United States Patent Application Publication US 2020/0248168 A1 - sequence listing, part 2

SEQ ID NO: 7400 - DNA, 20 bp, Artificial Sequence
  Description of Artificial Sequence: Synthetic oligonucleotide
  Target: PCSK9; (-) strand; PAM type: NRG; PAM sequence: AGG
ttacttttgtataaggagtg

SEQ ID NO: 7401 - DNA, 20 bp, Artificial Sequence
  Description of Artificial Sequence: Synthetic oligonucleotide
  Target: PCSK9; (-) strand; PAM type: NRG; PAM sequence: GAG
tttacttttgtataaggagt

SEQ ID NO: 7402 - DNA, 20 bp, Artificial Sequence
  Description of Artificial Sequence: Synthetic oligonucleotide
  Target: PCSK9; (-) strand; PAM type: NRG; PAM sequence: GAG
gggatttacttttgtataag

SEQ ID NO: 7403 - DNA, 20 bp, Artificial Sequence
  Description of Artificial Sequence: Synthetic oligonucleotide
  Target: PCSK9; (-) strand; PAM type: NRG; PAM sequence: AGG
ctgggatttacttttgtata

SEQ ID NO: 7404 - DNA, 20 bp, Artificial Sequence
  Description of Artificial Sequence: Synthetic oligonucleotide
  Target: PCSK9; (-) strand; PAM type: NRG; PAM sequence: AAG
actgggatttacttttgtat

SEQ ID NO: 7405 - DNA, 20 bp, Artificial Sequence
  Description of Artificial Sequence: Synthetic oligonucleotide
  Target: PCSK9; (-) strand; PAM type: NRG; PAM sequence: GGG
ttaatatcttggcttccact

SEQ ID NO: 7406 - DNA, 20 bp, Artificial Sequence
  Description of Artificial Sequence: Synthetic oligonucleotide
  Target: PCSK9; (-) strand; PAM type: NRG; PAM sequence: TGG
tttaatatcttggcttccac

SEQ ID NO: 7407 - DNA, 20 bp, Artificial Sequence
  Description of Artificial Sequence: Synthetic oligonucleotide
  Target: PCSK9; (-) strand; PAM type: NRG; PAM sequence: TGG
taaatctttttttaatatct

SEQ ID NO: 7408 - DNA, 20 bp, Artificial Sequence
  Description of Artificial Sequence: Synthetic oligonucleotide
  Target: PCSK9; (-) strand; PAM type: NRG; PAM sequence: AAG
agaaaggcctcctccttatc

SEQ ID NO: 7409 - DNA, 20 bp, Artificial Sequence
  Description of Artificial Sequence: Synthetic oligonucleotide
  Target: PCSK9; (-) strand; PAM type: NRG; PAM sequence: AGG
attttgtactgtgcttagaa

SEQ ID NO: 7410 - DNA, 20 bp, Artificial Sequence
  Description of Artificial Sequence: Synthetic oligonucleotide
  Target: PCSK9; (-) strand; PAM type: NRG; PAM sequence: AAG
gattttgtactgtgcttaga

SEQ ID NO: 7411 - DNA, 20 bp, Artificial Sequence
  Description of Artificial Sequence: Synthetic oligonucleotide
  Target: PCSK9; (-) strand; PAM type: NRG; PAM sequence: TAG
tcttgattttgtactgtgct

SEQ ID NO: 7412 - DNA, 20 bp, Artificial Sequence
  Description of Artificial Sequence: Synthetic oligonucleotide
  Target: PCSK9; (-) strand; PAM type: NRG; PAM sequence: CAG
tttcatggagtcaaacttat

SEQ ID NO: 7413 - DNA, 20 bp, Artificial Sequence
  Description of Artificial Sequence: Synthetic oligonucleotide
  Target: PCSK9; (-) strand; PAM type: NRG; PAM sequence: GAG
agaaaattttaattttcatg

SEQ ID NO: 7414 - DNA, 20 bp, Artificial Sequence
  Description of Artificial Sequence: Synthetic oligonucleotide
  Target: PCSK9; (-) strand; PAM type: NRG; PAM sequence: TGG
atagaaaattttaattttca

SEQ ID NO: 7415 - DNA, 20 bp, Artificial Sequence
  Description of Artificial Sequence: Synthetic oligonucleotide
  Target: PCSK9; (-) strand; PAM type: NRG; PAM sequence: TAG
ctttattgtatttttttcca

SEQ ID NO: 7416 - DNA, 20 bp, Artificial Sequence
  Description of Artificial Sequence: Synthetic oligonucleotide
  Target: PCSK9; (-) strand; PAM type: NRG; PAM sequence: CAG
tatgttgcaaatctattttc

SEQ ID NO: 7417 - DNA, 20 bp, Artificial Sequence
  Description of Artificial Sequence: Synthetic oligonucleotide
  Target: PCSK9; (-) strand; PAM type: NRG; PAM sequence: TAG
tttatgtataataccaaaat

SEQ ID NO: 7418 - DNA, 20 bp, Artificial Sequence
  Description of Artificial Sequence: Synthetic oligonucleotide
  Target: PCSK9; (-) strand; PAM type: NRG; PAM sequence: TAG
ttttgtttgatgatttgtaa

SEQ ID NO: 7419 - DNA, 20 bp, Artificial Sequence
  Description of Artificial Sequence: Synthetic oligonucleotide
  Target: PCSK9; (-) strand; PAM type: NRG; PAM sequence: GAG
attttttcattttggctgtg

SEQ ID NO: 7420 - DNA, 20 bp, Artificial Sequence
  Description of Artificial Sequence: Synthetic oligonucleotide
  Target: PCSK9; (-) strand; PAM type: NRG; PAM sequence: TGG
tcattttttcattttggctg

SEQ ID NO: 7421 - DNA, 20 bp, Artificial Sequence
  Description of Artificial Sequence: Synthetic oligonucleotide
  Target: PCSK9; (-) strand; PAM type: NRG; PAM sequence: TGG
gtctcttcattttttcattt

SEQ ID NO: 7422 - DNA, 20 bp, Artificial Sequence
  Description of Artificial Sequence: Synthetic oligonucleotide
  Target: PCSK9; (-) strand; PAM type: NRG; PAM sequence: AAG
aaatattttgacctttcctt

SEQ ID NO: 7423 - DNA, 20 bp, Artificial Sequence
  Description of Artificial Sequence: Synthetic oligonucleotide
  Target: PCSK9; (-) strand; PAM type: NRG; PAM sequence: GAG
gtcacacccaggccaacaca

SEQ ID NO: 7424 - DNA, 20 bp, Artificial Sequence
  Description of Artificial Sequence: Synthetic oligonucleotide
  Target: PCSK9; (-) strand; PAM type: NRG; PAM sequence: CAG
tggtcacacccaggccaaca

SEQ ID NO: 7425 - DNA, 20 bp, Artificial Sequence
  Description of Artificial Sequence: Synthetic oligonucleotide
  Target: PCSK9; (-) strand; PAM type: NRG; PAM sequence: AGG
taccgctcatggtcacaccc

SEQ ID NO: 7426 - DNA, 20 bp, Artificial Sequence
  Description of Artificial Sequence: Synthetic oligonucleotide
  Target: PCSK9; (-) strand; PAM type: NRG; PAM sequence: CAG
ctaccgctcatggtcacacc

SEQ ID NO: 7427 - DNA, 20 bp, Artificial Sequence
  Description of Artificial Sequence: Synthetic oligonucleotide
  Target: PCSK9; (-) strand; PAM type: NRG; PAM sequence: TGG
ccactggcaactaccgctca

SEQ ID NO: 7428 - DNA, 20 bp, Artificial Sequence
  Description of Artificial Sequence: Synthetic oligonucleotide
  Target: PCSK9; (-) strand; PAM type: NRG; PAM sequence: TGG
ggtatatttgtgaataccac

SEQ ID NO: 7429 - DNA, 20 bp, Artificial Sequence
  Description of Artificial Sequence: Synthetic oligonucleotide
  Target: PCSK9; (-) strand; PAM type: NRG; PAM sequence: GGG
gtgcccagaaggaggagaaa

SEQ ID NO: 7430 - DNA, 20 bp, Artificial Sequence
  Description of Artificial Sequence: Synthetic oligonucleotide
  Target: PCSK9; (-) strand; PAM type: NRG; PAM sequence: AGG
agtgcccagaaggaggagaa

SEQ ID NO: 7431 - DNA, 20 bp, Artificial Sequence
  Description of Artificial Sequence: Synthetic oligonucleotide
  Target: PCSK9; (-) strand; PAM type: NRG; PAM sequence: AAG
aagtgcccagaaggaggaga

SEQ ID NO: 7432 - DNA, 20 bp, Artificial Sequence
  Description of Artificial Sequence: Synthetic oligonucleotide
  Target: PCSK9; (-) strand; PAM type: NRG; PAM sequence: GAG
caccaagtgcccagaaggag

SEQ ID NO: 7433 - DNA, 20 bp, Artificial Sequence
  Description of Artificial Sequence: Synthetic oligonucleotide
  Target: PCSK9; (-) strand; PAM type: NRG; PAM sequence: AGG
cacaccaagtgcccagaagg

SEQ ID NO: 7434 - DNA, 20 bp, Artificial Sequence
  Description of Artificial Sequence: Synthetic oligonucleotide
  Target: PCSK9; (-) strand; PAM type: NRG; PAM sequence: GAG
tcacaccaagtgcccagaag

SEQ ID NO: 7435 - DNA, 20 bp, Artificial Sequence
  Description of Artificial Sequence: Synthetic oligonucleotide
  Target: PCSK9; (-) strand; PAM type: NRG; PAM sequence: AGG
aatcacaccaagtgcccaga

SEQ ID NO: 7436 - DNA, 20 bp, Artificial Sequence
  Description of Artificial Sequence: Synthetic oligonucleotide
  Target: PCSK9; (-) strand; PAM type: NRG; PAM sequence: AAG
caatcacaccaagtgcccag

SEQ ID NO: 7437 - DNA, 20 bp, Artificial Sequence
  Description of Artificial Sequence: Synthetic oligonucleotide
  Target: PCSK9; (-) strand; PAM type: NRG; PAM sequence: CAG
ctgcaatcacaccaagtgcc

SEQ ID NO: 7438 - DNA, 20 bp, Artificial Sequence
  Description of Artificial Sequence: Synthetic oligonucleotide
  Target: PCSK9; (-) strand; PAM type: NRG; PAM sequence: AAG
taggaaactgcaatcacacc

SEQ ID NO: 7439 - DNA, 20 bp, Artificial Sequence
  Description of Artificial Sequence: Synthetic oligonucleotide
  Target: PCSK9; (-) strand; PAM type: NRG; PAM sequence: AGG
ccacacctaaggtcaaatgt

SEQ ID NO: 7440 - DNA, 20 bp, Artificial Sequence
  Description of Artificial Sequence: Synthetic oligonucleotide
  Target: PCSK9; (-) strand; PAM type: NRG; PAM sequence: TAG
accacacctaaggtcaaatg

SEQ ID NO: 7441 - DNA, 20 bp, Artificial Sequence
  Description of Artificial Sequence: Synthetic oligonucleotide
  Target: PCSK9; (-) strand; PAM type: NRG; PAM sequence: AGG
gagacacatgaccacaccta

SEQ ID NO: 7442 - DNA, 20 bp, Artificial Sequence
  Description of Artificial Sequence: Synthetic oligonucleotide
  Target: PCSK9; (-) strand; PAM type: NRG; PAM sequence: AAG
cgagacacatgaccacacct

SEQ ID NO: 7443 - DNA, 20 bp, Artificial Sequence
  Description of Artificial Sequence: Synthetic oligonucleotide
  Target: PCSK9; (-) strand; PAM type: NRG; PAM sequence: GAG
cacatttccttctcctaagc

SEQ ID NO: 7444 - DNA, 20 bp, Artificial Sequence
  Description of Artificial Sequence: Synthetic oligonucleotide
  Target: PCSK9; (-) strand; PAM type: NRG; PAM sequence: AAG
cgttcacatttccttctcct

SEQ ID NO: 7445 - DNA, 20 bp, Artificial Sequence
  Description of Artificial Sequence: Synthetic oligonucleotide
  Target: PCSK9; (-) strand; PAM type: NRG; PAM sequence: AAG
tccatgcagcttccacacaa

SEQ ID NO: 7446 - DNA, 20 bp, Artificial Sequence
  Description of Artificial Sequence: Synthetic oligonucleotide
  Target: PCSK9; (-) strand; PAM type: NRG; PAM sequence: CAG
agcaaagaggtgactccatg

SEQ ID NO: 7447 - DNA, 20 bp, Artificial Sequence
  Description of Artificial Sequence: Synthetic oligonucleotide
  Target: PCSK9; (-) strand; PAM type: NRG; PAM sequence: AGG
gaggctgacggaaagcaaag

SEQ ID NO: 7448 - DNA, 20 bp, Artificial Sequence
  Description of Artificial Sequence: Synthetic oligonucleotide
  Target: PCSK9; (-) strand; PAM type: NRG; PAM sequence: GAG
tgaggctgacggaaagcaaa

SEQ ID NO: 7449 - DNA, 20 bp, Artificial Sequence
  Description of Artificial Sequence: Synthetic oligonucleotide
  Target: PCSK9; (-) strand; PAM type: NRG; PAM sequence: AAG
actgaggctgacggaaagca

SEQ ID NO: 7450 - DNA, 20 bp, Artificial Sequence
  Description of Artificial Sequence: Synthetic oligonucleotide
  Target: PCSK9; (-) strand; PAM type: NRG; PAM sequence: AAG
tgaacactgaggctgacgga

SEQ ID NO: 7451 - DNA, 20 bp, Artificial Sequence
  Description of Artificial Sequence: Synthetic oligonucleotide
  Target: PCSK9; (-) strand; PAM type: NRG; PAM sequence: CGG
ttgctgaacactgaggctga

SEQ ID NO: 7452 - DNA, 20 bp, Artificial Sequence
  Description of Artificial Sequence: Synthetic oligonucleotide
  Target: PCSK9; (-) strand; PAM type: NRG; PAM sequence: AGG
cagaacattgctgaacactg

SEQ ID NO: 7453 - DNA, 20 bp, Artificial Sequence
  Description of Artificial Sequence: Synthetic oligonucleotide
  Target: PCSK9; (-) strand; PAM type: NRG; PAM sequence: GAG
tcagaacattgctgaacact

SEQ ID NO: 7454 - DNA, 20 bp, Artificial Sequence
  Description of Artificial Sequence: Synthetic oligonucleotide
  Target: PCSK9; (-) strand; PAM type: NRG; PAM sequence: CAG
ctgataaagcaaccatcatt

SEQ ID NO: 7455 - DNA, 20 bp, Artificial Sequence
  Description of Artificial Sequence: Synthetic oligonucleotide
  Target: PCSK9; (-) strand; PAM type: NRG; PAM sequence: AAG
accccagaaccagactgata

SEQ ID NO: 7456 - DNA, 20 bp, Artificial Sequence
  Description of Artificial Sequence: Synthetic oligonucleotide
  Target: PCSK9; (-) strand; PAM type: NRG; PAM sequence: CAG
cattaccctcaccccagaac

SEQ ID NO: 7457 - DNA, 20 bp, Artificial Sequence
  Description of Artificial Sequence: Synthetic oligonucleotide
  Target: PCSK9; (-) strand; PAM type: NRG; PAM sequence: CAG
ctacttcattaccctcaccc

SEQ ID NO: 7458 - DNA, 20 bp, Artificial Sequence
  Description of Artificial Sequence: Synthetic oligonucleotide
  Target: PCSK9; (-) strand; PAM type: NRG; PAM sequence: AGG
ctcacctcacatgtccatca

SEQ ID NO: 7459 - DNA, 20 bp, Artificial Sequence
  Description of Artificial Sequence: Synthetic oligonucleotide
  Target: PCSK9; (-) strand; PAM type: NRG; PAM sequence: AAG
tctcacctcacatgtccatc

SEQ ID NO: 7460 - DNA, 20 bp, Artificial Sequence
  Description of Artificial Sequence: Synthetic oligonucleotide
  Target: PCSK9; (-) strand; PAM type: NRG; PAM sequence: AGG
tcaggggcttgaaatgtcaa

SEQ ID NO: 7461 - DNA, 20 bp, Artificial Sequence
  Description of Artificial Sequence: Synthetic oligonucleotide
  Target: PCSK9; (-) strand; PAM type: NRG; PAM sequence: AAG
ctcaggggcttgaaatgtca

SEQ ID NO: 7462 - DNA, 20 bp, Artificial Sequence
  Description of Artificial Sequence: Synthetic oligonucleotide
  Target: PCSK9; (-) strand; PAM type: NRG; PAM sequence: GGG
atgcacgccccaaatctcag

SEQ ID NO: 7463 - DNA, 20 bp, Artificial Sequence
  Description of Artificial Sequence: Synthetic oligonucleotide
  Target: PCSK9; (-) strand; PAM type: NRG; PAM sequence: GGG
catgcacgccccaaatctca

SEQ ID NO: 7464 - DNA, 20 bp, Artificial Sequence
  Description of Artificial Sequence: Synthetic oligonucleotide
  Target: PCSK9; (-) strand; PAM type: NRG; PAM sequence: AGG
acatgcacgccccaaatctc

SEQ ID NO: 7465 - DNA, 20 bp, Artificial Sequence
  Description of Artificial Sequence: Synthetic oligonucleotide
  Target: PCSK9; (-) strand; PAM type: NRG; PAM sequence: CAG
cacatgcacgccccaaatct

SEQ ID NO: 7466 - DNA, 20 bp, Artificial Sequence
  Description of Artificial Sequence: Synthetic oligonucleotide
  Target: PCSK9; (-) strand; PAM type: NRG; PAM sequence: CAG
aataggctaggttctgcttc

SEQ ID NO: 7467 - DNA, 20 bp, Artificial Sequence
  Description of Artificial Sequence: Synthetic oligonucleotide
  Target: PCSK9; (-) strand; PAM type: NRG; PAM sequence: AGG
ggaatccatcagaataggct

SEQ ID NO: 7468 - DNA, 20 bp, Artificial Sequence
  Description of Artificial Sequence: Synthetic oligonucleotide
  Target: PCSK9; (-) strand; PAM type: NRG; PAM sequence: TAG
aggaatccatcagaataggc

SEQ ID NO: 7469 - DNA, 20 bp, Artificial Sequence
  Description of Artificial Sequence: Synthetic oligonucleotide
  Target: PCSK9; (-) strand; PAM type: NRG; PAM sequence: AGG
ctggaggaatccatcagaat

SEQ ID NO: 7470 - DNA, 20 bp, Artificial Sequence
  Description of Artificial Sequence: Synthetic oligonucleotide
  Target: PCSK9; (-) strand; PAM type: NRG; PAM sequence: TAG
gctggaggaatccatcagaa

SEQ ID NO: 7471 - DNA, 20 bp, Artificial Sequence
  Description of Artificial Sequence: Synthetic oligonucleotide
  Target: PCSK9; (-) strand; PAM type: NRG; PAM sequence: CAG
gcagtgctggaggaatccat

SEQ ID NO: 7472 - DNA, 20 bp, Artificial Sequence
  Description of Artificial Sequence: Synthetic oligonucleotide
  Target: PCSK9; (-) strand; PAM type: NRG; PAM sequence: AGG
cttcccacgagcagtgctgg

SEQ ID NO: 7473 - DNA, 20 bp, Artificial Sequence
  Description of Artificial Sequence: Synthetic oligonucleotide
  Target: PCSK9; (-) strand; PAM type: NRG; PAM sequence: GAG
tcttcccacgagcagtgctg

SEQ ID NO: 7474 - DNA, 20 bp, Artificial Sequence
  Description of Artificial Sequence: Synthetic oligonucleotide
  Target: PCSK9; (-) strand; PAM type: NRG; PAM sequence: TGG
tgtcttcccacgagcagtgc

SEQ ID NO: 7475 - DNA, 20 bp, Artificial Sequence
  Description of Artificial Sequence: Synthetic oligonucleotide
  Target: PCSK9; (-) strand; PAM type: NRG; PAM sequence: CAG
tgatgatgtcttcccacgag

SEQ ID NO: 7476 - DNA, 20 bp, Artificial Sequence
  Description of Artificial Sequence: Synthetic oligonucleotide
  Target: PCSK9; (-) strand; PAM type: NRG; PAM sequence: GAG
tattgatgatgtcttcccac

SEQ ID NO: 7477 - DNA, 20 bp, Artificial Sequence
  Description of Artificial Sequence: Synthetic oligonucleotide
  Target: PCSK9; (-) strand; PAM type: NRG; PAM sequence: GGG
aagtggaatttcgagataaa

SEQ ID NO: 7478 - DNA, 20 bp, Artificial Sequence
  Description of Artificial Sequence: Synthetic oligonucleotide
  Target: PCSK9; (-) strand; PAM type: NRG; PAM sequence: AGG
gaagtggaatttcgagataa

SEQ ID NO: 7479 - DNA, 20 bp, Artificial Sequence
  Description of Artificial Sequence: Synthetic oligonucleotide
  Target: PCSK9; (-) strand; PAM type: NRG; PAM sequence: AAG
ggaagtggaatttcgagata

SEQ ID NO: 7480 - DNA, 20 bp, Artificial Sequence
  Description of Artificial Sequence: Synthetic oligonucleotide
  Target: PCSK9; (-) strand; PAM type: NRG; PAM sequence: GAG
attcctggaagtggaatttc

SEQ ID NO: 7481 - DNA, 20 bp, Artificial Sequence
  Description of Artificial Sequence: Synthetic oligonucleotide
  Target: PCSK9; (-) strand; PAM type: NRG; PAM sequence: TGG
gtttcataaattcctggaag

SEQ ID NO: 7482 - DNA, 20 bp, Artificial Sequence
  Description of Artificial Sequence: Synthetic oligonucleotide
  Target: PCSK9; (-) strand; PAM type: NRG; PAM sequence: AAG
tctgtttcataaattcctgg

SEQ ID NO: 7483 - DNA, 20 bp, Artificial Sequence
  Description of Artificial Sequence: Synthetic oligonucleotide
  Target: PCSK9; (-) strand; PAM type: NRG; PAM sequence: TGG
gtatctgtttcataaattcc

SEQ ID NO: 7484 - DNA, 20 bp, Artificial Sequence
  Description of Artificial Sequence: Synthetic oligonucleotide
  Target: PCSK9; (-) strand; PAM type: NRG; PAM sequence: GAG
atagctgtttgcacatgtga

SEQ ID NO: 7485 - DNA, 20 bp, Artificial Sequence
  Description of Artificial Sequence: Synthetic oligonucleotide
  Target: PCSK9; (-) strand; PAM type: NRG; PAM sequence: GAG
ccatagctgtttgcacatgt

SEQ ID NO: 7486 - DNA, 20 bp, Artificial Sequence
  Description of Artificial Sequence: Synthetic oligonucleotide
  Target: PCSK9; (-) strand; PAM type: NRG; PAM sequence: TAG
gccatgtctgtccttatcca

SEQ ID NO: 7487 - DNA, 20 bp, Artificial Sequence
  Description of Artificial Sequence: Synthetic oligonucleotide
  Target: PCSK9; (-) strand; PAM type: NRG; PAM sequence: AAG
gtcttttgctattgcaatcc

SEQ ID NO: 7488 - DNA, 20 bp, Artificial Sequence
  Description of Artificial Sequence: Synthetic oligonucleotide
  Target: PCSK9; (-) strand; PAM type: NRG; PAM sequence: TGG
ctattggttggtgtttccgt

SEQ ID NO: 7489 - DNA, 20 bp, Artificial Sequence
  Description of Artificial Sequence: Synthetic oligonucleotide
  Target: PCSK9; (-) strand; PAM type: NRG; PAM sequence: TGG
ttagccaatttcctattggt

SEQ ID NO: 7490 - DNA, 20 bp, Artificial Sequence
  Description of Artificial Sequence: Synthetic oligonucleotide
  Target: PCSK9; (-) strand; PAM type: NRG; PAM sequence: TGG
gtctttagccaatttcctat

SEQ ID NO: 7491 - DNA, 20 bp, Artificial Sequence
  Description of Artificial Sequence: Synthetic oligonucleotide
  Target: PCSK9; (-) strand; PAM type: NRG; PAM sequence: TAG
tgtatgtttcacaatgtctt

SEQ ID NO: 7492 - DNA, 20 bp, Artificial Sequence
  Description of Artificial Sequence: Synthetic oligonucleotide
  Target: PCSK9; (-) strand; PAM type: NRG; PAM sequence: CAG
ctgccttatttttctggttg

SEQ ID NO: 7493 - DNA, 20 bp, Artificial Sequence
  Description of Artificial Sequence: Synthetic oligonucleotide
  Target: PCSK9; (-) strand; PAM type: NRG; PAM sequence: TGG
catctactgccttatttttc

SEQ ID NO: 7494 - DNA, 20 bp, Artificial Sequence
  Description of Artificial Sequence: Synthetic oligonucleotide
  Target: PCSK9; (-) strand; PAM type: NRG; PAM sequence: TGG
tctcggaataaaaaccacac

SEQ ID NO: 7495 - DNA, 20 bp, Artificial Sequence
  Description of Artificial Sequence: Synthetic oligonucleotide
  Target: PCSK9; (-) strand; PAM type: NRG; PAM sequence: CGG
tcttaacctagccctaatct

SEQ ID NO: 7496 - DNA, 20 bp, Artificial Sequence
  Description of Artificial Sequence: Synthetic oligonucleotide
  Target: PCSK9; (-) strand; PAM type: NRG; PAM sequence: TAG
cttaatctgacgtcttaacc

SEQ ID NO: 7497 - DNA, 20 bp, Artificial Sequence
  Description of Artificial Sequence: Synthetic oligonucleotide
  Target: PCSK9; (-) strand; PAM type: NRG; PAM sequence: GGG
ttatattggtggggtggaga

SEQ ID NO: 7498 - DNA, 20 bp, Artificial Sequence
  Description of Artificial Sequence: Synthetic oligonucleotide
  Target: PCSK9; (-) strand; PAM type: NRG; PAM sequence: AGG
tttatattggtggggtggag

SEQ ID NO: 7499 - DNA, 20 bp, Artificial Sequence
  Description of Artificial Sequence: Synthetic oligonucleotide
  Target: PCSK9; (-) strand; PAM type: NRG; PAM sequence: GAG
atttatattggtggggtgga

SEQ ID NO: 7500 - DNA, 20 bp, Artificial Sequence
  Description of Artificial Sequence: Synthetic oligonucleotide
  Target: PCSK9; (-) strand; PAM type: NRG; PAM sequence: GAG
ttatttatattggtggggtg

SEQ ID NO: 7501 - DNA, 20 bp, Artificial Sequence
  Description of Artificial Sequence: Synthetic oligonucleotide
  Target: PCSK9; (-) strand; PAM type: NRG; PAM sequence: TGG
ttttatttatattggtgggg

SEQ ID NO: 7502 - DNA, 20 bp, Artificial Sequence
  Description of Artificial Sequence: Synthetic oligonucleotide
  Target: PCSK9; (-) strand; PAM type: NRG; PAM sequence: GGG
actttttatttatattggtg

SEQ ID NO: 7503 - DNA, 20 bp, Artificial Sequence
  Description of Artificial Sequence: Synthetic oligonucleotide
  Target: PCSK9; (-) strand; PAM type: NRG; PAM sequence: GGG
aactttttatttatattggt

SEQ ID NO: 7504 - DNA, 20 bp, Artificial Sequence
  Description of Artificial Sequence: Synthetic oligonucleotide
  Target: PCSK9; (-) strand; PAM type: NRG; PAM sequence: TGG
taactttttatttatattgg

SEQ ID NO: 7505 - DNA, 20 bp, Artificial Sequence
  Description of Artificial Sequence: Synthetic oligonucleotide
  Target: PCSK9; (-) strand; PAM type: NRG; PAM sequence: TGG
ttttaactttttatttatat

SEQ ID NO: 7506 - DNA, 20 bp, Artificial Sequence
  Description of Artificial Sequence: Synthetic oligonucleotide
  Target: PCSK9; (-) strand; PAM type: NRG; PAM sequence: TAG
actttttaaaattgtaaaaa

SEQ ID NO: 7507 - DNA, 20 bp, Artificial Sequence
  Description of Artificial Sequence: Synthetic oligonucleotide
  Target: PCSK9; (-) strand; PAM type: NRG; PAM sequence: GGG
ttttataaaactacttggat

SEQ ID NO: 7508 - DNA, 20 bp, Artificial Sequence
  Description of Artificial Sequence: Synthetic oligonucleotide
  Target: PCSK9; (-) strand; PAM type: NRG; PAM sequence: TGG
cttttataaaactacttgga

SEQ ID NO: 7509 - DNA, 20 bp, Artificial Sequence
  Description of Artificial Sequence: Synthetic oligonucleotide
  Target: PCSK9; (-) strand; PAM type: NRG; PAM sequence: TGG
tctacttttataaaactact

SEQ ID NO: 7510 - DNA, 20 bp, Artificial Sequence
  Description of Artificial Sequence: Synthetic oligonucleotide
  Target: PCSK9; (-) strand; PAM type: NRG; PAM sequence: TAG
attgggtatcttttcggaga

SEQ ID NO: 7511 - DNA, 20 bp, Artificial Sequence
  Description of Artificial Sequence: Synthetic oligonucleotide
  Target: PCSK9; (-) strand; PAM type: NRG; PAM sequence: GAG
atttattgggtatcttttcg

SEQ ID NO: 7512 - DNA, 20 bp, Artificial Sequence
  Description of Artificial Sequence: Synthetic oligonucleotide
  Target: PCSK9; (-) strand; PAM type: NRG; PAM sequence: CGG
ctatttattgggtatctttt

SEQ ID NO: 7513 - DNA, 20 bp, Artificial Sequence
  Description of Artificial Sequence: Synthetic oligonucleotide
  Target: PCSK9; (-) strand; PAM type: NRG; PAM sequence: GGG
aagtaatatacctatttatt

SEQ ID NO: 7514 - DNA, 20 bp, Artificial Sequence
  Description of Artificial Sequence: Synthetic oligonucleotide
  Target: PCSK9; (-) strand; PAM type: NRG; PAM sequence: TGG
aaagtaatatacctatttat

SEQ ID NO: 7515 - DNA, 20 bp, Artificial Sequence
  Description of Artificial Sequence: Synthetic oligonucleotide
  Target: PCSK9; (-) strand; PAM type: NRG; PAM sequence: AAG
ttgttataacagccccagga

SEQ ID NO: 7516 - DNA, 20 bp, Artificial Sequence
  Description of Artificial Sequence: Synthetic oligonucleotide
  Target: PCSK9; (-) strand; PAM type: NRG; PAM sequence: AGG
aaacttgttataacagcccc

SEQ ID NO: 7517 - DNA, 20 bp, Artificial Sequence
  Description of Artificial Sequence: Synthetic oligonucleotide
  Target: PCSK9; (-) strand; PAM type: NRG; PAM sequence: CAG
gaaacttgttataacagccc

SEQ ID NO: 7518 - DNA, 20 bp, Artificial Sequence
  Description of Artificial Sequence: Synthetic oligonucleotide
  Target: PCSK9; (-) strand; PAM type: NRG; PAM sequence: CAG
tttgtagaaacttgttataa

SEQ ID NO: 7519 - DNA, 20 bp, Artificial Sequence
  Description of Artificial Sequence: Synthetic oligonucleotide
  Target: PCSK9; (-) strand; PAM type: NRG; PAM sequence: TAG
atttgaagccagcaaatttg

SEQ ID NO: 7520 - DNA, 20 bp, Artificial Sequence
  Description of Artificial Sequence: Synthetic oligonucleotide
  Target: PCSK9; (-) strand; PAM type: NRG; PAM sequence: CAG
acgtttttgttatttgaagc

SEQ ID NO: 7521 - DNA, 20 bp, Artificial Sequence
  Description of Artificial Sequence: Synthetic oligonucleotide
  Target: PCSK9; (-) strand; PAM type: NRG; PAM sequence: AAG
gaatacgtttttgttatttg

SEQ ID NO: 7522 - DNA, 20 bp, Artificial Sequence
  Description of Artificial Sequence: Synthetic oligonucleotide
  Target: PCSK9; (-) strand; PAM type: NRG; PAM sequence: GAG
tctggcttccataactgcaa

SEQ ID NO: 7523 - DNA, 20 bp, Artificial Sequence
  Description of Artificial Sequence: Synthetic oligonucleotide
  Target: PCSK9; (-) strand; PAM type: NRG; PAM sequence: AAG
cttctggcttccataactgc

SEQ ID NO: 7524 - DNA, 20 bp, Artificial Sequence
  Description of Artificial Sequence: Synthetic oligonucleotide
  Target: PCSK9; (-) strand; PAM type: NRG; PAM sequence: TGG
aacccttcattccatacttc

SEQ ID NO: 7525 - DNA, 20 bp, Artificial Sequence
  Description of Artificial Sequence: Synthetic oligonucleotide
  Target: PCSK9; (-) strand; PAM type: NRG; PAM sequence: GGG
tcccctagagctttgggaga

SEQ ID NO: 7526 - DNA, 20 bp, Artificial Sequence
  Description of Artificial Sequence: Synthetic oligonucleotide
  Target: PCSK9; (-) strand; PAM type: NRG; PAM sequence: AGG
ctcccctagagctttgggag

SEQ ID NO: 7527 - DNA, 20 bp, Artificial Sequence
  Description of Artificial Sequence: Synthetic oligonucleotide
  Target: PCSK9; (-) strand; PAM type: NRG; PAM sequence: GAG
cctcccctagagctttggga

SEQ ID NO: 7528 - DNA, 20 bp, Artificial Sequence
  Description of Artificial Sequence: Synthetic oligonucleotide
  Target: PCSK9; (-) strand; PAM type: NRG; PAM sequence: GAG
ttcctcccctagagctttgg

SEQ ID NO: 7529 - DNA, 20 bp, Artificial Sequence
  Description of Artificial Sequence: Synthetic oligonucleotide
  Target: PCSK9; (-) strand; PAM type: NRG; PAM sequence: GGG
tgttcctcccctagagcttt

SEQ ID NO: 7530 - DNA, 20 bp, Artificial Sequence
  Description of Artificial Sequence: Synthetic oligonucleotide
  Target: PCSK9; (-) strand; PAM type: NRG; PAM sequence: TGG
atgttcctcccctagagctt

SEQ ID NO: 7531 - DNA, 20 bp, Artificial Sequence
  Description of Artificial Sequence: Synthetic oligonucleotide
  Target: PCSK9; (-) strand; PAM type: NRG; PAM sequence: GAG
caaggaatgttcctccccta

SEQ ID NO: 7532 - DNA, 20 bp, Artificial Sequence
  Description of Artificial Sequence: Synthetic oligonucleotide
  Target: PCSK9; (-) strand; PAM type: NRG; PAM sequence: TAG
agcaaggaatgttcctcccc

SEQ ID NO: 7533 - DNA, 20 bp, Artificial Sequence
  Description of Artificial Sequence: Synthetic oligonucleotide
  Target: PCSK9; (-) strand; PAM type: NRG; PAM sequence: AGG
caaaggagctggaagaagca

SEQ ID NO: 7534 - DNA, 20 bp, Artificial Sequence
  Description of Artificial Sequence: Synthetic oligonucleotide
  Target: PCSK9; (-) strand; PAM type: NRG; PAM sequence: AAG
ccaaaggagctggaagaagc

SEQ ID NO: 7535 - DNA, 20 bp, Artificial Sequence
  Description of Artificial Sequence: Synthetic oligonucleotide
  Target: PCSK9; (-) strand; PAM type: NRG; PAM sequence: AAG
gcccccaaaggagctggaag

SEQ ID NO: 7536 - DNA, 20 bp, Artificial Sequence
  Description of Artificial Sequence: Synthetic oligonucleotide
  Target: PCSK9; (-) strand; PAM type: NRG; PAM sequence: AAG
ggagcccccaaaggagctgg

SEQ ID NO: 7537 - DNA, 20 bp, Artificial Sequence
  Description of Artificial Sequence: Synthetic oligonucleotide
  Target: PCSK9; (-) strand; PAM type: NRG; PAM sequence: TGG
ccaggagcccccaaaggagc

SEQ ID NO: 7538 - DNA, 20 bp, Artificial Sequence
  Description of Artificial Sequence: Synthetic oligonucleotide
  Target: PCSK9; (-) strand; PAM type: NRG; PAM sequence: GAG
aatgccaggagcccccaaag

SEQ ID NO: 7539 - DNA, 20 bp, Artificial Sequence
  Description of Artificial Sequence: Synthetic oligonucleotide
  Target: PCSK9; (-) strand; PAM type: NRG; PAM sequence: AGG
ggaatgccaggagcccccaa

SEQ ID NO: 7540 - DNA, 20 bp, Artificial Sequence
  Description of Artificial Sequence: Synthetic oligonucleotide
  Target: PCSK9; (-) strand; PAM type: NRG; PAM sequence: AAG
aggaatgccaggagccccca

SEQ ID NO: 7541 - DNA, 20 bp, Artificial Sequence
  Description of Artificial Sequence: Synthetic oligonucleotide
  Target: PCSK9; (-) strand; PAM type: NRG; PAM sequence: GAG
cataagccaaggaatgccag

SEQ ID NO: 7542 - DNA, 20 bp, Artificial Sequence
  Description of Artificial Sequence: Synthetic oligonucleotide
  Target: PCSK9; (-) strand; PAM type: NRG; PAM sequence: AGG
gacataagccaaggaatgcc

SEQ ID NO: 7543 - DNA, 20 bp, Artificial Sequence
  Description of Artificial Sequence: Synthetic oligonucleotide
  Target: PCSK9; (-) strand; PAM type: NRG; PAM sequence: CAG
cgacataagccaaggaatgc

SEQ ID NO: 7544 - DNA, 20 bp, Artificial Sequence
  Description of Artificial Sequence: Synthetic oligonucleotide
  Target: PCSK9; (-) strand; PAM type: NRG; PAM sequence: AGG
agctgtgccgacataagcca

SEQ ID NO: 7545 - DNA, 20 bp, Artificial Sequence
  Description of Artificial Sequence: Synthetic oligonucleotide
  Target: PCSK9; (-) strand; PAM type: NRG; PAM sequence: AAG
gagctgtgccgacataagcc

SEQ ID NO: 7546 - DNA, 20 bp, Artificial Sequence
  Description of Artificial Sequence: Synthetic oligonucleotide
  Target: PCSK9; (-) strand; PAM type: NRG; PAM sequence: AAG
gattagagctgtgccgacat

SEQ ID NO: 7547 - DNA, 20 bp, Artificial Sequence
  Description of Artificial Sequence: Synthetic oligonucleotide
  Target: PCSK9; (-) strand; PAM type: NRG; PAM sequence: GAG
aacaatggaggcgccgatta

SEQ ID NO: 7548 - DNA, 20 bp, Artificial Sequence
  Description of Artificial Sequence: Synthetic oligonucleotide
  Target: PCSK9; (-) strand; PAM type: NRG; PAM sequence: TAG
gtaacaatggaggcgccgat

SEQ ID NO: 7549 - DNA, 20 bp, Artificial Sequence
  Description of Artificial Sequence: Synthetic oligonucleotide
  Target: PCSK9; (-) strand; PAM type: NRG; PAM sequence: AGG
aaacacctatgtaacaatgg

SEQ ID NO: 7550 - DNA, 20 bp, Artificial Sequence
  Description of Artificial Sequence: Synthetic oligonucleotide
  Target: PCSK9; (-) strand; PAM type: NRG; PAM sequence: GAG
gaaacacctatgtaacaatg

SEQ ID NO: 7551 - DNA, 20 bp, Artificial Sequence
  Description of Artificial Sequence: Synthetic oligonucleotide
  Target: PCSK9; (-) strand; PAM type: NRG; PAM sequence: TGG
cagaaacacctatgtaacaa

SEQ ID NO: 7552 - DNA, 20 bp, Artificial Sequence
  Description of Artificial Sequence: Synthetic oligonucleotide
  Target: PCSK9; (-) strand; PAM type: NRG; PAM sequence: CAG
ggggagagatacttgagaca

SEQ ID NO: 7553 - DNA, 20 bp, Artificial Sequence
  Description of Artificial Sequence: Synthetic oligonucleotide
  Target: PCSK9; (-) strand; PAM type: NRG; PAM sequence: GAG
gagaaaggggagagatactt

SEQ ID NO: 7554 - DNA, 20 bp, Artificial Sequence
  Description of Artificial Sequence: Synthetic oligonucleotide
  Target: PCSK9; (-) strand; PAM type: NRG; PAM sequence: GAG
atatcagaagagaaagggga

SEQ ID NO: 7555 - DNA, 20 bp, Artificial Sequence
  Description of Artificial Sequence: Synthetic oligonucleotide
  Target: PCSK9; (-) strand; PAM type: NRG; PAM sequence: GAG
tgatatcagaagagaaaggg

SEQ ID NO: 7556 - DNA, 20 bp, Artificial Sequence
  Description of Artificial Sequence: Synthetic oligonucleotide
  Target: PCSK9; (-) strand; PAM type: NRG; PAM sequence: GGG
actgatatcagaagagaaag

SEQ ID NO: 7557 - DNA, 20 bp, Artificial Sequence
  Description of Artificial Sequence: Synthetic oligonucleotide
  Target: PCSK9; (-) strand; PAM type: NRG; PAM sequence: GGG
gactgatatcagaagagaaa

SEQ ID NO: 7558 - DNA, 20 bp, Artificial Sequence
  Description of Artificial Sequence: Synthetic oligonucleotide
  Target: PCSK9; (-) strand; PAM type: NRG; PAM sequence: AGG
tgactgatatcagaagagaa

SEQ ID NO: 7559 - DNA, 20 bp, Artificial Sequence
  Description of Artificial Sequence: Synthetic oligonucleotide
  Target: PCSK9; (-) strand; PAM type: NRG; PAM sequence: AAG
atgactgatatcagaagaga

SEQ ID NO: 7560 - DNA, 20 bp, Artificial Sequence
  Description of Artificial Sequence: Synthetic oligonucleotide
  Target: PCSK9; (-) strand; PAM type: NRG; PAM sequence: GAG
tccaatgactgatatcagaa

SEQ ID NO: 7561 - DNA, 20 bp, Artificial Sequence
  Description of Artificial Sequence: Synthetic oligonucleotide
  Target: PCSK9; (-) strand; PAM type: NRG; PAM sequence: AAG
aatccaatgactgatatcag

SEQ ID NO: 7562 - DNA, 20 bp, Artificial Sequence
  Description of Artificial Sequence: Synthetic oligonucleotide
  Target: PCSK9; (-) strand; PAM type: NRG; PAM sequence: CAG
ctaaatccaatgactgatat

SEQ ID NO: 7563 - DNA, 20 bp, Artificial Sequence
  Description of Artificial Sequence: Synthetic oligonucleotide
  Target: PCSK9; (-) strand; PAM type: NRG; PAM sequence: TGG
agattatcctgggtttagga

SEQ ID NO: 7564 - DNA, 20 bp, Artificial Sequence
  Description of Artificial Sequence: Synthetic oligonucleotide
  Target: PCSK9; (-) strand; PAM type: NRG; PAM sequence: AGG
gaggagattatcctgggttt

SEQ ID NO: 7565 - DNA, 20 bp, Artificial Sequence
  Description of Artificial Sequence: Synthetic oligonucleotide
  Target: PCSK9; (-) strand; PAM type: NRG; PAM sequence: TAG
tgaggagattatcctgggtt

SEQ ID NO: 7566 - DNA, 20 bp, Artificial Sequence
  Description of Artificial Sequence: Synthetic oligonucleotide
  Target: PCSK9; (-) strand; PAM type: NRG; PAM sequence: GGG
tctcatgaggagattatcct

SEQ ID NO: 7567 - DNA, 20 bp, Artificial Sequence
  Description of Artificial Sequence: Synthetic oligonucleotide
  Target: PCSK9; (-) strand; PAM type: NRG; PAM sequence: TGG
atctcatgaggagattatcc

SEQ ID NO: 7568 - DNA, 20 bp, Artificial Sequence
  Description of Artificial Sequence: Synthetic oligonucleotide
  Target: PCSK9; (-) strand; PAM type: NRG; PAM sequence: GAG
tgacctaaggatctcatgag

SEQ ID NO: 7569 - DNA, 20 bp, Artificial Sequence
  Description of Artificial Sequence: Synthetic oligonucleotide
  Target: PCSK9; (-) strand; PAM type: NRG; PAM sequence: AGG
attgacctaaggatctcatg

SEQ ID NO: 7570 - DNA, 20 bp, Artificial Sequence
  Description of Artificial Sequence: Synthetic oligonucleotide
  Target: PCSK9; (-) strand; PAM type: NRG; PAM sequence: GAG
aattgacctaaggatctcat

SEQ ID NO: 7571 - DNA, 20 bp, Artificial Sequence
  Description of Artificial Sequence: Synthetic oligonucleotide
  Target: PCSK9; (-) strand; PAM type: NRG; PAM sequence: AGG
ttgcagatgtaattgaccta

SEQ ID NO: 7572 - DNA, 20 bp, Artificial Sequence
  Description of Artificial Sequence: Synthetic oligonucleotide
  Target: PCSK9; (-) strand; PAM type: NRG; PAM sequence: AAG
tttgcagatgtaattgacct

SEQ ID NO: 7573 - DNA, 20 bp, Artificial Sequence
  Description of Artificial Sequence: Synthetic oligonucleotide
  Target: PCSK9; (-) strand; PAM type: NRG; PAM sequence: CAG
atttggaaatgagatctttg

SEQ ID NO: 7574 - DNA, 20 bp, Artificial Sequence
  Description of Artificial Sequence: Synthetic oligonucleotide
  Target: PCSK9; (-) strand; PAM type: NRG; PAM sequence: GAG
atgtgaccttatttggaaat

SEQ ID NO: 7575 - DNA, 20 bp, Artificial Sequence
  Description of Artificial Sequence: Synthetic oligonucleotide
  Target: PCSK9; (-) strand; PAM type: NRG; PAM sequence: TGG
cttttgaatgtgaccttatt

SEQ ID NO: 7576 - DNA, 20 bp, Artificial Sequence
  Description of Artificial Sequence: Synthetic oligonucleotide
  Target: PCSK9; (-) strand; PAM type: NRG; PAM sequence: TGG
ataagtctaagactaacccc

SEQ ID NO: 7577 - DNA, 20 bp, Artificial Sequence
  Description of Artificial Sequence: Synthetic oligonucleotide
  Target: PCSK9; (-) strand; PAM type: NRG; PAM sequence: AAG
tcccccaaaaagataagtct

SEQ ID NO: 7578 - DNA, 20 bp, Artificial Sequence
  Description of Artificial Sequence: Synthetic oligonucleotide
  Target: PCSK9; (-) strand; PAM type: NRG; PAM sequence: AAG
atcgtgtcccccaaaaagat

SEQ ID NO: 7579 - DNA, 20 bp, Artificial Sequence
  Description of Artificial Sequence: Synthetic oligonucleotide
  Target: PCSK9; (-) strand; PAM type: NRG; PAM sequence: AAG
gttgaatcgtgtcccccaaa

SEQ ID NO: 7580 - DNA, 20 bp, Artificial Sequence
  Description of Artificial Sequence: Synthetic oligonucleotide
  Target: PCSK9; (-) strand; PAM type: NRG; PAM sequence: GGG
ccactgttacccacggtagt

SEQ ID NO: 7581 - DNA, 20 bp, Artificial Sequence
  Description of Artificial Sequence: Synthetic oligonucleotide
  Target: PCSK9; (-) strand; PAM type: NRG; PAM sequence: TGG
accactgttacccacggtag

SEQ ID NO: 7582 - DNA, 20 bp, Artificial Sequence
  Description of Artificial Sequence: Synthetic oligonucleotide
  Target: PCSK9; (-) strand; PAM type: NRG; PAM sequence: TAG
aaaaccactgttacccacgg

SEQ ID NO: 7583 - DNA, 20 bp, Artificial Sequence
  Description of Artificial Sequence: Synthetic oligonucleotide
  Target: PCSK9; (-) strand; PAM type: NRG; PAM sequence: CGG
gggaaaaccactgttaccca

SEQ ID NO: 7584 - DNA, 20 bp, Artificial Sequence
  Description of Artificial Sequence: Synthetic oligonucleotide
  Target: PCSK9; (-) strand; PAM type: NRG; PAM sequence: GGG
cctgaaccaccaccttctga

SEQ ID NO: 7585 - DNA, 20 bp, Artificial Sequence
  Description of Artificial Sequence: Synthetic oligonucleotide
  Target: PCSK9; (-) strand; PAM type: NRG; PAM sequence: AGG
tcctgaaccaccaccttctg

SEQ ID NO: 7586 - DNA, 20 bp, Artificial Sequence
  Description of Artificial Sequence: Synthetic oligonucleotide
  Target: PCSK9; (-) strand; PAM type: NRG; PAM sequence: GAG
ctcctgaaccaccaccttct

SEQ ID NO: 7587 - DNA, 20 bp, Artificial Sequence
  Description of Artificial Sequence: Synthetic oligonucleotide
  Target: PCSK9; (-) strand; PAM type: NRG; PAM sequence: AAG
ttgaaaggatatacagtgaa

SEQ ID NO: 7588 - DNA, 20 bp, Artificial Sequence
  Description of Artificial Sequence: Synthetic oligonucleotide
  Target: PCSK9; (-) strand; PAM type: NRG; PAM sequence: CAG
gaatagtttgaaaggatata

SEQ ID NO: 7589 - DNA, 20 bp, Artificial Sequence
  Description of Artificial Sequence: Synthetic oligonucleotide
  Target: PCSK9; (-) strand; PAM type: NRG; PAM sequence: AGG
taaaacgtgaatagtttgaa

SEQ ID NO: 7590 - DNA, 20 bp, Artificial Sequence
  Description of Artificial Sequence: Synthetic oligonucleotide
  Target: PCSK9; (-) strand; PAM type: NRG; PAM sequence: AAG
ttaaaacgtgaatagtttga

SEQ ID NO: 7591 - DNA, 20 bp, Artificial Sequence
  Description of Artificial Sequence: Synthetic oligonucleotide
  Target: PCSK9; (-) strand; PAM type: NRG; PAM sequence: TAG
tgttttttttaaaacgtgaa

SEQ ID NO: 7592 - DNA, 20 bp, Artificial Sequence
  Description of Artificial Sequence: Synthetic oligonucleotide
  Target: PCSK9; (-) strand; PAM type: NRG; PAM sequence: GGG
actcttttttgcaagggagg

SEQ ID NO: 7593 - DNA, 20 bp, Artificial Sequence
  Description of Artificial Sequence: Synthetic oligonucleotide
  Target: PCSK9; (-) strand; PAM type: NRG; PAM sequence: GGG
tactcttttttgcaagggag

SEQ ID NO: 7594 - DNA, 20 bp, Artificial Sequence
  Description of Artificial Sequence: Synthetic oligonucleotide
  Target: PCSK9; (-) strand; PAM type: NRG; PAM sequence: GGG
atactcttttttgcaaggga

SEQ ID NO: 7595 - DNA, 20 bp, Artificial Sequence
  Description of Artificial Sequence: Synthetic oligonucleotide
  Target: PCSK9; (-) strand; PAM type: NRG; PAM sequence: AGG
catactcttttttgcaaggg

SEQ ID NO: 7596 - DNA, 20 bp, Artificial Sequence
  Description of Artificial Sequence: Synthetic oligonucleotide
  Target: PCSK9; (-) strand; PAM type: NRG; PAM sequence: GAG
gcatactcttttttgcaagg

SEQ ID NO: 7597 - DNA, 20 bp, Artificial Sequence
  Description of Artificial Sequence: Synthetic oligonucleotide
  Target: PCSK9; (-) strand; PAM type: NRG; PAM sequence: GGG
gggcatactcttttttgcaa

SEQ ID NO: 7598 - DNA, 20 bp, Artificial Sequence
  Description of Artificial Sequence: Synthetic oligonucleotide
  Target: PCSK9; (-) strand; PAM type: NRG; PAM sequence: AGG
cgggcatactcttttttgca

SEQ ID NO: 7599 - DNA, 20 bp, Artificial Sequence
  Description of Artificial Sequence: Synthetic oligonucleotide
  Target: PCSK9; (-) strand; PAM type: NRG; PAM sequence: AAG
acgggcatactcttttttgc

SEQ ID NO: 7600 - DNA, 20 bp, Artificial Sequence
  Description of Artificial Sequence: Synthetic oligonucleotide
  Target: PCSK9; (-) strand; PAM type: NRG; PAM sequence: GGG
tacatttcaacattttgaac

SEQ ID NO: 7601 - DNA, 20 bp, Artificial Sequence
  Description of Artificial Sequence: Synthetic oligonucleotide
  Target: PCSK9; (-) strand; PAM type: NRG; PAM sequence: CGG
gtacatttcaacattttgaa

SEQ ID NO: 7602 - DNA, 20 bp, Artificial Sequence
  Description of Artificial Sequence: Synthetic oligonucleotide
  Target: PCSK9; (-) strand; PAM type: NRG; PAM sequence: GAG
tctgcagccaccattgctgt

SEQ ID NO: 7603 - DNA, 20 bp, Artificial Sequence
  Description of Artificial Sequence: Synthetic oligonucleotide
  Target: PCSK9; (-) strand; PAM type: NRG; PAM sequence: CAG
cctcagaaacttggagtctg

SEQ ID NO: 7604 - DNA, 20 bp, Artificial Sequence
  Description of Artificial Sequence: Synthetic oligonucleotide
  Target: PCSK9; (-) strand; PAM type: NRG; PAM sequence: GAG
tctccaacctcagaaacttg

SEQ ID NO: 7605 - DNA, 20 bp, Artificial Sequence
  Description of Artificial Sequence: Synthetic oligonucleotide
  Target: PCSK9; (-) strand; PAM type: NRG; PAM sequence: TGG
cttctccaacctcagaaact

SEQ ID NO: 7606 - DNA, 20 bp, Artificial Sequence
  Description of Artificial Sequence: Synthetic oligonucleotide
  Target: PCSK9; (-) strand; PAM type: NRG; PAM sequence: CAG
ctggctaccttctccaacct

SEQ ID NO: 7607 - DNA, 20 bp, Artificial Sequence
  Description of Artificial Sequence: Synthetic oligonucleotide
  Target: PCSK9; (-) strand; PAM type: NRG; PAM sequence: TGG
gaactcacttttatgctccc

SEQ ID NO: 7608 - DNA, 20 bp, Artificial Sequence
  Description of Artificial Sequence: Synthetic oligonucleotide
  Target: PCSK9; (-) strand; PAM type: NRG; PAM sequence: TAG
tcatagactgaatgagtaga

SEQ ID NO: 7609 - DNA, 20 bp, Artificial Sequence
  Description of Artificial Sequence: Synthetic oligonucleotide
  Target: PCSK9; (-) strand; PAM type: NRG; PAM sequence: TAG
cccctcatagactgaatgag

SEQ ID NO: 7610 - DNA, 20 bp, Artificial Sequence
  Description of Artificial Sequence: Synthetic oligonucleotide
  Target: PCSK9; (-) strand; PAM type: NRG; PAM sequence: GAG
cttcccctcatagactgaat

SEQ ID NO: 7611 - DNA, 20 bp, Artificial Sequence
  Description of Artificial Sequence: Synthetic oligonucleotide
  Target: PCSK9; (-) strand; PAM type: NRG; PAM sequence: TAG
tagccattgccttcccctca

SEQ ID NO: 7612 - DNA, 20 bp, Artificial Sequence
  Description of Artificial Sequence: Synthetic oligonucleotide
  Target: PCSK9; (-) strand; PAM type: NRG; PAM sequence: TAG
tgtccctcaaaatgcttttc

SEQ ID NO: 7613 - DNA, 20 bp, Artificial Sequence
  Description of Artificial Sequence: Synthetic oligonucleotide
  Target: PCSK9; (-) strand; PAM type: NRG; PAM sequence: AGG
tcaccccacaagcatcctca

SEQ ID NO: 7614 - DNA, 20 bp, Artificial Sequence
  Description of Artificial Sequence: Synthetic oligonucleotide
  Target: PCSK9; (-) strand; PAM type: NRG; PAM sequence: AAG
ttcaccccacaagcatcctc

SEQ ID NO: 7615 - DNA, 20 bp, Artificial Sequence
  Description of Artificial Sequence: Synthetic oligonucleotide
  Target: PCSK9; (-) strand; PAM type: NRG; PAM sequence: AAG
attctttcccttcaccccac

SEQ ID NO: 7616 - DNA, 20 bp, Artificial Sequence
  Description of Artificial Sequence: Synthetic oligonucleotide
  Target: PCSK9; (-) strand; PAM type: NRG; PAM sequence: GAG
atccctaaatgcctcttcct

SEQ ID NO: 7617 - DNA, 20 bp, Artificial Sequence
  Description of Artificial Sequence: Synthetic oligonucleotide
  Target: PCSK9; (-) strand; PAM type: NRG; PAM sequence: GGG
gccccaatctggcctccgca

SEQ ID NO: 7618 - DNA, 20 bp, Artificial Sequence
  Description of Artificial Sequence: Synthetic oligonucleotide
  Target: PCSK9; (-) strand; PAM type: NRG; PAM sequence: AGG
tgccccaatctggcctccgc

SEQ ID NO: 7619 - DNA, 20 bp, Artificial Sequence
  Description of Artificial Sequence: Synthetic oligonucleotide
  Target: PCSK9; (-) strand; PAM type: NRG; PAM sequence: CAG
ctgccccaatctggcctccg

SEQ ID NO: 7620 - DNA, 20 bp, Artificial Sequence
  Description of Artificial Sequence: Synthetic oligonucleotide
  Target: PCSK9; (-) strand; PAM type: NRG; PAM sequence: TGG
gacactcccctgccccaatc

SEQ ID NO: 7621 - DNA, 20 bp, Artificial Sequence
  Description of Artificial Sequence: Synthetic oligonucleotide
  Target: PCSK9; (-) strand; PAM type: NRG; PAM sequence: CAG
ggggaccatcctcttatact

SEQ ID NO: 7622 - DNA, 20 bp, Artificial Sequence
  Description of Artificial Sequence: Synthetic oligonucleotide
  Target: PCSK9; (-) strand; PAM type: NRG; PAM sequence: GGG
cttcctccttcagggcagag

SEQ ID NO: 7623 - DNA, 20 bp, Artificial Sequence
  Description of Artificial Sequence: Synthetic oligonucleotide
  Target: PCSK9; (-) strand; PAM type: NRG; PAM sequence: GGG
ccttcctccttcagggcaga

SEQ ID NO: 7624 - DNA, 20 bp, Artificial Sequence
  Description of Artificial Sequence: Synthetic oligonucleotide
  Target: PCSK9; (-) strand; PAM type: NRG; PAM sequence: AGG
gccttcctccttcagggcag

SEQ ID NO: 7625 - DNA, 20 bp, Artificial Sequence
  Description of Artificial Sequence: Synthetic oligonucleotide
  Target: PCSK9; (-) strand; PAM type: NRG; PAM sequence: GAG
tgccttcctccttcagggca

SEQ ID NO: 7626 - DNA, 20 bp, Artificial Sequence
  Description of Artificial Sequence: Synthetic oligonucleotide
  Target: PCSK9; (-) strand; PAM type: NRG; PAM sequence: CAG
cctgccttcctccttcaggg

SEQ ID NO: 7627 - DNA, 20 bp, Artificial Sequence
  Description of Artificial Sequence: Synthetic oligonucleotide
  Target: PCSK9; (-) strand; PAM type: NRG; PAM sequence: GGG
cctcctgccttcctccttca

SEQ ID NO: 7628 - DNA, 20 bp, Artificial Sequence
  Description of Artificial Sequence: Synthetic oligonucleotide
  Target: PCSK9; (-) strand; PAM type: NRG; PAM sequence: AGG
ccctcctgccttcctccttc

SEQ ID NO: 7629 - DNA, 20 bp, Artificial Sequence
  Description of Artificial Sequence: Synthetic oligonucleotide
  Target: PCSK9; (-) strand; PAM type: NRG; PAM sequence: CAG
cccctcctgccttcctcctt

SEQ ID NO: 7630 - DNA, 20 bp, Artificial Sequence
  Description of Artificial Sequence: Synthetic oligonucleotide
  Target: PCSK9; (-) strand; PAM type: NRG; PAM sequence: GGG
ctccaccacaagtgctttct

SEQ ID NO: 7631 - DNA, 20 bp, Artificial Sequence
  Description of Artificial Sequence: Synthetic oligonucleotide
  Target: PCSK9; (-) strand; PAM type: NRG; PAM sequence: TGG
cctccaccacaagtgctttc

SEQ ID NO: 7632 - DNA, 20 bp, Artificial Sequence
  Description of Artificial Sequence: Synthetic oligonucleotide
  Target: PCSK9; (-) strand; PAM type: NRG; PAM sequence: AAG
tggggcctcccctccaccac

SEQ ID NO: 7633 - DNA, 20 bp, Artificial Sequence
  Description of Artificial Sequence: Synthetic oligonucleotide
  Target: PCSK9; (-) strand; PAM type: NRG; PAM sequence: GGG
taagtcagaagcctcttctg

SEQ ID NO: 7634 - DNA, 20 bp, Artificial Sequence
  Description of Artificial Sequence: Synthetic oligonucleotide
  Target: PCSK9; (-) strand; PAM type: NRG; PAM sequence: GGG
gtaagtcagaagcctcttct

SEQ ID NO: 7635 - DNA, 20 bp, Artificial Sequence
  Description of Artificial Sequence: Synthetic oligonucleotide
  Target: PCSK9; (-) strand; PAM type: NRG; PAM sequence: TGG
ggtaagtcagaagcctcttc

SEQ ID NO: 7636 - DNA, 20 bp, Artificial Sequence
  Description of Artificial Sequence: Synthetic oligonucleotide
  Target: PCSK9; (-) strand; PAM type: NRG; PAM sequence: AAG
cagcaatcagggtaagtcag

SEQ ID NO: 7637 - DNA, 20 bp, Artificial Sequence
  Description of Artificial Sequence: Synthetic oligonucleotide
  Target: PCSK9; (-) strand; PAM type: NRG; PAM sequence: CAG
taccagcaatcagggtaagt

SEQ ID NO: 7638 - DNA, 20 bp, Artificial Sequence
  Description of Artificial Sequence: Synthetic oligonucleotide
  Target: PCSK9; (-) strand; PAM type: NRG; PAM sequence: AAG
gaggtaccagcaatcagggt

SEQ ID NO: 7639 - DNA, 20 bp, Artificial Sequence
  Description of Artificial Sequence: Synthetic oligonucleotide
  Target: PCSK9; (-) strand; PAM type: NRG; PAM sequence: GGG
ctgagaggtaccagcaatca

SEQ ID NO: 7640 - DNA, 20 bp, Artificial Sequence
  Description of Artificial Sequence: Synthetic oligonucleotide
  Target: PCSK9; (-) strand; PAM type: NRG; PAM sequence: AGG
cctgagaggtaccagcaatc

SEQ ID NO: 7641 - DNA, 20 bp, Artificial Sequence
  Description of Artificial Sequence: Synthetic oligonucleotide
  Target: PCSK9; (-) strand; PAM type: NRG; PAM sequence: CAG
ccctgagaggtaccagcaat

SEQ ID NO: 7642 - DNA, 20 bp, Artificial Sequence
  Description of Artificial Sequence: Synthetic oligonucleotide
  Target: PCSK9; (-) strand; PAM type: NRG; PAM sequence: CAG
ccagctcccctgagaggtac

SEQ ID NO: 7643 - DNA, 20 bp, Artificial Sequence
  Description of Artificial Sequence: Synthetic oligonucleotide
  Target: PCSK9; (-) strand; PAM type: NRG; PAM sequence: AGG
aagcagccagctcccctgag

SEQ ID NO: 7644 - DNA, 20 bp, Artificial Sequence
  Description of Artificial Sequence: Synthetic oligonucleotide
  Target: PCSK9; (-) strand; PAM type: NRG; PAM sequence: GAG
taagcagccagctcccctga

SEQ ID NO: 7645 - DNA, 20 bp, Artificial Sequence
  Description of Artificial Sequence: Synthetic oligonucleotide
  Target: PCSK9; (-) strand; PAM type: NRG; PAM sequence: GAG
aataagcagccagctcccct

SEQ ID NO: 7646 - DNA, 20 bp, Artificial Sequence
  Description of Artificial Sequence: Synthetic oligonucleotide
  Target: PCSK9; (-) strand; PAM type: NRG; PAM sequence: CAG
ctggccagcaaataagcagc

SEQ ID NO: 7647 - DNA, 20 bp, Artificial Sequence
  Description of Artificial Sequence: Synthetic oligonucleotide
  Target: PCSK9; (-) strand; PAM type: NRG; PAM sequence: CAG
caccctggccagcaaataag

SEQ ID NO: 7648 - DNA, 20 bp, Artificial Sequence
  Description of Artificial Sequence: Synthetic oligonucleotide
  Target: PCSK9; (-) strand; PAM type: NRG; PAM sequence: AAG
ccacaccctggccagcaaat

SEQ ID NO: 7649 - DNA, 20 bp, Artificial Sequence
  Description of Artificial Sequence: Synthetic oligonucleotide
  Target: PCSK9; (-) strand; PAM type: NRG; PAM sequence: CAG
gggttcccccacaccctggc

SEQ ID NO: 7650 - DNA, 20 bp, Artificial Sequence
  Description of Artificial Sequence: Synthetic oligonucleotide
  Target: PCSK9; (-) strand; PAM type: NRG; PAM sequence: TGG
aaatgggttcccccacaccc

SEQ ID NO: 7651 - DNA, 20 bp, Artificial Sequence
  Description of Artificial Sequence: Synthetic oligonucleotide
  Target: PCSK9; (-) strand; PAM type: NRG; PAM sequence: GGG
ccttctccctcttctcaaat

SEQ ID NO: 7652 - DNA, 20 bp, Artificial Sequence
  Description of Artificial Sequence: Synthetic oligonucleotide
  Target: PCSK9; (-) strand; PAM type: NRG; PAM sequence: TGG
accttctccctcttctcaaa

SEQ ID NO: 7653 - DNA, 20 bp, Artificial Sequence
  Description of Artificial Sequence: Synthetic oligonucleotide
  Target: PCSK9; (-) strand; PAM type: NRG; PAM sequence: AGG
ccctcccataagttgcccaa

SEQ ID NO: 7654 - DNA, 20 bp, Artificial Sequence
  Description of Artificial Sequence: Synthetic oligonucleotide
  Target: PCSK9; (-) strand; PAM type: NRG; PAM sequence: AAG
cccctcccataagttgccca

SEQ ID NO: 7655 - DNA, 20 bp, Artificial Sequence
  Description of Artificial Sequence: Synthetic oligonucleotide
  Target: PCSK9; (-) strand; PAM type: NRG; PAM sequence: AAG
tcaccaattacccctcccat

SEQ ID NO: 7656 - DNA, 20 bp, Artificial Sequence
  Description of Artificial Sequence: Synthetic oligonucleotide
  Target: PCSK9; (-) strand; PAM type: NRG; PAM sequence: GGG
gggcctcctgccacttggca

SEQ ID NO: 7657 - DNA, 20 bp, Artificial Sequence
  Description of Artificial Sequence: Synthetic oligonucleotide
  Target: PCSK9; (-) strand; PAM type: NRG; PAM sequence: AGG
tgggcctcctgccacttggc

SEQ ID NO: 7658 - DNA, 20 bp, Artificial Sequence
  Description of Artificial Sequence: Synthetic oligonucleotide
  Target: PCSK9; (-) strand; PAM type: NRG; PAM sequence: CAG
ctgggcctcctgccacttgg

SEQ ID NO: 7659 - DNA, 20 bp, Artificial Sequence
  Description of Artificial Sequence: Synthetic oligonucleotide
  Target: PCSK9; (-) strand; PAM type: NRG; PAM sequence: TGG
cagctgggcctcctgccact

SEQ ID NO: 7660 - DNA, 20 bp, Artificial Sequence
  Description of Artificial Sequence: Synthetic oligonucleotide
  Target: PCSK9; (-) strand; PAM type: NRG; PAM sequence: GGG
tatgaggggcagccccagct

SEQ ID NO: 7661 - DNA, 20 bp, Artificial Sequence
  Description of Artificial Sequence: Synthetic oligonucleotide
  Target: PCSK9; (-) strand; PAM type: NRG; PAM sequence: TGG
ttatgaggggcagccccagc

SEQ ID NO: 7662 - DNA, 20 bp, Artificial Sequence
  Description of Artificial Sequence: Synthetic oligonucleotide
  Target: PCSK9; (-) strand; PAM type: NRG; PAM sequence: CAG
actcttatgaggggcagccc

SEQ ID NO: 7663 - DNA, 20 bp, Artificial Sequence
  Description of Artificial Sequence: Synthetic oligonucleotide
  Target: PCSK9; (-) strand; PAM type: NRG; PAM sequence: CAG
cactgcactcttatgagggg

SEQ ID NO: 7664 - DNA, 20 bp, Artificial Sequence
  Description of Artificial Sequence: Synthetic oligonucleotide
  Target: PCSK9; (-) strand; PAM type: NRG; PAM sequence: GGG
ctccactgcactcttatgag

SEQ ID NO: 7665 - DNA, 20 bp, Artificial Sequence
  Description of Artificial Sequence: Synthetic oligonucleotide
  Target: PCSK9; (-) strand; PAM type: NRG; PAM sequence: GGG
cctccactgcactcttatga

SEQ ID NO: 7666 - DNA, 20 bp, Artificial Sequence
  Description of Artificial Sequence: Synthetic oligonucleotide
  Target: PCSK9; (-) strand; PAM type: NRG; PAM sequence: AGG
tcctccactgcactcttatg

SEQ ID NO: 7667 - DNA, 20 bp, Artificial Sequence
  Description of Artificial Sequence: Synthetic oligonucleotide
  Target: PCSK9; (-) strand; PAM type: NRG; PAM sequence: GAG
atcctccactgcactcttat

SEQ ID NO: 7668 - DNA, 20 bp, Artificial Sequence
  Description of Artificial Sequence: Synthetic oligonucleotide
  Target: PCSK9; (-) strand; PAM type: NRG; PAM sequence: CAG
gacagatggaaccagagggg

SEQ ID NO: 7669 - DNA, 20 bp, Artificial Sequence
  Description of Artificial Sequence: Synthetic oligonucleotide
  Target: PCSK9; (-) strand; PAM type: NRG; PAM sequence: GGG
tgcgacagatggaaccagag

SEQ ID NO: 7670 - DNA, 20 bp, Artificial Sequence
  Description of Artificial Sequence: Synthetic oligonucleotide
  Target: PCSK9; (-) strand; PAM type: NRG; PAM sequence: GGG
ctgcgacagatggaaccaga

SEQ ID NO: 7671 - DNA, 20 bp, Artificial Sequence
  Description of Artificial Sequence: Synthetic oligonucleotide
  Target: PCSK9; (-) strand; PAM type: NRG; PAM sequence: AGG
tctgcgacagatggaaccag

SEQ ID NO: 7672 - DNA, 20 bp, Artificial Sequence
  Description of Artificial Sequence: Synthetic oligonucleotide
  Target: PCSK9; (-) strand; PAM type: NRG; PAM sequence: GAG
ctctgcgacagatggaacca

SEQ ID NO: 7673 - DNA, 20 bp, Artificial Sequence
  Description of Artificial Sequence: Synthetic oligonucleotide
  Target: PCSK9; (-) strand; PAM type: NRG; PAM sequence: CAG
ggctctgcgacagatggaac

SEQ ID NO: 7674 - DNA, 20 bp, Artificial Sequence
  Description of Artificial Sequence: Synthetic oligonucleotide
  Target: PCSK9; (-) strand; PAM type: NRG; PAM sequence: TGG
accctgggctctgcgacaga

SEQ ID NO: 7675 - DNA, 20 bp, Artificial Sequence
  Description of Artificial Sequence: Synthetic oligonucleotide
  Target: PCSK9; (-) strand; PAM type: NRG; PAM sequence: CAG
aagcaccctgggctctgcga

SEQ ID NO: 7676 - DNA, 20 bp, Artificial Sequence
  Description of Artificial Sequence: Synthetic oligonucleotide
  Target: PCSK9; (-) strand; PAM type: NRG; PAM sequence: GGG
ggggaggaaggaagcaccct

SEQ ID NO: 7677 - DNA, 20 bp, Artificial Sequence
  Description of Artificial Sequence: Synthetic oligonucleotide
  Target: PCSK9; (-) strand; PAM type: NRG; PAM sequence: TGG
gggggaggaaggaagcaccc

SEQ ID NO: 7678 - DNA, 20 bp, Artificial Sequence
  Description of Artificial Sequence: Synthetic oligonucleotide
  Target: PCSK9; (-) strand; PAM type: NRG; PAM sequence: AAG
agggaggtgggggaggaagg

SEQ ID NO: 7679 - DNA, 20 bp, Artificial Sequence
  Description of Artificial Sequence: Synthetic oligonucleotide
  Target: PCSK9; (-) strand; PAM type: NRG; PAM sequence: AGG
ctgagggaggtgggggagga

SEQ ID NO: 7680 - DNA, 20 bp, Artificial Sequence
  Description of Artificial Sequence: Synthetic oligonucleotide
  Target: PCSK9; (-) strand; PAM type: NRG; PAM sequence: AAG
tctgagggaggtgggggagg

SEQ ID NO: 7681 - DNA, 20 bp, Artificial Sequence
  Description of Artificial Sequence: Synthetic oligonucleotide
  Target: PCSK9; (-) strand; PAM type: NRG; PAM sequence: AGG
tgttctgagggaggtggggg

SEQ ID NO: 7682 - DNA, 20 bp, Artificial Sequence
  Description of Artificial Sequence: Synthetic oligonucleotide
  Target: PCSK9; (-) strand; PAM type: NRG; PAM sequence: GAG
gtgttctgagggaggtgggg

SEQ ID NO: 7683 - DNA, 20 bp, Artificial Sequence
  Description of Artificial Sequence: Synthetic oligonucleotide
  Target: PCSK9; (-) strand; PAM type: NRG; PAM sequence: GGG
gtgtgttctgagggaggtgg

SEQ ID NO: 7684 - DNA, 20 bp, Artificial Sequence
  Description of Artificial Sequence: Synthetic oligonucleotide
  Target: PCSK9; (-) strand; PAM type: NRG; PAM sequence: GGG
ggtgtgttctgagggaggtg

SEQ ID NO: 7685 - DNA, 20 bp, Artificial Sequence
  Description of Artificial Sequence: Synthetic oligonucleotide
  Target: PCSK9; (-) strand; PAM type: NRG; PAM sequence: GGG
gggtgtgttctgagggaggt

SEQ ID NO: 7686 - DNA, 20 bp, Artificial Sequence
  Description of Artificial Sequence: Synthetic oligonucleotide
  Target: PCSK9; (-) strand; PAM type: NRG; PAM sequence: TGG
tgggtgtgttctgagggagg

SEQ ID NO: 7687 - DNA, 20 bp, Artificial Sequence
  Description of Artificial Sequence: Synthetic oligonucleotide
  Target: PCSK9; (-) strand; PAM type: NRG; PAM sequence: AGG
cagtgggtgtgttctgaggg

SEQ ID NO: 7688 - DNA, 20 bp, Artificial Sequence
  Description of Artificial Sequence: Synthetic oligonucleotide
  Target: PCSK9; (-) strand; PAM type: NRG; PAM sequence: GAG
gcagtgggtgtgttctgagg

SEQ ID NO: 7689 - DNA, 20 bp, Artificial Sequence
  Description of Artificial Sequence: Synthetic oligonucleotide
  Target: PCSK9; (-) strand; PAM type: NRG; PAM sequence: GGG
atgcagtgggtgtgttctga

SEQ ID NO: 7690 - DNA, 20 bp, Artificial Sequence
  Description of Artificial Sequence: Synthetic oligonucleotide
  Target: PCSK9; (-) strand; PAM type: NRG; PAM sequence: AGG
catgcagtgggtgtgttctg

SEQ ID NO: 7691 - DNA, 20 bp, Artificial Sequence
  Description of Artificial Sequence: Synthetic oligonucleotide
  Target: PCSK9; (-) strand; PAM type: NRG; PAM sequence: GAG
gcatgcagtgggtgtgttct

SEQ ID NO: 7692 - DNA, 20 bp, Artificial Sequence
  Description of Artificial Sequence: Synthetic oligonucleotide
  Target: PCSK9; (-) strand; PAM type: NRG; PAM sequence: GGG
gctgctgtccagcatgcagt

SEQ ID NO: 7693 - DNA, 20 bp, Artificial Sequence
  Description of Artificial Sequence: Synthetic oligonucleotide
  Target: PCSK9; (-) strand; PAM type: NRG; PAM sequence: TGG
ggctgctgtccagcatgcag

SEQ ID NO: 7694 - DNA, 20 bp, Artificial Sequence
  Description of Artificial Sequence: Synthetic oligonucleotide
  Target: PCSK9; (-) strand; PAM type: NRG; PAM sequence: CAG
gggggctgctgtccagcatg

SEQ ID NO: 7695 - DNA, 20 bp, Artificial Sequence
  Description of Artificial Sequence: Synthetic oligonucleotide
  Target: PCSK9; (-) strand; PAM type: NRG; PAM sequence: CAG
ccaggaagggggctgctgtc

SEQ ID NO: 7696 - DNA, 20 bp, Artificial Sequence
  Description of Artificial Sequence: Synthetic oligonucleotide
  Target: PCSK9; (-) strand; PAM type: NRG; PAM sequence: GGG
tgtccccaggcccaggaagg

SEQ ID NO: 7697 - DNA, 20 bp, Artificial Sequence
  Description of Artificial Sequence: Synthetic oligonucleotide
  Target: PCSK9; (-) strand; PAM type: NRG; PAM sequence: GGG
atgtccccaggcccaggaag

SEQ ID NO: 7698 - DNA, 20 bp, Artificial Sequence
  Description of Artificial Sequence: Synthetic oligonucleotide
  Target: PCSK9; (-) strand; PAM type: NRG; PAM sequence: GGG
gatgtccccaggcccaggaa

SEQ ID NO: 7699 - DNA, 20 bp, Artificial Sequence
  Description of Artificial Sequence: Synthetic oligonucleotide
  Target: PCSK9; (-) strand; PAM type: NRG; PAM sequence: AGG
ggatgtccccaggcccagga

SEQ ID NO: 7700 - DNA, 20 bp, Artificial Sequence
  Description of Artificial Sequence: Synthetic oligonucleotide
  Target: PCSK9; (-) strand; PAM type: NRG; PAM sequence: AAG
tggatgtccccaggcccagg

SEQ ID NO: 7701 - DNA, 20 bp, Artificial Sequence
  Description of Artificial Sequence: Synthetic oligonucleotide
  Target: PCSK9; (-) strand; PAM type: NRG; PAM sequence: AGG
acatggatgtccccaggccc

SEQ ID NO: 7702 - DNA, 20 bp, Artificial Sequence
  Description of Artificial Sequence: Synthetic oligonucleotide
  Target: PCSK9; (-) strand; PAM type: NRG; PAM sequence: CAG
gacatggatgtccccaggcc

SEQ ID NO: 7703 - DNA, 20 bp, Artificial Sequence
  Description of Artificial Sequence: Synthetic oligonucleotide
  Target: PCSK9; (-) strand; PAM type: NRG; PAM sequence: AGG
agagggacatggatgtcccc

SEQ ID NO: 7704 - DNA, 20 bp, Artificial Sequence
  Description of Artificial Sequence: Synthetic oligonucleotide
  Target: PCSK9; (-) strand; PAM type: NRG; PAM sequence: CAG
cagagggacatggatgtccc

SEQ ID NO: 7705 - DNA, 20 bp, Artificial Sequence
  Description of Artificial Sequence: Synthetic oligonucleotide
  Target: PCSK9; (-) strand; PAM type: NRG; PAM sequence: TGG
agcctgtgcacagagggaca

SEQ ID NO: 7706 - DNA, 20 bp, Artificial Sequence
  Description of Artificial Sequence: Synthetic oligonucleotide
  Target: PCSK9; (-) strand; PAM type: NRG; PAM sequence: GGG
tgatgaagcctgtgcacaga

SEQ ID NO: 7707 - DNA, 20 bp, Artificial Sequence
  Description of Artificial Sequence: Synthetic oligonucleotide
  Target: PCSK9; (-) strand; PAM type: NRG; PAM sequence: AGG
atgatgaagcctgtgcacag

SEQ ID NO: 7708 - DNA, 20 bp, Artificial Sequence
  Description of Artificial Sequence: Synthetic oligonucleotide
  Target: PCSK9; (-) strand; PAM type: NRG; PAM sequence: GAG
aatgatgaagcctgtgcaca

SEQ ID NO: 7709 - DNA, 20 bp, Artificial Sequence
  Description of Artificial Sequence: Synthetic oligonucleotide
  Target: PCSK9; (-) strand; PAM type: NRG; PAM sequence: CAG
agaatgatgaagcctgtgca

SEQ ID NO: 7710 - DNA, 20 bp, Artificial Sequence
  Description of Artificial Sequence: Synthetic oligonucleotide
  Target: PCSK9; (-) strand; PAM type: NRG; PAM sequence: AAG
cgtgcacccagagaatgatg

SEQ ID NO: 7711 - DNA, 20 bp, Artificial Sequence
  Description of Artificial Sequence: Synthetic oligonucleotide
  Target: PCSK9; (-) strand; PAM type: NRG; PAM sequence: GAG
gggtcgttaccgtgcaccca

SEQ ID NO: 7712 - DNA, 20 bp, Artificial Sequence
  Description of Artificial Sequence: Synthetic oligonucleotide
  Target: PCSK9; (-) strand; PAM type: NRG; PAM sequence: CAG
cggggtcgttaccgtgcacc

SEQ ID NO: 7713 - DNA, 20 bp, Artificial Sequence
  Description of Artificial Sequence: Synthetic oligonucleotide
  Target: PCSK9; (-) strand; PAM type: NRG; PAM sequence: GGG
ccttggcctctcacctaccg

SEQ ID NO: 7714 - DNA, 20 bp, Artificial Sequence
  Description of Artificial Sequence: Synthetic oligonucleotide
  Target: PCSK9; (-) strand; PAM type: NRG; PAM sequence: GGG
accttggcctctcacctacc

SEQ ID NO: 7715 - DNA, 20 bp, Artificial Sequence
  Description of Artificial Sequence: Synthetic oligonucleotide
  Target: PCSK9; (-) strand; PAM type: NRG; PAM sequence: CGG
gaccttggcctctcacctac

SEQ ID NO: 7716 - DNA, 20 bp, Artificial Sequence
  Description of Artificial Sequence: Synthetic oligonucleotide
  Target: PCSK9; (-) strand; PAM type: NRG; PAM sequence: TGG
gctgctcccctttgggacct

SEQ ID NO: 7717 - DNA, 20 bp, Artificial Sequence
  Description of Artificial Sequence: Synthetic oligonucleotide
  Target: PCSK9; (-) strand; PAM type: NRG; PAM sequence: GGG
tttccctgctgctccccttt

SEQ ID NO: 7718 - DNA, 20 bp, Artificial Sequence
  Description of Artificial Sequence: Synthetic oligonucleotide
  Target: PCSK9; (-) strand; PAM type: NRG; PAM sequence: TGG
ctttccctgctgctcccctt

SEQ ID NO: 7719 - DNA, 20 bp, Artificial Sequence
  Description of Artificial Sequence: Synthetic oligonucleotide
  Target: PCSK9; (-) strand; PAM type: NRG; PAM sequence: GAG
cctggagcaagaatagatgg

SEQ ID NO: 7720 - DNA, 20 bp, Artificial Sequence
  Description of Artificial Sequence: Synthetic oligonucleotide
  Target: PCSK9; (-) strand; PAM type: NRG; PAM sequence: GGG
cccctggagcaagaatagat

SEQ ID NO: 7721 - DNA, 20 bp, Artificial Sequence
  Description of Artificial Sequence: Synthetic oligonucleotide
  Target: PCSK9; (-) strand; PAM type: NRG; PAM sequence: TGG
tcccctggagcaagaataga

SEQ ID NO: 7722 - DNA, 20 bp, Artificial Sequence
  Description of Artificial Sequence: Synthetic oligonucleotide
  Target: PCSK9; (-) strand; PAM type: NRG; PAM sequence: TAG
ggcctcccctggagcaagaa

SEQ ID NO: 7723 - DNA, 20 bp, Artificial Sequence
  Description of Artificial Sequence: Synthetic oligonucleotide
  Target: PCSK9; (-) strand; PAM type: NRG; PAM sequence: AAG
tcaaaggcctcccctggagc

SEQ ID NO: 7724 - DNA, 20 bp, Artificial Sequence
  Description of Artificial Sequence: Synthetic oligonucleotide
  Target: PCSK9; (-) strand; PAM type: NRG; PAM sequence: GAG
ctcatcaaaggcctcccctg

SEQ ID NO: 7725 - DNA, 20 bp, Artificial Sequence
  Description of Artificial Sequence: Synthetic oligonucleotide
  Target: PCSK9; (-) strand; PAM type: NRG; PAM sequence: TGG
tcctcatcaaaggcctcccc

SEQ ID NO: 7726 - DNA, 20 bp, Artificial Sequence
  Description of Artificial Sequence: Synthetic oligonucleotide
  Target: PCSK9; (-) strand; PAM type: NRG; PAM sequence: AGG
tttggcagcttcctcatcaa

SEQ ID NO: 7727 - DNA, 20 bp, Artificial Sequence
  Description of Artificial Sequence: Synthetic oligonucleotide
  Target: PCSK9; (-) strand; PAM type: NRG; PAM sequence: AAG
ttttggcagcttcctcatca

SEQ ID NO: 7728 - DNA, 20 bp, Artificial Sequence
  Description of Artificial Sequence: Synthetic oligonucleotide
  Target: PCSK9; (-) strand; PAM type: NRG; PAM sequence: CAG
tatttgcaatgtgcttttgg

SEQ ID NO: 7729 - DNA, 20 bp, Artificial Sequence
  Description of Artificial Sequence: Synthetic oligonucleotide
  Target: PCSK9; (-) strand; PAM type: NRG; PAM sequence: TGG
ttgtatttgcaatgtgcttt

SEQ ID NO: 7730 - DNA, 20 bp, Artificial Sequence
  Description of Artificial Sequence: Synthetic oligonucleotide
  Target: PCSK9; (-) strand; PAM type: NRG; PAM sequence: TGG
tccttcctgttgcctgtaat

SEQ ID NO: 7731 - DNA, 20 bp, Artificial Sequence
  Description of Artificial Sequence: Synthetic oligonucleotide
  Target: PCSK9; (-) strand; PAM type: NRG; PAM sequence: TGG
gctgacagaggtggcagagg

SEQ ID NO: 7732 - DNA, 20 bp, Artificial Sequence
  Description of Artificial Sequence: Synthetic oligonucleotide
  Target: PCSK9; (-) strand; PAM type: NRG; PAM sequence: AGG
tttgctgacagaggtggcag

SEQ ID NO: 7733 - DNA, 20 bp, Artificial Sequence
  Description of Artificial Sequence: Synthetic oligonucleotide
  Target: PCSK9; (-) strand; PAM type: NRG; PAM sequence: GAG
gtttgctgacagaggtggca

SEQ ID NO: 7734 - DNA, 20 bp, Artificial Sequence
  Description of Artificial Sequence: Synthetic oligonucleotide
  Target: PCSK9; (-) strand; PAM type: NRG; PAM sequence: CAG
tggtttgctgacagaggtgg

SEQ ID NO: 7735 - DNA, 20 bp, Artificial Sequence
  Description of Artificial Sequence: Synthetic oligonucleotide
  Target: PCSK9; (-) strand; PAM type: NRG; PAM sequence: TGG
tcatggtttgctgacagagg

SEQ ID NO: 7736 - DNA, 20 bp, Artificial Sequence
  Description of Artificial Sequence: Synthetic oligonucleotide
  Target: PCSK9; (-) strand; PAM type: NRG; PAM sequence: AGG
agctcatggtttgctgacag

SEQ ID NO: 7737 - DNA, 20 bp, Artificial Sequence
  Description of Artificial Sequence: Synthetic oligonucleotide
  Target: PCSK9; (-) strand; PAM type: NRG; PAM sequence: GAG
gagctcatggtttgctgaca

SEQ ID NO: 7738 - DNA, 20 bp, Artificial Sequence
  Description of Artificial Sequence: Synthetic oligonucleotide
  Target: PCSK9; (-) strand; PAM type: NRG; PAM sequence: CAG
aggagctcatggtttgctga

SEQ ID NO: 7739 - DNA, 20 bp, Artificial Sequence
  Description of Artificial Sequence: Synthetic oligonucleotide
  Target: PCSK9; (-) strand; PAM type: NRG; PAM sequence: TGG
cagcacagagtaggagctca

SEQ ID NO: 7740 - DNA, 20 bp, Artificial Sequence
  Description of Artificial Sequence: Synthetic oligonucleotide
  Target: PCSK9; (-) strand; PAM type: NRG; PAM sequence: GAG
gccatcgcagcacagagtag

SEQ ID NO: 7741 - DNA, 20 bp, Artificial Sequence
  Description of Artificial Sequence: Synthetic oligonucleotide
  Target: PCSK9; (-) strand; PAM type: NRG; PAM sequence: AGG
ccgccatcgcagcacagagt

SEQ ID NO: 7742 - DNA, 20 bp, Artificial Sequence
  Description of Artificial Sequence: Synthetic oligonucleotide
  Target: PCSK9; (-) strand; PAM type: NRG; PAM sequence: TAG
cccgccatcgcagcacagag

SEQ ID NO: 7743 - DNA, 20 bp, Artificial Sequence
  Description of Artificial Sequence: Synthetic oligonucleotide
  Target: PCSK9; (-) strand; PAM type: NRG; PAM sequence: GAG
gagcccgccatcgcagcaca

SEQ ID NO: 7744 - DNA, 20 bp, Artificial Sequence
  Description of Artificial Sequence: Synthetic oligonucleotide
  Target: PCSK9; (-) strand; PAM type: NRG; PAM sequence: CAG
tcgagcccgccatcgcagca

SEQ ID NO: 7745 - DNA, 20 bp, Artificial Sequence
  Description of Artificial Sequence: Synthetic oligonucleotide
  Target: PCSK9; (-) strand; PAM type: NRG; PAM sequence: CAG
ccccatcgagcccgccatcg

SEQ ID NO: 7746 - DNA, 20 bp, Artificial Sequence
  Description of Artificial Sequence: Synthetic oligonucleotide
  Target: PCSK9; (-) strand; PAM type: NRG; PAM sequence: GAG
aggtcagagttatccccatc

SEQ ID NO: 7747 - DNA, 20 bp, Artificial Sequence
  Description of Artificial Sequence: Synthetic oligonucleotide
  Target: PCSK9; (-) strand; PAM type: NRG; PAM sequence: GAG
gactccatgaggtaaggtca

SEQ ID NO: 7748 - DNA, 20 bp, Artificial Sequence
  Description of Artificial Sequence: Synthetic oligonucleotide
  Target: PCSK9; (-) strand; PAM type: NRG; PAM sequence: CAG
gtgactccatgaggtaaggt

SEQ ID NO: 7749 - DNA, 20 bp, Artificial Sequence
  Description of Artificial Sequence: Synthetic oligonucleotide
  Target: PCSK9; (-) strand; PAM type: NRG; PAM sequence: AGG
gacagtgactccatgaggta

SEQ ID NO: 7750 - DNA, 20 bp, Artificial Sequence
  Description of Artificial Sequence: Synthetic oligonucleotide
  Target: PCSK9; (-) strand; PAM type: NRG; PAM sequence: AAG
tgacagtgactccatgaggt

SEQ ID NO: 7751 - DNA, 20 bp, Artificial Sequence
  Description of Artificial Sequence: Synthetic oligonucleotide
  Target: PCSK9; (-) strand; PAM type: NRG; PAM sequence: AGG
gggttgacagtgactccatg

SEQ ID NO: 7752 - DNA, 20 bp, Artificial Sequence
  Description of Artificial Sequence: Synthetic oligonucleotide
  Target: PCSK9; (-) strand; PAM type: NRG; PAM sequence: GAG
tgggttgacagtgactccat

SEQ ID NO: 7753 - DNA, 20 bp, Artificial Sequence
  Description of Artificial Sequence: Synthetic oligonucleotide
  Target: PCSK9; (-) strand; PAM type: NRG; PAM sequence: CAG
cagtgcaaccagtgggttga

SEQ ID NO: 7754 - DNA, 20 bp, Artificial Sequence
  Description of Artificial Sequence: Synthetic oligonucleotide
  Target: PCSK9; (-) strand; PAM type: NRG; PAM sequence: GGG
acaaagacagtgcaaccagt

SEQ ID NO: 7755 - DNA, 20 bp, Artificial Sequence
  Description of Artificial Sequence: Synthetic oligonucleotide
  Target: PCSK9; (-) strand; PAM type: NRG; PAM sequence: TGG
cacaaagacagtgcaaccag

SEQ ID NO: 7756 - DNA, 20 bp, Artificial Sequence
  Description of Artificial Sequence: Synthetic oligonucleotide
  Target: PCSK9; (-) strand; PAM type: NRG; PAM sequence: CAG
gtgcacaaagacagtgcaac

SEQ ID NO: 7757 - DNA, 20 bp, Artificial Sequence
  Description of Artificial Sequence: Synthetic oligonucleotide
  Target: PCSK9; (-) strand; PAM type: NRG; PAM sequence: CAG
agagagccagtgcacaaaga

SEQ ID NO: 7758 - DNA, 20 bp, Artificial Sequence
  Description of Artificial Sequence: Synthetic oligonucleotide
  Target: PCSK9; (-) strand; PAM type: NRG; PAM sequence: AAG
ctccagagagccagtgcaca

SEQ ID NO: 7759 - DNA, 20 bp, Artificial Sequence
  Description of Artificial Sequence: Synthetic oligonucleotide
  Target: PCSK9; (-) strand; PAM type: NRG; PAM sequence: CAG
aagacctcactccagagagc

SEQ ID NO: 7760 - DNA, 20 bp, Artificial Sequence
  Description of Artificial Sequence: Synthetic oligonucleotide
  Target: PCSK9; (-) strand; PAM type: NRG; PAM sequence: GAG
tgcaaagacctcactccaga

SEQ ID NO: 7761 - DNA, 20 bp, Artificial Sequence
  Description of Artificial Sequence: Synthetic oligonucleotide
  Target: PCSK9; (-) strand; PAM type: NRG; PAM sequence: GAG
tttgcaaagacctcactcca

SEQ ID NO: 7762 - DNA, 20 bp, Artificial Sequence
  Description of Artificial Sequence: Synthetic oligonucleotide
  Target: PCSK9; (-) strand; PAM type: NRG; PAM sequence: CAG
tgtttgcaaagacctcactc

SEQ ID NO: 7763 - DNA, 20 bp, Artificial Sequence
  Description of Artificial Sequence: Synthetic oligonucleotide
  Target: PCSK9; (-) strand; PAM type: NRG; PAM sequence: AAG
ctctttccactttgtttgca

SEQ ID NO: 7764 - DNA, 20 bp, Artificial Sequence
  Description of Artificial Sequence: Synthetic oligonucleotide
  Target: PCSK9; (-) strand; PAM type: NRG; PAM sequence: AAG
aatctaggtgctggagtcca

SEQ ID NO: 7765 - DNA, 20 bp, Artificial Sequence
  Description of Artificial Sequence: Synthetic oligonucleotide
  Target: PCSK9; (-) strand; PAM type: NRG; PAM sequence: GAG
tgctctgaatctaggtgctg

SEQ ID NO: 7766 - DNA, 20 bp, Artificial Sequence
  Description of Artificial Sequence: Synthetic oligonucleotide
  Target: PCSK9; (-) strand; PAM type: NRG; PAM sequence: TGG
cctgctctgaatctaggtgc

SEQ ID NO: 7767 - DNA, 20 bp, Artificial Sequence
  Description of Artificial Sequence: Synthetic oligonucleotide
  Target: PCSK9; (-) strand; PAM type: NRG; PAM sequence: AGG
aaatggcctgctctgaatct

SEQ ID NO: 7768 - DNA, 20 bp, Artificial Sequence
  Description of Artificial Sequence: Synthetic oligonucleotide
  Target: PCSK9; (-) strand; PAM type: NRG; PAM sequence: TAG
gaaatggcctgctctgaatc

SEQ ID NO: 7769 - DNA, 20 bp, Artificial Sequence
  Description of Artificial Sequence: Synthetic oligonucleotide
  Target: PCSK9; (-) strand; PAM type: NRG; PAM sequence: TGG
acagcagattccgagtgaaa

SEQ ID NO: 7770 - DNA, 20 bp, Artificial Sequence
  Description of Artificial Sequence: Synthetic oligonucleotide
  Target: PCSK9; (-) strand; PAM type: NRG; PAM sequence: GAG
gcagatgcacagcagattcc

SEQ ID NO: 7771 - DNA, 20 bp, Artificial Sequence
  Description of Artificial Sequence: Synthetic oligonucleotide
  Target: PCSK9; (-) strand; PAM type: NRG; PAM sequence: CAG
cctcccttgcagatgcacag

SEQ ID NO: 7772 - DNA, 20 bp, Artificial Sequence
  Description of Artificial Sequence: Synthetic oligonucleotide
  Target: PCSK9; (-) strand; PAM type: NRG; PAM sequence: CAG
gatcctcccttgcagatgca

SEQ ID NO: 7773 - DNA, 20 bp, Artificial Sequence
  Description of Artificial Sequence: Synthetic oligonucleotide
  Target: PCSK9; (-) strand; PAM type: NRG; PAM sequence: CAG
gaatttatgatcctcccttg

SEQ ID NO: 7774 - DNA, 20 bp, Artificial Sequence
  Description of Artificial Sequence: Synthetic oligonucleotide
  Target: PCSK9; (-) strand; PAM type: NRG; PAM sequence: AGG
tcgatactgggaagaaacaa

SEQ ID NO: 7775 - DNA, 20 bp, Artificial Sequence
  Description of Artificial Sequence: Synthetic oligonucleotide
  Target: PCSK9; (-) strand; PAM type: NRG; PAM sequence: AAG
gtcgatactgggaagaaaca

SEQ ID NO: 7776 - DNA, 20 bp, Artificial Sequence
  Description of Artificial Sequence: Synthetic oligonucleotide
  Target: PCSK9; (-) strand; PAM type: NRG; PAM sequence: AAG
gaagggctgtcgatactggg

SEQ ID NO: 7777 - DNA, 20 bp, Artificial Sequence
  Description of Artificial Sequence: Synthetic oligonucleotide
  Target: PCSK9; (-) strand; PAM type: NRG; PAM sequence: GGG
ctggaagggctgtcgatact

SEQ ID NO: 7778 - DNA, 20 bp, Artificial Sequence
  Description of Artificial Sequence: Synthetic oligonucleotide
  Target: PCSK9; (-) strand; PAM type: NRG; PAM sequence: TGG
tctggaagggctgtcgatac

SEQ ID NO: 7779 - DNA, 20 bp, Artificial Sequence
  Description of Artificial Sequence: Synthetic oligonucleotide
  Target: PCSK9; (-) strand; PAM type: NRG; PAM sequence: GGG
gaggcttgctctttctggaa

SEQ ID NO: 7780 - DNA, 20 bp, Artificial Sequence
  Description of Artificial Sequence: Synthetic oligonucleotide
  Target: PCSK9; (-) strand; PAM type: NRG; PAM sequence: AGG
tgaggcttgctctttctgga

SEQ ID NO: 7781 - DNA, 20 bp, Artificial Sequence
  Description of Artificial Sequence: Synthetic oligonucleotide
  Target: PCSK9; (-) strand; PAM type: NRG; PAM sequence: AAG
atgaggcttgctctttctgg

SEQ ID NO: 7782 - DNA, 20 bp, Artificial Sequence
  Description of Artificial Sequence: Synthetic oligonucleotide
  Target: PCSK9; (-) strand; PAM type: NRG; PAM sequence: TGG
gacatgaggcttgctctttc

SEQ ID NO: 7783 - DNA, 20 bp, Artificial Sequence
  Description of Artificial Sequence: Synthetic oligonucleotide
  Target: PCSK9; (-) strand; PAM type: NRG; PAM sequence: AGG
tgtacatgtggcatgacatg

SEQ ID NO: 7784 - DNA, 20 bp, Artificial Sequence
  Description of Artificial Sequence: Synthetic oligonucleotide
  Target: PCSK9; (-) strand; PAM type: NRG; PAM sequence: GAG
ttgtacatgtggcatgacat

SEQ ID NO: 7785 - DNA, 20 bp, Artificial Sequence
  Description of Artificial Sequence: Synthetic oligonucleotide
  Target: PCSK9; (-) strand; PAM type: NRG; PAM sequence: TGG
ctggcctcagattgtacatg

SEQ ID NO: 7786 - DNA, 20 bp, Artificial Sequence
  Description of Artificial Sequence: Synthetic oligonucleotide
  Target: PCSK9; (-) strand; PAM type: NRG; PAM sequence: CAG
ggaaagagagctcctggcct

SEQ ID NO: 7787 - DNA, 20 bp, Artificial Sequence
  Description of Artificial Sequence: Synthetic oligonucleotide
  Target: PCSK9; (-) strand; PAM type: NRG; PAM sequence: TGG
aaaaggggaaagagagctcc

SEQ ID NO: 7788 - DNA, 20 bp, Artificial Sequence
  Description of Artificial Sequence: Synthetic oligonucleotide
  Target: PCSK9; (-) strand; PAM type: NRG; PAM sequence: GAG
gaggatgaaaaggggaaaga

SEQ ID NO: 7789 - DNA, 20 bp, Artificial Sequence
  Description of Artificial Sequence: Synthetic oligonucleotide
  Target: PCSK9; (-) strand; PAM type: NRG; PAM sequence: GAG
aggaggatgaaaaggggaaa

SEQ ID NO: 7790 - DNA, 20 bp, Artificial Sequence
  Description of Artificial Sequence: Synthetic oligonucleotide
  Target: PCSK9; (-) strand; PAM type: NRG; PAM sequence: AAG
gcaggaggatgaaaagggga

SEQ ID NO: 7791 - DNA, 20 bp, Artificial Sequence
  Description of Artificial Sequence: Synthetic oligonucleotide
  Target: PCSK9; (-) strand; PAM type: NRG; PAM sequence: GGG
ccaggcaggaggatgaaaag

SEQ ID NO: 7792 - DNA, 20 bp, Artificial Sequence
  Description of Artificial Sequence: Synthetic oligonucleotide
  Target: PCSK9; (-) strand; PAM type: NRG; PAM sequence: GGG
accaggcaggaggatgaaaa

SEQ ID NO: 7793 - DNA, 20 bp, Artificial Sequence
  Description of Artificial Sequence: Synthetic oligonucleotide
  Target: PCSK9; (-) strand; PAM type: NRG; PAM sequence: AGG
taccaggcaggaggatgaaa

SEQ ID NO: 7794 - DNA, 20 bp, Artificial Sequence
  Description of Artificial Sequence: Synthetic oligonucleotide
  Target: PCSK9; (-) strand; PAM type: NRG; PAM sequence: AAG
gtaccaggcaggaggatgaa

SEQ ID NO: 7795 - DNA, 20 bp, Artificial Sequence
  Description of Artificial Sequence: Synthetic oligonucleotide
  Target: PCSK9; (-) strand; PAM type: NRG; PAM sequence: AGG
cctattgtgtaccaggcagg

SEQ ID NO: 7796 - DNA, 20 bp, Artificial Sequence
  Description of Artificial Sequence: Synthetic oligonucleotide
  Target: PCSK9; (-) strand; PAM type: NRG; PAM sequence: GAG
acctattgtgtaccaggcag

SEQ ID NO: 7797 - DNA, 20 bp, Artificial Sequence
  Description of Artificial Sequence: Synthetic oligonucleotide
  Target: PCSK9; (-) strand; PAM type: NRG; PAM sequence: AGG
acacctattgtgtaccaggc

SEQ ID NO: 7798 - DNA, 20 bp, Artificial Sequence
  Description of Artificial Sequence: Synthetic oligonucleotide
  Target: PCSK9; (-) strand; PAM type: NRG; PAM sequence: CAG
aacacctattgtgtaccagg

SEQ ID NO: 7799 - DNA, 20 bp, Artificial Sequence
  Description of Artificial Sequence: Synthetic oligonucleotide
  Target: PCSK9; (-) strand; PAM type: NRG; PAM sequence: AGG
gtaaacacctattgtgtacc

SEQ ID NO: 7800 - DNA, 20 bp, Artificial Sequence
  Description of Artificial Sequence: Synthetic oligonucleotide
  Target: PCSK9; (-) strand; PAM type: NRG; PAM sequence: CAG
agtaaacacctattgtgtac

SEQ ID NO: 7801 - DNA, 20 bp, Artificial Sequence
  Description of Artificial Sequence: Synthetic oligonucleotide
  Target: PCSK9; (-) strand; PAM type: NRG; PAM sequence: CAG
aaatcaactggacaagcatc

SEQ ID NO: 7802 - DNA, 20 bp, Artificial Sequence
  Description of Artificial Sequence: Synthetic oligonucleotide
  Target: PCSK9; (-) strand; PAM type: NRG; PAM sequence: AAG
gttcaagaaatcaactggac

SEQ ID NO: 7803 - DNA, 20 bp, Artificial Sequence
  Description of Artificial Sequence: Synthetic oligonucleotide
  Target: PCSK9; (-) strand; PAM type: NRG; PAM sequence: TGG
accatgttcaagaaatcaac

SEQ ID NO: 7804 - DNA, 20 bp, Artificial Sequence
  Description of Artificial Sequence: Synthetic oligonucleotide
  Target: PCSK9; (-) strand; PAM type: NRG; PAM sequence: AAG
tccttttacacaccatgttc

SEQ ID NO: 7805 - DNA, 20 bp, Artificial Sequence
  Description of Artificial Sequence: Synthetic oligonucleotide
  Target: PCSK9; (-) strand; PAM type: NRG; PAM sequence: AAG
tccagaagattcaatttgca

SEQ ID NO: 7806 - DNA, 20 bp, Artificial Sequence
  Description of Artificial Sequence: Synthetic oligonucleotide
  Target: PCSK9; (-) strand; PAM type: NRG; PAM sequence: AAG
gcacaagctcagctttccag

SEQ ID NO: 7807 - DNA, 20 bp, Artificial Sequence
  Description of Artificial Sequence: Synthetic oligonucleotide
  Target: PCSK9; (-) strand; PAM type: NRG; PAM sequence: CAG
taggcacaagctcagctttc

SEQ ID NO: 7808 - DNA, 20 bp, Artificial Sequence
  Description of Artificial Sequence: Synthetic oligonucleotide
  Target: PCSK9; (-) strand; PAM type: NRG; PAM sequence: CAG
ttctatggtaggcacaagct

SEQ ID NO: 7809 - DNA, 20 bp, Artificial Sequence
  Description of Artificial Sequence: Synthetic oligonucleotide
  Target: PCSK9; (-) strand; PAM type: NRG; PAM sequence: AAG
cagaattctatggtaggcac

SEQ ID NO: 7810 - DNA, 20 bp, Artificial Sequence
  Description of Artificial Sequence: Synthetic oligonucleotide
  Target: PCSK9; (-) strand; PAM type: NRG; PAM sequence: AGG
tacattcagaattctatggt

SEQ ID NO: 7811 - DNA, 20 bp, Artificial Sequence
  Description of Artificial Sequence: Synthetic oligonucleotide
  Target: PCSK9; (-) strand; PAM type: NRG; PAM sequence: TAG
gtacattcagaattctatgg

SEQ ID NO: 7812 - DNA, 20 bp, Artificial Sequence
  Description of Artificial Sequence: Synthetic oligonucleotide
  Target: PCSK9; (-) strand; PAM type: NRG; PAM sequence: TGG
taggtacattcagaattcta

SEQ ID NO: 7813 - DNA, 20 bp, Artificial Sequence
  Description of Artificial Sequence: Synthetic oligonucleotide
  Target: PCSK9; (-) strand; PAM type: NRG; PAM sequence: CAG
agacgtcatataggtacatt

SEQ ID NO: 7814 - DNA, 20 bp, Artificial Sequence
  Description of Artificial Sequence: Synthetic oligonucleotide
  Target: PCSK9; (-) strand; PAM type: NRG; PAM sequence: AGG
agtttgcaaagacgtcatat

SEQ ID NO: 7815 - DNA, 20 bp, Artificial Sequence
  Description of Artificial Sequence: Synthetic oligonucleotide
  Target: PCSK9; (-) strand; PAM type: NRG; PAM sequence: TAG
aagtttgcaaagacgtcata

SEQ ID NO: 7816 - DNA, 20 bp, Artificial Sequence
  Description of Artificial Sequence: Synthetic oligonucleotide
  Target: PCSK9; (-) strand; PAM type: NRG; PAM sequence: AAG
attcaggttttaagtttgca

SEQ ID NO: 7817 - DNA, 20 bp, Artificial Sequence
  Description of Artificial Sequence: Synthetic oligonucleotide
  Target: PCSK9; (-) strand; PAM type: NRG; PAM sequence: AAG
actacaaagattcaggtttt

SEQ ID NO: 7818 - DNA, 20 bp, Artificial Sequence
  Description of Artificial Sequence: Synthetic oligonucleotide
  Target: PCSK9; (-) strand; PAM type: NRG; PAM sequence: AGG
gatttatactacaaagattc

SEQ ID NO: 7819 - DNA, 20 bp, Artificial Sequence
  Description of Artificial Sequence: Synthetic oligonucleotide
  Target: PCSK9; (-) strand; PAM type: NRG; PAM sequence: CAG
ggatttatactacaaagatt

SEQ ID NO: 7820 - DNA, 20 bp, Artificial Sequence
  Description of Artificial Sequence: Synthetic oligonucleotide
  Target: PCSK9; (-) strand; PAM type: NRG; PAM sequence: AAG
ttcaagggatttatactaca

SEQ ID NO: 7821 - DNA, 20 bp, Artificial Sequence
  Description of Artificial Sequence: Synthetic oligonucleotide
  Target: PCSK9; (-) strand; PAM type: NRG; PAM sequence: GGG
ccagcctacatgcatttcaa

SEQ ID NO: 7822 - DNA, 20 bp, Artificial Sequence
  Description of Artificial Sequence: Synthetic oligonucleotide
  Target: PCSK9; (-) strand; PAM type: NRG; PAM sequence: AGG
tccagcctacatgcatttca

SEQ ID NO: 7823 - DNA, 20 bp, Artificial Sequence
  Description of Artificial Sequence: Synthetic oligonucleotide
  Target: PCSK9; (-) strand; PAM type: NRG; PAM sequence: AAG
gtccagcctacatgcatttc

SEQ ID NO: 7824 - DNA, 20 bp, Artificial Sequence
  Description of Artificial Sequence: Synthetic oligonucleotide
  Target: PCSK9; (-) strand; PAM type: NRG; PAM sequence: CAG
gattgcttgcttttgatgtc

SEQ ID NO: 7825 - DNA, 20 bp, Artificial Sequence
  Description of Artificial Sequence: Synthetic oligonucleotide
  Target: PCSK9; (-) strand; PAM type: NRG; PAM sequence: GAG
ccaactagctgctccttgaa

SEQ ID NO: 7826 - DNA, 20 bp, Artificial Sequence
  Description of Artificial Sequence: Synthetic oligonucleotide
  Target: PCSK9; (-) strand; PAM type: NRG; PAM sequence: AAG
taccaactagctgctccttg

SEQ ID NO: 7827 - DNA, 20 bp, Artificial Sequence
  Description of Artificial Sequence: Synthetic oligonucleotide
  Target: PCSK9; (-) strand; PAM type: NRG; PAM sequence: TAG
tgcacactgaccttaccaac

SEQ ID NO: 7828 - DNA, 20 bp, Artificial Sequence
  Description of Artificial Sequence: Synthetic oligonucleotide
  Target: PCSK9; (-) strand; PAM type: NRG; PAM sequence: CGG
aacttagcctggaccccctc

SEQ ID NO: 7829 - DNA, 20 bp, Artificial Sequence
  Description of Artificial Sequence: Synthetic oligonucleotide
  Target: PCSK9; (-) strand; PAM type: NRG; PAM sequence: TGG
gcagccttctaaacttagcc

SEQ ID NO: 7830 - DNA, 20 bp, Artificial Sequence
  Description of Artificial Sequence: Synthetic oligonucleotide
  Target: PCSK9; (-) strand; PAM type: NRG; PAM sequence: TAG
acctggcagccttctaaact

SEQ ID NO: 7831 - DNA, 20 bp, Artificial Sequence
  Description of Artificial Sequence: Synthetic oligonucleotide
  Target: PCSK9; (-) strand; PAM type: NRG; PAM sequence: CAG
ttccactggccttaacctgg

SEQ ID NO: 7832 - DNA, 20 bp, Artificial Sequence
  Description of Artificial Sequence: Synthetic oligonucleotide
  Target: PCSK9; (-) strand; PAM type: NRG; PAM sequence: TGG
tctttccactggccttaacc

SEQ ID NO: 7833 - DNA, 20 bp, Artificial Sequence
  Description of Artificial Sequence: Synthetic oligonucleotide
  Target: PCSK9; (-) strand; PAM type: NRG; PAM sequence: TGG
gcccaccgaattctttccac

SEQ ID NO: 7834 - DNA, 20 bp, Artificial Sequence
  Description of Artificial Sequence: Synthetic oligonucleotide
  Target: PCSK9; (-) strand; PAM type: NRG; PAM sequence: TGG
cttctgaatcaatcctactg

SEQ ID NO: 7835 - DNA, 20 bp, Artificial Sequence
  Description of Artificial Sequence: Synthetic oligonucleotide
  Target: PCSK9; (-) strand; PAM type: NRG; PAM sequence: GAG
cttgtctcctgctgaccagt

SEQ ID NO: 7836 - DNA, 20 bp, Artificial Sequence
  Description of Artificial Sequence: Synthetic oligonucleotide
  Target: PCSK9; (-) strand; PAM type: NRG; PAM sequence: CAG
ccaccttgtctcctgctgac

SEQ ID NO: 7837 - DNA, 20 bp, Artificial Sequence
  Description of Artificial Sequence: Synthetic oligonucleotide
  Target: PCSK9; (-) strand; PAM type: NRG; PAM sequence: GGG
ccaccttttcagtgtttcct

SEQ ID NO: 7838 - DNA, 20 bp, Artificial Sequence
  Description of Artificial Sequence: Synthetic oligonucleotide
  Target: PCSK9; (-) strand; PAM type: NRG; PAM sequence: TGG
cccaccttttcagtgtttcc

SEQ ID NO: 7839 - DNA, 20 bp, Artificial Sequence
  Description of Artificial Sequence: Synthetic oligonucleotide
  Target: PCSK9; (-) strand; PAM type: NRG; PAM sequence: CAG
ttctgccgggcccacctttt

SEQ ID NO: 7840 - DNA, 20 bp, Artificial Sequence
  Description of Artificial Sequence: Synthetic oligonucleotide
  Target: PCSK9; (-) strand; PAM type: NRG; PAM sequence: GGG
gccagactccaagttctgcc

SEQ ID NO: 7841 - DNA, 20 bp, Artificial Sequence
  Description of Artificial Sequence: Synthetic oligonucleotide
  Target: PCSK9; (-) strand; PAM type: NRG; PAM sequence: CGG
tgccagactccaagttctgc

SEQ ID NO: 7842 - DNA, 20 bp, Artificial Sequence
  Description of Artificial Sequence: Synthetic oligonucleotide
  Target: PCSK9; (-) strand; PAM type: NRG; PAM sequence: AAG
tgcgtgggatgccagactcc

SEQ ID NO: 7843 - DNA, 20 bp, Artificial Sequence
  Description of Artificial Sequence: Synthetic oligonucleotide
  Target: PCSK9; (-) strand; PAM type: NRG; PAM sequence: CAG
tctcaccctgcgtgggatgc

SEQ ID NO: 7844 - DNA, 20 bp, Artificial Sequence
  Description of Artificial Sequence: Synthetic oligonucleotide
  Target: PCSK9; (-) strand; PAM type: NRG; PAM sequence: GGG
tcccgcctctcaccctgcgt

SEQ ID NO: 7845 - DNA, 20 bp, Artificial Sequence
  Description of Artificial Sequence: Synthetic oligonucleotide
  Target: PCSK9; (-) strand; PAM type: NRG; PAM sequence: TGG
ctcccgcctctcaccctgcg

SEQ ID NO: 7846 - DNA, 20 bp, Artificial Sequence
  Description of Artificial Sequence: Synthetic oligonucleotide
  Target: PCSK9; (-) strand; PAM type: NRG; PAM sequence: GGG
aaggcaggccggcgccctag

SEQ ID NO: 7847 - DNA, 20 bp, Artificial Sequence
  Description of Artificial Sequence: Synthetic oligonucleotide
  Target: PCSK9; (-) strand; PAM type: NRG; PAM sequence: GGG
gaaggcaggccggcgcccta

SEQ ID NO: 7848 - DNA, 20 bp, Artificial Sequence
  Description of Artificial Sequence: Synthetic oligonucleotide
  Target: PCSK9; (-) strand; PAM type: NRG; PAM sequence: AGG
ggaaggcaggccggcgccct

SEQ ID NO: 7849 - DNA, 20 bp, Artificial Sequence
  Description of Artificial Sequence: Synthetic oligonucleotide
  Target: PCSK9; (-) strand; PAM type: NRG; PAM sequence: TAG
tggaaggcaggccggcgccc

SEQ ID NO: 7850 - DNA, 20 bp, Artificial Sequence
  Description of Artificial Sequence: Synthetic oligonucleotide
  Target: PCSK9; (-) strand; PAM type: NRG; PAM sequence: CGG
aactgggctggaaggcaggc

SEQ ID NO: 7851 - DNA, 20 bp, Artificial Sequence
  Description of Artificial Sequence: Synthetic oligonucleotide
  Target: PCSK9; (-) strand; PAM type: NRG; PAM sequence: AGG
tcctaactgggctggaaggc

SEQ ID NO: 7852 - DNA, 20 bp, Artificial Sequence
  Description of Artificial Sequence: Synthetic oligonucleotide
  Target: PCSK9; (-) strand; PAM type: NRG; PAM sequence: CAG
atcctaactgggctggaagg

SEQ ID NO: 7853 - DNA, 20 bp, Artificial Sequence
  Description of Artificial Sequence: Synthetic oligonucleotide
  Target: PCSK9; (-) strand; PAM type: NRG; PAM sequence: AGG
caaatcctaactgggctgga

SEQ ID NO: 7854 - DNA, 20 bp, Artificial Sequence
  Description of Artificial Sequence: Synthetic oligonucleotide
  Target: PCSK9; (-) strand; PAM type: NRG; PAM sequence: AAG
ccaaatcctaactgggctgg

SEQ ID NO: 7855 - DNA, 20 bp, Artificial Sequence
  Description of Artificial Sequence: Synthetic oligonucleotide
  Target: PCSK9; (-) strand; PAM type: NRG; PAM sequence: TGG
ctcccaaatcctaactgggc

SEQ ID NO: 7856 - DNA, 20 bp, Artificial Sequence
  Description of Artificial Sequence: Synthetic oligonucleotide
  Target: PCSK9; (-) strand; PAM type: NRG; PAM sequence: GGG
aaaactcccaaatcctaact

SEQ ID NO: 7857 - DNA, 20 bp, Artificial Sequence
  Description of Artificial Sequence: Synthetic oligonucleotide
  Target: PCSK9; (-) strand; PAM type: NRG; PAM sequence: TGG
aaaaactcccaaatcctaac

SEQ ID NO: 7858 - DNA, 20 bp, Artificial Sequence
  Description of Artificial Sequence: Synthetic oligonucleotide
  Target: PCSK9; (-) strand; PAM type: NRG; PAM sequence: AAG
gtcagattacgcgcagaggg

SEQ ID NO: 7859 - DNA, 20 bp, Artificial Sequence
  Description of Artificial Sequence: Synthetic oligonucleotide
  Target: PCSK9; (-) strand; PAM type: NRG; PAM sequence: GGG
agcgtcagattacgcgcaga

SEQ ID NO: 7860 - DNA, 20 bp, Artificial Sequence
  Description of Artificial Sequence: Synthetic oligonucleotide
  Target: PCSK9; (-) strand; PAM type: NRG; PAM sequence: AGG
cagcgtcagattacgcgcag

SEQ ID NO: 7861 - DNA, 20 bp, Artificial Sequence
  Description of Artificial Sequence: Synthetic oligonucleotide
  Target: PCSK9; (-) strand; PAM type: NRG; PAM sequence: GAG
acagcgtcagattacgcgca

SEQ ID NO: 7862 - DNA, 20 bp, Artificial Sequence
  Description of Artificial Sequence: Synthetic oligonucleotide
  Target: PCSK9; (-) strand; PAM type: NRG; PAM sequence: CAG
aaacagcgtcagattacgcg

SEQ ID NO: 7863 - DNA, 20 bp, Artificial Sequence
  Description of Artificial Sequence: Synthetic oligonucleotide
  Target: PCSK9; (-) strand; PAM type: NRG; PAM sequence: CAG
tcgccctccccaaacagcgt

SEQ ID NO: 7864 - DNA, 20 bp, Artificial Sequence
  Description of Artificial Sequence: Synthetic oligonucleotide
  Target: PCSK9; (-) strand; PAM type: NRG; PAM sequence: CAG
tcggcctcgccctccccaaa

SEQ ID NO: 7865 - DNA, 20 bp, Artificial Sequence
  Description of Artificial Sequence: Synthetic oligonucleotide
  Target: PCSK9; (-) strand; PAM type: NRG; PAM sequence: CGG
cggactggaggatcaggttt

SEQ ID NO: 7866 - DNA, 20 bp, Artificial Sequence
  Description of Artificial Sequence: Synthetic oligonucleotide
  Target: PCSK9; (-) strand; PAM type: NRG; PAM sequence: AGG
aacccccggactggaggatc

SEQ ID NO: 7867 - DNA, 20 bp, Artificial Sequence
  Description of Artificial Sequence: Synthetic oligonucleotide
  Target: PCSK9; (-) strand; PAM type: NRG; PAM sequence: CAG
gaacccccggactggaggat

SEQ ID NO: 7868 - DNA, 20 bp, Artificial Sequence
  Description of Artificial Sequence: Synthetic oligonucleotide
  Target: PCSK9; (-) strand; PAM type: NRG; PAM sequence: AGG
taacggaacccccggactgg

SEQ ID NO: 7869 - DNA, 20 bp, Artificial Sequence
  Description of Artificial Sequence: Synthetic oligonucleotide
  Target: PCSK9; (-) strand; PAM type: NRG; PAM sequence: GAG
ttaacggaacccccggactg

SEQ ID NO: 7870 - DNA, 20 bp, Artificial Sequence
  Description of Artificial Sequence: Synthetic oligonucleotide
  Target: PCSK9; (-) strand; PAM type: NRG; PAM sequence: TGG
cattaacggaacccccggac

SEQ ID NO: 7871 - DNA, 20 bp, Artificial Sequence
  Description of Artificial Sequence: Synthetic oligonucleotide
  Target: PCSK9; (-) strand; PAM type: NRG; PAM sequence: CGG
ttaaacattaacggaacccc

SEQ ID NO: 7872 - DNA, 20 bp, Artificial Sequence
  Description of Artificial Sequence: Synthetic oligonucleotide
  Target: PCSK9; (-) strand; PAM type: NRG; PAM sequence: CGG
cctatctgattaaacattaa

SEQ ID NO: 7873 - DNA, 20 bp, Artificial Sequence
  Description of Artificial Sequence: Synthetic oligonucleotide
  Target: PCSK9; (-) strand; PAM type: NRG; PAM sequence: CGG
tcacgccaccagagccccat

SEQ ID NO: 7874 - DNA, 20 bp, Artificial Sequence
  Description of Artificial Sequence: Synthetic oligonucleotide
  Target: PCSK9; (-) strand; PAM type: NRG; PAM sequence: GAG
gcgcgcagatcacgccacca

SEQ ID NO: 7875 - DNA, 20 bp, Artificial Sequence
  Description of Artificial Sequence: Synthetic oligonucleotide
  Target: PCSK9; (-) strand; PAM type: NRG; PAM sequence: CAG
gggcgcgcagatcacgccac

SEQ ID NO: 7876 - DNA, 20 bp, Artificial Sequence
  Description of Artificial Sequence: Synthetic oligonucleotide
  Target: PCSK9; (-) strand; PAM type: NRG; PAM sequence: CAG
tgcttgacgcctggggcgcg

SEQ ID NO: 7877 - DNA, 20 bp, Artificial Sequence
  Description of Artificial Sequence: Synthetic oligonucleotide
  Target: PCSK9; (-) strand; PAM type: NRG; PAM sequence: GGG
gtgtgggtgcttgacgcctg

SEQ ID NO: 7878 - DNA, 20 bp, Artificial Sequence
  Description of Artificial Sequence: Synthetic oligonucleotide
  Target: PCSK9; (-) strand; PAM type: NRG; PAM sequence: GGG
ggtgtgggtgcttgacgcct

SEQ ID NO: 7879 - DNA, 20 bp, Artificial Sequence
  Description of Artificial Sequence: Synthetic oligonucleotide
  Target: PCSK9; (-) strand; PAM type: NRG; PAM sequence: TGG
gggtgtgggtgcttgacgcc

SEQ ID NO: 7880 - DNA, 20 bp, Artificial Sequence
  Description of Artificial Sequence: Synthetic oligonucleotide
  Target: PCSK9; (-) strand; PAM type: NRG; PAM sequence: GGG
gcggaaaccttctagggtgt

SEQ ID NO: 7881 - DNA, 20 bp, Artificial Sequence
  Description of Artificial Sequence: Synthetic oligonucleotide
  Target: PCSK9; (-) strand; PAM type: NRG; PAM sequence: TGG
tgcggaaaccttctagggtg

SEQ ID NO: 7882 - DNA, 20 bp, Artificial Sequence
  Description of Artificial Sequence: Synthetic oligonucleotide
  Target: PCSK9; (-) strand; PAM type: NRG; PAM sequence: GGG
gtcgctgcggaaaccttcta

SEQ ID NO: 7883 - DNA, 20 bp, Artificial Sequence
  Description of Artificial Sequence: Synthetic oligonucleotide
  Target: PCSK9; (-) strand; PAM type: NRG; PAM sequence: AGG
cgtcgctgcggaaaccttct

SEQ ID NO: 7884 - DNA, 20 bp, Artificial Sequence
  Description of Artificial Sequence: Synthetic oligonucleotide
  Target: PCSK9; (-) strand; PAM type: NRG; PAM sequence: TAG
acgtcgctgcggaaaccttc

SEQ ID NO: 7885 - DNA, 20 bp, Artificial Sequence
  Description of Artificial Sequence: Synthetic oligonucleotide
  Target: PCSK9; (-) strand; PAM type: NRG; PAM sequence: CGG
tgagcgcctcgacgtcgctg

SEQ ID NO: 7886 - DNA, 20 bp, Artificial Sequence
  Description of Artificial Sequence: Synthetic oligonucleotide
  Target: PCSK9; (-) strand; PAM type: NRG; PAM sequence: GAG
cggcgcccgcctgcaaccat

SEQ ID NO: 7887 - DNA, 20 bp, Artificial Sequence
  Description of Artificial Sequence: Synthetic oligonucleotide
  Target: PCSK9; (-) strand; PAM type: NRG; PAM sequence: CGG
tcagaccctgaactgaacgg

SEQ ID NO: 7888 - DNA, 20 bp, Artificial Sequence
  Description of Artificial Sequence: Synthetic oligonucleotide
  Target: PCSK9; (-) strand; PAM type: NRG; PAM sequence: CGG
ggctcagaccctgaactgaa

SEQ ID NO: 7889 - DNA, 20 bp, Artificial Sequence
  Description of Artificial Sequence: Synthetic oligonucleotide
  Target: PCSK9; (-) strand; PAM type: NRG; PAM sequence: CAG
ctggctcactcctccaggct

SEQ ID NO: 7890 - DNA, 20 bp, Artificial Sequence
  Description of Artificial Sequence: Synthetic oligonucleotide
  Target: PCSK9; (-) strand; PAM type: NRG; PAM sequence: AGG
actgcctggctcactcctcc

SEQ ID NO: 7891 - DNA, 20 bp, Artificial Sequence
  Description of Artificial Sequence: Synthetic oligonucleotide
  Target: PCSK9; (-) strand; PAM type: NRG; PAM sequence: CAG
cactgcctggctcactcctc

SEQ ID NO: 7892 - DNA, 20 bp, Artificial Sequence
  Description of Artificial Sequence: Synthetic oligonucleotide
  Target: PCSK9; (-) strand; PAM type: NRG; PAM sequence: TGG
cccgagccagtctcactgcc

SEQ ID NO: 7893 - DNA, 20 bp, Artificial Sequence
  Description of Artificial Sequence: Synthetic oligonucleotide
  Target: PCSK9; (-) strand; PAM type: NRG; PAM sequence: CAG
gcgtcccggcccgcccgagc

SEQ ID NO: 7894 - DNA, 20 bp, Artificial Sequence
  Description of Artificial Sequence: Synthetic oligonucleotide
  Target: PCSK9; (-) strand; PAM type: NRG; PAM sequence: GAG
cgacgcgtcccggcccgccc

SEQ ID NO: 7895 - DNA, 20 bp, Artificial Sequence
  Description of Artificial Sequence: Synthetic oligonucleotide
  Target: PCSK9; (-) strand; PAM type: NRG; PAM sequence: CGG
gctgctgcaacgacgcgtcc

SEQ ID NO: 7896 - DNA, 20 bp, Artificial Sequence
  Description of Artificial Sequence: Synthetic oligonucleotide
  Target: PCSK9; (-) strand; PAM type: NRG; PAM sequence: GAG
gaatcctggctgggagctgg

SEQ ID NO: 7897 - DNA, 20 bp, Artificial Sequence
  Description of Artificial Sequence: Synthetic oligonucleotide
  Target: PCSK9; (-) strand; PAM type: NRG; PAM sequence: GGG
cggaatcctggctgggagct

SEQ ID NO: 7898 - DNA, 20 bp, Artificial Sequence
  Description of Artificial Sequence: Synthetic oligonucleotide
  Target: PCSK9; (-) strand; PAM type: NRG; PAM sequence: TGG
gcggaatcctggctgggagc

SEQ ID NO: 7899 - DNA, 20 bp, Artificial Sequence
  Description of Artificial Sequence: Synthetic oligonucleotide
  Target: PCSK9; (-) strand; PAM type: NRG; PAM sequence: GAG
gcgcgcggaatcctggctgg

SEQ ID NO: 7900 - DNA, 20 bp, Artificial Sequence
  Description of Artificial Sequence: Synthetic oligonucleotide
  Target: PCSK9; (-) strand; PAM type: NRG; PAM sequence: GGG
gggcgcgcggaatcctggct

SEQ ID NO: 7901 - DNA, 20 bp, Artificial Sequence
  Description of Artificial Sequence: Synthetic oligonucleotide
  Target: PCSK9; (-) strand; PAM type: NRG; PAM sequence: TGG
ggggcgcgcggaatcctggc

SEQ ID NO: 7902 - DNA, 20 bp, Artificial Sequence
  Description of Artificial Sequence: Synthetic oligonucleotide
  Target: PCSK9; (-) strand; PAM type: NRG; PAM sequence: TGG
tgaaggggcgcgcggaatcc

SEQ ID NO: 7903 - DNA, 20 bp, Artificial Sequence
  Description of Artificial Sequence: Synthetic oligonucleotide
  Target: PCSK9; (-) strand; PAM type: NRG; PAM sequence: CGG
agggcgcgtgaaggggcgcg

SEQ ID NO: 7904 - DNA, 20 bp, Artificial Sequence
  Description of Artificial Sequence: Synthetic oligonucleotide
  Target: PCSK9; (-) strand; PAM type: NRG; PAM sequence: GGG
caggagcagggcgcgtgaag

SEQ ID NO: 7905 - DNA, 20 bp, Artificial Sequence
  Description of Artificial Sequence: Synthetic oligonucleotide
  Target: PCSK9; (-) strand; PAM type: NRG; PAM sequence: GGG
tcaggagcagggcgcgtgaa

SEQ ID NO: 7906 - DNA, 20 bp, Artificial Sequence
  Description of Artificial Sequence: Synthetic oligonucleotide
  Target: PCSK9; (-) strand; PAM type: NRG; PAM sequence: AGG
ttcaggagcagggcgcgtga

SEQ ID NO: 7907 - DNA, 20 bp, Artificial Sequence
  Description of Artificial Sequence: Synthetic oligonucleotide
  Target: PCSK9; (-) strand; PAM type: NRG; PAM sequence: AAG
gttcaggagcagggcgcgtg

SEQ ID NO: 7908 - DNA, 20 bp, Artificial Sequence
  Description of Artificial Sequence: Synthetic oligonucleotide
  Target: PCSK9; (-) strand; PAM type: NRG; PAM sequence: GGG
ggagctgaagttcaggagca

SEQ ID NO: 7909 - DNA, 20 bp, Artificial Sequence
  Description of Artificial Sequence: Synthetic oligonucleotide
  Target: PCSK9; (-) strand; PAM type: NRG; PAM sequence: AGG
aggagctgaagttcaggagc

SEQ ID NO: 7910 - DNA, 20 bp, Artificial Sequence
  Description of Artificial Sequence: Synthetic oligonucleotide
  Target: PCSK9; (-) strand; PAM type: NRG; PAM sequence: CAG
caggagctgaagttcaggag

SEQ ID NO: 7911 - DNA, 20 bp, Artificial Sequence
  Description of Artificial Sequence: Synthetic oligonucleotide
  Target: PCSK9; (-) strand; PAM type: NRG; PAM sequence: GAG
gtgcaggagctgaagttcag

SEQ ID NO: 7912 - DNA, 20 bp, Artificial Sequence
  Description of Artificial Sequence: Synthetic oligonucleotide
  Target: PCSK9; (-) strand; PAM type: NRG; PAM sequence: AGG
ctgtgcaggagctgaagttc

SEQ ID NO: 7913 - DNA, 20 bp, Artificial Sequence
  Description of Artificial Sequence: Synthetic oligonucleotide
  Target: PCSK9; (-) strand; PAM type: NRG; PAM sequence: CAG
actgtgcaggagctgaagtt

SEQ ID NO: 7914 - DNA, 20 bp, Artificial Sequence
  Description of Artificial Sequence: Synthetic oligonucleotide
  Target: PCSK9; (-) strand; PAM type: NRG; PAM sequence: AAG
ggaggactgtgcaggagctg

SEQ ID NO: 7915 - DNA, 20 bp, Artificial Sequence
  Description of Artificial Sequence: Synthetic oligonucleotide
  Target: PCSK9; (-) strand; PAM type: NRG; PAM sequence: GAG
cggtggggaggactgtgcag

SEQ ID NO: 7916 - DNA, 20 bp, Artificial Sequence
  Description of Artificial Sequence: Synthetic oligonucleotide
  Target: PCSK9; (-) strand; PAM type: NRG; PAM sequence: AGG
tgcggtggggaggactgtgc

SEQ ID NO: 7917 - DNA, 20 bp, Artificial Sequence
  Description of Artificial Sequence: Synthetic oligonucleotide
  Target: PCSK9; (-) strand; PAM type: NRG; PAM sequence: CAG
ttgcggtggggaggactgtg

SEQ ID NO: 7918 - DNA, 20 bp, Artificial Sequence
  Description of Artificial Sequence: Synthetic oligonucleotide
  Target: PCSK9; (-) strand; PAM type: NRG; PAM sequence: AGG
ccttgagccttgcggtgggg

SEQ ID NO: 7919 - DNA, 20 bp, Artificial Sequence
  Description of Artificial Sequence: Synthetic oligonucleotide
  Target: PCSK9; (-) strand; PAM type: NRG; PAM sequence: GAG
gccttgagccttgcggtggg

SEQ ID NO: 7920 - DNA, 20 bp, Artificial Sequence
  Description of Artificial Sequence: Synthetic oligonucleotide
  Target: PCSK9; (-) strand; PAM type: NRG; PAM sequence: GGG
gcgccttgagccttgcggtg

SEQ ID NO: 7921 - DNA, 20 bp, Artificial Sequence
  Description of Artificial Sequence: Synthetic oligonucleotide
  Target: PCSK9; (-) strand; PAM type: NRG; PAM sequence: GGG
ggcgccttgagccttgcggt

SEQ ID NO: 7922 - DNA, 20 bp, Artificial Sequence
  Description of Artificial Sequence: Synthetic oligonucleotide
  Target: PCSK9; (-) strand; PAM type: NRG; PAM sequence: TGG
cggcgccttgagccttgcgg

SEQ ID NO: 7923 - DNA, 20 bp, Artificial Sequence
  Description of Artificial Sequence: Synthetic oligonucleotide
  Target: PCSK9; (-) strand; PAM type: NRG; PAM sequence: CGG
cggcggcgccttgagccttg

SEQ ID NO: 7924 - DNA, 20 bp, Artificial Sequence
  Description of Artificial Sequence: Synthetic oligonucleotide
  Target: PCSK9; (-) strand; PAM type: NRG; PAM sequence: GAG
gtccacgccggcggcgcctt

SEQ ID NO: 7925 - DNA, 20 bp, Artificial Sequence
  Description of Artificial Sequence: Synthetic oligonucleotide
  Target: PCSK9; (-) strand; PAM type: NRG; PAM sequence: CGG
ccgtgcgcggtccacgccgg

SEQ ID NO: 7926 - DNA, 20 bp, Artificial Sequence
  Description of Artificial Sequence: Synthetic oligonucleotide
  Target: PCSK9; (-) strand; PAM type: NRG; PAM sequence: CGG
aggccgtgcgcggtccacgc

SEQ ID NO: 7927 - DNA, 20 bp, Artificial Sequence
  Description of Artificial Sequence: Synthetic oligonucleotide
  Target: PCSK9; (-) strand; PAM type: NRG; PAM sequence: CGG
ggagacctagaggccgtgcg

SEQ ID NO: 7928 - DNA, 20 bp, Artificial Sequence
  Description of Artificial Sequence: Synthetic oligonucleotide
  Target: PCSK9; (-) strand; PAM type: NRG; PAM sequence: AGG
gtcctggcgaggagacctag

SEQ ID NO: 7929 - DNA, 20 bp, Artificial Sequence
  Description of Artificial Sequence: Synthetic oligonucleotide
  Target: PCSK9; (-) strand; PAM type: NRG; PAM sequence: GAG
tgtcctggcgaggagaccta

SEQ ID NO: 7930 - DNA, 20 bp, Artificial Sequence
  Description of Artificial Sequence: Synthetic oligonucleotide
  Target: PCSK9; (-) strand; PAM type: NRG; PAM sequence: TAG
gctgtcctggcgaggagacc

SEQ ID NO: 7931 - DNA, 20 bp, Artificial Sequence
  Description of Artificial Sequence: Synthetic oligonucleotide
  Target: PCSK9; (-) strand; PAM type: NRG; PAM sequence: GAG
gaggttgctgtcctggcgag

SEQ ID NO: 7932 - DNA, 20 bp, Artificial Sequence
  Description of Artificial Sequence: Synthetic oligonucleotide
  Target: PCSK9; (-) strand; PAM type: NRG; PAM sequence: AGG
gagaggttgctgtcctggcg

SEQ ID NO: 7933 - DNA, 20 bp, Artificial Sequence
  Description of Artificial Sequence: Synthetic oligonucleotide
  Target: PCSK9; (-) strand; PAM type: NRG; PAM sequence: GAG
ggagaggttgctgtcctggc

SEQ ID NO: 7934 - DNA, 20 bp, Artificial Sequence
  Description of Artificial Sequence: Synthetic oligonucleotide
  Target: PCSK9; (-) strand; PAM type: NRG; PAM sequence: TGG
caggggagaggttgctgtcc

SEQ ID NO: 7935 - DNA, 20 bp, Artificial Sequence
  Description of Artificial Sequence: Synthetic oligonucleotide
  Target: PCSK9; (-) strand; PAM type: NRG; PAM sequence: AGG
gcccatgagggccaggggag

SEQ ID NO: 7936 - DNA, 20 bp, Artificial Sequence
  Description of Artificial Sequence: Synthetic oligonucleotide
  Target: PCSK9; (-) strand; PAM type: NRG; PAM sequence: GAG
tgcccatgagggccagggga

SEQ ID NO: 7937 - DNA, 20 bp, Artificial Sequence
  Description of Artificial Sequence: Synthetic oligonucleotide
  Target: PCSK9; (-) strand; PAM type: NRG; PAM sequence: GAG
ggtgcccatgagggccaggg

SEQ ID NO: 7938 - DNA, 20 bp, Artificial Sequence
  Description of Artificial Sequence: Synthetic oligonucleotide
  Target: PCSK9; (-) strand; PAM type: NRG; PAM sequence: GGG
acggtgcccatgagggccag

SEQ ID NO: 7939 - DNA, 20 bp, Artificial Sequence
  Description of Artificial Sequence: Synthetic oligonucleotide
  Target: PCSK9; (-) strand; PAM type: NRG; PAM sequence: GGG
gacggtgcccatgagggcca

SEQ ID NO: 7940 - DNA, 20 bp, Artificial Sequence
  Description of Artificial Sequence: Synthetic oligonucleotide
  Target: PCSK9; (-) strand; PAM type: NRG; PAM sequence: AGG
tgacggtgcccatgagggcc

SEQ ID NO: 7941 - DNA, 20 bp, Artificial Sequence
  Description of Artificial Sequence: Synthetic oligonucleotide
  Target: PCSK9; (-) strand; PAM type: NRG; PAM sequence: CAG
ctgacggtgcccatgagggc

SEQ ID NO: 7942 - DNA, 20 bp, Artificial Sequence
  Description of Artificial Sequence: Synthetic oligonucleotide
  Target: PCSK9; (-) strand; PAM type: NRG; PAM sequence: GGG
ggagctgacggtgcccatga

SEQ ID NO: 7943 - DNA, 20 bp, Artificial Sequence
  Description of Artificial Sequence: Synthetic oligonucleotide
  Target: PCSK9; (-) strand; PAM type: NRG; PAM sequence: AGG
tggagctgacggtgcccatg

SEQ ID NO: 7944 - DNA, 20 bp, Artificial Sequence
  Description of Artificial Sequence: Synthetic oligonucleotide
  Target: PCSK9; (-) strand; PAM type: NRG; PAM sequence: GAG
ctggagctgacggtgcccat

SEQ ID NO: 7945 - DNA, 20 bp, Artificial Sequence
  Description of Artificial Sequence: Synthetic oligonucleotide
  Target: PCSK9; (-) strand; PAM type: NRG; PAM sequence: CGG
ccaggaccgcctggagctga

SEQ ID NO: 7946 - DNA, 20 bp, Artificial Sequence
  Description of Artificial Sequence: Synthetic oligonucleotide
  Target: PCSK9; (-) strand; PAM type: NRG; PAM sequence: GAG
gcggccaccaggaccgcctg

SEQ ID NO: 7947 - DNA, 20 bp, Artificial Sequence
  Description of Artificial Sequence: Synthetic oligonucleotide
  Target: PCSK9; (-) strand; PAM type: NRG; PAM sequence: TGG
cagcggccaccaggaccgcc

SEQ ID NO: 7948 - DNA, 20 bp, Artificial Sequence
  Description of Artificial Sequence: Synthetic oligonucleotide
  Target: PCSK9; (-) strand; PAM type: NRG; PAM sequence: AGG
cagcagtggcagcggccacc

SEQ ID NO: 7949 - DNA, 20 bp, Artificial Sequence
  Description of Artificial Sequence: Synthetic oligonucleotide
  Target: PCSK9; (-) strand; PAM type: NRG; PAM sequence: CAG
gcagcagtggcagcggccac

SEQ ID NO: 7950 - DNA, 20 bp, Artificial Sequence
  Description of Artificial Sequence: Synthetic oligonucleotide
  Target: PCSK9; (-) strand; PAM type: NRG; PAM sequence: CGG
agcagcagcagcagtggcag

SEQ ID NO: 7951 - DNA, 20 bp, Artificial Sequence
  Description of Artificial Sequence: Synthetic oligonucleotide
  Target: PCSK9; (-) strand; PAM type: NRG; PAM sequence: CAG
agcagcagcagcagcagtgg

SEQ ID NO: 7952 - DNA, 20 bp, Artificial Sequence
  Description of Artificial Sequence: Synthetic oligonucleotide
  Target: PCSK9; (-) strand; PAM type: NRG; PAM sequence: TGG
agcagcagcagcagcagcag

SEQ ID NO: 7953 - DNA, 20 bp, Artificial Sequence
  Description of Artificial Sequence: Synthetic oligonucleotide
  Target: PCSK9; (-) strand; PAM type: NRG; PAM sequence: CAG
agcagcagcagcagcagcag

SEQ ID NO: 7954 - DNA, 20 bp, Artificial Sequence
  Description of Artificial Sequence: Synthetic oligonucleotide
  Target: PCSK9; (-) strand; PAM type: NRG; PAM sequence: CAG
aggagcagcagcagcagcag

SEQ ID NO: 7955 - DNA, 20 bp, Artificial Sequence
  Description of Artificial Sequence: Synthetic oligonucleotide
  Target: PCSK9; (-) strand; PAM type: NRG; PAM sequence: CAG
cccaggagcagcagcagcag

SEQ ID NO: 7956 - DNA, 20 bp, Artificial Sequence
  Description of Artificial Sequence: Synthetic oligonucleotide
  Target: PCSK9; (-) strand; PAM type: NRG; PAM sequence: CAG
ggacccaggagcagcagcag

SEQ ID NO: 7957 - DNA, 20 bp, Artificial Sequence
  Description of Artificial Sequence: Synthetic oligonucleotide
  Target: PCSK9; (-) strand; PAM type: NRG; PAM sequence: CAG
gcgggacccaggagcagcag

SEQ ID NO: 7958 - DNA, 20 bp, Artificial Sequence
  Description of Artificial Sequence: Synthetic oligonucleotide
  Target: PCSK9; (-) strand; PAM type: NRG; PAM sequence: CAG
cccgcgggacccaggagcag

SEQ ID NO: 7959 - DNA, 20 bp, Artificial Sequence
  Description of Artificial Sequence: Synthetic oligonucleotide
  Target: PCSK9; (-) strand; PAM type: NRG; PAM sequence: CAG
gcgcccgcgggacccaggag

SEQ ID NO: 7960 - DNA, 20 bp, Artificial Sequence
  Description of Artificial Sequence: Synthetic oligonucleotide
  Target: PCSK9; (-) strand; PAM type: NRG; PAM sequence: GAG
cgggcgcccgcgggacccag

SEQ ID NO: 7961 - DNA, 20 bp, Artificial Sequence
  Description of Artificial Sequence: Synthetic oligonucleotide
  Target: PCSK9; (-) strand; PAM type: NRG; PAM sequence: AGG
cacgggcgcccgcgggaccc

SEQ ID NO: 7962 - DNA, 20 bp, Artificial Sequence
  Description of Artificial Sequence: Synthetic oligonucleotide
  Target: PCSK9; (-) strand; PAM type: NRG; PAM sequence: CAG
gcacgggcgcccgcgggacc

SEQ ID NO: 7963 - DNA, 20 bp, Artificial Sequence
  Description of Artificial Sequence: Synthetic oligonucleotide
  Target: PCSK9; (-) strand; PAM type: NRG; PAM sequence: GGG
tcctgcgcacgggcgcccgc

SEQ ID NO: 7964 - DNA, 20 bp, Artificial Sequence
  Description of Artificial Sequence: Synthetic oligonucleotide
  Target: PCSK9; (-) strand; PAM type: NRG; PAM sequence: CGG
ctcctgcgcacgggcgcccg

SEQ ID NO: 7965 - DNA, 20 bp, Artificial Sequence
  Description of Artificial Sequence: Synthetic oligonucleotide
  Target: PCSK9; (-) strand; PAM type: NRG; PAM sequence: GGG
gtcctcgtcctcctgcgcac

SEQ ID NO: 7966 - DNA, 20 bp, Artificial Sequence
  Description of Artificial Sequence: Synthetic oligonucleotide
  Target: PCSK9; (-) strand; PAM type: NRG; PAM sequence: CGG
cgtcctcgtcctcctgcgca

SEQ ID NO: 7967 - DNA, 20 bp, Artificial Sequence
  Description of Artificial Sequence: Synthetic oligonucleotide
  Target: PCSK9; (-) strand; PAM type: NRG; PAM sequence: TAG
aggctagcaccagctcctcg

SEQ ID NO: 7968 - DNA, 20 bp, Artificial Sequence
  Description of Artificial Sequence: Synthetic oligonucleotide
  Target: PCSK9; (-) strand; PAM type: NRG; PAM sequence: CAG
tcggaacgcaaggctagcac

SEQ ID NO: 7969 - DNA, 20 bp, Artificial Sequence
  Description of Artificial Sequence: Synthetic oligonucleotide
  Target: PCSK9; (-) strand; PAM type: NRG; PAM sequence: TAG
tcctcctcggaacgcaaggc

SEQ ID NO: 7970 - DNA, 20 bp, Artificial Sequence
  Description of Artificial Sequence: Synthetic oligonucleotide
  Target: PCSK9; (-) strand; PAM type: NRG; PAM sequence: AGG
gccgtcctcctcggaacgca

SEQ ID NO: 7971 - DNA, 20 bp, Artificial Sequence
  Description of Artificial Sequence: Synthetic oligonucleotide
  Target: PCSK9; (-) strand; PAM type: NRG; PAM sequence: AAG
ggccgtcctcctcggaacgc

SEQ ID NO: 7972 - DNA, 20 bp, Artificial Sequence
  Description of Artificial Sequence: Synthetic oligonucleotide
  Target: PCSK9; (-) strand; PAM type: NRG; PAM sequence: CGG
ttcggccaggccgtcctcct

SEQ ID NO: 7973 - DNA, 20 bp, Artificial Sequence
  Description of Artificial Sequence: Synthetic oligonucleotide
  Target: PCSK9; (-) strand; PAM type: NRG; PAM sequence: AGG
cgtgctcgggtgcttcggcc

SEQ ID NO: 7974 - DNA, 20 bp, Artificial Sequence
  Description of Artificial Sequence: Synthetic oligonucleotide
  Target: PCSK9; (-) strand; PAM type: NRG; PAM sequence: CAG
ccgtgctcgggtgcttcggc

SEQ ID NO: 7975 - DNA, 20 bp, Artificial Sequence
  Description of Artificial Sequence: Synthetic oligonucleotide
  Target: PCSK9; (-) strand; PAM type: NRG; PAM sequence: CGG
ggttccgtgctcgggtgctt

SEQ ID NO: 7976 - DNA, 20 bp, Artificial Sequence
  Description of Artificial Sequence: Synthetic oligonucleotide
  Target: PCSK9; (-) strand; PAM type: NRG; PAM sequence: GGG
gtggctgtggttccgtgctc

SEQ ID NO: 7977 - DNA, 20 bp, Artificial Sequence
  Description of Artificial Sequence: Synthetic oligonucleotide
  Target: PCSK9; (-) strand; PAM type: NRG; PAM sequence: CGG
ggtggctgtggttccgtgct

SEQ ID NO: 7978 - DNA, 20 bp, Artificial Sequence
  Description of Artificial Sequence: Synthetic oligonucleotide
  Target: PCSK9; (-) strand; PAM type: NRG; PAM sequence: TGG
gcagcggtggaaggtggctg

SEQ ID NO: 7979 - DNA, 20 bp, Artificial Sequence
  Description of Artificial Sequence: Synthetic oligonucleotide
  Target: PCSK9; (-) strand; PAM type: NRG; PAM sequence: TGG
cttggcgcagcggtggaagg

SEQ ID NO: 7980 - DNA, 20 bp, Artificial Sequence
  Description of Artificial Sequence: Synthetic oligonucleotide
  Target: PCSK9; (-) strand; PAM type: NRG; PAM sequence: AGG
caccttggcgcagcggtgga

SEQ ID NO: 7981 - DNA, 20 bp, Artificial Sequence
  Description of Artificial Sequence: Synthetic oligonucleotide
  Target: PCSK9; (-) strand; PAM type: NRG; PAM sequence: AAG
gcaccttggcgcagcggtgg

SEQ ID NO: 7982 - DNA, 20 bp, Artificial Sequence
  Description of Artificial Sequence: Synthetic oligonucleotide
  Target: PCSK9; (-) strand; PAM type: NRG; PAM sequence: TGG
cccgcaccttggcgcagcgg

SEQ ID NO: 7983 - DNA, 20 bp, Artificial Sequence
  Description of Artificial Sequence: Synthetic oligonucleotide
  Target: PCSK9; (-) strand; PAM type: NRG; PAM sequence: CGG
acacccgcaccttggcgcag

SEQ ID NO: 7984 - DNA, 20 bp, Artificial Sequence
  Description of Artificial Sequence: Synthetic oligonucleotide
  Target: PCSK9; (-) strand; PAM type: NRG; PAM sequence: CAG
cctacacccgcaccttggcg

SEQ ID NO: 7985 - DNA, 20 bp, Artificial Sequence
  Description of Artificial Sequence: Synthetic oligonucleotide
  Target: PCSK9; (-) strand; PAM type: NRG; PAM sequence: TGG
ccatccctacacccgcacct

SEQ ID NO: 7986 - DNA, 20 bp, Artificial Sequence
  Description of Artificial Sequence: Synthetic oligonucleotide
  Target: PCSK9; (-) strand; PAM type: NRG; PAM sequence: CGG
tcccggctgcgggttcgccc

SEQ ID NO: 7987 - DNA, 20 bp, Artificial Sequence
  Description of Artificial Sequence: Synthetic oligonucleotide
  Target: PCSK9; (-) strand; PAM type: NRG; PAM sequence: GGG
caccgcaccgtcccggctgc

SEQ ID NO: 7988 - DNA, 20 bp, Artificial Sequence
  Description of Artificial Sequence: Synthetic oligonucleotide
  Target: PCSK9; (-) strand; PAM type: NRG; PAM sequence: CGG
gcaccgcaccgtcccggctg

SEQ ID NO: 7989 - DNA, 20 bp, Artificial Sequence
  Description of Artificial Sequence: Synthetic oligonucleotide
  Target: PCSK9; (-) strand; PAM type: NRG; PAM sequence: CGG
gaaacagcaccgcaccgtcc

SEQ ID NO: 7990 - DNA, 20 bp, Artificial Sequence
  Description of Artificial Sequence: Synthetic oligonucleotide
  Target: PCSK9; (-) strand; PAM type: NRG; PAM sequence: CAG
aactgaggcccgagaggaaa

SEQ ID NO: 7991 - DNA, 20 bp, Artificial Sequence
  Description of Artificial Sequence: Synthetic oligonucleotide
  Target: PCSK9; (-) strand; PAM type: NRG; PAM sequence: AGG
gggggaaactgaggcccgag

SEQ ID NO: 7992 - DNA, 20 bp, Artificial Sequence
  Description of Artificial Sequence: Synthetic oligonucleotide
  Target: PCSK9; (-) strand; PAM type: NRG; PAM sequence: GAG
ggggggaaactgaggcccga

SEQ ID NO: 7993 - DNA, 20 bp, Artificial Sequence
  Description of Artificial Sequence: Synthetic oligonucleotide
  Target: PCSK9; (-) strand; PAM type: NRG; PAM sequence: GAG
atggggggaaactgaggccc

SEQ ID NO: 7994 - DNA, 20 bp, Artificial Sequence
  Description of Artificial Sequence: Synthetic oligonucleotide
  Target: PCSK9; (-) strand; PAM type: NRG; PAM sequence: AGG
tcttacatggggggaaactg

SEQ ID NO: 7995 - DNA, 20 bp, Artificial Sequence
  Description of Artificial Sequence: Synthetic oligonucleotide
  Target: PCSK9; (-) strand; PAM type: NRG; PAM sequence: GAG
ctcttacatggggggaaact

SEQ ID NO: 7996 - DNA, 20 bp, Artificial Sequence
  Description of Artificial Sequence: Synthetic oligonucleotide
  Target: PCSK9; (-) strand; PAM type: NRG; PAM sequence: GGG
cacttcctctcttacatggg

SEQ ID NO: 7997 - DNA, 20 bp, Artificial Sequence
  Description of Artificial Sequence: Synthetic oligonucleotide
  Target: PCSK9; (-) strand; PAM type: NRG; PAM sequence: GGG
ccacttcctctcttacatgg

SEQ ID NO: 7998 - DNA, 20 bp, Artificial Sequence
  Description of Artificial Sequence: Synthetic oligonucleotide
  Target: PCSK9; (-) strand; PAM type: NRG; PAM sequence: GGG
tccacttcctctcttacatg

SEQ ID NO: 7999 - DNA, 20 bp, Artificial Sequence
  Description of Artificial Sequence: Synthetic oligonucleotide
  Target: PCSK9; (-) strand; PAM type: NRG; PAM sequence: GGG
ctccacttcctctcttacat

SEQ ID NO: 8000 - DNA, 20 bp, Artificial Sequence
  Description of Artificial Sequence: Synthetic oligonucleotide
  Target: PCSK9; (-) strand; PAM type: NRG; PAM sequence: TGG
actccacttcctctcttaca

SEQ ID NO: 8001 - DNA, 20 bp, Artificial Sequence
  Description of Artificial Sequence: Synthetic oligonucleotide
  Target: PCSK9; (-) strand; PAM type: NRG; PAM sequence: CGG
cgtgccaagcgaagagccct

SEQ ID NO: 8002 - DNA, 20 bp, Artificial Sequence
  Description of Artificial Sequence: Synthetic oligonucleotide
  Target: PCSK9; (-) strand; PAM type: NRG; PAM sequence: GAG
ccaagatcgtgccaagcgaa

SEQ ID NO: 8003 - DNA, 20 bp, Artificial Sequence
  Description of Artificial Sequence: Synthetic oligonucleotide
  Target: PCSK9; (-) strand; PAM type: NRG; PAM sequence: AAG
ccccaagatcgtgccaagcg

SEQ ID NO: 8004 - DNA, 20 bp, Artificial Sequence
  Description of Artificial Sequence: Synthetic oligonucleotide
  Target: PCSK9; (-) strand; PAM type: NRG; PAM sequence: AAG
gcagtccccaagatcgtgcc

SEQ ID NO: 8005 - DNA, 20 bp, Artificial Sequence
  Description of Artificial Sequence: Synthetic oligonucleotide
  Target: PCSK9; (-) strand; PAM type: NRG; PAM sequence: AAG
ccgccttgcctgcagtcccc

SEQ ID NO: 8006 - DNA, 20 bp, Artificial Sequence
  Description of Artificial Sequence: Synthetic oligonucleotide
  Target: PCSK9; (-) strand; PAM type: NRG; PAM sequence: CAG
ctcccccgccgccttgcctg

SEQ ID NO: 8007 - DNA, 20 bp, Artificial Sequence
  Description of Artificial Sequence: Synthetic oligonucleotide
  Target: PCSK9; (-) strand; PAM type: NRG; PAM sequence: CGG
ccagcaagtccccaaagagc

SEQ ID NO: 8008 - DNA, 20 bp, Artificial Sequence
  Description of Artificial Sequence: Synthetic oligonucleotide
  Target: PCSK9; (-) strand; PAM type: NRG; PAM sequence: GAG
cgccccagcaagtccccaaa

SEQ ID NO: 8009 - DNA, 20 bp, Artificial Sequence
  Description of Artificial Sequence: Synthetic oligonucleotide
  Target: PCSK9; (-) strand; PAM type: NRG; PAM sequence: AAG
cacgccccagcaagtcccca

SEQ ID NO: 8010 - DNA, 20 bp, Artificial Sequence
  Description of Artificial Sequence: Synthetic oligonucleotide
  Target: PCSK9; (-) strand; PAM type: NRG; PAM sequence: AAG
gcgcagccgcacgccccagc

SEQ ID NO: 8011 - DNA, 20 bp, Artificial Sequence
  Description of Artificial Sequence: Synthetic oligonucleotide
  Target: PCSK9; (-) strand; PAM type: NRG; PAM sequence: CAG
aatagcgcagccgcacgccc

SEQ ID NO: 8012 - DNA, 20 bp, Artificial Sequence
  Description of Artificial Sequence: Synthetic oligonucleotide
  Target: PCSK9; (-) strand; PAM type: NRG; PAM sequence: CAG
aaccttcccactgaatagcg

SEQ ID NO: 8013 - DNA, 20 bp, Artificial Sequence
  Description of Artificial Sequence: Synthetic oligonucleotide
  Target: PCSK9; (-) strand; PAM type: NRG; PAM sequence: TAG
ccgcgaaccttcccactgaa

SEQ ID NO: 8014 - DNA, 20 bp, Artificial Sequence
  Description of Artificial Sequence: Synthetic oligonucleotide
  Target: PCSK9; (-) strand; PAM type: NRG; PAM sequence: GGG
ctcgcccttcctcggcctcc

SEQ ID NO: 8015 - DNA, 20 bp, Artificial Sequence
  Description of Artificial Sequence: Synthetic oligonucleotide
  Target: PCSK9; (-) strand; PAM type: NRG; PAM sequence: CGG
gctcgcccttcctcggcctc

SEQ ID NO: 8016 - DNA, 20 bp, Artificial Sequence
  Description of Artificial Sequence: Synthetic oligonucleotide
  Target: PCSK9; (-) strand; PAM type: NRG; PAM sequence: CGG
gtgctctgctcgcccttcct

SEQ ID NO: 8017 - DNA, 20 bp, Artificial Sequence
  Description of Artificial Sequence: Synthetic oligonucleotide
  Target: PCSK9; (-) strand; PAM type: NRG; PAM sequence: CAG
atctgggcaggatatcctgg

SEQ ID NO: 8018 - DNA, 20 bp, Artificial Sequence
  Description of Artificial Sequence: Synthetic oligonucleotide
  Target: PCSK9; (-) strand; PAM type: NRG; PAM sequence: TGG
gaaatctgggcaggatatcc

SEQ ID NO: 8019 - DNA, 20 bp, Artificial Sequence
  Description of Artificial Sequence: Synthetic oligonucleotide
  Target: PCSK9; (-) strand; PAM type: NRG; PAM sequence: AGG
agaaactgggaaatctgggc

SEQ ID NO: 8020 - DNA, 20 bp, Artificial Sequence
  Description of Artificial Sequence: Synthetic oligonucleotide
  Target: PCSK9; (-) strand; PAM type: NRG; PAM sequence: CAG
cagaaactgggaaatctggg

SEQ ID NO: 8021 - DNA, 20 bp, Artificial Sequence
  Description of Artificial Sequence: Synthetic oligonucleotide
  Target: PCSK9; (-) strand; PAM type: NRG; PAM sequence: GGG
aggcagaaactgggaaatct

SEQ ID NO: 8022 - DNA, 20 bp, Artificial Sequence
  Description of Artificial Sequence: Synthetic oligonucleotide
  Target: PCSK9; (-) strand; PAM type: NRG; PAM sequence: TGG
gaggcagaaactgggaaatc

SEQ ID NO: 8023 - DNA, 20 bp, Artificial Sequence
  Description of Artificial Sequence: Synthetic oligonucleotide
  Target: PCSK9; (-) strand; PAM type: NRG; PAM sequence: GGG
gccgcggcgaggcagaaact

SEQ ID NO: 8024 - DNA, 20 bp, Artificial Sequence
  Description of Artificial Sequence: Synthetic oligonucleotide
  Target: PCSK9; (-) strand; PAM type: NRG; PAM sequence: TGG
tgccgcggcgaggcagaaac

SEQ ID NO: 8025 - DNA, 20 bp, Artificial Sequence
  Description of Artificial Sequence: Synthetic oligonucleotide
  Target: PCSK9; (-) strand; PAM type: NRG; PAM sequence: CAG
ccacctgtgccgcggcgagg

SEQ ID NO: 8026 - DNA, 20 bp, Artificial Sequence
  Description of Artificial Sequence: Synthetic oligonucleotide
  Target: PCSK9; (-) strand; PAM type: NRG; PAM sequence: AGG
cacccacctgtgccgcggcg

SEQ ID NO: 8027 - DNA, 20 bp, Artificial Sequence
  Description of Artificial Sequence: Synthetic oligonucleotide
  Target: PCSK9; (-) strand; PAM type: NRG; PAM sequence: GAG
tcacccacctgtgccgcggc

SEQ ID NO: 8028 - DNA, 20 bp, Artificial Sequence
  Description of Artificial Sequence: Synthetic oligonucleotide
  Target: PCSK9; (-) strand; PAM type: NRG; PAM sequence: CGG
tccttcacccacctgtgccg

SEQ ID NO: 8029 - DNA, 20 bp, Artificial Sequence
  Description of Artificial Sequence: Synthetic oligonucleotide
  Target: PCSK9; (-) strand; PAM type: NRG; PAM sequence: AGG
tgcagttcccagtacgttcc

SEQ ID NO: 8030 - DNA, 20 bp, Artificial Sequence
  Description of Artificial Sequence: Synthetic oligonucleotide
  Target: PCSK9; (-) strand; PAM type: NRG; PAM sequence: CAG
gtgcagttcccagtacgttc

SEQ ID NO: 8031 - DNA, 20 bp, Artificial Sequence
  Description of Artificial Sequence: Synthetic oligonucleotide
  Target: PCSK9; (-) strand; PAM type: NRG; PAM sequence: CAG
tctgtgcctggtgcagttcc

SEQ ID NO: 8032 - DNA, 20 bp, Artificial Sequence
  Description of Artificial Sequence: Synthetic oligonucleotide
  Target: PCSK9; (-) strand; PAM type: NRG; PAM sequence: CAG
cgctttctctgtgcctggtg

SEQ ID NO: 8033 - DNA, 20 bp, Artificial Sequence
  Description of Artificial Sequence: Synthetic oligonucleotide
  Target: PCSK9; (-) strand; PAM type: NRG; PAM sequence: TGG
aagcccgctttctctgtgcc

SEQ ID NO: 8034 - DNA, 20 bp, Artificial Sequence
  Description of Artificial Sequence: Synthetic oligonucleotide
  Target: PCSK9; (-) strand; PAM type: NRG; PAM sequence: AAG
tcggaacccactataatggc

SEQ ID NO: 8035 - DNA, 20 bp, Artificial Sequence
  Description of Artificial Sequence: Synthetic oligonucleotide
  Target: PCSK9; (-) strand; PAM type: NRG; PAM sequence: TGG
caaatcggaacccactataa

SEQ ID NO: 8036 - DNA, 20 bp, Artificial Sequence
  Description of Artificial Sequence: Synthetic oligonucleotide
  Target: PCSK9; (-) strand; PAM type: NRG; PAM sequence: CGG
ccatgttttccaaaccaaat

SEQ ID NO: 8037 - DNA, 20 bp, Artificial Sequence
  Description of Artificial Sequence: Synthetic oligonucleotide
  Target: PCSK9; (-) strand; PAM type: NRG; PAM sequence: AGG
tcgggtagggccttctctcc

SEQ ID NO: 8038 - DNA, 20 bp, Artificial Sequence
  Description of Artificial Sequence: Synthetic oligonucleotide
  Target: PCSK9; (-) strand; PAM type: NRG; PAM sequence: CAG
ctcgggtagggccttctctc

SEQ ID NO: 8039 - DNA, 20 bp, Artificial Sequence
  Description of Artificial Sequence: Synthetic oligonucleotide
  Target: PCSK9; (-) strand; PAM type: NRG; PAM sequence: GGG
ccccgcccctgtctcgggta

SEQ ID NO: 8040 - DNA, 20 bp, Artificial Sequence
  Description of Artificial Sequence: Synthetic oligonucleotide
  Target: PCSK9; (-) strand; PAM type: NRG; PAM sequence: AGG
accccgcccctgtctcgggt

SEQ ID NO: 8041 - DNA, 20 bp, Artificial Sequence
  Description of Artificial Sequence: Synthetic oligonucleotide
  Target: PCSK9; (-) strand; PAM type: NRG; PAM sequence: TAG
caccccgcccctgtctcggg

SEQ ID NO: 8042 - DNA, 20 bp, Artificial Sequence
  Description of Artificial Sequence: Synthetic oligonucleotide
  Target: PCSK9; (-) strand; PAM type: NRG; PAM sequence: GGG
tcccaccccgcccctgtctc

SEQ ID NO: 8043 - DNA, 20 bp, Artificial Sequence
  Description of Artificial Sequence: Synthetic oligonucleotide
  Target: PCSK9; (-) strand; PAM type: NRG; PAM sequence: CGG
ttcccaccccgcccctgtct

SEQ ID NO: 8044 - DNA, 20 bp, Artificial Sequence
  Description of Artificial Sequence: Synthetic oligonucleotide
  Target: PCSK9; (-) strand; PAM type: NRG; PAM sequence: CAG
aagaaattgcctcgtgctcc

SEQ ID NO: 8045 - DNA, 20 bp, Artificial Sequence
  Description of Artificial Sequence: Synthetic oligonucleotide
  Target: PCSK9; (-) strand; PAM type: NRG; PAM sequence: AAG
agcatgagttctgtgtcata

SEQ ID NO: 8046 - DNA, 20 bp, Artificial Sequence
  Description of Artificial Sequence: Synthetic oligonucleotide
  Target: PCSK9; (-) strand; PAM type: NRG; PAM sequence: GAG
cagatggaatactagagcat

SEQ ID NO: 8047 - DNA, 20 bp, Artificial Sequence
  Description of Artificial Sequence: Synthetic oligonucleotide
  Target: PCSK9; (-) strand; PAM type: NRG; PAM sequence: GAG
ctgaaacagatggaatacta

SEQ ID NO: 8048 - DNA, 20 bp, Artificial Sequence
  Description of Artificial Sequence: Synthetic oligonucleotide
  Target: PCSK9; (-) strand; PAM type: NRG; PAM sequence: TAG
ggctgaaacagatggaatac

SEQ ID NO: 8049 - DNA, 20 bp, Artificial Sequence
  Description of Artificial Sequence: Synthetic oligonucleotide
  Target: PCSK9; (-) strand; PAM type: NRG; PAM sequence: TGG
ttttcttcggctgaaacaga

SEQ ID NO: 8050 - DNA, 20 bp, Artificial Sequence
  Description of Artificial Sequence: Synthetic oligonucleotide
  Target: PCSK9; (-) strand; PAM type: NRG; PAM sequence: CAG
gttcttttcttcggctgaaa

SEQ ID NO: 8051 - DNA, 20 bp, Artificial Sequence
  Description of Artificial Sequence: Synthetic oligonucleotide
  Target: PCSK9; (-) strand; PAM type: NRG; PAM sequence: CGG
cttcagctggttcttttctt

SEQ ID NO: 8052 - DNA, 20 bp, Artificial Sequence
  Description of Artificial Sequence: Synthetic oligonucleotide
  Target: PCSK9; (-) strand; PAM type: NRG; PAM sequence: TGG
ttctcccctgccccttcagc

SEQ ID NO: 8053 - DNA, 20 bp, Artificial Sequence
  Description of Artificial Sequence: Synthetic oligonucleotide
  Target: PCSK9; (-) strand; PAM type: NRG; PAM sequence: CAG
ccccttctcccctgcccctt

SEQ ID NO: 8054 - DNA, 20 bp, Artificial Sequence
  Description of Artificial Sequence: Synthetic oligonucleotide
  Target: PCSK9; (-) strand; PAM type: NRG; PAM sequence: GAG
aaaggacgccaatgggcctc

SEQ ID NO: 8055 - DNA, 20 bp, Artificial Sequence
  Description of Artificial Sequence: Synthetic oligonucleotide
  Target: PCSK9; (-) strand; PAM type: NRG; PAM sequence: GGG
gagtcctaaaggacgccaat

SEQ ID NO: 8056 - DNA, 20 bp, Artificial Sequence
  Description of Artificial Sequence: Synthetic oligonucleotide
  Target: PCSK9; (-) strand; PAM type: NRG; PAM sequence: TGG
tgagtcctaaaggacgccaa

SEQ ID NO: 8057 - DNA, 20 bp, Artificial Sequence
  Description of Artificial Sequence: Synthetic oligonucleotide
  Target: PCSK9; (-) strand; PAM type: NRG; PAM sequence: AGG
cttccctgcctgagtcctaa

SEQ ID NO: 8058 - DNA, 20 bp, Artificial Sequence
  Description of Artificial Sequence: Synthetic oligonucleotide
  Target: PCSK9; (-) strand; PAM type: NRG; PAM sequence: AAG
ccttccctgcctgagtccta

SEQ ID NO: 8059 - DNA, 20 bp, Artificial Sequence
  Description of Artificial Sequence: Synthetic oligonucleotide
  Target: PCSK9; (-) strand; PAM type: NRG; PAM sequence: GAG
ccaagggcccttccctgcct

SEQ ID NO: 8060 - DNA, 20 bp, Artificial Sequence
  Description of Artificial Sequence: Synthetic oligonucleotide
  Target: PCSK9; (-) strand; PAM type: NRG; PAM sequence: GGG
ctccggctccagagcaccaa

SEQ ID NO: 8061 - DNA, 20 bp, Artificial Sequence
  Description of Artificial Sequence: Synthetic oligonucleotide
  Target: PCSK9; (-) strand; PAM type: NRG; PAM sequence: AGG
cctccggctccagagcacca

SEQ ID NO: 8062 - DNA, 20 bp, Artificial Sequence
  Description of Artificial Sequence: Synthetic oligonucleotide
  Target: PCSK9; (-) strand; PAM type: NRG; PAM sequence: AAG
acctccggctccagagcacc

SEQ ID NO: 8063 - DNA, 20 bp, Artificial Sequence
  Description of Artificial Sequence: Synthetic oligonucleotide
  Target: PCSK9; (-) strand; PAM type: NRG; PAM sequence: GAG
gcgcaccacctccggctcca

SEQ ID NO: 8064 - DNA, 20 bp, Artificial Sequence
  Description of Artificial Sequence: Synthetic oligonucleotide
  Target: PCSK9; (-) strand; PAM type: NRG; PAM sequence: CAG
aggcgcaccacctccggctc

SEQ ID NO: 8065 - DNA, 20 bp, Artificial Sequence
  Description of Artificial Sequence: Synthetic oligonucleotide
  Target: PCSK9; (-) strand; PAM type: NRG; PAM sequence: CGG
agtaccaggcgcaccacctc

SEQ ID NO: 8066 - DNA, 20 bp, Artificial Sequence
  Description of Artificial Sequence: Synthetic oligonucleotide
  Target: PCSK9; (-) strand; PAM type: NRG; PAM sequence: AGG
agctccggggtcccagtacc

SEQ ID NO: 8067 - DNA, 20 bp, Artificial Sequence
  Description of Artificial Sequence: Synthetic oligonucleotide
  Target: PCSK9; (-) strand; PAM type: NRG; PAM sequence: CAG
cagctccggggtcccagtac

SEQ ID NO: 8068 - DNA, 20 bp, Artificial Sequence
  Description of Artificial Sequence: Synthetic oligonucleotide
  Target: PCSK9; (-) strand; PAM type: NRG; PAM sequence: CAG
cgggctcagctccggggtcc

SEQ ID NO: 8069 - DNA, 20 bp, Artificial Sequence
  Description of Artificial Sequence: Synthetic oligonucleotide
  Target: PCSK9; (-) strand; PAM type: NRG; PAM sequence: GGG
aggcgccgggctcagctccg

SEQ ID NO: 8070 - DNA, 20 bp, Artificial Sequence
  Description of Artificial Sequence: Synthetic oligonucleotide
  Target: PCSK9; (-) strand; PAM type: NRG; PAM sequence: GGG
gaggcgccgggctcagctcc

SEQ ID NO: 8071 - DNA, 20 bp, Artificial Sequence
  Description of Artificial Sequence: Synthetic oligonucleotide
  Target: PCSK9; (-) strand; PAM type: NRG; PAM sequence: CGG
tgaggcgccgggctcagctc

SEQ ID NO: 8072 - DNA, 20 bp, Artificial Sequence
  Description of Artificial Sequence: Synthetic oligonucleotide
  Target: PCSK9; (-) strand; PAM type: NRG; PAM sequence: CAG
gtgggctgaggcgccgggct

SEQ ID NO: 8073 - DNA, 20 bp, Artificial Sequence
  Description of Artificial Sequence: Synthetic oligonucleotide
  Target: PCSK9; (-) strand; PAM type: NRG; PAM sequence: GGG
gccaggtgggctgaggcgcc

SEQ ID NO: 8074 - DNA, 20 bp, Artificial Sequence
  Description of Artificial Sequence: Synthetic oligonucleotide
  Target: PCSK9; (-) strand; PAM type: NRG; PAM sequence: CGG
agccaggtgggctgaggcgc

SEQ ID NO: 8075 - DNA, 20 bp, Artificial Sequence
  Description of Artificial Sequence: Synthetic oligonucleotide
  Target: PCSK9; (-) strand; PAM type: NRG; PAM sequence: AGG
gcagacagccaggtgggctg

SEQ ID NO: 8076 - DNA, 20 bp, Artificial Sequence
  Description of Artificial Sequence: Synthetic oligonucleotide
  Target: PCSK9; (-) strand; PAM type: NRG; PAM sequence: GAG
ggcagacagccaggtgggct

SEQ ID NO: 8077 - DNA, 20 bp, Artificial Sequence
  Description of Artificial Sequence: Synthetic oligonucleotide
  Target: PCSK9; (-) strand; PAM type: NRG; PAM sequence: GGG
cggtcggcagacagccaggt

SEQ ID NO: 8078 - DNA, 20 bp, Artificial Sequence
  Description of Artificial Sequence: Synthetic oligonucleotide
  Target: PCSK9; (-) strand; PAM type: NRG; PAM sequence: TGG
acggtcggcagacagccagg

SEQ ID NO: 8079 - DNA, 20 bp, Artificial Sequence
  Description of Artificial Sequence: Synthetic oligonucleotide
  Target: PCSK9; (-) strand; PAM type: NRG; PAM sequence: AGG
cacacggtcggcagacagcc

SEQ ID NO: 8080 - DNA, 20 bp, Artificial Sequence
  Description of Artificial Sequence: Synthetic oligonucleotide
  Target: PCSK9; (-) strand; PAM type: NRG; PAM sequence: CAG
gcacacggtcggcagacagc

SEQ ID NO: 8081 - DNA, 20 bp, Artificial Sequence
  Description of Artificial Sequence: Synthetic oligonucleotide
  Target: PCSK9; (-) strand; PAM type: NRG; PAM sequence: CAG
ccccgcacacggtcggcaga

SEQ ID NO: 8082 - DNA, 20 bp, Artificial Sequence
  Description of Artificial Sequence: Synthetic oligonucleotide
  Target: PCSK9; (-) strand; PAM type: NRG; PAM sequence: CAG
ctcgccccgcacacggtcgg

SEQ ID NO: 8083 - DNA, 20 bp, Artificial Sequence
  Description of Artificial Sequence: Synthetic oligonucleotide
  Target: PCSK9; (-) strand; PAM type: NRG; PAM sequence: CGG
aaactcgccccgcacacggt

SEQ ID NO: 8084 - DNA, 20 bp, Artificial Sequence
  Description of Artificial Sequence: Synthetic oligonucleotide
  Target: PCSK9; (-) strand; PAM type: NRG; PAM sequence: CGG
gagcaaactcgccccgcaca

SEQ ID NO: 8085 - DNA, 20 bp, Artificial Sequence
  Description of Artificial Sequence: Synthetic oligonucleotide
  Target: PCSK9; (-) strand; PAM type: NRG; PAM sequence: GAG
cagaagctggcagagttgtt

SEQ ID NO: 8086 - DNA, 20 bp, Artificial Sequence
  Description of Artificial Sequence: Synthetic oligonucleotide
  Target: PCSK9; (-) strand; PAM type: NRG; PAM sequence: GAG
ctgagggccagaagctggca

SEQ ID NO: 8087 - DNA, 20 bp, Artificial Sequence
  Description of Artificial Sequence: Synthetic oligonucleotide
  Target: PCSK9; (-) strand; PAM type: NRG; PAM sequence: CAG
gcctgagggccagaagctgg

SEQ ID NO: 8088 - DNA, 20 bp, Artificial Sequence
  Description of Artificial Sequence: Synthetic oligonucleotide
  Target: PCSK9; (-) strand; PAM type: NRG; PAM sequence: TGG
acagcctgagggccagaagc

SEQ ID NO: 8089 - DNA, 20 bp, Artificial Sequence
  Description of Artificial Sequence: Synthetic oligonucleotide
  Target: PCSK9; (-) strand; PAM type: NRG; PAM sequence: AAG
tcccacagcctgagggccag

SEQ ID NO: 8090 - DNA, 20 bp, Artificial Sequence
  Description of Artificial Sequence: Synthetic oligonucleotide
  Target: PCSK9; (-) strand; PAM type: NRG; PAM sequence: CAG
gcttcccacagcctgagggc

SEQ ID NO: 8091 - DNA, 20 bp, Artificial Sequence
  Description of Artificial Sequence: Synthetic oligonucleotide
  Target: PCSK9; (-) strand; PAM type: NRG; PAM sequence: GGG
agaagcttcccacagcctga

SEQ ID NO: 8092 - DNA, 20 bp, Artificial Sequence
  Description of Artificial Sequence: Synthetic oligonucleotide
  Target: PCSK9; (-) strand; PAM type: NRG; PAM sequence: AGG
aagaagcttcccacagcctg

SEQ ID NO: 8093 - DNA, 20 bp, Artificial Sequence
  Description of Artificial Sequence: Synthetic oligonucleotide
  Target: PCSK9; (-) strand; PAM type: NRG; PAM sequence: GAG
gaagaagcttcccacagcct

SEQ ID NO: 8094 - DNA, 20 bp, Artificial Sequence
  Description of Artificial Sequence: Synthetic oligonucleotide
  Target: PCSK9; (-) strand; PAM type: NRG; PAM sequence: CAG
ccccgggaagaagcttccca

SEQ ID NO: 8095 - DNA, 20 bp, Artificial Sequence
  Description of Artificial Sequence: Synthetic oligonucleotide
  Target: PCSK9; (-) strand; PAM type: NRG; PAM sequence: AAG
agtggtctcgccccgggaag

SEQ ID NO: 8096 - DNA, 20 bp, Artificial Sequence
  Description of Artificial Sequence: Synthetic oligonucleotide
  Target: PCSK9; (-) strand; PAM type: NRG; PAM sequence: AAG
gctagtggtctcgccccggg

SEQ ID NO: 8097 - DNA, 20 bp, Artificial Sequence
  Description of Artificial Sequence: Synthetic oligonucleotide
  Target: PCSK9; (-) strand; PAM type: NRG; PAM sequence: GGG
aaagctagtggtctcgcccc

SEQ ID NO: 8098 - DNA, 20 bp, Artificial Sequence
  Description of Artificial Sequence: Synthetic oligonucleotide
  Target: PCSK9; (-) strand; PAM type: NRG; PAM sequence: CGG
aaaagctagtggtctcgccc

SEQ ID NO: 8099 - DNA, 20 bp, Artificial Sequence
  Description of Artificial Sequence: Synthetic oligonucleotide
  Target: PCSK9; (-) strand; PAM type: NRG; PAM sequence: TGG
taatacttagaaaaagctag

SEQ ID NO: 8100 - DNA, 20 bp, Artificial Sequence
  Description of Artificial Sequence: Synthetic oligonucleotide
  Target: PCSK9; (-) strand; PAM type: NRG; PAM sequence: TAG
tggtaatacttagaaaaagc

SEQ ID NO: 8101 - DNA, 20 bp, Artificial Sequence
  Description of Artificial Sequence: Synthetic oligonucleotide
  Target: PCSK9; (-) strand; PAM type: NRG; PAM sequence: AAG
gggctggtaatacttagaaa

SEQ ID NO: 8102 - DNA, 20 bp, Artificial Sequence
  Description of Artificial Sequence: Synthetic oligonucleotide
  Target: PCSK9; (-) strand; PAM type: NRG; PAM sequence: TAG
agtcctgggctggtaatact

SEQ ID NO: 8103 - DNA, 20 bp, Artificial Sequence
  Description of Artificial Sequence: Synthetic oligonucleotide
  Target: PCSK9; (-) strand; PAM type: NRG; PAM sequence: TGG
acctcagccaagtcctgggc

SEQ ID NO: 8104 - DNA, 20 bp, Artificial Sequence
  Description of Artificial Sequence: Synthetic oligonucleotide
  Target: PCSK9; (-) strand; PAM type: NRG; PAM sequence: GGG
cagaacctcagccaagtcct

SEQ ID NO: 8105 - DNA, 20 bp, Artificial Sequence
  Description of Artificial Sequence: Synthetic oligonucleotide
  Target: PCSK9; (-) strand; PAM type: NRG; PAM sequence: TGG
acagaacctcagccaagtcc

SEQ ID NO: 8106 - DNA, 20 bp, Artificial Sequence
  Description of Artificial Sequence: Synthetic oligonucleotide
  Target: PCSK9; (-) strand; PAM type: NRG; PAM sequence: AAG
ggggacacagaacctcagcc

SEQ ID NO: 8107 - DNA, 20 bp, Artificial Sequence
  Description of Artificial Sequence: Synthetic oligonucleotide
  Target: PCSK9; (-) strand; PAM type: NRG; PAM sequence: CAG
agctgggggacacagaacct

SEQ ID NO: 8108 - DNA, 20 bp, Artificial Sequence
  Description of Artificial Sequence: Synthetic oligonucleotide
  Target: PCSK9; (-) strand; PAM type: NRG; PAM sequence: CAG
tgactccaagctgggggaca

SEQ ID NO: 8109 - DNA, 20 bp, Artificial Sequence
  Description of Artificial Sequence: Synthetic oligonucleotide
  Target: PCSK9; (-) strand; PAM type: NRG; PAM sequence: GGG
cacatctgactccaagctgg

SEQ ID NO: 8110 - DNA, 20 bp, Artificial Sequence
  Description of Artificial Sequence: Synthetic oligonucleotide
  Target: PCSK9; (-) strand; PAM type: NRG; PAM sequence: GGG
ccacatctgactccaagctg

SEQ ID NO: 8111 - DNA, 20 bp, Artificial Sequence
  Description of Artificial Sequence: Synthetic oligonucleotide
  Target: PCSK9; (-) strand; PAM type: NRG; PAM sequence: GGG
cccacatctgactccaagct

SEQ ID NO: 8112 - DNA, 20 bp, Artificial Sequence
  Description of Artificial Sequence: Synthetic oligonucleotide
  Target: PCSK9; (-) strand; PAM type: NRG; PAM sequence: TGG
ccccacatctgactccaagc

SEQ ID NO: 8113 - DNA, 20 bp, Artificial Sequence
  Description of Artificial Sequence: Synthetic oligonucleotide
  Target: PCSK9; (-) strand; PAM type: NRG; PAM sequence: AAG
tcaaccccacatctgactcc

SEQ ID NO: 8114 - DNA, 20 bp, Artificial Sequence
  Description of Artificial Sequence: Synthetic oligonucleotide
  Target: PCSK9; (-) strand; PAM type: NRG; PAM sequence: AAG
acagctagtgagaggaagcc

SEQ ID NO: 8115 - DNA, 20 bp, Artificial Sequence
  Description of Artificial Sequence: Synthetic oligonucleotide
  Target: PCSK9; (-) strand; PAM type: NRG; PAM sequence: AAG
gcaccacagctagtgagagg

SEQ ID NO: 8116 - DNA, 20 bp, Artificial Sequence
  Description of Artificial Sequence: Synthetic oligonucleotide
  Target: PCSK9; (-) strand; PAM type: NRG; PAM sequence: AGG
caagcaccacagctagtgag

SEQ ID NO: 8117 - DNA, 20 bp, Artificial Sequence
  Description of Artificial Sequence: Synthetic oligonucleotide
  Target: PCSK9; (-) strand; PAM type: NRG; PAM sequence: GAG
tcaagcaccacagctagtga

SEQ ID NO: 8118 - DNA, 20 bp, Artificial Sequence
  Description of Artificial Sequence: Synthetic oligonucleotide
  Target: PCSK9; (-) strand; PAM type: NRG; PAM sequence: GAG
tgtcaagcaccacagctagt

SEQ ID NO: 8119 - DNA, 20 bp, Artificial Sequence
  Description of Artificial Sequence: Synthetic oligonucleotide
  Target: PCSK9; (-) strand; PAM type: NRG; PAM sequence: TAG
gacttgtcaagcaccacagc

SEQ ID NO: 8120 - DNA, 20 bp, Artificial Sequence
  Description of Artificial Sequence: Synthetic oligonucleotide
  Target: PCSK9; (-) strand; PAM type: NRG; PAM sequence: CAG
aagtgacttgtcaagcacca

SEQ ID NO: 8121 - DNA, 20 bp, Artificial Sequence
  Description of Artificial Sequence: Synthetic oligonucleotide
  Target: PCSK9; (-) strand; PAM type: NRG; PAM sequence: AAG
tcaaggataagtgacttgtc

SEQ ID NO: 8122 - DNA, 20 bp, Artificial Sequence
  Description of Artificial Sequence: Synthetic oligonucleotide
  Target: PCSK9; (-) strand; PAM type: NRG; PAM sequence: AAG
ggcaatggaggctcaaggat

SEQ ID NO: 8123 - DNA, 20 bp, Artificial Sequence
  Description of Artificial Sequence: Synthetic oligonucleotide
  Target: PCSK9; (-) strand; PAM type: NRG; PAM sequence: AGG
gattaggcaatggaggctca

SEQ ID NO: 8124 - DNA, 20 bp, Artificial Sequence
  Description of Artificial Sequence: Synthetic oligonucleotide
  Target: PCSK9; (-) strand; PAM type: NRG; PAM sequence: AAG
agattaggcaatggaggctc

SEQ ID NO: 8125 - DNA, 20 bp, Artificial Sequence
  Description of Artificial Sequence: Synthetic oligonucleotide
  Target: PCSK9; (-) strand; PAM type: NRG; PAM sequence: AGG
ttttaaagattaggcaatgg

SEQ ID NO: 8126 - DNA, 20 bp, Artificial Sequence
  Description of Artificial Sequence: Synthetic oligonucleotide
  Target: PCSK9; (-) strand; PAM type: NRG; PAM sequence: GAG
cttttaaagattaggcaatg

SEQ ID NO: 8127 - DNA, 20 bp, Artificial Sequence
  Description of Artificial Sequence: Synthetic oligonucleotide
  Target: PCSK9; (-) strand; PAM type: NRG; PAM sequence: TGG
cccttttaaagattaggcaa

SEQ ID NO: 8128 - DNA, 20 bp, Artificial Sequence
  Description of Artificial Sequence: Synthetic oligonucleotide
  Target: PCSK9; (-) strand; PAM type: NRG; PAM sequence: AGG
tcacctcccttttaaagatt

SEQ ID NO: 8129 - DNA, 20 bp, Artificial Sequence
  Description of Artificial Sequence: Synthetic oligonucleotide
  Target: PCSK9; (-) strand; PAM type: NRG; PAM sequence: TAG
gtcacctcccttttaaagat

SEQ ID NO: 8130 - DNA, 20 bp, Artificial Sequence
  Description of Artificial Sequence: Synthetic oligonucleotide
  Target: PCSK9; (-) strand; PAM type: NRG; PAM sequence: AAG
cgattgtcacctccctttta

SEQ ID NO: 8131 - DNA, 20 bp, Artificial Sequence
  Description of Artificial Sequence: Synthetic oligonucleotide
  Target: PCSK9; (-) strand; PAM type: NRG; PAM sequence: GGG
tctgctgccactgagccgta

SEQ ID NO: 8132 - DNA, 20 bp, Artificial Sequence
  Description of Artificial Sequence: Synthetic oligonucleotide
  Target: PCSK9; (-) strand; PAM type: NRG; PAM sequence: AGG
atctgctgccactgagccgt

SEQ ID NO: 8133 - DNA, 20 bp, Artificial Sequence
  Description of Artificial Sequence: Synthetic oligonucleotide
  Target: PCSK9; (-) strand; PAM type: NRG; PAM sequence: TAG
catctgctgccactgagccg

SEQ ID NO: 8134 - DNA, 20 bp, Artificial Sequence
  Description of Artificial Sequence: Synthetic oligonucleotide
  Target: PCSK9; (-) strand; PAM type: NRG; PAM sequence: GAG
tctccccatctgctgccact

SEQ ID NO: 8135 - DNA, 20 bp, Artificial Sequence
  Description of Artificial Sequence: Synthetic oligonucleotide
  Target: PCSK9; (-) strand; PAM type: NRG; PAM sequence: CAG
gtaagttcactcatggtcaa

SEQ ID NO: 8136 - DNA, 20 bp, Artificial Sequence
  Description of Artificial Sequence: Synthetic oligonucleotide
  Target: PCSK9; (-) strand; PAM type: NRG; PAM sequence: TGG
ttgcattgtaagttcactca

SEQ ID NO: 8137 - DNA, 20 bp, Artificial Sequence
  Description of Artificial Sequence: Synthetic oligonucleotide
  Target: PCSK9; (-) strand; PAM type: NRG; PAM sequence: AAG
ccccccggggcttgcattgt

SEQ ID NO: 8138 - DNA, 20 bp, Artificial Sequence
  Description of Artificial Sequence: Synthetic oligonucleotide
  Target: PCSK9; (-) strand; PAM type: NRG; PAM sequence: GGG
aactgcaagtgatccccccg

SEQ ID NO: 8139 - DNA, 20 bp, Artificial Sequence
  Description of Artificial Sequence: Synthetic oligonucleotide
  Target: PCSK9; (-) strand; PAM type: NRG; PAM sequence: GGG
aaactgcaagtgatcccccc

SEQ ID NO: 8140 - DNA, 20 bp, Artificial Sequence
  Description of Artificial Sequence: Synthetic oligonucleotide
  Target: PCSK9; (-) strand; PAM type: NRG; PAM sequence: CGG
aaaactgcaagtgatccccc

SEQ ID NO: 8141 - DNA, 20 bp, Artificial Sequence
  Description of Artificial Sequence: Synthetic oligonucleotide
  Target: PCSK9; (-) strand; PAM type: NRG; PAM sequence: AAG
gcagacagggacaaaactgc

SEQ ID NO: 8142 - DNA, 20 bp, Artificial Sequence
  Description of Artificial Sequence: Synthetic oligonucleotide
  Target: PCSK9; (-) strand; PAM type: NRG; PAM sequence: GGG
aacaggtcacactgcagaca

SEQ ID NO: 8143 - DNA, 20 bp, Artificial Sequence
  Description of Artificial Sequence: Synthetic oligonucleotide
  Target: PCSK9; (-) strand; PAM type: NRG; PAM sequence: AGG
caacaggtcacactgcagac

SEQ ID NO: 8144 - DNA, 20 bp, Artificial Sequence
  Description of Artificial Sequence: Synthetic oligonucleotide
  Target: PCSK9; (-) strand; PAM type: NRG; PAM sequence: CAG
ccaacaggtcacactgcaga

SEQ ID NO: 8145 - DNA, 20 bp, Artificial Sequence
  Description of Artificial Sequence: Synthetic oligonucleotide
  Target: PCSK9; (-) strand; PAM type: NRG; PAM sequence: CAG
gtcaccaacaggtcacactg

SEQ ID NO: 8146 - DNA, 20 bp, Artificial Sequence
  Description of Artificial Sequence: Synthetic oligonucleotide
  Target: PCSK9; (-) strand; PAM type: NRG; PAM sequence: AGG
gcaaagacaatgtcaccaac

SEQ ID NO: 8147 - DNA, 20 bp, Artificial Sequence
  Description of Artificial Sequence: Synthetic oligonucleotide
  Target: PCSK9; (-) strand; PAM type: NRG; PAM sequence: CAG
agcaaagacaatgtcaccaa

SEQ ID NO: 8148 - DNA, 20 bp, Artificial Sequence
  Description of Artificial Sequence: Synthetic oligonucleotide
  Target: PCSK9; (-) strand; PAM type: NRG; PAM sequence: AAG
aggagctgtggtttggagca

SEQ ID NO: 8149 - DNA, 20 bp, Artificial Sequence
  Description of Artificial Sequence: Synthetic oligonucleotide
  Target: PCSK9; (-) strand; PAM type: NRG; PAM sequence: GAG
gccccaggagctgtggtttg

SEQ ID NO: 8150 - DNA, 20 bp, Artificial Sequence
  Description of Artificial Sequence: Synthetic oligonucleotide
  Target: PCSK9; (-) strand; PAM type: NRG; PAM sequence: TGG
ctgccccaggagctgtggtt

SEQ ID NO: 8151 - DNA, 20 bp, Artificial Sequence
  Description of Artificial Sequence: Synthetic oligonucleotide
  Target: PCSK9; (-) strand; PAM type: NRG; PAM sequence: TGG
cccctctgccccaggagctg

SEQ ID NO: 8152 - DNA, 20 bp, Artificial Sequence
  Description of Artificial Sequence: Synthetic oligonucleotide
  Target: PCSK9; (-) strand; PAM type: NRG; PAM sequence: GAG
aattttcccctctgccccag

SEQ ID NO: 8153 - DNA, 20 bp, Artificial Sequence
  Description of Artificial Sequence: Synthetic oligonucleotide
  Target: PCSK9; (-) strand; PAM type: NRG; PAM sequence: AGG
agaattttcccctctgcccc

SEQ ID NO: 8154 - DNA, 20 bp, Artificial Sequence
  Description of Artificial Sequence: Synthetic oligonucleotide
  Target: PCSK9; (-) strand; PAM type: NRG; PAM sequence: CAG
cagaattttcccctctgccc

SEQ ID NO: 8155 - DNA, 20 bp, Artificial Sequence
  Description of Artificial Sequence: Synthetic oligonucleotide
  Target: PCSK9; (-) strand; PAM type: NRG; PAM sequence: CAG
gggcaggcagctgtgagtgg

SEQ ID NO: 8156 - DNA, 20 bp, Artificial Sequence
  Description of Artificial Sequence: Synthetic oligonucleotide
  Target: PCSK9; (-) strand; PAM type: NRG; PAM sequence: TGG
cgtgggcaggcagctgtgag

SEQ ID NO: 8157 - DNA, 20 bp, Artificial Sequence
  Description of Artificial Sequence: Synthetic oligonucleotide
  Target: PCSK9; (-) strand; PAM type: NRG; PAM sequence: GAG
aagcgtgggcaggcagctgt

SEQ ID NO: 8158 - DNA, 20 bp, Artificial Sequence
  Description of Artificial Sequence: Synthetic oligonucleotide
  Target: PCSK9; (-) strand; PAM type: NRG; PAM sequence: CAG
cagacagaagcgtgggcagg

SEQ ID NO: 8159 - DNA, 20 bp, Artificial Sequence
  Description of Artificial Sequence: Synthetic oligonucleotide
  Target: PCSK9; (-) strand; PAM type: NRG; PAM sequence: AGG
actcagacagaagcgtgggc

SEQ ID NO: 8160 - DNA, 20 bp, Artificial Sequence
  Description of Artificial Sequence: Synthetic oligonucleotide
  Target: PCSK9; (-) strand; PAM type: NRG; PAM sequence: CAG
cactcagacagaagcgtggg

SEQ ID NO: 8161 - DNA, 20 bp, Artificial Sequence
  Description of Artificial Sequence: Synthetic oligonucleotide
  Target: PCSK9; (-) strand; PAM type: NRG; PAM sequence: GGG
gcacactcagacagaagcgt

SEQ ID NO: 8162 - DNA, 20 bp, Artificial Sequence
  Description of Artificial Sequence: Synthetic oligonucleotide
  Target: PCSK9; (-) strand; PAM type: NRG; PAM sequence: TGG
agcacactcagacagaagcg

SEQ ID NO: 8163 - DNA, 20 bp, Artificial Sequence
  Description of Artificial Sequence: Synthetic oligonucleotide
  Target: PCSK9; (-) strand; PAM type: NRG; PAM sequence: AAG
cacccagcacactcagacag

SEQ ID NO: 8164 - DNA, 20 bp, Artificial Sequence
  Description of Artificial Sequence: Synthetic oligonucleotide
  Target: PCSK9; (-) strand; PAM type: NRG; PAM sequence: CAG
tgccacccagcacactcaga

SEQ ID NO: 8165 - DNA, 20 bp, Artificial Sequence
  Description of Artificial Sequence: Synthetic oligonucleotide
  Target: PCSK9; (-) strand; PAM type: NRG; PAM sequence: CAG
atcctgccacccagcacact

SEQ ID NO: 8166 - DNA, 20 bp, Artificial Sequence
  Description of Artificial Sequence: Synthetic oligonucleotide
  Target: PCSK9; (-) strand; PAM type: NRG; PAM sequence: CAG
ggacttgccatcctgccacc

SEQ ID NO: 8167 - DNA, 20 bp, Artificial Sequence
  Description of Artificial Sequence: Synthetic oligonucleotide
  Target: PCSK9; (-) strand; PAM type: NRG; PAM sequence: AGG
gggctatactgagctgagta

SEQ ID NO: 8168 - DNA, 20 bp, Artificial Sequence
  Description of Artificial Sequence: Synthetic oligonucleotide
  Target: PCSK9; (-) strand; PAM type: NRG; PAM sequence: AAG
agggctatactgagctgagt

SEQ ID NO: 8169 - DNA, 20 bp, Artificial Sequence
  Description of Artificial Sequence: Synthetic oligonucleotide
  Target: PCSK9; (-) strand; PAM type: NRG; PAM sequence: GAG
gaagagggctatactgagct

SEQ ID NO: 8170 - DNA, 20 bp, Artificial Sequence
  Description of Artificial Sequence: Synthetic oligonucleotide
  Target: PCSK9; (-) strand; PAM type: NRG; PAM sequence: GAG
acaaggaagagggctatact

SEQ ID NO: 8171 - DNA, 20 bp, Artificial Sequence
  Description of Artificial Sequence: Synthetic oligonucleotide
  Target: PCSK9; (-) strand; PAM type: NRG; PAM sequence: GGG
ggctcagggaacaaggaaga

SEQ ID NO: 8172 - DNA, 20 bp, Artificial Sequence
  Description of Artificial Sequence: Synthetic oligonucleotide
  Target: PCSK9; (-) strand; PAM type: NRG; PAM sequence: AGG
aggctcagggaacaaggaag

SEQ ID NO: 8173 - DNA, 20 bp, Artificial Sequence
  Description of Artificial Sequence: Synthetic oligonucleotide
  Target: PCSK9; (-) strand; PAM type: NRG; PAM sequence: GAG
aaggctcagggaacaaggaa

SEQ ID NO: 8174 - DNA, 20 bp, Artificial Sequence
  Description of Artificial Sequence: Synthetic oligonucleotide
  Target: PCSK9; (-) strand; PAM type: NRG; PAM sequence: AAG
caaaggctcagggaacaagg

SEQ ID NO: 8175 - DNA, 20 bp, Artificial Sequence
  Description of Artificial Sequence: Synthetic oligonucleotide
  Target: PCSK9; (-) strand; PAM type: NRG; PAM sequence: AGG
agtcaaaggctcagggaaca

SEQ ID NO: 8176 - DNA, 20 bp, Artificial Sequence
  Description of Artificial Sequence: Synthetic oligonucleotide
  Target: PCSK9; (-) strand; PAM type: NRG; PAM sequence: AAG
aagtcaaaggctcagggaac

SEQ ID NO: 8177 - DNA, 20 bp, Artificial Sequence
  Description of Artificial Sequence: Synthetic oligonucleotide
  Target: PCSK9; (-) strand; PAM type: NRG; PAM sequence: GGG
tcgagaaagtcaaaggctca

SEQ ID NO: 8178 - DNA, 20 bp, Artificial Sequence
  Description of Artificial Sequence: Synthetic oligonucleotide
  Target: PCSK9; (-) strand; PAM type: NRG; PAM sequence: AGG
ctcgagaaagtcaaaggctc

SEQ ID NO: 8179 - DNA, 20 bp, Artificial Sequence
  Description of Artificial Sequence: Synthetic oligonucleotide
  Target: PCSK9; (-) strand; PAM type: NRG; PAM sequence: CAG
cctcgagaaagtcaaaggct

SEQ ID NO: 8180 - DNA, 20 bp, Artificial Sequence
  Description of Artificial Sequence: Synthetic oligonucleotide
  Target: PCSK9; (-) strand; PAM type: NRG; PAM sequence: AGG
acatccctcgagaaagtcaa

SEQ ID NO: 8181 - DNA, 20 bp, Artificial Sequence
  Description of Artificial Sequence: Synthetic oligonucleotide
  Target: PCSK9; (-) strand; PAM type: NRG; PAM sequence: AAG
aacatccctcgagaaagtca

SEQ ID NO: 8182 - DNA, 20 bp, Artificial Sequence
  Description of Artificial Sequence: Synthetic oligonucleotide
  Target: PCSK9; (-) strand; PAM type: NRG; PAM sequence: AAG
ccccacaacatccctcgaga

SEQ ID NO: 8183 - DNA, 20 bp, Artificial Sequence
  Description of Artificial Sequence: Synthetic oligonucleotide
  Target: PCSK9; (-) strand; PAM type: NRG; PAM sequence: GAG
acaaccccacaacatccctc

SEQ ID NO: 8184 - DNA, 20 bp, Artificial Sequence
  Description of Artificial Sequence: Synthetic oligonucleotide
  Target: PCSK9; (-) strand; PAM type: NRG; PAM sequence: TGG
tgaaatgccctttcttatcc

SEQ ID NO: 8185 - DNA, 20 bp, Artificial Sequence
  Description of Artificial Sequence: Synthetic oligonucleotide
  Target: PCSK9; (-) strand; PAM type: NRG; PAM sequence: TGG
gaacagttgttttggagcag

SEQ ID NO: 8186 - DNA, 20 bp, Artificial Sequence
  Description of Artificial Sequence: Synthetic oligonucleotide
  Target: PCSK9; (-) strand; PAM type: NRG; PAM sequence: CAG
ccagaacagttgttttggag

SEQ ID NO: 8187 - DNA, 20 bp, Artificial Sequence
  Description of Artificial Sequence: Synthetic oligonucleotide
  Target: PCSK9; (-) strand; PAM type: NRG; PAM sequence: GAG
tttccagaacagttgttttg

SEQ ID NO: 8188 - DNA, 20 bp, Artificial Sequence
  Description of Artificial Sequence: Synthetic oligonucleotide
  Target: PCSK9; (-) strand; PAM type: NRG; PAM sequence: TGG
tatttccagaacagttgttt

SEQ ID NO: 8189 - DNA, 20 bp, Artificial Sequence
  Description of Artificial Sequence: Synthetic oligonucleotide
  Target: PCSK9; (-) strand; PAM type: NRG; PAM sequence: CAG
ggtactcactatttccagaa

SEQ ID NO: 8190 - DNA, 20 bp, Artificial Sequence
  Description of Artificial Sequence: Synthetic oligonucleotide
  Target: PCSK9; (-) strand; PAM type: NRG; PAM sequence: CAG
gatggggtactcactatttc

SEQ ID NO: 8191 - DNA, 20 bp, Artificial Sequence
  Description of Artificial Sequence: Synthetic oligonucleotide
  Target: PCSK9; (-) strand; PAM type: NRG; PAM sequence: GGG
cttactcacctctcaggatg

SEQ ID NO: 8192 - DNA, 20 bp, Artificial Sequence
  Description of Artificial Sequence: Synthetic oligonucleotide
  Target: PCSK9; (-) strand; PAM type: NRG; PAM sequence: GGG
gcttactcacctctcaggat

SEQ ID NO: 8193 - DNA, 20 bp, Artificial Sequence
  Description of Artificial Sequence: Synthetic oligonucleotide
  Target: PCSK9; (-) strand; PAM type: NRG; PAM sequence: TGG
tgcttactcacctctcagga

SEQ ID NO: 8194 - DNA, 20 bp, Artificial Sequence
  Description of Artificial Sequence: Synthetic oligonucleotide
  Target: PCSK9; (-) strand; PAM type: NRG; PAM sequence: AGG
cctctgcttactcacctctc

SEQ ID NO: 8195 - DNA, 20 bp, Artificial Sequence
  Description of Artificial Sequence: Synthetic oligonucleotide
  Target: PCSK9; (-) strand; PAM type: NRG; PAM sequence: CAG
gcctctgcttactcacctct

SEQ ID NO: 8196 - DNA, 20 bp, Artificial Sequence
  Description of Artificial Sequence: Synthetic oligonucleotide
  Target: PCSK9; (-) strand; PAM type: NRG; PAM sequence: CAG
gcttggttcaggtggtcata

SEQ ID NO: 8197 - DNA, 20 bp, Artificial Sequence
  Description of Artificial Sequence: Synthetic oligonucleotide
  Target: PCSK9; (-) strand; PAM type: NRG; PAM sequence: TGG
cctcaagggcttggttcagg

SEQ ID NO: 8198 - DNA, 20 bp, Artificial Sequence
  Description of Artificial Sequence: Synthetic oligonucleotide
  Target: PCSK9; (-) strand; PAM type: NRG; PAM sequence: AGG
catcctcaagggcttggttc

SEQ ID NO: 8199 - DNA, 20 bp, Artificial Sequence
  Description of Artificial Sequence: Synthetic oligonucleotide
  Target: PCSK9; (-) strand; PAM type: NRG; PAM sequence: CAG
acatcctcaagggcttggtt

SEQ ID NO: 8200 - DNA, 20 bp, Artificial Sequence
  Description of Artificial Sequence: Synthetic oligonucleotide
  Target: PCSK9; (-) strand; PAM type: NRG; PAM sequence: TGG
aagaaacatcctcaagggct

SEQ ID NO: 8201 - DNA, 20 bp, Artificial Sequence
  Description of Artificial Sequence: Synthetic oligonucleotide
  Target: PCSK9; (-) strand; PAM type: NRG; PAM sequence: GGG
cagagaagaaacatcctcaa

SEQ ID NO: 8202 - DNA, 20 bp, Artificial Sequence
  Description of Artificial Sequence: Synthetic oligonucleotide
  Target: PCSK9; (-) strand; PAM type: NRG; PAM sequence: AGG
ccagagaagaaacatcctca

SEQ ID NO: 8203 - DNA, 20 bp, Artificial Sequence
  Description of Artificial Sequence: Synthetic oligonucleotide
  Target: PCSK9; (-) strand; PAM type: NRG; PAM sequence: AAG
accagagaagaaacatcctc

SEQ ID NO: 8204 - DNA, 20 bp, Artificial Sequence
  Description of Artificial Sequence: Synthetic oligonucleotide
  Target: PCSK9; (-) strand; PAM type: NRG; PAM sequence: AAG
gttccaaacttccaccagag

SEQ ID NO: 8205 - DNA, 20 bp, Artificial Sequence
  Description of Artificial Sequence: Synthetic oligonucleotide
  Target: PCSK9; (-) strand; PAM type: NRG; PAM sequence: GAG
cctgttccaaacttccacca

SEQ ID NO: 8206 - DNA, 20 bp, Artificial Sequence
  Description of Artificial Sequence: Synthetic oligonucleotide
  Target: PCSK9; (-) strand; PAM type: NRG; PAM sequence: CAG
ctcctgttccaaacttccac

SEQ ID NO: 8207 - DNA, 20 bp, Artificial Sequence
  Description of Artificial Sequence: Synthetic oligonucleotide
  Target: PCSK9; (-) strand; PAM type: NRG; PAM sequence: AGG
atgaataaatgaacttgagg

SEQ ID NO: 8208 - DNA, 20 bp, Artificial Sequence
  Description of Artificial Sequence: Synthetic oligonucleotide
  Target: PCSK9; (-) strand; PAM type: NRG; PAM sequence: GAG
aatgaataaatgaacttgag

SEQ ID NO: 8209 - DNA, 20 bp, Artificial Sequence
  Description of Artificial Sequence: Synthetic oligonucleotide
  Target: PCSK9; (-) strand; PAM type: NRG; PAM sequence: AGG
tgaatgaataaatgaacttg

SEQ ID NO: 8210 - DNA, 20 bp, Artificial Sequence
  Description of Artificial Sequence: Synthetic oligonucleotide
  Target: PCSK9; (-) strand; PAM type: NRG; PAM sequence: GAG
atgaatgaataaatgaactt

SEQ ID NO: 8211 - DNA, 20 bp, Artificial Sequence
  Description of Artificial Sequence: Synthetic oligonucleotide
  Target: PCSK9; (-) strand; PAM type: NRG; PAM sequence: TGG
catgactaaaagaaaaggat

SEQ ID NO: 8212 - DNA, 20 bp, Artificial Sequence
  Description of Artificial Sequence: Synthetic oligonucleotide
  Target: PCSK9; (-) strand; PAM type: NRG; PAM sequence: AGG
tttctcatgactaaaagaaa

SEQ ID NO: 8213 - DNA, 20 bp, Artificial Sequence
  Description of Artificial Sequence: Synthetic oligonucleotide
  Target: PCSK9; (-) strand; PAM type: NRG; PAM sequence: AAG
gtttctcatgactaaaagaa

SEQ ID NO: 8214 - DNA, 20 bp, Artificial Sequence
  Description of Artificial Sequence: Synthetic oligonucleotide
  Target: PCSK9; (-) strand; PAM type: NRG; PAM sequence: AAG
cctcagtttctcatgactaa

SEQ ID NO: 8215 - DNA, 20 bp, Artificial Sequence
  Description of Artificial Sequence: Synthetic oligonucleotide
  Target: PCSK9; (-) strand; PAM type: NRG; PAM sequence: CAG
gacctcctctctctgggcct

SEQ ID NO: 8216 - DNA, 20 bp, Artificial Sequence
  Description of Artificial Sequence: Synthetic oligonucleotide
  Target: PCSK9; (-) strand; PAM type: NRG; PAM sequence: GGG
tggggtgacctcctctctct

SEQ ID NO: 8217 - DNA, 20 bp, Artificial Sequence
  Description of Artificial Sequence: Synthetic oligonucleotide
  Target: PCSK9; (-) strand; PAM type: NRG; PAM sequence: TGG
ctggggtgacctcctctctc

SEQ ID NO: 8218 - DNA, 20 bp, Artificial Sequence
  Description of Artificial Sequence: Synthetic oligonucleotide
  Target: PCSK9; (-) strand; PAM type: NRG; PAM sequence: GGG
acccagttctaatgcacctg

SEQ ID NO: 8219 - DNA, 20 bp, Artificial Sequence
  Description of Artificial Sequence: Synthetic oligonucleotide
  Target: PCSK9; (-) strand; PAM type: NRG; PAM sequence: GGG
aacccagttctaatgcacct

SEQ ID NO: 8220 - DNA, 20 bp, Artificial Sequence
  Description of Artificial Sequence: Synthetic oligonucleotide
  Target: PCSK9; (-) strand; PAM type: NRG; PAM sequence: TGG
aaacccagttctaatgcacc

SEQ ID NO: 8221 - DNA, 20 bp, Artificial Sequence
  Description of Artificial Sequence: Synthetic oligonucleotide
  Target: PCSK9; (-) strand; PAM type: NRG; PAM sequence: CAG
gagtgtcagttctggaaacc

SEQ ID NO: 8222 - DNA, 20 bp, Artificial Sequence
  Description of Artificial Sequence: Synthetic oligonucleotide
  Target: PCSK9; (-) strand; PAM type: NRG; PAM sequence: TGG
gtgcagtggagtgtcagttc

SEQ ID NO: 8223 - DNA, 20 bp, Artificial Sequence
  Description of Artificial Sequence: Synthetic oligonucleotide
  Target: PCSK9; (-) strand; PAM type: NRG; PAM sequence: CAG
tactctgtgcagtggagtgt

SEQ ID NO: 8224 - DNA, 20 bp, Artificial Sequence
  Description of Artificial Sequence: Synthetic oligonucleotide
  Target: PCSK9; (-) strand; PAM type: NRG; PAM sequence: GAG
ggagagtactctgtgcagtg

SEQ ID NO: 8225 - DNA, 20 bp, Artificial Sequence
  Description of Artificial Sequence: Synthetic oligonucleotide
  Target: PCSK9; (-) strand; PAM type: NRG; PAM sequence: TGG
tgggagagtactctgtgcag

SEQ ID NO: 8226 - DNA, 20 bp, Artificial Sequence
  Description of Artificial Sequence: Synthetic oligonucleotide
  Target: PCSK9; (-) strand; PAM type: NRG; PAM sequence: CAG
aattgggagagtactctgtg

SEQ ID NO: 8227 - DNA, 20 bp, Artificial Sequence
  Description of Artificial Sequence: Synthetic oligonucleotide
  Target: PCSK9; (-) strand; PAM type: NRG; PAM sequence: GAG
aaaaattgaatgaattggga

SEQ ID NO: 8228 - DNA, 20 bp, Artificial Sequence
  Description of Artificial Sequence: Synthetic oligonucleotide
  Target: PCSK9; (-) strand; PAM type: NRG; PAM sequence: GAG
ataaaaattgaatgaattgg

SEQ ID NO: 8229 - DNA, 20 bp, Artificial Sequence
  Description of Artificial Sequence: Synthetic oligonucleotide
  Target: PCSK9; (-) strand; PAM type: NRG; PAM sequence: GGG
aaataaaaattgaatgaatt

SEQ ID NO: 8230 - DNA, 20 bp, Artificial Sequence
  Description of Artificial Sequence: Synthetic oligonucleotide
  Target: PCSK9; (-) strand; PAM type: NRG; PAM sequence: TGG
taaataaaaattgaatgaat

SEQ ID NO: 8231 - DNA, 20 bp, Artificial Sequence
  Description of Artificial Sequence: Synthetic oligonucleotide
  Target: PCSK9; (-) strand; PAM type: NRG; PAM sequence: AAG
gaactcctactaatgcttca

SEQ ID NO: 8232 - DNA, 20 bp, Artificial Sequence
  Description of Artificial Sequence: Synthetic oligonucleotide
  Target: PCSK9; (-) strand; PAM type: NRG; PAM sequence: TAG
ttcatggtacctcctaatcc

SEQ ID NO: 8233 - DNA, 20 bp, Artificial Sequence
  Description of Artificial Sequence: Synthetic oligonucleotide
  Target: PCSK9; (-) strand; PAM type: NRG; PAM sequence: TGG
cagctctgtatctttgttca

SEQ ID NO: 8234 - DNA, 20 bp, Artificial Sequence
  Description of Artificial Sequence: Synthetic oligonucleotide
  Target: PCSK9; (-) strand; PAM type: NRG; PAM sequence: CAG
tcttccacctctggttttcc

SEQ ID NO: 8235 - DNA, 20 bp, Artificial Sequence
  Description of Artificial Sequence: Synthetic oligonucleotide
  Target: PCSK9; (-) strand; PAM type: NRG; PAM sequence: TGG
tgctccttatcttccacctc

SEQ ID NO: 8236 - DNA, 20 bp, Artificial Sequence
  Description of Artificial Sequence: Synthetic oligonucleotide
  Target: PCSK9; (-) strand; PAM type: NRG; PAM sequence: TGG
aaaaaaaagaaaaagaactg

SEQ ID NO: 8237 - DNA, 20 bp, Artificial Sequence
  Description of Artificial Sequence: Synthetic oligonucleotide
  Target: PCSK9; (-) strand; PAM type: NRG; PAM sequence: AAG
catctcaaaaaaaaaagaaa

SEQ ID NO: 8238 - DNA, 20 bp, Artificial Sequence
  Description of Artificial Sequence: Synthetic oligonucleotide
  Target: PCSK9; (-) strand; PAM type: NRG; PAM sequence: AAG
aaactccatctcaaaaaaaa

SEQ ID NO: 8239 - DNA, 20 bp, Artificial Sequence
  Description of Artificial Sequence: Synthetic oligonucleotide
  Target: PCSK9; (-) strand; PAM type: NRG; PAM sequence: GAG
cactccagcctgggcaacaa

SEQ ID NO: 8240 - DNA, 20 bp, Artificial Sequence
  Description of Artificial Sequence: Synthetic oligonucleotide
  Target: PCSK9; (-) strand; PAM type: NRG; PAM sequence: AAG
tgcactccagcctgggcaac

SEQ ID NO: 8241 - DNA, 20 bp, Artificial Sequence
  Description of Artificial Sequence: Synthetic oligonucleotide
  Target: PCSK9; (-) strand; PAM type: NRG; PAM sequence: GGG
gcaccattgcactccagcct

SEQ ID NO: 8242 - DNA, 20 bp, Artificial Sequence
  Description of Artificial Sequence: Synthetic oligonucleotide
  Target: PCSK9; (-) strand; PAM type: NRG; PAM sequence: TGG
tgcaccattgcactccagcc

SEQ ID NO: 8243 - DNA, 20 bp, Artificial Sequence
  Description of Artificial Sequence: Synthetic oligonucleotide
  Target: PCSK9; (-) strand; PAM type: NRG; PAM sequence: CAG
gagactgcaccattgcactc

SEQ ID NO: 8244 - DNA, 20 bp, Artificial Sequence
  Description of Artificial Sequence: Synthetic oligonucleotide
  Target: PCSK9; (-) strand; PAM type: NRG; PAM sequence: GAG
gacagatgttgcagtgagct

SEQ ID NO: 8245 - DNA, 20 bp, Artificial Sequence
  Description of Artificial Sequence: Synthetic oligonucleotide
  Target: PCSK9; (-) strand; PAM type: NRG; PAM sequence: GAG
cgggagacagatgttgcagt

SEQ ID NO: 8246 - DNA, 20 bp, Artificial Sequence
  Description of Artificial Sequence: Synthetic oligonucleotide
  Target: PCSK9; (-) strand; PAM type: NRG; PAM sequence: CAG
aacccgggagacagatgttg

SEQ ID NO: 8247 - DNA, 20 bp, Artificial Sequence
  Description of Artificial Sequence: Synthetic oligonucleotide
  Target: PCSK9; (-) strand; PAM type: NRG; PAM sequence: CAG
aaccacttgaacccgggaga

SEQ ID NO: 8248 - DNA, 20 bp, Artificial Sequence
  Description of Artificial Sequence: Synthetic oligonucleotide
  Target: PCSK9; (-) strand; PAM type: NRG; PAM sequence: GAG
ggagaaccacttgaacccgg

SEQ ID NO: 8249 - DNA, 20 bp, Artificial Sequence
  Description of Artificial Sequence: Synthetic oligonucleotide
  Target: PCSK9; (-) strand; PAM type: NRG; PAM sequence: GGG
caggagaaccacttgaaccc

SEQ ID NO: 8250 - DNA, 20 bp, Artificial Sequence
  Description of Artificial Sequence: Synthetic oligonucleotide
  Target: PCSK9; (-) strand; PAM type: NRG; PAM sequence: CGG
gcaggagaaccacttgaacc

SEQ ID NO: 8251 - DNA, 20 bp, Artificial Sequence
  Description of Artificial Sequence: Synthetic oligonucleotide
  Target: PCSK9; (-) strand; PAM type: NRG; PAM sequence: GAG
ttcttgggaggctgaggcag

SEQ ID NO: 8252 - DNA, 20 bp, Artificial Sequence
  Description of Artificial Sequence: Synthetic oligonucleotide
  Target: PCSK9; (-) strand; PAM type: NRG; PAM sequence: AGG
gcttcttgggaggctgaggc

SEQ ID NO: 8253 - DNA, 20 bp, Artificial Sequence
  Description of Artificial Sequence: Synthetic oligonucleotide
  Target: PCSK9; (-) strand; PAM type: NRG; PAM sequence: CAG
agcttcttgggaggctgagg

SEQ ID NO: 8254 - DNA, 20 bp, Artificial Sequence
  Description of Artificial Sequence: Synthetic oligonucleotide
  Target: PCSK9; (-) strand; PAM type: NRG; PAM sequence: AGG
cccagcttcttgggaggctg

SEQ ID NO: 8255 - DNA, 20 bp, Artificial Sequence
  Description of Artificial Sequence: Synthetic oligonucleotide
  Target: PCSK9; (-) strand; PAM type: NRG; PAM sequence: GAG
tcccagcttcttgggaggct

SEQ ID NO: 8256 - DNA, 20 bp, Artificial Sequence
  Description of Artificial Sequence: Synthetic oligonucleotide
  Target: PCSK9; (-) strand; PAM type: NRG; PAM sequence: AGG
tgtaatcccagcttcttggg

SEQ ID NO: 8257 - DNA, 20 bp, Artificial Sequence
  Description of Artificial Sequence: Synthetic oligonucleotide
  Target: PCSK9; (-) strand; PAM type: NRG; PAM sequence: GAG
ctgtaatcccagcttcttgg

SEQ ID NO: 8258 - DNA, 20 bp, Artificial Sequence
  Description of Artificial Sequence: Synthetic oligonucleotide
  Target: PCSK9; (-) strand; PAM type: NRG; PAM sequence: GGG
acctgtaatcccagcttctt

SEQ ID NO: 8259 - DNA, 20 bp, Artificial Sequence
  Description of Artificial Sequence: Synthetic oligonucleotide
  Target: PCSK9; (-) strand; PAM type: NRG; PAM sequence: TGG
tacctgtaatcccagcttct

SEQ ID NO: 8260 - DNA, 20 bp, Artificial Sequence
  Description of Artificial Sequence: Synthetic oligonucleotide
  Target: PCSK9; (-) strand; PAM type: NRG; PAM sequence: CAG
gtggcaggtacctgtaatcc

SEQ ID NO: 8261 - DNA, 20 bp, Artificial Sequence
  Description of Artificial Sequence: Synthetic oligonucleotide
  Target: PCSK9; (-) strand; PAM type: NRG; PAM sequence: AGG
aattagccgggcgtggtggc

SEQ ID NO: 8262 - DNA, 20 bp, Artificial Sequence
  Description of Artificial Sequence: Synthetic oligonucleotide
  Target: PCSK9; (-) strand; PAM type: NRG; PAM sequence: CAG
aaattagccgggcgtggtgg

SEQ ID NO: 8263 - DNA, 20 bp, Artificial Sequence
  Description of Artificial Sequence: Synthetic oligonucleotide
  Target: PCSK9; (-) strand; PAM type: NRG; PAM sequence: TGG
caaaaattagccgggcgtgg

SEQ ID NO: 8264 - DNA, 20 bp, Artificial Sequence
  Description of Artificial Sequence: Synthetic oligonucleotide
  Target: PCSK9; (-) strand; PAM type: NRG; PAM sequence: TGG
atacaaaaattagccgggcg

SEQ ID NO: 8265 - DNA, 20 bp, Artificial Sequence
  Description of Artificial Sequence: Synthetic oligonucleotide
  Target: PCSK9; (-) strand; PAM type: NRG; PAM sequence: GGG
taaaaatacaaaaattagcc

SEQ ID NO: 8266 - DNA, 20 bp, Artificial Sequence
  Description of Artificial Sequence: Synthetic oligonucleotide
  Target: PCSK9; (-) strand; PAM type: NRG; PAM sequence: CGG
ctaaaaatacaaaaattagc

SEQ ID NO: 8267 - DNA, 20 bp, Artificial Sequence
  Description of Artificial Sequence: Synthetic oligonucleotide
  Target: PCSK9; (-) strand; PAM type: NRG; PAM sequence: TAG
tctactaaaaatacaaaaat

SEQ ID NO: 8268 - DNA, 20 bp, Artificial Sequence
  Description of Artificial Sequence: Synthetic oligonucleotide
  Target: PCSK9; (-) strand; PAM type: NRG; PAM sequence: TGG
tgcgactagcctggccaacg

SEQ ID NO: 8269 - DNA, 20 bp, Artificial Sequence
  Description of Artificial Sequence: Synthetic oligonucleotide
  Target: PCSK9; (-) strand; PAM type: NRG; PAM sequence: TGG
tcaggagtttgcgactagcc

SEQ ID NO: 8270 - DNA, 20 bp, Artificial Sequence
  Description of Artificial Sequence: Synthetic oligonucleotide
  Target: PCSK9; (-) strand; PAM type: NRG; PAM sequence: TAG
ggaggtcaggagtttgcgac

SEQ ID NO: 8271 - DNA, 20 bp, Artificial Sequence
  Description of Artificial Sequence: Synthetic oligonucleotide
  Target: PCSK9; (-) strand; PAM type: NRG; PAM sequence: GAG
ggatccactgaggaggtcag

SEQ ID NO: 8272 - DNA, 20 bp, Artificial Sequence
  Description of Artificial Sequence: Synthetic oligonucleotide
  Target: PCSK9; (-) strand; PAM type: NRG; PAM sequence: AGG
tcggatccactgaggaggtc

SEQ ID NO: 8273 - DNA, 20 bp, Artificial Sequence
  Description of Artificial Sequence: Synthetic oligonucleotide
  Target: PCSK9; (-) strand; PAM type: NRG; PAM sequence: CAG
ctcggatccactgaggaggt

SEQ ID NO: 8274 - DNA, 20 bp, Artificial Sequence
  Description of Artificial Sequence: Synthetic oligonucleotide
  Target: PCSK9; (-) strand; PAM type: NRG; PAM sequence: AGG
cctcctcggatccactgagg

SEQ ID NO: 8275 - DNA, 20 bp, Artificial Sequence
  Description of Artificial Sequence: Synthetic oligonucleotide
  Target: PCSK9; (-) strand; PAM type: NRG; PAM sequence: GAG
acctcctcggatccactgag

SEQ ID NO: 8276 - DNA, 20 bp, Artificial Sequence
  Description of Artificial Sequence: Synthetic oligonucleotide
  Target: PCSK9; (-) strand; PAM type: NRG; PAM sequence: AGG
tcacctcctcggatccactg

SEQ ID NO: 8277 - DNA, 20 bp, Artificial Sequence
  Description of Artificial Sequence: Synthetic oligonucleotide
  Target: PCSK9; (-) strand; PAM type: NRG; PAM sequence: GAG
atcacctcctcggatccact

SEQ ID NO: 8278 - DNA, 20 bp, Artificial Sequence
  Description of Artificial Sequence: Synthetic oligonucleotide
  Target: PCSK9; (-) strand; PAM type: NRG; PAM sequence: CGG
aggcgggaggatcacctcct

SEQ ID NO: 8279 - DNA, 20 bp, Artificial Sequence
  Description of Artificial Sequence: Synthetic oligonucleotide
  Target: PCSK9; (-) strand; PAM type: NRG; PAM sequence: AGG
ctttgggaggctgaggcggg

SEQ ID NO: 8280 - DNA, 20 bp, Artificial Sequence
  Description of Artificial Sequence: Synthetic oligonucleotide
  Target: PCSK9; (-) strand; PAM type: NRG; PAM sequence: GAG
actttgggaggctgaggcgg

SEQ ID NO: 8281 - DNA, 20 bp, Artificial Sequence
  Description of Artificial Sequence: Synthetic oligonucleotide
  Target: PCSK9; (-) strand; PAM type: NRG; PAM sequence: GGG
gcactttgggaggctgaggc

SEQ ID NO: 8282 - DNA, 20 bp, Artificial Sequence
  Description of Artificial Sequence: Synthetic oligonucleotide
  Target: PCSK9; (-) strand; PAM type: NRG; PAM sequence: CGG
agcactttgggaggctgagg

SEQ ID NO: 8283 - DNA, 20 bp, Artificial Sequence
  Description of Artificial Sequence: Synthetic oligonucleotide
  Target: PCSK9; (-) strand; PAM type: NRG; PAM sequence: AGG
tcgagcactttgggaggctg

SEQ ID NO: 8284 - DNA, 20 bp, Artificial Sequence
  Description of Artificial Sequence: Synthetic oligonucleotide
  Target: PCSK9; (-) strand; PAM type: NRG; PAM sequence: GAG
ttcgagcactttgggaggct

SEQ ID NO: 8285 - DNA, 20 bp, Artificial Sequence
  Description of Artificial Sequence: Synthetic oligonucleotide
  Target: PCSK9; (-) strand; PAM type: NRG; PAM sequence: AGG
tgtaattcgagcactttggg

SEQ ID NO: 8286 - DNA, 20 bp, Artificial Sequence
  Description of Artificial Sequence: Synthetic oligonucleotide
  Target: PCSK9; (-) strand; PAM type: NRG; PAM sequence: GAG
ctgtaattcgagcactttgg

SEQ ID NO: 8287 - DNA, 20 bp, Artificial Sequence
  Description of Artificial Sequence: Synthetic oligonucleotide
  Target: PCSK9; (-) strand; PAM type: NRG; PAM sequence: GGG
acctgtaattcgagcacttt

SEQ ID NO: 8288 - DNA, 20 bp, Artificial Sequence
  Description of Artificial Sequence: Synthetic oligonucleotide
  Target: PCSK9; (-) strand; PAM type: NRG; PAM sequence: TGG
cacctgtaattcgagcactt

SEQ ID NO: 8289 - DNA, 20 bp, Artificial Sequence
  Description of Artificial Sequence: Synthetic oligonucleotide
  Target: PCSK9; (-) strand; PAM type: NRG; PAM sequence: GAG
gtggctcacacctgtaattc

SEQ ID NO: 8290 - DNA, 20 bp, Artificial Sequence
  Description of Artificial Sequence: Synthetic oligonucleotide
  Target: PCSK9; (-) strand; PAM type: NRG; PAM sequence: TGG
actgtggaggccaggcgtgg

SEQ ID NO: 8291 - DNA, 20 bp, Artificial Sequence
  Description of Artificial Sequence: Synthetic oligonucleotide
  Target: PCSK9; (-) strand; PAM type: NRG; PAM sequence: TGG
agaactgtggaggccaggcg

SEQ ID NO: 8292 - DNA, 20 bp, Artificial Sequence
  Description of Artificial Sequence: Synthetic oligonucleotide
  Target: PCSK9; (-) strand; PAM type: NRG; PAM sequence: AGG
gataaagaactgtggaggcc

SEQ ID NO: 8293 - DNA, 20 bp, Artificial Sequence
  Description of Artificial Sequence: Synthetic oligonucleotide
  Target: PCSK9; (-) strand; PAM type: NRG; PAM sequence: CAG
ggataaagaactgtggaggc

SEQ ID NO: 8294 - DNA, 20 bp, Artificial Sequence
  Description of Artificial Sequence: Synthetic oligonucleotide
  Target: PCSK9; (-) strand; PAM type: NRG; PAM sequence: AGG
cggtggataaagaactgtgg

SEQ ID NO: 8295 - DNA, 20 bp, Artificial Sequence
  Description of Artificial Sequence: Synthetic oligonucleotide
  Target: PCSK9; (-) strand; PAM type: NRG; PAM sequence: GAG
acggtggataaagaactgtg

SEQ ID NO: 8296 - DNA, 20 bp, Artificial Sequence
  Description of Artificial Sequence: Synthetic oligonucleotide
  Target: PCSK9; (-) strand; PAM type: NRG; PAM sequence: TGG
agacggtggataaagaactg

SEQ ID NO: 8297 - DNA, 20 bp, Artificial Sequence
  Description of Artificial Sequence: Synthetic oligonucleotide
  Target: PCSK9; (-) strand; PAM type: NRG; PAM sequence: AAG
tacatttcagacggtggata

SEQ ID NO: 8298 - DNA, 20 bp, Artificial Sequence
  Description of Artificial Sequence: Synthetic oligonucleotide
  Target: PCSK9; (-) strand; PAM type: NRG; PAM sequence: TGG
acattttacatttcagacgg

SEQ ID NO: 8299 - DNA, 20 bp, Artificial Sequence
  Description of Artificial Sequence: Synthetic oligonucleotide
  Target: PCSK9; (-) strand; PAM type: NRG; PAM sequence: CGG
gtaacattttacatttcaga

SEQ ID NO: 8300 - DNA, 20 bp, Artificial Sequence
  Description of Artificial Sequence: Synthetic oligonucleotide
  Target: PCSK9; (-) strand; PAM type: NRG; PAM sequence: CAG
tttcgtaacattttacattt

SEQ ID NO: 8301 - DNA, 20 bp, Artificial Sequence
  Description of Artificial Sequence: Synthetic oligonucleotide
  Target: PCSK9; (-) strand; PAM type: NRG; PAM sequence: TGG
taaatcacaaaaaaaacttt

SEQ ID NO: 8302 - DNA, 20 bp, Artificial Sequence
  Description of Artificial Sequence: Synthetic oligonucleotide
  Target: PCSK9; (-) strand; PAM type: NRG; PAM sequence: AGG
atctcatgtcagttcacgtc

SEQ ID NO: 8303 - DNA, 20 bp, Artificial Sequence
  Description of Artificial Sequence: Synthetic oligonucleotide
  Target: PCSK9; (-) strand; PAM type: NRG; PAM sequence: CAG
aatctcatgtcagttcacgt

SEQ ID NO: 8304 - DNA, 20 bp, Artificial Sequence
  Description of Artificial Sequence: Synthetic oligonucleotide
  Target: PCSK9; (-) strand; PAM type: NRG; PAM sequence: CAG
aattaaaaataatctcatgt

SEQ ID NO: 8305 - DNA, 20 bp, Artificial Sequence
  Description of Artificial Sequence: Synthetic oligonucleotide
  Target: PCSK9; (-) strand; PAM type: NRG; PAM sequence: CAG
gctgcatactgtaatctatg

SEQ ID NO: 8306 - DNA, 20 bp, Artificial Sequence
  Description of Artificial Sequence: Synthetic oligonucleotide
  Target: PCSK9; (-) strand; PAM type: NRG; PAM sequence: GAG
agtctgcttggaagaatctg

SEQ ID NO: 8307 - DNA, 20 bp, Artificial Sequence
  Description of Artificial Sequence: Synthetic oligonucleotide
  Target: PCSK9; (-) strand; PAM type: NRG; PAM sequence: TGG
agagtctgcttggaagaatc

SEQ ID NO: 8308 - DNA, 20 bp, Artificial Sequence
  Description of Artificial Sequence: Synthetic oligonucleotide
  Target: PCSK9; (-) strand; PAM type: NRG; PAM sequence: AAG
ggcaatcagagtctgcttgg

SEQ ID NO: 8309 - DNA, 20 bp, Artificial Sequence
  Description of Artificial Sequence: Synthetic oligonucleotide
  Target: PCSK9; (-) strand; PAM type: NRG; PAM sequence: TGG
atgggcaatcagagtctgct

SEQ ID NO: 8310 - DNA, 20 bp, Artificial Sequence
  Description of Artificial Sequence: Synthetic oligonucleotide
  Target: PCSK9; (-) strand; PAM type: NRG; PAM sequence: GAG
aaggcagtaatgggcaatca

SEQ ID NO: 8311 - DNA, 20 bp, Artificial Sequence
  Description of Artificial Sequence: Synthetic oligonucleotide
  Target: PCSK9; (-) strand; PAM type: NRG; PAM sequence: CAG
gaaaggcagtaatgggcaat

SEQ ID NO: 8312 - DNA, 20 bp, Artificial Sequence
  Description of Artificial Sequence: Synthetic oligonucleotide
  Target: PCSK9; (-) strand; PAM type: NRG; PAM sequence: GGG
gattttagaaaggcagtaat

SEQ ID NO: 8313 - DNA, 20 bp, Artificial Sequence
  Description of Artificial Sequence: Synthetic oligonucleotide
  Target: PCSK9; (-) strand; PAM type: NRG; PAM sequence: TGG
ggattttagaaaggcagtaa

SEQ ID NO: 8314 - DNA, 20 bp, Artificial Sequence
  Description of Artificial Sequence: Synthetic oligonucleotide
  Target: PCSK9; (-) strand; PAM type: NRG; PAM sequence: CAG
ttgtttggattttagaaagg

SEQ ID NO: 8315 - DNA, 20 bp, Artificial Sequence
  Description of Artificial Sequence: Synthetic oligonucleotide
  Target: PCSK9; (-) strand; PAM type: NRG; PAM sequence: AGG
aacttgtttggattttagaa

SEQ ID NO: 8316 - DNA, 20 bp, Artificial Sequence
  Description of Artificial Sequence: Synthetic oligonucleotide
  Target: PCSK9; (-) strand; PAM type: NRG; PAM sequence: AAG
gaacttgtttggattttaga

SEQ ID NO: 8317 - DNA, 20 bp, Artificial Sequence
  Description of Artificial Sequence: Synthetic oligonucleotide
  Target: PCSK9; (-) strand; PAM type: NRG; PAM sequence: TAG
ctcagaacttgtttggattt

SEQ ID NO: 8318 - DNA, 20 bp, Artificial Sequence
  Description of Artificial Sequence: Synthetic oligonucleotide
  Target: PCSK9; (-) strand; PAM type: NRG; PAM sequence: TGG
tttgaacctcagaacttgtt

SEQ ID NO: 8319 - DNA, 20 bp, Artificial Sequence
  Description of Artificial Sequence: Synthetic oligonucleotide
  Target: PCSK9; (-) strand; PAM type: NRG; PAM sequence: CAG
gccaaaacggttttgaacct

SEQ ID NO: 8320 - DNA, 20 bp, Artificial Sequence
  Description of Artificial Sequence: Synthetic oligonucleotide
  Target: PCSK9; (-) strand; PAM type: NRG; PAM sequence: CGG
ccaaagccttagggccaaaa

SEQ ID NO: 8321 - DNA, 20 bp, Artificial Sequence
  Description of Artificial Sequence: Synthetic oligonucleotide
  Target: PCSK9; (-) strand; PAM type: NRG; PAM sequence: GGG
cccctttacccaaagcctta

SEQ ID NO: 8322 - DNA, 20 bp, Artificial Sequence
  Description of Artificial Sequence: Synthetic oligonucleotide
  Target: PCSK9; (-) strand; PAM type: NRG; PAM sequence: AGG
ccccctttacccaaagcctt

SEQ ID NO: 8323 - DNA, 20 bp, Artificial Sequence
  Description of Artificial Sequence: Synthetic oligonucleotide
  Target: PCSK9; (-) strand; PAM type: NRG; PAM sequence: TAG
accccctttacccaaagcct

SEQ ID NO: 8324 - DNA, 20 bp, Artificial Sequence
  Description of Artificial Sequence: Synthetic oligonucleotide
  Target: PCSK9; (-) strand; PAM type: NRG; PAM sequence: AAG
gagtccaccccctttaccca

SEQ ID NO: 8325 - DNA, 20 bp, Artificial Sequence
  Description of Artificial Sequence: Synthetic oligonucleotide
  Target: PCSK9; (-) strand; PAM type: NRG; PAM sequence: GAG
actccagtcagagtagaaca

SEQ ID NO: 8326 - DNA, 20 bp, Artificial Sequence
  Description of Artificial Sequence: Synthetic oligonucleotide
  Target: PCSK9; (-) strand; PAM type: NRG; PAM sequence: CAG
ggactccagtcagagtagaa

SEQ ID NO: 8327 - DNA, 20 bp, Artificial Sequence
  Description of Artificial Sequence: Synthetic oligonucleotide
  Target: PCSK9; (-) strand; PAM type: NRG; PAM sequence: TAG
atcttggactccagtcagag

SEQ ID NO: 8328 - DNA, 20 bp, Artificial Sequence
  Description of Artificial Sequence: Synthetic oligonucleotide
  Target: PCSK9; (-) strand; PAM type: NRG; PAM sequence: GAG
tgcatcttggactccagtca

SEQ ID NO: 8329 - DNA, 20 bp, Artificial Sequence
  Description of Artificial Sequence: Synthetic oligonucleotide
  Target: PCSK9; (-) strand; PAM type: NRG; PAM sequence: CAG
tatgcatcttggactccagt

SEQ ID NO: 8330 - DNA, 20 bp, Artificial Sequence
  Description of Artificial Sequence: Synthetic oligonucleotide
  Target: PCSK9; (-) strand; PAM type: NRG; PAM sequence: CAG
tatatatgcatcttggactc

SEQ ID NO: 8331 - DNA, 20 bp, Artificial Sequence
  Description of Artificial Sequence: Synthetic oligonucleotide
  Target: PCSK9; (-) strand; PAM type: NRG; PAM sequence: TGG
atctctgtatatatgcatct

SEQ ID NO: 8332 - DNA, 20 bp, Artificial Sequence
  Description of Artificial Sequence: Synthetic oligonucleotide
  Target: PCSK9; (-) strand; PAM type: NRG; PAM sequence: CAG
ccctacctcaacctaccttg

SEQ ID NO: 8333 - DNA, 20 bp, Artificial Sequence
  Description of Artificial Sequence: Synthetic oligonucleotide
  Target: PCSK9; (-) strand; PAM type: NRG; PAM sequence: TGG
ccaaactccatgctcctcct

SEQ ID NO: 8334 - DNA, 20 bp, Artificial Sequence
  Description of Artificial Sequence: Synthetic oligonucleotide
  Target: PCSK9; (-) strand; PAM type: NRG; PAM sequence: AAG
tccccacagcctcatgaatc

SEQ ID NO: 8335 - DNA, 20 bp, Artificial Sequence
  Description of Artificial Sequence: Synthetic oligonucleotide
  Target: PCSK9; (-) strand; PAM type: NRG; PAM sequence: CAG
gaaccttcactggctcccca

SEQ ID NO: 8336 - DNA, 20 bp, Artificial Sequence
  Description of Artificial Sequence: Synthetic oligonucleotide
  Target: PCSK9; (-) strand; PAM type: NRG; PAM sequence: TGG
acctgcttaagaaccttcac

SEQ ID NO: 8337 - DNA, 20 bp, Artificial Sequence
  Description of Artificial Sequence: Synthetic oligonucleotide
  Target: PCSK9; (-) strand; PAM type: NRG; PAM sequence: AAG
tcaggcagacatacctgctt

SEQ ID NO: 8338 - DNA, 20 bp, Artificial Sequence
  Description of Artificial Sequence: Synthetic oligonucleotide
  Target: PCSK9; (-) strand; PAM type: NRG; PAM sequence: CAG
ctgctccaactgctctcagg

SEQ ID NO: 8339 - DNA, 20 bp, Artificial Sequence
  Description of Artificial Sequence: Synthetic oligonucleotide
  Target: PCSK9; (-) strand; PAM type: NRG; PAM sequence: AGG
tgtctgctccaactgctctc

SEQ ID NO: 8340 - DNA, 20 bp, Artificial Sequence
  Description of Artificial Sequence: Synthetic oligonucleotide
  Target: PCSK9; (-) strand; PAM type: NRG; PAM sequence: CAG
ttgtctgctccaactgctct

SEQ ID NO: 8341 - DNA, 20 bp, Artificial Sequence
  Description of Artificial Sequence: Synthetic oligonucleotide
  Target: PCSK9; (-) strand; PAM type: NRG; PAM sequence: TAG
atggtgatttgtttggtttt

SEQ ID NO: 8342 - DNA, 20 bp, Artificial Sequence
  Description of Artificial Sequence: Synthetic oligonucleotide
  Target: PCSK9; (-) strand; PAM type: NRG; PAM sequence: TGG
actatctatggtgatttgtt

SEQ ID NO: 8343 - DNA, 20 bp, Artificial Sequence
  Description of Artificial Sequence: Synthetic oligonucleotide
  Target: PCSK9; (-) strand; PAM type: NRG; PAM sequence: TGG
attatagcagccactatcta

SEQ ID NO: 8344 - DNA, 20 bp, Artificial Sequence
  Description of Artificial Sequence: Synthetic oligonucleotide
  Target: PCSK9; (-) strand; PAM type: NRG; PAM sequence: CAG
aggggacaaacaaattatag

SEQ ID NO: 8345 - DNA, 20 bp, Artificial Sequence
  Description of Artificial Sequence: Synthetic oligonucleotide
  Target: PCSK9; (-) strand; PAM type: NRG; PAM sequence: TAG
tggaggggacaaacaaatta

SEQ ID NO: 8346 - DNA, 20 bp, Artificial Sequence
  Description of Artificial Sequence: Synthetic oligonucleotide
  Target: PCSK9; (-) strand; PAM type: NRG; PAM sequence: GGG
tttccacatgagatttggag

SEQ ID NO: 8347 - DNA, 20 bp, Artificial Sequence
  Description of Artificial Sequence: Synthetic oligonucleotide
  Target: PCSK9; (-) strand; PAM type: NRG; PAM sequence: GGG
atttccacatgagatttgga

SEQ ID NO: 8348 - DNA, 20 bp, Artificial Sequence
  Description of Artificial Sequence: Synthetic oligonucleotide
  Target: PCSK9; (-) strand; PAM type: NRG; PAM sequence: AGG
aatttccacatgagatttgg

SEQ ID NO: 8349 - DNA, 20 bp, Artificial Sequence
  Description of Artificial Sequence: Synthetic oligonucleotide
  Target: PCSK9; (-) strand; PAM type: NRG; PAM sequence: GAG
aaatttccacatgagatttg

SEQ ID NO: 8350 - DNA, 20 bp, Artificial Sequence
  Description of Artificial Sequence: Synthetic oligonucleotide
  Target: PCSK9; (-) strand; PAM type: NRG; PAM sequence: TGG
ccaaatttccacatgagatt

SEQ ID NO: 8351 - DNA, 20 bp, Artificial Sequence
  Description of Artificial Sequence: Synthetic oligonucleotide
  Target: PCSK9; (-) strand; PAM type: NRG; PAM sequence: GAG
tgaggaccaaatttccacat

SEQ ID NO: 8352 - DNA, 20 bp, Artificial Sequence
  Description of Artificial Sequence: Synthetic oligonucleotide
  Target: PCSK9; (-) strand; PAM type: NRG; PAM sequence: AGG
aggccccacttccaacactg

SEQ ID NO: 8353 - DNA, 20 bp, Artificial Sequence
  Description of Artificial Sequence: Synthetic oligonucleotide
  Target: PCSK9; (-) strand; PAM type: NRG; PAM sequence: GAG
taggccccacttccaacact

SEQ ID NO: 8354 - DNA, 20 bp, Artificial Sequence
  Description of Artificial Sequence: Synthetic oligonucleotide
  Target: PCSK9; (-) strand; PAM type: NRG; PAM sequence: AGG
tgacccaaacacctcccatt

SEQ ID NO: 8355 - DNA, 20 bp, Artificial Sequence
  Description of Artificial Sequence: Synthetic oligonucleotide
  Target: PCSK9; (-) strand; PAM type: NRG; PAM sequence: TAG
atgacccaaacacctcccat

SEQ ID NO: 8356 - DNA, 20 bp, Artificial Sequence
  Description of Artificial Sequence: Synthetic oligonucleotide
  Target: PCSK9; (-) strand; PAM type: NRG; PAM sequence: GGG
cggcaccaagcctttcacag

SEQ ID NO: 8357 - DNA, 20 bp, Artificial Sequence
  Description of Artificial Sequence: Synthetic oligonucleotide
  Target: PCSK9; (-) strand; PAM type: NRG; PAM sequence: GGG
acggcaccaagcctttcaca

SEQ ID NO: 8358 - DNA, 20 bp, Artificial Sequence
  Description of Artificial Sequence: Synthetic oligonucleotide
  Target: PCSK9; (-) strand; PAM type: NRG; PAM sequence: AGG
gacggcaccaagcctttcac

SEQ ID NO: 8359 - DNA, 20 bp, Artificial Sequence
  Description of Artificial Sequence: Synthetic oligonucleotide
  Target: PCSK9; (-) strand; PAM type: NRG; PAM sequence: CAG
ggacggcaccaagcctttca

SEQ ID NO: 8360 - DNA, 20 bp, Artificial Sequence
  Description of Artificial Sequence: Synthetic oligonucleotide
  Target: PCSK9; (-) strand; PAM type: NRG; PAM sequence: AAG
attatcacaaggacggcacc

SEQ ID NO: 8361 - DNA, 20 bp, Artificial Sequence
  Description of Artificial Sequence: Synthetic oligonucleotide
  Target: PCSK9; (-) strand; PAM type: NRG; PAM sequence: CGG
cttactcattatcacaagga

SEQ ID NO: 8362 - DNA, 20 bp, Artificial Sequence
  Description of Artificial Sequence: Synthetic oligonucleotide
  Target: PCSK9; (-) strand; PAM type: NRG; PAM sequence: AGG
agaacttactcattatcaca

SEQ ID NO: 8363 - DNA, 20 bp, Artificial Sequence
  Description of Artificial Sequence: Synthetic oligonucleotide
  Target: PCSK9; (-) strand; PAM type: NRG; PAM sequence: AAG
gagaacttactcattatcac

SEQ ID NO: 8364 - DNA, 20 bp, Artificial Sequence
  Description of Artificial Sequence: Synthetic oligonucleotide
  Target: PCSK9; (-) strand; PAM type: NRG; PAM sequence: GAG
ttcaagggaaatcatagcgg

SEQ ID NO: 8365 - DNA, 20 bp, Artificial Sequence
  Description of Artificial Sequence: Synthetic oligonucleotide
  Target: PCSK9; (-) strand; PAM type: NRG; PAM sequence: GGG
ccttcaagggaaatcatagc

SEQ ID NO: 8366 - DNA, 20 bp, Artificial Sequence
  Description of Artificial Sequence: Synthetic oligonucleotide
  Target: PCSK9; (-) strand; PAM type: NRG; PAM sequence: CGG
gccttcaagggaaatcatag

SEQ ID NO: 8367 - DNA, 20 bp, Artificial Sequence
  Description of Artificial Sequence: Synthetic oligonucleotide
  Target: PCSK9; (-) strand; PAM type: NRG; PAM sequence: TAG
tcagccttcaagggaaatca

SEQ ID NO: 8368 - DNA, 20 bp, Artificial Sequence
  Description of Artificial Sequence: Synthetic oligonucleotide
  Target: PCSK9; (-) strand; PAM type: NRG; PAM sequence: GGG
ttttaataatcagccttcaa

SEQ ID NO: 8369 - DNA, 20 bp, Artificial Sequence
  Description of Artificial Sequence: Synthetic oligonucleotide
  Target: PCSK9; (-) strand; PAM type: NRG; PAM sequence: AGG
tttttaataatcagccttca

SEQ ID NO: 8370 - DNA, 20 bp, Artificial Sequence
  Description of Artificial Sequence: Synthetic oligonucleotide
  Target: PCSK9; (-) strand; PAM type: NRG; PAM sequence: AAG
ctttttaataatcagccttc

SEQ ID NO: 8371 - DNA, 20 bp, Artificial Sequence
  Description of Artificial Sequence: Synthetic oligonucleotide
  Target: PCSK9; (-) strand; PAM type: NRG; PAM sequence: CAG
gccaagctctttttaataat

SEQ ID NO: 8372 - DNA, 20 bp, Artificial Sequence
  Description of Artificial Sequence: Synthetic oligonucleotide
  Target: PCSK9; (-) strand; PAM type: NRG; PAM sequence: AAG
agagaagagagggaggtgcc

SEQ ID NO: 8373 - DNA, 20 bp, Artificial Sequence
  Description of Artificial Sequence: Synthetic oligonucleotide
  Target: PCSK9; (-) strand; PAM type: NRG; PAM sequence: AGG
aagcaagagagaagagaggg

SEQ ID NO: 8374 - DNA, 20 bp, Artificial Sequence
  Description of Artificial Sequence: Synthetic oligonucleotide
  Target: PCSK9; (-) strand; PAM type: NRG; PAM sequence: GAG
gaagcaagagagaagagagg

SEQ ID NO: 8375 - DNA, 20 bp, Artificial Sequence
  Description of Artificial Sequence: Synthetic oligonucleotide
  Target: PCSK9; (-) strand; PAM type: NRG; PAM sequence: GGG
aagaagcaagagagaagaga

SEQ ID NO: 8376 - DNA, 20 bp, Artificial Sequence
  Description of Artificial Sequence: Synthetic oligonucleotide
  Target: PCSK9; (-) strand; PAM type: NRG; PAM sequence: AGG
gaagaagcaagagagaagag

SEQ ID NO: 8377 - DNA, 20 bp, Artificial Sequence
  Description of Artificial Sequence: Synthetic oligonucleotide
  Target: PCSK9; (-) strand; PAM type: NRG; PAM sequence: GAG
agaagaagcaagagagaaga

SEQ ID NO: 8378 - DNA, 20 bp, Artificial Sequence
  Description of Artificial Sequence: Synthetic oligonucleotide
  Target: PCSK9; (-) strand; PAM type: NRG; PAM sequence: GAG
agagaagaagcaagagagaa

SEQ ID NO: 8379 - DNA, 20 bp, Artificial Sequence
  Description of Artificial Sequence: Synthetic oligonucleotide
  Target: PCSK9; (-) strand; PAM type: NRG; PAM sequence: AAG
caagagaagaagcaagagag

SEQ ID NO: 8380 - DNA, 20 bp, Artificial Sequence
  Description of Artificial Sequence: Synthetic oligonucleotide
  Target: PCSK9; (-) strand; PAM type: NRG; PAM sequence: GAG
tggcaagagaagaagcaaga

SEQ ID NO: 8381 - DNA, 20 bp, Artificial Sequence
  Description of Artificial Sequence: Synthetic oligonucleotide
  Target: PCSK9; (-) strand; PAM type: NRG; PAM sequence: GAG
catggcaagagaagaagcaa

SEQ ID NO: 8382 - DNA, 20 bp, Artificial Sequence
  Description of Artificial Sequence: Synthetic oligonucleotide
  Target: PCSK9; (-) strand; PAM type: NRG; PAM sequence: AAG
cacatggcaagagaagaagc

SEQ ID NO: 8383 - DNA, 20 bp, Artificial Sequence
  Description of Artificial Sequence: Synthetic oligonucleotide
  Target: PCSK9; (-) strand; PAM type: NRG; PAM sequence: AAG
caatcacatggcaagagaag

SEQ ID NO: 8384 - DNA, 20 bp, Artificial Sequence
  Description of Artificial Sequence: Synthetic oligonucleotide
  Target: PCSK9; (-) strand; PAM type: NRG; PAM sequence: AAG
gatcaatcacatggcaagag

SEQ ID NO: 8385 - DNA, 20 bp, Artificial Sequence
  Description of Artificial Sequence: Synthetic oligonucleotide
  Target: PCSK9; (-) strand; PAM type: NRG; PAM sequence: GAG
agagatcaatcacatggcaa

SEQ ID NO: 8386 - DNA, 20 bp, Artificial Sequence
  Description of Artificial Sequence: Synthetic oligonucleotide
  Target: PCSK9; (-) strand; PAM type: NRG; PAM sequence: AAG
gcagagatcaatcacatggc

SEQ ID NO: 8387 - DNA, 20 bp, Artificial Sequence
  Description of Artificial Sequence: Synthetic oligonucleotide
  Target: PCSK9; (-) strand; PAM type: NRG; PAM sequence: TGG
atgtgcagagatcaatcaca

SEQ ID NO: 8388 - DNA, 20 bp, Artificial Sequence
  Description of Artificial Sequence: Synthetic oligonucleotide
  Target: PCSK9; (-) strand; PAM type: NRG; PAM sequence: GAG
aaggggagcctacatgtgca

SEQ ID NO: 8389 - DNA, 20 bp, Artificial Sequence
  Description of Artificial Sequence: Synthetic oligonucleotide
  Target: PCSK9; (-) strand; PAM type: NRG; PAM sequence: CAG
tgaaggggagcctacatgtg

SEQ ID NO: 8390 - DNA, 20 bp, Artificial Sequence
  Description of Artificial Sequence: Synthetic oligonucleotide
  Target: PCSK9; (-) strand; PAM type: NRG; PAM sequence: GAG
tgatggcagaaggtgaaggg

SEQ ID NO: 8391 - DNA, 20 bp, Artificial Sequence
  Description of Artificial Sequence: Synthetic oligonucleotide
  Target: PCSK9; (-) strand; PAM type: NRG; PAM sequence: GGG
actgatggcagaaggtgaag

SEQ ID NO: 8392 - DNA, 20 bp, Artificial Sequence
  Description of Artificial Sequence: Synthetic oligonucleotide
  Target: PCSK9; (-) strand; PAM type: NRG; PAM sequence: GGG
cactgatggcagaaggtgaa

SEQ ID NO: 8393 - DNA, 20 bp, Artificial Sequence
  Description of Artificial Sequence: Synthetic oligonucleotide
  Target: PCSK9; (-) strand; PAM type: NRG; PAM sequence: AGG
tcactgatggcagaaggtga

SEQ ID NO: 8394 - DNA, 20 bp, Artificial Sequence
  Description of Artificial Sequence: Synthetic oligonucleotide
  Target: PCSK9; (-) strand; PAM type: NRG; PAM sequence: AAG
ttcactgatggcagaaggtg

SEQ ID NO: 8395 - DNA, 20 bp, Artificial Sequence
  Description of Artificial Sequence: Synthetic oligonucleotide
  Target: PCSK9; (-) strand; PAM type: NRG; PAM sequence: AGG
ctgctttcactgatggcaga

SEQ ID NO: 8396 - DNA, 20 bp, Artificial Sequence
  Description of Artificial Sequence: Synthetic oligonucleotide
  Target: PCSK9; (-) strand; PAM type: NRG; PAM sequence: AAG
gctgctttcactgatggcag

SEQ ID NO: 8397 - DNA, 20 bp, Artificial Sequence
  Description of Artificial Sequence: Synthetic oligonucleotide
  Target: PCSK9; (-) strand; PAM type: NRG; PAM sequence: CAG
taagctgctttcactgatgg

SEQ ID NO: 8398 - DNA, 20 bp, Artificial Sequence
  Description of Artificial Sequence: Synthetic oligonucleotide
  Target: PCSK9; (-) strand; PAM type: NRG; PAM sequence: TGG
ccttaagctgctttcactga

SEQ ID NO: 8399 - DNA, 20 bp, Artificial Sequence
  Description of Artificial Sequence: Synthetic oligonucleotide
  Target: PCSK9; (-) strand; PAM type: NRG; PAM sequence: AAG
ctgcttctggtgagggcctt

SEQ ID NO: 8400 - DNA, 20 bp, Artificial Sequence
  Description of Artificial Sequence: Synthetic oligonucleotide
  Target: PCSK9; (-) strand; PAM type: NRG; PAM sequence: GGG
ccagcatctgcttctggtga

SEQ ID NO: 8401 - DNA, 20 bp, Artificial Sequence
  Description of Artificial Sequence: Synthetic oligonucleotide
  Target: PCSK9; (-) strand; PAM type: NRG; PAM sequence: AGG
accagcatctgcttctggtg

SEQ ID NO: 8402 - DNA, 20 bp, Artificial Sequence
  Description of Artificial Sequence: Synthetic oligonucleotide
  Target: PCSK9; (-) strand; PAM type: NRG; PAM sequence: GAG
caccagcatctgcttctggt

SEQ ID NO: 8403 - DNA, 20 bp, Artificial Sequence
  Description of Artificial Sequence: Synthetic oligonucleotide
  Target: PCSK9; (-) strand; PAM type: NRG; PAM sequence: TGG
atggcaccagcatctgcttc

SEQ ID NO: 8404 - DNA, 20 bp, Artificial Sequence
  Description of Artificial Sequence: Synthetic oligonucleotide
  Target: PCSK9; (-) strand; PAM type: NRG; PAM sequence: CAG
ctctccaggaagcatggcac

SEQ ID NO: 8405 - DNA, 20 bp, Artificial Sequence
  Description of Artificial Sequence: Synthetic oligonucleotide
  Target: PCSK9; (-) strand; PAM type: NRG; PAM sequence: TGG
tgcaagctctccaggaagca

SEQ ID NO: 8406 - DNA, 20 bp, Artificial Sequence
  Description of Artificial Sequence: Synthetic oligonucleotide
  Target: PCSK9; (-) strand; PAM type: NRG; PAM sequence: AAG
gattctgcaagctctccagg

SEQ ID NO: 8407 - DNA, 20 bp, Artificial Sequence
  Description of Artificial Sequence: Synthetic oligonucleotide
  Target: PCSK9; (-) strand; PAM type: NRG; PAM sequence: AGG
catgattctgcaagctctcc

SEQ ID NO: 8408 - DNA, 20 bp, Artificial Sequence
  Description of Artificial Sequence: Synthetic oligonucleotide
  Target: PCSK9; (-) strand; PAM type: NRG; PAM sequence: CAG
tcatgattctgcaagctctc

SEQ ID NO: 8409 - DNA, 20 bp, Artificial Sequence
  Description of Artificial Sequence: Synthetic oligonucleotide
  Target: PCSK9; (-) strand; PAM type: NRG; PAM sequence: AAG
tattcagctcatgattctgc

SEQ ID NO: 8410 - DNA, 20 bp, Artificial Sequence
  Description of Artificial Sequence: Synthetic oligonucleotide
  Target: PCSK9; (-) strand; PAM type: NRG; PAM sequence: CAG
acaaggaaaagggatttatt

SEQ ID NO: 8411 - DNA, 20 bp, Artificial Sequence
  Description of Artificial Sequence: Synthetic oligonucleotide
  Target: PCSK9; (-) strand; PAM type: NRG; PAM sequence: GGG
tgagtaatttacaaggaaaa

SEQ ID NO: 8412 - DNA, 20 bp, Artificial Sequence
  Description of Artificial Sequence: Synthetic oligonucleotide
  Target: PCSK9; (-) strand; PAM type: NRG; PAM sequence: AGG
gtgagtaatttacaaggaaa

SEQ ID NO: 8413 - DNA, 20 bp, Artificial Sequence
  Description of Artificial Sequence: Synthetic oligonucleotide
  Target: PCSK9; (-) strand; PAM type: NRG; PAM sequence: AAG
ggtgagtaatttacaaggaa

SEQ ID NO: 8414 - DNA, 20 bp, Artificial Sequence
  Description of Artificial Sequence: Synthetic oligonucleotide
  Target: PCSK9; (-) strand; PAM type: NRG; PAM sequence: AGG
ctgaaggtgagtaatttaca

SEQ ID NO: 8415 - DNA, 20 bp, Artificial Sequence
  Description of Artificial Sequence: Synthetic oligonucleotide
  Target: PCSK9; (-) strand; PAM type: NRG; PAM sequence: AAG
cctgaaggtgagtaatttac

SEQ ID NO: 8416 - DNA, 20 bp, Artificial Sequence
  Description of Artificial Sequence: Synthetic oligonucleotide
  Target: PCSK9; (-) strand; PAM type: NRG; PAM sequence: GAG
ataaaggaatacctgaaggt

SEQ ID NO: 8417 - DNA, 20 bp, Artificial Sequence
  Description of Artificial Sequence: Synthetic oligonucleotide
  Target: PCSK9; (-) strand; PAM type: NRG; PAM sequence: AGG
ctatataaaggaatacctga

SEQ ID NO: 8418 - DNA, 20 bp, Artificial Sequence
  Description of Artificial Sequence: Synthetic oligonucleotide
  Target: PCSK9; (-) strand; PAM type: NRG; PAM sequence: AAG
gctatataaaggaatacctg

SEQ ID NO: 8419 - DNA, 20 bp, Artificial Sequence
  Description of Artificial Sequence: Synthetic oligonucleotide
  Target: PCSK9; (-) strand; PAM type: NRG; PAM sequence: AGG
ccttttgtgttgctatataa

SEQ ID NO: 8420 - DNA, 20 bp, Artificial Sequence
  Description of Artificial Sequence: Synthetic oligonucleotide
  Target: PCSK9; (-) strand; PAM type: NRG; PAM sequence: AAG
tccttttgtgttgctatata

SEQ ID NO: 8421 - DNA, 20 bp, Artificial Sequence
  Description of Artificial Sequence: Synthetic oligonucleotide
  Target: PCSK9; (-) strand; PAM type: NRG; PAM sequence: TAG
aaaagtcaaggccactgtct

SEQ ID NO: 8422 - DNA, 20 bp, Artificial Sequence
  Description of Artificial Sequence: Synthetic oligonucleotide
  Target: PCSK9; (-) strand; PAM type: NRG; PAM sequence: AGG
ttaaagagagagaaaagtca

SEQ ID NO: 8423 - DNA, 20 bp, Artificial Sequence
  Description of Artificial Sequence: Synthetic oligonucleotide
  Target: PCSK9; (-) strand; PAM type: NRG; PAM sequence: AAG
cttaaagagagagaaaagtc

SEQ ID NO: 8424 - DNA, 20 bp, Artificial Sequence
  Description of Artificial Sequence: Synthetic oligonucleotide
  Target: PCSK9; (-) strand; PAM type: NRG; PAM sequence: AAG
cacttcttaaagagagagaa

SEQ ID NO: 8425 - DNA, 20 bp, Artificial Sequence
  Description of Artificial Sequence: Synthetic oligonucleotide
  Target: PCSK9; (-) strand; PAM type: NRG; PAM sequence: GAG
ggcaacacttcttaaagaga

SEQ ID NO: 8426 - DNA, 20 bp, Artificial Sequence
  Description of Artificial Sequence: Synthetic oligonucleotide
  Target: PCSK9; (-) strand; PAM type: NRG; PAM sequence: GAG
aaggcaacacttcttaaaga

SEQ ID NO: 8427 - DNA, 20 bp, Artificial Sequence
  Description of Artificial Sequence: Synthetic oligonucleotide
  Target: PCSK9; (-) strand; PAM type: NRG; PAM sequence: GAG
caaaggcaacacttcttaaa

SEQ ID NO: 8428 - DNA, 20 bp, Artificial Sequence
  Description of Artificial Sequence: Synthetic oligonucleotide
  Target: PCSK9; (-) strand; PAM type: NRG; PAM sequence: AAG
agcaaaggcaacacttctta

SEQ ID NO: 8429 - DNA, 20 bp, Artificial Sequence
  Description of Artificial Sequence: Synthetic oligonucleotide
  Target: PCSK9; (-) strand; PAM type: NRG; PAM sequence: AGG
agggatgactaagtgagcaa

SEQ ID NO: 8430 - DNA, 20 bp, Artificial Sequence
  Description of Artificial Sequence: Synthetic oligonucleotide
  Target: PCSK9; (-) strand; PAM type: NRG; PAM sequence: AAG
aagggatgactaagtgagca

SEQ ID NO: 8431 - DNA, 20 bp, Artificial Sequence
  Description of Artificial Sequence: Synthetic oligonucleotide
  Target: PCSK9; (-) strand; PAM type: NRG; PAM sequence: GAG
ggcagaagggatgactaagt

SEQ ID NO: 8432 - DNA, 20 bp, Artificial Sequence
  Description of Artificial Sequence: Synthetic oligonucleotide
  Target: PCSK9; (-) strand; PAM type: NRG; PAM sequence: AAG
tgcaggcagaagggatgact

SEQ ID NO: 8433 - DNA, 20 bp, Artificial Sequence
  Description of Artificial Sequence: Synthetic oligonucleotide
  Target: PCSK9; (-) strand; PAM type: NRG; PAM sequence: GGG
ctctacaaatgcaggcagaa

SEQ ID NO: 8434 - DNA, 20 bp, Artificial Sequence
  Description of Artificial Sequence: Synthetic oligonucleotide
  Target: PCSK9; (-) strand; PAM type: NRG; PAM sequence: AGG
gctctacaaatgcaggcaga

SEQ ID NO: 8435 - DNA, 20 bp, Artificial Sequence
  Description of Artificial Sequence: Synthetic oligonucleotide
  Target: PCSK9; (-) strand; PAM type: NRG; PAM sequence: AAG
tgctctacaaatgcaggcag

SEQ ID NO: 8436 - DNA, 20 bp, Artificial Sequence
  Description of Artificial Sequence: Synthetic oligonucleotide
  Target: PCSK9; (-) strand; PAM type: NRG; PAM sequence: CAG
agatgctctacaaatgcagg

SEQ ID NO: 8437 - DNA, 20 bp, Artificial Sequence
  Description of Artificial Sequence: Synthetic oligonucleotide
  Target: PCSK9; (-) strand; PAM type: NRG; PAM sequence: AGG
tccagatgctctacaaatgc

SEQ ID NO: 8438 - DNA, 20 bp, Artificial Sequence
  Description of Artificial Sequence: Synthetic oligonucleotide
  Target: PCSK9; (-) strand; PAM type: NRG; PAM sequence: CAG
atccagatgctctacaaatg

SEQ ID NO: 8439 - DNA, 20 bp, Artificial Sequence
  Description of Artificial Sequence: Synthetic oligonucleotide
  Target: PCSK9; (-) strand; PAM type: NRG; PAM sequence: CAG
ggttatataaatctcccatc

SEQ ID NO: 8440 - DNA, 20 bp, Artificial Sequence
  Description of Artificial Sequence: Synthetic oligonucleotide
  Target: PCSK9; (-) strand; PAM type: NRG; PAM sequence: CGG
gctgggaaagtcaagagtga

SEQ ID NO: 8441 - DNA, 20 bp, Artificial Sequence
  Description of Artificial Sequence: Synthetic oligonucleotide
  Target: PCSK9; (-) strand; PAM type: NRG; PAM sequence: GAG
aggcctgctgggaaagtcaa

SEQ ID NO: 8442 - DNA, 20 bp, Artificial Sequence
  Description of Artificial Sequence: Synthetic oligonucleotide
  Target: PCSK9; (-) strand; PAM type: NRG; PAM sequence: AAG
ataggcctgctgggaaagtc

SEQ ID NO: 8443 - DNA, 20 bp, Artificial Sequence
  Description of Artificial Sequence: Synthetic oligonucleotide
  Target: PCSK9; (-) strand; PAM type: NRG; PAM sequence: AAG
atgacataggcctgctggga

SEQ ID NO: 8444 - DNA, 20 bp, Artificial Sequence
  Description of Artificial Sequence: Synthetic oligonucleotide
  Target: PCSK9; (-) strand; PAM type: NRG; PAM sequence: GGG
acctatgacataggcctgct

SEQ ID NO: 8445 - DNA, 20 bp, Artificial Sequence
  Description of Artificial Sequence: Synthetic oligonucleotide
  Target: PCSK9; (-) strand; PAM type: NRG; PAM sequence: TGG
tacctatgacataggcctgc

SEQ ID NO: 8446 - DNA, 20 bp, Artificial Sequence
  Description of Artificial Sequence: Synthetic oligonucleotide
  Target: PCSK9; (-) strand; PAM type: NRG; PAM sequence: AGG
gaccacagtacctatgacat

SEQ ID NO: 8447 - DNA, 20 bp, Artificial Sequence
  Description of Artificial Sequence: Synthetic oligonucleotide
  Target: PCSK9; (-) strand; PAM type: NRG; PAM sequence: TAG
agaccacagtacctatgaca

SEQ ID NO: 8448 - DNA, 20 bp, Artificial Sequence
  Description of Artificial Sequence: Synthetic oligonucleotide
  Target: PCSK9; (-) strand; PAM type: NRG; PAM sequence: CAG
ctgctgtattgtagagacca

SEQ ID NO: 8449 - DNA, 20 bp, Artificial Sequence
  Description of Artificial Sequence: Synthetic oligonucleotide
  Target: PCSK9; (-) strand; PAM type: NRG; PAM sequence: GAG
gatacctctgctgtattgta

SEQ ID NO: 8450 - DNA, 20 bp, Artificial Sequence
  Description of Artificial Sequence: Synthetic oligonucleotide
  Target: PCSK9; (-) strand; PAM type: NRG; PAM sequence: TAG
cagatacctctgctgtattg

SEQ ID NO: 8451 - DNA, 20 bp, Artificial Sequence
  Description of Artificial Sequence: Synthetic oligonucleotide
  Target: PCSK9; (-) strand; PAM type: NRG; PAM sequence: CAG
cactcaacctctcggagcct

SEQ ID NO: 8452 - DNA, 20 bp, Artificial Sequence
  Description of Artificial Sequence: Synthetic oligonucleotide
  Target: PCSK9; (-) strand; PAM type: NRG; PAM sequence: GAG
gcaagtcactcaacctctcg

SEQ ID NO: 8453 - DNA, 20 bp, Artificial Sequence
  Description of Artificial Sequence: Synthetic oligonucleotide
  Target: PCSK9; (-) strand; PAM type: NRG; PAM sequence: CGG
gagcaagtcactcaacctct

SEQ ID NO: 8454 - DNA, 20 bp, Artificial Sequence
  Description of Artificial Sequence: Synthetic oligonucleotide
  Target: PCSK9; (-) strand; PAM type: NRG; PAM sequence: AAG
ctggttgtgcagccatgagc

SEQ ID NO: 8455 - DNA, 20 bp, Artificial Sequence
  Description of Artificial Sequence: Synthetic oligonucleotide
  Target: PCSK9; (-) strand; PAM type: NRG; PAM sequence: GAG
tttactggttgtgcagccat

SEQ ID NO: 8456 - DNA, 20 bp, Artificial Sequence
  Description of Artificial Sequence: Synthetic oligonucleotide
  Target: PCSK9; (-) strand; PAM type: NRG; PAM sequence: CAG
tccaatatttactggttgtg

SEQ ID NO: 8457 - DNA, 20 bp, Artificial Sequence
  Description of Artificial Sequence: Synthetic oligonucleotide
  Target: PCSK9; (-) strand; PAM type: NRG; PAM sequence: TGG
attccagctccaatatttac

SEQ ID NO: 8458 - DNA, 20 bp, Artificial Sequence
  Description of Artificial Sequence: Synthetic oligonucleotide
  Target: PCSK9; (-) strand; PAM type: NRG; PAM sequence: CAG
gaaaccgtggacctgaattc

SEQ ID NO: 8459 - DNA, 20 bp, Artificial Sequence
  Description of Artificial Sequence: Synthetic oligonucleotide
  Target: PCSK9; (-) strand; PAM type: NRG; PAM sequence: TGG
gctttggagccaggaaaccg

SEQ ID NO: 8460 - DNA, 20 bp, Artificial Sequence
  Description of Artificial Sequence: Synthetic oligonucleotide
  Target: PCSK9; (-) strand; PAM type: NRG; PAM sequence: AGG
aaatcatgggctttggagcc

SEQ ID NO: 8461 - DNA, 20 bp, Artificial Sequence
  Description of Artificial Sequence: Synthetic oligonucleotide
  Target: PCSK9; (-) strand; PAM type: NRG; PAM sequence: CAG
aaaatcatgggctttggagc

SEQ ID NO: 8462 - DNA, 20 bp, Artificial Sequence
  Description of Artificial Sequence: Synthetic oligonucleotide
  Target: PCSK9; (-) strand; PAM type: NRG; PAM sequence: GAG
ggaaaaaatcatgggctttg

SEQ ID NO: 8463 - DNA, 20 bp, Artificial Sequence
  Description of Artificial Sequence: Synthetic oligonucleotide
  Target: PCSK9; (-) strand; PAM type: NRG; PAM sequence: TGG
agggaaaaaatcatgggctt

SEQ ID NO: 8464 - DNA, 20 bp, Artificial Sequence
  Description of Artificial Sequence: Synthetic oligonucleotide
  Target: PCSK9; (-) strand; PAM type: NRG; PAM sequence: GGG
aaattgagggaaaaaatcat

SEQ ID NO: 8465 - DNA, 20 bp, Artificial Sequence
  Description of Artificial Sequence: Synthetic oligonucleotide
  Target: PCSK9; (-) strand; PAM type: NRG; PAM sequence: TGG
taaattgagggaaaaaatca

SEQ ID NO: 8466 - DNA, 20 bp, Artificial Sequence
  Description of Artificial Sequence: Synthetic oligonucleotide
  Target: PCSK9; (-) strand; PAM type: NRG; PAM sequence: GGG
ccccagtcagaataaattga

SEQ ID NO: 8467 - DNA, 20 bp, Artificial Sequence
  Description of Artificial Sequence: Synthetic oligonucleotide
  Target: PCSK9; (-) strand; PAM type: NRG; PAM sequence: AGG
gccccagtcagaataaattg

SEQ ID NO: 8468 - DNA, 20 bp, Artificial Sequence
  Description of Artificial Sequence: Synthetic oligonucleotide
  Target: PCSK9; (-) strand; PAM type: NRG; PAM sequence: GAG
tgccccagtcagaataaatt

SEQ ID NO: 8469 - DNA, 20 bp, Artificial Sequence
  Description of Artificial Sequence: Synthetic oligonucleotide
  Target: PCSK9; (-) strand; PAM type: NRG; PAM sequence: CAG
cccctcccccatgccccagt

SEQ ID NO: 8470 - DNA, 20 bp, Artificial Sequence
  Description of Artificial Sequence: Synthetic oligonucleotide
  Target: PCSK9; (-) strand; PAM type: NRG; PAM sequence: CAG
ccaccccctcccccatgccc

SEQ ID NO: 8471 - DNA, 20 bp, Artificial Sequence
  Description of Artificial Sequence: Synthetic oligonucleotide
  Target: PCSK9; (-) strand; PAM type: NRG; PAM sequence: AGG
ctcctggtggccctgcccaa

SEQ ID NO: 8472 - DNA, 20 bp, Artificial Sequence
  Description of Artificial Sequence: Synthetic oligonucleotide
  Target: PCSK9; (-) strand; PAM type: NRG; PAM sequence: AAG
gctcctggtggccctgccca

SEQ ID NO: 8473 - DNA, 20 bp, Artificial Sequence
  Description of Artificial Sequence: Synthetic oligonucleotide
  Target: PCSK9; (-) strand; PAM type: NRG; PAM sequence: TGG
acgggcctggtcgctcctgg

SEQ ID NO: 8474 - DNA, 20 bp, Artificial Sequence
  Description of Artificial Sequence: Synthetic oligonucleotide
  Target: PCSK9; (-) strand; PAM type: NRG; PAM sequence: TGG
tctacgggcctggtcgctcc

SEQ ID NO: 8475 - DNA, 20 bp, Artificial Sequence
  Description of Artificial Sequence: Synthetic oligonucleotide
  Target: PCSK9; (-) strand; PAM type: NRG; PAM sequence: TGG
cacccagctctctacgggcc

SEQ ID NO: 8476 - DNA, 20 bp, Artificial Sequence
  Description of Artificial Sequence: Synthetic oligonucleotide
  Target: PCSK9; (-) strand; PAM type: NRG; PAM sequence: GGG
acctgcacccagctctctac

SEQ ID NO: 8477 - DNA, 20 bp, Artificial Sequence
  Description of Artificial Sequence: Synthetic oligonucleotide
  Target: PCSK9; (-) strand; PAM type: NRG; PAM sequence: CGG
tacctgcacccagctctcta

SEQ ID NO: 8478 - DNA, 20 bp, Artificial Sequence
  Description of Artificial Sequence: Synthetic oligonucleotide
  Target: PCSK9; (-) strand; PAM type: NRG; PAM sequence: CAG
ttttcctctgtacctgcacc

SEQ ID NO: 8479 - DNA, 20 bp, Artificial Sequence
  Description of Artificial Sequence: Synthetic oligonucleotide
  Target: PCSK9; (-) strand; PAM type: NRG; PAM sequence: AGG
tacgggccacactcgacaac

SEQ ID NO: 8480 - DNA, 20 bp, Artificial Sequence
  Description of Artificial Sequence: Synthetic oligonucleotide
  Target: PCSK9; (-) strand; PAM type: NRG; PAM sequence: CAG
ctacgggccacactcgacaa

SEQ ID NO: 8481 - DNA, 20 bp, Artificial Sequence
  Description of Artificial Sequence: Synthetic oligonucleotide
  Target: PCSK9; (-) strand; PAM type: NRG; PAM sequence: GGG
caggcaaaaatgggaactac

SEQ ID NO: 8482 - DNA, 20 bp, Artificial Sequence
  Description of Artificial Sequence: Synthetic oligonucleotide
  Target: PCSK9; (-) strand; PAM type: NRG; PAM sequence: CGG
tcaggcaaaaatgggaacta

SEQ ID NO: 8483 - DNA, 20 bp, Artificial Sequence
  Description of Artificial Sequence: Synthetic oligonucleotide
  Target: PCSK9; (-) strand; PAM type: NRG; PAM sequence: GGG
tgtgccattcaggcaaaaat

SEQ ID NO: 8484 - DNA, 20 bp, Artificial Sequence
  Description of Artificial Sequence: Synthetic oligonucleotide
  Target: PCSK9; (-) strand; PAM type: NRG; PAM sequence: TGG
atgtgccattcaggcaaaaa

SEQ ID NO: 8485 - DNA, 20 bp, Artificial Sequence
  Description of Artificial Sequence: Synthetic oligonucleotide
  Target: PCSK9; (-) strand; PAM type: NRG; PAM sequence: AGG
cactttcaaatgtgccattc

SEQ ID NO: 8486 - DNA, 20 bp, Artificial Sequence
  Description of Artificial Sequence: Synthetic oligonucleotide
  Target: PCSK9; (-) strand; PAM type: NRG; PAM sequence: CAG
acactttcaaatgtgccatt

SEQ ID NO: 8487 - DNA, 20 bp, Artificial Sequence
  Description of Artificial Sequence: Synthetic oligonucleotide
  Target: PCSK9; (-) strand; PAM type: NRG; PAM sequence: TGG
gccaactattattattcaca

SEQ ID NO: 8488 - DNA, 20 bp, Artificial Sequence
  Description of Artificial Sequence: Synthetic oligonucleotide
  Target: PCSK9; (-) strand; PAM type: NRG; PAM sequence: AGG
gcaaattaaagaactcatat

SEQ ID NO: 8489 - DNA, 20 bp, Artificial Sequence
  Description of Artificial Sequence: Synthetic oligonucleotide
  Target: PCSK9; (-) strand; PAM type: NRG; PAM sequence: TAG
agcaaattaaagaactcata

SEQ ID NO: 8490 - DNA, 20 bp, Artificial Sequence
  Description of Artificial Sequence: Synthetic oligonucleotide
  Target: PCSK9; (-) strand; PAM type: NRG; PAM sequence: AAG
gcggaccaaaaagcaaatta

SEQ ID NO: 8491 - DNA, 20 bp, Artificial Sequence
  Description of Artificial Sequence: Synthetic oligonucleotide
  Target: PCSK9; (-) strand; PAM type: NRG; PAM sequence: AAG
gttaccaaatgcggaccaaa

SEQ ID NO: 8492 - DNA, 20 bp, Artificial Sequence
  Description of Artificial Sequence: Synthetic oligonucleotide
  Target: PCSK9; (-) strand; PAM type: NRG; PAM sequence: CGG
gataaagaagttaccaaatg

SEQ ID NO: 8493 - DNA, 20 bp, Artificial Sequence
  Description of Artificial Sequence: Synthetic oligonucleotide
  Target: PCSK9; (-) strand; PAM type: NRG; PAM sequence: AAG
gagtatagtagatgataaag

SEQ ID NO: 8494 - DNA, 20 bp, Artificial Sequence
  Description of Artificial Sequence: Synthetic oligonucleotide
  Target: PCSK9; (-) strand; PAM type: NRG; PAM sequence: AAG
acagagtatagtagatgata

SEQ ID NO: 8495 - DNA, 20 bp, Artificial Sequence
  Description of Artificial Sequence: Synthetic oligonucleotide
  Target: PCSK9; (-) strand; PAM type: NRG; PAM sequence: TAG
agagacacaacagagtatag

SEQ ID NO: 8496 - DNA, 20 bp, Artificial Sequence
  Description of Artificial Sequence: Synthetic oligonucleotide
  Target: PCSK9; (-) strand; PAM type: NRG; PAM sequence: TAG
aaaagagacacaacagagta

SEQ ID NO: 8497 - DNA, 20 bp, Artificial Sequence
  Description of Artificial Sequence: Synthetic oligonucleotide
  Target: PCSK9; (-) strand; PAM type: NRG; PAM sequence: GAG
acaacaaaagagacacaaca

SEQ ID NO: 8498 - DNA, 20 bp, Artificial Sequence
  Description of Artificial Sequence: Synthetic oligonucleotide
  Target: PCSK9; (-) strand; PAM type: NRG; PAM sequence: CAG
ttacaacaaaagagacacaa

SEQ ID NO: 8499 - DNA, 20 bp, Artificial Sequence
  Description of Artificial Sequence: Synthetic oligonucleotide
  Target: PCSK9; (-) strand; PAM type: NRG; PAM sequence: GAG
acttacaaattacaacaaaa

SEQ ID NO: 8500 - DNA, 20 bp, Artificial Sequence
  Description of Artificial Sequence: Synthetic oligonucleotide
  Target: PCSK9; (-) strand; PAM type: NRG; PAM sequence: AAG
ctacttacaaattacaacaa

SEQ ID NO: 8501 - DNA, 20 bp, Artificial Sequence
  Description of Artificial Sequence: Synthetic oligonucleotide
  Target: PCSK9; (-) strand; PAM type: NRG; PAM sequence: AGG
gaagaaacccagcaaaccct

SEQ ID NO: 8502 - DNA, 20 bp, Artificial Sequence
  Description of Artificial Sequence: Synthetic oligonucleotide
  Target: PCSK9; (-) strand; PAM type: NRG; PAM sequence: TAG
ggaagaaacccagcaaaccc

SEQ ID NO: 8503 - DNA, 20 bp, Artificial Sequence
  Description of Artificial Sequence: Synthetic oligonucleotide
  Target: PCSK9; (-) strand; PAM type: NRG; PAM sequence: CAG
atgatgacatggaagaaacc

SEQ ID NO: 8504 - DNA, 20 bp, Artificial Sequence
  Description of Artificial Sequence: Synthetic oligonucleotide
  Target: PCSK9; (-) strand; PAM type: NRG; PAM sequence: AAG
ggaggaacatgatgacatgg

SEQ ID NO: 8505 - DNA, 20 bp, Artificial Sequence
  Description of Artificial Sequence: Synthetic oligonucleotide
  Target: PCSK9; (-) strand; PAM type: NRG; PAM sequence: TGG
caaggaggaacatgatgaca

SEQ ID NO: 8506 - DNA, 20 bp, Artificial Sequence
  Description of Artificial Sequence: Synthetic oligonucleotide
  Target: PCSK9; (-) strand; PAM type: NRG; PAM sequence: AGG
gatcctggccccatgcaagg

SEQ ID NO: 8507 - DNA, 20 bp, Artificial Sequence
  Description of Artificial Sequence: Synthetic oligonucleotide
  Target: PCSK9; (-) strand; PAM type: NRG; PAM sequence: GAG
ggatcctggccccatgcaag

SEQ ID NO: 8508 - DNA, 20 bp, Artificial Sequence
  Description of Artificial Sequence: Synthetic oligonucleotide
  Target: PCSK9; (-) strand; PAM type: NRG; PAM sequence: AGG
acggatcctggccccatgca

SEQ ID NO: 8509 - DNA, 20 bp, Artificial Sequence
  Description of Artificial Sequence: Synthetic oligonucleotide
  Target: PCSK9; (-) strand; PAM type: NRG; PAM sequence: AAG
cacggatcctggccccatgc

SEQ ID NO: 8510 - DNA, 20 bp, Artificial Sequence
  Description of Artificial Sequence: Synthetic oligonucleotide
  Target: PCSK9; (-) strand; PAM type: NRG; PAM sequence: TGG
caggcaacctccacggatcc

SEQ ID NO: 8511 - DNA, 20 bp, Artificial Sequence
  Description of Artificial Sequence: Synthetic oligonucleotide
  Target: PCSK9; (-) strand; PAM type: NRG; PAM sequence: CGG
taggtgccaggcaacctcca

SEQ ID NO: 8512 - DNA, 20 bp, Artificial Sequence
  Description of Artificial Sequence: Synthetic oligonucleotide
  Target: PCSK9; (-) strand; PAM type: NRG; PAM sequence: AGG
agcaccaccacgtaggtgcc

SEQ ID NO: 8513 - DNA, 20 bp, Artificial Sequence
  Description of Artificial Sequence: Synthetic oligonucleotide
  Target: PCSK9; (-) strand; PAM type: NRG; PAM sequence: CAG
cagcaccaccacgtaggtgc

SEQ ID NO: 8514 - DNA, 20 bp, Artificial Sequence
  Description of Artificial Sequence: Synthetic oligonucleotide
  Target: PCSK9; (-) strand; PAM type: NRG; PAM sequence: AGG
ctccttcagcaccaccacgt

SEQ ID NO: 8515 - DNA, 20 bp, Artificial Sequence
  Description of Artificial Sequence: Synthetic oligonucleotide
  Target: PCSK9; (-) strand; PAM type: NRG; PAM sequence: TAG
cctccttcagcaccaccacg

SEQ ID NO: 8516 - DNA, 20 bp, Artificial Sequence
  Description of Artificial Sequence: Synthetic oligonucleotide
  Target: PCSK9; (-) strand; PAM type: NRG; PAM sequence: CAG
gagaggtgggtctcctcctt

SEQ ID NO: 8517 - DNA, 20 bp, Artificial Sequence
  Description of Artificial Sequence: Synthetic oligonucleotide
  Target: PCSK9; (-) strand; PAM type: NRG; PAM sequence: GGG
gcgctctgactgcgagaggt

SEQ ID NO: 8518 - DNA, 20 bp, Artificial Sequence
  Description of Artificial Sequence: Synthetic oligonucleotide
  Target: PCSK9; (-) strand; PAM type: NRG; PAM sequence: TGG
tgcgctctgactgcgagagg

SEQ ID NO: 8519 - DNA, 20 bp, Artificial Sequence
  Description of Artificial Sequence: Synthetic oligonucleotide
  Target: PCSK9; (-) strand; PAM type: NRG; PAM sequence: AGG
cagtgcgctctgactgcgag

SEQ ID NO: 8520 - DNA, 20 bp, Artificial Sequence
  Description of Artificial Sequence: Synthetic oligonucleotide
  Target: PCSK9; (-) strand; PAM type: NRG; PAM sequence: GAG
gcagtgcgctctgactgcga

SEQ ID NO: 8521 - DNA, 20 bp, Artificial Sequence
  Description of Artificial Sequence: Synthetic oligonucleotide
  Target: PCSK9; (-) strand; PAM type: NRG; PAM sequence: GAG
gggcagtgcgctctgactgc

SEQ ID NO: 8522 - DNA, 20 bp, Artificial Sequence
  Description of Artificial Sequence: Synthetic oligonucleotide
  Target: PCSK9; (-) strand; PAM type: NRG; PAM sequence: CAG
ctgggcctgcaggcggcggg

SEQ ID NO: 8523 - DNA, 20 bp, Artificial Sequence
  Description of Artificial Sequence: Synthetic oligonucleotide
  Target: PCSK9; (-) strand; PAM type: NRG; PAM sequence: GGG
agcctgggcctgcaggcggc

SEQ ID NO: 8524 - DNA, 20 bp, Artificial Sequence
  Description of Artificial Sequence: Synthetic oligonucleotide
  Target: PCSK9; (-) strand; PAM type: NRG; PAM sequence: CGG
cagcctgggcctgcaggcgg

SEQ ID NO: 8525 - DNA, 20 bp, Artificial Sequence
  Description of Artificial Sequence: Synthetic oligonucleotide
  Target: PCSK9; (-) strand; PAM type: NRG; PAM sequence: CGG
gggcagcctgggcctgcagg

SEQ ID NO: 8526 - DNA, 20 bp, Artificial Sequence
  Description of Artificial Sequence: Synthetic oligonucleotide
  Target: PCSK9; (-) strand; PAM type: NRG; PAM sequence: AGG
ggcgggcagcctgggcctgc

SEQ ID NO: 8527 - DNA, 20 bp, Artificial Sequence
  Description of Artificial Sequence: Synthetic oligonucleotide
  Target: PCSK9; (-) strand; PAM type: NRG; PAM sequence: CAG
cggcgggcagcctgggcctg

SEQ ID NO: 8528 - DNA, 20 bp, Artificial Sequence
  Description of Artificial Sequence: Synthetic oligonucleotide
  Target: PCSK9; (-) strand; PAM type: NRG; PAM sequence: GGG
gtatccccggcgggcagcct

SEQ ID NO: 8529 - DNA, 20 bp, Artificial Sequence
  Description of Artificial Sequence: Synthetic oligonucleotide
  Target: PCSK9; (-) strand; PAM type: NRG; PAM sequence: TGG
ggtatccccggcgggcagcc

SEQ ID NO: 8530 - DNA, 20 bp, Artificial Sequence
  Description of Artificial Sequence: Synthetic oligonucleotide
  Target: PCSK9; (-) strand; PAM type: NRG; PAM sequence: CAG
ggtgaggtatccccggcggg

SEQ ID NO: 8531 - DNA, 20 bp, Artificial Sequence
  Description of Artificial Sequence: Synthetic oligonucleotide
  Target: PCSK9; (-) strand; PAM type: NRG; PAM sequence: GGG
cttggtgaggtatccccggc

SEQ ID NO: 8532 - DNA, 20 bp, Artificial Sequence
  Description of Artificial Sequence: Synthetic oligonucleotide
  Target: PCSK9; (-) strand; PAM type: NRG; PAM sequence: CGG
tcttggtgaggtatccccgg

SEQ ID NO: 8533 - DNA, 20 bp, Artificial Sequence
  Description of Artificial Sequence: Synthetic oligonucleotide
  Target: PCSK9; (-) strand; PAM type: NRG; PAM sequence: CGG
ggatcttggtgaggtatccc

SEQ ID NO: 8534 - DNA, 20 bp, Artificial Sequence
  Description of Artificial Sequence: Synthetic oligonucleotide
  Target: PCSK9; (-) strand; PAM type: NRG; PAM sequence: AGG
agacatgcaggatcttggtg

SEQ ID NO: 8535 - DNA, 20 bp, Artificial Sequence
  Description of Artificial Sequence: Synthetic oligonucleotide
  Target: PCSK9; (-) strand; PAM type: NRG; PAM sequence: GAG
aagacatgcaggatcttggt

SEQ ID NO: 8536 - DNA, 20 bp, Artificial Sequence
  Description of Artificial Sequence: Synthetic oligonucleotide
  Target: PCSK9; (-) strand; PAM type: NRG; PAM sequence: TGG
atggaagacatgcaggatct

SEQ ID NO: 8537 - DNA, 20 bp, Artificial Sequence
  Description of Artificial Sequence: Synthetic oligonucleotide
  Target: PCSK9; (-) strand; PAM type: NRG; PAM sequence: AGG
gaaggccatggaagacatgc

SEQ ID NO: 8538 - DNA, 20 bp, Artificial Sequence
  Description of Artificial Sequence: Synthetic oligonucleotide
  Target: PCSK9; (-) strand; PAM type: NRG; PAM sequence: CAG
agaaggccatggaagacatg

SEQ ID NO: 8539 - DNA, 20 bp, Artificial Sequence
  Description of Artificial Sequence: Synthetic oligonucleotide
  Target: PCSK9; (-) strand; PAM type: NRG; PAM sequence: AAG
agccaggaagaaggccatgg

SEQ ID NO: 8540 - DNA, 20 bp, Artificial Sequence
  Description of Artificial Sequence: Synthetic oligonucleotide
  Target: PCSK9; (-) strand; PAM type: NRG; PAM sequence: TGG
ggaagccaggaagaaggcca

SEQ ID NO: 8541 - DNA, 20 bp, Artificial Sequence
  Description of Artificial Sequence: Synthetic oligonucleotide
  Target: PCSK9; (-) strand; PAM type: NRG; PAM sequence: AGG
tcaccaggaagccaggaaga

SEQ ID NO: 8542 - DNA, 20 bp, Artificial Sequence
  Description of Artificial Sequence: Synthetic oligonucleotide
  Target: PCSK9; (-) strand; PAM type: NRG; PAM sequence: AAG
ttcaccaggaagccaggaag

SEQ ID NO: 8543 - DNA, 20 bp, Artificial Sequence
  Description of Artificial Sequence: Synthetic oligonucleotide
  Target: PCSK9; (-) strand; PAM type: NRG; PAM sequence: AAG
atcttcaccaggaagccagg

SEQ ID NO: 8544 - DNA, 20 bp, Artificial Sequence
  Description of Artificial Sequence: Synthetic oligonucleotide
  Target: PCSK9; (-) strand; PAM type: NRG; PAM sequence: AGG
ctcatcttcaccaggaagcc

SEQ ID NO: 8545 - DNA, 20 bp, Artificial Sequence
  Description of Artificial Sequence: Synthetic oligonucleotide
  Target: PCSK9; (-) strand; PAM type: NRG; PAM sequence: CAG
actcatcttcaccaggaagc

SEQ ID NO: 8546 - DNA, 20 bp, Artificial Sequence
  Description of Artificial Sequence: Synthetic oligonucleotide
  Target: PCSK9; (-) strand; PAM type: NRG; PAM sequence: AAG
cgccactcatcttcaccagg

SEQ ID NO: 8547 - DNA, 20 bp, Artificial Sequence
  Description of Artificial Sequence: Synthetic oligonucleotide
  Target: PCSK9; (-) strand; PAM type: NRG; PAM sequence: AGG
ggtcgccactcatcttcacc

SEQ ID NO: 8548 - DNA, 20 bp, Artificial Sequence
  Description of Artificial Sequence: Synthetic oligonucleotide
  Target: PCSK9; (-) strand; PAM type: NRG; PAM sequence: CAG
aggtcgccactcatcttcac

SEQ ID NO: 8549 - DNA, 20 bp, Artificial Sequence
  Description of Artificial Sequence: Synthetic oligonucleotide
  Target: PCSK9; (-) strand; PAM type: NRG; PAM sequence: AGG
ggtggctcaccagctccagc

SEQ ID NO: 8550 - DNA, 20 bp, Artificial Sequence
  Description of Artificial Sequence: Synthetic oligonucleotide
  Target: PCSK9; (-) strand; PAM type: NRG; PAM sequence: CAG
gggtggctcaccagctccag

SEQ ID NO: 8551 - DNA, 20 bp, Artificial Sequence
  Description of Artificial Sequence: Synthetic oligonucleotide
  Target: PCSK9; (-) strand; PAM type: NRG; PAM sequence: CAG
aaagggtggctcaccagctc

SEQ ID NO: 8552 - DNA, 20 bp, Artificial Sequence
  Description of Artificial Sequence: Synthetic oligonucleotide
  Target: PCSK9; (-) strand; PAM type: NRG; PAM sequence: CAG
tcccaaaaagggtggctcac

SEQ ID NO: 8553 - DNA, 20 bp, Artificial Sequence
  Description of Artificial Sequence: Synthetic oligonucleotide
  Target: PCSK9; (-) strand; PAM type: NRG; PAM sequence: TGG
agtgccattcccaaaaaggg

SEQ ID NO: 8554 - DNA, 20 bp, Artificial Sequence
  Description of Artificial Sequence: Synthetic oligonucleotide
  Target: PCSK9; (-) strand; PAM type: NRG; PAM sequence: GGG
ggaagtgccattcccaaaaa

SEQ ID NO: 8555 - DNA, 20 bp, Artificial Sequence
  Description of Artificial Sequence: Synthetic oligonucleotide
  Target: PCSK9; (-) strand; PAM type: NRG; PAM sequence: AGG
aggaagtgccattcccaaaa

SEQ ID NO: 8556 - DNA, 20 bp, Artificial Sequence
  Description of Artificial Sequence: Synthetic oligonucleotide
  Target: PCSK9; (-) strand; PAM type: NRG; PAM sequence: AAG
caggaagtgccattcccaaa

SEQ ID NO: 8557 - DNA, 20 bp, Artificial Sequence
  Description of Artificial Sequence: Synthetic oligonucleotide
  Target: PCSK9; (-) strand; PAM type: NRG; PAM sequence: AAG
agtggcccagccctatcagg

SEQ ID NO: 8558 - DNA, 20 bp, Artificial Sequence
  Description of Artificial Sequence: Synthetic oligonucleotide
  Target: PCSK9; (-) strand; PAM type: NRG; PAM sequence: AGG
tgcagtggcccagccctatc

SEQ ID NO: 8559 - DNA, 20 bp, Artificial Sequence
  Description of Artificial Sequence: Synthetic oligonucleotide
  Target: PCSK9; (-) strand; PAM type: NRG; PAM sequence: CAG
atgcagtggcccagccctat

SEQ ID NO: 8560 - DNA, 20 bp, Artificial Sequence
  Description of Artificial Sequence: Synthetic oligonucleotide
  Target: PCSK9; (-) strand; PAM type: NRG; PAM sequence: CAG
ccagtgtatatgcagtggcc

SEQ ID NO: 8561 - DNA, 20 bp, Artificial Sequence
  Description of Artificial Sequence: Synthetic oligonucleotide
  Target: PCSK9; (-) strand; PAM type: NRG; PAM sequence: TGG
agtccccagtgtatatgcag

SEQ ID NO: 8562 - DNA, 20 bp, Artificial Sequence
  Description of Artificial Sequence: Synthetic oligonucleotide
  Target: PCSK9; (-) strand; PAM type: NRG; PAM sequence: CAG
cacagtccccagtgtatatg

SEQ ID NO: 8563 - DNA, 20 bp, Artificial Sequence
  Description of Artificial Sequence: Synthetic oligonucleotide
  Target: PCSK9; (-) strand; PAM type: NRG; PAM sequence: CAG
ggcctactaagcacagtccc

SEQ ID NO: 8564 - DNA, 20 bp, Artificial Sequence
  Description of Artificial Sequence: Synthetic oligonucleotide
  Target: PCSK9; (-) strand; PAM type: NRG; PAM sequence: CAG
agcaatgggcctactaagca

SEQ ID NO: 8565 - DNA, 20 bp, Artificial Sequence
  Description of Artificial Sequence: Synthetic oligonucleotide
  Target: PCSK9; (-) strand; PAM type: NRG; PAM sequence: AAG
ttttcagcaatgggcctact

SEQ ID NO: 8566 - DNA, 20 bp, Artificial Sequence
  Description of Artificial Sequence: Synthetic oligonucleotide
  Target: PCSK9; (-) strand; PAM type: NRG; PAM sequence: GGG
cccttctgattttcagcaat

SEQ ID NO: 8567 - DNA, 20 bp, Artificial Sequence
  Description of Artificial Sequence: Synthetic oligonucleotide
  Target: PCSK9; (-) strand; PAM type: NRG; PAM sequence: TGG
ccccttctgattttcagcaa

SEQ ID NO: 8568 - DNA, 20 bp, Artificial Sequence
  Description of Artificial Sequence: Synthetic oligonucleotide
  Target: PCSK9; (-) strand; PAM type: NRG; PAM sequence: CAG
tgctgtccccttctgatttt

SEQ ID NO: 8569 - DNA, 20 bp, Artificial Sequence
  Description of Artificial Sequence: Synthetic oligonucleotide
  Target: PCSK9; (-) strand; PAM type: NRG; PAM sequence: AAG
tactgtgcttggtacccgat

SEQ ID NO: 8570 - DNA, 20 bp, Artificial Sequence
  Description of Artificial Sequence: Synthetic oligonucleotide
  Target: PCSK9; (-) strand; PAM type: NRG; PAM sequence: TGG
aagccagtagttactgtgct

SEQ ID NO: 8571 - DNA, 20 bp, Artificial Sequence
  Description of Artificial Sequence: Synthetic oligonucleotide
  Target: PCSK9; (-) strand; PAM type: NRG; PAM sequence: TAG
aattctatacagaaagccag

SEQ ID NO: 8572 - DNA, 20 bp, Artificial Sequence
  Description of Artificial Sequence: Synthetic oligonucleotide
  Target: PCSK9; (-) strand; PAM type: NRG; PAM sequence: CAG
gggaattctatacagaaagc

SEQ ID NO: 8573 - DNA, 20 bp, Artificial Sequence
  Description of Artificial Sequence: Synthetic oligonucleotide
  Target: PCSK9; (-) strand; PAM type: NRG; PAM sequence: AAG
taaagggaattctatacaga

SEQ ID NO: 8574 - DNA, 20 bp, Artificial Sequence
  Description of Artificial Sequence: Synthetic oligonucleotide
  Target: PCSK9; (-) strand; PAM type: NRG; PAM sequence: CAG
ggcttaaagggaattctata

SEQ ID NO: 8575 - DNA, 20 bp, Artificial Sequence
  Description of Artificial Sequence: Synthetic oligonucleotide
  Target: PCSK9; (-) strand; PAM type: NRG; PAM sequence: GGG
ggggcatggccaggcttaaa

SEQ ID NO: 8576 - DNA, 20 bp, Artificial Sequence
  Description of Artificial Sequence: Synthetic oligonucleotide
  Target: PCSK9; (-) strand; PAM type: NRG; PAM sequence: AGG
tggggcatggccaggcttaa

SEQ ID NO: 8577 - DNA, 20 bp, Artificial Sequence
  Description of Artificial Sequence: Synthetic oligonucleotide
  Target: PCSK9; (-) strand; PAM type: NRG; PAM sequence: AAG
ctggggcatggccaggctta

SEQ ID NO: 8578 - DNA, 20 bp, Artificial Sequence
  Description of Artificial Sequence: Synthetic oligonucleotide
  Target: PCSK9; (-) strand; PAM type: NRG; PAM sequence: AGG
cgtaccactggggcatggcc

SEQ ID NO: 8579 - DNA, 20 bp, Artificial Sequence
  Description of Artificial Sequence: Synthetic oligonucleotide
  Target: PCSK9; (-) strand; PAM type: NRG; PAM sequence: CAG
acgtaccactggggcatggc

SEQ ID NO: 8580 - DNA, 20 bp, Artificial Sequence
  Description of Artificial Sequence: Synthetic oligonucleotide
  Target: PCSK9; (-) strand; PAM type: NRG; PAM sequence: TGG
atagacgtaccactggggca

SEQ ID NO: 8581 - DNA, 20 bp, Artificial Sequence
  Description of Artificial Sequence: Synthetic oligonucleotide
  Target: PCSK9; (-) strand; PAM type: NRG; PAM sequence: GGG
tgaagatagacgtaccactg

SEQ ID NO: 8582 - DNA, 20 bp, Artificial Sequence
  Description of Artificial Sequence: Synthetic oligonucleotide
  Target: PCSK9; (-) strand; PAM type: NRG; PAM sequence: GGG
atgaagatagacgtaccact

SEQ ID NO: 8583 - DNA, 20 bp, Artificial Sequence
  Description of Artificial Sequence: Synthetic oligonucleotide
  Target: PCSK9; (-) strand; PAM type: NRG; PAM sequence: TGG
aatgaagatagacgtaccac

SEQ ID NO: 8584 - DNA, 20 bp, Artificial Sequence
  Description of Artificial Sequence: Synthetic oligonucleotide
  Target: PCSK9; (-) strand; PAM type: NRG; PAM sequence: TAG
cctcgtctttcaaatgaaga

SEQ ID NO: 8585 - DNA, 20 bp, Artificial Sequence
  Description of Artificial Sequence: Synthetic oligonucleotide
  Target: PCSK9; (-) strand; PAM type: NRG; PAM sequence: AAG
gtctcctcgtctttcaaatg

SEQ ID NO: 8586 - DNA, 20 bp, Artificial Sequence
  Description of Artificial Sequence: Synthetic oligonucleotide
  Target: PCSK9; (-) strand; PAM type: NRG; PAM sequence: CAG
gtgtggtcccctctgaactt

SEQ ID NO: 8587 - DNA, 20 bp, Artificial Sequence
  Description of Artificial Sequence: Synthetic oligonucleotide
  Target: PCSK9; (-) strand; PAM type: NRG; PAM sequence: TGG
tctacccctagctgtctgtg

SEQ ID NO: 8588 - DNA, 20 bp, Artificial Sequence
  Description of Artificial Sequence: Synthetic oligonucleotide
  Target: PCSK9; (-) strand; PAM type: NRG; PAM sequence: TAG
tttgatccaggctctacccc

SEQ ID NO: 8589 - DNA, 20 bp, Artificial Sequence
  Description of Artificial Sequence: Synthetic oligonucleotide
  Target: PCSK9; (-) strand; PAM type: NRG; PAM sequence: AGG
cagaccaatgggtttgatcc

SEQ ID NO: 8590 - DNA, 20 bp, Artificial Sequence
  Description of Artificial Sequence: Synthetic oligonucleotide
  Target: PCSK9; (-) strand; PAM type: NRG; PAM sequence: CAG
gcagaccaatgggtttgatc

SEQ ID NO: 8591 - DNA, 20 bp, Artificial Sequence
  Description of Artificial Sequence: Synthetic oligonucleotide
  Target: PCSK9; (-) strand; PAM type: NRG; PAM sequence: GGG
tggctggcaggcagaccaat

SEQ ID NO: 8592 - DNA, 20 bp, Artificial Sequence
  Description of Artificial Sequence: Synthetic oligonucleotide
  Target: PCSK9; (-) strand; PAM type: NRG; PAM sequence: TGG
atggctggcaggcagaccaa

SEQ ID NO: 8593 - DNA, 20 bp, Artificial Sequence
  Description of Artificial Sequence: Synthetic oligonucleotide
  Target: PCSK9; (-) strand; PAM type: NRG; PAM sequence: CAG
gcacaagaatggctggcagg

SEQ ID NO: 8594 - DNA, 20 bp, Artificial Sequence
  Description of Artificial Sequence: Synthetic oligonucleotide
  Target: PCSK9; (-) strand; PAM type: NRG; PAM sequence: AGG
ttggcacaagaatggctggc

SEQ ID NO: 8595 - DNA, 20 bp, Artificial Sequence
  Description of Artificial Sequence: Synthetic oligonucleotide
  Target: PCSK9; (-) strand; PAM type: NRG; PAM sequence: CAG
attggcacaagaatggctgg

SEQ ID NO: 8596 - DNA, 20 bp, Artificial Sequence
  Description of Artificial Sequence: Synthetic oligonucleotide
  Target: PCSK9; (-) strand; PAM type: NRG; PAM sequence: TGG
tgcattggcacaagaatggc

SEQ ID NO: 8597 - DNA, 20 bp, Artificial Sequence
  Description of Artificial Sequence: Synthetic oligonucleotide
  Target: PCSK9; (-) strand; PAM type: NRG; PAM sequence: TGG
cagatgcattggcacaagaa

SEQ ID NO: 8598 - DNA, 20 bp, Artificial Sequence
  Description of Artificial Sequence: Synthetic oligonucleotide
  Target: PCSK9; (-) strand; PAM type: NRG; PAM sequence: AAG
ggcagcagatgcattggcac

SEQ ID NO: 8599 - DNA, 20 bp, Artificial Sequence
  Description of Artificial Sequence: Synthetic oligonucleotide
  Target: PCSK9; (-) strand; PAM type: NRG; PAM sequence: TGG
tccgtaggcagcagatgcat

SEQ ID NO: 8600 - DNA, 20 bp, Artificial Sequence
  Description of Artificial Sequence: Synthetic oligonucleotide
  Target: PCSK9; (-) strand; PAM type: NRG; PAM sequence: CAG
ctacaggtttccgtaggcag

SEQ ID NO: 8601 - DNA, 20 bp, Artificial Sequence
  Description of Artificial Sequence: Synthetic oligonucleotide
  Target: PCSK9; (-) strand; PAM type: NRG; PAM sequence: CAG
tccctacaggtttccgtagg

SEQ ID NO: 8602 - DNA, 20 bp, Artificial Sequence
  Description of Artificial Sequence: Synthetic oligonucleotide
  Target: PCSK9; (-) strand; PAM type: NRG; PAM sequence: AGG
ttgtccctacaggtttccgt

SEQ ID NO: 8603 - DNA, 20 bp, Artificial Sequence
  Description of Artificial Sequence: Synthetic oligonucleotide
  Target: PCSK9; (-) strand; PAM type: NRG; PAM sequence: TAG
cttgtccctacaggtttccg

SEQ ID NO: 8604 - DNA, 20 bp, Artificial Sequence
  Description of Artificial Sequence: Synthetic oligonucleotide
  Target: PCSK9; (-) strand; PAM type: NRG; PAM sequence: AGG
tcccagggccttgtccctac

SEQ ID NO: 8605 - DNA, 20 bp, Artificial Sequence
  Description of Artificial Sequence: Synthetic oligonucleotide
  Target: PCSK9; (-) strand; PAM type: NRG; PAM sequence: CAG
atcccagggccttgtcccta

SEQ ID NO: 8606 - DNA, 20 bp, Artificial Sequence
  Description of Artificial Sequence: Synthetic oligonucleotide
  Target: PCSK9; (-) strand; PAM type: NRG; PAM sequence: GGG
aggctccactgaacatccca

SEQ ID NO: 8607 - DNA, 20 bp, Artificial Sequence
  Description of Artificial Sequence: Synthetic oligonucleotide
  Target: PCSK9; (-) strand; PAM type: NRG; PAM sequence: AGG
caggctccactgaacatccc

SEQ ID NO: 8608 - DNA, 20 bp, Artificial Sequence
  Description of Artificial Sequence: Synthetic oligonucleotide
  Target: PCSK9; (-) strand; PAM type: NRG; PAM sequence: CAG
tcaggctccactgaacatcc

SEQ ID NO: 8609 - DNA, 20 bp, Artificial Sequence
  Description of Artificial Sequence: Synthetic oligonucleotide
  Target: PCSK9; (-) strand; PAM type: NRG; PAM sequence: AGG
gcttttttataaaatgactc

SEQ ID NO: 8610 - DNA, 20 bp, Artificial Sequence
  Description of Artificial Sequence: Synthetic oligonucleotide
  Target: PCSK9; (-) strand; PAM type: NRG; PAM sequence: CAG
tgcttttttataaaatgact

SEQ ID NO: 8611 - DNA, 20 bp, Artificial Sequence
  Description of Artificial Sequence: Synthetic oligonucleotide
  Target: PCSK9; (-) strand; PAM type: NRG; PAM sequence: GAG
caaaggaattttggacccta

SEQ ID NO: 8612 - DNA, 20 bp, Artificial Sequence
  Description of Artificial Sequence: Synthetic oligonucleotide
  Target: PCSK9; (-) strand; PAM type: NRG; PAM sequence: TAG
ttcaaaggaattttggaccc

SEQ ID NO: 8613 - DNA, 20 bp, Artificial Sequence
  Description of Artificial Sequence: Synthetic oligonucleotide
  Target: PCSK9; (-) strand; PAM type: NRG; PAM sequence: TGG
caacagcttcaaaggaattt

SEQ ID NO: 8614 - DNA, 20 bp, Artificial Sequence
  Description of Artificial Sequence: Synthetic oligonucleotide
  Target: PCSK9; (-) strand; PAM type: NRG; PAM sequence: AGG
ctggatagcaacagcttcaa

SEQ ID NO: 8615 - DNA, 20 bp, Artificial Sequence
  Description of Artificial Sequence: Synthetic oligonucleotide
  Target: PCSK9; (-) strand; PAM type: NRG; PAM sequence: AAG
tctggatagcaacagcttca

SEQ ID NO: 8616 - DNA, 20 bp, Artificial Sequence
  Description of Artificial Sequence: Synthetic oligonucleotide
  Target: PCSK9; (-) strand; PAM type: NRG; PAM sequence: CAG
gacttcactctggatagcaa

SEQ ID NO: 8617 - DNA, 20 bp, Artificial Sequence
  Description of Artificial Sequence: Synthetic oligonucleotide
  Target: PCSK9; (-) strand; PAM type: NRG; PAM sequence: TAG
agaagggacttcactctgga

SEQ ID NO: 8618 - DNA, 20 bp, Artificial Sequence
  Description of Artificial Sequence: Synthetic oligonucleotide
  Target: PCSK9; (-) strand; PAM type: NRG; PAM sequence: TGG
ctaaagaagggacttcactc

SEQ ID NO: 8619 - DNA, 20 bp, Artificial Sequence
  Description of Artificial Sequence: Synthetic oligonucleotide
  Target: PCSK9; (-) strand; PAM type: NRG; PAM sequence: GGG
ggccaccctgtcctaaagaa

SEQ ID NO: 8620 - DNA, 20 bp, Artificial Sequence
  Description of Artificial Sequence: Synthetic oligonucleotide
  Target: PCSK9; (-) strand; PAM type: NRG; PAM sequence: AGG
gggccaccctgtcctaaaga

SEQ ID NO: 8621 - DNA, 20 bp, Artificial Sequence
  Description of Artificial Sequence: Synthetic oligonucleotide
  Target: PCSK9; (-) strand; PAM type: NRG; PAM sequence: AAG
agggccaccctgtcctaaag

SEQ ID NO: 8622 - DNA, 20 bp, Artificial Sequence
  Description of Artificial Sequence: Synthetic oligonucleotide
  Target: PCSK9; (-) strand; PAM type: NRG; PAM sequence: AAG
aggagggccaccctgtccta

SEQ ID NO: 8623 - DNA, 20 bp, Artificial Sequence
  Description of Artificial Sequence: Synthetic oligonucleotide
  Target: PCSK9; (-) strand; PAM type: NRG; PAM sequence: GGG
gtgacatccaggagggagga

SEQ ID NO: 8624 - DNA, 20 bp, Artificial Sequence
  Description of Artificial Sequence: Synthetic oligonucleotide
  Target: PCSK9; (-) strand; PAM type: NRG; PAM sequence: AGG
tgtgacatccaggagggagg

SEQ ID NO: 8625 - DNA, 20 bp, Artificial Sequence
  Description of Artificial Sequence: Synthetic oligonucleotide
  Target: PCSK9; (-) strand; PAM type: NRG; PAM sequence: GAG
atgtgacatccaggagggag

SEQ ID NO: 8626 - DNA, 20 bp, Artificial Sequence
  Description of Artificial Sequence: Synthetic oligonucleotide
  Target: PCSK9; (-) strand; PAM type: NRG; PAM sequence: AGG
agatgtgacatccaggaggg

SEQ ID NO: 8627 - DNA, 20 bp, Artificial Sequence
  Description of Artificial Sequence: Synthetic oligonucleotide
  Target: PCSK9; (-) strand; PAM type: NRG; PAM sequence: GAG
aagatgtgacatccaggagg

SEQ ID NO: 8628 - DNA, 20 bp, Artificial Sequence
  Description of Artificial Sequence: Synthetic oligonucleotide
  Target: PCSK9; (-) strand; PAM type: NRG; PAM sequence: GGG
cgaagatgtgacatccagga

SEQ ID NO: 8629 - DNA, 20 bp, Artificial Sequence
  Description of Artificial Sequence: Synthetic oligonucleotide
  Target: PCSK9; (-) strand; PAM type: NRG; PAM sequence: AGG
ccgaagatgtgacatccagg

SEQ ID NO: 8630 - DNA, 20 bp, Artificial Sequence
  Description of Artificial Sequence: Synthetic oligonucleotide
  Target: PCSK9; (-) strand; PAM type: NRG; PAM sequence: GAG
accgaagatgtgacatccag

SEQ ID NO: 8631 - DNA, 20 bp, Artificial Sequence
  Description of Artificial Sequence: Synthetic oligonucleotide
  Target: PCSK9; (-) strand; PAM type: NRG; PAM sequence: AGG
ccaccgaagatgtgacatcc

SEQ ID NO: 8632 - DNA, 20 bp, Artificial Sequence
  Description of Artificial Sequence: Synthetic oligonucleotide
  Target: PCSK9; (-) strand; PAM type: NRG; PAM sequence: CAG
tccaccgaagatgtgacatc

SEQ ID NO: 8633 - DNA, 20 bp, Artificial Sequence
  Description of Artificial Sequence: Synthetic oligonucleotide
  Target: PCSK9; (-) strand; PAM type: NRG; PAM sequence: AAG
ccctttctgcccctccaccg

SEQ ID NO: 8634 - DNA, 20 bp, Artificial Sequence
  Description of Artificial Sequence: Synthetic oligonucleotide
  Target: PCSK9; (-) strand; PAM type: NRG; PAM sequence: CAG
gccagggtgaggagaatacc

SEQ ID NO: 8635 - DNA, 20 bp, Artificial Sequence
  Description of Artificial Sequence: Synthetic oligonucleotide
  Target: PCSK9; (-) strand; PAM type: NRG; PAM sequence: GAG
agcactagggccagggtgag

SEQ ID NO: 8636 - DNA, 20 bp, Artificial Sequence
  Description of Artificial Sequence: Synthetic oligonucleotide
  Target: PCSK9; (-) strand; PAM type: NRG; PAM sequence: AGG
gaagcactagggccagggtg

SEQ ID NO: 8637 - DNA, 20 bp, Artificial Sequence
  Description of Artificial Sequence: Synthetic oligonucleotide
  Target: PCSK9; (-) strand; PAM type: NRG; PAM sequence: GAG
tgaagcactagggccagggt

SEQ ID NO: 8638 - DNA, 20 bp, Artificial Sequence
  Description of Artificial Sequence: Synthetic oligonucleotide
  Target: PCSK9; (-) strand; PAM type: NRG; PAM sequence: GGG
gatttgaagcactagggcca

SEQ ID NO: 8639 - DNA, 20 bp, Artificial Sequence
  Description of Artificial Sequence: Synthetic oligonucleotide
  Target: PCSK9; (-) strand; PAM type: NRG; PAM sequence: AGG
agatttgaagcactagggcc

SEQ ID NO: 8640 - DNA, 20 bp, Artificial Sequence
  Description of Artificial Sequence: Synthetic oligonucleotide
  Target: PCSK9; (-) strand; PAM type: NRG; PAM sequence: CAG
aagatttgaagcactagggc

SEQ ID NO: 8641 - DNA, 20 bp, Artificial Sequence
  Description of Artificial Sequence: Synthetic oligonucleotide
  Target: PCSK9; (-) strand; PAM type: NRG; PAM sequence: GGG
ttttaagatttgaagcacta

SEQ ID NO: 8642 - DNA, 20 bp, Artificial Sequence
  Description of Artificial Sequence: Synthetic oligonucleotide
  Target: PCSK9; (-) strand; PAM type: NRG; PAM sequence: AGG
tttttaagatttgaagcact

SEQ ID NO: 8643 - DNA, 20 bp, Artificial Sequence
  Description of Artificial Sequence: Synthetic oligonucleotide
  Target: PCSK9; (-) strand; PAM type: NRG; PAM sequence: TAG
ttttttaagatttgaagcac

SEQ ID NO: 8644 - DNA, 20 bp, Artificial Sequence
  Description of Artificial Sequence: Synthetic oligonucleotide
  Target: PCSK9; (-) strand; PAM type: NRG; PAM sequence: AAG
aaacgtttttttaagatttg

SEQ ID NO: 8645 - DNA, 20 bp, Artificial Sequence
  Description of Artificial Sequence: Synthetic oligonucleotide
  Target: PCSK9; (-) strand; PAM type: NRG; PAM sequence: AAG
acaaataaaaacgttttttt

SEQ ID NO: 8646 - DNA, 20 bp, Artificial Sequence
  Description of Artificial Sequence: Synthetic oligonucleotide
  Target: PCSK9; (-) strand; PAM type: NRG; PAM sequence: AAG
tgggctagaaggtggtgcag

SEQ ID NO: 8647 - DNA, 20 bp, Artificial Sequence
  Description of Artificial Sequence: Synthetic oligonucleotide
  Target: PCSK9; (-) strand; PAM type: NRG; PAM sequence: CAG
aggtgggctagaaggtggtg

SEQ ID NO: 8648 - DNA, 20 bp, Artificial Sequence
  Description of Artificial Sequence: Synthetic oligonucleotide
  Target: PCSK9; (-) strand; PAM type: NRG; PAM sequence: TGG
aaacgaggtgggctagaagg

SEQ ID NO: 8649 - DNA, 20 bp, Artificial Sequence
  Description of Artificial Sequence: Synthetic oligonucleotide
  Target: PCSK9; (-) strand; PAM type: NRG; PAM sequence: AGG
aggaaacgaggtgggctaga

SEQ ID NO: 8650 - DNA, 20 bp, Artificial Sequence
  Description of Artificial Sequence: Synthetic oligonucleotide
  Target: PCSK9; (-) strand; PAM type: NRG; PAM sequence: AAG
caggaaacgaggtgggctag

SEQ ID NO: 8651 - DNA, 20 bp, Artificial Sequence
  Description of Artificial Sequence: Synthetic oligonucleotide
  Target: PCSK9; (-) strand; PAM type: NRG; PAM sequence: TAG
ggccaggaaacgaggtgggc

SEQ ID NO: 8652 - DNA, 20 bp, Artificial Sequence
  Description of Artificial Sequence: Synthetic oligonucleotide
  Target: PCSK9; (-) strand; PAM type: NRG; PAM sequence: GGG
tagaggccaggaaacgaggt

SEQ ID NO: 8653 - DNA, 20 bp, Artificial Sequence
  Description of Artificial Sequence: Synthetic oligonucleotide
  Target: PCSK9; (-) strand; PAM type: NRG; PAM sequence: TGG
ttagaggccaggaaacgagg

SEQ ID NO: 8654 - DNA, 20 bp, Artificial Sequence
  Description of Artificial Sequence: Synthetic oligonucleotide
  Target: PCSK9; (-) strand; PAM type: NRG; PAM sequence: AGG
aagttagaggccaggaaacg

SEQ ID NO: 8655 - DNA, 20 bp, Artificial Sequence
  Description of Artificial Sequence: Synthetic oligonucleotide
  Target: PCSK9; (-) strand; PAM type: NRG; PAM sequence: GAG
caagttagaggccaggaaac

SEQ ID NO: 8656 - DNA, 20 bp, Artificial Sequence
  Description of Artificial Sequence: Synthetic oligonucleotide
  Target: PCSK9; (-) strand; PAM type: NRG; PAM sequence: AGG
ctctcatcaagttagaggcc

SEQ ID NO: 8657 - DNA, 20 bp, Artificial Sequence
  Description of Artificial Sequence: Synthetic oligonucleotide
  Target: PCSK9; (-) strand; PAM type: NRG; PAM sequence: CAG
gctctcatcaagttagaggc

SEQ ID NO: 8658 - DNA, 20 bp, Artificial Sequence
  Description of Artificial Sequence: Synthetic oligonucleotide
  Target: PCSK9; (-) strand; PAM type: NRG; PAM sequence: AGG
acacgctctcatcaagttag

SEQ ID NO: 8659 - DNA, 20 bp, Artificial Sequence
  Description of Artificial Sequence: Synthetic oligonucleotide
  Target: PCSK9; (-) strand; PAM type: NRG; PAM sequence: GAG
cacacgctctcatcaagtta

SEQ ID NO: 8660 - DNA, 20 bp, Artificial Sequence
  Description of Artificial Sequence: Synthetic oligonucleotide
  Target: PCSK9; (-) strand; PAM type: NRG; PAM sequence: TAG
gacacacgctctcatcaagt

SEQ ID NO: 8661 - DNA, 20 bp, Artificial Sequence
  Description of Artificial Sequence: Synthetic oligonucleotide
  Target: PCSK9; (-) strand; PAM type: NRG; PAM sequence: AAG
aaatgacacacgctctcatc

SEQ ID NO: 8662 - DNA, 20 bp, Artificial Sequence
  Description of Artificial Sequence: Synthetic oligonucleotide
  Target: PCSK9; (-) strand; PAM type: NRG; PAM sequence: CAG
ccgcctgccatgtggagaat

SEQ ID NO: 8663 - DNA, 20 bp, Artificial Sequence
  Description of Artificial Sequence: Synthetic oligonucleotide
  Target: PCSK9; (-) strand; PAM type: NRG; PAM sequence: GAG
gaagcaccgcctgccatgtg

SEQ ID NO: 8664 - DNA, 20 bp, Artificial Sequence
  Description of Artificial Sequence: Synthetic oligonucleotide
  Target: PCSK9; (-) strand; PAM type: NRG; PAM sequence: TGG
aagaagcaccgcctgccatg

SEQ ID NO: 8665 - DNA, 20 bp, Artificial Sequence
  Description of Artificial Sequence: Synthetic oligonucleotide
  Target: PCSK9; (-) strand; PAM type: NRG; PAM sequence: AAG
actgtctgcaggaggctaag

SEQ ID NO: 8666 - DNA, 20 bp, Artificial Sequence
  Description of Artificial Sequence: Synthetic oligonucleotide
  Target: PCSK9; (-) strand; PAM type: NRG; PAM sequence: AAG
ctcactgtctgcaggaggct

SEQ ID NO: 8667 - DNA, 20 bp, Artificial Sequence
  Description of Artificial Sequence: Synthetic oligonucleotide
  Target: PCSK9; (-) strand; PAM type: NRG; PAM sequence: AGG
ggggcctcactgtctgcagg

SEQ ID NO: 8668 - DNA, 20 bp, Artificial Sequence
  Description of Artificial Sequence: Synthetic oligonucleotide
  Target: PCSK9; (-) strand; PAM type: NRG; PAM sequence: GAG
tggggcctcactgtctgcag

SEQ ID NO: 8669 - DNA, 20 bp, Artificial Sequence
  Description of Artificial Sequence: Synthetic oligonucleotide
  Target: PCSK9; (-) strand; PAM type: NRG; PAM sequence: AGG
cgtggggcctcactgtctgc

SEQ ID NO: 8670 - DNA, 20 bp, Artificial Sequence
  Description of Artificial Sequence: Synthetic oligonucleotide
  Target: PCSK9; (-) strand; PAM type: NRG; PAM sequence: CAG
ccgtggggcctcactgtctg

SEQ ID NO: 8671 - DNA, 20 bp, Artificial Sequence
  Description of Artificial Sequence: Synthetic oligonucleotide
  Target: PCSK9; (-) strand; PAM type: NRG; PAM sequence: GGG
tgaccttggacaagaccgtg

SEQ ID NO: 8672 - DNA, 20 bp, Artificial Sequence
  Description of Artificial Sequence: Synthetic oligonucleotide
  Target: PCSK9; (-) strand; PAM type: NRG; PAM sequence: GGG
gtgaccttggacaagaccgt

SEQ ID NO: 8673 - DNA, 20 bp, Artificial Sequence
  Description of Artificial Sequence: Synthetic oligonucleotide
  Target: PCSK9; (-) strand; PAM type: NRG; PAM sequence: TGG
tgtgaccttggacaagaccg

SEQ ID NO: 8674 - DNA, 20 bp, Artificial Sequence
  Description of Artificial Sequence: Synthetic oligonucleotide
  Target: PCSK9; (-) strand; PAM type: NRG; PAM sequence: AAG
cacgctgtgtgaccttggac

SEQ ID NO: 8675 - DNA, 20 bp, Artificial Sequence
  Description of Artificial Sequence: Synthetic oligonucleotide
  Target: PCSK9; (-) strand; PAM type: NRG; PAM sequence: TGG
cattacacgctgtgtgacct

SEQ ID NO: 8676 - DNA, 20 bp, Artificial Sequence
  Description of Artificial Sequence: Synthetic oligonucleotide
  Target: PCSK9; (-) strand; PAM type: NRG; PAM sequence: CAG
ggagacccaggtccagactc

SEQ ID NO: 8677 - DNA, 20 bp, Artificial Sequence
  Description of Artificial Sequence: Synthetic oligonucleotide
  Target: PCSK9; (-) strand; PAM type: NRG; PAM sequence: CAG
gcagctaggagacccaggtc

SEQ ID NO: 8678 - DNA, 20 bp, Artificial Sequence
  Description of Artificial Sequence: Synthetic oligonucleotide
  Target: PCSK9; (-) strand; PAM type: NRG; PAM sequence: AGG
gcagtgcagctaggagaccc

SEQ ID NO: 8679 - DNA, 20 bp, Artificial Sequence
  Description of Artificial Sequence: Synthetic oligonucleotide
  Target: PCSK9; (-) strand; PAM type: NRG; PAM sequence: CAG
tgcagtgcagctaggagacc

SEQ ID NO: 8680 - DNA, 20 bp, Artificial Sequence
  Description of Artificial Sequence: Synthetic oligonucleotide
  Target: PCSK9; (-) strand; PAM type: NRG; PAM sequence: GAG
cagcagtgcagtgcagctag

SEQ ID NO: 8681 - DNA, 20 bp, Artificial Sequence
  Description of Artificial Sequence: Synthetic oligonucleotide
  Target: PCSK9; (-) strand; PAM type: NRG; PAM sequence: AGG
ggcagcagtgcagtgcagct

SEQ ID NO: 8682 - DNA, 20 bp, Artificial Sequence
  Description of Artificial Sequence: Synthetic oligonucleotide
  Target: PCSK9; (-) strand; PAM type: NRG; PAM sequence: TAG
gggcagcagtgcagtgcagc

SEQ ID NO: 8683 - DNA, 20 bp, Artificial Sequence
  Description of Artificial Sequence: Synthetic oligonucleotide
  Target: PCSK9; (-) strand; PAM type: NRG; PAM sequence: CAG
catggggcagcagtgcagtg

SEQ ID NO: 8684 - DNA, 20 bp, Artificial Sequence
  Description of Artificial Sequence: Synthetic oligonucleotide
  Target: PCSK9; (-) strand; PAM type: NRG; PAM sequence: CAG
taacccatggggcagcagtg

SEQ ID NO: 8685 - DNA, 20 bp, Artificial Sequence
  Description of Artificial Sequence: Synthetic oligonucleotide
  Target: PCSK9; (-) strand; PAM type: NRG; PAM sequence: CAG
ctgattaacccatggggcag

SEQ ID NO: 8686 - DNA, 20 bp, Artificial Sequence
  Description of Artificial Sequence: Synthetic oligonucleotide
  Target: PCSK9; (-) strand; PAM type: NRG; PAM sequence: CAG
gagctgattaacccatgggg

SEQ ID NO: 8687 - DNA, 20 bp, Artificial Sequence
  Description of Artificial Sequence: Synthetic oligonucleotide
  Target: PCSK9; (-) strand; PAM type: NRG; PAM sequence: GGG
gctgagctgattaacccatg

SEQ ID NO: 8688 - DNA, 20 bp, Artificial Sequence
  Description of Artificial Sequence: Synthetic oligonucleotide
  Target: PCSK9; (-) strand; PAM type: NRG; PAM sequence: GGG
tgctgagctgattaacccat

SEQ ID NO: 8689 - DNA, 20 bp, Artificial Sequence
  Description of Artificial Sequence: Synthetic oligonucleotide
  Target: PCSK9; (-) strand; PAM type: NRG; PAM sequence: TGG
atgctgagctgattaaccca

SEQ ID NO: 8690 - DNA, 20 bp, Artificial Sequence
  Description of Artificial Sequence: Synthetic oligonucleotide
  Target: PCSK9; (-) strand; PAM type: NRG; PAM sequence: GAG
ctgttcagccacggtatgct

SEQ ID NO: 8691 - DNA, 20 bp, Artificial Sequence
  Description of Artificial Sequence: Synthetic oligonucleotide
  Target: PCSK9; (-) strand; PAM type: NRG; PAM sequence: CGG
atgaggtagctgttcagcca

SEQ ID NO: 8692 - DNA, 20 bp, Artificial Sequence
  Description of Artificial Sequence: Synthetic oligonucleotide
  Target: PCSK9; (-) strand; PAM type: NRG; PAM sequence: CAG
cttggtatgaggtagctgtt

SEQ ID NO: 8693 - DNA, 20 bp, Artificial Sequence
  Description of Artificial Sequence: Synthetic oligonucleotide
  Target: PCSK9; (-) strand; PAM type: NRG; PAM sequence: TAG
ccacaggccttggtatgagg

SEQ ID NO: 8694 - DNA, 20 bp, Artificial Sequence
  Description of Artificial Sequence: Synthetic oligonucleotide
  Target: PCSK9; (-) strand; PAM type: NRG; PAM sequence: AGG
gcgccacaggccttggtatg

SEQ ID NO: 8695 - DNA, 20 bp, Artificial Sequence
  Description of Artificial Sequence: Synthetic oligonucleotide
  Target: PCSK9; (-) strand; PAM type: NRG; PAM sequence: GAG
ggcgccacaggccttggtat

SEQ ID NO: 8696 - DNA, 20 bp, Artificial Sequence
  Description of Artificial Sequence: Synthetic oligonucleotide
  Target: PCSK9; (-) strand; PAM type: NRG; PAM sequence: TGG
tgtcatggcgccacaggcct

SEQ ID NO: 8697 - DNA, 20 bp, Artificial Sequence
  Description of Artificial Sequence: Synthetic oligonucleotide
  Target: PCSK9; (-) strand; PAM type: NRG; PAM sequence: AGG
aatccctgtcatggcgccac

SEQ ID NO: 8698 - DNA, 20 bp, Artificial Sequence
  Description of Artificial Sequence: Synthetic oligonucleotide
  Target: PCSK9; (-) strand; PAM type: NRG; PAM sequence: CAG
caatccctgtcatggcgcca

SEQ ID NO: 8699 - DNA, 20 bp, Artificial Sequence
  Description of Artificial Sequence: Synthetic oligonucleotide
  Target: PCSK9; (-) strand; PAM type: NRG; PAM sequence: TGG
gaccctgtcaatccctgtca

SEQ ID NO: 8700 - DNA, 20 bp, Artificial Sequence
  Description of Artificial Sequence: Synthetic oligonucleotide
  Target: PCSK9; (-) strand; PAM type: NRG; PAM sequence: GGG
gactacgggtttccaaggca

SEQ ID NO: 8701 - DNA, 20 bp, Artificial Sequence
  Description of Artificial Sequence: Synthetic oligonucleotide
  Target: PCSK9; (-) strand; PAM type: NRG; PAM sequence: AGG
agactacgggtttccaaggc

SEQ ID NO: 8702 - DNA, 20 bp, Artificial Sequence
  Description of Artificial Sequence: Synthetic oligonucleotide
  Target: PCSK9; (-) strand; PAM type: NRG; PAM sequence: CAG
tagactacgggtttccaagg

SEQ ID NO: 8703 - DNA, 20 bp, Artificial Sequence
  Description of Artificial Sequence: Synthetic oligonucleotide
  Target: PCSK9; (-) strand; PAM type: NRG; PAM sequence: AGG
acttagactacgggtttcca

SEQ ID NO: 8704 - DNA, 20 bp, Artificial Sequence
  Description of Artificial Sequence: Synthetic oligonucleotide
  Target: PCSK9; (-) strand; PAM type: NRG; PAM sequence: AAG
tacttagactacgggtttcc

SEQ ID NO: 8705 - DNA, 20 bp, Artificial Sequence
  Description of Artificial Sequence: Synthetic oligonucleotide
  Target: PCSK9; (-) strand; PAM type: NRG; PAM sequence: GGG
gtctcctctacttagactac

SEQ ID NO: 8706 - DNA, 20 bp, Artificial Sequence
  Description of Artificial Sequence: Synthetic oligonucleotide
  Target: PCSK9; (-) strand; PAM type: NRG; PAM sequence: CGG
agtctcctctacttagacta

SEQ ID NO: 8707 - DNA, 20 bp, Artificial Sequence
  Description of Artificial Sequence: Synthetic oligonucleotide
  Target: PCSK9; (-) strand; PAM type: NRG; PAM sequence: TAG
acttgtcagtctcctctact

SEQ ID NO: 8708 - DNA, 20 bp, Artificial Sequence
  Description of Artificial Sequence: Synthetic oligonucleotide
  Target: PCSK9; (-) strand; PAM type: NRG; PAM sequence: CAG
gatggaaggcattgacttgt

SEQ ID NO: 8709 - DNA, 20 bp, Artificial Sequence
  Description of Artificial Sequence: Synthetic oligonucleotide
  Target: PCSK9; (-) strand; PAM type: NRG; PAM sequence: AGG
gtgttgagcagactgatgga

SEQ ID NO: 8710 - DNA, 20 bp, Artificial Sequence
  Description of Artificial Sequence: Synthetic oligonucleotide
  Target: PCSK9; (-) strand; PAM type: NRG; PAM sequence: AAG
tgtgttgagcagactgatgg

SEQ ID NO: 8711 - DNA, 20 bp, Artificial Sequence
  Description of Artificial Sequence: Synthetic oligonucleotide
  Target: PCSK9; (-) strand; PAM type: NRG; PAM sequence: TGG
acgtgtgttgagcagactga

SEQ ID NO: 8712 - DNA, 20 bp, Artificial Sequence
  Description of Artificial Sequence: Synthetic oligonucleotide
  Target: PCSK9; (-) strand; PAM type: NRG; PAM sequence: CAG
cttggtaaacgtgtgttgag

SEQ ID NO: 8713 - DNA, 20 bp, Artificial Sequence
  Description of Artificial Sequence: Synthetic oligonucleotide
  Target: PCSK9; (-) strand; PAM type: NRG; PAM sequence: GAG
gcacttggtaaacgtgtgtt

SEQ ID NO: 8714 - DNA, 20 bp, Artificial Sequence
  Description of Artificial Sequence: Synthetic oligonucleotide
  Target: PCSK9; (-) strand; PAM type: NRG; PAM sequence: TGG
tgcagcacacagtaggcact

SEQ ID NO: 8715 - DNA, 20 bp, Artificial Sequence
  Description of Artificial Sequence: Synthetic oligonucleotide
  Target: PCSK9; (-) strand; PAM type: NRG; PAM sequence: AGG
tcgcctctgcagcacacagt

SEQ ID NO: 8716 - DNA, 20 bp, Artificial Sequence
  Description of Artificial Sequence: Synthetic oligonucleotide
  Target: PCSK9; (-) strand; PAM type: NRG; PAM sequence: TAG
ttcgcctctgcagcacacag

SEQ ID NO: 8717 - DNA, 20 bp, Artificial Sequence
  Description of Artificial Sequence: Synthetic oligonucleotide
  Target: PCSK9; (-) strand; PAM type: NRG; PAM sequence: CAG
atcttcgcctctgcagcaca

SEQ ID NO: 8718 - DNA, 20 bp, Artificial Sequence
  Description of Artificial Sequence: Synthetic oligonucleotide
  Target: PCSK9; (-) strand; PAM type: NRG; PAM sequence: CAG
ctgtgtcatcttcgcctctg

SEQ ID NO: 8719 - DNA, 20 bp, Artificial Sequence
  Description of Artificial Sequence: Synthetic oligonucleotide
  Target: PCSK9; (-) strand; PAM type: NRG; PAM sequence: GAG
taagctcaagggaaaggcct

SEQ ID NO: 8720 - DNA, 20 bp, Artificial Sequence
  Description of Artificial Sequence: Synthetic oligonucleotide
  Target: PCSK9; (-) strand; PAM type: NRG; PAM sequence: AGG
gaactgtaagctcaagggaa

SEQ ID NO: 8721 - DNA, 20 bp, Artificial Sequence
  Description of Artificial Sequence: Synthetic oligonucleotide
  Target: PCSK9; (-) strand; PAM type: NRG; PAM sequence: AAG
tgaactgtaagctcaaggga

SEQ ID NO: 8722 - DNA, 20 bp, Artificial Sequence
  Description of Artificial Sequence: Synthetic oligonucleotide
  Target: PCSK9; (-) strand; PAM type: NRG; PAM sequence: GGG
ctcctgaactgtaagctcaa

SEQ ID NO: 8723 - DNA, 20 bp, Artificial Sequence
  Description of Artificial Sequence: Synthetic oligonucleotide
  Target: PCSK9; (-) strand; PAM type: NRG; PAM sequence: AGG
cctcctgaactgtaagctca

SEQ ID NO: 8724 - DNA, 20 bp, Artificial Sequence
  Description of Artificial Sequence: Synthetic oligonucleotide
  Target: PCSK9; (-) strand; PAM type: NRG; PAM sequence: AAG
tcctcctgaactgtaagctc

SEQ ID NO: 8725 - DNA, 20 bp, Artificial Sequence
  Description of Artificial Sequence: Synthetic oligonucleotide
  Target: PCSK9; (-) strand; PAM type: NRG; PAM sequence: AAG
agtctctcctcctgaactgt

SEQ ID NO: 8726 - DNA, 20 bp, Artificial Sequence
  Description of Artificial Sequence: Synthetic oligonucleotide
  Target: PCSK9; (-) strand; PAM type: NRG; PAM sequence: CAG
ctgtactggcagtcactggt

SEQ ID NO: 8727 - DNA, 20 bp, Artificial Sequence
  Description of Artificial Sequence: Synthetic oligonucleotide
  Target: PCSK9; (-) strand; PAM type: NRG; PAM sequence: TGG
tcaactgtactggcagtcac

SEQ ID NO: 8728 - DNA, 20 bp, Artificial Sequence
  Description of Artificial Sequence: Synthetic oligonucleotide
  Target: PCSK9; (-) strand; PAM type: NRG; PAM sequence: CAG
cccatagtcaactgtactgg

SEQ ID NO: 8729 - DNA, 20 bp, Artificial Sequence
  Description of Artificial Sequence: Synthetic oligonucleotide
  Target: PCSK9; (-) strand; PAM type: NRG; PAM sequence: TGG
tgtcccatagtcaactgtac

SEQ ID NO: 8730 - DNA, 20 bp, Artificial Sequence
  Description of Artificial Sequence: Synthetic oligonucleotide
  Target: PCSK9; (-) strand; PAM type: NRG; PAM sequence: TAG
aggctgagcacattgtccca

SEQ ID NO: 8731 - DNA, 20 bp, Artificial Sequence
  Description of Artificial Sequence: Synthetic oligonucleotide
  Target: PCSK9; (-) strand; PAM type: NRG; PAM sequence: GAG
cttcgtctctccccaaggct

SEQ ID NO: 8732 - DNA, 20 bp, Artificial Sequence
  Description of Artificial Sequence: Synthetic oligonucleotide
  Target: PCSK9; (-) strand; PAM type: NRG; PAM sequence: AGG
accttcttcgtctctcccca

SEQ ID NO: 8733 - DNA, 20 bp, Artificial Sequence
  Description of Artificial Sequence: Synthetic oligonucleotide
  Target: PCSK9; (-) strand; PAM type: NRG; PAM sequence: AAG
taccttcttcgtctctcccc

SEQ ID NO: 8734 - DNA, 20 bp, Artificial Sequence
  Description of Artificial Sequence: Synthetic oligonucleotide
  Target: PCSK9; (-) strand; PAM type: NRG; PAM sequence: GGG
cctgtcatctggtgctatac

SEQ ID NO: 8735 - DNA, 20 bp, Artificial Sequence
  Description of Artificial Sequence: Synthetic oligonucleotide
  Target: PCSK9; (-) strand; PAM type: NRG; PAM sequence: CGG
gcctgtcatctggtgctata

SEQ ID NO: 8736 - DNA, 20 bp, Artificial Sequence
  Description of Artificial Sequence: Synthetic oligonucleotide
  Target: PCSK9; (-) strand; PAM type: NRG; PAM sequence: TGG
tggggctcgtgcctgtcatc

SEQ ID NO: 8737 - DNA, 20 bp, Artificial Sequence
  Description of Artificial Sequence: Synthetic oligonucleotide
  Target: PCSK9; (-) strand; PAM type: NRG; PAM sequence: GGG
agcagctgccctggcctgtg

SEQ ID NO: 8738 - DNA, 20 bp, Artificial Sequence
  Description of Artificial Sequence: Synthetic oligonucleotide
  Target: PCSK9; (-) strand; PAM type: NRG; PAM sequence: GGG
gagcagctgccctggcctgt

SEQ ID NO: 8739 - DNA, 20 bp, Artificial Sequence
  Description of Artificial Sequence: Synthetic oligonucleotide
  Target: PCSK9; (-) strand; PAM type: NRG; PAM sequence: TGG
tgagcagctgccctggcctg

SEQ ID NO: 8740 - DNA, 20 bp, Artificial Sequence
  Description of Artificial Sequence: Synthetic oligonucleotide
  Target: PCSK9; (-) strand; PAM type: NRG; PAM sequence: TGG
tctcctctgagcagctgccc

SEQ ID NO: 8741 - DNA, 20 bp, Artificial Sequence
  Description of Artificial Sequence: Synthetic oligonucleotide
  Target: PCSK9; (-) strand; PAM type: NRG; PAM sequence: CAG
ttggcctactctcctctgag

SEQ ID NO: 8742 - DNA, 20 bp, Artificial Sequence
  Description of Artificial Sequence: Synthetic oligonucleotide
  Target: PCSK9; (-) strand; PAM type: NRG; PAM sequence: GAG
tgcttggcctactctcctct

SEQ ID NO: 8743 - DNA, 20 bp, Artificial Sequence
  Description of Artificial Sequence: Synthetic oligonucleotide
  Target: PCSK9; (-) strand; PAM type: NRG; PAM sequence: TGG
ccttctgtttgccttctgct

SEQ ID NO: 8744 - DNA, 20 bp, Artificial Sequence
  Description of Artificial Sequence: Synthetic oligonucleotide
  Target: PCSK9; (-) strand; PAM type: NRG; PAM sequence: CAG
ctctcgatggcaaatgcctg

SEQ ID NO: 8745 - DNA, 20 bp, Artificial Sequence
  Description of Artificial Sequence: Synthetic oligonucleotide
  Target: PCSK9; (-) strand; PAM type: NRG; PAM sequence: TGG
gtttgaagtccagctctcga

SEQ ID NO: 8746 - DNA, 20 bp, Artificial Sequence
  Description of Artificial Sequence: Synthetic oligonucleotide
  Target: PCSK9; (-) strand; PAM type: NRG; PAM sequence: CAG
atgatgcccagtttgaagtc

SEQ ID NO: 8747 - DNA, 20 bp, Artificial Sequence
  Description of Artificial Sequence: Synthetic oligonucleotide
  Target: PCSK9; (-) strand; PAM type: NRG; PAM sequence: AAG
ctggtatgatgcccagtttg

SEQ ID NO: 8748 - DNA, 20 bp, Artificial Sequence
  Description of Artificial Sequence: Synthetic oligonucleotide
  Target: PCSK9; (-) strand; PAM type: NRG; PAM sequence: CAG
acccaggctggtatgatgcc

SEQ ID NO: 8749 - DNA, 20 bp, Artificial Sequence
  Description of Artificial Sequence: Synthetic oligonucleotide
  Target: PCSK9; (-) strand; PAM type: NRG; PAM sequence: TGG
ggcaggactcgaacccaggc

SEQ ID NO: 8750 - DNA, 20 bp, Artificial Sequence
  Description of Artificial Sequence: Synthetic oligonucleotide
  Target: PCSK9; (-) strand; PAM type: NRG; PAM sequence: AGG
gctgggcaggactcgaaccc

SEQ ID NO: 8751 - DNA, 20 bp, Artificial Sequence
  Description of Artificial Sequence: Synthetic oligonucleotide
  Target: PCSK9; (-) strand; PAM type: NRG; PAM sequence: CAG
ggctgggcaggactcgaacc

SEQ ID NO: 8752 - DNA, 20 bp, Artificial Sequence
  Description of Artificial Sequence: Synthetic oligonucleotide
  Target: PCSK9; (-) strand; PAM type: NRG; PAM sequence: AGG
cagccaataaggggctgggc

SEQ ID NO: 8753 - DNA, 20 bp, Artificial Sequence
  Description of Artificial Sequence: Synthetic oligonucleotide
  Target: PCSK9; (-) strand; PAM type: NRG; PAM sequence: CAG
acagccaataaggggctggg

SEQ ID NO: 8754 - DNA, 20 bp, Artificial Sequence
  Description of Artificial Sequence: Synthetic oligonucleotide
  Target: PCSK9; (-) strand; PAM type: NRG; PAM sequence: GGG
tagacagccaataaggggct

SEQ ID NO: 8755 - DNA, 20 bp, Artificial Sequence
  Description of Artificial Sequence: Synthetic oligonucleotide
  Target: PCSK9; (-) strand; PAM type: NRG; PAM sequence: TGG
ttagacagccaataaggggc

SEQ ID NO: 8756 - DNA, 20 bp, Artificial Sequence
  Description of Artificial Sequence: Synthetic oligonucleotide
  Target: PCSK9; (-) strand; PAM type: NRG; PAM sequence: GGG
agggttagacagccaataag

SEQ ID NO: 8757 - DNA, 20 bp, Artificial Sequence
  Description of Artificial Sequence: Synthetic oligonucleotide
  Target: PCSK9; (-) strand; PAM type: NRG; PAM sequence: GGG
cagggttagacagccaataa

SEQ ID NO: 8758 - DNA, 20 bp, Artificial Sequence
  Description of Artificial Sequence: Synthetic oligonucleotide
  Target: PCSK9; (-) strand; PAM type: NRG; PAM sequence: AGG
tcagggttagacagccaata

SEQ ID NO: 8759 - DNA, 20 bp, Artificial Sequence
  Description of Artificial Sequence: Synthetic oligonucleotide
  Target: PCSK9; (-) strand; PAM type: NRG; PAM sequence: AAG
ctcagggttagacagccaat

SEQ ID NO: 8760 - DNA, 20 bp, Artificial Sequence
  Description of Artificial Sequence: Synthetic oligonucleotide
  Target: PCSK9; (-) strand; PAM type: NRG; PAM sequence: CAG
gggatttgctcagggttaga

SEQ ID NO: 8761 - DNA, 20 bp, Artificial Sequence
  Description of Artificial Sequence: Synthetic oligonucleotide
  Target: PCSK9; (-) strand; PAM type: NRG; PAM sequence: TAG
tgaagggatttgctcagggt

SEQ ID NO: 8762 - DNA, 20 bp, Artificial Sequence
  Description of Artificial Sequence: Synthetic oligonucleotide
  Target: PCSK9; (-) strand; PAM type: NRG; PAM sequence: GGG
gaggtgaagggatttgctca

SEQ ID NO: 8763 - DNA, 20 bp, Artificial Sequence
  Description of Artificial Sequence: Synthetic oligonucleotide
  Target: PCSK9; (-) strand; PAM type: NRG; PAM sequence: AGG
agaggtgaagggatttgctc

SEQ ID NO: 8764 - DNA, 20 bp, Artificial Sequence
  Description of Artificial Sequence: Synthetic oligonucleotide
  Target: PCSK9; (-) strand; PAM type: NRG; PAM sequence: CAG
gagaggtgaagggatttgct

SEQ ID NO: 8765 - DNA, 20 bp, Artificial Sequence
  Description of Artificial Sequence: Synthetic oligonucleotide
  Target: PCSK9; (-) strand; PAM type: NRG; PAM sequence: GGG
atgaggctcagagaggtgaa

SEQ ID NO: 8766 - DNA, 20 bp, Artificial Sequence
  Description of Artificial Sequence: Synthetic oligonucleotide
  Target: PCSK9; (-) strand; PAM type: NRG; PAM sequence: AGG
aatgaggctcagagaggtga

SEQ ID NO: 8767 - DNA, 20 bp, Artificial Sequence
  Description of Artificial Sequence: Synthetic oligonucleotide
  Target: PCSK9; (-) strand; PAM type: NRG; PAM sequence: AAG
gaatgaggctcagagaggtg

SEQ ID NO: 8768 - DNA, 20 bp, Artificial Sequence
  Description of Artificial Sequence: Synthetic oligonucleotide
  Target: PCSK9; (-) strand; PAM type: NRG; PAM sequence: AGG
tagaggaatgaggctcagag

SEQ ID NO: 8769 - DNA, 20 bp, Artificial Sequence
  Description of Artificial Sequence: Synthetic oligonucleotide
  Target: PCSK9; (-) strand; PAM type: NRG; PAM sequence: GAG
atagaggaatgaggctcaga

SEQ ID NO: 8770 - DNA, 20 bp, Artificial Sequence
  Description of Artificial Sequence: Synthetic oligonucleotide
  Target: PCSK9; (-) strand; PAM type: NRG; PAM sequence: GAG
agatagaggaatgaggctca

SEQ ID NO: 8771 - DNA, 20 bp, Artificial Sequence
  Description of Artificial Sequence: Synthetic oligonucleotide
  Target: PCSK9; (-) strand; PAM type: NRG; PAM sequence: CAG
acagatagaggaatgaggct

SEQ ID NO: 8772 - DNA, 20 bp, Artificial Sequence
  Description of Artificial Sequence: Synthetic oligonucleotide
  Target: PCSK9; (-) strand; PAM type: NRG; PAM sequence: AGG
ggtttacagatagaggaatg

SEQ ID NO: 8773 - DNA, 20 bp, Artificial Sequence
  Description of Artificial Sequence: Synthetic oligonucleotide
  Target: PCSK9; (-) strand; PAM type: NRG; PAM sequence: GAG
tggtttacagatagaggaat

SEQ ID NO: 8774 - DNA, 20 bp, Artificial Sequence
  Description of Artificial Sequence: Synthetic oligonucleotide
  Target: PCSK9; (-) strand; PAM type: NRG; PAM sequence: AGG
tataactggtttacagatag

SEQ ID NO: 8775 - DNA, 20 bp, Artificial Sequence
  Description of Artificial Sequence: Synthetic oligonucleotide
  Target: PCSK9; (-) strand; PAM type: NRG; PAM sequence: GAG
ttataactggtttacagata

SEQ ID NO: 8776 - DNA, 20 bp, Artificial Sequence
  Description of Artificial Sequence: Synthetic oligonucleotide
  Target: PCSK9; (-) strand; PAM type: NRG; PAM sequence: TAG
tattataactggtttacaga

SEQ ID NO: 8777 - DNA, 20 bp, Artificial Sequence
  Description of Artificial Sequence: Synthetic oligonucleotide
  Target: PCSK9; (-) strand; PAM type: NRG; PAM sequence: CAG
caattattataactggttta

SEQ ID NO: 8778 - DNA, 20 bp, Artificial Sequence
  Description of Artificial Sequence: Synthetic oligonucleotide
  Target: PCSK9; (-) strand; PAM type: NRG; PAM sequence: TGG
aatgttccaattattataac

SEQ ID NO: 8779 - DNA, 20 bp, Artificial Sequence
  Description of Artificial Sequence: Synthetic oligonucleotide
  Target: PCSK9; (-) strand; PAM type: NRG; PAM sequence: TAG
gaatgcttcacgacctcatt

SEQ ID NO: 8780 - DNA, 20 bp, Artificial Sequence
  Description of Artificial Sequence: Synthetic oligonucleotide
  Target: PCSK9; (-) strand; PAM type: NRG; PAM sequence: TAG
cttcagcgagtttccgtacc

SEQ ID NO: 8781 - DNA, 20 bp, Artificial Sequence
  Description of Artificial Sequence: Synthetic oligonucleotide
  Target: PCSK9; (-) strand; PAM type: NRG; PAM sequence: GAG
taacctgcccccacttcagc

SEQ ID NO: 8782 - DNA, 20 bp, Artificial Sequence
  Description of Artificial Sequence: Synthetic oligonucleotide
  Target: PCSK9; (-) strand; PAM type: NRG; PAM sequence: CAG
ttcttaacctgcccccactt

SEQ ID NO: 8783 - DNA, 20 bp, Artificial Sequence
  Description of Artificial Sequence: Synthetic oligonucleotide
  Target: PCSK9; (-) strand; PAM type: NRG; PAM sequence: AGG
ggatgccttcgtatccccag

SEQ ID NO: 8784 - DNA, 20 bp, Artificial Sequence
  Description of Artificial Sequence: Synthetic oligonucleotide
  Target: PCSK9; (-) strand; PAM type: NRG; PAM sequence: GAG
tggatgccttcgtatcccca

SEQ ID NO: 8785 - DNA, 20 bp, Artificial Sequence
  Description of Artificial Sequence: Synthetic oligonucleotide
  Target: PCSK9; (-) strand; PAM type: NRG; PAM sequence: CAG
cctggatgccttcgtatccc

SEQ ID NO: 8786 - DNA, 20 bp, Artificial Sequence
  Description of Artificial Sequence: Synthetic oligonucleotide
  Target: PCSK9; (-) strand; PAM type: NRG; PAM sequence: TGG
ctcctgccacaactagtccc

SEQ ID NO: 8787 - DNA, 20 bp, Artificial Sequence
  Description of Artificial Sequence: Synthetic oligonucleotide
  Target: PCSK9; (-) strand; PAM type: NRG; PAM sequence: TAG
taacagcctcctgccacaac

SEQ ID NO: 8788 - DNA, 20 bp, Artificial Sequence
  Description of Artificial Sequence: Synthetic oligonucleotide
  Target: PCSK9; (-) strand; PAM type: NRG; PAM sequence: CAG
ccttcagacctaagtggtaa

SEQ ID NO: 8789 - DNA, 20 bp, Artificial Sequence
  Description of Artificial Sequence: Synthetic oligonucleotide
  Target: PCSK9; (-) strand; PAM type: NRG; PAM sequence: TGG
ccttacccttcagacctaag

SEQ ID NO: 8790 - DNA, 20 bp, Artificial Sequence
  Description of Artificial Sequence: Synthetic oligonucleotide
  Target: PCSK9; (-) strand; PAM type: NRG; PAM sequence: AAG
tctccttacccttcagacct

SEQ ID NO: 8791 - DNA, 20 bp, Artificial Sequence
  Description of Artificial Sequence: Synthetic oligonucleotide
  Target: PCSK9; (-) strand; PAM type: NRG; PAM sequence: CAG
tattccctctccttaccctt

SEQ ID NO: 8792 - DNA, 20 bp, Artificial Sequence
  Description of Artificial Sequence: Synthetic oligonucleotide
  Target: PCSK9; (-) strand; PAM type: NRG; PAM sequence: AAG
gctccaactgggcagaggga

SEQ ID NO: 8793 - DNA, 20 bp, Artificial Sequence
  Description of Artificial Sequence: Synthetic oligonucleotide
  Target: PCSK9; (-) strand; PAM type: NRG; PAM sequence: GGG
accggctccaactgggcaga

SEQ ID NO: 8794 - DNA, 20 bp, Artificial Sequence
  Description of Artificial Sequence: Synthetic oligonucleotide
  Target: PCSK9; (-) strand; PAM type: NRG; PAM sequence: AGG
caccggctccaactgggcag

SEQ ID NO: 8795 - DNA, 20 bp, Artificial Sequence
  Description of Artificial Sequence: Synthetic oligonucleotide
  Target: PCSK9; (-) strand; PAM type: NRG; PAM sequence: GAG
ccaccggctccaactgggca

SEQ ID NO: 8796 - DNA, 20 bp, Artificial Sequence
  Description of Artificial Sequence: Synthetic oligonucleotide
  Target: PCSK9; (-) strand; PAM type: NRG; PAM sequence: CAG
tgccaccggctccaactggg

SEQ ID NO: 8797 - DNA, 20 bp, Artificial Sequence
  Description of Artificial Sequence: Synthetic oligonucleotide
  Target: PCSK9; (-) strand; PAM type: NRG; PAM sequence: GGG
ccatgccaccggctccaact

SEQ ID NO: 8798 - DNA, 20 bp, Artificial Sequence
  Description of Artificial Sequence: Synthetic oligonucleotide
  Target: PCSK9; (-) strand; PAM type: NRG; PAM sequence: TGG
tccatgccaccggctccaac

SEQ ID NO: 8799 - DNA, 20 bp, Artificial Sequence
  Description of Artificial Sequence: Synthetic oligonucleotide
  Target: PCSK9; (-) strand; PAM type: NRG; PAM sequence: CGG
cagcctctcctccatgccac

SEQ ID NO: 8800 - DNA, 20 bp, Artificial Sequence
  Description of Artificial Sequence: Synthetic oligonucleotide
  Target: PCSK9; (-) strand; PAM type: NRG; PAM sequence: CAG
ctcgggtgattccccacagg

SEQ ID NO: 8801 - DNA, 20 bp, Artificial Sequence
  Description of Artificial Sequence: Synthetic oligonucleotide
  Target: PCSK9; (-) strand; PAM type: NRG; PAM sequence: AGG
accctcgggtgattccccac

SEQ ID NO: 8802 - DNA, 20 bp, Artificial Sequence
  Description of Artificial Sequence: Synthetic oligonucleotide
  Target: PCSK9; (-) strand; PAM type: NRG; PAM sequence: CAG
aaccctcgggtgattcccca

SEQ ID NO: 8803 - DNA, 20 bp, Artificial Sequence
  Description of Artificial Sequence: Synthetic oligonucleotide
  Target: PCSK9; (-) strand; PAM type: NRG; PAM sequence: GGG
catggcagcggtgaaccctc

SEQ ID NO: 8804 - DNA, 20 bp, Artificial Sequence
  Description of Artificial Sequence: Synthetic oligonucleotide
  Target: PCSK9; (-) strand; PAM type: NRG; PAM sequence: CGG
gcatggcagcggtgaaccct

SEQ ID NO: 8805 - DNA, 20 bp, Artificial Sequence
  Description of Artificial Sequence: Synthetic oligonucleotide
  Target: PCSK9; (-) strand; PAM type: NRG; PAM sequence: CGG
tgactccctgcgcatggcag

SEQ ID NO: 8806 - DNA, 20 bp, Artificial Sequence
  Description of Artificial Sequence: Synthetic oligonucleotide
  Target: PCSK9; (-) strand; PAM type: NRG; PAM sequence: CAG
tcctgactccctgcgcatgg

SEQ ID NO: 8807 - DNA, 20 bp, Artificial Sequence
  Description of Artificial Sequence: Synthetic oligonucleotide
  Target: PCSK9; (-) strand; PAM type: NRG; PAM sequence: TGG
acctcctgactccctgcgca

SEQ ID NO: 8808 - DNA, 20 bp, Artificial Sequence
  Description of Artificial Sequence: Synthetic oligonucleotide
  Target: PCSK9; (-) strand; PAM type: NRG; PAM sequence: TGG
gtctcaaaaaaaaaaaaaaa

SEQ ID NO: 8809 - DNA, 20 bp, Artificial Sequence
  Description of Artificial Sequence: Synthetic oligonucleotide
  Target: PCSK9; (-) strand; PAM type: NRG; PAM sequence: GAG
gcactccagtctgggcaaca

SEQ ID NO: 8810 - DNA, 20 bp, Artificial Sequence
  Description of Artificial Sequence: Synthetic oligonucleotide
  Target: PCSK9; (-) strand; PAM type: NRG; PAM sequence: CAG
ctgcactccagtctgggcaa

SEQ ID NO: 8811 - DNA, 20 bp, Artificial Sequence
  Description of Artificial Sequence: Synthetic oligonucleotide
  Target: PCSK9; (-) strand; PAM type: NRG; PAM sequence: GGG
gcaccactgcactccagtct

SEQ ID NO: 8812 - DNA, 20 bp, Artificial Sequence
  Description of Artificial Sequence: Synthetic oligonucleotide
  Target: PCSK9; (-) strand; PAM type: NRG; PAM sequence: TGG
ggcaccactgcactccagtc

SEQ ID NO: 8813 - DNA, 20 bp, Artificial Sequence
  Description of Artificial Sequence: Synthetic oligonucleotide
  Target: PCSK9; (-) strand; PAM type: NRG; PAM sequence: CAG
gatatggcaccactgcactc

SEQ ID NO: 8814 - DNA, 20 bp, Artificial Sequence
  Description of Artificial Sequence: Synthetic oligonucleotide
  Target: PCSK9; (-) strand; PAM type: NRG; PAM sequence: TGG
gggaggcagaggtgcagata

SEQ ID NO: 8815 - DNA, 20 bp, Artificial Sequence
  Description of Artificial Sequence: Synthetic oligonucleotide
  Target: PCSK9; (-) strand; PAM type: NRG; PAM sequence: CAG
gaacccgggaggcagaggtg

SEQ ID NO: 8816 - DNA, 20 bp, Artificial Sequence
  Description of Artificial Sequence: Synthetic oligonucleotide
  Target: PCSK9; (-) strand; PAM type: NRG; PAM sequence: AGG
agcttgaacccgggaggcag

SEQ ID NO: 8817 - DNA, 20 bp, Artificial Sequence
  Description of Artificial Sequence: Synthetic oligonucleotide
  Target: PCSK9; (-) strand; PAM type: NRG; PAM sequence: GAG
gagcttgaacccgggaggca

SEQ ID NO: 8818 - DNA, 20 bp, Artificial Sequence
  Description of Artificial Sequence: Synthetic oligonucleotide
  Target: PCSK9; (-) strand; PAM type: NRG; PAM sequence: CAG
gtgagcttgaacccgggagg

SEQ ID NO: 8819 - DNA, 20 bp, Artificial Sequence
  Description of Artificial Sequence: Synthetic oligonucleotide
  Target: PCSK9; (-) strand; PAM type: NRG; PAM sequence: AGG
gcagtgagcttgaacccggg

SEQ ID NO: 8820 - DNA, 20 bp, Artificial Sequence
  Description of Artificial Sequence: Synthetic oligonucleotide
  Target: PCSK9; (-) strand; PAM type: NRG; PAM sequence: GAG
tgcagtgagcttgaacccgg

SEQ ID NO: 8821 - DNA, 20 bp, Artificial Sequence
  Description of Artificial Sequence: Synthetic oligonucleotide
  Target: PCSK9; (-) strand; PAM type: NRG; PAM sequence: GGG
gttgcagtgagcttgaaccc

SEQ ID NO: 8822 - DNA, 20 bp, Artificial Sequence
  Description of Artificial Sequence: Synthetic oligonucleotide
  Target: PCSK9; (-) strand; PAM type: NRG; PAM sequence: CGG
ggttgcagtgagcttgaacc

SEQ ID NO: 8823 - DNA, 20 bp, Artificial Sequence
  Description of Artificial Sequence: Synthetic oligonucleotide
  Target: PCSK9; (-) strand; PAM type: NRG; PAM sequence: GAG
cgggaggcagaggttgcagt

SEQ ID NO: 8824 - DNA, 20 bp, Artificial Sequence
  Description of Artificial Sequence: Synthetic oligonucleotide
  Target: PCSK9; (-) strand; PAM type: NRG; PAM sequence: CAG
aacccgggaggcagaggttg

SEQ ID NO: 8825 - DNA, 20 bp, Artificial Sequence
  Description of Artificial Sequence: Synthetic oligonucleotide
  Target: PCSK9; (-) strand; PAM type: NRG; PAM sequence: AGG
cgcttgaacccgggaggcag

SEQ ID NO: 8826 - DNA, 20 bp, Artificial Sequence
  Description of Artificial Sequence: Synthetic oligonucleotide
  Target: PCSK9; (-) strand; PAM type: NRG; PAM sequence: GAG
tcgcttgaacccgggaggca

SEQ ID NO: 8827 - DNA, 20 bp, Artificial Sequence
  Description of Artificial Sequence: Synthetic oligonucleotide
  Target: PCSK9; (-) strand; PAM type: NRG; PAM sequence: CAG
aatcgcttgaacccgggagg

SEQ ID NO: 8828 - DNA, 20 bp, Artificial Sequence
  Description of Artificial Sequence: Synthetic oligonucleotide
  Target: PCSK9; (-) strand; PAM type: NRG; PAM sequence: AGG
gagaatcgcttgaacccggg

SEQ ID NO: 8829 - DNA, 20 bp, Artificial Sequence
  Description of Artificial Sequence: Synthetic oligonucleotide
  Target: PCSK9; (-) strand; PAM type: NRG; PAM sequence: GAG
ggagaatcgcttgaacccgg

SEQ ID NO: 8830 - DNA, 20 bp, Artificial Sequence
  Description of Artificial Sequence: Synthetic oligonucleotide
  Target: PCSK9; (-) strand; PAM type: NRG; PAM sequence: GGG
caggagaatcgcttgaaccc

SEQ ID NO: 8831 - DNA, 20 bp, Artificial Sequence
  Description of Artificial Sequence: Synthetic oligonucleotide
  Target: PCSK9; (-) strand; PAM type: NRG; PAM sequence: CGG
gcaggagaatcgcttgaacc

SEQ ID NO: 8832 - DNA, 20 bp, Artificial Sequence
  Description of Artificial Sequence: Synthetic oligonucleotide
  Target: PCSK9; (-) strand; PAM type: NRG; PAM sequence: GAG
tactcgggaggctgaggcag

SEQ ID NO: 8833 - DNA, 20 bp, Artificial Sequence
  Description of Artificial Sequence: Synthetic oligonucleotide
  Target: PCSK9; (-) strand; PAM type: NRG; PAM sequence: AGG
gctactcgggaggctgaggc

SEQ ID NO: 8834 - DNA, 20 bp, Artificial Sequence
  Description of Artificial Sequence: Synthetic oligonucleotide
  Target: PCSK9; (-) strand; PAM type: NRG; PAM sequence: CAG
agctactcgggaggctgagg

SEQ ID NO: 8835 - DNA, 20 bp, Artificial Sequence
  Description of Artificial Sequence: Synthetic oligonucleotide
  Target: PCSK9; (-) strand; PAM type: NRG; PAM sequence: AGG
cccagctactcgggaggctg

SEQ ID NO: 8836 - DNA, 20 bp, Artificial Sequence
  Description of Artificial Sequence: Synthetic oligonucleotide
  Target: PCSK9; (-) strand; PAM type: NRG; PAM sequence: GAG
tcccagctactcgggaggct

SEQ ID NO: 8837 - DNA, 20 bp, Artificial Sequence
  Description of Artificial Sequence: Synthetic oligonucleotide
  Target: PCSK9; (-) strand; PAM type: NRG; PAM sequence: AGG
tgtagtcccagctactcggg

SEQ ID NO: 8838 - DNA, 20 bp, Artificial Sequence
  Description of Artificial Sequence: Synthetic oligonucleotide
  Target: PCSK9; (-) strand; PAM type: NRG; PAM sequence: GAG
ctgtagtcccagctactcgg

SEQ ID NO: 8839 - DNA, 20 bp, Artificial Sequence
  Description of Artificial Sequence: Synthetic oligonucleotide
  Target: PCSK9; (-) strand; PAM type: NRG; PAM sequence: GGG
acctgtagtcccagctactc

SEQ ID NO: 8840 - DNA, 20 bp, Artificial Sequence
  Description of Artificial Sequence: Synthetic oligonucleotide
  Target: PCSK9; (-) strand; PAM type: NRG; PAM sequence: CGG
cacctgtagtcccagctact

SEQ ID NO: 8841 - DNA, 20 bp, Artificial Sequence
  Description of Artificial Sequence: Synthetic oligonucleotide
  Target: PCSK9; (-) strand; PAM type: NRG; PAM sequence: CAG
gtggcacacacctgtagtcc

SEQ ID NO: 8842 - DNA, 20 bp, Artificial Sequence
  Description of Artificial Sequence: Synthetic oligonucleotide
  Target: PCSK9; (-) strand; PAM type: NRG; PAM sequence: TAG
ggcatggtggcacacacctg

SEQ ID NO: 8843 - DNA, 20 bp, Artificial Sequence
  Description of Artificial Sequence: Synthetic oligonucleotide
  Target: PCSK9; (-) strand; PAM type: NRG; PAM sequence: TGG
caaaaattagccaggcatgg

SEQ ID NO: 8844 - DNA, 20 bp, Artificial Sequence
  Description of Artificial Sequence: Synthetic oligonucleotide
  Target: PCSK9; (-) strand; PAM type: NRG; PAM sequence: TGG
atacaaaaattagccaggca

SEQ ID NO: 8845 - DNA, 20 bp, Artificial Sequence
  Description of Artificial Sequence: Synthetic oligonucleotide
  Target: PCSK9; (-) strand; PAM type: NRG; PAM sequence: AGG
taaaaatacaaaaattagcc

SEQ ID NO: 8846 - DNA, 20 bp, Artificial Sequence
  Description of Artificial Sequence: Synthetic oligonucleotide
  Target: PCSK9; (-) strand; PAM type: NRG; PAM sequence: CAG
ttaaaaatacaaaaattagc

SEQ ID NO: 8847 - DNA, 20 bp, Artificial Sequence
  Description of Artificial Sequence: Synthetic oligonucleotide
  Target: PCSK9; (-) strand; PAM type: NRG; PAM sequence: TAG
tctattaaaaatacaaaaat

SEQ ID NO: 8848 - DNA, 20 bp, Artificial Sequence
  Description of Artificial Sequence: Synthetic oligonucleotide
  Target: PCSK9; (-) strand; PAM type: NRG; PAM sequence: TGG
cgagaccagcctggccaaca

SEQ ID NO: 8849 - DNA, 20 bp, Artificial Sequence
  Description of Artificial Sequence: Synthetic oligonucleotide
  Target: PCSK9; (-) strand; PAM type: NRG; PAM sequence: TGG
tcgagagttcgagaccagcc

SEQ ID NO: 8850 - DNA, 20 bp, Artificial Sequence
  Description of Artificial Sequence: Synthetic oligonucleotide
  Target: PCSK9; (-) strand; PAM type: NRG; PAM sequence: CAG
tgaggtcgagagttcgagac

SEQ ID NO: 8851 - DNA, 20 bp, Artificial Sequence
  Description of Artificial Sequence: Synthetic oligonucleotide
  Target: PCSK9; (-) strand; PAM type: NRG; PAM sequence: GAG
tcacctgaggtcgagagttc

SEQ ID NO: 8852 - DNA, 20 bp, Artificial Sequence
  Description of Artificial Sequence: Synthetic oligonucleotide
  Target: PCSK9; (-) strand; PAM type: NRG; PAM sequence: GAG
gggggatcacctgaggtcga

SEQ ID NO: 8853 - DNA, 20 bp, Artificial Sequence
  Description of Artificial Sequence: Synthetic oligonucleotide
  Target: PCSK9; (-) strand; PAM type: NRG; PAM sequence: GAG
gtgggggatcacctgaggtc

SEQ ID NO: 8854 - DNA, 20 bp, Artificial Sequence
  Description of Artificial Sequence: Synthetic oligonucleotide
  Target: PCSK9; (-) strand; PAM type: NRG; PAM sequence: AGG
ccgaggtgggggatcacctg

SEQ ID NO: 8855 - DNA, 20 bp, Artificial Sequence
  Description of Artificial Sequence: Synthetic oligonucleotide
  Target: PCSK9; (-) strand; PAM type: NRG; PAM sequence: GAG
gccgaggtgggggatcacct

SEQ ID NO: 8856 - DNA, 20 bp, Artificial Sequence
  Description of Artificial Sequence: Synthetic oligonucleotide
  Target: PCSK9; (-) strand; PAM type: NRG; PAM sequence: GGG
actttgggaggccgaggtgg

SEQ ID NO: 8857 - DNA, 20 bp, Artificial Sequence
  Description of Artificial Sequence: Synthetic oligonucleotide
  Target: PCSK9; (-) strand; PAM type: NRG; PAM sequence: GGG
cactttgggaggccgaggtg

SEQ ID NO: 8858 - DNA, 20 bp, Artificial Sequence
  Description of Artificial Sequence: Synthetic oligonucleotide
  Target: PCSK9; (-) strand; PAM type: NRG; PAM sequence: GGG
gcactttgggaggccgaggt

SEQ ID NO: 8859 - DNA, 20 bp, Artificial Sequence
  Description of Artificial Sequence: Synthetic oligonucleotide
  Target: PCSK9; (-) strand; PAM type: NRG; PAM sequence: TGG
agcactttgggaggccgagg

SEQ ID NO: 8860 - DNA, 20 bp, Artificial Sequence
  Description of Artificial Sequence: Synthetic oligonucleotide
  Target: PCSK9; (-) strand; PAM type: NRG; PAM sequence: AGG
cccagcactttgggaggccg

SEQ ID NO: 8861 - DNA, 20 bp, Artificial Sequence
  Description of Artificial Sequence: Synthetic oligonucleotide
  Target: PCSK9; (-) strand; PAM type: NRG; PAM sequence: GAG
tcccagcactttgggaggcc

SEQ ID NO: 8862 - DNA, 20 bp, Artificial Sequence
  Description of Artificial Sequence: Synthetic oligonucleotide
  Target: PCSK9; (-) strand; PAM type: NRG; PAM sequence: AGG
tgtaatcccagcactttggg

SEQ ID NO: 8863 - DNA, 20 bp, Artificial Sequence
  Description of Artificial Sequence: Synthetic oligonucleotide
  Target: PCSK9; (-) strand; PAM type: NRG; PAM sequence: GAG
ctgtaatcccagcactttgg

SEQ ID NO: 8864 - DNA, 20 bp, Artificial Sequence
  Description of Artificial Sequence: Synthetic oligonucleotide
  Target: PCSK9; (-) strand; PAM type: NRG; PAM sequence: GGG
gcctgtaatcccagcacttt

SEQ ID NO: 8865 - DNA, 20 bp, Artificial Sequence
  Description of Artificial Sequence: Synthetic oligonucleotide
  Target: PCSK9; (-) strand; PAM type: NRG; PAM sequence: TGG
cgcctgtaatcccagcactt

SEQ ID NO: 8866 - DNA, 20 bp, Artificial Sequence
  Description of Artificial Sequence: Synthetic oligonucleotide
  Target: PCSK9; (-) strand; PAM type: NRG; PAM sequence: CAG
gtgactcacgcctgtaatcc

SEQ ID NO: 8867 - DNA, 20 bp, Artificial Sequence
  Description of Artificial Sequence: Synthetic oligonucleotide
  Target: PCSK9; (-) strand; PAM type: NRG; PAM sequence: CGG
agtgcatcagcagctgggag

SEQ ID NO: 8868 - DNA, 20 bp, Artificial Sequence
  Description of Artificial Sequence: Synthetic oligonucleotide
  Target: PCSK9; (-) strand; PAM type: NRG; PAM sequence: GAG
aagagtgcatcagcagctgg

SEQ ID NO: 8869 - DNA, 20 bp, Artificial Sequence
  Description of Artificial Sequence: Synthetic oligonucleotide
  Target: PCSK9; (-) strand; PAM type: NRG; PAM sequence: GGG
acaagagtgcatcagcagct

SEQ ID NO: 8870 - DNA, 20 bp, Artificial Sequence
  Description of Artificial Sequence: Synthetic oligonucleotide
  Target: PCSK9; (-) strand; PAM type: NRG; PAM sequence: TGG
gacaagagtgcatcagcagc

SEQ ID NO: 8871 - DNA, 20 bp, Artificial Sequence
  Description of Artificial Sequence: Synthetic oligonucleotide
  Target: PCSK9; (-) strand; PAM type: NRG; PAM sequence: CAG
gaaggacaagagtgcatcag

SEQ ID NO: 8872 - DNA, 20 bp, Artificial Sequence
  Description of Artificial Sequence: Synthetic oligonucleotide
  Target: PCSK9; (-) strand; PAM type: NRG; PAM sequence: CAG
ttagaaggacaagagtgcat

SEQ ID NO: 8873 - DNA, 20 bp, Artificial Sequence
  Description of Artificial Sequence: Synthetic oligonucleotide
  Target: PCSK9; (-) strand; PAM type: NRG; PAM sequence: GAG
agcaggagttagaaggacaa

SEQ ID NO: 8874 - DNA, 20 bp, Artificial Sequence
  Description of Artificial Sequence: Synthetic oligonucleotide
  Target: PCSK9; (-) strand; PAM type: NRG; PAM sequence: AAG
ctagcaggagttagaaggac

SEQ ID NO: 8875 - DNA, 20 bp, Artificial Sequence
  Description of Artificial Sequence: Synthetic oligonucleotide
  Target: PCSK9; (-) strand; PAM type: NRG; PAM sequence: AGG
aggcactagcaggagttaga

SEQ ID NO: 8876 - DNA, 20 bp, Artificial Sequence
  Description of Artificial Sequence: Synthetic oligonucleotide
  Target: PCSK9; (-) strand; PAM type: NRG; PAM sequence: AAG
gaggcactagcaggagttag

SEQ ID NO: 8877 - DNA, 20 bp, Artificial Sequence
  Description of Artificial Sequence: Synthetic oligonucleotide
  Target: PCSK9; (-) strand; PAM type: NRG; PAM sequence: TAG
tgggaggcactagcaggagt

SEQ ID NO: 8878 - DNA, 20 bp, Artificial Sequence
  Description of Artificial Sequence: Synthetic oligonucleotide
  Target: PCSK9; (-) strand; PAM type: NRG; PAM sequence: GAG
ccaatgggaggcactagcag

SEQ ID NO: 8879 - DNA, 20 bp, Artificial Sequence
  Description of Artificial Sequence: Synthetic oligonucleotide
  Target: PCSK9; (-) strand; PAM type: NRG; PAM sequence: AGG
agccaatgggaggcactagc

SEQ ID NO: 8880 - DNA, 20 bp, Artificial Sequence
  Description of Artificial Sequence: Synthetic oligonucleotide
  Target: PCSK9; (-) strand; PAM type: NRG; PAM sequence: CAG
cagccaatgggaggcactag

SEQ ID NO: 8881 - DNA, 20 bp, Artificial Sequence
  Description of Artificial Sequence: Synthetic oligonucleotide
  Target: PCSK9; (-) strand; PAM type: NRG; PAM sequence: TAG
gctcagccaatgggaggcac

SEQ ID NO: 8882 - DNA, 20 bp, Artificial Sequence
  Description of Artificial Sequence: Synthetic oligonucleotide
  Target: PCSK9; (-) strand; PAM type: NRG; PAM sequence: AGG
agttgggctcagccaatggg

SEQ ID NO: 8883 - DNA, 20 bp, Artificial Sequence
  Description of Artificial Sequence: Synthetic oligonucleotide
  Target: PCSK9; (-) strand; PAM type: NRG; PAM sequence: GAG
cagttgggctcagccaatgg

SEQ ID NO: 8884 - DNA, 20 bp, Artificial Sequence
  Description of Artificial Sequence: Synthetic oligonucleotide
  Target: PCSK9; (-) strand; PAM type: NRG; PAM sequence: GGG
tccagttgggctcagccaat

SEQ ID NO: 8885 - DNA, 20 bp, Artificial Sequence
  Description of Artificial Sequence: Synthetic oligonucleotide
  Target: PCSK9; (-) strand; PAM type: NRG; PAM sequence: TGG
ttccagttgggctcagccaa

SEQ ID NO: 8886 - DNA, 20 bp, Artificial Sequence
  Description of Artificial Sequence: Synthetic oligonucleotide
  Target: PCSK9; (-) strand; PAM type: NRG; PAM sequence: CAG
gcaaagcttccagttgggct

SEQ ID NO: 8887 - DNA, 20 bp, Artificial Sequence
  Description of Artificial Sequence: Synthetic oligonucleotide
  Target: PCSK9; (-) strand; PAM type: NRG; PAM sequence: GGG
cccttgcaaagcttccagtt

SEQ ID NO: 8888 - DNA, 20 bp, Artificial Sequence
  Description of Artificial Sequence: Synthetic oligonucleotide
  Target: PCSK9; (-) strand; PAM type: NRG; PAM sequence: TGG
tcccttgcaaagcttccagt

SEQ ID NO: 8889 - DNA, 20 bp, Artificial Sequence
  Description of Artificial Sequence: Synthetic oligonucleotide
  Target: PCSK9; (-) strand; PAM type: NRG; PAM sequence: CAG
cagctcccttgcaaagcttc

SEQ ID NO: 8890 - DNA, 20 bp, Artificial Sequence
  Description of Artificial Sequence: Synthetic oligonucleotide
  Target: PCSK9; (-) strand; PAM type: NRG; PAM sequence: AAG
gcagcaccagctcccttgca

SEQ ID NO: 8891 - DNA, 20 bp, Artificial Sequence
  Description of Artificial Sequence: Synthetic oligonucleotide
  Target: PCSK9; (-) strand; PAM type: NRG; PAM sequence: CAG
ctcagtgcaaactgcagcac

SEQ ID NO: 8892 - DNA, 20 bp, Artificial Sequence
  Description of Artificial Sequence: Synthetic oligonucleotide
  Target: PCSK9; (-) strand; PAM type: NRG; PAM sequence: CAG
agcctgctcagtgcaaactg

SEQ ID NO: 8893 - DNA, 20 bp, Artificial Sequence
  Description of Artificial Sequence: Synthetic oligonucleotide
  Target: PCSK9; (-) strand; PAM type: NRG; PAM sequence: CAG
ccagccttctccagcctgct

SEQ ID NO: 8894 - DNA, 20 bp, Artificial Sequence
  Description of Artificial Sequence: Synthetic oligonucleotide
  Target: PCSK9; (-) strand; PAM type: NRG; PAM sequence: CAG
gtctattctccagccttctc

SEQ ID NO: 8895 - DNA, 20 bp, Artificial Sequence
  Description of Artificial Sequence: Synthetic oligonucleotide
  Target: PCSK9; (-) strand; PAM type: NRG; PAM sequence: CAG
ttgtcccctagtctattctc

SEQ ID NO: 8896 - DNA, 20 bp, Artificial Sequence
  Description of Artificial Sequence: Synthetic oligonucleotide
  Target: PCSK9; (-) strand; PAM type: NRG; PAM sequence: TAG
tggcaattcggtttgtcccc

SEQ ID NO: 8897 - DNA, 20 bp, Artificial Sequence
  Description of Artificial Sequence: Synthetic oligonucleotide
  Target: PCSK9; (-) strand; PAM type: NRG; PAM sequence: CGG
acataacagcactggcaatt

SEQ ID NO: 8898 - DNA, 20 bp, Artificial Sequence
  Description of Artificial Sequence: Synthetic oligonucleotide
  Target: PCSK9; (-) strand; PAM type: NRG; PAM sequence: TGG
aaatcatgacataacagcac

SEQ ID NO: 8899 - DNA, 20 bp, Artificial Sequence
  Description of Artificial Sequence: Synthetic oligonucleotide
  Target: PCSK9; (-) strand; PAM type: NRG; PAM sequence: CAG
atgcctaaatcatgacataa

SEQ ID NO: 8900 - DNA, 20 bp, Artificial Sequence
  Description of Artificial Sequence: Synthetic oligonucleotide
  Target: PCSK9; (-) strand; PAM type: NRG; PAM sequence: TGG
atggagtgaagctcaggccc

SEQ ID NO: 8901 - DNA, 20 bp, Artificial Sequence
  Description of Artificial Sequence: Synthetic oligonucleotide
  Target: PCSK9; (-) strand; PAM type: NRG; PAM sequence: AGG
atggacatggagtgaagctc

SEQ ID NO: 8902 - DNA, 20 bp, Artificial Sequence
  Description of Artificial Sequence: Synthetic oligonucleotide
  Target: PCSK9; (-) strand; PAM type: NRG; PAM sequence: CAG
gatggacatggagtgaagct

SEQ ID NO: 8903 - DNA, 20 bp, Artificial Sequence
  Description of Artificial Sequence: Synthetic oligonucleotide
  Target: PCSK9; (-) strand; PAM type: NRG; PAM sequence: AAG
ggcaggatggacatggagtg

SEQ ID NO: 8904 - DNA, 20 bp, Artificial Sequence
  Description of Artificial Sequence: Synthetic oligonucleotide
  Target: PCSK9; (-) strand; PAM type: NRG; PAM sequence: GAG
ctctgggcaggatggacatg

SEQ ID NO: 8905 - DNA, 20 bp, Artificial Sequence
  Description of Artificial Sequence: Synthetic oligonucleotide
  Target: PCSK9; (-) strand; PAM type: NRG; PAM sequence: TGG
ggctctgggcaggatggaca

SEQ ID NO: 8906 - DNA, 20 bp, Artificial Sequence
  Description of Artificial Sequence: Synthetic oligonucleotide
  Target: PCSK9; (-) strand; PAM type: NRG; PAM sequence: TGG
tgccaaggctctgggcagga

SEQ ID NO: 8907 - DNA, 20 bp, Artificial Sequence
  Description of Artificial Sequence: Synthetic oligonucleotide
  Target: PCSK9; (-) strand; PAM type: NRG; PAM sequence: AGG
gctgtgccaaggctctgggc

SEQ ID NO: 8908 - DNA, 20 bp, Artificial Sequence
  Description of Artificial Sequence: Synthetic oligonucleotide
  Target: PCSK9; (-) strand; PAM type: NRG; PAM sequence: CAG
ggctgtgccaaggctctggg

SEQ ID NO: 8909 - DNA, 20 bp, Artificial Sequence
  Description of Artificial Sequence: Synthetic oligonucleotide
  Target: PCSK9; (-) strand; PAM type: NRG; PAM sequence: GGG
ccaggctgtgccaaggctct

SEQ ID NO: 8910 - DNA, 20 bp, Artificial Sequence
  Description of Artificial Sequence: Synthetic oligonucleotide
  Target: PCSK9; (-) strand; PAM type: NRG; PAM sequence: TGG
gccaggctgtgccaaggctc

SEQ ID NO: 8911 - DNA, 20 bp, Artificial Sequence
  Description of Artificial Sequence: Synthetic oligonucleotide
  Target: PCSK9; (-) strand; PAM type: NRG; PAM sequence: AGG
ctgggagccaggctgtgcca

SEQ ID NO: 8912 - DNA, 20 bp, Artificial Sequence
  Description of Artificial Sequence: Synthetic oligonucleotide
  Target: PCSK9; (-) strand; PAM type: NRG; PAM sequence: AAG
tctgggagccaggctgtgcc

SEQ ID NO: 8913 - DNA, 20 bp, Artificial Sequence
  Description of Artificial Sequence: Synthetic oligonucleotide
  Target: PCSK9; (-) strand; PAM type: NRG; PAM sequence: AGG
tgacatcttgtctgggagcc

SEQ ID NO: 8914 - DNA, 20 bp, Artificial Sequence
  Description of Artificial Sequence: Synthetic oligonucleotide
  Target: PCSK9; (-) strand; PAM type: NRG; PAM sequence: CAG
ttgacatcttgtctgggagc

SEQ ID NO: 8915 - DNA, 20 bp, Artificial Sequence
  Description of Artificial Sequence: Synthetic oligonucleotide
  Target: PCSK9; (-) strand; PAM type: NRG; PAM sequence: GAG
gaacttgacatcttgtctgg

SEQ ID NO: 8916 - DNA, 20 bp, Artificial Sequence
  Description of Artificial Sequence: Synthetic oligonucleotide
  Target: PCSK9; (-) strand; PAM type: NRG; PAM sequence: GGG
ctgaacttgacatcttgtct

SEQ ID NO: 8917 - DNA, 20 bp, Artificial Sequence
  Description of Artificial Sequence: Synthetic oligonucleotide
  Target: PCSK9; (-) strand; PAM type: NRG; PAM sequence: TGG
tctgaacttgacatcttgtc

SEQ ID NO: 8918 - DNA, 20 bp, Artificial Sequence
  Description of Artificial Sequence: Synthetic oligonucleotide
  Target: PCSK9; (-) strand; PAM type: NRG; PAM sequence: AGG
atagaggattccttttagga

SEQ ID NO: 8919 - DNA, 20 bp, Artificial Sequence
  Description of Artificial Sequence: Synthetic oligonucleotide
  Target: PCSK9; (-) strand; PAM type: NRG; PAM sequence: AAG
catagaggattccttttagg

SEQ ID NO: 8920 - DNA, 20 bp, Artificial Sequence
  Description of Artificial Sequence: Synthetic oligonucleotide
  Target: PCSK9; (-) strand; PAM type: NRG; PAM sequence: AGG
tggcatagaggattcctttt

SEQ ID NO: 8921 - DNA, 20 bp, Artificial Sequence
  Description of Artificial Sequence: Synthetic oligonucleotide
  Target: PCSK9; (-) strand; PAM type: NRG; PAM sequence: TAG
ctggcatagaggattccttt

SEQ ID NO: 8922 - DNA, 20 bp, Artificial Sequence
  Description of Artificial Sequence: Synthetic oligonucleotide
  Target: PCSK9; (-) strand; PAM type: NRG; PAM sequence: AGG
tgcaacacggtctggcatag

SEQ ID NO: 8923 - DNA, 20 bp, Artificial Sequence
  Description of Artificial Sequence: Synthetic oligonucleotide
  Target: PCSK9; (-) strand; PAM type: NRG; PAM sequence: GAG
ctgcaacacggtctggcata

SEQ ID NO: 8924 - DNA, 20 bp, Artificial Sequence
  Description of Artificial Sequence: Synthetic oligonucleotide
  Target: PCSK9; (-) strand; PAM type: NRG; PAM sequence: TAG
ccctgcaacacggtctggca

SEQ ID NO: 8925 - DNA, 20 bp, Artificial Sequence
  Description of Artificial Sequence: Synthetic oligonucleotide
  Target: PCSK9; (-) strand; PAM type: NRG; PAM sequence: TGG
catatccctgcaacacggtc

SEQ ID NO: 8926 - DNA, 20 bp, Artificial Sequence
  Description of Artificial Sequence: Synthetic oligonucleotide
  Target: PCSK9; (-) strand; PAM type: NRG; PAM sequence: CGG
actcccatatccctgcaaca

SEQ ID NO: 8927 - DNA, 20 bp, Artificial Sequence
  Description of Artificial Sequence: Synthetic oligonucleotide
  Target: PCSK9; (-) strand; PAM type: NRG; PAM sequence: CAG
ccttgatcaggctgggagcc

SEQ ID NO: 8928 - DNA, 20 bp, Artificial Sequence
  Description of Artificial Sequence: Synthetic oligonucleotide
  Target: PCSK9; (-) strand; PAM type: NRG; PAM sequence: GAG
tcgctccttgatcaggctgg

SEQ ID NO: 8929 - DNA, 20 bp, Artificial Sequence
  Description of Artificial Sequence: Synthetic oligonucleotide
  Target: PCSK9; (-) strand; PAM type: NRG; PAM sequence: GGG
tctcgctccttgatcaggct

SEQ ID NO: 8930 - DNA, 20 bp, Artificial Sequence
  Description of Artificial Sequence: Synthetic oligonucleotide
  Target: PCSK9; (-) strand; PAM type: NRG; PAM sequence: TGG
ttctcgctccttgatcaggc

SEQ ID NO: 8931 - DNA, 20 bp, Artificial Sequence
  Description of Artificial Sequence: Synthetic oligonucleotide
  Target: PCSK9; (-) strand; PAM type: NRG; PAM sequence: AGG
agttttctcgctccttgatc

SEQ ID NO: 8932 - DNA, 20 bp, Artificial Sequence
  Description of Artificial Sequence: Synthetic oligonucleotide
  Target: PCSK9; (-) strand; PAM type: NRG; PAM sequence: CAG
gagttttctcgctccttgat

SEQ ID NO: 8933 - DNA, 20 bp, Artificial Sequence
  Description of Artificial Sequence: Synthetic oligonucleotide
  Target: PCSK9; (-) strand; PAM type: NRG; PAM sequence: GAG
ggaggacagactaggagcct

SEQ ID NO: 8934 - DNA, 20 bp, Artificial Sequence
  Description of Artificial Sequence: Synthetic oligonucleotide
  Target: PCSK9; (-) strand; PAM type: NRG; PAM sequence: GAG
tgccccggaggacagactag

SEQ ID NO: 8935 - DNA, 20 bp, Artificial Sequence
  Description of Artificial Sequence: Synthetic oligonucleotide
  Target: PCSK9; (-) strand; PAM type: NRG; PAM sequence: AGG
agtgccccggaggacagact

SEQ ID NO: 8936 - DNA, 20 bp, Artificial Sequence
  Description of Artificial Sequence: Synthetic oligonucleotide
  Target: PCSK9; (-) strand; PAM type: NRG; PAM sequence: TAG
tagtgccccggaggacagac

SEQ ID NO: 8937 - DNA, 20 bp, Artificial Sequence
  Description of Artificial Sequence: Synthetic oligonucleotide
  Target: PCSK9; (-) strand; PAM type: NRG; PAM sequence: CAG
cctgctagtgccccggagga

SEQ ID NO: 8938 - DNA, 20 bp, Artificial Sequence
  Description of Artificial Sequence: Synthetic oligonucleotide
  Target: PCSK9; (-) strand; PAM type: NRG; PAM sequence: AGG
tgtccctgctagtgccccgg

SEQ ID NO: 8939 - DNA, 20 bp, Artificial Sequence
  Description of Artificial Sequence: Synthetic oligonucleotide
  Target: PCSK9; (-) strand; PAM type: NRG; PAM sequence: GAG
ttgtccctgctagtgccccg

SEQ ID NO: 8940 - DNA, 20 bp, Artificial Sequence
  Description of Artificial Sequence: Synthetic oligonucleotide
  Target: PCSK9; (-) strand; PAM type: NRG; PAM sequence: CGG
ccttgtccctgctagtgccc

SEQ ID NO: 8941 - DNA, 20 bp, Artificial Sequence
  Description of Artificial Sequence: Synthetic oligonucleotide
  Target: PCSK9; (-) strand; PAM type: NRG; PAM sequence: TAG
gcctcccaccttgtccctgc

SEQ ID NO: 8942 - DNA, 20 bp, Artificial Sequence
  Description of Artificial Sequence: Synthetic oligonucleotide
  Target: PCSK9; (-) strand; PAM type: NRG; PAM sequence: CAG
gtccccacatcccagcccag

SEQ ID NO: 8943 - DNA, 20 bp, Artificial Sequence
  Description of Artificial Sequence: Synthetic oligonucleotide
  Target: PCSK9; (-) strand; PAM type: NRG; PAM sequence: CAG
cctgtccccacatcccagcc

SEQ ID NO: 8944 - DNA, 20 bp, Artificial Sequence
  Description of Artificial Sequence: Synthetic oligonucleotide
  Target: PCSK9; (-) strand; PAM type: NRG; PAM sequence: CAG
tcaaacctgtccccacatcc

SEQ ID NO: 8945 - DNA, 20 bp, Artificial Sequence
  Description of Artificial Sequence: Synthetic oligonucleotide
  Target: PCSK9; (-) strand; PAM type: NRG; PAM sequence: TGG
cagcaaacacagccacagcc

SEQ ID NO: 8946 - DNA, 20 bp, Artificial Sequence
  Description of Artificial Sequence: Synthetic oligonucleotide
  Target: PCSK9; (-) strand; PAM type: NRG; PAM sequence: CAG
gacagcagcaaacacagcca

SEQ ID NO: 8947 - DNA, 20 bp, Artificial Sequence
  Description of Artificial Sequence: Synthetic oligonucleotide
  Target: PCSK9; (-) strand; PAM type: NRG; PAM sequence: CAG
catttggacagcagcaaaca

SEQ ID NO: 8948 - DNA, 20 bp, Artificial Sequence
  Description of Artificial Sequence: Synthetic oligonucleotide
  Target: PCSK9; (-) strand; PAM type: NRG; PAM sequence: CAG
tgcttaagccatttggacag

SEQ ID NO: 8949 - DNA, 20 bp, Artificial Sequence
  Description of Artificial Sequence: Synthetic oligonucleotide
  Target: PCSK9; (-) strand; PAM type: NRG; PAM sequence: CAG
ctctgcttaagccatttgga

SEQ ID NO: 8950 - DNA, 20 bp, Artificial Sequence
  Description of Artificial Sequence: Synthetic oligonucleotide
  Target: PCSK9; (-) strand; PAM type: NRG; PAM sequence: TGG
gggactctgcttaagccatt

SEQ ID NO: 8951 - DNA, 20 bp, Artificial Sequence
  Description of Artificial Sequence: Synthetic oligonucleotide
  Target: PCSK9; (-) strand; PAM type: NRG; PAM sequence: AAG
gaggccgggggactctgctt

SEQ ID NO: 8952 - DNA, 20 bp, Artificial Sequence
  Description of Artificial Sequence: Synthetic oligonucleotide
  Target: PCSK9; (-) strand; PAM type: NRG; PAM sequence: GGG
gcagaagccagagaggccgg

SEQ ID NO: 8953 - DNA, 20 bp, Artificial Sequence
  Description of Artificial Sequence: Synthetic oligonucleotide
  Target: PCSK9; (-) strand; PAM type: NRG; PAM sequence: GGG
tgcagaagccagagaggccg

SEQ ID NO: 8954 - DNA, 20 bp, Artificial Sequence
  Description of Artificial Sequence: Synthetic oligonucleotide
  Target: PCSK9; (-) strand; PAM type: NRG; PAM sequence: GGG
ctgcagaagccagagaggcc

SEQ ID NO: 8955 - DNA, 20 bp, Artificial Sequence
  Description of Artificial Sequence: Synthetic oligonucleotide
  Target: PCSK9; (-) strand; PAM type: NRG; PAM sequence: CGG
cctgcagaagccagagaggc

SEQ ID NO: 8956 - DNA, 20 bp, Artificial Sequence
  Description of Artificial Sequence: Synthetic oligonucleotide
  Target: PCSK9; (-) strand; PAM type: NRG; PAM sequence: AGG
aaggcctgcagaagccagag

SEQ ID NO: 8957 - DNA, 20 bp, Artificial Sequence
  Description of Artificial Sequence: Synthetic oligonucleotide
  Target: PCSK9; (-) strand; PAM type: NRG; PAM sequence: GAG
caaggcctgcagaagccaga

SEQ ID NO: 8958 - DNA, 20 bp, Artificial Sequence
  Description of Artificial Sequence: Synthetic oligonucleotide
  Target: PCSK9; (-) strand; PAM type: NRG; PAM sequence: GAG
ttcaaggcctgcagaagcca

SEQ ID NO: 8959 - DNA, 20 bp, Artificial Sequence
  Description of Artificial Sequence: Synthetic oligonucleotide
  Target: PCSK9; (-) strand; PAM type: NRG; PAM sequence: CAG
acttcaaggcctgcagaagc

SEQ ID NO: 8960 - DNA, 20 bp, Artificial Sequence
  Description of Artificial Sequence: Synthetic oligonucleotide
  Target: PCSK9; (-) strand; PAM type: NRG; PAM sequence: AAG
ggcaacttcaaggcctgcag

SEQ ID NO: 8961 - DNA, 20 bp, Artificial Sequence
  Description of Artificial Sequence: Synthetic oligonucleotide
  Target: PCSK9; (-) strand; PAM type: NRG; PAM sequence: CAG
tggggcaacttcaaggcctg

SEQ ID NO: 8962 - DNA, 20 bp, Artificial Sequence
  Description of Artificial Sequence: Synthetic oligonucleotide
  Target: PCSK9; (-) strand; PAM type: NRG; PAM sequence: AGG
gtcgacatggggcaacttca

SEQ ID NO: 8963 - DNA, 20 bp, Artificial Sequence
  Description of Artificial Sequence: Synthetic oligonucleotide
  Target: PCSK9; (-) strand; PAM type: NRG; PAM sequence: AAG
agtcgacatggggcaacttc

SEQ ID NO: 8964 - DNA, 20 bp, Artificial Sequence
  Description of Artificial Sequence: Synthetic oligonucleotide
  Target: PCSK9; (-) strand; PAM type: NRG; PAM sequence: GGG
tcctcgatgtagtcgacatg

SEQ ID NO: 8965 - DNA, 20 bp, Artificial Sequence
  Description of Artificial Sequence: Synthetic oligonucleotide
  Target: PCSK9; (-) strand; PAM type: NRG; PAM sequence: GGG
ctcctcgatgtagtcgacat

SEQ ID NO: 8966 - DNA, 20 bp, Artificial Sequence
  Description of Artificial Sequence: Synthetic oligonucleotide
  Target: PCSK9; (-) strand; PAM type: NRG; PAM sequence: TGG
cctcctcgatgtagtcgaca

SEQ ID NO: 8967 - DNA, 20 bp, Artificial Sequence
  Description of Artificial Sequence: Synthetic oligonucleotide
  Target: PCSK9; (-) strand; PAM type: NRG; PAM sequence: TAG
cagaggagtcctcctcgatg

SEQ ID NO: 8968 - DNA, 20 bp, Artificial Sequence
  Description of Artificial Sequence: Synthetic oligonucleotide
  Target: PCSK9; (-) strand; PAM type: NRG; PAM sequence: GAG
tgctctgggcaaagacagag

SEQ ID NO: 8969 - DNA, 20 bp, Artificial Sequence
  Description of Artificial Sequence: Synthetic oligonucleotide
  Target: PCSK9; (-) strand; PAM type: NRG; PAM sequence: AGG
gatgctctgggcaaagacag

SEQ ID NO: 8970 - DNA, 20 bp, Artificial Sequence
  Description of Artificial Sequence: Synthetic oligonucleotide
  Target: PCSK9; (-) strand; PAM type: NRG; PAM sequence: GAG
ggatgctctgggcaaagaca

SEQ ID NO: 8971 - DNA, 20 bp, Artificial Sequence
  Description of Artificial Sequence: Synthetic oligonucleotide
  Target: PCSK9; (-) strand; PAM type: NRG; PAM sequence: CAG
cgggatgctctgggcaaaga

SEQ ID NO: 8972 - DNA, 20 bp, Artificial Sequence
  Description of Artificial Sequence: Synthetic oligonucleotide
  Target: PCSK9; (-) strand; PAM type: NRG; PAM sequence: AAG
tccacgggatgctctgggca

SEQ ID NO: 8973 - DNA, 20 bp, Artificial Sequence
  Description of Artificial Sequence: Synthetic oligonucleotide
  Target: PCSK9; (-) strand; PAM type: NRG; PAM sequence: GGG
caggttccacgggatgctct

SEQ ID NO: 8974 - DNA, 20 bp, Artificial Sequence
  Description of Artificial Sequence: Synthetic oligonucleotide
  Target: PCSK9; (-) strand; PAM type: NRG; PAM sequence: TGG
ccaggttccacgggatgctc

SEQ ID NO: 8975 - DNA, 20 bp, Artificial Sequence
  Description of Artificial Sequence: Synthetic oligonucleotide
  Target: PCSK9; (-) strand; PAM type: NRG; PAM sequence: GGG
taatccgctccaggttccac

SEQ ID NO: 8976 - DNA, 20 bp, Artificial Sequence
  Description of Artificial Sequence: Synthetic oligonucleotide
  Target: PCSK9; (-) strand; PAM type: NRG; PAM sequence: CGG
gtaatccgctccaggttcca

SEQ ID NO: 8977 - DNA, 20 bp, Artificial Sequence
  Description of Artificial Sequence: Synthetic oligonucleotide
  Target: PCSK9; (-) strand; PAM type: NRG; PAM sequence: AGG
gtggaggggtaatccgctcc

SEQ ID NO: 8978 - DNA, 20 bp, Artificial Sequence
  Description of Artificial Sequence: Synthetic oligonucleotide
  Target: PCSK9; (-) strand; PAM type: NRG; PAM sequence: CAG
cgtggaggggtaatccgctc

SEQ ID NO: 8979 - DNA, 20 bp, Artificial Sequence
  Description of Artificial Sequence: Synthetic oligonucleotide
  Target: PCSK9; (-) strand; PAM type: NRG; PAM sequence: GGG
atccgcccggtaccgtggag

SEQ ID NO: 8980 - DNA, 20 bp, Artificial Sequence
  Description of Artificial Sequence: Synthetic oligonucleotide
  Target: PCSK9; (-) strand; PAM type: NRG; PAM sequence: GGG
catccgcccggtaccgtgga

SEQ ID NO: 8981 - DNA, 20 bp, Artificial Sequence
  Description of Artificial Sequence: Synthetic oligonucleotide
  Target: PCSK9; (-) strand; PAM type: NRG; PAM sequence: AGG
tcatccgcccggtaccgtgg

SEQ ID NO: 8982 - DNA, 20 bp, Artificial Sequence
  Description of Artificial Sequence: Synthetic oligonucleotide
  Target: PCSK9; (-) strand; PAM type: NRG; PAM sequence: GAG
ttcatccgcccggtaccgtg

SEQ ID NO: 8983 - DNA, 20 bp, Artificial Sequence
  Description of Artificial Sequence: Synthetic oligonucleotide
  Target: PCSK9; (-) strand; PAM type: NRG; PAM sequence: TGG
tattcatccgcccggtaccg

SEQ ID NO: 8984 - DNA, 20 bp, Artificial Sequence
  Description of Artificial Sequence: Synthetic oligonucleotide
  Target: PCSK9; (-) strand; PAM type: NRG; PAM sequence: CGG
ggggctggtattcatccgcc

SEQ ID NO: 8985 - DNA, 20 bp, Artificial Sequence
  Description of Artificial Sequence: Synthetic oligonucleotide
  Target: PCSK9; (-) strand; PAM type: NRG; PAM sequence: TGG
tgggggtcttaccggggggc

SEQ ID NO: 8986 - DNA, 20 bp, Artificial Sequence
  Description of Artificial Sequence: Synthetic oligonucleotide
  Target: PCSK9; (-) strand; PAM type: NRG; PAM sequence: GGG
cagatgggggtcttaccggg

SEQ ID NO: 8987 - DNA, 20 bp, Artificial Sequence
  Description of Artificial Sequence: Synthetic oligonucleotide
  Target: PCSK9; (-) strand; PAM type: NRG; PAM sequence: GGG
acagatgggggtcttaccgg

SEQ ID NO: 8988 - DNA, 20 bp, Artificial Sequence
  Description of Artificial Sequence: Synthetic oligonucleotide
  Target: PCSK9; (-) strand; PAM type: NRG; PAM sequence: GGG
cacagatgggggtcttaccg

SEQ ID NO: 8989 - DNA, 20 bp, Artificial Sequence
  Description of Artificial Sequence: Synthetic oligonucleotide
  Target: PCSK9; (-) strand; PAM type: NRG; PAM sequence: GGG
gcacagatgggggtcttacc

SEQ ID NO: 8990 - DNA, 20 bp, Artificial Sequence
  Description of Artificial Sequence: Synthetic oligonucleotide
  Target: PCSK9; (-) strand; PAM type: NRG; PAM sequence: CGG
ggcacagatgggggtcttac

SEQ ID NO: 8991 - DNA, 20 bp, Artificial Sequence
  Description of Artificial Sequence: Synthetic oligonucleotide
  Target: PCSK9; (-) strand; PAM type: NRG; PAM sequence: GGG
gtggggcagggcacagatgg

SEQ ID NO: 8992 - DNA, 20 bp, Artificial Sequence
  Description of Artificial Sequence: Synthetic oligonucleotide
  Target: PCSK9; (-) strand; PAM type: NRG; PAM sequence: GGG
ggtggggcagggcacagatg

SEQ ID NO: 8993 - DNA, 20 bp, Artificial Sequence
  Description of Artificial Sequence: Synthetic oligonucleotide
  Target: PCSK9; (-) strand; PAM type: NRG; PAM sequence: GGG
gggtggggcagggcacagat

SEQ ID NO: 8994 - DNA, 20 bp, Artificial Sequence
  Description of Artificial Sequence: Synthetic oligonucleotide
  Target: PCSK9; (-) strand; PAM type: NRG; PAM sequence: TGG
ggggtggggcagggcacaga

SEQ ID NO: 8995 - DNA, 20 bp, Artificial Sequence
  Description of Artificial Sequence: Synthetic oligonucleotide
  Target: PCSK9; (-) strand; PAM type: NRG; PAM sequence: CAG
agatggggtggggcagggca

SEQ ID NO: 8996 - DNA, 20 bp, Artificial Sequence
  Description of Artificial Sequence: Synthetic oligonucleotide
  Target: PCSK9; (-) strand; PAM type: NRG; PAM sequence: GGG
agctcagatggggtggggca

SEQ ID NO: 8997 - DNA, 20 bp, Artificial Sequence
  Description of Artificial Sequence: Synthetic oligonucleotide
  Target: PCSK9; (-) strand; PAM type: NRG; PAM sequence: AGG
cagctcagatggggtggggc

SEQ ID NO: 8998 - DNA, 20 bp, Artificial Sequence
  Description of Artificial Sequence: Synthetic oligonucleotide
  Target: PCSK9; (-) strand; PAM type: NRG; PAM sequence: CAG
tcagctcagatggggtgggg

SEQ ID NO: 8999 - DNA, 20 bp, Artificial Sequence
  Description of Artificial Sequence: Synthetic oligonucleotide
  Target: PCSK9; (-) strand; PAM type: NRG; PAM sequence: GGG
gattcagctcagatggggtg

SEQ ID NO: 9000 - DNA, 20 bp, Artificial Sequence
  Description of Artificial Sequence: Synthetic oligonucleotide
  Target: PCSK9; (-) strand; PAM type: NRG; PAM sequence: GGG
ggattcagctcagatggggt

SEQ ID NO: 9001 - DNA, 20 bp, Artificial Sequence
  Description of Artificial Sequence: Synthetic oligonucleotide
  Target: PCSK9; (-) strand; PAM type: NRG; PAM sequence: TGG
tggattcagctcagatgggg

SEQ ID NO: 9002 - DNA, 20 bp, Artificial Sequence
  Description of Artificial Sequence: Synthetic oligonucleotide
  Target: PCSK9; (-) strand; PAM type: NRG; PAM sequence: GGG
aaatggattcagctcagatg

SEQ ID NO: 9003 - DNA, 20 bp, Artificial Sequence
  Description of Artificial Sequence: Synthetic oligonucleotide
  Target: PCSK9; (-) strand; PAM type: NRG; PAM sequence: GGG
caaatggattcagctcagat

SEQ ID NO: 9004 - DNA, 20 bp, Artificial Sequence
  Description of Artificial Sequence: Synthetic oligonucleotide
  Target: PCSK9; (-) strand; PAM type: NRG; PAM sequence: TGG
gcaaatggattcagctcaga

SEQ ID NO: 9005 - DNA, 20 bp, Artificial Sequence
  Description of Artificial Sequence: Synthetic oligonucleotide
  Target: PCSK9; (-) strand; PAM type: NRG; PAM sequence: CAG
cagagcaaatggattcagct

SEQ ID NO: 9006 - DNA, 20 bp, Artificial Sequence
  Description of Artificial Sequence: Synthetic oligonucleotide
  Target: PCSK9; (-) strand; PAM type: NRG; PAM sequence: CAG
cagggcagagcaaatggatt

SEQ ID NO: 9007 - DNA, 20 bp, Artificial Sequence
  Description of Artificial Sequence: Synthetic oligonucleotide
  Target: PCSK9; (-) strand; PAM type: NRG; PAM sequence: TGG
ccaggccagggcagagcaaa

SEQ ID NO: 9008 - DNA, 20 bp, Artificial Sequence
  Description of Artificial Sequence: Synthetic oligonucleotide
  Target: PCSK9; (-) strand; PAM type: NRG; PAM sequence: GAG
agggaggccaggccagggca

SEQ ID NO: 9009 - DNA, 20 bp, Artificial Sequence
  Description of Artificial Sequence: Synthetic oligonucleotide
  Target: PCSK9; (-) strand; PAM type: NRG; PAM sequence: CAG
gcagggaggccaggccaggg

SEQ ID NO: 9010 - DNA, 20 bp, Artificial Sequence
  Description of Artificial Sequence: Synthetic oligonucleotide
  Target: PCSK9; (-) strand; PAM type: NRG; PAM sequence: GGG
ccagcagggaggccaggcca

SEQ ID NO: 9011 - DNA, 20 bp, Artificial Sequence
  Description of Artificial Sequence: Synthetic oligonucleotide
  Target: PCSK9; (-) strand; PAM type: NRG; PAM sequence: AGG
accagcagggaggccaggcc

SEQ ID NO: 9012 - DNA, 20 bp, Artificial Sequence
  Description of Artificial Sequence: Synthetic oligonucleotide
  Target: PCSK9; (-) strand; PAM type: NRG; PAM sequence: CAG
caccagcagggaggccaggc

SEQ ID NO: 9013 - DNA, 20 bp, Artificial Sequence
  Description of Artificial Sequence: Synthetic oligonucleotide
  Target: PCSK9; (-) strand; PAM type: NRG; PAM sequence: AGG
aaaccaccagcagggaggcc

SEQ ID NO: 9014 - DNA, 20 bp, Artificial Sequence
  Description of Artificial Sequence: Synthetic oligonucleotide
  Target: PCSK9; (-) strand; PAM type: NRG; PAM sequence: CAG
gaaaccaccagcagggaggc

SEQ ID NO: 9015 - DNA, 20 bp, Artificial Sequence
  Description of Artificial Sequence: Synthetic oligonucleotide
  Target: PCSK9; (-) strand; PAM type: NRG; PAM sequence: AGG
agtggaaaccaccagcaggg

SEQ ID NO: 9016 - DNA, 20 bp, Artificial Sequence
  Description of Artificial Sequence: Synthetic oligonucleotide
  Target: PCSK9; (-) strand; PAM type: NRG; PAM sequence: GAG
aagtggaaaccaccagcagg

SEQ ID NO: 9017 - DNA, 20 bp, Artificial Sequence
  Description of Artificial Sequence: Synthetic oligonucleotide
  Target: PCSK9; (-) strand; PAM type: NRG; PAM sequence: GGG
agaagtggaaaccaccagca

SEQ ID NO: 9018 - DNA, 20 bp, Artificial Sequence
  Description of Artificial Sequence: Synthetic oligonucleotide
  Target: PCSK9; (-) strand; PAM type: NRG; PAM sequence: AGG
gagaagtggaaaccaccagc

SEQ ID NO: 9019 - DNA, 20 bp, Artificial Sequence
  Description of Artificial Sequence: Synthetic oligonucleotide
  Target: PCSK9; (-) strand; PAM type: NRG; PAM sequence: CAG
cgagaagtggaaaccaccag

SEQ ID NO: 9020 - DNA, 20 bp, Artificial Sequence
  Description of Artificial Sequence: Synthetic oligonucleotide
  Target: PCSK9; (-) strand; PAM type: NRG; PAM sequence: CAG
ccccgagaagtggaaaccac

SEQ ID NO: 9021 - DNA, 20 bp, Artificial Sequence
  Description of Artificial Sequence: Synthetic oligonucleotide
  Target: PCSK9; (-) strand; PAM type: NRG; PAM sequence: TGG
tcccaaagccccccgagaag

SEQ ID NO: 9022 - DNA, 20 bp, Artificial Sequence
  Description of Artificial Sequence: Synthetic oligonucleotide
  Target: PCSK9; (-) strand; PAM type: NRG; PAM sequence: AAG
gagtcccaaagccccccgag

SEQ ID NO: 9023 - DNA, 20 bp, Artificial Sequence
  Description of Artificial Sequence: Synthetic oligonucleotide
  Target: PCSK9; (-) strand; PAM type: NRG; PAM sequence: GAG
gctgagtcccaaagcccccc

SEQ ID NO: 9024 - DNA, 20 bp, Artificial Sequence
  Description of Artificial Sequence: Synthetic oligonucleotide
  Target: PCSK9; (-) strand; PAM type: NRG; PAM sequence: AAG
agtggaggtgctgagtccca

SEQ ID NO: 9025 - DNA, 20 bp, Artificial Sequence
  Description of Artificial Sequence: Synthetic oligonucleotide
  Target: PCSK9; (-) strand; PAM type: NRG; PAM sequence: GAG
aaggggtcagtggaggtgct

SEQ ID NO: 9026 - DNA, 20 bp, Artificial Sequence
  Description of Artificial Sequence: Synthetic oligonucleotide
  Target: PCSK9; (-) strand; PAM type: NRG; PAM sequence: AGG
agaaaaaaaggggtcagtgg

SEQ ID NO: 9027 - DNA, 20 bp, Artificial Sequence
  Description of Artificial Sequence: Synthetic oligonucleotide
  Target: PCSK9; (-) strand; PAM type: NRG; PAM sequence: GAG
cagaaaaaaaggggtcagtg

SEQ ID NO: 9028 - DNA, 20 bp, Artificial Sequence
  Description of Artificial Sequence: Synthetic oligonucleotide
  Target: PCSK9; (-) strand; PAM type: NRG; PAM sequence: TGG
gacagaaaaaaaggggtcag

SEQ ID NO: 9029 - DNA, 20 bp, Artificial Sequence
  Description of Artificial Sequence: Synthetic oligonucleotide
  Target: PCSK9; (-) strand; PAM type: NRG; PAM sequence: CAG
tgggacagaaaaaaaggggt

SEQ ID NO: 9030 - DNA, 20 bp, Artificial Sequence
  Description of Artificial Sequence: Synthetic oligonucleotide
  Target: PCSK9; (-) strand; PAM type: NRG; PAM sequence: GGG
gggatgggacagaaaaaaag

SEQ ID NO: 9031 - DNA, 20 bp, Artificial Sequence
  Description of Artificial Sequence: Synthetic oligonucleotide
  Target: PCSK9; (-) strand; PAM type: NRG; PAM sequence: GGG
ggggatgggacagaaaaaaa

SEQ ID NO: 9032 - DNA, 20 bp, Artificial Sequence
  Description of Artificial Sequence: Synthetic oligonucleotide
  Target: PCSK9; (-) strand; PAM type: NRG; PAM sequence: AGG
tggggatgggacagaaaaaa

SEQ ID NO: 9033 - DNA, 20 bp, Artificial Sequence
  Description of Artificial Sequence: Synthetic oligonucleotide
  Target: PCSK9; (-) strand; PAM type: NRG; PAM sequence: AAG
atggggatgggacagaaaaa

SEQ ID NO: 9034 - DNA, 20 bp, Artificial Sequence
  Description of Artificial Sequence: Synthetic oligonucleotide
  Target: PCSK9; (-) strand; PAM type: NRG; PAM sequence: CAG
tgcaggggatggggatggga

SEQ ID NO: 9035 - DNA, 20 bp, Artificial Sequence
  Description of Artificial Sequence: Synthetic oligonucleotide
  Target: PCSK9; (-) strand; PAM type: NRG; PAM sequence: GGG
gggctgcaggggatggggat

SEQ ID NO: 9036 - DNA, 20 bp, Artificial Sequence
  Description of Artificial Sequence: Synthetic oligonucleotide
  Target: PCSK9; (-) strand; PAM type: NRG; PAM sequence: TGG
ggggctgcaggggatgggga

SEQ ID NO: 9037 - DNA, 20 bp, Artificial Sequence
  Description of Artificial Sequence: Synthetic oligonucleotide
  Target: PCSK9; (-) strand; PAM type: NRG; PAM sequence: GGG
agtgggggctgcaggggatg

SEQ ID NO: 9038 - DNA, 20 bp, Artificial Sequence
  Description of Artificial Sequence: Synthetic oligonucleotide
  Target: PCSK9; (-) strand; PAM type: NRG; PAM sequence: GGG
cagtgggggctgcaggggat

SEQ ID NO: 9039 - DNA, 20 bp, Artificial Sequence
  Description of Artificial Sequence: Synthetic oligonucleotide
  Target: PCSK9; (-) strand; PAM type: NRG; PAM sequence: TGG
gcagtgggggctgcagggga

SEQ ID NO: 9040 - DNA, 20 bp, Artificial Sequence
  Description of Artificial Sequence: Synthetic oligonucleotide
  Target: PCSK9; (-) strand; PAM type: NRG; PAM sequence: GGG
gcaggcagtgggggctgcag

SEQ ID NO: 9041 - DNA, 20 bp, Artificial Sequence
  Description of Artificial Sequence: Synthetic oligonucleotide
  Target: PCSK9; (-) strand; PAM type: NRG; PAM sequence: GGG
ggcaggcagtgggggctgca

SEQ ID NO: 9042 - DNA, 20 bp, Artificial Sequence
  Description of Artificial Sequence: Synthetic oligonucleotide
  Target: PCSK9; (-) strand; PAM type: NRG; PAM sequence: AGG
aggcaggcagtgggggctgc

SEQ ID NO: 9043 - DNA, 20 bp, Artificial Sequence
  Description of Artificial Sequence: Synthetic oligonucleotide
  Target: PCSK9; (-) strand; PAM type: NRG; PAM sequence: CAG
aaggcaggcagtgggggctg

SEQ ID NO: 9044 - DNA, 20 bp, Artificial Sequence
  Description of Artificial Sequence: Synthetic oligonucleotide
  Target: PCSK9; (-) strand; PAM type: NRG; PAM sequence: GGG
aacaggaaggcaggcagtgg

SEQ ID NO: 9045 - DNA, 20 bp, Artificial Sequence
  Description of Artificial Sequence: Synthetic oligonucleotide
  Target: PCSK9; (-) strand; PAM type: NRG; PAM sequence: GGG
caacaggaaggcaggcagtg

SEQ ID NO: 9046 - DNA, 20 bp, Artificial Sequence
  Description of Artificial Sequence: Synthetic oligonucleotide
  Target: PCSK9; (-) strand; PAM type: NRG; PAM sequence: GGG
gcaacaggaaggcaggcagt

SEQ ID NO: 9047 - DNA, 20 bp, Artificial Sequence
  Description of Artificial Sequence: Synthetic oligonucleotide
  Target: PCSK9; (-) strand; PAM type: NRG; PAM sequence: TGG
ggcaacaggaaggcaggcag

SEQ ID NO: 9048 - DNA, 20 bp, Artificial Sequence
  Description of Artificial Sequence: Synthetic oligonucleotide
  Target: PCSK9; (-) strand; PAM type: NRG; PAM sequence: CAG
tggggcaacaggaaggcagg

SEQ ID NO: 9049 - DNA, 20 bp, Artificial Sequence
  Description of Artificial Sequence: Synthetic oligonucleotide
  Target: PCSK9; (-) strand; PAM type: NRG; PAM sequence: AGG
ttgtggggcaacaggaaggc

SEQ ID NO: 9050 - DNA, 20 bp, Artificial Sequence
  Description of Artificial Sequence: Synthetic oligonucleotide
  Target: PCSK9; (-) strand; PAM type: NRG; PAM sequence: CAG
tttgtggggcaacaggaagg

SEQ ID NO: 9051 - DNA, 20 bp, Artificial Sequence
  Description of Artificial Sequence: Synthetic oligonucleotide
  Target: PCSK9; (-) strand; PAM type: NRG; PAM sequence: AGG
gcatttgtggggcaacagga

SEQ ID NO: 9052 - DNA, 20 bp, Artificial Sequence
  Description of Artificial Sequence: Synthetic oligonucleotide
  Target: PCSK9; (-) strand; PAM type: NRG; PAM sequence: AAG
tgcatttgtggggcaacagg

SEQ ID NO: 9053 - DNA, 20 bp, Artificial Sequence
  Description of Artificial Sequence: Synthetic oligonucleotide
  Target: PCSK9; (-) strand; PAM type: NRG; PAM sequence: AGG
ttttgcatttgtggggcaac

SEQ ID NO: 9054 - DNA, 20 bp, Artificial Sequence
  Description of Artificial Sequence: Synthetic oligonucleotide
  Target: PCSK9; (-) strand; PAM type: NRG; PAM sequence: CAG
cttttgcatttgtggggcaa

SEQ ID NO: 9055 - DNA, 20 bp, Artificial Sequence
  Description of Artificial Sequence: Synthetic oligonucleotide
  Target: PCSK9; (-) strand; PAM type: NRG; PAM sequence: GGG
gcaagacttttgcatttgtg

SEQ ID NO: 9056 - DNA, 20 bp, Artificial Sequence
  Description of Artificial Sequence: Synthetic oligonucleotide
  Target: PCSK9; (-) strand; PAM type: NRG; PAM sequence: GGG
ggcaagacttttgcatttgt

SEQ ID NO: 9057 - DNA, 20 bp, Artificial Sequence
  Description of Artificial Sequence: Synthetic oligonucleotide
  Target: PCSK9; (-) strand; PAM type: NRG; PAM sequence: TGG
aggcaagacttttgcatttg

SEQ ID NO: 9058 - DNA, 20 bp, Artificial Sequence
  Description of Artificial Sequence: Synthetic oligonucleotide
  Target: PCSK9; (-) strand; PAM type: NRG; PAM sequence: AAG
aaaagaggatcatttaaggc

SEQ ID NO: 9059 - DNA, 20 bp, Artificial Sequence
  Description of Artificial Sequence: Synthetic oligonucleotide
  Target: PCSK9; (-) strand; PAM type: NRG; PAM sequence: AGG
aaggaaaagaggatcattta

SEQ ID NO: 9060 - DNA, 20 bp, Artificial Sequence
  Description of Artificial Sequence: Synthetic oligonucleotide
  Target: PCSK9; (-) strand; PAM type: NRG; PAM sequence: AAG
gaaggaaaagaggatcattt

SEQ ID NO: 9061 - DNA, 20 bp, Artificial Sequence
  Description of Artificial Sequence: Synthetic oligonucleotide
  Target: PCSK9; (-) strand; PAM type: NRG; PAM sequence: AGG
caagagaaaagaaggaaaag

SEQ ID NO: 9062 - DNA, 20 bp, Artificial Sequence
  Description of Artificial Sequence: Synthetic oligonucleotide
  Target: PCSK9; (-) strand; PAM type: NRG; PAM sequence: GAG
acaagagaaaagaaggaaaa

SEQ ID NO: 9063 - DNA, 20 bp, Artificial Sequence
  Description of Artificial Sequence: Synthetic oligonucleotide
  Target: PCSK9; (-) strand; PAM type: NRG; PAM sequence: AAG
aaacaagagaaaagaaggaa

SEQ ID NO: 9064 - DNA, 20 bp, Artificial Sequence
  Description of Artificial Sequence: Synthetic oligonucleotide
  Target: PCSK9; (-) strand; PAM type: NRG; PAM sequence: AGG
aaggaaaacaagagaaaaga

SEQ ID NO: 9065 - DNA, 20 bp, Artificial Sequence
  Description of Artificial Sequence: Synthetic oligonucleotide
  Target: PCSK9; (-) strand; PAM type: NRG; PAM sequence: AAG
aaaggaaaacaagagaaaag

SEQ ID NO: 9066 - DNA, 20 bp, Artificial Sequence
  Description of Artificial Sequence: Synthetic oligonucleotide
  Target: PCSK9; (-) strand; PAM type: NRG; PAM sequence: AAG
agaaaaggaaaacaagagaa

SEQ ID NO: 9067 - DNA, 20 bp, Artificial Sequence
  Description of Artificial Sequence: Synthetic oligonucleotide
  Target: PCSK9; (-) strand; PAM type: NRG; PAM sequence: GAG
tggtgagaaaaggaaaacaa

SEQ ID NO: 9068 - DNA, 20 bp, Artificial Sequence
  Description of Artificial Sequence: Synthetic oligonucleotide
  Target: PCSK9; (-) strand; PAM type: NRG; PAM sequence: AAG
aatggtgagaaaaggaaaac

SEQ ID NO: 9069 - DNA, 20 bp, Artificial Sequence
  Description of Artificial Sequence: Synthetic oligonucleotide
  Target: PCSK9; (-) strand; PAM type: NRG; PAM sequence: AGG
ccattccaaatggtgagaaa

SEQ ID NO: 9070 - DNA, 20 bp, Artificial Sequence
  Description of Artificial Sequence: Synthetic oligonucleotide
  Target: PCSK9; (-) strand; PAM type: NRG; PAM sequence: AAG
gccattccaaatggtgagaa

SEQ ID NO: 9071 - DNA, 20 bp, Artificial Sequence
  Description of Artificial Sequence: Synthetic oligonucleotide
  Target: PCSK9; (-) strand; PAM type: NRG; PAM sequence: GAG
gctgggccattccaaatggt

SEQ ID NO: 9072 - DNA, 20 bp, Artificial Sequence
  Description of Artificial Sequence: Synthetic oligonucleotide
  Target: PCSK9; (-) strand; PAM type: NRG; PAM sequence: TGG
gcctgctgggccattccaaa

SEQ ID NO: 9073 - DNA, 20 bp, Artificial Sequence
  Description of Artificial Sequence: Synthetic oligonucleotide
  Target: PCSK9; (-) strand; PAM type: NRG; PAM sequence: GGG
caaggtaagtgcagcctgct

SEQ ID NO: 9074 - DNA, 20 bp, Artificial Sequence
  Description of Artificial Sequence: Synthetic oligonucleotide
  Target: PCSK9; (-) strand; PAM type: NRG; PAM sequence: TGG
ccaaggtaagtgcagcctgc

SEQ ID NO: 9075 - DNA, 20 bp, Artificial Sequence
  Description of Artificial Sequence: Synthetic oligonucleotide
  Target: PCSK9; (-) strand; PAM type: NRG; PAM sequence: CAG
ccctccttccaaggtaagtg

SEQ ID NO: 9076 - DNA, 20 bp, Artificial Sequence
  Description of Artificial Sequence: Synthetic oligonucleotide
  Target: PCSK9; (-) strand; PAM type: NRG; PAM sequence: AAG
atgaaccctccttccaaggt

SEQ ID NO: 9077 - DNA, 20 bp, Artificial Sequence
  Description of Artificial Sequence: Synthetic oligonucleotide
  Target: PCSK9; (-) strand; PAM type: NRG; PAM sequence: AGG
tcagatgaaccctccttcca

SEQ ID NO: 9078 - DNA, 20 bp, Artificial Sequence
  Description of Artificial Sequence: Synthetic oligonucleotide
  Target: PCSK9; (-) strand; PAM type: NRG; PAM sequence: AAG
atcagatgaaccctccttcc

SEQ ID NO: 9079 - DNA, 20 bp, Artificial Sequence
  Description of Artificial Sequence: Synthetic oligonucleotide
  Target: PCSK9; (-) strand; PAM type: NRG; PAM sequence: CAG
gccctaggtagagtcaccat

SEQ ID NO: 9080 - DNA, 20 bp, Artificial Sequence
  Description of Artificial Sequence: Synthetic oligonucleotide
  Target: PCSK9; (-) strand; PAM type: NRG; PAM sequence: GAG
aggcctgggggccctaggta

SEQ ID NO: 9081 - DNA, 20 bp, Artificial Sequence
  Description of Artificial Sequence: Synthetic oligonucleotide
  Target: PCSK9; (-) strand; PAM type: NRG; PAM sequence: TAG
agaggcctgggggccctagg

SEQ ID NO: 9082 - DNA, 20 bp, Artificial Sequence
  Description of Artificial Sequence: Synthetic oligonucleotide
  Target: PCSK9; (-) strand; PAM type: NRG; PAM sequence: AGG
tatagaggcctgggggccct

SEQ ID NO: 9083 - DNA, 20 bp, Artificial Sequence
  Description of Artificial Sequence: Synthetic oligonucleotide
  Target: PCSK9; (-) strand; PAM type: NRG; PAM sequence: TAG
ttatagaggcctgggggccc

SEQ ID NO: 9084 - DNA, 20 bp, Artificial Sequence
  Description of Artificial Sequence: Synthetic oligonucleotide
  Target: PCSK9; (-) strand; PAM type: NRG; PAM sequence: GGG
tgggagttatagaggcctgg

SEQ ID NO: 9085 - DNA, 20 bp, Artificial Sequence
  Description of Artificial Sequence: Synthetic oligonucleotide
  Target: PCSK9; (-) strand; PAM type: NRG; PAM sequence: GGG
ctgggagttatagaggcctg

SEQ ID NO: 9086 - DNA, 20 bp, Artificial Sequence
  Description of Artificial Sequence: Synthetic oligonucleotide
  Target: PCSK9; (-) strand; PAM type: NRG; PAM sequence: GGG
actgggagttatagaggcct

SEQ ID NO: 9087 - DNA, 20 bp, Artificial Sequence
  Description of Artificial Sequence: Synthetic oligonucleotide
  Target: PCSK9; (-) strand; PAM type: NRG; PAM sequence: TGG
cactgggagttatagaggcc

SEQ ID NO: 9088 - DNA, 20 bp, Artificial Sequence
  Description of Artificial Sequence: Synthetic oligonucleotide
  Target: PCSK9; (-) strand; PAM type: NRG; PAM sequence: AGG
cagggcactgggagttatag

SEQ ID NO: 9089 - DNA, 20 bp, Artificial Sequence
  Description of Artificial Sequence: Synthetic oligonucleotide
  Target: PCSK9; (-) strand; PAM type: NRG; PAM sequence: GAG
gcagggcactgggagttata

SEQ ID NO: 9090 - DNA, 20 bp, Artificial Sequence
  Description of Artificial Sequence: Synthetic oligonucleotide
  Target: PCSK9; (-) strand; PAM type: NRG; PAM sequence: TAG
ctgcagggcactgggagtta

SEQ ID NO: 9091 - DNA, 20 bp, Artificial Sequence
  Description of Artificial Sequence: Synthetic oligonucleotide
  Target: PCSK9; (-) strand; PAM type: NRG; PAM sequence: GAG
tccagtctgcagggcactgg

SEQ ID NO: 9092 - DNA, 20 bp, Artificial Sequence
  Description of Artificial Sequence: Synthetic oligonucleotide
  Target: PCSK9; (-) strand; PAM type: NRG; PAM sequence: GGG
ggtccagtctgcagggcact

SEQ ID NO: 9093 - DNA, 20 bp, Artificial Sequence
  Description of Artificial Sequence: Synthetic oligonucleotide
  Target: PCSK9; (-) strand; PAM type: NRG; PAM sequence: TGG
tggtccagtctgcagggcac

SEQ ID NO: 9094 - DNA, 20 bp, Artificial Sequence
  Description of Artificial Sequence: Synthetic oligonucleotide
  Target: PCSK9; (-) strand; PAM type: NRG; PAM sequence: GGG
aggatctggtccagtctgca

SEQ ID NO: 9095 - DNA, 20 bp, Artificial Sequence
  Description of Artificial Sequence: Synthetic oligonucleotide
  Target: PCSK9; (-) strand; PAM type: NRG; PAM sequence: AGG
aaggatctggtccagtctgc

SEQ ID NO: 9096 - DNA, 20 bp, Artificial Sequence
  Description of Artificial Sequence: Synthetic oligonucleotide
  Target: PCSK9; (-) strand; PAM type: NRG; PAM sequence: CAG
aaaggatctggtccagtctg

SEQ ID NO: 9097 - DNA, 20 bp, Artificial Sequence
  Description of Artificial Sequence: Synthetic oligonucleotide
  Target: PCSK9; (-) strand; PAM type: NRG; PAM sequence: CAG
tcccattaaaggatctggtc

SEQ ID NO: 9098 - DNA, 20 bp, Artificial Sequence
  Description of Artificial Sequence: Synthetic oligonucleotide
  Target: PCSK9; (-) strand; PAM type: NRG; PAM sequence: TGG
gtctatcccattaaaggatc

SEQ ID NO: 9099 - DNA, 20 bp, Artificial Sequence
  Description of Artificial Sequence: Synthetic oligonucleotide
  Target: PCSK9; (-) strand; PAM type: NRG; PAM sequence: AGG
ggttgtgtctatcccattaa

SEQ ID NO: 9100 - DNA, 20 bp, Artificial Sequence
  Description of Artificial Sequence: Synthetic oligonucleotide
  Target: PCSK9; (-) strand; PAM type: NRG; PAM sequence: AAG
gggttgtgtctatcccatta

SEQ ID NO: 9101 - DNA, 20 bp, Artificial Sequence
  Description of Artificial Sequence: Synthetic oligonucleotide
  Target: PCSK9; (-) strand; PAM type: NRG; PAM sequence: GGG
aggcagaggcatcccagaca

SEQ ID NO: 9102 - DNA, 20 bp, Artificial Sequence
  Description of Artificial Sequence: Synthetic oligonucleotide
  Target: PCSK9; (-) strand; PAM type: NRG; PAM sequence: AGG
taggcagaggcatcccagac

SEQ ID NO: 9103 - DNA, 20 bp, Artificial Sequence
  Description of Artificial Sequence: Synthetic oligonucleotide
  Target: PCSK9; (-) strand; PAM type: NRG; PAM sequence: CAG
gtaggcagaggcatcccaga

SEQ ID NO: 9104 - DNA, 20 bp, Artificial Sequence
  Description of Artificial Sequence: Synthetic oligonucleotide
  Target: PCSK9; (-) strand; PAM type: NRG; PAM sequence: CAG
gaaggtaggcagaggcatcc

SEQ ID NO: 9105 - DNA, 20 bp, Artificial Sequence
  Description of Artificial Sequence: Synthetic oligonucleotide
  Target: PCSK9; (-) strand; PAM type: NRG; PAM sequence: AGG
caaaacaggaaggtaggcag

SEQ ID NO: 9106 - DNA, 20 bp, Artificial Sequence
  Description of Artificial Sequence: Synthetic oligonucleotide
  Target: PCSK9; (-) strand; PAM type: NRG; PAM sequence: GAG
gcaaaacaggaaggtaggca

SEQ ID NO: 9107 - DNA, 20 bp, Artificial Sequence
  Description of Artificial Sequence: Synthetic oligonucleotide
  Target: PCSK9; (-) strand; PAM type: NRG; PAM sequence: CAG
cagcaaaacaggaaggtagg

SEQ ID NO: 9108 - DNA, 20 bp, Artificial Sequence
  Description of Artificial Sequence: Synthetic oligonucleotide
  Target: PCSK9; (-) strand; PAM type: NRG; PAM sequence: AGG
gagcagcaaaacaggaaggt

SEQ ID NO: 9109 - DNA, 20 bp, Artificial Sequence
  Description of Artificial Sequence: Synthetic oligonucleotide
  Target: PCSK9; (-) strand; PAM type: NRG; PAM sequence: TAG
ggagcagcaaaacaggaagg

SEQ ID NO: 9110 - DNA, 20 bp, Artificial Sequence
  Description of Artificial Sequence: Synthetic oligonucleotide
  Target: PCSK9; (-) strand; PAM type: NRG; PAM sequence: AGG
ggtggagcagcaaaacagga

SEQ ID NO: 9111 - DNA, 20 bp, Artificial Sequence
  Description of Artificial Sequence: Synthetic oligonucleotide
  Target: PCSK9; (-) strand; PAM type: NRG; PAM sequence: AAG
aggtggagcagcaaaacagg

SEQ ID NO: 9112 - DNA, 20 bp, Artificial Sequence
  Description of Artificial Sequence: Synthetic oligonucleotide
  Target: PCSK9; (-) strand; PAM type: NRG; PAM sequence: AGG
ggcaggtggagcagcaaaac

SEQ ID NO: 9113 - DNA, 20 bp, Artificial Sequence
  Description of Artificial Sequence: Synthetic oligonucleotide
  Target: PCSK9; (-) strand; PAM type: NRG; PAM sequence: CAG
aggcaggtggagcagcaaaa

SEQ ID NO: 9114 - DNA, 20 bp, Artificial Sequence
  Description of Artificial Sequence: Synthetic oligonucleotide
  Target: PCSK9; (-) strand; PAM type: NRG; PAM sequence: CAG
ggagctggaggcaggtggag

SEQ ID NO: 9115 - DNA, 20 bp, Artificial Sequence
  Description of Artificial Sequence: Synthetic oligonucleotide
  Target: PCSK9; (-) strand; PAM type: NRG; PAM sequence: GAG
aacggagctggaggcaggtg

SEQ ID NO: 9116 - DNA, 20 bp, Artificial Sequence
  Description of Artificial Sequence: Synthetic oligonucleotide
  Target: PCSK9; (-) strand; PAM type: NRG; PAM sequence: TGG
caaacggagctggaggcagg

SEQ ID NO: 9117 - DNA, 20 bp, Artificial Sequence
  Description of Artificial Sequence: Synthetic oligonucleotide
  Target: PCSK9; (-) strand; PAM type: NRG; PAM sequence: AGG
agccaaacggagctggaggc

SEQ ID NO: 9118 - DNA, 20 bp, Artificial Sequence
  Description of Artificial Sequence: Synthetic oligonucleotide
  Target: PCSK9; (-) strand; PAM type: NRG; PAM sequence: CAG
aagccaaacggagctggagg

SEQ ID NO: 9119 - DNA, 20 bp, Artificial Sequence
  Description of Artificial Sequence: Synthetic oligonucleotide
  Target: PCSK9; (-) strand; PAM type: NRG; PAM sequence: AGG
aggaagccaaacggagctgg

SEQ ID NO: 9120 - DNA, 20 bp, Artificial Sequence
  Description of Artificial Sequence: Synthetic oligonucleotide
  Target: PCSK9; (-) strand; PAM type: NRG; PAM sequence: GAG
caggaagccaaacggagctg

SEQ ID NO: 9121 - DNA, 20 bp, Artificial Sequence
  Description of Artificial Sequence: Synthetic oligonucleotide
  Target: PCSK9; (-) strand; PAM type: NRG; PAM sequence: TGG
cccaggaagccaaacggagc

SEQ ID NO: 9122 - DNA, 20 bp, Artificial Sequence
  Description of Artificial Sequence: Synthetic oligonucleotide
  Target: PCSK9; (-) strand; PAM type: NRG; PAM sequence: GAG
gagccccaggaagccaaacg

SEQ ID NO: 9123 - DNA, 20 bp, Artificial Sequence
  Description of Artificial Sequence: Synthetic oligonucleotide
  Target: PCSK9; (-) strand; PAM type: NRG; PAM sequence: CGG
gggagccccaggaagccaaa

SEQ ID NO: 9124 - DNA, 20 bp, Artificial Sequence
  Description of Artificial Sequence: Synthetic oligonucleotide
  Target: PCSK9; (-) strand; PAM type: NRG; PAM sequence: AAG
cccaggcagggagccccagg

SEQ ID NO: 9125 - DNA, 20 bp, Artificial Sequence
  Description of Artificial Sequence: Synthetic oligonucleotide
  Target: PCSK9; (-) strand; PAM type: NRG; PAM sequence: AGG
tggcccaggcagggagcccc

SEQ ID NO: 9126 - DNA, 20 bp, Artificial Sequence
  Description of Artificial Sequence: Synthetic oligonucleotide
  Target: PCSK9; (-) strand; PAM type: NRG; PAM sequence: CAG
gtggcccaggcagggagccc

SEQ ID NO: 9127 - DNA, 20 bp, Artificial Sequence
  Description of Artificial Sequence: Synthetic oligonucleotide
  Target: PCSK9; (-) strand; PAM type: NRG; PAM sequence: GAG
cacaaagtggcccaggcagg

SEQ ID NO: 9128 - DNA, 20 bp, Artificial Sequence
  Description of Artificial Sequence: Synthetic oligonucleotide
  Target: PCSK9; (-) strand; PAM type: NRG; PAM sequence: GGG
gacacaaagtggcccaggca

SEQ ID NO: 9129 - DNA, 20 bp, Artificial Sequence
  Description of Artificial Sequence: Synthetic oligonucleotide
  Target: PCSK9; (-) strand; PAM type: NRG; PAM sequence: AGG
agacacaaagtggcccaggc

SEQ ID NO: 9130 - DNA, 20 bp, Artificial Sequence
  Description of Artificial Sequence: Synthetic oligonucleotide
  Target: PCSK9; (-) strand; PAM type: NRG; PAM sequence: CAG
aagacacaaagtggcccagg

SEQ ID NO: 9131 - DNA, 20 bp, Artificial Sequence
  Description of Artificial Sequence: Synthetic oligonucleotide
  Target: PCSK9; (-) strand; PAM type: NRG; PAM sequence: AGG
gggaagacacaaagtggccc

SEQ ID NO: 9132 - DNA, 20 bp, Artificial Sequence
  Description of Artificial Sequence: Synthetic oligonucleotide
  Target: PCSK9; (-) strand; PAM type: NRG; PAM sequence: CAG
agggaagacacaaagtggcc

SEQ ID NO: 9133 - DNA, 20 bp, Artificial Sequence
  Description of Artificial Sequence: Synthetic oligonucleotide
  Target: PCSK9; (-) strand; PAM type: NRG; PAM sequence: TGG
cctagagggaagacacaaag

SEQ ID NO: 9134 - DNA, 20 bp, Artificial Sequence
  Description of Artificial Sequence: Synthetic oligonucleotide
  Target: PCSK9; (-) strand; PAM type: NRG; PAM sequence: AAG
aggcctagagggaagacaca

SEQ ID NO: 9135 - DNA, 20 bp, Artificial Sequence
  Description of Artificial Sequence: Synthetic oligonucleotide
  Target: PCSK9; (-) strand; PAM type: NRG; PAM sequence: AAG
ggaaagaaaggcctagaggg

SEQ ID NO: 9136 - DNA, 20 bp, Artificial Sequence
  Description of Artificial Sequence: Synthetic oligonucleotide
  Target: PCSK9; (-) strand; PAM type: NRG; PAM sequence: GGG
agtggaaagaaaggcctaga

SEQ ID NO: 9137 - DNA, 20 bp, Artificial Sequence
  Description of Artificial Sequence: Synthetic oligonucleotide
  Target: PCSK9; (-) strand; PAM type: NRG; PAM sequence: AGG
cagtggaaagaaaggcctag

SEQ ID NO: 9138 - DNA, 20 bp, Artificial Sequence
  Description of Artificial Sequence: Synthetic oligonucleotide
  Target: PCSK9; (-) strand; PAM type: NRG; PAM sequence: GAG
acagtggaaagaaaggccta

SEQ ID NO: 9139 - DNA, 20 bp, Artificial Sequence
  Description of Artificial Sequence: Synthetic oligonucleotide
  Target: PCSK9; (-) strand; PAM type: NRG; PAM sequence: TAG
gaacagtggaaagaaaggcc

SEQ ID NO: 9140 - DNA, 20 bp, Artificial Sequence
  Description of Artificial Sequence: Synthetic oligonucleotide
  Target: PCSK9; (-) strand; PAM type: NRG; PAM sequence: AGG
agagggaacagtggaaagaa

SEQ ID NO: 9141 - DNA, 20 bp, Artificial Sequence
  Description of Artificial Sequence: Synthetic oligonucleotide
  Target: PCSK9; (-) strand; PAM type: NRG; PAM sequence: AAG
cagagggaacagtggaaaga

SEQ ID NO: 9142 - DNA, 20 bp, Artificial Sequence
  Description of Artificial Sequence: Synthetic oligonucleotide
  Target: PCSK9; (-) strand; PAM type: NRG; PAM sequence: AAG
caggcagagggaacagtgga

SEQ ID NO: 9143 - DNA, 20 bp, Artificial Sequence
  Description of Artificial Sequence: Synthetic oligonucleotide
  Target: PCSK9; (-) strand; PAM type: NRG; PAM sequence: TGG
acaccaggcagagggaacag

SEQ ID NO: 9144 - DNA, 20 bp, Artificial Sequence
  Description of Artificial Sequence: Synthetic oligonucleotide
  Target: PCSK9; (-) strand; PAM type: NRG; PAM sequence: CAG
gccacaccaggcagagggaa

SEQ ID NO: 9145 - DNA, 20 bp, Artificial Sequence
  Description of Artificial Sequence: Synthetic oligonucleotide
  Target: PCSK9; (-) strand; PAM type: NRG; PAM sequence: GGG
gccaggccacaccaggcaga

SEQ ID NO: 9146 - DNA, 20 bp, Artificial Sequence
  Description of Artificial Sequence: Synthetic oligonucleotide
  Target: PCSK9; (-) strand; PAM type: NRG; PAM sequence: AGG
agccaggccacaccaggcag

SEQ ID NO: 9147 - DNA, 20 bp, Artificial Sequence
  Description of Artificial Sequence: Synthetic oligonucleotide
  Target: PCSK9; (-) strand; PAM type: NRG; PAM sequence: GAG
tagccaggccacaccaggca

SEQ ID NO: 9148 - DNA, 20 bp, Artificial Sequence
  Description of Artificial Sequence: Synthetic oligonucleotide
  Target: PCSK9; (-) strand; PAM type: NRG; PAM sequence: CAG
catagccaggccacaccagg

SEQ ID NO: 9149 - DNA, 20 bp, Artificial Sequence
  Description of Artificial Sequence: Synthetic oligonucleotide
  Target: PCSK9; (-) strand; PAM type: NRG; PAM sequence: AGG
ttccatagccaggccacacc

SEQ ID NO: 9150 - DNA, 20 bp, Artificial Sequence
  Description of Artificial Sequence: Synthetic oligonucleotide
  Target: PCSK9; (-) strand; PAM type: NRG; PAM sequence: CAG
cttccatagccaggccacac

SEQ ID NO: 9151 - DNA, 20 bp, Artificial Sequence
  Description of Artificial Sequence: Synthetic oligonucleotide
  Target: PCSK9; (-) strand; PAM type: NRG; PAM sequence: AGG
cctccctcccttccatagcc

SEQ ID NO: 9152 - DNA, 20 bp, Artificial Sequence
  Description of Artificial Sequence: Synthetic oligonucleotide
  Target: PCSK9; (-) strand; PAM type: NRG; PAM sequence: CAG
tcctccctcccttccatagc

SEQ ID NO: 9153 - DNA, 20 bp, Artificial Sequence
  Description of Artificial Sequence: Synthetic oligonucleotide
  Target: PCSK9; (-) strand; PAM type: NRG; PAM sequence: TAG
ctcctcctccctcccttcca

SEQ ID NO: 9154 - DNA, 20 bp, Artificial Sequence
  Description of Artificial Sequence: Synthetic oligonucleotide
  Target: PCSK9; (-) strand; PAM type: NRG; PAM sequence: TGG
agaatgcagaccgttttcca

SEQ ID NO: 9155 - DNA, 20 bp, Artificial Sequence
  Description of Artificial Sequence: Synthetic oligonucleotide
  Target: PCSK9; (-) strand; PAM type: NRG; PAM sequence: CAG
tgcaagtccctgctagaatg

SEQ ID NO: 9156 - DNA, 20 bp, Artificial Sequence
  Description of Artificial Sequence: Synthetic oligonucleotide
  Target: PCSK9; (-) strand; PAM type: NRG; PAM sequence: TAG
tgccacctgcaagtccctgc

SEQ ID NO: 9157 - DNA, 20 bp, Artificial Sequence
  Description of Artificial Sequence: Synthetic oligonucleotide
  Target: PCSK9; (-) strand; PAM type: NRG; PAM sequence: AAG
ccgactgaattgccacctgc

SEQ ID NO: 9158 - DNA, 20 bp, Artificial Sequence
  Description of Artificial Sequence: Synthetic oligonucleotide
  Target: PCSK9; (-) strand; PAM type: NRG; PAM sequence: GAG
cctcaggccaggtgcatcta

SEQ ID NO: 9159 - DNA, 20 bp, Artificial Sequence
  Description of Artificial Sequence: Synthetic oligonucleotide
  Target: PCSK9; (-) strand; PAM type: NRG; PAM sequence: TAG
ctcctcaggccaggtgcatc

SEQ ID NO: 9160 - DNA, 20 bp, Artificial Sequence
  Description of Artificial Sequence: Synthetic oligonucleotide
  Target: PCSK9; (-) strand; PAM type: NRG; PAM sequence: AGG
cttcattctctcctcaggcc

SEQ ID NO: 9161 - DNA, 20 bp, Artificial Sequence
  Description of Artificial Sequence: Synthetic oligonucleotide
  Target: PCSK9; (-) strand; PAM type: NRG; PAM sequence: CAG
ccttcattctctcctcaggc

SEQ ID NO: 9162 - DNA, 20 bp, Artificial Sequence
  Description of Artificial Sequence: Synthetic oligonucleotide
  Target: PCSK9; (-) strand; PAM type: NRG; PAM sequence: AGG
gaacccttcattctctcctc

SEQ ID NO: 9163 - DNA, 20 bp, Artificial Sequence
  Description of Artificial Sequence: Synthetic oligonucleotide
  Target: PCSK9; (-) strand; PAM type: NRG; PAM sequence: CAG
agaacccttcattctctcct

SEQ ID NO: 9164 - DNA, 20 bp, Artificial Sequence
  Description of Artificial Sequence: Synthetic oligonucleotide
  Target: PCSK9; (-) strand; PAM type: NRG; PAM sequence: TAG
caaacttaacacagtccaac

SEQ ID NO: 9165 - DNA, 20 bp, Artificial Sequence
  Description of Artificial Sequence: Synthetic oligonucleotide
  Target: PCSK9; (-) strand; PAM type: NRG; PAM sequence: CAG
tgggcacctcaaacttaaca

SEQ ID NO: 9166 - DNA, 20 bp, Artificial Sequence
  Description of Artificial Sequence: Synthetic oligonucleotide
  Target: PCSK9; (-) strand; PAM type: NRG; PAM sequence: GGG
agctccagacctcacaccat

SEQ ID NO: 9167 - DNA, 20 bp, Artificial Sequence
  Description of Artificial Sequence: Synthetic oligonucleotide
  Target: PCSK9; (-) strand; PAM type: NRG; PAM sequence: TGG
gagctccagacctcacacca

SEQ ID NO: 9168 - DNA, 20 bp, Artificial Sequence
  Description of Artificial Sequence: Synthetic oligonucleotide
  Target: PCSK9; (-) strand; PAM type: NRG; PAM sequence: CAG
atcatctctgcgctgagctc

SEQ ID NO: 9169 - DNA, 20 bp, Artificial Sequence
  Description of Artificial Sequence: Synthetic oligonucleotide
  Target: PCSK9; (-) strand; PAM type: NRG; PAM sequence: GAG
cattgcatcatctctgcgct

SEQ ID NO: 9170 - DNA, 20 bp, Artificial Sequence
  Description of Artificial Sequence: Synthetic oligonucleotide
  Target: PCSK9; (-) strand; PAM type: NRG; PAM sequence: TGG
cgtcctggcaccatgttgca

SEQ ID NO: 9171 - DNA, 20 bp, Artificial Sequence
  Description of Artificial Sequence: Synthetic oligonucleotide
  Target: PCSK9; (-) strand; PAM type: NRG; PAM sequence: TGG
tcaccccaagctctgcgtcc

SEQ ID NO: 9172 - DNA, 20 bp, Artificial Sequence
  Description of Artificial Sequence: Synthetic oligonucleotide
  Target: PCSK9; (-) strand; PAM type: NRG; PAM sequence: AAG
gtgaaagctgagttcacccc

SEQ ID NO: 9173 - DNA, 20 bp, Artificial Sequence
  Description of Artificial Sequence: Synthetic oligonucleotide
  Target: PCSK9; (-) strand; PAM type: NRG; PAM sequence: GAG
accggtaaggggtgaaagct

SEQ ID NO: 9174 - DNA, 20 bp, Artificial Sequence
  Description of Artificial Sequence: Synthetic oligonucleotide
  Target: PCSK9; (-) strand; PAM type: NRG; PAM sequence: AAG
cgagaaccggtaaggggtga

SEQ ID NO: 9175 - DNA, 20 bp, Artificial Sequence
  Description of Artificial Sequence: Synthetic oligonucleotide
  Target: PCSK9; (-) strand; PAM type: NRG; PAM sequence: GGG
atcccacgagaaccggtaag

SEQ ID NO: 9176 - DNA, 20 bp, Artificial Sequence
  Description of Artificial Sequence: Synthetic oligonucleotide
  Target: PCSK9; (-) strand; PAM type: NRG; PAM sequence: GGG
gatcccacgagaaccggtaa

SEQ ID NO: 9177 - DNA, 20 bp, Artificial Sequence
  Description of Artificial Sequence: Synthetic oligonucleotide
  Target: PCSK9; (-) strand; PAM type: NRG; PAM sequence: AGG
agatcccacgagaaccggta

SEQ ID NO: 9178 - DNA, 20 bp, Artificial Sequence
  Description of Artificial Sequence: Synthetic oligonucleotide
  Target: PCSK9; (-) strand; PAM type: NRG; PAM sequence: AAG
aagatcccacgagaaccggt

SEQ ID NO: 9179 - DNA, 20 bp, Artificial Sequence
  Description of Artificial Sequence: Synthetic oligonucleotide
  Target: PCSK9; (-) strand; PAM type: NRG; PAM sequence: CGG
tcccaagatcccacgagaac

SEQ ID NO: 9180 - DNA, 20 bp, Artificial Sequence
  Description of Artificial Sequence: Synthetic oligonucleotide
  Target: PCSK9; (-) strand; PAM type: NRG; PAM sequence: GAG
gtggcttcccaagatcccac

SEQ ID NO: 9181 - DNA, 20 bp, Artificial Sequence
  Description of Artificial Sequence: Synthetic oligonucleotide
  Target: PCSK9; (-) strand; PAM type: NRG; PAM sequence: AAG
atagaagaaagtggcttccc

SEQ ID NO: 9182 - DNA, 20 bp, Artificial Sequence
  Description of Artificial Sequence: Synthetic oligonucleotide
  Target: PCSK9; (-) strand; PAM type: NRG; PAM sequence: TGG
acaaagctcatagaagaaag

SEQ ID NO: 9183 - DNA, 20 bp, Artificial Sequence
  Description of Artificial Sequence: Synthetic oligonucleotide
  Target: PCSK9; (-) strand; PAM type: NRG; PAM sequence: AAG
acgacaaagctcatagaaga

SEQ ID NO: 9184 - DNA, 20 bp, Artificial Sequence
  Description of Artificial Sequence: Synthetic oligonucleotide
  Target: PCSK9; (-) strand; PAM type: NRG; PAM sequence: AAG
aagaacgacaaagctcatag

SEQ ID NO: 9185 - DNA, 20 bp, Artificial Sequence
  Description of Artificial Sequence: Synthetic oligonucleotide
  Target: PCSK9; (-) strand; PAM type: NRG; PAM sequence: TAG
gacaagaacgacaaagctca

SEQ ID NO: 9186 - DNA, 20 bp, Artificial Sequence
  Description of Artificial Sequence: Synthetic oligonucleotide
  Target: PCSK9; (-) strand; PAM type: NRG; PAM sequence: AAG
ttttacagacaagaacgaca

SEQ ID NO: 9187 - DNA, 20 bp, Artificial Sequence
  Description of Artificial Sequence: Synthetic oligonucleotide
  Target: PCSK9; (-) strand; PAM type: NRG; PAM sequence: AAG
tatgtgcccattttacagac

SEQ ID NO: 9188 - DNA, 20 bp, Artificial Sequence
  Description of Artificial Sequence: Synthetic oligonucleotide
  Target: PCSK9; (-) strand; PAM type: NRG; PAM sequence: CAG
agggttatgtgcccatttta

SEQ ID NO: 9189 - DNA, 20 bp, Artificial Sequence
  Description of Artificial Sequence: Synthetic oligonucleotide
  Target: PCSK9; (-) strand; PAM type: NRG; PAM sequence: GGG
ctgtgagaaggacagggaca

SEQ ID NO: 9190 - DNA, 20 bp, Artificial Sequence
  Description of Artificial Sequence: Synthetic oligonucleotide
  Target: PCSK9; (-) strand; PAM type: NRG; PAM sequence: AGG
cctgtgagaaggacagggac

SEQ ID NO: 9191 - DNA, 20 bp, Artificial Sequence
  Description of Artificial Sequence: Synthetic oligonucleotide
  Target: PCSK9; (-) strand; PAM type: NRG; PAM sequence: CAG
acctgtgagaaggacaggga

SEQ ID NO: 9192 - DNA, 20 bp, Artificial Sequence
  Description of Artificial Sequence: Synthetic oligonucleotide
  Target: PCSK9; (-) strand; PAM type: NRG; PAM sequence: GGG
agcaacctgtgagaaggaca

SEQ ID NO: 9193 - DNA, 20 bp, Artificial Sequence
  Description of Artificial Sequence: Synthetic oligonucleotide
  Target: PCSK9; (-) strand; PAM type: NRG; PAM sequence: AGG
cagcaacctgtgagaaggac

SEQ ID NO: 9194 - DNA, 20 bp, Artificial Sequence
  Description of Artificial Sequence: Synthetic oligonucleotide
  Target: PCSK9; (-) strand; PAM type: NRG; PAM sequence: CAG
acagcaacctgtgagaagga

SEQ ID NO: 9195 - DNA, 20 bp, Artificial Sequence
  Description of Artificial Sequence: Synthetic oligonucleotide
  Target: PCSK9; (-) strand; PAM type: NRG; PAM sequence: AGG
tctcacagcaacctgtgaga

SEQ ID NO: 9196 - DNA, 20 bp, Artificial Sequence
  Description of Artificial Sequence: Synthetic oligonucleotide
  Target: PCSK9; (-) strand; PAM type: NRG; PAM sequence: AAG
gtctcacagcaacctgtgag

SEQ ID NO: 9197 - DNA, 20 bp, Artificial Sequence
  Description of Artificial Sequence: Synthetic oligonucleotide
  Target: PCSK9; (-) strand; PAM type: NRG; PAM sequence: GAG
ggagtctcacagcaacctgt

SEQ ID NO: 9198 - DNA, 20 bp, Artificial Sequence
  Description of Artificial Sequence: Synthetic oligonucleotide
  Target: PCSK9; (-) strand; PAM type: NRG; PAM sequence: CAG
ttcaactcattggagtctca

SEQ ID NO: 9199 - DNA, 20 bp, Artificial Sequence
  Description of Artificial Sequence: Synthetic oligonucleotide
  Target: PCSK9; (-) strand; PAM type: NRG; PAM sequence: GAG
gcacatccttcaactcattg

SEQ ID NO: 9200 - DNA, 20 bp, Artificial Sequence
  Description of Artificial Sequence: Synthetic oligonucleotide
  Target: PCSK9; (-) strand; PAM type: NRG; PAM sequence: TGG
ctgcacatccttcaactcat

SEQ ID NO: 9201 - DNA, 20 bp, Artificial Sequence
  Description of Artificial Sequence: Synthetic oligonucleotide
  Target: PCSK9; (-) strand; PAM type: NRG; PAM sequence: AAG
ccccaacttttcacttccaa

SEQ ID NO: 9202 - DNA, 20 bp, Artificial Sequence
  Description of Artificial Sequence: Synthetic oligonucleotide
  Target: PCSK9; (-) strand; PAM type: NRG; PAM sequence: TAG
gtgtatgcaaagtcacacag

SEQ ID NO: 9203 - DNA, 20 bp, Artificial Sequence
  Description of Artificial Sequence: Synthetic oligonucleotide
  Target: PCSK9; (-) strand; PAM type: NRG; PAM sequence: CAG
tgggtgtatgcaaagtcaca

SEQ ID NO: 9204 - DNA, 20 bp, Artificial Sequence
  Description of Artificial Sequence: Synthetic oligonucleotide
  Target: PCSK9; (-) strand; PAM type: NRG; PAM sequence: AAG
acacagtttgggtgtatgca

SEQ ID NO: 9205 - DNA, 20 bp, Artificial Sequence
  Description of Artificial Sequence: Synthetic oligonucleotide
  Target: PCSK9; (-) strand; PAM type: NRG; PAM sequence: GGG
tatgcaaggtcacacagttt

SEQ ID NO: 9206 - DNA, 20 bp, Artificial Sequence
  Description of Artificial Sequence: Synthetic oligonucleotide
  Target: PCSK9; (-) strand; PAM type: NRG; PAM sequence: TGG
atatgcaaggtcacacagtt

SEQ ID NO: 9207 - DNA, 20 bp, Artificial Sequence
  Description of Artificial Sequence: Synthetic oligonucleotide
  Target: PCSK9; (-) strand; PAM type: NRG; PAM sequence: CAG
cagacatatgcaaggtcaca

SEQ ID NO: 9208 - DNA, 20 bp, Artificial Sequence
  Description of Artificial Sequence: Synthetic oligonucleotide
  Target: PCSK9; (-) strand; PAM type: NRG; PAM sequence: AGG
cagcaactcagacatatgca

SEQ ID NO: 9209 - DNA, 20 bp, Artificial Sequence
  Description of Artificial Sequence: Synthetic oligonucleotide
  Target: PCSK9; (-) strand; PAM type: NRG; PAM sequence: AAG
gcagcaactcagacatatgc

SEQ ID NO: 9210 - DNA, 20 bp, Artificial Sequence
  Description of Artificial Sequence: Synthetic oligonucleotide
  Target: PCSK9; (-) strand; PAM type: NRG; PAM sequence: CAG
ctgttgcaatggcagcaact

SEQ ID NO: 9211 - DNA, 20 bp, Artificial Sequence
  Description of Artificial Sequence: Synthetic oligonucleotide
  Target: PCSK9; (-) strand; PAM type: NRG; PAM sequence: CAG
gctctgatctgttgcaatgg

SEQ ID NO: 9212 - DNA, 20 bp, Artificial Sequence
  Description of Artificial Sequence: Synthetic oligonucleotide
  Target: PCSK9; (-) strand; PAM type: NRG; PAM sequence: TGG
ccagctctgatctgttgcaa

SEQ ID NO: 9213 - DNA, 20 bp, Artificial Sequence
  Description of Artificial Sequence: Synthetic oligonucleotide
  Target: PCSK9; (-) strand; PAM type: NRG; PAM sequence: CAG
tttctccacacccagcccac

SEQ ID NO: 9214 - DNA, 20 bp, Artificial Sequence
  Description of Artificial Sequence: Synthetic oligonucleotide
  Target: PCSK9; (-) strand; PAM type: NRG; PAM sequence: CAG
acaaaccctttctccacacc

SEQ ID NO: 9215 - DNA, 20 bp, Artificial Sequence
  Description of Artificial Sequence: Synthetic oligonucleotide
  Target: PCSK9; (-) strand; PAM type: NRG; PAM sequence: AGG
gctgctgccacccttgccag

SEQ ID NO: 9216 - DNA, 20 bp, Artificial Sequence
  Description of Artificial Sequence: Synthetic oligonucleotide
  Target: PCSK9; (-) strand; PAM type: NRG; PAM sequence: GAG
tgctgctgccacccttgcca

SEQ ID NO: 9217 - DNA, 20 bp, Artificial Sequence
  Description of Artificial Sequence: Synthetic oligonucleotide
  Target: PCSK9; (-) strand; PAM type: NRG; PAM sequence: CAG
tctgctgctgccacccttgc

SEQ ID NO: 9218 - DNA, 20 bp, Artificial Sequence
  Description of Artificial Sequence: Synthetic oligonucleotide
  Target: PCSK9; (-) strand; PAM type: NRG; PAM sequence: AGG
gtcagcacacatgaccgacc

SEQ ID NO: 9219 - DNA, 20 bp, Artificial Sequence
  Description of Artificial Sequence: Synthetic oligonucleotide
  Target: PCSK9; (-) strand; PAM type: NRG; PAM sequence: CAG
ggtcagcacacatgaccgac

SEQ ID NO: 9220 - DNA, 20 bp, Artificial Sequence
  Description of Artificial Sequence: Synthetic oligonucleotide
  Target: PCSK9; (-) strand; PAM type: NRG; PAM sequence: CAG
acaggctgcccaggccgggt

SEQ ID NO: 9221 - DNA, 20 bp, Artificial Sequence
  Description of Artificial Sequence: Synthetic oligonucleotide
  Target: PCSK9; (-) strand; PAM type: NRG; PAM sequence: GGG
ggccacaggctgcccaggcc

SEQ ID NO: 9222 - DNA, 20 bp, Artificial Sequence
  Description of Artificial Sequence: Synthetic oligonucleotide
  Target: PCSK9; (-) strand; PAM type: NRG; PAM sequence: CGG
tggccacaggctgcccaggc

SEQ ID NO: 9223 - DNA, 20 bp, Artificial Sequence
  Description of Artificial Sequence: Synthetic oligonucleotide
  Target: PCSK9; (-) strand; PAM type: NRG; PAM sequence: AGG
tccctggccacaggctgccc

SEQ ID NO: 9224 - DNA, 20 bp, Artificial Sequence
  Description of Artificial Sequence: Synthetic oligonucleotide
  Target: PCSK9; (-) strand; PAM type: NRG; PAM sequence: CAG
ctccctggccacaggctgcc

SEQ ID NO: 9225 - DNA, 20 bp, Artificial Sequence
  Description of Artificial Sequence: Synthetic oligonucleotide
  Target: PCSK9; (-) strand; PAM type: NRG; PAM sequence: AGG
gctgtcctctccctggccac

SEQ ID NO: 9226 - DNA, 20 bp, Artificial Sequence
  Description of Artificial Sequence: Synthetic oligonucleotide
  Target: PCSK9; (-) strand; PAM type: NRG; PAM sequence: CAG
agctgtcctctccctggcca

SEQ ID NO: 9227 - DNA, 20 bp, Artificial Sequence
  Description of Artificial Sequence: Synthetic oligonucleotide
  Target: PCSK9; (-) strand; PAM type: NRG; PAM sequence: TGG
cagaggagctgtcctctccc

SEQ ID NO: 9228 - DNA, 20 bp, Artificial Sequence
  Description of Artificial Sequence: Synthetic oligonucleotide
  Target: PCSK9; (-) strand; PAM type: NRG; PAM sequence: GAG
aacaggctcttcctacagag

SEQ ID NO: 9229 - DNA, 20 bp, Artificial Sequence
  Description of Artificial Sequence: Synthetic oligonucleotide
  Target: PCSK9; (-) strand; PAM type: NRG; PAM sequence: AGG
ggaacaggctcttcctacag

SEQ ID NO: 9230 - DNA, 20 bp, Artificial Sequence
  Description of Artificial Sequence: Synthetic oligonucleotide
  Target: PCSK9; (-) strand; PAM type: NRG; PAM sequence: GAG
aggaacaggctcttcctaca

SEQ ID NO: 9231 - DNA, 20 bp, Artificial Sequence
  Description of Artificial Sequence: Synthetic oligonucleotide
  Target: PCSK9; (-) strand; PAM type: NRG; PAM sequence: CAG
aaaggaacaggctcttccta

SEQ ID NO: 9232 - DNA, 20 bp, Artificial Sequence
  Description of Artificial Sequence: Synthetic oligonucleotide
  Target: PCSK9; (-) strand; PAM type: NRG; PAM sequence: AGG
tcacctggttggaaaggaac

SEQ ID NO: 9233 - DNA, 20 bp, Artificial Sequence
  Description of Artificial Sequence: Synthetic oligonucleotide
  Target: PCSK9; (-) strand; PAM type: NRG; PAM sequence: CAG
ctcacctggttggaaaggaa

SEQ ID NO: 9234 - DNA, 20 bp, Artificial Sequence
  Description of Artificial Sequence: Synthetic oligonucleotide
  Target: PCSK9; (-) strand; PAM type: NRG; PAM sequence: AGG
gaggtctcacctggttggaa

SEQ ID NO: 9235 - DNA, 20 bp, Artificial Sequence
  Description of Artificial Sequence: Synthetic oligonucleotide
  Target: PCSK9; (-) strand; PAM type: NRG; PAM sequence: AAG
agaggtctcacctggttgga

SEQ ID NO: 9236 - DNA, 20 bp, Artificial Sequence
  Description of Artificial Sequence: Synthetic oligonucleotide
  Target: PCSK9; (-) strand; PAM type: NRG; PAM sequence: TGG
ctgaagaggtctcacctggt

SEQ ID NO: 9237 - DNA, 20 bp, Artificial Sequence
  Description of Artificial Sequence: Synthetic oligonucleotide
  Target: PCSK9; (-) strand; PAM type: NRG; PAM sequence: TGG
tccactgaagaggtctcacc

SEQ ID NO: 9238 - DNA, 20 bp, Artificial Sequence
  Description of Artificial Sequence: Synthetic oligonucleotide
  Target: PCSK9; (-) strand; PAM type: NRG; PAM sequence: AGG
gctccagggctccactgaag

SEQ ID NO: 9239 - DNA, 20 bp, Artificial Sequence
  Description of Artificial Sequence: Synthetic oligonucleotide
  Target: PCSK9; (-) strand; PAM type: NRG; PAM sequence: GAG
ggctccagggctccactgaa

SEQ ID NO: 9240 - DNA, 20 bp, Artificial Sequence
  Description of Artificial Sequence: Synthetic oligonucleotide
  Target: PCSK9; (-) strand; PAM type: NRG; PAM sequence: AAG
ggggctccagggctccactg

SEQ ID NO: 9241 - DNA, 20 bp, Artificial Sequence
  Description of Artificial Sequence: Synthetic oligonucleotide
  Target: PCSK9; (-) strand; PAM type: NRG; PAM sequence: GGG
gtggagtacagggggctcca

SEQ ID NO: 9242 - DNA, 20 bp, Artificial Sequence
  Description of Artificial Sequence: Synthetic oligonucleotide
  Target: PCSK9; (-) strand; PAM type: NRG; PAM sequence: AGG
tgtggagtacagggggctcc

SEQ ID NO: 9243 - DNA, 20 bp, Artificial Sequence
  Description of Artificial Sequence: Synthetic oligonucleotide
  Target: PCSK9; (-) strand; PAM type: NRG; PAM sequence: CAG
atgtggagtacagggggctc

SEQ ID NO: 9244 - DNA, 20 bp, Artificial Sequence
  Description of Artificial Sequence: Synthetic oligonucleotide
  Target: PCSK9; (-) strand; PAM type: NRG; PAM sequence: GGG
gcactgatgtggagtacagg

SEQ ID NO: 9245 - DNA, 20 bp, Artificial Sequence
  Description of Artificial Sequence: Synthetic oligonucleotide
  Target: PCSK9; (-) strand; PAM type: NRG; PAM sequence: GGG
ggcactgatgtggagtacag

SEQ ID NO: 9246 - DNA, 20 bp, Artificial Sequence
  Description of Artificial Sequence: Synthetic oligonucleotide
  Target: PCSK9; (-) strand; PAM type: NRG; PAM sequence: GGG
aggcactgatgtggagtaca

SEQ ID NO: 9247 - DNA, 20 bp, Artificial Sequence
  Description of Artificial Sequence: Synthetic oligonucleotide
  Target: PCSK9; (-) strand; PAM type: NRG; PAM sequence: AGG
gaggcactgatgtggagtac

SEQ ID NO: 9248 - DNA, 20 bp, Artificial Sequence
  Description of Artificial Sequence: Synthetic oligonucleotide
  Target: PCSK9; (-) strand; PAM type: NRG; PAM sequence: CAG
tgaggcactgatgtggagta

SEQ ID NO: 9249 - DNA, 20 bp, Artificial Sequence
  Description of Artificial Sequence: Synthetic oligonucleotide
  Target: PCSK9; (-) strand; PAM type: NRG; PAM sequence: GAG
gtccctgaggcactgatgtg

SEQ ID NO: 9250 - DNA, 20 bp, Artificial Sequence
  Description of Artificial Sequence: Synthetic oligonucleotide
  Target: PCSK9; (-) strand; PAM type: NRG; PAM sequence: TGG
aggtccctgaggcactgatg

SEQ ID NO: 9251 - DNA, 20 bp, Artificial Sequence
  Description of Artificial Sequence: Synthetic oligonucleotide
  Target: PCSK9; (-) strand; PAM type: NRG; PAM sequence: AGG
cctgctccgggaggtccctg

SEQ ID NO: 9252 - DNA, 20 bp, Artificial Sequence
  Description of Artificial Sequence: Synthetic oligonucleotide
  Target: PCSK9; (-) strand; PAM type: NRG; PAM sequence: GAG
gcctgctccgggaggtccct

SEQ ID NO: 9253 - DNA, 20 bp, Artificial Sequence
  Description of Artificial Sequence: Synthetic oligonucleotide
  Target: PCSK9; (-) strand; PAM type: NRG; PAM sequence: AGG
tgatattagcctgctccggg

SEQ ID NO: 9254 - DNA, 20 bp, Artificial Sequence
  Description of Artificial Sequence: Synthetic oligonucleotide
  Target: PCSK9; (-) strand; PAM type: NRG; PAM sequence: GAG
ctgatattagcctgctccgg

SEQ ID NO: 9255 - DNA, 20 bp, Artificial Sequence
  Description of Artificial Sequence: Synthetic oligonucleotide
  Target: PCSK9; (-) strand; PAM type: NRG; PAM sequence: GGG
ctctgatattagcctgctcc

SEQ ID NO: 9256 - DNA, 20 bp, Artificial Sequence
  Description of Artificial Sequence: Synthetic oligonucleotide
  Target: PCSK9; (-) strand; PAM type: NRG; PAM sequence: CGG
tctctgatattagcctgctc

SEQ ID NO: 9257 - DNA, 20 bp, Artificial Sequence
  Description of Artificial Sequence: Synthetic oligonucleotide
  Target: PCSK9; (-) strand; PAM type: NRG; PAM sequence: TAG
tccctcttggtctctgatat

SEQ ID NO: 9258 - DNA, 20 bp, Artificial Sequence
  Description of Artificial Sequence: Synthetic oligonucleotide
  Target: PCSK9; (-) strand; PAM type: NRG; PAM sequence: TGG
tcctctgccagtgtccctct

SEQ ID NO: 9259 - DNA, 20 bp, Artificial Sequence
  Description of Artificial Sequence: Synthetic oligonucleotide
  Target: PCSK9; (-) strand; PAM type: NRG; PAM sequence: CAG
gggtctctgtgatcctctgc

SEQ ID NO: 9260 - DNA, 20 bp, Artificial Sequence
  Description of Artificial Sequence: Synthetic oligonucleotide
  Target: PCSK9; (-) strand; PAM type: NRG; PAM sequence: GGG
ctcagtccctgcctggactg

SEQ ID NO: 9261 - DNA, 20 bp, Artificial Sequence
  Description of Artificial Sequence: Synthetic oligonucleotide
  Target: PCSK9; (-) strand; PAM type: NRG; PAM sequence: GGG
tctcagtccctgcctggact

SEQ ID NO: 9262 - DNA, 20 bp, Artificial Sequence
  Description of Artificial Sequence: Synthetic oligonucleotide
  Target: PCSK9; (-) strand; PAM type: NRG; PAM sequence: TGG
ttctcagtccctgcctggac

SEQ ID NO: 9263 - DNA, 20 bp, Artificial Sequence
  Description of Artificial Sequence: Synthetic oligonucleotide
  Target: PCSK9; (-) strand; PAM type: NRG; PAM sequence: TGG
agatcttctcagtccctgcc

SEQ ID NO: 9264 - DNA, 20 bp, Artificial Sequence
  Description of Artificial Sequence: Synthetic oligonucleotide
  Target: PCSK9; (-) strand; PAM type: NRG; PAM sequence: CAG
cttagggggcaagatcttct

SEQ ID NO: 9265 - DNA, 20 bp, Artificial Sequence
  Description of Artificial Sequence: Synthetic oligonucleotide
  Target: PCSK9; (-) strand; PAM type: NRG; PAM sequence: AAG
aggaaactaacttagggggc

SEQ ID NO: 9266 - DNA, 20 bp, Artificial Sequence
  Description of Artificial Sequence: Synthetic oligonucleotide
  Target: PCSK9; (-) strand; PAM type: NRG; PAM sequence: GGG
tgctaggaaactaacttagg

SEQ ID NO: 9267 - DNA, 20 bp, Artificial Sequence
  Description of Artificial Sequence: Synthetic oligonucleotide
  Target: PCSK9; (-) strand; PAM type: NRG; PAM sequence: GGG
gtgctaggaaactaacttag

SEQ ID NO: 9268 - DNA, 20 bp, Artificial Sequence
  Description of Artificial Sequence: Synthetic oligonucleotide
  Target: PCSK9; (-) strand; PAM type: NRG; PAM sequence: GGG
agtgctaggaaactaactta

SEQ ID NO: 9269 - DNA, 20 bp, Artificial Sequence
  Description of Artificial Sequence: Synthetic oligonucleotide
  Target: PCSK9; (-) strand; PAM type: NRG; PAM sequence: AGG
cagtgctaggaaactaactt

SEQ ID NO: 9270 - DNA, 20 bp, Artificial Sequence
  Description of Artificial Sequence: Synthetic oligonucleotide
  Target: PCSK9; (-) strand; PAM type: NRG; PAM sequence: TAG
gcagtgctaggaaactaact

SEQ ID NO: 9271 - DNA, 20 bp, Artificial Sequence
  Description of Artificial Sequence: Synthetic oligonucleotide
  Target: PCSK9; (-) strand; PAM type: NRG; PAM sequence: AGG
taatttgtcacagcagtgct

SEQ ID NO: 9272 - DNA, 20 bp, Artificial Sequence
  Description of Artificial Sequence: Synthetic oligonucleotide
  Target: PCSK9; (-) strand; PAM type: NRG; PAM sequence: TAG
gtaatttgtcacagcagtgc

SEQ ID NO: 9273 - DNA, 20 bp, Artificial Sequence
  Description of Artificial Sequence: Synthetic oligonucleotide
  Target: PCSK9; (-) strand; PAM type: NRG; PAM sequence: CAG
ggggtggtaatttgtcacag

SEQ ID NO: 9274 - DNA, 20 bp, Artificial Sequence
  Description of Artificial Sequence: Synthetic oligonucleotide
  Target: PCSK9; (-) strand; PAM type: NRG; PAM sequence: CAG
gagggggtggtaatttgtca

SEQ ID NO: 9275 - DNA, 20 bp, Artificial Sequence
  Description of Artificial Sequence: Synthetic oligonucleotide
  Target: PCSK9; (-) strand; PAM type: NRG; PAM sequence: TGG
acttgttccaaccgaggggg

SEQ ID NO: 9276 - DNA, 20 bp, Artificial Sequence
  Description of Artificial Sequence: Synthetic oligonucleotide
  Target: PCSK9; (-) strand; PAM type: NRG; PAM sequence: GGG
tcaacttgttccaaccgagg

SEQ ID NO: 9277 - DNA, 20 bp, Artificial Sequence
  Description of Artificial Sequence: Synthetic oligonucleotide
  Target: PCSK9; (-) strand; PAM type: NRG; PAM sequence: GGG
atcaacttgttccaaccgag

SEQ ID NO: 9278 - DNA, 20 bp, Artificial Sequence
  Description of Artificial Sequence: Synthetic oligonucleotide
  Target: PCSK9; (-) strand; PAM type: NRG; PAM sequence: GGG
aatcaacttgttccaaccga

SEQ ID NO: 9279 - DNA, 20 bp, Artificial Sequence
  Description of Artificial Sequence: Synthetic oligonucleotide
  Target: PCSK9; (-) strand; PAM type: NRG; PAM sequence: AGG
gaatcaacttgttccaaccg

SEQ ID NO: 9280 - DNA, 20 bp, Artificial Sequence
  Description of Artificial Sequence: Synthetic oligonucleotide
  Target: PCSK9; (-) strand; PAM type: NRG; PAM sequence: GAG
agaatcaacttgttccaacc

SEQ ID NO: 9281 - DNA, 20 bp, Artificial Sequence
  Description of Artificial Sequence: Synthetic oligonucleotide
  Target: PCSK9; (-) strand; PAM type: NRG; PAM sequence: GAG
ttctggcctccaggactgca

SEQ ID NO: 9282 - DNA, 20 bp, Artificial Sequence
  Description of Artificial Sequence: Synthetic oligonucleotide
  Target: PCSK9; (-) strand; PAM type: NRG; PAM sequence: CAG
gcttctggcctccaggactg

SEQ ID NO: 9283 - DNA, 20 bp, Artificial Sequence
  Description of Artificial Sequence: Synthetic oligonucleotide
  Target: PCSK9; (-) strand; PAM type: NRG; PAM sequence: AGG
gattcaggcttctggcctcc

SEQ ID NO: 9284 - DNA, 20 bp, Artificial Sequence
  Description of Artificial Sequence: Synthetic oligonucleotide
  Target: PCSK9; (-) strand; PAM type: NRG; PAM sequence: CAG
tgattcaggcttctggcctc

SEQ ID NO: 9285 - DNA, 20 bp, Artificial Sequence
  Description of Artificial Sequence: Synthetic oligonucleotide
  Target: PCSK9; (-) strand; PAM type: NRG; PAM sequence: TGG
ccgacactgattcaggcttc

SEQ ID NO: 9286 - DNA, 20 bp, Artificial Sequence
  Description of Artificial Sequence: Synthetic oligonucleotide
  Target: PCSK9; (-) strand; PAM type: NRG; PAM sequence: AGG
ggtcctgccgacactgattc

SEQ ID NO: 9287 - DNA, 20 bp, Artificial Sequence
  Description of Artificial Sequence: Synthetic oligonucleotide
  Target: PCSK9; (-) strand; PAM type: NRG; PAM sequence: CAG
tggtcctgccgacactgatt

SEQ ID NO: 9288 - DNA, 20 bp, Artificial Sequence
  Description of Artificial Sequence: Synthetic oligonucleotide
  Target: PCSK9; (-) strand; PAM type: NRG; PAM sequence: TGG
tggagccccccgggagaaag

SEQ ID NO: 9289 - DNA, 20 bp, Artificial Sequence
  Description of Artificial Sequence: Synthetic oligonucleotide
  Target: PCSK9; (-) strand; PAM type: NRG; PAM sequence: AAG
ccctggagccccccgggaga

SEQ ID NO: 9290 - DNA, 20 bp, Artificial Sequence
  Description of Artificial Sequence: Synthetic oligonucleotide
  Target: PCSK9; (-) strand; PAM type: NRG; PAM sequence: GAG
ttctccctggagccccccgg

SEQ ID NO: 9291 - DNA, 20 bp, Artificial Sequence
  Description of Artificial Sequence: Synthetic oligonucleotide
  Target: PCSK9; (-) strand; PAM type: NRG; PAM sequence: GGG
gcttctccctggagcccccc

SEQ ID NO: 9292 - DNA, 20 bp, Artificial Sequence
  Description of Artificial Sequence: Synthetic oligonucleotide
  Target: PCSK9; (-) strand; PAM type: NRG; PAM sequence: CGG
agcttctccctggagccccc

SEQ ID NO: 9293 - DNA, 20 bp, Artificial Sequence
  Description of Artificial Sequence: Synthetic oligonucleotide
  Target: PCSK9; (-) strand; PAM type: NRG; PAM sequence: GAG
gcaagagaagcttctccctg

SEQ ID NO: 9294 - DNA, 20 bp, Artificial Sequence
  Description of Artificial Sequence: Synthetic oligonucleotide
  Target: PCSK9; (-) strand; PAM type: NRG; PAM sequence: TGG
aggcaagagaagcttctccc

SEQ ID NO: 9295 - DNA, 20 bp, Artificial Sequence
  Description of Artificial Sequence: Synthetic oligonucleotide
  Target: PCSK9; (-) strand; PAM type: NRG; PAM sequence: AAG
ggacacggaagaggcaagag

SEQ ID NO: 9296 - DNA, 20 bp, Artificial Sequence
  Description of Artificial Sequence: Synthetic oligonucleotide
  Target: PCSK9; (-) strand; PAM type: NRG; PAM sequence: GAG
ttgggacacggaagaggcaa

SEQ ID NO: 9297 - DNA, 20 bp, Artificial Sequence
  Description of Artificial Sequence: Synthetic oligonucleotide
  Target: PCSK9; (-) strand; PAM type: NRG; PAM sequence: AAG
tgttgggacacggaagaggc

SEQ ID NO: 9298 - DNA, 20 bp, Artificial Sequence
  Description of Artificial Sequence: Synthetic oligonucleotide
  Target: PCSK9; (-) strand; PAM type: NRG; PAM sequence: AGG
ccgctgttgggacacggaag

SEQ ID NO: 9299 - DNA, 20 bp, Artificial Sequence
  Description of Artificial Sequence: Synthetic oligonucleotide
  Target: PCSK9; (-) strand; PAM type: NRG; PAM sequence: GAG
gccgctgttgggacacggaa

SEQ ID NO: 9300 - DNA, 20 bp, Artificial Sequence
  Description of Artificial Sequence: Synthetic oligonucleotide
  Target: PCSK9; (-) strand; PAM type: NRG; PAM sequence: AAG
ctgccgctgttgggacacgg

SEQ ID NO: 9301 - DNA, 20 bp, Artificial Sequence
  Description of Artificial Sequence: Synthetic oligonucleotide
  Target: PCSK9; (-) strand; PAM type: NRG; PAM sequence: CGG
gtgctgccgctgttgggaca

SEQ ID NO: 9302 - DNA, 20 bp, Artificial Sequence
  Description of Artificial Sequence: Synthetic oligonucleotide
  Target: PCSK9; (-) strand; PAM type: NRG; PAM sequence: GGG
attggtgtgctgccgctgtt

SEQ ID NO: 9303 - DNA, 20 bp, Artificial Sequence
  Description of Artificial Sequence: Synthetic oligonucleotide
  Target: PCSK9; (-) strand; PAM type: NRG; PAM sequence: TGG
gattggtgtgctgccgctgt

SEQ ID NO: 9304 - DNA, 20 bp, Artificial Sequence
  Description of Artificial Sequence: Synthetic oligonucleotide
  Target: PCSK9; (-) strand; PAM type: NRG; PAM sequence: TGG
gtgaagacagaggctgggat

SEQ ID NO: 9305 - DNA, 20 bp, Artificial Sequence
  Description of Artificial Sequence: Synthetic oligonucleotide
  Target: PCSK9; (-) strand; PAM type: NRG; PAM sequence: GGG
gctgtgtgaagacagaggct

SEQ ID NO: 9306 - DNA, 20 bp, Artificial Sequence
  Description of Artificial Sequence: Synthetic oligonucleotide
  Target: PCSK9; (-) strand; PAM type: NRG; PAM sequence: TGG
ggctgtgtgaagacagaggc

SEQ ID NO: 9307 - DNA, 20 bp, Artificial Sequence
  Description of Artificial Sequence: Synthetic oligonucleotide
  Target: PCSK9; (-) strand; PAM type: NRG; PAM sequence: AGG
agaaggctgtgtgaagacag

SEQ ID NO: 9308 - DNA, 20 bp, Artificial Sequence
  Description of Artificial Sequence: Synthetic oligonucleotide
  Target: PCSK9; (-) strand; PAM type: NRG; PAM sequence: GAG
gagaaggctgtgtgaagaca

SEQ ID NO: 9309 - DNA, 20 bp, Artificial Sequence
  Description of Artificial Sequence: Synthetic oligonucleotide
  Target: PCSK9; (-) strand; PAM type: NRG; PAM sequence: CAG
cagagaaggctgtgtgaaga

SEQ ID NO: 9310 - DNA, 20 bp, Artificial Sequence
  Description of Artificial Sequence: Synthetic oligonucleotide
  Target: PCSK9; (-) strand; PAM type: NRG; PAM sequence: AAG
gacacagagaaggctgtgtg

SEQ ID NO: 9311 - DNA, 20 bp, Artificial Sequence
  Description of Artificial Sequence: Synthetic oligonucleotide
  Target: PCSK9; (-) strand; PAM type: NRG; PAM sequence: AGG
agaggagagagacacagaga

SEQ ID NO: 9312 - DNA, 20 bp, Artificial Sequence
  Description of Artificial Sequence: Synthetic oligonucleotide
  Target: PCSK9; (-) strand; PAM type: NRG; PAM sequence: AAG
aagaggagagagacacagag

SEQ ID NO: 9313 - DNA, 20 bp, Artificial Sequence
  Description of Artificial Sequence: Synthetic oligonucleotide
  Target: PCSK9; (-) strand; PAM type: NRG; PAM sequence: GAG
atgaagaggagagagacaca

SEQ ID NO: 9314 - DNA, 20 bp, Artificial Sequence
  Description of Artificial Sequence: Synthetic oligonucleotide
  Target: PCSK9; (-) strand; PAM type: NRG; PAM sequence: CAG
caatgaagaggagagagaca

SEQ ID NO: 9315 - DNA, 20 bp, Artificial Sequence
  Description of Artificial Sequence: Synthetic oligonucleotide
  Target: PCSK9; (-) strand; PAM type: NRG; PAM sequence: GAG
atgagacaatgaagaggaga

SEQ ID NO: 9316 - DNA, 20 bp, Artificial Sequence
  Description of Artificial Sequence: Synthetic oligonucleotide
  Target: PCSK9; (-) strand; PAM type: NRG; PAM sequence: GAG
ttatgagacaatgaagagga

SEQ ID NO: 9317 - DNA, 20 bp, Artificial Sequence
  Description of Artificial Sequence: Synthetic oligonucleotide
  Target: PCSK9; (-) strand; PAM type: NRG; PAM sequence: GAG
ccttatgagacaatgaagag

SEQ ID NO: 9318 - DNA, 20 bp, Artificial Sequence
  Description of Artificial Sequence: Synthetic oligonucleotide
  Target: PCSK9; (-) strand; PAM type: NRG; PAM sequence: AGG
gtccttatgagacaatgaag

SEQ ID NO: 9319 - DNA, 20 bp, Artificial Sequence
  Description of Artificial Sequence: Synthetic oligonucleotide
  Target: PCSK9; (-) strand; PAM type: NRG; PAM sequence: GAG
tgtccttatgagacaatgaa

SEQ ID NO: 9320 - DNA, 20 bp, Artificial Sequence
  Description of Artificial Sequence: Synthetic oligonucleotide
  Target: PCSK9; (-) strand; PAM type: NRG; PAM sequence: AAG
agtgtccttatgagacaatg

SEQ ID NO: 9321 - DNA, 20 bp, Artificial Sequence
  Description of Artificial Sequence: Synthetic oligonucleotide
  Target: PCSK9; (-) strand; PAM type: NRG; PAM sequence: GAG
ccaatgacaagtgtccttat

SEQ ID NO: 9322 - DNA, 20 bp, Artificial Sequence
  Description of Artificial Sequence: Synthetic oligonucleotide
  Target: PCSK9; (-) strand; PAM type: NRG; PAM sequence: AAG
tgggccctaaatccaatgac

SEQ ID NO: 9323 - DNA, 20 bp, Artificial Sequence
  Description of Artificial Sequence: Synthetic oligonucleotide
  Target: PCSK9; (-) strand; PAM type: NRG; PAM sequence: GGG
atcatcctggaggatccagt

SEQ ID NO: 9324 - DNA, 20 bp, Artificial Sequence
  Description of Artificial Sequence: Synthetic oligonucleotide
  Target: PCSK9; (-) strand; PAM type: NRG; PAM sequence: TGG
gatcatcctggaggatccag

SEQ ID NO: 9325 - DNA, 20 bp, Artificial Sequence
  Description of Artificial Sequence: Synthetic oligonucleotide
  Target: PCSK9; (-) strand; PAM type: NRG; PAM sequence: CAG
tgagatcatcctggaggatc

SEQ ID NO: 9326 - DNA, 20 bp, Artificial Sequence
  Description of Artificial Sequence: Synthetic oligonucleotide
  Target: PCSK9; (-) strand; PAM type: NRG; PAM sequence: AGG
cccacatgagatcatcctgg

SEQ ID NO: 9327 - DNA, 20 bp, Artificial Sequence
  Description of Artificial Sequence: Synthetic oligonucleotide
  Target: PCSK9; (-) strand; PAM type: NRG; PAM sequence: GAG
ccccacatgagatcatcctg

SEQ ID NO: 9328 - DNA, 20 bp, Artificial Sequence
  Description of Artificial Sequence: Synthetic oligonucleotide
  Target: PCSK9; (-) strand; PAM type: NRG; PAM sequence: TGG
ttccccacatgagatcatcc

SEQ ID NO: 9329 - DNA, 20 bp, Artificial Sequence
  Description of Artificial Sequence: Synthetic oligonucleotide
  Target: PCSK9; (-) strand; PAM type: NRG; PAM sequence: GAG
gtggttaaggttccccacat

SEQ ID NO: 9330 - DNA, 20 bp, Artificial Sequence
  Description of Artificial Sequence: Synthetic oligonucleotide
  Target: PCSK9; (-) strand; PAM type: NRG; PAM sequence: AGG
ggtccttgcagatgtggtta

SEQ ID NO: 9331 - DNA, 20 bp, Artificial Sequence
  Description of Artificial Sequence: Synthetic oligonucleotide
  Target: PCSK9; (-) strand; PAM type: NRG; PAM sequence: AAG
gggtccttgcagatgtggtt

SEQ ID NO: 9332 - DNA, 20 bp, Artificial Sequence
  Description of Artificial Sequence: Synthetic oligonucleotide
  Target: PCSK9; (-) strand; PAM type: NRG; PAM sequence: TGG
aaaaagggtccttgcagatg

SEQ ID NO: 9333 - DNA, 20 bp, Artificial Sequence
  Description of Artificial Sequence: Synthetic oligonucleotide
  Target: PCSK9; (-) strand; PAM type: NRG; PAM sequence: CAG
atttggaaaaagggtccttg

SEQ ID NO: 9334 - DNA, 20 bp, Artificial Sequence
  Description of Artificial Sequence: Synthetic oligonucleotide
  Target: PCSK9; (-) strand; PAM type: NRG; PAM sequence: GGG
tgtgaccttatttggaaaaa

SEQ ID NO: 9335 - DNA, 20 bp, Artificial Sequence
  Description of Artificial Sequence: Synthetic oligonucleotide
  Target: PCSK9; (-) strand; PAM type: NRG; PAM sequence: AGG
ctgtgaccttatttggaaaa

SEQ ID NO: 9336 - DNA, 20 bp, Artificial Sequence
  Description of Artificial Sequence: Synthetic oligonucleotide
  Target: PCSK9; (-) strand; PAM type: NRG; PAM sequence: AAG
gctgtgaccttatttggaaa

SEQ ID NO: 9337 - DNA, 20 bp, Artificial Sequence
  Description of Artificial Sequence: Synthetic oligonucleotide
  Target: PCSK9; (-) strand; PAM type: NRG; PAM sequence: TGG
cctgtggctgtgaccttatt

SEQ ID NO: 9338 - DNA, 20 bp, Artificial Sequence
  Description of Artificial Sequence: Synthetic oligonucleotide
  Target: PCSK9; (-) strand; PAM type: NRG; PAM sequence: TGG
atcctaacccccacaacctg

SEQ ID NO: 9339 - DNA, 20 bp, Artificial Sequence
  Description of Artificial Sequence: Synthetic oligonucleotide
  Target: PCSK9; (-) strand; PAM type: NRG; PAM sequence: GAG
agggaacagtggctgccaaa

SEQ ID NO: 9340 - DNA, 20 bp, Artificial Sequence
  Description of Artificial Sequence: Synthetic oligonucleotide
  Target: PCSK9; (-) strand; PAM type: NRG; PAM sequence: AAG
ggagggaacagtggctgcca

SEQ ID NO: 9341 - DNA, 20 bp, Artificial Sequence
  Description of Artificial Sequence: Synthetic oligonucleotide
  Target: PCSK9; (-) strand; PAM type: NRG; PAM sequence: TGG
caagggagaggagggaacag

SEQ ID NO: 9342 - DNA, 20 bp, Artificial Sequence
  Description of Artificial Sequence: Synthetic oligonucleotide
  Target: PCSK9; (-) strand; PAM type: NRG; PAM sequence: CAG
gcccaagggagaggagggaa

SEQ ID NO: 9343 - DNA, 20 bp, Artificial Sequence
  Description of Artificial Sequence: Synthetic oligonucleotide
  Target: PCSK9; (-) strand; PAM type: NRG; PAM sequence: GGG
ttctggcccaagggagagga

SEQ ID NO: 9344 - DNA, 20 bp, Artificial Sequence
  Description of Artificial Sequence: Synthetic oligonucleotide
  Target: PCSK9; (-) strand; PAM type: NRG; PAM sequence: AGG
cttctggcccaagggagagg

SEQ ID NO: 9345 - DNA, 20 bp, Artificial Sequence
  Description of Artificial Sequence: Synthetic oligonucleotide
  Target: PCSK9; (-) strand; PAM type: NRG; PAM sequence: GAG
gcttctggcccaagggagag

SEQ ID NO: 9346 - DNA, 20 bp, Artificial Sequence
  Description of Artificial Sequence: Synthetic oligonucleotide
  Target: PCSK9; (-) strand; PAM type: NRG; PAM sequence: AGG
ctgcttctggcccaagggag

SEQ ID NO: 9347 - DNA, 20 bp, Artificial Sequence
  Description of Artificial Sequence: Synthetic oligonucleotide
  Target: PCSK9; (-) strand; PAM type: NRG; PAM sequence: GAG
tctgcttctggcccaaggga

SEQ ID NO: 9348 - DNA, 20 bp, Artificial Sequence
  Description of Artificial Sequence: Synthetic oligonucleotide
  Target: PCSK9; (-) strand; PAM type: NRG; PAM sequence: GAG
cgtctgcttctggcccaagg

SEQ ID NO: 9349 - DNA, 20 bp, Artificial Sequence
  Description of Artificial Sequence: Synthetic oligonucleotide
  Target: PCSK9; (-) strand; PAM type: NRG; PAM sequence: GGG
cacgtctgcttctggcccaa

SEQ ID NO: 9350 - DNA, 20 bp, Artificial Sequence
  Description of Artificial Sequence: Synthetic oligonucleotide
  Target: PCSK9; (-) strand; PAM type: NRG; PAM sequence: AGG
ccacgtctgcttctggccca

SEQ ID NO: 9351 - DNA, 20 bp, Artificial Sequence
  Description of Artificial Sequence: Synthetic oligonucleotide
  Target: PCSK9; (-) strand; PAM type: NRG; PAM sequence: AAG
cccacgtctgcttctggccc

SEQ ID NO: 9352 - DNA, 20 bp, Artificial Sequence
  Description of Artificial Sequence: Synthetic oligonucleotide
  Target: PCSK9; (-) strand; PAM type: NRG; PAM sequence: TGG
aagggccccacgtctgcttc

SEQ ID NO: 9353 - DNA, 20 bp, Artificial Sequence
  Description of Artificial Sequence: Synthetic oligonucleotide
  Target: PCSK9; (-) strand; PAM type: NRG; PAM sequence: GGG
ggcatcctatggggaagaaa

SEQ ID NO: 9354 - DNA, 20 bp, Artificial Sequence
  Description of Artificial Sequence: Synthetic oligonucleotide
  Target: PCSK9; (-) strand; PAM type: NRG; PAM sequence: AGG
gggcatcctatggggaagaa

SEQ ID NO: 9355 - DNA, 20 bp, Artificial Sequence
  Description of Artificial Sequence: Synthetic oligonucleotide
  Target: PCSK9; (-) strand; PAM type: NRG; PAM sequence: AAG
tgggcatcctatggggaaga

SEQ ID NO: 9356 - DNA, 20 bp, Artificial Sequence
  Description of Artificial Sequence: Synthetic oligonucleotide
  Target: PCSK9; (-) strand; PAM type: NRG; PAM sequence: AAG
tccatgggcatcctatgggg

SEQ ID NO: 9357 - DNA, 20 bp, Artificial Sequence
  Description of Artificial Sequence: Synthetic oligonucleotide
  Target: PCSK9; (-) strand; PAM type: NRG; PAM sequence: GGG
caatccatgggcatcctatg

SEQ ID NO: 9358 - DNA, 20 bp, Artificial Sequence
  Description of Artificial Sequence: Synthetic oligonucleotide
  Target: PCSK9; (-) strand; PAM type: NRG; PAM sequence: GGG
gcaatccatgggcatcctat

SEQ ID NO: 9359 - DNA, 20 bp, Artificial Sequence
  Description of Artificial Sequence: Synthetic oligonucleotide
  Target: PCSK9; (-) strand; PAM type: NRG; PAM sequence: TGG
ggcaatccatgggcatccta

SEQ ID NO: 9360 - DNA, 20 bp, Artificial Sequence
  Description of Artificial Sequence: Synthetic oligonucleotide
  Target: PCSK9; (-) strand; PAM type: NRG; PAM sequence: GGG
cgggaaggggggcaatccat

SEQ ID NO: 9361 - DNA, 20 bp, Artificial Sequence
  Description of Artificial Sequence: Synthetic oligonucleotide
  Target: PCSK9; (-) strand; PAM type: NRG; PAM sequence: TGG
gcgggaaggggggcaatcca

SEQ ID NO: 9362 - DNA, 20 bp, Artificial Sequence
  Description of Artificial Sequence: Synthetic oligonucleotide
  Target: PCSK9; (-) strand; PAM type: NRG; PAM sequence: GGG
ctcgggggaagcgggaaggg

SEQ ID NO: 9363 - DNA, 20 bp, Artificial Sequence
  Description of Artificial Sequence: Synthetic oligonucleotide
  Target: PCSK9; (-) strand; PAM type: NRG; PAM sequence: GGG
actcgggggaagcgggaagg

SEQ ID NO: 9364 - DNA, 20 bp, Artificial Sequence
  Description of Artificial Sequence: Synthetic oligonucleotide
  Target: PCSK9; (-) strand; PAM type: NRG; PAM sequence: GGG
cactcgggggaagcgggaag

SEQ ID NO: 9365 - DNA, 20 bp, Artificial Sequence
  Description of Artificial Sequence: Synthetic oligonucleotide
  Target: PCSK9; (-) strand; PAM type: NRG; PAM sequence: GGG
acactcgggggaagcgggaa

SEQ ID NO: 9366 - DNA, 20 bp, Artificial Sequence
  Description of Artificial Sequence: Synthetic oligonucleotide
  Target: PCSK9; (-) strand; PAM type: NRG; PAM sequence: AGG
gacactcgggggaagcggga

SEQ ID NO: 9367 - DNA, 20 bp, Artificial Sequence
  Description of Artificial Sequence: Synthetic oligonucleotide
  Target: PCSK9; (-) strand; PAM type: NRG; PAM sequence: AAG
agacactcgggggaagcggg

SEQ ID NO: 9368 - DNA, 20 bp, Artificial Sequence
  Description of Artificial Sequence: Synthetic oligonucleotide
  Target: PCSK9; (-) strand; PAM type: NRG; PAM sequence: GGG
cacagacactcgggggaagc

SEQ ID NO: 9369 - DNA, 20 bp, Artificial Sequence
  Description of Artificial Sequence: Synthetic oligonucleotide
  Target: PCSK9; (-) strand; PAM type: NRG; PAM sequence: CGG
ccacagacactcgggggaag

SEQ ID NO: 9370 - DNA, 20 bp, Artificial Sequence
  Description of Artificial Sequence: Synthetic oligonucleotide
  Target: PCSK9; (-) strand; PAM type: NRG; PAM sequence: AAG
ctcccacagacactcggggg

SEQ ID NO: 9371 - DNA, 20 bp, Artificial Sequence
  Description of Artificial Sequence: Synthetic oligonucleotide
  Target: PCSK9; (-) strand; PAM type: NRG; PAM sequence: GGG
cacctcccacagacactcgg

SEQ ID NO: 9372 - DNA, 20 bp, Artificial Sequence
  Description of Artificial Sequence: Synthetic oligonucleotide
  Target: PCSK9; (-) strand; PAM type: NRG; PAM sequence: GGG
ccacctcccacagacactcg

SEQ ID NO: 9373 - DNA, 20 bp, Artificial Sequence
  Description of Artificial Sequence: Synthetic oligonucleotide
  Target: PCSK9; (-) strand; PAM type: NRG; PAM sequence: GGG
gccacctcccacagacactc

SEQ ID NO: 9374 - DNA, 20 bp, Artificial Sequence
  Description of Artificial Sequence: Synthetic oligonucleotide
  Target: PCSK9; (-) strand; PAM type: NRG; PAM sequence: CGG
tgccacctcccacagacact

SEQ ID NO: 9375 - DNA, 20 bp, Artificial Sequence
  Description of Artificial Sequence: Synthetic oligonucleotide
  Target: PCSK9; (-) strand; PAM type: NRG; PAM sequence: CAG
gccattcctgccacctccca

SEQ ID NO: 9376 - DNA, 20 bp, Artificial Sequence
  Description of Artificial Sequence: Synthetic oligonucleotide
  Target: PCSK9; (-) strand; PAM type: NRG; PAM sequence: GGG
ccttgatatgactccagaag

SEQ ID NO: 9377 - DNA, 20 bp, Artificial Sequence
  Description of Artificial Sequence: Synthetic oligonucleotide
  Target: PCSK9; (-) strand; PAM type: NRG; PAM sequence: GGG
cccttgatatgactccagaa

SEQ ID NO: 9378 - DNA, 20 bp, Artificial Sequence
  Description of Artificial Sequence: Synthetic oligonucleotide
  Target: PCSK9; (-) strand; PAM type: NRG; PAM sequence: AGG
gcccttgatatgactccaga

SEQ ID NO: 9379 - DNA, 20 bp, Artificial Sequence
  Description of Artificial Sequence: Synthetic oligonucleotide
  Target: PCSK9; (-) strand; PAM type: NRG; PAM sequence: AAG
agcccttgatatgactccag

SEQ ID NO: 9380 - DNA, 20 bp, Artificial Sequence
  Description of Artificial Sequence: Synthetic oligonucleotide
  Target: PCSK9; (-) strand; PAM type: NRG; PAM sequence: CAG
ccaagcccttgatatgactc

SEQ ID NO: 9381 - DNA, 20 bp, Artificial Sequence
  Description of Artificial Sequence: Synthetic oligonucleotide
  Target: PCSK9; (-) strand; PAM type: NRG; PAM sequence: AAG
caggaggacttcctccagcc

SEQ ID NO: 9382 - DNA, 20 bp, Artificial Sequence
  Description of Artificial Sequence: Synthetic oligonucleotide
  Target: PCSK9; (-) strand; PAM type: NRG; PAM sequence: CAG
agctccaggaggacttcctc

SEQ ID NO: 9383 - DNA, 20 bp, Artificial Sequence
  Description of Artificial Sequence: Synthetic oligonucleotide
  Target: PCSK9; (-) strand; PAM type: NRG; PAM sequence: AGG
gccagcccaacagctccagg

SEQ ID NO: 9384 - DNA, 20 bp, Artificial Sequence
  Description of Artificial Sequence: Synthetic oligonucleotide
  Target: PCSK9; (-) strand; PAM type: NRG; PAM sequence: GAG
tgccagcccaacagctccag

SEQ ID NO: 9385 - DNA, 20 bp, Artificial Sequence
  Description of Artificial Sequence: Synthetic oligonucleotide
  Target: PCSK9; (-) strand; PAM type: NRG; PAM sequence: AGG
catgccagcccaacagctcc

SEQ ID NO: 9386 - DNA, 20 bp, Artificial Sequence
  Description of Artificial Sequence: Synthetic oligonucleotide
  Target: PCSK9; (-) strand; PAM type: NRG; PAM sequence: CAG
ccatgccagcccaacagctc

SEQ ID NO: 9387 - DNA, 20 bp, Artificial Sequence
  Description of Artificial Sequence: Synthetic oligonucleotide
  Target: PCSK9; (-) strand; PAM type: NRG; PAM sequence: CAG
cctgccccatgccagcccaa

SEQ ID NO: 9388 - DNA, 20 bp, Artificial Sequence
  Description of Artificial Sequence: Synthetic oligonucleotide
  Target: PCSK9; (-) strand; PAM type: NRG; PAM sequence: CAG
ccagccagcctgccccatgc

SEQ ID NO: 9389 - DNA, 20 bp, Artificial Sequence
  Description of Artificial Sequence: Synthetic oligonucleotide
  Target: PCSK9; (-) strand; PAM type: NRG; PAM sequence: CAG
aagctgctgctgggcccagc

SEQ ID NO: 9390 - DNA, 20 bp, Artificial Sequence
  Description of Artificial Sequence: Synthetic oligonucleotide
  Target: PCSK9; (-) strand; PAM type: NRG; PAM sequence: CAG
gaagaagctgctgctgggcc

SEQ ID NO: 9391 - DNA, 20 bp, Artificial Sequence
  Description of Artificial Sequence: Synthetic oligonucleotide
  Target: PCSK9; (-) strand; PAM type: NRG; PAM sequence: GGG
tgaatgaagaagctgctgct

SEQ ID NO: 9392 - DNA, 20 bp, Artificial Sequence
  Description of Artificial Sequence: Synthetic oligonucleotide
  Target: PCSK9; (-) strand; PAM type: NRG; PAM sequence: TGG
atgaatgaagaagctgctgc

SEQ ID NO: 9393 - DNA, 20 bp, Artificial Sequence
  Description of Artificial Sequence: Synthetic oligonucleotide
  Target: PCSK9; (-) strand; PAM type: NRG; PAM sequence: AAG
tggcctccccatgaatgaag

SEQ ID NO: 9394 - DNA, 20 bp, Artificial Sequence
  Description of Artificial Sequence: Synthetic oligonucleotide
  Target: PCSK9; (-) strand; PAM type: NRG; PAM sequence: AAG
ttgtggcctccccatgaatg

SEQ ID NO: 9395 - DNA, 20 bp, Artificial Sequence
  Description of Artificial Sequence: Synthetic oligonucleotide
  Target: PCSK9; (-) strand; PAM type: NRG; PAM sequence: TGG
agctctagggcccatgcttg

SEQ ID NO: 9396 - DNA, 20 bp, Artificial Sequence
  Description of Artificial Sequence: Synthetic oligonucleotide
  Target: PCSK9; (-) strand; PAM type: NRG; PAM sequence: GGG
gagggcggcagccagctcta

SEQ ID NO: 9397 - DNA, 20 bp, Artificial Sequence
  Description of Artificial Sequence: Synthetic oligonucleotide
  Target: PCSK9; (-) strand; PAM type: NRG; PAM sequence: AGG
tgagggcggcagccagctct

SEQ ID NO: 9398 - DNA, 20 bp, Artificial Sequence
  Description of Artificial Sequence: Synthetic oligonucleotide
  Target: PCSK9; (-) strand; PAM type: NRG; PAM sequence: TAG
ttgagggcggcagccagctc

SEQ ID NO: 9399 - DNA, 20 bp, Artificial Sequence
  Description of Artificial Sequence: Synthetic oligonucleotide
  Target: PCSK9; (-) strand; PAM type: NRG; PAM sequence: CAG
ctgggtttgagggcggcagc

SEQ ID NO: 9400 - DNA, 20 bp, Artificial Sequence
  Description of Artificial Sequence: Synthetic oligonucleotide
  Target: PCSK9; (-) strand; PAM type: NRG; PAM sequence: CAG
gggtctgggtttgagggcgg

SEQ ID NO: 9401 - DNA, 20 bp, Artificial Sequence
  Description of Artificial Sequence: Synthetic oligonucleotide
  Target: PCSK9; (-) strand; PAM type: NRG; PAM sequence: CGG
gcagggtctgggtttgaggg

SEQ ID NO: 9402 - DNA, 20 bp, Artificial Sequence
  Description of Artificial Sequence: Synthetic oligonucleotide
  Target: PCSK9; (-) strand; PAM type: NRG; PAM sequence: GGG
agtgcagggtctgggtttga

SEQ ID NO: 9403 - DNA, 20 bp, Artificial Sequence
  Description of Artificial Sequence: Synthetic oligonucleotide
  Target: PCSK9; (-) strand; PAM type: NRG; PAM sequence: AGG
gagtgcagggtctgggtttg

SEQ ID NO: 9404 - DNA, 20 bp, Artificial Sequence
  Description of Artificial Sequence: Synthetic oligonucleotide
  Target: PCSK9; (-) strand; PAM type: NRG; PAM sequence: GAG
agagtgcagggtctgggttt

SEQ ID NO: 9405 - DNA, 20 bp, Artificial Sequence
  Description of Artificial Sequence: Synthetic oligonucleotide
  Target: PCSK9; (-) strand; PAM type: NRG; PAM sequence: GGG
cagttaagagtgcagggtct

SEQ ID NO: 9406 - DNA, 20 bp, Artificial Sequence
  Description of Artificial Sequence: Synthetic oligonucleotide
  Target: PCSK9; (-) strand; PAM type: NRG; PAM sequence: TGG
acagttaagagtgcagggtc

SEQ ID NO: 9407 - DNA, 20 bp, Artificial Sequence
  Description of Artificial Sequence: Synthetic oligonucleotide
  Target: PCSK9; (-) strand; PAM type: NRG; PAM sequence: GGG
gtcacacagttaagagtgca

SEQ ID NO: 9408 - DNA, 20 bp, Artificial Sequence
  Description of Artificial Sequence: Synthetic oligonucleotide
  Target: PCSK9; (-) strand; PAM type: NRG; PAM sequence: AGG
ggtcacacagttaagagtgc

SEQ ID NO: 9409 - DNA, 20 bp, Artificial Sequence
  Description of Artificial Sequence: Synthetic oligonucleotide
  Target: PCSK9; (-) strand; PAM type: NRG; PAM sequence: CAG
aggtcacacagttaagagtg

SEQ ID NO: 9410 - DNA, 20 bp, Artificial Sequence
  Description of Artificial Sequence: Synthetic oligonucleotide
  Target: PCSK9; (-) strand; PAM type: NRG; PAM sequence: GAG
atgcaaggtcacacagttaa

SEQ ID NO: 9411 - DNA, 20 bp, Artificial Sequence
  Description of Artificial Sequence: Synthetic oligonucleotide
  Target: PCSK9; (-) strand; PAM type: NRG; PAM sequence: AAG
gtatgcaaggtcacacagtt

SEQ ID NO: 9412 - DNA, 20 bp, Artificial Sequence
  Description of Artificial Sequence: Synthetic oligonucleotide
  Target: PCSK9; (-) strand; PAM type: NRG; PAM sequence: CAG
gtgacgtatgcaaggtcaca

SEQ ID NO: 9413 - DNA, 20 bp, Artificial Sequence
  Description of Artificial Sequence: Synthetic oligonucleotide
  Target: PCSK9; (-) strand; PAM type: NRG; PAM sequence: AGG
gagggtgagtgacgtatgca

SEQ ID NO: 9414 - DNA, 20 bp, Artificial Sequence
  Description of Artificial Sequence: Synthetic oligonucleotide
  Target: PCSK9; (-) strand; PAM type: NRG; PAM sequence: AAG
agagggtgagtgacgtatgc

SEQ ID NO: 9415 - DNA, 20 bp, Artificial Sequence
  Description of Artificial Sequence: Synthetic oligonucleotide
  Target: PCSK9; (-) strand; PAM type: NRG; PAM sequence: GAG
acctgaagatcagagagggt

SEQ ID NO: 9416 - DNA, 20 bp, Artificial Sequence
  Description of Artificial Sequence: Synthetic oligonucleotide
  Target: PCSK9; (-) strand; PAM type: NRG; PAM sequence: GGG
aggaacctgaagatcagaga

SEQ ID NO: 9417 - DNA, 20 bp, Artificial Sequence
  Description of Artificial Sequence: Synthetic oligonucleotide
  Target: PCSK9; (-) strand; PAM type: NRG; PAM sequence: AGG
gaggaacctgaagatcagag

SEQ ID NO: 9418 - DNA, 20 bp, Artificial Sequence
  Description of Artificial Sequence: Synthetic oligonucleotide
  Target: PCSK9; (-) strand; PAM type: NRG; PAM sequence: GAG
agaggaacctgaagatcaga

SEQ ID NO: 9419 - DNA, 20 bp, Artificial Sequence
  Description of Artificial Sequence: Synthetic oligonucleotide
  Target: PCSK9; (-) strand; PAM type: NRG; PAM sequence: GAG
gcagaggaacctgaagatca

SEQ ID NO: 9420 - DNA, 20 bp, Artificial Sequence
  Description of Artificial Sequence: Synthetic oligonucleotide
  Target: PCSK9; (-) strand; PAM type: NRG; PAM sequence: CAG
ttgcagaggaacctgaagat

SEQ ID NO: 9421 - DNA, 20 bp, Artificial Sequence
  Description of Artificial Sequence: Synthetic oligonucleotide
  Target: PCSK9; (-) strand; PAM type: NRG; PAM sequence: AAG
cccttttgcagaggaacctg

SEQ ID NO: 9422 - DNA, 20 bp, Artificial Sequence
  Description of Artificial Sequence: Synthetic oligonucleotide
  Target: PCSK9; (-) strand; PAM type: NRG; PAM sequence: AGG
tcattacctcccttttgcag

SEQ ID NO: 9423 - DNA, 20 bp, Artificial Sequence
  Description of Artificial Sequence: Synthetic oligonucleotide
  Target: PCSK9; (-) strand; PAM type: NRG; PAM sequence: GAG
atcattacctcccttttgca

SEQ ID NO: 9424 - DNA, 20 bp, Artificial Sequence
  Description of Artificial Sequence: Synthetic oligonucleotide
  Target: PCSK9; (-) strand; PAM type: NRG; PAM sequence: CAG
ttatcattacctcccttttg

SEQ ID NO: 9425 - DNA, 20 bp, Artificial Sequence
  Description of Artificial Sequence: Synthetic oligonucleotide
  Target: PCSK9; (-) strand; PAM type: NRG; PAM sequence: GGG
caaacagccccccagagtga

SEQ ID NO: 9426 - DNA, 20 bp, Artificial Sequence
  Description of Artificial Sequence: Synthetic oligonucleotide
  Target: PCSK9; (-) strand; PAM type: NRG; PAM sequence: AGG
ccaaacagccccccagagtg

SEQ ID NO: 9427 - DNA, 20 bp, Artificial Sequence
  Description of Artificial Sequence: Synthetic oligonucleotide
  Target: PCSK9; (-) strand; PAM type: NRG; PAM sequence: GAG
tccaaacagccccccagagt

SEQ ID NO: 9428 - DNA, 20 bp, Artificial Sequence
  Description of Artificial Sequence: Synthetic oligonucleotide
  Target: PCSK9; (-) strand; PAM type: NRG; PAM sequence: GAG
accctccaaacagcccccca

SEQ ID NO: 9429 - DNA, 20 bp, Artificial Sequence
  Description of Artificial Sequence: Synthetic oligonucleotide
  Target: PCSK9; (-) strand; PAM type: NRG; PAM sequence: CAG
taaccctccaaacagccccc

SEQ ID NO: 9430 - DNA, 20 bp, Artificial Sequence
  Description of Artificial Sequence: Synthetic oligonucleotide
  Target: PCSK9; (-) strand; PAM type: NRG; PAM sequence: CAG
aactgatttaaccctccaaa

SEQ ID NO: 9431 - DNA, 20 bp, Artificial Sequence
  Description of Artificial Sequence: Synthetic oligonucleotide
  Target: PCSK9; (-) strand; PAM type: NRG; PAM sequence: CAG
tgacagagaaatgcatgcta

SEQ ID NO: 9432 - DNA, 20 bp, Artificial Sequence
  Description of Artificial Sequence: Synthetic oligonucleotide
  Target: PCSK9; (-) strand; PAM type: NRG; PAM sequence: GAG
acctcactcaatacctgaca

SEQ ID NO: 9433 - DNA, 20 bp, Artificial Sequence
  Description of Artificial Sequence: Synthetic oligonucleotide
  Target: PCSK9; (-) strand; PAM type: NRG; PAM sequence: CAG
gcacctcactcaatacctga

SEQ ID NO: 9434 - DNA, 20 bp, Artificial Sequence
  Description of Artificial Sequence: Synthetic oligonucleotide
  Target: PCSK9; (-) strand; PAM type: NRG; PAM sequence: CAG
aaaatgcagggctaaaatca

SEQ ID NO: 9435 - DNA, 20 bp, Artificial Sequence
  Description of Artificial Sequence: Synthetic oligonucleotide
  Target: PCSK9; (-) strand; PAM type: NRG; PAM sequence: GGG
ggtaagaaaagaaaaatgca

SEQ ID NO: 9436 - DNA, 20 bp, Artificial Sequence
  Description of Artificial Sequence: Synthetic oligonucleotide
  Target: PCSK9; (-) strand; PAM type: NRG; PAM sequence: AGG
tggtaagaaaagaaaaatgc

SEQ ID NO: 9437 - DNA, 20 bp, Artificial Sequence
  Description of Artificial Sequence: Synthetic oligonucleotide
  Target: PCSK9; (-) strand; PAM type: NRG; PAM sequence: CAG
atggtaagaaaagaaaaatg

SEQ ID NO: 9438 - DNA, 20 bp, Artificial Sequence
  Description of Artificial Sequence: Synthetic oligonucleotide
  Target: PCSK9; (-) strand; PAM type: NRG; PAM sequence: AAG
ttattattgaatggtaagaa

SEQ ID NO: 9439 - DNA, 20 bp, Artificial Sequence
  Description of Artificial Sequence: Synthetic oligonucleotide
  Target: PCSK9; (-) strand; PAM type: NRG; PAM sequence: AAG
aaacgttattattgaatggt

SEQ ID NO: 9440 - DNA, 20 bp, Artificial Sequence
  Description of Artificial Sequence: Synthetic oligonucleotide
  Target: PCSK9; (-) strand; PAM type: NRG; PAM sequence: TGG
ctcaaaacgttattattgaa

SEQ ID NO: 9441 - DNA, 20 bp, Artificial Sequence
  Description of Artificial Sequence: Synthetic oligonucleotide
  Target: PCSK9; (-) strand; PAM type: NRG; PAM sequence: GGG
tatggtgcctggcgcacagt

SEQ ID NO: 9442 - DNA, 20 bp, Artificial Sequence
  Description of Artificial Sequence: Synthetic oligonucleotide
  Target: PCSK9; (-) strand; PAM type: NRG; PAM sequence: TGG
atatggtgcctggcgcacag

SEQ ID NO: 9443 - DNA, 20 bp, Artificial Sequence
  Description of Artificial Sequence: Synthetic oligonucleotide
  Target: PCSK9; (-) strand; PAM type: NRG; PAM sequence: CAG
ctaatatggtgcctggcgca

SEQ ID NO: 9444 - DNA, 20 bp, Artificial Sequence
  Description of Artificial Sequence: Synthetic oligonucleotide
  Target: PCSK9; (-) strand; PAM type: NRG; PAM sequence: TGG
ccagcacctaatatggtgcc

SEQ ID NO: 9445 - DNA, 20 bp, Artificial Sequence
  Description of Artificial Sequence: Synthetic oligonucleotide
  Target: PCSK9; (-) strand; PAM type: NRG; PAM sequence: TGG
tgtatccccagcacctaata

SEQ ID NO: 9446 - DNA, 20 bp, Artificial Sequence
  Description of Artificial Sequence: Synthetic oligonucleotide
  Target: PCSK9; (-) strand; PAM type: NRG; PAM sequence: CAG
ttcattcacatttgtatccc

SEQ ID NO: 9447 - DNA, 20 bp, Artificial Sequence
  Description of Artificial Sequence: Synthetic oligonucleotide
  Target: PCSK9; (-) strand; PAM type: NRG; PAM sequence: GAG
tggatacactgttgggggaa

SEQ ID NO: 9448 - DNA, 20 bp, Artificial Sequence
  Description of Artificial Sequence: Synthetic oligonucleotide
  Target: PCSK9; (-) strand; PAM type: NRG; PAM sequence: AAG
tctggatacactgttggggg

SEQ ID NO: 9449 - DNA, 20 bp, Artificial Sequence
  Description of Artificial Sequence: Synthetic oligonucleotide
  Target: PCSK9; (-) strand; PAM type: NRG; PAM sequence: GGG
tcttctggatacactgttgg

SEQ ID NO: 9450 - DNA, 20 bp, Artificial Sequence
  Description of Artificial Sequence: Synthetic oligonucleotide
  Target: PCSK9; (-) strand; PAM type: NRG; PAM sequence: GGG
atcttctggatacactgttg

SEQ ID NO: 9451 - DNA, 20 bp, Artificial Sequence
  Description of Artificial Sequence: Synthetic oligonucleotide
  Target: PCSK9; (-) strand; PAM type: NRG; PAM sequence: GGG
aatcttctggatacactgtt

SEQ ID NO: 9452 - DNA, 20 bp, Artificial Sequence
  Description of Artificial Sequence: Synthetic oligonucleotide
  Target: PCSK9; (-) strand; PAM type: NRG; PAM sequence: TGG
taatcttctggatacactgt

SEQ ID NO: 9453 - DNA, 20 bp, Artificial Sequence
  Description of Artificial Sequence: Synthetic oligonucleotide
  Target: PCSK9; (-) strand; PAM type: NRG; PAM sequence: TGG
taaggaatggattaatcttc

SEQ ID NO: 9454 - DNA, 20 bp, Artificial Sequence
  Description of Artificial Sequence: Synthetic oligonucleotide
  Target: PCSK9; (-) strand; PAM type: NRG; PAM sequence: TGG
agtagcatttgtttaaggaa

SEQ ID NO: 9455 - DNA, 20 bp, Artificial Sequence
  Description of Artificial Sequence: Synthetic oligonucleotide
  Target: PCSK9; (-) strand; PAM type: NRG; PAM sequence: AGG
tgtcaagtagcatttgttta

SEQ ID NO: 9456 - DNA, 20 bp, Artificial Sequence
  Description of Artificial Sequence: Synthetic oligonucleotide
  Target: PCSK9; (-) strand; PAM type: NRG; PAM sequence: AAG
gtgtcaagtagcatttgttt

SEQ ID NO: 9457 - DNA, 20 bp, Artificial Sequence
  Description of Artificial Sequence: Synthetic oligonucleotide
  Target: PCSK9; (-) strand; PAM type: NRG; PAM sequence: TAG
cagaactaatctgtgtcaag

SEQ ID NO: 9458 - DNA, 20 bp, Artificial Sequence
  Description of Artificial Sequence: Synthetic oligonucleotide
  Target: PCSK9; (-) strand; PAM type: NRG; PAM sequence: AAG
atccagaactaatctgtgtc

SEQ ID NO: 9459 - DNA, 20 bp, Artificial Sequence
  Description of Artificial Sequence: Synthetic oligonucleotide
  Target: PCSK9; (-) strand; PAM type: NRG; PAM sequence: CAG
ttcagagctctcagcctatc

SEQ ID NO: 9460 - DNA, 20 bp, Artificial Sequence
  Description of Artificial Sequence: Synthetic oligonucleotide
  Target: PCSK9; (-) strand; PAM type: NRG; PAM sequence: CAG
ctgcactccttcagagctct

SEQ ID NO: 9461 - DNA, 20 bp, Artificial Sequence
  Description of Artificial Sequence: Synthetic oligonucleotide
  Target: PCSK9; (-) strand; PAM type: NRG; PAM sequence: GAG
cagctgcctgcactccttca

SEQ ID NO: 9462 - DNA, 20 bp, Artificial Sequence
  Description of Artificial Sequence: Synthetic oligonucleotide
  Target: PCSK9; (-) strand; PAM type: NRG; PAM sequence: CAG
cgcagctgcctgcactcctt

SEQ ID NO: 9463 - DNA, 20 bp, Artificial Sequence
  Description of Artificial Sequence: Synthetic oligonucleotide
  Target: PCSK9; (-) strand; PAM type: NRG; PAM sequence: CAG
ctgctggatacacaggctcg

SEQ ID NO: 9464 - DNA, 20 bp, Artificial Sequence
  Description of Artificial Sequence: Synthetic oligonucleotide
  Target: PCSK9; (-) strand; PAM type: NRG; PAM sequence: AGG
gatccttctgctggatacac

SEQ ID NO: 9465 - DNA, 20 bp, Artificial Sequence
  Description of Artificial Sequence: Synthetic oligonucleotide
  Target: PCSK9; (-) strand; PAM type: NRG; PAM sequence: CAG
tgatccttctgctggataca

SEQ ID NO: 9466 - DNA, 20 bp, Artificial Sequence
  Description of Artificial Sequence: Synthetic oligonucleotide
  Target: PCSK9; (-) strand; PAM type: NRG; PAM sequence: TGG
tcctttcctgatccttctgc

SEQ ID NO: 9467 - DNA, 20 bp, Artificial Sequence
  Description of Artificial Sequence: Synthetic oligonucleotide
  Target: PCSK9; (-) strand; PAM type: NRG; PAM sequence: AGG
gctagaacagcgcttcctcc

SEQ ID NO: 9468 - DNA, 20 bp, Artificial Sequence
  Description of Artificial Sequence: Synthetic oligonucleotide
  Target: PCSK9; (-) strand; PAM type: NRG; PAM sequence: CAG
ggctagaacagcgcttcctc

SEQ ID NO: 9469 - DNA, 20 bp, Artificial Sequence
  Description of Artificial Sequence: Synthetic oligonucleotide
  Target: PCSK9; (-) strand; PAM type: NRG; PAM sequence: CAG
cccgtaggtcttggctagaa

SEQ ID NO: 9470 - DNA, 20 bp, Artificial Sequence
  Description of Artificial Sequence: Synthetic oligonucleotide
  Target: PCSK9; (-) strand; PAM type: NRG; PAM sequence: TAG
atgcccccgtaggtcttggc

SEQ ID NO: 9471 - DNA, 20 bp, Artificial Sequence
  Description of Artificial Sequence: Synthetic oligonucleotide
  Target: PCSK9; (-) strand; PAM type: NRG; PAM sequence: TGG
aataatgcccccgtaggtct

SEQ ID NO: 9472 - DNA, 20 bp, Artificial Sequence
  Description of Artificial Sequence: Synthetic oligonucleotide
  Target: PCSK9; (-) strand; PAM type: NRG; PAM sequence: AGG
ctggttaataatgcccccgt

SEQ ID NO: 9473 - DNA, 20 bp, Artificial Sequence
  Description of Artificial Sequence: Synthetic oligonucleotide
  Target: PCSK9; (-) strand; PAM type: NRG; PAM sequence: TAG
cctggttaataatgcccccg

SEQ ID NO: 9474 - DNA, 20 bp, Artificial Sequence
  Description of Artificial Sequence: Synthetic oligonucleotide
  Target: PCSK9; (-) strand; PAM type: NRG; PAM sequence: TGG
tggacaccgtcccctttgcc

SEQ ID NO: 9475 - DNA, 20 bp, Artificial Sequence
  Description of Artificial Sequence: Synthetic oligonucleotide
  Target: PCSK9; (-) strand; PAM type: NRG; PAM sequence: TGG
tccacgttcattccactgct

SEQ ID NO: 9476 - DNA, 20 bp, Artificial Sequence
  Description of Artificial Sequence: Synthetic oligonucleotide
  Target: PCSK9; (-) strand; PAM type: NRG; PAM sequence: CAG
ccacactccctcctgcctca

SEQ ID NO: 9477 - DNA, 20 bp, Artificial Sequence
  Description of Artificial Sequence: Synthetic oligonucleotide
  Target: PCSK9; (-) strand; PAM type: NRG; PAM sequence: AGG
agcctcggtcccttctgcac

SEQ ID NO: 9478 - DNA, 20 bp, Artificial Sequence
  Description of Artificial Sequence: Synthetic oligonucleotide
  Target: PCSK9; (-) strand; PAM type: NRG; PAM sequence: CAG
cagcctcggtcccttctgca

SEQ ID NO: 9479 - DNA, 20 bp, Artificial Sequence
  Description of Artificial Sequence: Synthetic oligonucleotide
  Target: PCSK9; (-) strand; PAM type: NRG; PAM sequence: CGG
cctcctggtctcaccagcct

SEQ ID NO: 9480 - DNA, 20 bp, Artificial Sequence
  Description of Artificial Sequence: Synthetic oligonucleotide
  Target: PCSK9; (-) strand; PAM type: NRG; PAM sequence: CAG
ccaggccctcctggtctcac

SEQ ID NO: 9481 - DNA, 20 bp, Artificial Sequence
  Description of Artificial Sequence: Synthetic oligonucleotide
  Target: PCSK9; (-) strand; PAM type: NRG; PAM sequence: TGG
ggaggccacccaggccctcc

SEQ ID NO: 9482 - DNA, 20 bp, Artificial Sequence
  Description of Artificial Sequence: Synthetic oligonucleotide
  Target: PCSK9; (-) strand; PAM type: NRG; PAM sequence: AGG
atctgacctggaggccaccc

SEQ ID NO: 9483 - DNA, 20 bp, Artificial Sequence
  Description of Artificial Sequence: Synthetic oligonucleotide
  Target: PCSK9; (-) strand; PAM type: NRG; PAM sequence: CAG
catctgacctggaggccacc

SEQ ID NO: 9484 - DNA, 20 bp, Artificial Sequence
  Description of Artificial Sequence: Synthetic oligonucleotide
  Target: PCSK9; (-) strand; PAM type: NRG; PAM sequence: AGG
tcctttcacatctgacctgg

SEQ ID NO: 9485 - DNA, 20 bp, Artificial Sequence
  Description of Artificial Sequence: Synthetic oligonucleotide
  Target: PCSK9; (-) strand; PAM type: NRG; PAM sequence: GAG
ttcctttcacatctgacctg

SEQ ID NO: 9486 - DNA, 20 bp, Artificial Sequence
  Description of Artificial Sequence: Synthetic oligonucleotide
  Target: PCSK9; (-) strand; PAM type: NRG; PAM sequence: TGG
tcttcctttcacatctgacc

SEQ ID NO: 9487 - DNA, 20 bp, Artificial Sequence
  Description of Artificial Sequence: Synthetic oligonucleotide
  Target: PCSK9; (-) strand; PAM type: NRG; PAM sequence: AAG
gagaagctcagactgtggcc

SEQ ID NO: 9488 - DNA, 20 bp, Artificial Sequence
  Description of Artificial Sequence: Synthetic oligonucleotide
  Target: PCSK9; (-) strand; PAM type: NRG; PAM sequence: TGG
cgcctgagaagctcagactg

SEQ ID NO: 9489 - DNA, 20 bp, Artificial Sequence
  Description of Artificial Sequence: Synthetic oligonucleotide
  Target: PCSK9; (-) strand; PAM type: NRG; PAM sequence: CAG
tgccatacgcctgagaagct

SEQ ID NO: 9490 - DNA, 20 bp, Artificial Sequence
  Description of Artificial Sequence: Synthetic oligonucleotide
  Target: PCSK9; (-) strand; PAM type: NRG; PAM sequence: AAG
agccctgccatacgcctgag

SEQ ID NO: 9491 - DNA, 20 bp, Artificial Sequence
  Description of Artificial Sequence: Synthetic oligonucleotide
  Target: PCSK9; (-) strand; PAM type: NRG; PAM sequence: GAG
ggcagccctgccatacgcct

SEQ ID NO: 9492 - DNA, 20 bp, Artificial Sequence
  Description of Artificial Sequence: Synthetic oligonucleotide
  Target: PCSK9; (-) strand; PAM type: NRG; PAM sequence: CAG
gctcattccctctcaccagg

SEQ ID NO: 9493 - DNA, 20 bp, Artificial Sequence
  Description of Artificial Sequence: Synthetic oligonucleotide
  Target: PCSK9; (-) strand; PAM type: NRG; PAM sequence: AGG
ggagctcattccctctcacc

SEQ ID NO: 9494 - DNA, 20 bp, Artificial Sequence
  Description of Artificial Sequence: Synthetic oligonucleotide
  Target: PCSK9; (-) strand; PAM type: NRG; PAM sequence: CAG
gggagctcattccctctcac

SEQ ID NO: 9495 - DNA, 20 bp, Artificial Sequence
  Description of Artificial Sequence: Synthetic oligonucleotide
  Target: PCSK9; (-) strand; PAM type: NRG; PAM sequence: GAG
ttgcatacctccagagcagg

SEQ ID NO: 9496 - DNA, 20 bp, Artificial Sequence
  Description of Artificial Sequence: Synthetic oligonucleotide
  Target: PCSK9; (-) strand; PAM type: NRG; PAM sequence: GGG
gcttgcatacctccagagca

SEQ ID NO: 9497 - DNA, 20 bp, Artificial Sequence
  Description of Artificial Sequence: Synthetic oligonucleotide
  Target: PCSK9; (-) strand; PAM type: NRG; PAM sequence: AGG
tgcttgcatacctccagagc

SEQ ID NO: 9498 - DNA, 20 bp, Artificial Sequence
  Description of Artificial Sequence: Synthetic oligonucleotide
  Target: PCSK9; (-) strand; PAM type: NRG; PAM sequence: CAG
ctgcttgcatacctccagag

SEQ ID NO: 9499 - DNA, 20 bp, Artificial Sequence
  Description of Artificial Sequence: Synthetic oligonucleotide
  Target: PCSK9; (-) strand; PAM type: NRG; PAM sequence: GAG
gtcctgcttgcatacctcca

SEQ ID NO: 9500 - DNA, 20 bp, Artificial Sequence
  Description of Artificial Sequence: Synthetic oligonucleotide
  Target: PCSK9; (-) strand; PAM type: NRG; PAM sequence: CAG
cagtcctgcttgcatacctc

SEQ ID NO: 9501 - DNA, 20 bp, Artificial Sequence
  Description of Artificial Sequence: Synthetic oligonucleotide
  Target: PCSK9; (-) strand; PAM type: NRG; PAM sequence: CAG
gcctctggcaggtgagagcc

SEQ ID NO: 9502 - DNA, 20 bp, Artificial Sequence
  Description of Artificial Sequence: Synthetic oligonucleotide
  Target: PCSK9; (-) strand; PAM type: NRG; PAM sequence: GAG
ctgtggcctctggcaggtga

SEQ ID NO: 9503 - DNA, 20 bp, Artificial Sequence
  Description of Artificial Sequence: Synthetic oligonucleotide
  Target: PCSK9; (-) strand; PAM type: NRG; PAM sequence: GAG
ctctgtggcctctggcaggt

SEQ ID NO: 9504 - DNA, 20 bp, Artificial Sequence
  Description of Artificial Sequence: Synthetic oligonucleotide
  Target: PCSK9; (-) strand; PAM type: NRG; PAM sequence: AGG
aaagctctgtggcctctggc

SEQ ID NO: 9505 - DNA, 20 bp, Artificial Sequence
  Description of Artificial Sequence: Synthetic oligonucleotide
  Target: PCSK9; (-) strand; PAM type: NRG; PAM sequence: CAG
gaaagctctgtggcctctgg

SEQ ID NO: 9506 - DNA, 20 bp, Artificial Sequence
  Description of Artificial Sequence: Synthetic oligonucleotide
  Target: PCSK9; (-) strand; PAM type: NRG; PAM sequence: TGG
ctggaaagctctgtggcctc

SEQ ID NO: 9507 - DNA, 20 bp, Artificial Sequence
  Description of Artificial Sequence: Synthetic oligonucleotide
  Target: PCSK9; (-) strand; PAM type: NRG; PAM sequence: TGG
ccagcctctggaaagctctg

SEQ ID NO: 9508 - DNA, 20 bp, Artificial Sequence
  Description of Artificial Sequence: Synthetic oligonucleotide
  Target: PCSK9; (-) strand; PAM type: NRG; PAM sequence: AAG
ggcctcttccagcctctgga

SEQ ID NO: 9509 - DNA, 20 bp, Artificial Sequence
  Description of Artificial Sequence: Synthetic oligonucleotide
  Target: PCSK9; (-) strand; PAM type: NRG; PAM sequence: TGG
gagtggcctcttccagcctc

SEQ ID NO: 9510 - DNA, 20 bp, Artificial Sequence
  Description of Artificial Sequence: Synthetic oligonucleotide
  Target: PCSK9; (-) strand; PAM type: NRG; PAM sequence: CAG
ggccttggagtggcctcttc

SEQ ID NO: 9511 - DNA, 20 bp, Artificial Sequence
  Description of Artificial Sequence: Synthetic oligonucleotide
  Target: PCSK9; (-) strand; PAM type: NRG; PAM sequence: TGG
ggggcaaagaggccttggag

SEQ ID NO: 9512 - DNA, 20 bp, Artificial Sequence
  Description of Artificial Sequence: Synthetic oligonucleotide
  Target: PCSK9; (-) strand; PAM type: NRG; PAM sequence: GAG
tcaggggcaaagaggccttg

SEQ ID NO: 9513 - DNA, 20 bp, Artificial Sequence
  Description of Artificial Sequence: Synthetic oligonucleotide
  Target: PCSK9; (-) strand; PAM type: NRG; PAM sequence: TGG
tctcaggggcaaagaggcct

SEQ ID NO: 9514 - DNA, 20 bp, Artificial Sequence
  Description of Artificial Sequence: Synthetic oligonucleotide
  Target: PCSK9; (-) strand; PAM type: NRG; PAM sequence: AGG
caccactctcaggggcaaag

SEQ ID NO: 9515 - DNA, 20 bp, Artificial Sequence
  Description of Artificial Sequence: Synthetic oligonucleotide
  Target: PCSK9; (-) strand; PAM type: NRG; PAM sequence: GAG
ccaccactctcaggggcaaa

SEQ ID NO: 9516 - DNA, 20 bp, Artificial Sequence
  Description of Artificial Sequence: Synthetic oligonucleotide
  Target: PCSK9; (-) strand; PAM type: NRG; PAM sequence: AAG
agccaccactctcaggggca

SEQ ID NO: 9517 - DNA, 20 bp, Artificial Sequence
  Description of Artificial Sequence: Synthetic oligonucleotide
  Target: PCSK9; (-) strand; PAM type: NRG; PAM sequence: GGG
agaagagccaccactctcag

SEQ ID NO: 9518 - DNA, 20 bp, Artificial Sequence
  Description of Artificial Sequence: Synthetic oligonucleotide
  Target: PCSK9; (-) strand; PAM type: NRG; PAM sequence: GGG
aagaagagccaccactctca

SEQ ID NO: 9519 - DNA, 20 bp, Artificial Sequence
  Description of Artificial Sequence: Synthetic oligonucleotide
  Target: PCSK9; (-) strand; PAM type: NRG; PAM sequence: AGG
caagaagagccaccactctc

SEQ ID NO: 9520 - DNA, 20 bp, Artificial Sequence
  Description of Artificial Sequence: Synthetic oligonucleotide
  Target: PCSK9; (-) strand; PAM type: NRG; PAM sequence: CAG
tcaagaagagccaccactct

SEQ ID NO: 9521 - DNA, 20 bp, Artificial Sequence
  Description of Artificial Sequence: Synthetic oligonucleotide
  Target: PCSK9; (-) strand; PAM type: NRG; PAM sequence: GAG
tggcaaggtggcctcaagaa

SEQ ID NO: 9522 - DNA, 20 bp, Artificial Sequence
  Description of Artificial Sequence: Synthetic oligonucleotide
  Target: PCSK9; (-) strand; PAM type: NRG; PAM sequence: AAG
cgtggcaaggtggcctcaag

SEQ ID NO: 9523 - DNA, 20 bp, Artificial Sequence
  Description of Artificial Sequence: Synthetic oligonucleotide
  Target: PCSK9; (-) strand; PAM type: NRG; PAM sequence: AAG
cagcgtggcaaggtggcctc

SEQ ID NO: 9524 - DNA, 20 bp, Artificial Sequence
  Description of Artificial Sequence: Synthetic oligonucleotide
  Target: PCSK9; (-) strand; PAM type: NRG; PAM sequence: TGG
cctgtgacagcgtggcaagg

SEQ ID NO: 9525 - DNA, 20 bp, Artificial Sequence
  Description of Artificial Sequence: Synthetic oligonucleotide
  Target: PCSK9; (-) strand; PAM type: NRG; PAM sequence: AGG
ttccctgtgacagcgtggca

SEQ ID NO: 9526 - DNA, 20 bp, Artificial Sequence
  Description of Artificial Sequence: Synthetic oligonucleotide
  Target: PCSK9; (-) strand; PAM type: NRG; PAM sequence: AAG
gttccctgtgacagcgtggc

SEQ ID NO: 9527 - DNA, 20 bp, Artificial Sequence
  Description of Artificial Sequence: Synthetic oligonucleotide
  Target: PCSK9; (-) strand; PAM type: NRG; PAM sequence: TGG
gctagttccctgtgacagcg

SEQ ID NO: 9528 - DNA, 20 bp, Artificial Sequence
  Description of Artificial Sequence: Synthetic oligonucleotide
  Target: PCSK9; (-) strand; PAM type: NRG; PAM sequence: CAG
gggctgctagttccctgtga

SEQ ID NO: 9529 - DNA, 20 bp, Artificial Sequence
  Description of Artificial Sequence: Synthetic oligonucleotide
  Target: PCSK9; (-) strand; PAM type: NRG; PAM sequence: TAG
ccgggtgaggcaggggctgc

SEQ ID NO: 9530 - DNA, 20 bp, Artificial Sequence
  Description of Artificial Sequence: Synthetic oligonucleotide
  Target: PCSK9; (-) strand; PAM type: NRG; PAM sequence: GGG
caaacccccgggtgaggcag

SEQ ID NO: 9531 - DNA, 20 bp, Artificial Sequence
  Description of Artificial Sequence: Synthetic oligonucleotide
  Target: PCSK9; (-) strand; PAM type: NRG; PAM sequence: GGG
ccaaacccccgggtgaggca

SEQ ID NO: 9532 - DNA, 20 bp, Artificial Sequence
  Description of Artificial Sequence: Synthetic oligonucleotide
  Target: PCSK9; (-) strand; PAM type: NRG; PAM sequence: AGG
tccaaacccccgggtgaggc

SEQ ID NO: 9533 - DNA, 20 bp, Artificial Sequence
  Description of Artificial Sequence: Synthetic oligonucleotide
  Target: PCSK9; (-) strand; PAM type: NRG; PAM sequence: CAG
ttccaaacccccgggtgagg

SEQ ID NO: 9534 - DNA, 20 bp, Artificial Sequence
  Description of Artificial Sequence: Synthetic oligonucleotide
  Target: PCSK9; (-) strand; PAM type: NRG; PAM sequence: AGG
atcttccaaacccccgggtg

SEQ ID NO: 9535 - DNA, 20 bp, Artificial Sequence
  Description of Artificial Sequence: Synthetic oligonucleotide
  Target: PCSK9; (-) strand; PAM type: NRG; PAM sequence: GAG
tatcttccaaacccccgggt

SEQ ID NO: 9536 - DNA, 20 bp, Artificial Sequence
  Description of Artificial Sequence: Synthetic oligonucleotide
  Target: PCSK9; (-) strand; PAM type: NRG; PAM sequence: GGG
cctctatcttccaaaccccc

SEQ ID NO: 9537 - DNA, 20 bp, Artificial Sequence
  Description of Artificial Sequence: Synthetic oligonucleotide
  Target: PCSK9; (-) strand; PAM type: NRG; PAM sequence: CGG
ccctctatcttccaaacccc

SEQ ID NO: 9538 - DNA, 20 bp, Artificial Sequence
  Description of Artificial Sequence: Synthetic oligonucleotide
  Target: PCSK9; (-) strand; PAM type: NRG; PAM sequence: AGG
tgagacacagggcccttcct

SEQ ID NO: 9539 - DNA, 20 bp, Artificial Sequence
  Description of Artificial Sequence: Synthetic oligonucleotide
  Target: PCSK9; (-) strand; PAM type: NRG; PAM sequence: TAG
atgagacacagggcccttcc

SEQ ID NO: 9540 - DNA, 20 bp, Artificial Sequence
  Description of Artificial Sequence: Synthetic oligonucleotide
  Target: PCSK9; (-) strand; PAM type: NRG; PAM sequence: GGG
cccagctcggatgagacaca

SEQ ID NO: 9541 - DNA, 20 bp, Artificial Sequence
  Description of Artificial Sequence: Synthetic oligonucleotide
  Target: PCSK9; (-) strand; PAM type: NRG; PAM sequence: AGG
gcccagctcggatgagacac

SEQ ID NO: 9542 - DNA, 20 bp, Artificial Sequence
  Description of Artificial Sequence: Synthetic oligonucleotide
  Target: PCSK9; (-) strand; PAM type: NRG; PAM sequence: CAG
ggcccagctcggatgagaca

SEQ ID NO: 9543 - DNA, 20 bp, Artificial Sequence
  Description of Artificial Sequence: Synthetic oligonucleotide
  Target: PCSK9; (-) strand; PAM type: NRG; PAM sequence: GAG
gaaaggggcccagctcggat

SEQ ID NO: 9544 - DNA, 20 bp, Artificial Sequence
  Description of Artificial Sequence: Synthetic oligonucleotide
  Target: PCSK9; (-) strand; PAM type: NRG; PAM sequence: CGG
ggctggaaaggggcccagct

SEQ ID NO: 9545 - DNA, 20 bp, Artificial Sequence
  Description of Artificial Sequence: Synthetic oligonucleotide
  Target: PCSK9; (-) strand; PAM type: NRG; PAM sequence: CAG
tgagaggctggaaaggggcc

SEQ ID NO: 9546 - DNA, 20 bp, Artificial Sequence
  Description of Artificial Sequence: Synthetic oligonucleotide
  Target: PCSK9; (-) strand; PAM type: NRG; PAM sequence: GGG
tccagtgagaggctggaaag

SEQ ID NO: 9547 - DNA, 20 bp, Artificial Sequence
  Description of Artificial Sequence: Synthetic oligonucleotide
  Target: PCSK9; (-) strand; PAM type: NRG; PAM sequence: GGG
ttccagtgagaggctggaaa

SEQ ID NO: 9548 - DNA, 20 bp, Artificial Sequence
  Description of Artificial Sequence: Synthetic oligonucleotide
  Target: PCSK9; (-) strand; PAM type: NRG; PAM sequence: AGG
cttccagtgagaggctggaa

SEQ ID NO: 9549 - DNA, 20 bp, Artificial Sequence
  Description of Artificial Sequence: Synthetic oligonucleotide
  Target: PCSK9; (-) strand; PAM type: NRG; PAM sequence: AAG
ccttccagtgagaggctgga

SEQ ID NO: 9550 - DNA, 20 bp, Artificial Sequence
  Description of Artificial Sequence: Synthetic oligonucleotide
  Target: PCSK9; (-) strand; PAM type: NRG; PAM sequence: TGG
gcttccttccagtgagaggc

SEQ ID NO: 9551 - DNA, 20 bp, Artificial Sequence
  Description of Artificial Sequence: Synthetic oligonucleotide
  Target: PCSK9; (-) strand; PAM type: NRG; PAM sequence: AGG
ttgggcttccttccagtgag

SEQ ID NO: 9552 - DNA, 20 bp, Artificial Sequence
  Description of Artificial Sequence: Synthetic oligonucleotide
  Target: PCSK9; (-) strand; PAM type: NRG; PAM sequence: GAG
cttgggcttccttccagtga

SEQ ID NO: 9553 - DNA, 20 bp, Artificial Sequence
  Description of Artificial Sequence: Synthetic oligonucleotide
  Target: PCSK9; (-) strand; PAM type: NRG; PAM sequence: GAG
tccttgggcttccttccagt

SEQ ID NO: 9554 - DNA, 20 bp, Artificial Sequence
  Description of Artificial Sequence: Synthetic oligonucleotide
  Target: PCSK9; (-) strand; PAM type: NRG; PAM sequence: CAG
aacatccttgggcttccttc

SEQ ID NO: 9555 - DNA, 20 bp, Artificial Sequence
  Description of Artificial Sequence: Synthetic oligonucleotide
  Target: PCSK9; (-) strand; PAM type: NRG; PAM sequence: GGG
gcccccacaggaacatcctt

SEQ ID NO: 9556 - DNA, 20 bp, Artificial Sequence
  Description of Artificial Sequence: Synthetic oligonucleotide
  Target: PCSK9; (-) strand; PAM type: NRG; PAM sequence: TGG
agcccccacaggaacatcct

SEQ ID NO: 9557 - DNA, 20 bp, Artificial Sequence
  Description of Artificial Sequence: Synthetic oligonucleotide
  Target: PCSK9; (-) strand; PAM type: NRG; PAM sequence: AGG
ggcctggtaaaagcccccac

SEQ ID NO: 9558 - DNA, 20 bp, Artificial Sequence
  Description of Artificial Sequence: Synthetic oligonucleotide
  Target: PCSK9; (-) strand; PAM type: NRG; PAM sequence: CAG
gggcctggtaaaagccccca

SEQ ID NO: 9559 - DNA, 20 bp, Artificial Sequence
  Description of Artificial Sequence: Synthetic oligonucleotide
  Target: PCSK9; (-) strand; PAM type: NRG; PAM sequence: AAG
agggcaggtgggcctggtaa

SEQ ID NO: 9560 - DNA, 20 bp, Artificial Sequence
  Description of Artificial Sequence: Synthetic oligonucleotide
  Target: PCSK9; (-) strand; PAM type: NRG; PAM sequence: TGG
cagcagagggcaggtgggcc

SEQ ID NO: 9561 - DNA, 20 bp, Artificial Sequence
  Description of Artificial Sequence: Synthetic oligonucleotide
  Target: PCSK9; (-) strand; PAM type: NRG; PAM sequence: GGG
atggccagcagagggcaggt

SEQ ID NO: 9562 - DNA, 20 bp, Artificial Sequence
  Description of Artificial Sequence: Synthetic oligonucleotide
  Target: PCSK9; (-) strand; PAM type: NRG; PAM sequence: TGG
catggccagcagagggcagg

SEQ ID NO: 9563 - DNA, 20 bp, Artificial Sequence
  Description of Artificial Sequence: Synthetic oligonucleotide
  Target: PCSK9; (-) strand; PAM type: NRG; PAM sequence: AGG
aagcatggccagcagagggc

SEQ ID NO: 9564 - DNA, 20 bp, Artificial Sequence
  Description of Artificial Sequence: Synthetic oligonucleotide
  Target: PCSK9; (-) strand; PAM type: NRG; PAM sequence: CAG
caagcatggccagcagaggg

SEQ ID NO: 9565 - DNA, 20 bp, Artificial Sequence
  Description of Artificial Sequence: Synthetic oligonucleotide
  Target: PCSK9; (-) strand; PAM type: NRG; PAM sequence: GGG
ctgcaagcatggccagcaga

SEQ ID NO: 9566 - DNA, 20 bp, Artificial Sequence
  Description of Artificial Sequence: Synthetic oligonucleotide
  Target: PCSK9; (-) strand; PAM type: NRG; PAM sequence: AGG
gctgcaagcatggccagcag

SEQ ID NO: 9567 - DNA, 20 bp, Artificial Sequence
  Description of Artificial Sequence: Synthetic oligonucleotide
  Target: PCSK9; (-) strand; PAM type: NRG; PAM sequence: GAG
ggctgcaagcatggccagca

SEQ ID NO: 9568 - DNA, 20 bp, Artificial Sequence
  Description of Artificial Sequence: Synthetic oligonucleotide
  Target: PCSK9; (-) strand; PAM type: NRG; PAM sequence: CAG
gaggctgcaagcatggccag

SEQ ID NO: 9569 - DNA, 20 bp, Artificial Sequence
  Description of Artificial Sequence: Synthetic oligonucleotide
  Target: PCSK9; (-) strand; PAM type: NRG; PAM sequence: CAG
caggaggctgcaagcatggc

SEQ ID NO: 9570 - DNA, 20 bp, Artificial Sequence
  Description of Artificial Sequence: Synthetic oligonucleotide
  Target: PCSK9; (-) strand; PAM type: NRG; PAM sequence: TGG
gggtcaggaggctgcaagca

SEQ ID NO: 9571 - DNA, 20 bp, Artificial Sequence
  Description of Artificial Sequence: Synthetic oligonucleotide
  Target: PCSK9; (-) strand; PAM type: NRG; PAM sequence: AAG
ggacagggtcaggaggctgc

SEQ ID NO: 9572 - DNA, 20 bp, Artificial Sequence
  Description of Artificial Sequence: Synthetic oligonucleotide
  Target: PCSK9; (-) strand; PAM type: NRG; PAM sequence: AGG
cctgctgggacagggtcagg

SEQ ID NO: 9573 - DNA, 20 bp, Artificial Sequence
  Description of Artificial Sequence: Synthetic oligonucleotide
  Target: PCSK9; (-) strand; PAM type: NRG; PAM sequence: GAG
tcctgctgggacagggtcag

SEQ ID NO: 9574 - DNA, 20 bp, Artificial Sequence
  Description of Artificial Sequence: Synthetic oligonucleotide
  Target: PCSK9; (-) strand; PAM type: NRG; PAM sequence: AGG
tgtcctgctgggacagggtc

SEQ ID NO: 9575 - DNA, 20 bp, Artificial Sequence
  Description of Artificial Sequence: Synthetic oligonucleotide
  Target: PCSK9; (-) strand; PAM type: NRG; PAM sequence: CAG
ctgtcctgctgggacagggt

SEQ ID NO: 9576 - DNA, 20 bp, Artificial Sequence
  Description of Artificial Sequence: Synthetic oligonucleotide
  Target: PCSK9; (-) strand; PAM type: NRG; PAM sequence: GGG
cccactgtcctgctgggaca

SEQ ID NO: 9577 - DNA, 20 bp, Artificial Sequence
  Description of Artificial Sequence: Synthetic oligonucleotide
  Target: PCSK9; (-) strand; PAM type: NRG; PAM sequence: AGG
gcccactgtcctgctgggac

SEQ ID NO: 9578 - DNA, 20 bp, Artificial Sequence
  Description of Artificial Sequence: Synthetic oligonucleotide
  Target: PCSK9; (-) strand; PAM type: NRG; PAM sequence: CAG
agcccactgtcctgctggga

SEQ ID NO: 9579 - DNA, 20 bp, Artificial Sequence
  Description of Artificial Sequence: Synthetic oligonucleotide
  Target: PCSK9; (-) strand; PAM type: NRG; PAM sequence: GGG
caccagcccactgtcctgct

SEQ ID NO: 9580 - DNA, 20 bp, Artificial Sequence
  Description of Artificial Sequence: Synthetic oligonucleotide
  Target: PCSK9; (-) strand; PAM type: NRG; PAM sequence: TGG
acaccagcccactgtcctgc

SEQ ID NO: 9581 - DNA, 20 bp, Artificial Sequence
  Description of Artificial Sequence: Synthetic oligonucleotide
  Target: PCSK9; (-) strand; PAM type: NRG; PAM sequence: CAG
cggttcctgcccgctcacac

SEQ ID NO: 9582 - DNA, 20 bp, Artificial Sequence
  Description of Artificial Sequence: Synthetic oligonucleotide
  Target: PCSK9; (-) strand; PAM type: NRG; PAM sequence: CGG
ccacaccttctaagtgcagg

SEQ ID NO: 9583 - DNA, 20 bp, Artificial Sequence
  Description of Artificial Sequence: Synthetic oligonucleotide
  Target: PCSK9; (-) strand; PAM type: NRG; PAM sequence: AGG
gccccacaccttctaagtgc

SEQ ID NO: 9584 - DNA, 20 bp, Artificial Sequence
  Description of Artificial Sequence: Synthetic oligonucleotide
  Target: PCSK9; (-) strand; PAM type: NRG; PAM sequence: CAG
agccccacaccttctaagtg

SEQ ID NO: 9585 - DNA, 20 bp, Artificial Sequence
  Description of Artificial Sequence: Synthetic oligonucleotide
  Target: PCSK9; (-) strand; PAM type: NRG; PAM sequence: AAG
gaggcagccccacaccttct

SEQ ID NO: 9586 - DNA, 20 bp, Artificial Sequence
  Description of Artificial Sequence: Synthetic oligonucleotide
  Target: PCSK9; (-) strand; PAM type: NRG; PAM sequence: CAG
cagatggaagctcggggagg

SEQ ID NO: 9587 - DNA, 20 bp, Artificial Sequence
  Description of Artificial Sequence: Synthetic oligonucleotide
  Target: PCSK9; (-) strand; PAM type: NRG; PAM sequence: AGG
cggcagatggaagctcgggg

SEQ ID NO: 9588 - DNA, 20 bp, Artificial Sequence
  Description of Artificial Sequence: Synthetic oligonucleotide
  Target: PCSK9; (-) strand; PAM type: NRG; PAM sequence: GAG
gcggcagatggaagctcggg

SEQ ID NO: 9589 - DNA, 20 bp, Artificial Sequence
  Description of Artificial Sequence: Synthetic oligonucleotide
  Target: PCSK9; (-) strand; PAM type: NRG; PAM sequence: GGG
cagcggcagatggaagctcg

SEQ ID NO: 9590 - DNA, 20 bp, Artificial Sequence
  Description of Artificial Sequence: Synthetic oligonucleotide
  Target: PCSK9; (-) strand; PAM type: NRG; PAM sequence: GGG
ccagcggcagatggaagctc

SEQ ID NO: 9591 - DNA, 20 bp, Artificial Sequence
  Description of Artificial Sequence: Synthetic oligonucleotide
  Target: PCSK9; (-) strand; PAM type: NRG; PAM sequence: CGG
cccagcggcagatggaagct

SEQ ID NO: 9592 - DNA, 20 bp, Artificial Sequence
  Description of Artificial Sequence: Synthetic oligonucleotide
  Target: PCSK9; (-) strand; PAM type: NRG; PAM sequence: AAG
gtggccccagcggcagatgg

SEQ ID NO: 9593 - DNA, 20 bp, Artificial Sequence
  Description of Artificial Sequence: Synthetic oligonucleotide
  Target: PCSK9; (-) strand; PAM type: NRG; PAM sequence: TGG
ggtgtggccccagcggcaga

SEQ ID NO: 9594 - DNA, 20 bp, Artificial Sequence
  Description of Artificial Sequence: Synthetic oligonucleotide
  Target: PCSK9; (-) strand; PAM type: NRG; PAM sequence: CAG
ctggggtgtggccccagcgg

SEQ ID NO: 9595 - DNA, 20 bp, Artificial Sequence
  Description of Artificial Sequence: Synthetic oligonucleotide
  Target: PCSK9; (-) strand; PAM type: NRG; PAM sequence: CGG
ggcctggggtgtggccccag

SEQ ID NO: 9596 - DNA, 20 bp, Artificial Sequence
  Description of Artificial Sequence: Synthetic oligonucleotide
  Target: PCSK9; (-) strand; PAM type: NRG; PAM sequence: CAG
ctgggcctggggtgtggccc

SEQ ID NO: 9597 - DNA, 20 bp, Artificial Sequence
  Description of Artificial Sequence: Synthetic oligonucleotide
  Target: PCSK9; (-) strand; PAM type: NRG; PAM sequence: TGG
ccatccctgggcctggggtg

SEQ ID NO: 9598 - DNA, 20 bp, Artificial Sequence
  Description of Artificial Sequence: Synthetic oligonucleotide
  Target: PCSK9; (-) strand; PAM type: NRG; PAM sequence: GGG
gggtcccatccctgggcctg

SEQ ID NO: 9599 - DNA, 20 bp, Artificial Sequence
  Description of Artificial Sequence: Synthetic oligonucleotide
  Target: PCSK9; (-) strand; PAM type: NRG; PAM sequence: GGG
ggggtcccatccctgggcct

SEQ ID NO: 9600 - DNA, 20 bp, Artificial Sequence
  Description of Artificial Sequence: Synthetic oligonucleotide
  Target: PCSK9; (-) strand; PAM type: NRG; PAM sequence: TGG
tggggtcccatccctgggcc

SEQ ID NO: 9601 - DNA, 20 bp, Artificial Sequence
  Description of Artificial Sequence: Synthetic oligonucleotide
  Target: PCSK9; (-) strand; PAM type: NRG; PAM sequence: GGG
cactgtggggtcccatccct

SEQ ID NO: 9602 - DNA, 20 bp, Artificial Sequence
  Description of Artificial Sequence: Synthetic oligonucleotide
  Target: PCSK9; (-) strand; PAM type: NRG; PAM sequence: TGG
ccactgtggggtcccatccc

SEQ ID NO: 9603 - DNA, 20 bp, Artificial Sequence
  Description of Artificial Sequence: Synthetic oligonucleotide
  Target: PCSK9; (-) strand; PAM type: NRG; PAM sequence: GGG
aagatgatgtgaccactgtg

SEQ ID NO: 9604 - DNA, 20 bp, Artificial Sequence
  Description of Artificial Sequence: Synthetic oligonucleotide
  Target: PCSK9; (-) strand; PAM type: NRG; PAM sequence: GGG
caagatgatgtgaccactgt

SEQ ID NO: 9605 - DNA, 20 bp, Artificial Sequence
  Description of Artificial Sequence: Synthetic oligonucleotide
  Target: PCSK9; (-) strand; PAM type: NRG; PAM sequence: TGG
gcaagatgatgtgaccactg

SEQ ID NO: 9606 - DNA, 20 bp, Artificial Sequence
  Description of Artificial Sequence: Synthetic oligonucleotide
  Target: PCSK9; (-) strand; PAM type: NRG; PAM sequence: AAG
ctgtacctgggttctgctgc

SEQ ID NO: 9607 - DNA, 20 bp, Artificial Sequence
  Description of Artificial Sequence: Synthetic oligonucleotide
  Target: PCSK9; (-) strand; PAM type: NRG; PAM sequence: GGG
ctgctccaggagctgtacct

SEQ ID NO: 9608 - DNA, 20 bp, Artificial Sequence
  Description of Artificial Sequence: Synthetic oligonucleotide
  Target: PCSK9; (-) strand; PAM type: NRG; PAM sequence: TGG
tctgctccaggagctgtacc

SEQ ID NO: 9609 - DNA, 20 bp, Artificial Sequence
  Description of Artificial Sequence: Synthetic oligonucleotide
  Target: PCSK9; (-) strand; PAM type: NRG; PAM sequence: GAG
gggaccaccatctgctccag

SEQ ID NO: 9610 - DNA, 20 bp, Artificial Sequence
  Description of Artificial Sequence: Synthetic oligonucleotide
  Target: PCSK9; (-) strand; PAM type: NRG; PAM sequence: AGG
ttgggaccaccatctgctcc

SEQ ID NO: 9611 - DNA, 20 bp, Artificial Sequence
  Description of Artificial Sequence: Synthetic oligonucleotide
  Target: PCSK9; (-) strand; PAM type: NRG; PAM sequence: CAG
cttgggaccaccatctgctc

SEQ ID NO: 9612 - DNA, 20 bp, Artificial Sequence
  Description of Artificial Sequence: Synthetic oligonucleotide
  Target: PCSK9; (-) strand; PAM type: NRG; PAM sequence: GGG
ttctggtcccacccgtgctt

SEQ ID NO: 9613 - DNA, 20 bp, Artificial Sequence
  Description of Artificial Sequence: Synthetic oligonucleotide
  Target: PCSK9; (-) strand; PAM type: NRG; PAM sequence: TGG
tttctggtcccacccgtgct

SEQ ID NO: 9614 - DNA, 20 bp, Artificial Sequence
  Description of Artificial Sequence: Synthetic oligonucleotide
  Target: PCSK9; (-) strand; PAM type: NRG; PAM sequence: TGG
gcccaggtgagagtcctttc

SEQ ID NO: 9615 - DNA, 20 bp, Artificial Sequence
  Description of Artificial Sequence: Synthetic oligonucleotide
  Target: PCSK9; (-) strand; PAM type: NRG; PAM sequence: GAG
agctgagttagcccaggtga

SEQ ID NO: 9616 - DNA, 20 bp, Artificial Sequence
  Description of Artificial Sequence: Synthetic oligonucleotide
  Target: PCSK9; (-) strand; PAM type: NRG; PAM sequence: GAG
gcagctgagttagcccaggt

SEQ ID NO: 9617 - DNA, 20 bp, Artificial Sequence
  Description of Artificial Sequence: Synthetic oligonucleotide
  Target: PCSK9; (-) strand; PAM type: NRG; PAM sequence: AGG
ggctgcagctgagttagccc

SEQ ID NO: 9618 - DNA, 20 bp, Artificial Sequence
  Description of Artificial Sequence: Synthetic oligonucleotide
  Target: PCSK9; (-) strand; PAM type: NRG; PAM sequence: CAG
aggctgcagctgagttagcc

SEQ ID NO: 9619 - DNA, 20 bp, Artificial Sequence
  Description of Artificial Sequence: Synthetic oligonucleotide
  Target: PCSK9; (-) strand; PAM type: NRG; PAM sequence: TAG
aactgaggctgcagctgagt

SEQ ID NO: 9620 - DNA, 20 bp, Artificial Sequence
  Description of Artificial Sequence: Synthetic oligonucleotide
  Target: PCSK9; (-) strand; PAM type: NRG; PAM sequence: GAG
agggaactgaggctgcagct

SEQ ID NO: 9621 - DNA, 20 bp, Artificial Sequence
  Description of Artificial Sequence: Synthetic oligonucleotide
  Target: PCSK9; (-) strand; PAM type: NRG; PAM sequence: CAG
tgaggagggaactgaggctg

SEQ ID NO: 9622 - DNA, 20 bp, Artificial Sequence
  Description of Artificial Sequence: Synthetic oligonucleotide
  Target: PCSK9; (-) strand; PAM type: NRG; PAM sequence: AGG
cgtgtgtgaggagggaactg

SEQ ID NO: 9623 - DNA, 20 bp, Artificial Sequence
  Description of Artificial Sequence: Synthetic oligonucleotide
  Target: PCSK9; (-) strand; PAM type: NRG; PAM sequence: GAG
tcgtgtgtgaggagggaact

SEQ ID NO: 9624 - DNA, 20 bp, Artificial Sequence
  Description of Artificial Sequence: Synthetic oligonucleotide
  Target: PCSK9; (-) strand; PAM type: NRG; PAM sequence: GGG
ttcctcgtcgtgtgtgagga

SEQ ID NO: 9625 - DNA, 20 bp, Artificial Sequence
  Description of Artificial Sequence: Synthetic oligonucleotide
  Target: PCSK9; (-) strand; PAM type: NRG; PAM sequence: AGG
gttcctcgtcgtgtgtgagg

SEQ ID NO: 9626 - DNA, 20 bp, Artificial Sequence
  Description of Artificial Sequence: Synthetic oligonucleotide
  Target: PCSK9; (-) strand; PAM type: NRG; PAM sequence: GAG
tgttcctcgtcgtgtgtgag

SEQ ID NO: 9627 - DNA, 20 bp, Artificial Sequence
  Description of Artificial Sequence: Synthetic oligonucleotide
  Target: PCSK9; (-) strand; PAM type: NRG; PAM sequence: AGG
catgttcctcgtcgtgtgtg

SEQ ID NO: 9628 - DNA, 20 bp, Artificial Sequence
  Description of Artificial Sequence: Synthetic oligonucleotide
  Target: PCSK9; (-) strand; PAM type: NRG; PAM sequence: GAG
ccatgttcctcgtcgtgtgt

SEQ ID NO: 9629 - DNA, 20 bp, Artificial Sequence
  Description of Artificial Sequence: Synthetic oligonucleotide
  Target: PCSK9; (-) strand; PAM type: NRG; PAM sequence: CAG
aggcctgctgggcaggcttc

SEQ ID NO: 9630 - DNA, 20 bp, Artificial Sequence
  Description of Artificial Sequence: Synthetic oligonucleotide
  Target: PCSK9; (-) strand; PAM type: NRG; PAM sequence: AGG
gagcagaaggcctgctgggc

SEQ ID NO: 9631 - DNA, 20 bp, Artificial Sequence
  Description of Artificial Sequence: Synthetic oligonucleotide
  Target: PCSK9; (-) strand; PAM type: NRG; PAM sequence: CAG
cgagcagaaggcctgctggg

SEQ ID NO: 9632 - DNA, 20 bp, Artificial Sequence
  Description of Artificial Sequence: Synthetic oligonucleotide
  Target: PCSK9; (-) strand; PAM type: NRG; PAM sequence: GGG
catcgagcagaaggcctgct

SEQ ID NO: 9633 - DNA, 20 bp, Artificial Sequence
  Description of Artificial Sequence: Synthetic oligonucleotide
  Target: PCSK9; (-) strand; PAM type: NRG; PAM sequence: TGG
acatcgagcagaaggcctgc

SEQ ID NO: 9634 - DNA, 20 bp, Artificial Sequence
  Description of Artificial Sequence: Synthetic oligonucleotide
  Target: PCSK9; (-) strand; PAM type: NRG; PAM sequence: AGG
cacaacgcacatcgagcaga

SEQ ID NO: 9635 - DNA, 20 bp, Artificial Sequence
  Description of Artificial Sequence: Synthetic oligonucleotide
  Target: PCSK9; (-) strand; PAM type: NRG; PAM sequence: AAG
acacaacgcacatcgagcag

SEQ ID NO: 9636 - DNA, 20 bp, Artificial Sequence
  Description of Artificial Sequence: Synthetic oligonucleotide
  Target: PCSK9; (-) strand; PAM type: NRG; PAM sequence: CAG
gccacacaacgcacatcgag

SEQ ID NO: 9637 - DNA, 20 bp, Artificial Sequence
  Description of Artificial Sequence: Synthetic oligonucleotide
  Target: PCSK9; (-) strand; PAM type: NRG; PAM sequence: GAG
taagccacacaacgcacatc

SEQ ID NO: 9638 - DNA, 20 bp, Artificial Sequence
  Description of Artificial Sequence: Synthetic oligonucleotide
  Target: PCSK9; (-) strand; PAM type: NRG; PAM sequence: AAG
ctgcttccctccctggacgt

SEQ ID NO: 9639 - DNA, 20 bp, Artificial Sequence
  Description of Artificial Sequence: Synthetic oligonucleotide
  Target: PCSK9; (-) strand; PAM type: NRG; PAM sequence: TGG
acagaggctgcttccctccc

SEQ ID NO: 9640 - DNA, 20 bp, Artificial Sequence
  Description of Artificial Sequence: Synthetic oligonucleotide
  Target: PCSK9; (-) strand; PAM type: NRG; PAM sequence: AGG
ttatctagaagacagcacag

SEQ ID NO: 9641 - DNA, 20 bp, Artificial Sequence
  Description of Artificial Sequence: Synthetic oligonucleotide
  Target: PCSK9; (-) strand; PAM type: NRG; PAM sequence: GAG
cttatctagaagacagcaca

SEQ ID NO: 9642 - DNA, 20 bp, Artificial Sequence
  Description of Artificial Sequence: Synthetic oligonucleotide
  Target: PCSK9; (-) strand; PAM type: NRG; PAM sequence: CAG
ggcttatctagaagacagca

SEQ ID NO: 9643 - DNA, 20 bp, Artificial Sequence
  Description of Artificial Sequence: Synthetic oligonucleotide
  Target: PCSK9; (-) strand; PAM type: NRG; PAM sequence: CAG
atacaggcttatctagaaga

SEQ ID NO: 9644 - DNA, 20 bp, Artificial Sequence
  Description of Artificial Sequence: Synthetic oligonucleotide
  Target: PCSK9; (-) strand; PAM type: NRG; PAM sequence: AAG
gggaatacaggcttatctag

SEQ ID NO: 9645 - DNA, 20 bp, Artificial Sequence
  Description of Artificial Sequence: Synthetic oligonucleotide
  Target: PCSK9; (-) strand; PAM type: NRG; PAM sequence: TAG
ccggggaatacaggcttatc

SEQ ID NO: 9646 - DNA, 20 bp, Artificial Sequence
  Description of Artificial Sequence: Synthetic oligonucleotide
  Target: PCSK9; (-) strand; PAM type: NRG; PAM sequence: AGG
gcagacagcccggggaatac

SEQ ID NO: 9647 - DNA, 20 bp, Artificial Sequence
  Description of Artificial Sequence: Synthetic oligonucleotide
  Target: PCSK9; (-) strand; PAM type: NRG; PAM sequence: CAG
ggcagacagcccggggaata

SEQ ID NO: 9648 - DNA, 20 bp, Artificial Sequence
  Description of Artificial Sequence: Synthetic oligonucleotide
  Target: PCSK9; (-) strand; PAM type: NRG; PAM sequence: GGG
atacattggcagacagcccg

SEQ ID NO: 9649 - DNA, 20 bp, Artificial Sequence
  Description of Artificial Sequence: Synthetic oligonucleotide
  Target: PCSK9; (-) strand; PAM type: NRG; PAM sequence: GGG
gatacattggcagacagccc

SEQ ID NO: 9650 - DNA, 20 bp, Artificial Sequence
  Description of Artificial Sequence: Synthetic oligonucleotide
  Target: PCSK9; (-) strand; PAM type: NRG; PAM sequence: CGG
ggatacattggcagacagcc

SEQ ID NO: 9651 - DNA, 20 bp, Artificial Sequence
  Description of Artificial Sequence: Synthetic oligonucleotide
  Target: PCSK9; (-) strand; PAM type: NRG; PAM sequence: CAG
caactggatacattggcaga

SEQ ID NO: 9652 - DNA, 20 bp, Artificial Sequence
  Description of Artificial Sequence: Synthetic oligonucleotide
  Target: PCSK9; (-) strand; PAM type: NRG; PAM sequence: CAG
gggacaactggatacattgg

SEQ ID NO: 9653 - DNA, 20 bp, Artificial Sequence
  Description of Artificial Sequence: Synthetic oligonucleotide
  Target: PCSK9; (-) strand; PAM type: NRG; PAM sequence: TGG
gacgggacaactggatacat

SEQ ID NO: 9654 - DNA, 20 bp, Artificial Sequence
  Description of Artificial Sequence: Synthetic oligonucleotide
  Target: PCSK9; (-) strand; PAM type: NRG; PAM sequence: TGG
ttccaggctgacgggacaac

SEQ ID NO: 9655 - DNA, 20 bp, Artificial Sequence
  Description of Artificial Sequence: Synthetic oligonucleotide
  Target: PCSK9; (-) strand; PAM type: NRG; PAM sequence: GGG
ctcagagcttccaggctgac

SEQ ID NO: 9656 - DNA, 20 bp, Artificial Sequence
  Description of Artificial Sequence: Synthetic oligonucleotide
  Target: PCSK9; (-) strand; PAM type: NRG; PAM sequence: CGG
cctcagagcttccaggctga

SEQ ID NO: 9657 - DNA, 20 bp, Artificial Sequence
  Description of Artificial Sequence: Synthetic oligonucleotide
  Target: PCSK9; (-) strand; PAM type: NRG; PAM sequence: AGG
ggttttccctcagagcttcc

SEQ ID NO: 9658 - DNA, 20 bp, Artificial Sequence
  Description of Artificial Sequence: Synthetic oligonucleotide
  Target: PCSK9; (-) strand; PAM type: NRG; PAM sequence: CAG
aggttttccctcagagcttc

SEQ ID NO: 9659 - DNA, 20 bp, Artificial Sequence
  Description of Artificial Sequence: Synthetic oligonucleotide
  Target: PCSK9; (-) strand; PAM type: NRG; PAM sequence: GAG
cagcccaaggttttccctca

SEQ ID NO: 9660 - DNA, 20 bp, Artificial Sequence
  Description of Artificial Sequence: Synthetic oligonucleotide
  Target: PCSK9; (-) strand; PAM type: NRG; PAM sequence: CAG
agcagcccaaggttttccct

SEQ ID NO: 9661 - DNA, 20 bp, Artificial Sequence
  Description of Artificial Sequence: Synthetic oligonucleotide
  Target: PCSK9; (-) strand; PAM type: NRG; PAM sequence: AGG
ggtgctcaggaagcagccca

SEQ ID NO: 9662 - DNA, 20 bp, Artificial Sequence
  Description of Artificial Sequence: Synthetic oligonucleotide
  Target: PCSK9; (-) strand; PAM type: NRG; PAM sequence: AAG
aggtgctcaggaagcagccc

SEQ ID NO: 9663 - DNA, 20 bp, Artificial Sequence
  Description of Artificial Sequence: Synthetic oligonucleotide
  Target: PCSK9; (-) strand; PAM type: NRG; PAM sequence: CAG
ggatacaggtgctcaggaag

SEQ ID NO: 9664 - DNA, 20 bp, Artificial Sequence
  Description of Artificial Sequence: Synthetic oligonucleotide
  Target: PCSK9; (-) strand; PAM type: NRG; PAM sequence: AAG
aggggatacaggtgctcagg

SEQ ID NO: 9665 - DNA, 20 bp, Artificial Sequence
  Description of Artificial Sequence: Synthetic oligonucleotide
  Target: PCSK9; (-) strand; PAM type: NRG; PAM sequence: AGG
tgcaggggatacaggtgctc

SEQ ID NO: 9666 - DNA, 20 bp, Artificial Sequence
  Description of Artificial Sequence: Synthetic oligonucleotide
  Target: PCSK9; (-) strand; PAM type: NRG; PAM sequence: CAG
ctgcaggggatacaggtgct

SEQ ID NO: 9667 - DNA, 20 bp, Artificial Sequence
  Description of Artificial Sequence: Synthetic oligonucleotide
  Target: PCSK9; (-) strand; PAM type: NRG; PAM sequence: AGG
gggctggctgcaggggatac

SEQ ID NO: 9668 - DNA, 20 bp, Artificial Sequence
  Description of Artificial Sequence: Synthetic oligonucleotide
  Target: PCSK9; (-) strand; PAM type: NRG; PAM sequence: CAG
cgggctggctgcaggggata

SEQ ID NO: 9669 - DNA, 20 bp, Artificial Sequence
  Description of Artificial Sequence: Synthetic oligonucleotide
  Target: PCSK9; (-) strand; PAM type: NRG; PAM sequence: GGG
aggccccgggctggctgcag

SEQ ID NO: 9670 - DNA, 20 bp, Artificial Sequence
  Description of Artificial Sequence: Synthetic oligonucleotide
  Target: PCSK9; (-) strand; PAM type: NRG; PAM sequence: GGG
gaggccccgggctggctgca

SEQ ID NO: 9671 - DNA, 20 bp, Artificial Sequence
  Description of Artificial Sequence: Synthetic oligonucleotide
  Target: PCSK9; (-) strand; PAM type: NRG; PAM sequence: AGG
agaggccccgggctggctgc

SEQ ID NO: 9672 - DNA, 20 bp, Artificial Sequence
  Description of Artificial Sequence: Synthetic oligonucleotide
  Target: PCSK9; (-) strand; PAM type: NRG; PAM sequence: CAG
cagaggccccgggctggctg

SEQ ID NO: 9673 - DNA, 20 bp, Artificial Sequence
  Description of Artificial Sequence: Synthetic oligonucleotide
  Target: PCSK9; (-) strand; PAM type: NRG; PAM sequence: TGG
tcctagcagaggccccgggc

SEQ ID NO: 9674 - DNA, 20 bp, Artificial Sequence
  Description of Artificial Sequence: Synthetic oligonucleotide
  Target: PCSK9; (-) strand; PAM type: NRG; PAM sequence: GGG
ctgctcctagcagaggcccc

SEQ ID NO: 9675 - DNA, 20 bp, Artificial Sequence
  Description of Artificial Sequence: Synthetic oligonucleotide
  Target: PCSK9; (-) strand; PAM type: NRG; PAM sequence: CGG
tctgctcctagcagaggccc

SEQ ID NO: 9676 - DNA, 20 bp, Artificial Sequence
  Description of Artificial Sequence: Synthetic oligonucleotide
  Target: PCSK9; (-) strand; PAM type: NRG; PAM sequence: AGG
gctcagtctgctcctagcag

SEQ ID NO: 9677 - DNA, 20 bp, Artificial Sequence
  Description of Artificial Sequence: Synthetic oligonucleotide
  Target: PCSK9; (-) strand; PAM type: NRG; PAM sequence: GAG
tgctcagtctgctcctagca

SEQ ID NO: 9678 - DNA, 20 bp, Artificial Sequence
  Description of Artificial Sequence: Synthetic oligonucleotide
  Target: PCSK9; (-) strand; PAM type: NRG; PAM sequence: CAG
catgctcagtctgctcctag

SEQ ID NO: 9679 - DNA, 20 bp, Artificial Sequence
  Description of Artificial Sequence: Synthetic oligonucleotide
  Target: PCSK9; (-) strand; PAM type: NRG; PAM sequence: TAG
agccatgctcagtctgctcc

SEQ ID NO: 9680 - DNA, 20 bp, Artificial Sequence
  Description of Artificial Sequence: Synthetic oligonucleotide
  Target: PCSK9; (-) strand; PAM type: NRG; PAM sequence: CAG
ccaggcccataagccatgct

SEQ ID NO: 9681 - DNA, 20 bp, Artificial Sequence
  Description of Artificial Sequence: Synthetic oligonucleotide
  Target: PCSK9; (-) strand; PAM type: NRG; PAM sequence: AAG
ccagatggtgccaggcccat

SEQ ID NO: 9682 - DNA, 20 bp, Artificial Sequence
  Description of Artificial Sequence: Synthetic oligonucleotide
  Target: PCSK9; (-) strand; PAM type: NRG; PAM sequence: AGG
ggcagaggccagatggtgcc

SEQ ID NO: 9683 - DNA, 20 bp, Artificial Sequence
  Description of Artificial Sequence: Synthetic oligonucleotide
  Target: PCSK9; (-) strand; PAM type: NRG; PAM sequence: CAG
gggcagaggccagatggtgc

SEQ ID NO: 9684 - DNA, 20 bp, Artificial Sequence
  Description of Artificial Sequence: Synthetic oligonucleotide
  Target: PCSK9; (-) strand; PAM type: NRG; PAM sequence: TGG
caaggtgggcagaggccaga

SEQ ID NO: 9685 - DNA, 20 bp, Artificial Sequence
  Description of Artificial Sequence: Synthetic oligonucleotide
  Target: PCSK9; (-) strand; PAM type: NRG; PAM sequence: CAG
ccagcaaggtgggcagaggc

SEQ ID NO: 9686 - DNA, 20 bp, Artificial Sequence
  Description of Artificial Sequence: Synthetic oligonucleotide
  Target: PCSK9; (-) strand; PAM type: NRG; PAM sequence: AGG
aaggccagcaaggtgggcag

SEQ ID NO: 9687 - DNA, 20 bp, Artificial Sequence
  Description of Artificial Sequence: Synthetic oligonucleotide
  Target: PCSK9; (-) strand; PAM type: NRG; PAM sequence: GAG
caaggccagcaaggtgggca

SEQ ID NO: 9688 - DNA, 20 bp, Artificial Sequence
  Description of Artificial Sequence: Synthetic oligonucleotide
  Target: PCSK9; (-) strand; PAM type: NRG; PAM sequence: CAG
gacaaggccagcaaggtggg

SEQ ID NO: 9689 - DNA, 20 bp, Artificial Sequence
  Description of Artificial Sequence: Synthetic oligonucleotide
  Target: PCSK9; (-) strand; PAM type: NRG; PAM sequence: GGG
caagacaaggccagcaaggt

SEQ ID NO: 9690 - DNA, 20 bp, Artificial Sequence
  Description of Artificial Sequence: Synthetic oligonucleotide
  Target: PCSK9; (-) strand; PAM type: NRG; PAM sequence: TGG
acaagacaaggccagcaagg

SEQ ID NO: 9691 - DNA, 20 bp, Artificial Sequence
  Description of Artificial Sequence: Synthetic oligonucleotide
  Target: PCSK9; (-) strand; PAM type: NRG; PAM sequence: AGG
gacacaagacaaggccagca

SEQ ID NO: 9692 - DNA, 20 bp, Artificial Sequence
  Description of Artificial Sequence: Synthetic oligonucleotide
  Target: PCSK9; (-) strand; PAM type: NRG; PAM sequence: AAG
agacacaagacaaggccagc

SEQ ID NO: 9693 - DNA, 20 bp, Artificial Sequence
  Description of Artificial Sequence: Synthetic oligonucleotide
  Target: PCSK9; (-) strand; PAM type: NRG; PAM sequence: CAG
gggcagacacaagacaaggc

SEQ ID NO: 9694 - DNA, 20 bp, Artificial Sequence
  Description of Artificial Sequence: Synthetic oligonucleotide
  Target: PCSK9; (-) strand; PAM type: NRG; PAM sequence: AGG
gaaggggcagacacaagaca

SEQ ID NO: 9695 - DNA, 20 bp, Artificial Sequence
  Description of Artificial Sequence: Synthetic oligonucleotide
  Target: PCSK9; (-) strand; PAM type: NRG; PAM sequence: AAG
cgaaggggcagacacaagac

SEQ ID NO: 9696 - DNA, 20 bp, Artificial Sequence
  Description of Artificial Sequence: Synthetic oligonucleotide
  Target: PCSK9; (-) strand; PAM type: NRG; PAM sequence: AAG
aatgtcgaaggggcagacac

SEQ ID NO: 9697 - DNA, 20 bp, Artificial Sequence
  Description of Artificial Sequence: Synthetic oligonucleotide
  Target: PCSK9; (-) strand; PAM type: NRG; PAM sequence: CAG
gctatggaatgtcgaagggg

SEQ ID NO: 9698 - DNA, 20 bp, Artificial Sequence
  Description of Artificial Sequence: Synthetic oligonucleotide
  Target: PCSK9; (-) strand; PAM type: NRG; PAM sequence: GGG
tgggctatggaatgtcgaag

SEQ ID NO: 9699 - DNA, 20 bp, Artificial Sequence
  Description of Artificial Sequence: Synthetic oligonucleotide
  Target: PCSK9; (-) strand; PAM type: NRG; PAM sequence: GGG
ctgggctatggaatgtcgaa

SEQ ID NO: 9700 - DNA, 20 bp, Artificial Sequence
  Description of Artificial Sequence: Synthetic oligonucleotide
  Target: PCSK9; (-) strand; PAM type: NRG; PAM sequence: AGG
gctgggctatggaatgtcga

SEQ ID NO: 9701 - DNA, 20 bp, Artificial Sequence
  Description of Artificial Sequence: Synthetic oligonucleotide
  Target: PCSK9; (-) strand; PAM type: NRG; PAM sequence: AAG
agctgggctatggaatgtcg

SEQ ID NO: 9702 - DNA, 20 bp, Artificial Sequence
  Description of Artificial Sequence: Synthetic oligonucleotide
  Target: PCSK9; (-) strand; PAM type: NRG; PAM sequence: TGG
ctagatattgagctgggcta

SEQ ID NO: 9703 - DNA, 20 bp, Artificial Sequence
  Description of Artificial Sequence: Synthetic oligonucleotide
  Target: PCSK9; (-) strand; PAM type: NRG; PAM sequence: GGG
gaaccactagatattgagct

SEQ ID NO: 9704 - DNA, 20 bp, Artificial Sequence
  Description of Artificial Sequence: Synthetic oligonucleotide
  Target: PCSK9; (-) strand; PAM type: NRG; PAM sequence: TGG
ggaaccactagatattgagc

SEQ ID NO: 9705 - DNA, 20 bp, Artificial Sequence
  Description of Artificial Sequence: Synthetic oligonucleotide
  Target: PCSK9; (-) strand; PAM type: NRG; PAM sequence: GAG
tagaggaaccactagatatt

SEQ ID NO: 9706 - DNA, 20 bp, Artificial Sequence
  Description of Artificial Sequence: Synthetic oligonucleotide
  Target: PCSK9; (-) strand; PAM type: NRG; PAM sequence: TAG
cgccaccctagaggaaccac

SEQ ID NO: 9707 - DNA, 20 bp, Artificial Sequence
  Description of Artificial Sequence: Synthetic oligonucleotide
  Target: PCSK9; (-) strand; PAM type: NRG; PAM sequence: AGG
aacagtgctcgccaccctag

SEQ ID NO: 9708 - DNA, 20 bp, Artificial Sequence
  Description of Artificial Sequence: Synthetic oligonucleotide
  Target: PCSK9; (-) strand; PAM type: NRG; PAM sequence: GAG
aaacagtgctcgccacccta

SEQ ID NO: 9709 - DNA, 20 bp, Artificial Sequence
  Description of Artificial Sequence: Synthetic oligonucleotide
  Target: PCSK9; (-) strand; PAM type: NRG; PAM sequence: TAG
ccaaacagtgctcgccaccc

SEQ ID NO: 9710 - DNA, 20 bp, Artificial Sequence
  Description of Artificial Sequence: Synthetic oligonucleotide
  Target: PCSK9; (-) strand; PAM type: NRG; PAM sequence: CAG
gaagacatctggagaccaaa

SEQ ID NO: 9711 - DNA, 20 bp, Artificial Sequence
  Description of Artificial Sequence: Synthetic oligonucleotide
  Target: PCSK9; (-) strand; PAM type: NRG; PAM sequence: GAG
ctccgacctgaagacatctg

SEQ ID NO: 9712 - DNA, 20 bp, Artificial Sequence
  Description of Artificial Sequence: Synthetic oligonucleotide
  Target: PCSK9; (-) strand; PAM type: NRG; PAM sequence: TGG
agctccgacctgaagacatc

SEQ ID NO: 9713 - DNA, 20 bp, Artificial Sequence
  Description of Artificial Sequence: Synthetic oligonucleotide
  Target: PCSK9; (-) strand; PAM type: NRG; PAM sequence: AAG
gcgctgtgagctccgacctg

SEQ ID NO: 9714 - DNA, 20 bp, Artificial Sequence
  Description of Artificial Sequence: Synthetic oligonucleotide
  Target: PCSK9; (-) strand; PAM type: NRG; PAM sequence: GAG
ggggtggctgagagcgctgt

SEQ ID NO: 9715 - DNA, 20 bp, Artificial Sequence
  Description of Artificial Sequence: Synthetic oligonucleotide
  Target: PCSK9; (-) strand; PAM type: NRG; PAM sequence: GAG
cactgggaaggggtggctga

SEQ ID NO: 9716 - DNA, 20 bp, Artificial Sequence
  Description of Artificial Sequence: Synthetic oligonucleotide
  Target: PCSK9; (-) strand; PAM type: NRG; PAM sequence: GAG
tacactgggaaggggtggct

SEQ ID NO: 9717 - DNA, 20 bp, Artificial Sequence
  Description of Artificial Sequence: Synthetic oligonucleotide
  Target: PCSK9; (-) strand; PAM type: NRG; PAM sequence: TGG
ggtgctacactgggaagggg

SEQ ID NO: 9718 - DNA, 20 bp, Artificial Sequence
  Description of Artificial Sequence: Synthetic oligonucleotide
  Target: PCSK9; (-) strand; PAM type: NRG; PAM sequence: GGG
cccggtgctacactgggaag

SEQ ID NO: 9719 - DNA, 20 bp, Artificial Sequence
  Description of Artificial Sequence: Synthetic oligonucleotide
  Target: PCSK9; (-) strand; PAM type: NRG; PAM sequence: GGG
gcccggtgctacactgggaa

SEQ ID NO: 9720 - DNA, 20 bp, Artificial Sequence
  Description of Artificial Sequence: Synthetic oligonucleotide
  Target: PCSK9; (-) strand; PAM type: NRG; PAM sequence: AGG
tgcccggtgctacactggga

SEQ ID NO: 9721 - DNA, 20 bp, Artificial Sequence
  Description of Artificial Sequence: Synthetic oligonucleotide
  Target: PCSK9; (-) strand; PAM type: NRG; PAM sequence: AAG
gtgcccggtgctacactggg

SEQ ID NO: 9722 - DNA, 20 bp, Artificial Sequence
  Description of Artificial Sequence: Synthetic oligonucleotide
  Target: PCSK9; (-) strand; PAM type: NRG; PAM sequence: GGG
catgtgcccggtgctacact

SEQ ID NO: 9723 - DNA, 20 bp, Artificial Sequence
  Description of Artificial Sequence: Synthetic oligonucleotide
  Target: PCSK9; (-) strand; PAM type: NRG; PAM sequence: TGG
ccatgtgcccggtgctacac

SEQ ID NO: 9724 - DNA, 20 bp, Artificial Sequence
  Description of Artificial Sequence: Synthetic oligonucleotide
  Target: PCSK9; (-) strand; PAM type: NRG; PAM sequence: CGG
ataggcatctaccatgtgcc

SEQ ID NO: 9725 - DNA, 20 bp, Artificial Sequence
  Description of Artificial Sequence: Synthetic oligonucleotide
  Target: PCSK9; (-) strand; PAM type: NRG; PAM sequence: AGG
aggagctttcactcatcaat

SEQ ID NO: 9726 - DNA, 20 bp, Artificial Sequence
  Description of Artificial Sequence: Synthetic oligonucleotide
  Target: PCSK9; (-) strand; PAM type: NRG; PAM sequence: TAG
taggagctttcactcatcaa

SEQ ID NO: 9727 - DNA, 20 bp, Artificial Sequence
  Description of Artificial Sequence: Synthetic oligonucleotide
  Target: PCSK9; (-) strand; PAM type: NRG; PAM sequence: GAG
ttgctctctgagtgtgttag

SEQ ID NO: 9728 - DNA, 20 bp, Artificial Sequence
  Description of Artificial Sequence: Synthetic oligonucleotide
  Target: PCSK9; (-) strand; PAM type: NRG; PAM sequence: AGG
ccttgctctctgagtgtgtt

SEQ ID NO: 9729 - DNA, 20 bp, Artificial Sequence
  Description of Artificial Sequence: Synthetic oligonucleotide
  Target: PCSK9; (-) strand; PAM type: NRG; PAM sequence: TAG
tccttgctctctgagtgtgt

SEQ ID NO: 9730 - DNA, 20 bp, Artificial Sequence
  Description of Artificial Sequence: Synthetic oligonucleotide
  Target: PCSK9; (-) strand; PAM type: NRG; PAM sequence: GAG
aggcggagtccttgctctct

SEQ ID NO: 9731 - DNA, 20 bp, Artificial Sequence
  Description of Artificial Sequence: Synthetic oligonucleotide
  Target: PCSK9; (-) strand; PAM type: NRG; PAM sequence: GAG
ccaggctgtgggatgaggcg

SEQ ID NO: 9732 - DNA, 20 bp, Artificial Sequence
  Description of Artificial Sequence: Synthetic oligonucleotide
  Target: PCSK9; (-) strand; PAM type: NRG; PAM sequence: CGG
tcccaggctgtgggatgagg

SEQ ID NO: 9733 - DNA, 20 bp, Artificial Sequence
  Description of Artificial Sequence: Synthetic oligonucleotide
  Target: PCSK9; (-) strand; PAM type: NRG; PAM sequence: AGG
tcctcccaggctgtgggatg

SEQ ID NO: 9734 - DNA, 20 bp, Artificial Sequence
  Description of Artificial Sequence: Synthetic oligonucleotide
  Target: PCSK9; (-) strand; PAM type: NRG; PAM sequence: GAG
ctcctcccaggctgtgggat

SEQ ID NO: 9735 - DNA, 20 bp, Artificial Sequence
  Description of Artificial Sequence: Synthetic oligonucleotide
  Target: PCSK9; (-) strand; PAM type: NRG; PAM sequence: GGG
tgcctctcctcccaggctgt

SEQ ID NO: 9736 - DNA, 20 bp, Artificial Sequence
  Description of Artificial Sequence: Synthetic oligonucleotide
  Target: PCSK9; (-) strand; PAM type: NRG; PAM sequence: TGG
ctgcctctcctcccaggctg

SEQ ID NO: 9737 - DNA, 20 bp, Artificial Sequence
  Description of Artificial Sequence: Synthetic oligonucleotide
  Target: PCSK9; (-) strand; PAM type: NRG; PAM sequence: AGG
ggcagtctgcctctcctccc

SEQ ID NO: 9738 - DNA, 20 bp, Artificial Sequence
  Description of Artificial Sequence: Synthetic oligonucleotide
  Target: PCSK9; (-) strand; PAM type: NRG; PAM sequence: CAG
tggcagtctgcctctcctcc

SEQ ID NO: 9739 - DNA, 20 bp, Artificial Sequence
  Description of Artificial Sequence: Synthetic oligonucleotide
  Target: PCSK9; (-) strand; PAM type: NRG; PAM sequence: CAG
catgctgagcaggtccttgg

SEQ ID NO: 9740 - DNA, 20 bp, Artificial Sequence
  Description of Artificial Sequence: Synthetic oligonucleotide
  Target: PCSK9; (-) strand; PAM type: NRG; PAM sequence: TGG
tagcatgctgagcaggtcct

SEQ ID NO: 9741 - DNA, 20 bp, Artificial Sequence
  Description of Artificial Sequence: Synthetic oligonucleotide
  Target: PCSK9; (-) strand; PAM type: NRG; PAM sequence: AGG
tcttctgtagcatgctgagc

SEQ ID NO: 9742 - DNA, 20 bp, Artificial Sequence
  Description of Artificial Sequence: Synthetic oligonucleotide
  Target: PCSK9; (-) strand; PAM type: NRG; PAM sequence: CAG
ttcttctgtagcatgctgag

SEQ ID NO: 9743 - DNA, 20 bp, Artificial Sequence
  Description of Artificial Sequence: Synthetic oligonucleotide
  Target: PCSK9; (-) strand; PAM type: NRG; PAM sequence: GAG
ggtttcttctgtagcatgct

SEQ ID NO: 9744 - DNA, 20 bp, Artificial Sequence
  Description of Artificial Sequence: Synthetic oligonucleotide
  Target: PCSK9; (-) strand; PAM type: NRG; PAM sequence: TAG
gggcactttggtttcttctg

SEQ ID NO: 9745 - DNA, 20 bp, Artificial Sequence
  Description of Artificial Sequence: Synthetic oligonucleotide
  Target: PCSK9; (-) strand; PAM type: NRG; PAM sequence: TGG
gatcagtcccgtgggcactt

SEQ ID NO: 9746 - DNA, 20 bp, Artificial Sequence
  Description of Artificial Sequence: Synthetic oligonucleotide
  Target: PCSK9; (-) strand; PAM type: NRG; PAM sequence: GGG
gctccactgatcagtcccgt

SEQ ID NO: 9747 - DNA, 20 bp, Artificial Sequence
  Description of Artificial Sequence: Synthetic oligonucleotide
  Target: PCSK9; (-) strand; PAM type: NRG; PAM sequence: TGG
agctccactgatcagtcccg

SEQ ID NO: 9748 - DNA, 20 bp, Artificial Sequence
  Description of Artificial Sequence: Synthetic oligonucleotide
  Target: PCSK9; (-) strand; PAM type: NRG; PAM sequence: CAG
cggcaggaagctccactgat

SEQ ID NO: 9749 - DNA, 20 bp, Artificial Sequence
  Description of Artificial Sequence: Synthetic oligonucleotide
  Target: PCSK9; (-) strand; PAM type: NRG; PAM sequence: AAG
aggcctccagtctcggcagg

SEQ ID NO: 9750 - DNA, 20 bp, Artificial Sequence
  Description of Artificial Sequence: Synthetic oligonucleotide
  Target: PCSK9; (-) strand; PAM type: NRG; PAM sequence: AGG
ctaaggcctccagtctcggc

SEQ ID NO: 9751 - DNA, 20 bp, Artificial Sequence
  Description of Artificial Sequence: Synthetic oligonucleotide
  Target: PCSK9; (-) strand; PAM type: NRG; PAM sequence: CAG
cctaaggcctccagtctcgg

SEQ ID NO: 9752 - DNA, 20 bp, Artificial Sequence
  Description of Artificial Sequence: Synthetic oligonucleotide
  Target: PCSK9; (-) strand; PAM type: NRG; PAM sequence: CGG
tgccctaaggcctccagtct

SEQ ID NO: 9753 - DNA, 20 bp, Artificial Sequence
  Description of Artificial Sequence: Synthetic oligonucleotide
  Target: PCSK9; (-) strand; PAM type: NRG; PAM sequence: CAG
ctaccctgccctaaggcctc

SEQ ID NO: 9754 - DNA, 20 bp, Artificial Sequence
  Description of Artificial Sequence: Synthetic oligonucleotide
  Target: PCSK9; (-) strand; PAM type: NRG; PAM sequence: AGG
acactgtctaccctgcccta

SEQ ID NO: 9755 - DNA, 20 bp, Artificial Sequence
  Description of Artificial Sequence: Synthetic oligonucleotide
  Target: PCSK9; (-) strand; PAM type: NRG; PAM sequence: AAG
cacactgtctaccctgccct

SEQ ID NO: 9756 - DNA, 20 bp, Artificial Sequence
  Description of Artificial Sequence: Synthetic oligonucleotide
  Target: PCSK9; (-) strand; PAM type: NRG; PAM sequence: CAG
cagtccgaactgtgagtccc

SEQ ID NO: 9757 - DNA, 20 bp, Artificial Sequence
  Description of Artificial Sequence: Synthetic oligonucleotide
  Target: PCSK9; (-) strand; PAM type: NRG; PAM sequence: GAG
ctgggcacagtccgaactgt

SEQ ID NO: 9758 - DNA, 20 bp, Artificial Sequence
  Description of Artificial Sequence: Synthetic oligonucleotide
  Target: PCSK9; (-) strand; PAM type: NRG; PAM sequence: CAG
tatgctagtaggtctgggca

SEQ ID NO: 9759 - DNA, 20 bp, Artificial Sequence
  Description of Artificial Sequence: Synthetic oligonucleotide
  Target: PCSK9; (-) strand; PAM type: NRG; PAM sequence: GGG
cccactatgctagtaggtct

SEQ ID NO: 9760 - DNA, 20 bp, Artificial Sequence
  Description of Artificial Sequence: Synthetic oligonucleotide
  Target: PCSK9; (-) strand; PAM type: NRG; PAM sequence: TGG
acccactatgctagtaggtc

SEQ ID NO: 9761 - DNA, 20 bp, Artificial Sequence
  Description of Artificial Sequence: Synthetic oligonucleotide
  Target: PCSK9; (-) strand; PAM type: NRG; PAM sequence: AGG
cacccacccactatgctagt

SEQ ID NO: 9762 - DNA, 20 bp, Artificial Sequence
  Description of Artificial Sequence: Synthetic oligonucleotide
  Target: PCSK9; (-) strand; PAM type: NRG; PAM sequence: TAG
ccacccacccactatgctag

SEQ ID NO: 9763 - DNA, 20 bp, Artificial Sequence
  Description of Artificial Sequence: Synthetic oligonucleotide
  Target: PCSK9; (-) strand; PAM type: NRG; PAM sequence: TAG
ctcccacccacccactatgc

SEQ ID NO: 9764 - DNA, 20 bp, Artificial Sequence
  Description of Artificial Sequence: Synthetic oligonucleotide
  Target: PCSK9; (-) strand; PAM type: NRG; PAM sequence: CAG
tttcaggcaaggtcggcccc

SEQ ID NO: 9765 - DNA, 20 bp, Artificial Sequence
  Description of Artificial Sequence: Synthetic oligonucleotide
  Target: PCSK9; (-) strand; PAM type: NRG; PAM sequence: CGG
acatgaatttcaggcaaggt

SEQ ID NO: 9766 - DNA, 20 bp, Artificial Sequence
  Description of Artificial Sequence: Synthetic oligonucleotide
  Target: PCSK9; (-) strand; PAM type: NRG; PAM sequence: AGG
tcccacatgaatttcaggca

SEQ ID NO: 9767 - DNA, 20 bp, Artificial Sequence
  Description of Artificial Sequence: Synthetic oligonucleotide
  Target: PCSK9; (-) strand; PAM type: NRG; PAM sequence: AAG
atcccacatgaatttcaggc

SEQ ID NO: 9768 - DNA, 20 bp, Artificial Sequence
  Description of Artificial Sequence: Synthetic oligonucleotide
  Target: PCSK9; (-) strand; PAM type: NRG; PAM sequence: AGG
tgagatcccacatgaatttc

SEQ ID NO: 9769 - DNA, 20 bp, Artificial Sequence
  Description of Artificial Sequence: Synthetic oligonucleotide
  Target: PCSK9; (-) strand; PAM type: NRG; PAM sequence: CAG
ctgagatcccacatgaattt

SEQ ID NO: 9770 - DNA, 20 bp, Artificial Sequence
  Description of Artificial Sequence: Synthetic oligonucleotide
  Target: PCSK9; (-) strand; PAM type: NRG; PAM sequence: GAG
agcaattcagtggctgctct

SEQ ID NO: 9771 - DNA, 20 bp, Artificial Sequence
  Description of Artificial Sequence: Synthetic oligonucleotide
  Target: PCSK9; (-) strand; PAM type: NRG; PAM sequence: TGG
ccccctacagagcaattcag

SEQ ID NO: 9772 - DNA, 20 bp, Artificial Sequence
  Description of Artificial Sequence: Synthetic oligonucleotide
  Target: PCSK9; (-) strand; PAM type: NRG; PAM sequence: CAG
tagccccctacagagcaatt

SEQ ID NO: 9773 - DNA, 20 bp, Artificial Sequence
  Description of Artificial Sequence: Synthetic oligonucleotide
  Target: PCSK9; (-) strand; PAM type: NRG; PAM sequence: GAG
ccactatttagccccctaca

SEQ ID NO: 9774 - DNA, 20 bp, Artificial Sequence
  Description of Artificial Sequence: Synthetic oligonucleotide
  Target: PCSK9; (-) strand; PAM type: NRG; PAM sequence: CAG
ggccactatttagcccccta

SEQ ID NO: 9775 - DNA, 20 bp, Artificial Sequence
  Description of Artificial Sequence: Synthetic oligonucleotide
  Target: PCSK9; (-) strand; PAM type: NRG; PAM sequence: TAG
tatctgtgggggccactatt

SEQ ID NO: 9776 - DNA, 20 bp, Artificial Sequence
  Description of Artificial Sequence: Synthetic oligonucleotide
  Target: PCSK9; (-) strand; PAM type: NRG; PAM sequence: GGG
ctgggtgtgtgtatctgtgg

SEQ ID NO: 9777 - DNA, 20 bp, Artificial Sequence
  Description of Artificial Sequence: Synthetic oligonucleotide
  Target: PCSK9; (-) strand; PAM type: NRG; PAM sequence: GGG
tctgggtgtgtgtatctgtg

SEQ ID NO: 9778 - DNA, 20 bp, Artificial Sequence
  Description of Artificial Sequence: Synthetic oligonucleotide
  Target: PCSK9; (-) strand; PAM type: NRG; PAM sequence: GGG
gtctgggtgtgtgtatctgt

SEQ ID NO: 9779 - DNA, 20 bp, Artificial Sequence
  Description of Artificial Sequence: Synthetic oligonucleotide
  Target: PCSK9; (-) strand; PAM type: NRG; PAM sequence: TGG
tgtctgggtgtgtgtatctg

SEQ ID NO: 9780 - DNA, 20 bp, Artificial Sequence
  Description of Artificial Sequence: Synthetic oligonucleotide
  Target: PCSK9; (-) strand; PAM type: NRG; PAM sequence: GGG
ctggctcacaggctctgtct

SEQ ID NO: 9781 - DNA, 20 bp, Artificial Sequence
  Description of Artificial Sequence: Synthetic oligonucleotide
  Target: PCSK9; (-) strand; PAM type: NRG; PAM sequence: TGG
tctggctcacaggctctgtc

SEQ ID NO: 9782 - DNA, 20 bp, Artificial Sequence
  Description of Artificial Sequence: Synthetic oligonucleotide
  Target: PCSK9; (-) strand; PAM type: NRG; PAM sequence: AGG
ccaaataaggtctggctcac

SEQ ID NO: 9783 - DNA, 20 bp, Artificial Sequence
  Description of Artificial Sequence: Synthetic oligonucleotide
  Target: PCSK9; (-) strand; PAM type: NRG; PAM sequence: CAG
tccaaataaggtctggctca

SEQ ID NO: 9784 - DNA, 20 bp, Artificial Sequence
  Description of Artificial Sequence: Synthetic oligonucleotide
  Target: PCSK9; (-) strand; PAM type: NRG; PAM sequence: TGG
ccttttctccaaataaggtc

SEQ ID NO: 9785 - DNA, 20 bp, Artificial Sequence
  Description of Artificial Sequence: Synthetic oligonucleotide
  Target: PCSK9; (-) strand; PAM type: NRG; PAM sequence: AGG
aaagaccttttctccaaata

SEQ ID NO: 9786 - DNA, 20 bp, Artificial Sequence
  Description of Artificial Sequence: Synthetic oligonucleotide
  Target: PCSK9; (-) strand; PAM type: NRG; PAM sequence: AAG
caaagaccttttctccaaat

SEQ ID NO: 9787 - DNA, 20 bp, Artificial Sequence
  Description of Artificial Sequence: Synthetic oligonucleotide
  Target: PCSK9; (-) strand; PAM type: NRG; PAM sequence: AAG
gatgcttaattacatctaca

SEQ ID NO: 9788 - DNA, 20 bp, Artificial Sequence
  Description of Artificial Sequence: Synthetic oligonucleotide
  Target: PCSK9; (-) strand; PAM type: NRG; PAM sequence: GAG
aatccagatgatgccatctt

SEQ ID NO: 9789 - DNA, 20 bp, Artificial Sequence
  Description of Artificial Sequence: Synthetic oligonucleotide
  Target: PCSK9; (-) strand; PAM type: NRG; PAM sequence: CAG
ttacagcccaccgcataatc

SEQ ID NO: 9790 - DNA, 20 bp, Artificial Sequence
  Description of Artificial Sequence: Synthetic oligonucleotide
  Target: PCSK9; (-) strand; PAM type: NRG; PAM sequence: CAG
aagacacatcacaggactta

SEQ ID NO: 9791 - DNA, 20 bp, Artificial Sequence
  Description of Artificial Sequence: Synthetic oligonucleotide
  Target: PCSK9; (-) strand; PAM type: NRG; PAM sequence: AGG
ctctcataaagacacatcac

SEQ ID NO: 9792 - DNA, 20 bp, Artificial Sequence
  Description of Artificial Sequence: Synthetic oligonucleotide
  Target: PCSK9; (-) strand; PAM type: NRG; PAM sequence: CAG
tctctcataaagacacatca

SEQ ID NO: 9793 - DNA, 20 bp, Artificial Sequence
  Description of Artificial Sequence: Synthetic oligonucleotide
  Target: PCSK9; (-) strand; PAM type: NRG; PAM sequence: AAG
ccctctgcctttctctcata

SEQ ID NO: 9794 - DNA, 20 bp, Artificial Sequence
  Description of Artificial Sequence: Synthetic oligonucleotide
  Target: PCSK9; (-) strand; PAM type: NRG; PAM sequence: TGG
tctccacctctgtctccacg

SEQ ID NO: 9795 - DNA, 20 bp, Artificial Sequence
  Description of Artificial Sequence: Synthetic oligonucleotide
  Target: PCSK9; (-) strand; PAM type: NRG; PAM sequence: TGG
tgctggtgttccctggcttg

SEQ ID NO: 9796 - DNA, 20 bp, Artificial Sequence
  Description of Artificial Sequence: Synthetic oligonucleotide
  Target: PCSK9; (-) strand; PAM type: NRG; PAM sequence: TGG
tggtggctgctggtgttccc

SEQ ID NO: 9797 - DNA, 20 bp, Artificial Sequence
  Description of Artificial Sequence: Synthetic oligonucleotide
  Target: PCSK9; (-) strand; PAM type: NRG; PAM sequence: TGG
ttccggcttctggtggctgc

SEQ ID NO: 9798 - DNA, 20 bp, Artificial Sequence
  Description of Artificial Sequence: Synthetic oligonucleotide
  Target: PCSK9; (-) strand; PAM type: NRG; PAM sequence: TGG
tcacgtcttccggcttctgg

SEQ ID NO: 9799 - DNA, 20 bp, Artificial Sequence
  Description of Artificial Sequence: Synthetic oligonucleotide
  Target: PCSK9; (-) strand; PAM type: NRG; PAM sequence: TGG
gcctcacgtcttccggcttc

SEQ ID NO: 9800 - DNA, 20 bp, Artificial Sequence
  Description of Artificial Sequence: Synthetic oligonucleotide
  Target: PCSK9; (-) strand; PAM type: NRG; PAM sequence: CGG
gaaccctgcctcacgtcttc

SEQ ID NO: 9801 - DNA, 20 bp, Artificial Sequence
  Description of Artificial Sequence: Synthetic oligonucleotide
  Target: PCSK9; (-) strand; PAM type: NRG; PAM sequence: AAG
tcagcagcgaaggctctggg

SEQ ID NO: 9802 - DNA, 20 bp, Artificial Sequence
  Description of Artificial Sequence: Synthetic oligonucleotide
  Target: PCSK9; (-) strand; PAM type: NRG; PAM sequence: GGG
gactcagcagcgaaggctct

SEQ ID NO: 9803 - DNA, 20 bp, Artificial Sequence
  Description of Artificial Sequence: Synthetic oligonucleotide
  Target: PCSK9; (-) strand; PAM type: NRG; PAM sequence: TGG
agactcagcagcgaaggctc

SEQ ID NO: 9804 - DNA, 20 bp, Artificial Sequence
  Description of Artificial Sequence: Synthetic oligonucleotide
  Target: PCSK9; (-) strand; PAM type: NRG; PAM sequence: AGG
attcccagactcagcagcga

SEQ ID NO: 9805 - DNA, 20 bp, Artificial Sequence
  Description of Artificial Sequence: Synthetic oligonucleotide
  Target: PCSK9; (-) strand; PAM type: NRG; PAM sequence: AAG
aattcccagactcagcagcg

SEQ ID NO: 9806 - DNA, 20 bp, Artificial Sequence
  Description of Artificial Sequence: Synthetic oligonucleotide
  Target: PCSK9; (-) strand; PAM type: NRG; PAM sequence: CAG
tcacaaattcccagactcag

SEQ ID NO: 9807 - DNA, 20 bp, Artificial Sequence
  Description of Artificial Sequence: Synthetic oligonucleotide
  Target: PCSK9; (-) strand; PAM type: NRG; PAM sequence: CAG
cggtcacaaattcccagact

SEQ ID NO: 9808 - DNA, 20 bp, Artificial Sequence
  Description of Artificial Sequence: Synthetic oligonucleotide
  Target: PCSK9; (-) strand; PAM type: NRG; PAM sequence: CAG
tggcttcggtcacaaattcc

SEQ ID NO: 9809 - DNA, 20 bp, Artificial Sequence
  Description of Artificial Sequence: Synthetic oligonucleotide
  Target: PCSK9; (-) strand; PAM type: NRG; PAM sequence: CGG
gtacccacttcttatggctt

SEQ ID NO: 9810 - DNA, 20 bp, Artificial Sequence
  Description of Artificial Sequence: Synthetic oligonucleotide
  Target: PCSK9; (-) strand; PAM type: NRG; PAM sequence: TGG
gggcgtgtacccacttctta

SEQ ID NO: 9811 - DNA, 20 bp, Artificial Sequence
  Description of Artificial Sequence: Synthetic oligonucleotide
  Target: PCSK9; (-) strand; PAM type: NRG; PAM sequence: GGG
gagcaagtgtgggaggctca

SEQ ID NO: 9812 - DNA, 20 bp, Artificial Sequence
  Description of Artificial Sequence: Synthetic oligonucleotide
  Target: PCSK9; (-) strand; PAM type: NRG; PAM sequence: AGG
tgagcaagtgtgggaggctc

SEQ ID NO: 9813 - DNA, 20 bp, Artificial Sequence
  Description of Artificial Sequence: Synthetic oligonucleotide
  Target: PCSK9; (-) strand; PAM type: NRG; PAM sequence: CAG
gtgagcaagtgtgggaggct

SEQ ID NO: 9814 - DNA, 20 bp, Artificial Sequence
  Description of Artificial Sequence: Synthetic oligonucleotide
  Target: PCSK9; (-) strand; PAM type: NRG; PAM sequence: AGG
gacaggtgagcaagtgtggg

SEQ ID NO: 9815 - DNA, 20 bp, Artificial Sequence
  Description of Artificial Sequence: Synthetic oligonucleotide
  Target: PCSK9; (-) strand; PAM type: NRG; PAM sequence: GAG
ggacaggtgagcaagtgtgg

SEQ ID NO: 9816 - DNA, 20 bp, Artificial Sequence
  Description of Artificial Sequence: Synthetic oligonucleotide
  Target: PCSK9; (-) strand; PAM type: NRG; PAM sequence: GGG
caggacaggtgagcaagtgt

SEQ ID NO: 9817 - DNA, 20 bp, Artificial Sequence
  Description of Artificial Sequence: Synthetic oligonucleotide
  Target: PCSK9; (-) strand; PAM type: NRG; PAM sequence: TGG
tcaggacaggtgagcaagtg

SEQ ID NO: 9818 - DNA, 20 bp, Artificial Sequence
  Description of Artificial Sequence: Synthetic oligonucleotide
  Target: PCSK9; (-) strand; PAM type: NRG; PAM sequence: AAG
tcatctcaggacaggtgagc

SEQ ID NO: 9819 - DNA, 20 bp, Artificial Sequence
  Description of Artificial Sequence: Synthetic oligonucleotide
  Target: PCSK9; (-) strand; PAM type: NRG; PAM sequence: GAG
attctcatctcaggacaggt

SEQ ID NO: 9820 - DNA, 20 bp, Artificial Sequence
  Description of Artificial Sequence: Synthetic oligonucleotide
  Target: PCSK9; (-) strand; PAM type: NRG; PAM sequence: AGG
agagattctcatctcaggac

SEQ ID NO: 9821 - DNA, 20 bp, Artificial Sequence
  Description of Artificial Sequence: Synthetic oligonucleotide
  Target: PCSK9; (-) strand; PAM type: NRG; PAM sequence: CAG
tagagattctcatctcagga

SEQ ID NO: 9822 - DNA, 20 bp, Artificial Sequence
  Description of Artificial Sequence: Synthetic oligonucleotide
  Target: PCSK9; (-) strand; PAM type: NRG; PAM sequence: AGG
agagtagagattctcatctc

SEQ ID NO: 9823 - DNA, 20 bp, Artificial Sequence
  Description of Artificial Sequence: Synthetic oligonucleotide
  Target: PCSK9; (-) strand; PAM type: NRG; PAM sequence: CAG
cagagtagagattctcatct

SEQ ID NO: 9824 - DNA, 20 bp, Artificial Sequence
  Description of Artificial Sequence: Synthetic oligonucleotide
  Target: PCSK9; (-) strand; PAM type: NRG; PAM sequence: GAG
tccaaatatgctgcagagta

SEQ ID NO: 9825 - DNA, 20 bp, Artificial Sequence
  Description of Artificial Sequence: Synthetic oligonucleotide
  Target: PCSK9; (-) strand; PAM type: NRG; PAM sequence: TAG
cctccaaatatgctgcagag

SEQ ID NO: 9826 - DNA, 20 bp, Artificial Sequence
  Description of Artificial Sequence: Synthetic oligonucleotide
  Target: PCSK9; (-) strand; PAM type: NRG; PAM sequence: GAG
gatcctccaaatatgctgca

SEQ ID NO: 9827 - DNA, 20 bp, Artificial Sequence
  Description of Artificial Sequence: Synthetic oligonucleotide
  Target: PCSK9; (-) strand; PAM type: NRG; PAM sequence: CAG
gtgatcctccaaatatgctg

SEQ ID NO: 9828 - DNA, 20 bp, Artificial Sequence
  Description of Artificial Sequence: Synthetic oligonucleotide
  Target: PCSK9; (-) strand; PAM type: NRG; PAM sequence: CAG
cagcacctctgtggcccccg

SEQ ID NO: 9829 - DNA, 20 bp, Artificial Sequence
  Description of Artificial Sequence: Synthetic oligonucleotide
  Target: PCSK9; (-) strand; PAM type: NRG; PAM sequence: TGG
ccatctgaacagcacctctg

SEQ ID NO: 9830 - DNA, 20 bp, Artificial Sequence
  Description of Artificial Sequence: Synthetic oligonucleotide
  Target: PCSK9; (-) strand; PAM type: NRG; PAM sequence: CAG
cttctgaagtgccatctgaa

SEQ ID NO: 9831 - DNA, 20 bp, Artificial Sequence
  Description of Artificial Sequence: Synthetic oligonucleotide
  Target: PCSK9; (-) strand; PAM type: NRG; PAM sequence: AAG
agggtctcctgagtcttctg

SEQ ID NO: 9832 - DNA, 20 bp, Artificial Sequence
  Description of Artificial Sequence: Synthetic oligonucleotide
  Target: PCSK9; (-) strand; PAM type: NRG; PAM sequence: GAG
ctcctgccccagggtctcct

SEQ ID NO: 9833 - DNA, 20 bp, Artificial Sequence
  Description of Artificial Sequence: Synthetic oligonucleotide
  Target: PCSK9; (-) strand; PAM type: NRG; PAM sequence: GGG
gtcaaactgctcctgcccca

SEQ ID NO: 9834 - DNA, 20 bp, Artificial Sequence
  Description of Artificial Sequence: Synthetic oligonucleotide
  Target: PCSK9; (-) strand; PAM type: NRG; PAM sequence: AGG
agtcaaactgctcctgcccc

SEQ ID NO: 9835 - DNA, 20 bp, Artificial Sequence
  Description of Artificial Sequence: Synthetic oligonucleotide
  Target: PCSK9; (-) strand; PAM type: NRG; PAM sequence: CAG
cagtcaaactgctcctgccc

SEQ ID NO: 9836 - DNA, 20 bp, Artificial Sequence
  Description of Artificial Sequence: Synthetic oligonucleotide
  Target: PCSK9; (-) strand; PAM type: NRG; PAM sequence: CAG
agggcagccctctgggctgt

SEQ ID NO: 9837 - DNA, 20 bp, Artificial Sequence
  Description of Artificial Sequence: Synthetic oligonucleotide
  Target: PCSK9; (-) strand; PAM type: NRG; PAM sequence: GGG
gaatcagagggcagccctct

SEQ ID NO: 9838 - DNA, 20 bp, Artificial Sequence
  Description of Artificial Sequence: Synthetic oligonucleotide
  Target: PCSK9; (-) strand; PAM type: NRG; PAM sequence: TGG
ggaatcagagggcagccctc

SEQ ID NO: 9839 - DNA, 20 bp, Artificial Sequence
  Description of Artificial Sequence: Synthetic oligonucleotide
  Target: PCSK9; (-) strand; PAM type: NRG; PAM sequence: CAG
cctcaggtggaatcagaggg

SEQ ID NO: 9840 - DNA, 20 bp, Artificial Sequence
  Description of Artificial Sequence: Synthetic oligonucleotide
  Target: PCSK9; (-) strand; PAM type: NRG; PAM sequence: GGG
gggcctcaggtggaatcaga

SEQ ID NO: 9841 - DNA, 20 bp, Artificial Sequence
  Description of Artificial Sequence: Synthetic oligonucleotide
  Target: PCSK9; (-) strand; PAM type: NRG; PAM sequence: AGG
agggcctcaggtggaatcag

SEQ ID NO: 9842 - DNA, 20 bp, Artificial Sequence
  Description of Artificial Sequence: Synthetic oligonucleotide
  Target: PCSK9; (-) strand; PAM type: NRG; PAM sequence: GAG
cagggcctcaggtggaatca

SEQ ID NO: 9843 - DNA, 20 bp, Artificial Sequence
  Description of Artificial Sequence: Synthetic oligonucleotide
  Target: PCSK9; (-) strand; PAM type: NRG; PAM sequence: CAG
agcagggcctcaggtggaat

SEQ ID NO: 9844 - DNA, 20 bp, Artificial Sequence
  Description of Artificial Sequence: Synthetic oligonucleotide
  Target: PCSK9; (-) strand; PAM type: NRG; PAM sequence: TGG
aggaaaagcagggcctcagg

SEQ ID NO: 9845 - DNA, 20 bp, Artificial Sequence
  Description of Artificial Sequence: Synthetic oligonucleotide
  Target: PCSK9; (-) strand; PAM type: NRG; PAM sequence: AGG
gccaggaaaagcagggcctc

SEQ ID NO: 9846 - DNA, 20 bp, Artificial Sequence
  Description of Artificial Sequence: Synthetic oligonucleotide
  Target: PCSK9; (-) strand; PAM type: NRG; PAM sequence: CAG
agccaggaaaagcagggcct

SEQ ID NO: 9847 - DNA, 20 bp, Artificial Sequence
  Description of Artificial Sequence: Synthetic oligonucleotide
  Target: PCSK9; (-) strand; PAM type: NRG; PAM sequence: GGG
ccctgcagccaggaaaagca

SEQ ID NO: 9848 - DNA, 20 bp, Artificial Sequence
  Description of Artificial Sequence: Synthetic oligonucleotide
  Target: PCSK9; (-) strand; PAM type: NRG; PAM sequence: AGG
cccctgcagccaggaaaagc

SEQ ID NO: 9849 - DNA, 20 bp, Artificial Sequence
  Description of Artificial Sequence: Synthetic oligonucleotide
  Target: PCSK9; (-) strand; PAM type: NRG; PAM sequence: CAG
acccctgcagccaggaaaag

SEQ ID NO: 9850 - DNA, 20 bp, Artificial Sequence
  Description of Artificial Sequence: Synthetic oligonucleotide
  Target: PCSK9; (-) strand; PAM type: NRG; PAM sequence: AAG
ggaacccctgcagccaggaa

SEQ ID NO: 9851 - DNA, 20 bp, Artificial Sequence
  Description of Artificial Sequence: Synthetic oligonucleotide
  Target: PCSK9; (-) strand; PAM type: NRG; PAM sequence: AGG
gccctggaacccctgcagcc

SEQ ID NO: 9852 - DNA, 20 bp, Artificial Sequence
  Description of Artificial Sequence: Synthetic oligonucleotide
  Target: PCSK9; (-) strand; PAM type: NRG; PAM sequence: CAG
ggccctggaacccctgcagc

SEQ ID NO: 9853 - DNA, 20 bp, Artificial Sequence
  Description of Artificial Sequence: Synthetic oligonucleotide
  Target: PCSK9; (-) strand; PAM type: NRG; PAM sequence: CAG
gcctggccctggaacccctg

SEQ ID NO: 9854 - DNA, 20 bp, Artificial Sequence
  Description of Artificial Sequence: Synthetic oligonucleotide
  Target: PCSK9; (-) strand; PAM type: NRG; PAM sequence: TGG
cagcggaaatggcctggccc

SEQ ID NO: 9855 - DNA, 20 bp, Artificial Sequence
  Description of Artificial Sequence: Synthetic oligonucleotide
  Target: PCSK9; (-) strand; PAM type: NRG; PAM sequence: TGG
ctgcgccagcggaaatggcc

SEQ ID NO: 9856 - DNA, 20 bp, Artificial Sequence
  Description of Artificial Sequence: Synthetic oligonucleotide
  Target: PCSK9; (-) strand; PAM type: NRG; PAM sequence: TGG
gagtcctgcgccagcggaaa

SEQ ID NO: 9857 - DNA, 20 bp, Artificial Sequence
  Description of Artificial Sequence: Synthetic oligonucleotide
  Target: PCSK9; (-) strand; PAM type: NRG; PAM sequence: CGG
ctagcagagtcctgcgccag

SEQ ID NO: 9858 - DNA, 20 bp, Artificial Sequence
  Description of Artificial Sequence: Synthetic oligonucleotide
  Target: PCSK9; (-) strand; PAM type: NRG; PAM sequence: CAG
ctgctagcagagtcctgcgc

SEQ ID NO: 9859 - DNA, 20 bp, Artificial Sequence
  Description of Artificial Sequence: Synthetic oligonucleotide
  Target: PCSK9; (-) strand; PAM type: NRG; PAM sequence: GAG
caggcaggttgctgctagca

SEQ ID NO: 9860 - DNA, 20 bp, Artificial Sequence
  Description of Artificial Sequence: Synthetic oligonucleotide
  Target: PCSK9; (-) strand; PAM type: NRG; PAM sequence: CAG
ttcaggcaggttgctgctag

SEQ ID NO: 9861 - DNA, 20 bp, Artificial Sequence
  Description of Artificial Sequence: Synthetic oligonucleotide
  Target: PCSK9; (-) strand; PAM type: NRG; PAM sequence: TAG
gacttcaggcaggttgctgc

SEQ ID NO: 9862 - DNA, 20 bp, Artificial Sequence
  Description of Artificial Sequence: Synthetic oligonucleotide
  Target: PCSK9; (-) strand; PAM type: NRG; PAM sequence: AGG
gccaaaggaagacttcaggc

SEQ ID NO: 9863 - DNA, 20 bp, Artificial Sequence
  Description of Artificial Sequence: Synthetic oligonucleotide
  Target: PCSK9; (-) strand; PAM type: NRG; PAM sequence: CAG
ggccaaaggaagacttcagg

SEQ ID NO: 9864 - DNA, 20 bp, Artificial Sequence
  Description of Artificial Sequence: Synthetic oligonucleotide
  Target: PCSK9; (-) strand; PAM type: NRG; PAM sequence: AGG
ccaggccaaaggaagacttc

SEQ ID NO: 9865 - DNA, 20 bp, Artificial Sequence
  Description of Artificial Sequence: Synthetic oligonucleotide
  Target: PCSK9; (-) strand; PAM type: NRG; PAM sequence: CAG
gccaggccaaaggaagactt

SEQ ID NO: 9866 - DNA, 20 bp, Artificial Sequence
  Description of Artificial Sequence: Synthetic oligonucleotide
  Target: PCSK9; (-) strand; PAM type: NRG; PAM sequence: AAG
actctcagccaggccaaagg

SEQ ID NO: 9867 - DNA, 20 bp, Artificial Sequence
  Description of Artificial Sequence: Synthetic oligonucleotide
  Target: PCSK9; (-) strand; PAM type: NRG; PAM sequence: AGG
gaaactctcagccaggccaa

SEQ ID NO: 9868 - DNA, 20 bp, Artificial Sequence
  Description of Artificial Sequence: Synthetic oligonucleotide
  Target: PCSK9; (-) strand; PAM type: NRG; PAM sequence: AAG
agaaactctcagccaggcca

SEQ ID NO: 9869 - DNA, 20 bp, Artificial Sequence
  Description of Artificial Sequence: Synthetic oligonucleotide
  Target: PCSK9; (-) strand; PAM type: NRG; PAM sequence: AGG
ggtctcagaaactctcagcc

SEQ ID NO: 9870 - DNA, 20 bp, Artificial Sequence
  Description of Artificial Sequence: Synthetic oligonucleotide
  Target: PCSK9; (-) strand; PAM type: NRG; PAM sequence: CAG
aggtctcagaaactctcagc

SEQ ID NO: 9871 - DNA, 20 bp, Artificial Sequence
  Description of Artificial Sequence: Synthetic oligonucleotide
  Target: PCSK9; (-) strand; PAM type: NRG; PAM sequence: CAG
gcgcaggtctcagaaactct

SEQ ID NO: 9872 - DNA, 20 bp, Artificial Sequence
  Description of Artificial Sequence: Synthetic oligonucleotide
  Target: PCSK9; (-) strand; PAM type: NRG; PAM sequence: CAG
ctccgctccagcgcaggtct

SEQ ID NO: 9873 - DNA, 20 bp, Artificial Sequence
  Description of Artificial Sequence: Synthetic oligonucleotide
  Target: PCSK9; (-) strand; PAM type: NRG; PAM sequence: AGG
aagcacctccgctccagcgc

SEQ ID NO: 9874 - DNA, 20 bp, Artificial Sequence
  Description of Artificial Sequence: Synthetic oligonucleotide
  Target: PCSK9; (-) strand; PAM type: NRG; PAM sequence: CAG
gaagcacctccgctccagcg

SEQ ID NO: 9875 - DNA, 20 bp, Artificial Sequence
  Description of Artificial Sequence: Synthetic oligonucleotide
  Target: PCSK9; (-) strand; PAM type: NRG; PAM sequence: CAG
ggaaggaagcacctccgctc

SEQ ID NO: 9876 - DNA, 20 bp, Artificial Sequence
  Description of Artificial Sequence: Synthetic oligonucleotide
  Target: PCSK9; (-) strand; PAM type: NRG; PAM sequence: AAG
aagaaaggaagcaaggaagg

SEQ ID NO: 9877 - DNA, 20 bp, Artificial Sequence
  Description of Artificial Sequence: Synthetic oligonucleotide
  Target: PCSK9; (-) strand; PAM type: NRG; PAM sequence: AGG
aggaagaaaggaagcaagga

SEQ ID NO: 9878 - DNA, 20 bp, Artificial Sequence
  Description of Artificial Sequence: Synthetic oligonucleotide
  Target: PCSK9; (-) strand; PAM type: NRG; PAM sequence: AAG
gaggaagaaaggaagcaagg

SEQ ID NO: 9879 - DNA, 20 bp, Artificial Sequence
  Description of Artificial Sequence: Synthetic oligonucleotide
  Target: PCSK9; (-) strand; PAM type: NRG; PAM sequence: AGG
agagaggaagaaaggaagca

SEQ ID NO: 9880 - DNA, 20 bp, Artificial Sequence
  Description of Artificial Sequence: Synthetic oligonucleotide
  Target: PCSK9; (-) strand; PAM type: NRG; PAM sequence: AAG
gagagaggaagaaaggaagc

SEQ ID NO: 9881 - DNA, 20 bp, Artificial Sequence
  Description of Artificial Sequence: Synthetic oligonucleotide
  Target: PCSK9; (-) strand; PAM type: NRG; PAM sequence: AAG
aagggagagaggaagaaagg

SEQ ID NO: 9882 - DNA, 20 bp, Artificial Sequence
  Description of Artificial Sequence: Synthetic oligonucleotide
  Target: PCSK9; (-) strand; PAM type: NRG; PAM sequence: AGG
gagaagggagagaggaagaa

SEQ ID NO: 9883 - DNA, 20 bp, Artificial Sequence
  Description of Artificial Sequence: Synthetic oligonucleotide
  Target: PCSK9; (-) strand; PAM type: NRG; PAM sequence: AAG
ggagaagggagagaggaaga

SEQ ID NO: 9884 - DNA, 20 bp, Artificial Sequence
  Description of Artificial Sequence: Synthetic oligonucleotide
  Target: PCSK9; (-) strand; PAM type: NRG; PAM sequence: AAG
ggatggagaagggagagagg

SEQ ID NO: 9885 - DNA, 20 bp, Artificial Sequence
  Description of Artificial Sequence: Synthetic oligonucleotide
  Target: PCSK9; (-) strand; PAM type: NRG; PAM sequence: AGG
gctggatggagaagggagag

SEQ ID NO: 9886 - DNA, 20 bp, Artificial Sequence
  Description of Artificial Sequence: Synthetic oligonucleotide
  Target: PCSK9; (-) strand; PAM type: NRG; PAM sequence: GAG
tgctggatggagaagggaga

SEQ ID NO: 9887 - DNA, 20 bp, Artificial Sequence
  Description of Artificial Sequence: Synthetic oligonucleotide
  Target: PCSK9; (-) strand; PAM type: NRG; PAM sequence: GAG
cctgctggatggagaaggga

SEQ ID NO: 9888 - DNA, 20 bp, Artificial Sequence
  Description of Artificial Sequence: Synthetic oligonucleotide
  Target: PCSK9; (-) strand; PAM type: NRG; PAM sequence: GAG
agcctgctggatggagaagg

SEQ ID NO: 9889 - DNA, 20 bp, Artificial Sequence
  Description of Artificial Sequence: Synthetic oligonucleotide
  Target: PCSK9; (-) strand; PAM type: NRG; PAM sequence: GGG
ccagcctgctggatggagaa

SEQ ID NO: 9890 - DNA, 20 bp, Artificial Sequence
  Description of Artificial Sequence: Synthetic oligonucleotide
  Target: PCSK9; (-) strand; PAM type: NRG; PAM sequence: AGG
tccagcctgctggatggaga

SEQ ID NO: 9891 - DNA, 20 bp, Artificial Sequence
  Description of Artificial Sequence: Synthetic oligonucleotide
  Target: PCSK9; (-) strand; PAM type: NRG; PAM sequence: AAG
gtccagcctgctggatggag

SEQ ID NO: 9892 - DNA, 20 bp, Artificial Sequence
  Description of Artificial Sequence: Synthetic oligonucleotide
  Target: PCSK9; (-) strand; PAM type: NRG; PAM sequence: GAG
caggtccagcctgctggatg

SEQ ID NO: 9893 - DNA, 20 bp, Artificial Sequence
  Description of Artificial Sequence: Synthetic oligonucleotide
  Target: PCSK9; (-) strand; PAM type: NRG; PAM sequence: TGG
ggcaggtccagcctgctgga

SEQ ID NO: 9894 - DNA, 20 bp, Artificial Sequence
  Description of Artificial Sequence: Synthetic oligonucleotide
  Target: PCSK9; (-) strand; PAM type: NRG; PAM sequence: TGG
gccaggcaggtccagcctgc

SEQ ID NO: 9895 - DNA, 20 bp, Artificial Sequence
  Description of Artificial Sequence: Synthetic oligonucleotide
  Target: PCSK9; (-) strand; PAM type: NRG; PAM sequence: CAG
tcacagatgccaggcaggtc

SEQ ID NO: 9896 - DNA, 20 bp, Artificial Sequence
  Description of Artificial Sequence: Synthetic oligonucleotide
  Target: PCSK9; (-) strand; PAM type: NRG; PAM sequence: AGG
agagctcacagatgccaggc

SEQ ID NO: 9897 - DNA, 20 bp, Artificial Sequence
  Description of Artificial Sequence: Synthetic oligonucleotide
  Target: PCSK9; (-) strand; PAM type: NRG; PAM sequence: CAG
gagagctcacagatgccagg

SEQ ID NO: 9898 - DNA, 20 bp, Artificial Sequence
  Description of Artificial Sequence: Synthetic oligonucleotide
  Target: PCSK9; (-) strand; PAM type: NRG; PAM sequence: AGG
agggagagctcacagatgcc

SEQ ID NO: 9899 - DNA, 20 bp, Artificial Sequence
  Description of Artificial Sequence: Synthetic oligonucleotide
  Target: PCSK9; (-) strand; PAM type: NRG; PAM sequence: CAG
tagggagagctcacagatgc

SEQ ID NO: 9900 - DNA, 20 bp, Artificial Sequence
  Description of Artificial Sequence: Synthetic oligonucleotide
  Target: PCSK9; (-) strand; PAM type: NRG; PAM sequence: CAG
gagaaagtagggagagctca

SEQ ID NO: 9901 - DNA, 20 bp, Artificial Sequence
  Description of Artificial Sequence: Synthetic oligonucleotide
  Target: PCSK9; (-) strand; PAM type: NRG; PAM sequence: GAG
ggtataggagaaagtaggga

SEQ ID NO: 9902 - DNA, 20 bp, Artificial Sequence
  Description of Artificial Sequence: Synthetic oligonucleotide
  Target: PCSK9; (-) strand; PAM type: NRG; PAM sequence: GAG
agggtataggagaaagtagg

SEQ ID NO: 9903 - DNA, 20 bp, Artificial Sequence
  Description of Artificial Sequence: Synthetic oligonucleotide
  Target: PCSK9; (-) strand; PAM type: NRG; PAM sequence: GGG
ttagggtataggagaaagta

SEQ ID NO: 9904 - DNA, 20 bp, Artificial Sequence
  Description of Artificial Sequence: Synthetic oligonucleotide
  Target: PCSK9; (-) strand; PAM type: NRG; PAM sequence: AGG
gttagggtataggagaaagt

SEQ ID NO: 9905 - DNA, 20 bp, Artificial Sequence
  Description of Artificial Sequence: Synthetic oligonucleotide
  Target: PCSK9; (-) strand; PAM type: NRG; PAM sequence: TAG
ggttagggtataggagaaag

SEQ ID NO: 9906 - DNA, 20 bp, Artificial Sequence
  Description of Artificial Sequence: Synthetic oligonucleotide
  Target: PCSK9; (-) strand; PAM type: NRG; PAM sequence: AAG
aaaggttagggtataggaga

SEQ ID NO: 9907 - DNA, 20 bp, Artificial Sequence
  Description of Artificial Sequence: Synthetic oligonucleotide
  Target: PCSK9; (-) strand; PAM type: NRG; PAM sequence: GAG
ggacaaaggttagggtatag

SEQ ID NO: 9908 - DNA, 20 bp, Artificial Sequence
  Description of Artificial Sequence: Synthetic oligonucleotide
  Target: PCSK9; (-) strand; PAM type: NRG; PAM sequence: AGG
caggacaaaggttagggtat

SEQ ID NO: 9909 - DNA, 20 bp, Artificial Sequence
  Description of Artificial Sequence: Synthetic oligonucleotide
  Target: PCSK9; (-) strand; PAM type: NRG; PAM sequence: TAG
gcaggacaaaggttagggta

SEQ ID NO: 9910 - DNA, 20 bp, Artificial Sequence
  Description of Artificial Sequence: Synthetic oligonucleotide
  Target: PCSK9; (-) strand; PAM type: NRG; PAM sequence: GGG
cccatgcaggacaaaggtta

SEQ ID NO: 9911 - DNA, 20 bp, Artificial Sequence
  Description of Artificial Sequence: Synthetic oligonucleotide
  Target: PCSK9; (-) strand; PAM type: NRG; PAM sequence: AGG
gcccatgcaggacaaaggtt

SEQ ID NO: 9912 - DNA, 20 bp, Artificial Sequence
  Description of Artificial Sequence: Synthetic oligonucleotide
  Target: PCSK9; (-) strand; PAM type: NRG; PAM sequence: TAG
cgcccatgcaggacaaaggt

SEQ ID NO: 9913 - DNA, 20 bp, Artificial Sequence
  Description of Artificial Sequence: Synthetic oligonucleotide
  Target: PCSK9; (-) strand; PAM type: NRG; PAM sequence: AGG
gagtcgcccatgcaggacaa

SEQ ID NO: 9914 - DNA, 20 bp, Artificial Sequence
  Description of Artificial Sequence: Synthetic oligonucleotide
  Target: PCSK9; (-) strand; PAM type: NRG; PAM sequence: AAG
ggagtcgcccatgcaggaca

SEQ ID NO: 9915 - DNA, 20 bp, Artificial Sequence
  Description of Artificial Sequence: Synthetic oligonucleotide
  Target: PCSK9; (-) strand; PAM type: NRG; PAM sequence: AGG
actgggggagtcgcccatgc

SEQ ID NO: 9916 - DNA, 20 bp, Artificial Sequence
  Description of Artificial Sequence: Synthetic oligonucleotide
  Target: PCSK9; (-) strand; PAM type: NRG; PAM sequence: CAG
cactgggggagtcgcccatg

SEQ ID NO: 9917 - DNA, 20 bp, Artificial Sequence
  Description of Artificial Sequence: Synthetic oligonucleotide
  Target: PCSK9; (-) strand; PAM type: NRG; PAM sequence: GAG
ctgcaagagactcactgggg

SEQ ID NO: 9918 - DNA, 20 bp, Artificial Sequence
  Description of Artificial Sequence: Synthetic oligonucleotide
  Target: PCSK9; (-) strand; PAM type: NRG; PAM sequence: GGG
agctgcaagagactcactgg

SEQ ID NO: 9919 - DNA, 20 bp, Artificial Sequence
  Description of Artificial Sequence: Synthetic oligonucleotide
  Target: PCSK9; (-) strand; PAM type: NRG; PAM sequence: GGG
aagctgcaagagactcactg

SEQ ID NO: 9920 - DNA, 20 bp, Artificial Sequence
  Description of Artificial Sequence: Synthetic oligonucleotide
  Target: PCSK9; (-) strand; PAM type: NRG; PAM sequence: GGG
aaagctgcaagagactcact

SEQ ID NO: 9921 - DNA, 20 bp, Artificial Sequence
  Description of Artificial Sequence: Synthetic oligonucleotide
  Target: PCSK9; (-) strand; PAM type: NRG; PAM sequence: TGG
aaaagctgcaagagactcac

SEQ ID NO: 9922 - DNA, 20 bp, Artificial Sequence
  Description of Artificial Sequence: Synthetic oligonucleotide
  Target: PCSK9; (-) strand; PAM type: NRG; PAM sequence: GAG
cactggggtaaaagctgcaa

SEQ ID NO: 9923 - DNA, 20 bp, Artificial Sequence
  Description of Artificial Sequence: Synthetic oligonucleotide
  Target: PCSK9; (-) strand; PAM type: NRG; PAM sequence: AAG
ggcactggggtaaaagctgc

SEQ ID NO: 9924 - DNA, 20 bp, Artificial Sequence
  Description of Artificial Sequence: Synthetic oligonucleotide
  Target: PCSK9; (-) strand; PAM type: NRG; PAM sequence: AAG
agaagcaggcactggggtaa

SEQ ID NO: 9925 - DNA, 20 bp, Artificial Sequence
  Description of Artificial Sequence: Synthetic oligonucleotide
  Target: PCSK9; (-) strand; PAM type: NRG; PAM sequence: GGG
tctccaagaagcaggcactg

SEQ ID NO: 9926 - DNA, 20 bp, Artificial Sequence
  Description of Artificial Sequence: Synthetic oligonucleotide
  Target: PCSK9; (-) strand; PAM type: NRG; PAM sequence: GGG
ttctccaagaagcaggcact

SEQ ID NO: 9927 - DNA, 20 bp, Artificial Sequence
  Description of Artificial Sequence: Synthetic oligonucleotide
  Target: PCSK9; (-) strand; PAM type: NRG; PAM sequence: TGG
attctccaagaagcaggcac

SEQ ID NO: 9928 - DNA, 20 bp, Artificial Sequence
  Description of Artificial Sequence: Synthetic oligonucleotide
  Target: PCSK9; (-) strand; PAM type: NRG; PAM sequence: AGG
gtttggattctccaagaagc

SEQ ID NO: 9929 - DNA, 20 bp, Artificial Sequence
  Description of Artificial Sequence: Synthetic oligonucleotide
  Target: PCSK9; (-) strand; PAM type: NRG; PAM sequence: CAG
agtttggattctccaagaag

SEQ ID NO: 9930 - DNA, 20 bp, Artificial Sequence
  Description of Artificial Sequence: Synthetic oligonucleotide
  Target: PCSK9; (-) strand; PAM type: NRG; PAM sequence: AAG
atcagtttggattctccaag

SEQ ID NO: 9931 - DNA, 20 bp, Artificial Sequence
  Description of Artificial Sequence: Synthetic oligonucleotide
  Target: PCSK9; (-) strand; PAM type: NRG; PAM sequence: AAG
tggatcagtttggattctcc

SEQ ID NO: 9932 - DNA, 20 bp, Artificial Sequence
  Description of Artificial Sequence: Synthetic oligonucleotide
  Target: PCSK9; (-) strand; PAM type: NRG; PAM sequence: TGG
catccctaactggatcagtt

SEQ ID NO: 9933 - DNA, 20 bp, Artificial Sequence
  Description of Artificial Sequence: Synthetic oligonucleotide
  Target: PCSK9; (-) strand; PAM type: NRG; PAM sequence: CAG
tttatcatccctaactggat

SEQ ID NO: 9934 - DNA, 20 bp, Artificial Sequence
  Description of Artificial Sequence: Synthetic oligonucleotide
  Target: PCSK9; (-) strand; PAM type: NRG; PAM sequence: TGG
tacactttatcatccctaac

SEQ ID NO: 9935 - DNA, 20 bp, Artificial Sequence
  Description of Artificial Sequence: Synthetic oligonucleotide
  Target: PCSK9; (-) strand; PAM type: NRG; PAM sequence: GAG
cctcagagaaaacagtcacc

SEQ ID NO: 9936 - DNA, 20 bp, Artificial Sequence
  Description of Artificial Sequence: Synthetic oligonucleotide
  Target: PCSK9; (-) strand; PAM type: NRG; PAM sequence: CAG
agtcacaacctcagagaaaa

SEQ ID NO: 9937 - DNA, 20 bp, Artificial Sequence
  Description of Artificial Sequence: Synthetic oligonucleotide
  Target: PCSK9; (-) strand; PAM type: NRG; PAM sequence: GAG
tcacacgagtcacaacctca

SEQ ID NO: 9938 - DNA, 20 bp, Artificial Sequence
  Description of Artificial Sequence: Synthetic oligonucleotide
  Target: PCSK9; (-) strand; PAM type: NRG; PAM sequence: CAG
cctcacacgagtcacaacct

SEQ ID NO: 9939 - DNA, 20 bp, Artificial Sequence
  Description of Artificial Sequence: Synthetic oligonucleotide
  Target: PCSK9; (-) strand; PAM type: NRG; PAM sequence: GAG
ggactgcttctgcctcacac

SEQ ID NO: 9940 - DNA, 20 bp, Artificial Sequence
  Description of Artificial Sequence: Synthetic oligonucleotide
  Target: PCSK9; (-) strand; PAM type: NRG; PAM sequence: GGG
agataccaggagggctcacg

SEQ ID NO: 9941 - DNA, 20 bp, Artificial Sequence
  Description of Artificial Sequence: Synthetic oligonucleotide
  Target: PCSK9; (-) strand; PAM type: NRG; PAM sequence: GGG
aagataccaggagggctcac

SEQ ID NO: 9942 - DNA, 20 bp, Artificial Sequence
  Description of Artificial Sequence: Synthetic oligonucleotide
  Target: PCSK9; (-) strand; PAM type: NRG; PAM sequence: CGG
caagataccaggagggctca

SEQ ID NO: 9943 - DNA, 20 bp, Artificial Sequence
  Description of Artificial Sequence: Synthetic oligonucleotide
  Target: PCSK9; (-) strand; PAM type: NRG; PAM sequence: GGG
cactccacaagataccagga

SEQ ID NO: 9944 - DNA, 20 bp, Artificial Sequence
  Description of Artificial Sequence: Synthetic oligonucleotide
  Target: PCSK9; (-) strand; PAM type: NRG; PAM sequence: AGG
ccactccacaagataccagg

SEQ ID NO: 9945 - DNA, 20 bp, Artificial Sequence
  Description of Artificial Sequence: Synthetic oligonucleotide
  Target: PCSK9; (-) strand; PAM type: NRG; PAM sequence: GAG
tccactccacaagataccag

SEQ ID NO: 9946 - DNA, 20 bp, Artificial Sequence
  Description of Artificial Sequence: Synthetic oligonucleotide
  Target: PCSK9; (-) strand; PAM type: NRG; PAM sequence: AGG
tctccactccacaagatacc

SEQ ID NO: 9947 - DNA, 20 bp, Artificial Sequence
  Description of Artificial Sequence: Synthetic oligonucleotide
  Target: PCSK9; (-) strand; PAM type: NRG; PAM sequence: CAG
ttctccactccacaagatac

SEQ ID NO: 9948 - DNA, 20 bp, Artificial Sequence
  Description of Artificial Sequence: Synthetic oligonucleotide
  Target: PCSK9; (-) strand; PAM type: NRG; PAM sequence: AAG
ccaagcgttctccactccac

SEQ ID NO: 9949 - DNA, 20 bp, Artificial Sequence
  Description of Artificial Sequence: Synthetic oligonucleotide
  Target: PCSK9; (-) strand; PAM type: NRG; PAM sequence: AAG
ggcctcctggctccaggtcc

SEQ ID NO: 9950 - DNA, 20 bp, Artificial Sequence
  Description of Artificial Sequence: Synthetic oligonucleotide
  Target: PCSK9; (-) strand; PAM type: NRG; PAM sequence: AGG
tgtctgggcctcctggctcc

SEQ ID NO: 9951 - DNA, 20 bp, Artificial Sequence
  Description of Artificial Sequence: Synthetic oligonucleotide
  Target: PCSK9; (-) strand; PAM type: NRG; PAM sequence: CAG
atgtctgggcctcctggctc

SEQ ID NO: 9952 - DNA, 20 bp, Artificial Sequence
  Description of Artificial Sequence: Synthetic oligonucleotide
  Target: PCSK9; (-) strand; PAM type: NRG; PAM sequence: TGG
ggatgtatgtctgggcctcc

SEQ ID NO: 9953 - DNA, 20 bp, Artificial Sequence
  Description of Artificial Sequence: Synthetic oligonucleotide
  Target: PCSK9; (-) strand; PAM type: NRG; PAM sequence: GGG
ctcggacaggatgtatgtct

SEQ ID NO: 9954 - DNA, 20 bp, Artificial Sequence
  Description of Artificial Sequence: Synthetic oligonucleotide
  Target: PCSK9; (-) strand; PAM type: NRG; PAM sequence: TGG
gctcggacaggatgtatgtc

SEQ ID NO: 9955 - DNA, 20 bp, Artificial Sequence
  Description of Artificial Sequence: Synthetic oligonucleotide
  Target: PCSK9; (-) strand; PAM type: NRG; PAM sequence: AGG
caggaagctgcagctcggac

SEQ ID NO: 9956 - DNA, 20 bp, Artificial Sequence
  Description of Artificial Sequence: Synthetic oligonucleotide
  Target: PCSK9; (-) strand; PAM type: NRG; PAM sequence: CAG
acaggaagctgcagctcgga

SEQ ID NO: 9957 - DNA, 20 bp, Artificial Sequence
  Description of Artificial Sequence: Synthetic oligonucleotide
  Target: PCSK9; (-) strand; PAM type: NRG; PAM sequence: CGG
agagacaggaagctgcagct

SEQ ID NO: 9958 - DNA, 20 bp, Artificial Sequence
  Description of Artificial Sequence: Synthetic oligonucleotide
  Target: PCSK9; (-) strand; PAM type: NRG; PAM sequence: CAG
attttagagacaggaagctg

SEQ ID NO: 9959 - DNA, 20 bp, Artificial Sequence
  Description of Artificial Sequence: Synthetic oligonucleotide
  Target: PCSK9; (-) strand; PAM type: NRG; PAM sequence: AAG
cggctcattttagagacagg

SEQ ID NO: 9960 - DNA, 20 bp, Artificial Sequence
  Description of Artificial Sequence: Synthetic oligonucleotide
  Target: PCSK9; (-) strand; PAM type: NRG; PAM sequence: AGG
ggccggctcattttagagac

SEQ ID NO: 9961 - DNA, 20 bp, Artificial Sequence
  Description of Artificial Sequence: Synthetic oligonucleotide
  Target: PCSK9; (-) strand; PAM type: NRG; PAM sequence: CAG
tggccggctcattttagaga

SEQ ID NO: 9962 - DNA, 20 bp, Artificial Sequence
  Description of Artificial Sequence: Synthetic oligonucleotide
  Target: PCSK9; (-) strand; PAM type: NRG; PAM sequence: GAG
gcgctggccggctcatttta

SEQ ID NO: 9963 - DNA, 20 bp, Artificial Sequence
  Description of Artificial Sequence: Synthetic oligonucleotide
  Target: PCSK9; (-) strand; PAM type: NRG; PAM sequence: TAG
ctgcgctggccggctcattt

SEQ ID NO: 9964 - DNA, 20 bp, Artificial Sequence
  Description of Artificial Sequence: Synthetic oligonucleotide
  Target: PCSK9; (-) strand; PAM type: NRG; PAM sequence: CGG
gtctggccacctgcgctggc

SEQ ID NO: 9965 - DNA, 20 bp, Artificial Sequence
  Description of Artificial Sequence: Synthetic oligonucleotide
  Target: PCSK9; (-) strand; PAM type: NRG; PAM sequence: TGG
tgatgtctggccacctgcgc

SEQ ID NO: 9966 - DNA, 20 bp, Artificial Sequence
  Description of Artificial Sequence: Synthetic oligonucleotide
  Target: PCSK9; (-) strand; PAM type: NRG; PAM sequence: TGG
aggagaataacagtgatgtc

SEQ ID NO: 9967 - DNA, 20 bp, Artificial Sequence
  Description of Artificial Sequence: Synthetic oligonucleotide
  Target: PCSK9; (-) strand; PAM type: NRG; PAM sequence: CAG
aaagactcaaaggagaataa

SEQ ID NO: 9968 - DNA, 20 bp, Artificial Sequence
  Description of Artificial Sequence: Synthetic oligonucleotide
  Target: PCSK9; (-) strand; PAM type: NRG; PAM sequence: GAG
caagatttaaagactcaaag

SEQ ID NO: 9969 - DNA, 20 bp, Artificial Sequence
  Description of Artificial Sequence: Synthetic oligonucleotide
  Target: PCSK9; (-) strand; PAM type: NRG; PAM sequence: AGG
aacaagatttaaagactcaa

SEQ ID NO: 9970 - DNA, 20 bp, Artificial Sequence
  Description of Artificial Sequence: Synthetic oligonucleotide
  Target: PCSK9; (-) strand; PAM type: NRG; PAM sequence: AAG
caacaagatttaaagactca

SEQ ID NO: 9971 - DNA, 20 bp, Artificial Sequence
  Description of Artificial Sequence: Synthetic oligonucleotide
  Target: PCSK9; (-) strand; PAM type: NRG; PAM sequence: AAG
aagaaagacaacaagattta

SEQ ID NO: 9972 - DNA, 20 bp, Artificial Sequence
  Description of Artificial Sequence: Synthetic oligonucleotide
  Target: PCSK9; (-) strand; PAM type: NRG; PAM sequence: AAG
gagtctgcaagaaagacaac

SEQ ID NO: 9973 - DNA, 20 bp, Artificial Sequence
  Description of Artificial Sequence: Synthetic oligonucleotide
  Target: PCSK9; (-) strand; PAM type: NRG; PAM sequence: AAG
agctcaccgagtctgcaaga

SEQ ID NO: 9974 - DNA, 20 bp, Artificial Sequence
  Description of Artificial Sequence: Synthetic oligonucleotide
  Target: PCSK9; (-) strand; PAM type: NRG; PAM sequence: AAG
tcacagctcaccgagtctgc

SEQ ID NO: 9975 - DNA, 20 bp, Artificial Sequence
  Description of Artificial Sequence: Synthetic oligonucleotide
  Target: PCSK9; (-) strand; PAM type: NRG; PAM sequence: GAG
atagcctttcacagctcacc

SEQ ID NO: 9976 - DNA, 20 bp, Artificial Sequence
  Description of Artificial Sequence: Synthetic oligonucleotide
  Target: PCSK9; (-) strand; PAM type: NRG; PAM sequence: CAG
gcccctattatagcctttca

SEQ ID NO: 9977 - DNA, 20 bp, Artificial Sequence
  Description of Artificial Sequence: Synthetic oligonucleotide
  Target: PCSK9; (-) strand; PAM type: NRG; PAM sequence: TAG
gtaaaataaagcccctatta

SEQ ID NO: 9978 - DNA, 20 bp, Artificial Sequence
  Description of Artificial Sequence: Synthetic oligonucleotide
  Target: PCSK9; (-) strand; PAM type: NRG; PAM sequence: AAG
tagtatcaaagtgtaaaata

SEQ ID NO: 9979 - DNA, 20 bp, Artificial Sequence
  Description of Artificial Sequence: Synthetic oligonucleotide
  Target: PCSK9; (-) strand; PAM type: NRG; PAM sequence: AAG
atgttcaaaaaatagtatca

SEQ ID NO: 9980 - DNA, 20 bp, Artificial Sequence
  Description of Artificial Sequence: Synthetic oligonucleotide
  Target: PCSK9; (-) strand; PAM type: NRG; PAM sequence: TAG
taatatgaatgttcaaaaaa

SEQ ID NO: 9981 - DNA, 20 bp, Artificial Sequence
  Description of Artificial Sequence: Synthetic oligonucleotide
  Target: PCSK9; (-) strand; PAM type: NRG; PAM sequence: AAG
gctactgccaagaaggaccc

SEQ ID NO: 9982 - DNA, 20 bp, Artificial Sequence
  Description of Artificial Sequence: Synthetic oligonucleotide
  Target: PCSK9; (-) strand; PAM type: NRG; PAM sequence: AGG
tggcaatgctactgccaaga

SEQ ID NO: 9983 - DNA, 20 bp, Artificial Sequence
  Description of Artificial Sequence: Synthetic oligonucleotide
  Target: PCSK9; (-) strand; PAM type: NRG; PAM sequence: AAG
ctggcaatgctactgccaag

SEQ ID NO: 9984 - DNA, 20 bp, Artificial Sequence
  Description of Artificial Sequence: Synthetic oligonucleotide
  Target: PCSK9; (-) strand; PAM type: NRG; PAM sequence: AAG
cagctggcaatgctactgcc

SEQ ID NO: 9985 - DNA, 20 bp, Artificial Sequence
  Description of Artificial Sequence: Synthetic oligonucleotide
  Target: PCSK9; (-) strand; PAM type: NRG; PAM sequence: TGG
aactgtccaaggccatcagc

SEQ ID NO: 9986 - DNA, 20 bp, Artificial Sequence
  Description of Artificial Sequence: Synthetic oligonucleotide
  Target: PCSK9; (-) strand; PAM type: NRG; PAM sequence: CAG
aggtaactgtccaaggccat

SEQ ID NO: 9987 - DNA, 20 bp, Artificial Sequence
  Description of Artificial Sequence: Synthetic oligonucleotide
  Target: PCSK9; (-) strand; PAM type: NRG; PAM sequence: AGG
agagggcaggtaactgtcca

SEQ ID NO: 9988 - DNA, 20 bp, Artificial Sequence
  Description of Artificial Sequence: Synthetic oligonucleotide
  Target: PCSK9; (-) strand; PAM type: NRG; PAM sequence: AAG
gagagggcaggtaactgtcc

SEQ ID NO: 9989 - DNA, 20 bp, Artificial Sequence
  Description of Artificial Sequence: Synthetic oligonucleotide
  Target: PCSK9; (-) strand; PAM type: NRG; PAM sequence: AGG
aagggaggcctagagagggc

SEQ ID NO: 9990 - DNA, 20 bp, Artificial Sequence
  Description of Artificial Sequence: Synthetic oligonucleotide
  Target: PCSK9; (-) strand; PAM type: NRG; PAM sequence: CAG
aaagggaggcctagagaggg

SEQ ID NO: 9991 - DNA, 20 bp, Artificial Sequence
  Description of Artificial Sequence: Synthetic oligonucleotide
  Target: PCSK9; (-) strand; PAM type: NRG; PAM sequence: GGG
aggaaagggaggcctagaga

SEQ ID NO: 9992 - DNA, 20 bp, Artificial Sequence
  Description of Artificial Sequence: Synthetic oligonucleotide
  Target: PCSK9; (-) strand; PAM type: NRG; PAM sequence: AGG
aaggaaagggaggcctagag

SEQ ID NO: 9993 - DNA, 20 bp, Artificial Sequence
  Description of Artificial Sequence: Synthetic oligonucleotide
  Target: PCSK9; (-) strand; PAM type: NRG; PAM sequence: GAG
caaggaaagggaggcctaga

SEQ ID NO: 9994 - DNA, 20 bp, Artificial Sequence
  Description of Artificial Sequence: Synthetic oligonucleotide
  Target: PCSK9; (-) strand; PAM type: NRG; PAM sequence: GAG
gacaaggaaagggaggccta

SEQ ID NO: 9995 - DNA, 20 bp, Artificial Sequence
  Description of Artificial Sequence: Synthetic oligonucleotide
  Target: PCSK9; (-) strand; PAM type: NRG; PAM sequence: TAG
tagacaaggaaagggaggcc

SEQ ID NO: 9996 - DNA, 20 bp, Artificial Sequence
  Description of Artificial Sequence: Synthetic oligonucleotide
  Target: PCSK9; (-) strand; PAM type: NRG; PAM sequence: AGG
tttcatagacaaggaaaggg

SEQ ID NO: 9997 - DNA, 20 bp, Artificial Sequence
  Description of Artificial Sequence: Synthetic oligonucleotide
  Target: PCSK9; (-) strand; PAM type: NRG; PAM sequence: GAG
atttcatagacaaggaaagg

SEQ ID NO: 9998 - DNA, 20 bp, Artificial Sequence
  Description of Artificial Sequence: Synthetic oligonucleotide
  Target: PCSK9; (-) strand; PAM type: NRG; PAM sequence: GGG
gtatttcatagacaaggaaa

SEQ ID NO: 9999 - DNA, 20 bp, Artificial Sequence
  Description of Artificial Sequence: Synthetic oligonucleotide
  Target: PCSK9; (-) strand; PAM type: NRG; PAM sequence: AGG
tgtatttcatagacaaggaa

SEQ ID NO: 10000 - DNA, 20 bp, Artificial Sequence
  Description of Artificial Sequence: Synthetic oligonucleotide
  Target: PCSK9; (-) strand; PAM type: NRG; PAM sequence: AAG
atgtatttcatagacaagga

SEQ ID NO: 10001 - DNA, 20 bp, Artificial Sequence
  Description of Artificial Sequence: Synthetic oligonucleotide
  Target: PCSK9; (-) strand; PAM type: NRG; PAM sequence: AGG
tataatgtatttcatagaca

SEQ ID NO: 10002 - DNA, 20 bp, Artificial Sequence
  Description of Artificial Sequence: Synthetic oligonucleotide
  Target: PCSK9; (-) strand; PAM type: NRG; PAM sequence: AAG
ctataatgtatttcatagac

SEQ ID NO: 10003 - DNA, 20 bp, Artificial Sequence
  Description of Artificial Sequence: Synthetic oligonucleotide
  Target: PCSK9; (-) strand; PAM type: NRG; PAM sequence: TAG
ctattctataatgtatttca

SEQ ID NO: 10004 - DNA, 20 bp, Artificial Sequence
  Description of Artificial Sequence: Synthetic oligonucleotide
  Target: PCSK9; (-) strand; PAM type: NRG; PAM sequence: AAG
cacatcccaggcactggtga

SEQ ID NO: 10005 - DNA, 20 bp, Artificial Sequence
  Description of Artificial Sequence: Synthetic oligonucleotide
  Target: PCSK9; (-) strand; PAM type: NRG; PAM sequence: TGG
acagagcacatcccaggcac

SEQ ID NO: 10006 - DNA, 20 bp, Artificial Sequence
  Description of Artificial Sequence: Synthetic oligonucleotide
  Target: PCSK9; (-) strand; PAM type: NRG; PAM sequence: AGG
gaaactacagagcacatccc

SEQ ID NO: 10007 - DNA, 20 bp, Artificial Sequence
  Description of Artificial Sequence: Synthetic oligonucleotide
  Target: PCSK9; (-) strand; PAM type: NRG; PAM sequence: CAG
agaaactacagagcacatcc

SEQ ID NO: 10008 - DNA, 20 bp, Artificial Sequence
  Description of Artificial Sequence: Synthetic oligonucleotide
  Target: PCSK9; (-) strand; PAM type: NRG; PAM sequence: GAG
gttaacacacagaaactaca

SEQ ID NO: 10009 - DNA, 20 bp, Artificial Sequence
  Description of Artificial Sequence: Synthetic oligonucleotide
  Target: PCSK9; (-) strand; PAM type: NRG; PAM sequence: CAG
tagttaacacacagaaacta

SEQ ID NO: 10010 - DNA, 20 bp, Artificial Sequence
  Description of Artificial Sequence: Synthetic oligonucleotide
  Target: PCSK9; (-) strand; PAM type: NRG; PAM sequence: CAG
tcaaccttatagttaacaca

SEQ ID NO: 10011 - DNA, 20 bp, Artificial Sequence
  Description of Artificial Sequence: Synthetic oligonucleotide
  Target: PCSK9; (-) strand; PAM type: NRG; PAM sequence: TAG
tgagcataaagtcaacctta

SEQ ID NO: 10012 - DNA, 20 bp, Artificial Sequence
  Description of Artificial Sequence: Synthetic oligonucleotide
  Target: PCSK9; (-) strand; PAM type: NRG; PAM sequence: AAG
gagaggagggaatgagcata

SEQ ID NO: 10013 - DNA, 20 bp, Artificial Sequence
  Description of Artificial Sequence: Synthetic oligonucleotide
  Target: PCSK9; (-) strand; PAM type: NRG; PAM sequence: GAG
tttgtgggagaggagggaat

SEQ ID NO: 10014 - DNA, 20 bp, Artificial Sequence
  Description of Artificial Sequence: Synthetic oligonucleotide
  Target: PCSK9; (-) strand; PAM type: NRG; PAM sequence: GGG
gcgacatttgtgggagagga

SEQ ID NO: 10015 - DNA, 20 bp, Artificial Sequence
  Description of Artificial Sequence: Synthetic oligonucleotide
  Target: PCSK9; (-) strand; PAM type: NRG; PAM sequence: AGG
ggcgacatttgtgggagagg

SEQ ID NO: 10016 - DNA, 20 bp, Artificial Sequence
  Description of Artificial Sequence: Synthetic oligonucleotide
  Target: PCSK9; (-) strand; PAM type: NRG; PAM sequence: GAG
aggcgacatttgtgggagag

SEQ ID NO: 10017 - DNA, 20 bp, Artificial Sequence
  Description of Artificial Sequence: Synthetic oligonucleotide
  Target: PCSK9; (-) strand; PAM type: NRG; PAM sequence: AGG
caaggcgacatttgtgggag

SEQ ID NO: 10018 - DNA, 20 bp, Artificial Sequence
  Description of Artificial Sequence: Synthetic oligonucleotide
  Target: PCSK9; (-) strand; PAM type: NRG; PAM sequence: GAG
ccaaggcgacatttgtggga

SEQ ID NO: 10019 - DNA, 20 bp, Artificial Sequence
  Description of Artificial Sequence: Synthetic oligonucleotide
  Target: PCSK9; (-) strand; PAM type: NRG; PAM sequence: GAG
ttccaaggcgacatttgtgg

SEQ ID NO: 10020 - DNA, 20 bp, Artificial Sequence
  Description of Artificial Sequence: Synthetic oligonucleotide
  Target: PCSK9; (-) strand; PAM type: NRG; PAM sequence: GGG
ctttccaaggcgacatttgt

SEQ ID NO: 10021 - DNA, 20 bp, Artificial Sequence
  Description of Artificial Sequence: Synthetic oligonucleotide
  Target: PCSK9; (-) strand; PAM type: NRG; PAM sequence: TGG
tctttccaaggcgacatttg

SEQ ID NO: 10022 - DNA, 20 bp, Artificial Sequence
  Description of Artificial Sequence: Synthetic oligonucleotide
  Target: PCSK9; (-) strand; PAM type: NRG; PAM sequence: AGG
aggctgcctccgtctttcca

SEQ ID NO: 10023 - DNA, 20 bp, Artificial Sequence
  Description of Artificial Sequence: Synthetic oligonucleotide
  Target: PCSK9; (-) strand; PAM type: NRG; PAM sequence: AAG
caggctgcctccgtctttcc

SEQ ID NO: 10024 - DNA, 20 bp, Artificial Sequence
  Description of Artificial Sequence: Synthetic oligonucleotide
  Target: PCSK9; (-) strand; PAM type: NRG; PAM sequence: AGG
ctaggagatacacctccacc

SEQ ID NO: 10025 - DNA, 20 bp, Artificial Sequence
  Description of Artificial Sequence: Synthetic oligonucleotide
  Target: PCSK9; (-) strand; PAM type: NRG; PAM sequence: CAG
tctaggagatacacctccac

SEQ ID NO: 10026 - DNA, 20 bp, Artificial Sequence
  Description of Artificial Sequence: Synthetic oligonucleotide
  Target: PCSK9; (-) strand; PAM type: NRG; PAM sequence: GAG
ctctgtatgctggtgtctag

SEQ ID NO: 10027 - DNA, 20 bp, Artificial Sequence
  Description of Artificial Sequence: Synthetic oligonucleotide
  Target: PCSK9; (-) strand; PAM type: NRG; PAM sequence: AGG
cactctgtatgctggtgtct

SEQ ID NO: 10028 - DNA, 20 bp, Artificial Sequence
  Description of Artificial Sequence: Synthetic oligonucleotide
  Target: PCSK9; (-) strand; PAM type: NRG; PAM sequence: TAG
tcactctgtatgctggtgtc

SEQ ID NO: 10029 - DNA, 20 bp, Artificial Sequence
  Description of Artificial Sequence: Synthetic oligonucleotide
  Target: PCSK9; (-) strand; PAM type: NRG; PAM sequence: TGG
ccggtggtcactctgtatgc

SEQ ID NO: 10030 - DNA, 20 bp, Artificial Sequence
  Description of Artificial Sequence: Synthetic oligonucleotide
  Target: PCSK9; (-) strand; PAM type: NRG; PAM sequence: TGG
ccctgccctcgatttcccgg

SEQ ID NO: 10031 - DNA, 20 bp, Artificial Sequence
  Description of Artificial Sequence: Synthetic oligonucleotide
  Target: PCSK9; (-) strand; PAM type: NRG; PAM sequence: CGG
tgaccctgccctcgatttcc

SEQ ID NO: 10032 - DNA, 20 bp, Artificial Sequence
  Description of Artificial Sequence: Synthetic oligonucleotide
  Target: PCSK9; (-) strand; PAM type: NRG; PAM sequence: CGG
ctcgggcacattctcgaagt

SEQ ID NO: 10033 - DNA, 20 bp, Artificial Sequence
  Description of Artificial Sequence: Synthetic oligonucleotide
  Target: PCSK9; (-) strand; PAM type: NRG; PAM sequence: AAG
cctcctcgggcacattctcg

SEQ ID NO: 10034 - DNA, 20 bp, Artificial Sequence
  Description of Artificial Sequence: Synthetic oligonucleotide
  Target: PCSK9; (-) strand; PAM type: NRG; PAM sequence: GGG
aagcgggtcccgtcctcctc

SEQ ID NO: 10035 - DNA, 20 bp, Artificial Sequence
  Description of Artificial Sequence: Synthetic oligonucleotide
  Target: PCSK9; (-) strand; PAM type: NRG; PAM sequence: CGG
gaagcgggtcccgtcctcct

SEQ ID NO: 10036 - DNA, 20 bp, Artificial Sequence
  Description of Artificial Sequence: Synthetic oligonucleotide
  Target: PCSK9; (-) strand; PAM type: NRG; PAM sequence: GGG
gcttacctgtctgtggaagc

SEQ ID NO: 10037 - DNA, 20 bp, Artificial Sequence
  Description of Artificial Sequence: Synthetic oligonucleotide
  Target: PCSK9; (-) strand; PAM type: NRG; PAM sequence: CGG
tgcttacctgtctgtggaag

SEQ ID NO: 10038 - DNA, 20 bp, Artificial Sequence
  Description of Artificial Sequence: Synthetic oligonucleotide
  Target: PCSK9; (-) strand; PAM type: NRG; PAM sequence: AAG
ccgtgcttacctgtctgtgg

SEQ ID NO: 10039 - DNA, 20 bp, Artificial Sequence
  Description of Artificial Sequence: Synthetic oligonucleotide
  Target: PCSK9; (-) strand; PAM type: NRG; PAM sequence: TGG
cggccgtgcttacctgtctg

SEQ ID NO: 10040 - DNA, 20 bp, Artificial Sequence
  Description of Artificial Sequence: Synthetic oligonucleotide
  Target: PCSK9; (-) strand; PAM type: NRG; PAM sequence: CGG
gaggcagccctcccatcaga

SEQ ID NO: 10041 - DNA, 20 bp, Artificial Sequence
  Description of Artificial Sequence: Synthetic oligonucleotide
  Target: PCSK9; (-) strand; PAM type: NRG; PAM sequence: CAG
ggcagaggcagccctcccat

SEQ ID NO: 10042 - DNA, 20 bp, Artificial Sequence
  Description of Artificial Sequence: Synthetic oligonucleotide
  Target: PCSK9; (-) strand; PAM type: NRG; PAM sequence: CAG
gatggggatatgggcagagg

SEQ ID NO: 10043 - DNA, 20 bp, Artificial Sequence
  Description of Artificial Sequence: Synthetic oligonucleotide
  Target: PCSK9; (-) strand; PAM type: NRG; PAM sequence: AGG
caggatggggatatgggcag

SEQ ID NO: 10044 - DNA, 20 bp, Artificial Sequence
  Description of Artificial Sequence: Synthetic oligonucleotide
  Target: PCSK9; (-) strand; PAM type: NRG; PAM sequence: GAG
ccaggatggggatatgggca

SEQ ID NO: 10045 - DNA, 20 bp, Artificial Sequence
  Description of Artificial Sequence: Synthetic oligonucleotide
  Target: PCSK9; (-) strand; PAM type: NRG; PAM sequence: CAG
ctccaggatggggatatggg

SEQ ID NO: 10046 - DNA, 20 bp, Artificial Sequence
  Description of Artificial Sequence: Synthetic oligonucleotide
  Target: PCSK9; (-) strand; PAM type: NRG; PAM sequence: GGG
cacctccaggatggggatat

SEQ ID NO: 10047 - DNA, 20 bp, Artificial Sequence
  Description of Artificial Sequence: Synthetic oligonucleotide
  Target: PCSK9; (-) strand; PAM type: NRG; PAM sequence: TGG
ccacctccaggatggggata

SEQ ID NO: 10048 - DNA, 20 bp, Artificial Sequence
  Description of Artificial Sequence: Synthetic oligonucleotide
  Target: PCSK9; (-) strand; PAM type: NRG; PAM sequence: GGG
ccccacccacctccaggatg

SEQ ID NO: 10049 - DNA, 20 bp, Artificial Sequence
  Description of Artificial Sequence: Synthetic oligonucleotide
  Target: PCSK9; (-) strand; PAM type: NRG; PAM sequence: GGG
tccccacccacctccaggat

SEQ ID NO: 10050 - DNA, 20 bp, Artificial Sequence
  Description of Artificial Sequence: Synthetic oligonucleotide
  Target: PCSK9; (-) strand; PAM type: NRG; PAM sequence: TGG
gtccccacccacctccagga

SEQ ID NO: 10051 - DNA, 20 bp, Artificial Sequence
  Description of Artificial Sequence: Synthetic oligonucleotide
  Target: PCSK9; (-) strand; PAM type: NRG; PAM sequence: AGG
ggcagtccccacccacctcc

SEQ ID NO: 10052 - DNA, 20 bp, Artificial Sequence
  Description of Artificial Sequence: Synthetic oligonucleotide
  Target: PCSK9; (-) strand; PAM type: NRG; PAM sequence: CAG
tggcagtccccacccacctc

SEQ ID NO: 10053 - DNA, 20 bp, Artificial Sequence
  Description of Artificial Sequence: Synthetic oligonucleotide
  Target: PCSK9; (-) strand; PAM type: NRG; PAM sequence: CAG
gctgcaacgctctggggtgg

SEQ ID NO: 10054 - DNA, 20 bp, Artificial Sequence
  Description of Artificial Sequence: Synthetic oligonucleotide
  Target: PCSK9; (-) strand; PAM type: NRG; PAM sequence: TGG
acagctgcaacgctctgggg

SEQ ID NO: 10055 - DNA, 20 bp, Artificial Sequence
  Description of Artificial Sequence: Synthetic oligonucleotide
  Target: PCSK9; (-) strand; PAM type: NRG; PAM sequence: GGG
agtacagctgcaacgctctg

SEQ ID NO: 10056 - DNA, 20 bp, Artificial Sequence
  Description of Artificial Sequence: Synthetic oligonucleotide
  Target: PCSK9; (-) strand; PAM type: NRG; PAM sequence: GGG
gagtacagctgcaacgctct

SEQ ID NO: 10057 - DNA, 20 bp, Artificial Sequence
  Description of Artificial Sequence: Synthetic oligonucleotide
  Target: PCSK9; (-) strand; PAM type: NRG; PAM sequence: TGG
ggagtacagctgcaacgctc

SEQ ID NO: 10058 - DNA, 20 bp, Artificial Sequence
  Description of Artificial Sequence: Synthetic oligonucleotide
  Target: PCSK9; (-) strand; PAM type: NRG; PAM sequence: CAG
gggggtgcaacccaggagta

SEQ ID NO: 10059 - DNA, 20 bp, Artificial Sequence
  Description of Artificial Sequence: Synthetic oligonucleotide
  Target: PCSK9; (-) strand; PAM type: NRG; PAM sequence: GAG
ctggggggggtgcaacccag

SEQ ID NO: 10060 - DNA, 20 bp, Artificial Sequence
  Description of Artificial Sequence: Synthetic oligonucleotide
  Target: PCSK9; (-) strand; PAM type: NRG; PAM sequence: AGG
agctggggggggtgcaaccc

SEQ ID NO: 10061 - DNA, 20 bp, Artificial Sequence
  Description of Artificial Sequence: Synthetic oligonucleotide
  Target: PCSK9; (-) strand; PAM type: NRG; PAM sequence: CAG
cagctggggggggtgcaacc

SEQ ID NO: 10062 - DNA, 20 bp, Artificial Sequence
  Description of Artificial Sequence: Synthetic oligonucleotide
  Target: PCSK9; (-) strand; PAM type: NRG; PAM sequence: GGG
gggacagtgacagctggggg

SEQ ID NO: 10063 - DNA, 20 bp, Artificial Sequence
  Description of Artificial Sequence: Synthetic oligonucleotide
  Target: PCSK9; (-) strand; PAM type: NRG; PAM sequence: GGG
ggggacagtgacagctgggg

SEQ ID NO: 10064 - DNA, 20 bp, Artificial Sequence
  Description of Artificial Sequence: Synthetic oligonucleotide
  Target: PCSK9; (-) strand; PAM type: NRG; PAM sequence: GGG
aggggacagtgacagctggg

SEQ ID NO: 10065 - DNA, 20 bp, Artificial Sequence
  Description of Artificial Sequence: Synthetic oligonucleotide
  Target: PCSK9; (-) strand; PAM type: NRG; PAM sequence: GGG
gaggggacagtgacagctgg

SEQ ID NO: 10066 - DNA, 20 bp, Artificial Sequence
  Description of Artificial Sequence: Synthetic oligonucleotide
  Target: PCSK9; (-) strand; PAM type: NRG; PAM sequence: GGG
ggaggggacagtgacagctg

SEQ ID NO: 10067 - DNA, 20 bp, Artificial Sequence
  Description of Artificial Sequence: Synthetic oligonucleotide
  Target: PCSK9; (-) strand; PAM type: NRG; PAM sequence: GGG
gggaggggacagtgacagct

SEQ ID NO: 10068 - DNA, 20 bp, Artificial Sequence
  Description of Artificial Sequence: Synthetic oligonucleotide
  Target: PCSK9; (-) strand; PAM type: NRG; PAM sequence: TGG
agggaggggacagtgacagc

SEQ ID NO: 10069 - DNA, 20 bp, Artificial Sequence
  Description of Artificial Sequence: Synthetic oligonucleotide
  Target: PCSK9; (-) strand; PAM type: NRG; PAM sequence: CAG
tggcagggaggggacagtga

SEQ ID NO: 10070 - DNA, 20 bp, Artificial Sequence
  Description of Artificial Sequence: Synthetic oligonucleotide
  Target: PCSK9; (-) strand; PAM type: NRG; PAM sequence: CAG
aactgatggcagggagggga

SEQ ID NO: 10071 - DNA, 20 bp, Artificial Sequence
  Description of Artificial Sequence: Synthetic oligonucleotide
  Target: PCSK9; (-) strand; PAM type: NRG; PAM sequence: GGG
ccacaactgatggcagggag

SEQ ID NO: 10072 - DNA, 20 bp, Artificial Sequence
  Description of Artificial Sequence: Synthetic oligonucleotide
  Target: PCSK9; (-) strand; PAM type: NRG; PAM sequence: GGG
cccacaactgatggcaggga

SEQ ID NO: 10073 - DNA, 20 bp, Artificial Sequence
  Description of Artificial Sequence: Synthetic oligonucleotide
  Target: PCSK9; (-) strand; PAM type: NRG; PAM sequence: AGG
tcccacaactgatggcaggg

SEQ ID NO: 10074 - DNA, 20 bp, Artificial Sequence
  Description of Artificial Sequence: Synthetic oligonucleotide
  Target: PCSK9; (-) strand; PAM type: NRG; PAM sequence: GAG
ttcccacaactgatggcagg

SEQ ID NO: 10075 - DNA, 20 bp, Artificial Sequence
  Description of Artificial Sequence: Synthetic oligonucleotide
  Target: PCSK9; (-) strand; PAM type: NRG; PAM sequence: GGG
ccttcccacaactgatggca

SEQ ID NO: 10076 - DNA, 20 bp, Artificial Sequence
  Description of Artificial Sequence: Synthetic oligonucleotide
  Target: PCSK9; (-) strand; PAM type: NRG; PAM sequence: AGG
cccttcccacaactgatggc

SEQ ID NO: 10077 - DNA, 20 bp, Artificial Sequence
  Description of Artificial Sequence: Synthetic oligonucleotide
  Target: PCSK9; (-) strand; PAM type: NRG; PAM sequence: CAG
gcccttcccacaactgatgg

SEQ ID NO: 10078 - DNA, 20 bp, Artificial Sequence
  Description of Artificial Sequence: Synthetic oligonucleotide
  Target: PCSK9; (-) strand; PAM type: NRG; PAM sequence: TGG
aacgcccttcccacaactga

SEQ ID NO: 10079 - DNA, 20 bp, Artificial Sequence
  Description of Artificial Sequence: Synthetic oligonucleotide
  Target: PCSK9; (-) strand; PAM type: NRG; PAM sequence: TGG
caaatcagcaggtggctgga

SEQ ID NO: 10080 - DNA, 20 bp, Artificial Sequence
  Description of Artificial Sequence: Synthetic oligonucleotide
  Target: PCSK9; (-) strand; PAM type: NRG; PAM sequence: TGG
ataacaaatcagcaggtggc

SEQ ID NO: 10081 - DNA, 20 bp, Artificial Sequence
  Description of Artificial Sequence: Synthetic oligonucleotide
  Target: PCSK9; (-) strand; PAM type: NRG; PAM sequence: TGG
ccctataacaaatcagcagg

SEQ ID NO: 10082 - DNA, 20 bp, Artificial Sequence
  Description of Artificial Sequence: Synthetic oligonucleotide
  Target: PCSK9; (-) strand; PAM type: NRG; PAM sequence: AGG
ccaccctataacaaatcagc

SEQ ID NO: 10083 - DNA, 20 bp, Artificial Sequence
  Description of Artificial Sequence: Synthetic oligonucleotide
  Target: PCSK9; (-) strand; PAM type: NRG; PAM sequence: CAG
tccaccctataacaaatcag

SEQ ID NO: 10084 - DNA, 20 bp, Artificial Sequence
  Description of Artificial Sequence: Synthetic oligonucleotide
  Target: PCSK9; (-) strand; PAM type: NRG; PAM sequence: CAG
ccctccaccctataacaaat

SEQ ID NO: 10085 - DNA, 20 bp, Artificial Sequence
  Description of Artificial Sequence: Synthetic oligonucleotide
  Target: PCSK9; (-) strand; PAM type: NRG; PAM sequence: AAG
aacacaaggaccacatgaga

SEQ ID NO: 10086 - DNA, 20 bp, Artificial Sequence
  Description of Artificial Sequence: Synthetic oligonucleotide
  Target: PCSK9; (-) strand; PAM type: NRG; PAM sequence: GAG
gacgaacacaaggaccacat

SEQ ID NO: 10087 - DNA, 20 bp, Artificial Sequence
  Description of Artificial Sequence: Synthetic oligonucleotide
  Target: PCSK9; (-) strand; PAM type: NRG; PAM sequence: AGG
tggcctgctcgacgaacaca

SEQ ID NO: 10088 - DNA, 20 bp, Artificial Sequence
  Description of Artificial Sequence: Synthetic oligonucleotide
  Target: PCSK9; (-) strand; PAM type: NRG; PAM sequence: AAG
ctggcctgctcgacgaacac

SEQ ID NO: 10089 - DNA, 20 bp, Artificial Sequence
  Description of Artificial Sequence: Synthetic oligonucleotide
  Target: PCSK9; (-) strand; PAM type: NRG; PAM sequence: TGG
gccatgactgtcacacttgc

SEQ ID NO: 10090 - DNA, 20 bp, Artificial Sequence
  Description of Artificial Sequence: Synthetic oligonucleotide
  Target: PCSK9; (-) strand; PAM type: NRG; PAM sequence: GGG
gctgaccacccctgccaggt

SEQ ID NO: 10091 - DNA, 20 bp, Artificial Sequence
  Description of Artificial Sequence: Synthetic oligonucleotide
  Target: PCSK9; (-) strand; PAM type: NRG; PAM sequence: TGG
cgctgaccacccctgccagg

SEQ ID NO: 10092 - DNA, 20 bp, Artificial Sequence
  Description of Artificial Sequence: Synthetic oligonucleotide
  Target: PCSK9; (-) strand; PAM type: NRG; PAM sequence: AGG
ggccgctgaccacccctgcc

SEQ ID NO: 10093 - DNA, 20 bp, Artificial Sequence
  Description of Artificial Sequence: Synthetic oligonucleotide
  Target: PCSK9; (-) strand; PAM type: NRG; PAM sequence: CAG
cggccgctgaccacccctgc

SEQ ID NO: 10094 - DNA, 20 bp, Artificial Sequence
  Description of Artificial Sequence: Synthetic oligonucleotide
  Target: PCSK9; (-) strand; PAM type: NRG; PAM sequence: CGG
ccttggccacgccggcatcc

SEQ ID NO: 10095 - DNA, 20 bp, Artificial Sequence
  Description of Artificial Sequence: Synthetic oligonucleotide
  Target: PCSK9; (-) strand; PAM type: NRG; PAM sequence: CGG
gctggcacccttggccacgc

SEQ ID NO: 10096 - DNA, 20 bp, Artificial Sequence
  Description of Artificial Sequence: Synthetic oligonucleotide
  Target: PCSK9; (-) strand; PAM type: NRG; PAM sequence: TGG
gctgcgcatgctggcaccct

SEQ ID NO: 10097 - DNA, 20 bp, Artificial Sequence
  Description of Artificial Sequence: Synthetic oligonucleotide
  Target: PCSK9; (-) strand; PAM type: NRG; PAM sequence: TGG
cacgcgcaggctgcgcatgc

SEQ ID NO: 10098 - DNA, 20 bp, Artificial Sequence
  Description of Artificial Sequence: Synthetic oligonucleotide
  Target: PCSK9; (-) strand; PAM type: NRG; PAM sequence: AGG
cttggcagttgagcacgcgc

SEQ ID NO: 10099 - DNA, 20 bp, Artificial Sequence
  Description of Artificial Sequence: Synthetic oligonucleotide
  Target: PCSK9; (-) strand; PAM type: NRG; PAM sequence: CAG
ccttggcagttgagcacgcg

SEQ ID NO: 10100 - DNA, 20 bp, Artificial Sequence
  Description of Artificial Sequence: Synthetic oligonucleotide
  Target: PCSK9; (-) strand; PAM type: NRG; PAM sequence: GAG
gtgcccttcccttggcagtt

SEQ ID NO: 10101 - DNA, 20 bp, Artificial Sequence
  Description of Artificial Sequence: Synthetic oligonucleotide
  Target: PCSK9; (-) strand; PAM type: NRG; PAM sequence: CAG
taaccgtgcccttcccttgg

SEQ ID NO: 10102 - DNA, 20 bp, Artificial Sequence
  Description of Artificial Sequence: Synthetic oligonucleotide
  Target: PCSK9; (-) strand; PAM type: NRG; PAM sequence: TGG
cgctaaccgtgcccttccct

SEQ ID NO: 10103 - DNA, 20 bp, Artificial Sequence
  Description of Artificial Sequence: Synthetic oligonucleotide
  Target: PCSK9; (-) strand; PAM type: NRG; PAM sequence: GGG
gggccatcacttacctatga

SEQ ID NO: 10104 - DNA, 20 bp, Artificial Sequence
  Description of Artificial Sequence: Synthetic oligonucleotide
  Target: PCSK9; (-) strand; PAM type: NRG; PAM sequence: AGG
ggggccatcacttacctatg

SEQ ID NO: 10105 - DNA, 20 bp, Artificial Sequence
  Description of Artificial Sequence: Synthetic oligonucleotide
  Target: PCSK9; (-) strand; PAM type: NRG; PAM sequence: GAG
tggggccatcacttacctat

SEQ ID NO: 10106 - DNA, 20 bp, Artificial Sequence
  Description of Artificial Sequence: Synthetic oligonucleotide
  Target: PCSK9; (-) strand; PAM type: NRG; PAM sequence: GGG
tggagagagaccagcgtctg

SEQ ID NO: 10107 - DNA, 20 bp, Artificial Sequence
  Description of Artificial Sequence: Synthetic oligonucleotide
  Target: PCSK9; (-) strand; PAM type: NRG; PAM sequence: GGG
atggagagagaccagcgtct

SEQ ID NO: 10108 - DNA, 20 bp, Artificial Sequence
  Description of Artificial Sequence: Synthetic oligonucleotide
  Target: PCSK9; (-) strand; PAM type: NRG; PAM sequence: TGG
gatggagagagaccagcgtc

SEQ ID NO: 10109 - DNA, 20 bp, Artificial Sequence
  Description of Artificial Sequence: Synthetic oligonucleotide
  Target: PCSK9; (-) strand; PAM type: NRG; PAM sequence: CAG
aggtccagatggagagagac

SEQ ID NO: 10110 - DNA, 20 bp, Artificial Sequence
  Description of Artificial Sequence: Synthetic oligonucleotide
  Target: PCSK9; (-) strand; PAM type: NRG; PAM sequence: GAG
aggccaggtccagatggaga

SEQ ID NO: 10111 - DNA, 20 bp, Artificial Sequence
  Description of Artificial Sequence: Synthetic oligonucleotide
  Target: PCSK9; (-) strand; PAM type: NRG; PAM sequence: GAG
ccaggccaggtccagatgga

SEQ ID NO: 10112 - DNA, 20 bp, Artificial Sequence
  Description of Artificial Sequence: Synthetic oligonucleotide
  Target: PCSK9; (-) strand; PAM type: NRG; PAM sequence: GAG
tcccaggccaggtccagatg

SEQ ID NO: 10113 - DNA, 20 bp, Artificial Sequence
  Description of Artificial Sequence: Synthetic oligonucleotide
  Target: PCSK9; (-) strand; PAM type: NRG; PAM sequence: TGG
cctcccaggccaggtccaga

SEQ ID NO: 10114 - DNA, 20 bp, Artificial Sequence
  Description of Artificial Sequence: Synthetic oligonucleotide
  Target: PCSK9; (-) strand; PAM type: NRG; PAM sequence: CAG
gccacctcccaggccaggtc

SEQ ID NO: 10115 - DNA, 20 bp, Artificial Sequence
  Description of Artificial Sequence: Synthetic oligonucleotide
  Target: PCSK9; (-) strand; PAM type: NRG; PAM sequence: AGG
cccaagccacctcccaggcc

SEQ ID NO: 10116 - DNA, 20 bp, Artificial Sequence
  Description of Artificial Sequence: Synthetic oligonucleotide
  Target: PCSK9; (-) strand; PAM type: NRG; PAM sequence: CAG
gcccaagccacctcccaggc

SEQ ID NO: 10117 - DNA, 20 bp, Artificial Sequence
  Description of Artificial Sequence: Synthetic oligonucleotide
  Target: PCSK9; (-) strand; PAM type: NRG; PAM sequence: AGG
cccagcccaagccacctccc

SEQ ID NO: 10118 - DNA, 20 bp, Artificial Sequence
  Description of Artificial Sequence: Synthetic oligonucleotide
  Target: PCSK9; (-) strand; PAM type: NRG; PAM sequence: CAG
gcccagcccaagccacctcc

SEQ ID NO: 10119 - DNA, 20 bp, Artificial Sequence
  Description of Artificial Sequence: Synthetic oligonucleotide
  Target: PCSK9; (-) strand; PAM type: NRG; PAM sequence: AAG
gctctccctgggcccagccc

SEQ ID NO: 10120 - DNA, 20 bp, Artificial Sequence
  Description of Artificial Sequence: Synthetic oligonucleotide
  Target: PCSK9; (-) strand; PAM type: NRG; PAM sequence: CAG
acattagctctccctgggcc

SEQ ID NO: 10121 - DNA, 20 bp, Artificial Sequence
  Description of Artificial Sequence: Synthetic oligonucleotide
  Target: PCSK9; (-) strand; PAM type: NRG; PAM sequence: GGG
aggagacattagctctccct

SEQ ID NO: 10122 - DNA, 20 bp, Artificial Sequence
  Description of Artificial Sequence: Synthetic oligonucleotide
  Target: PCSK9; (-) strand; PAM type: NRG; PAM sequence: TGG
taggagacattagctctccc

SEQ ID NO: 10123 - DNA, 20 bp, Artificial Sequence
  Description of Artificial Sequence: Synthetic oligonucleotide
  Target: PCSK9; (-) strand; PAM type: NRG; PAM sequence: TAG
cattcttggttaggagacat

SEQ ID NO: 10124 - DNA, 20 bp, Artificial Sequence
  Description of Artificial Sequence: Synthetic oligonucleotide
  Target: PCSK9; (-) strand; PAM type: NRG; PAM sequence: GAG
gccacagcattcttggttag

SEQ ID NO: 10125 - DNA, 20 bp, Artificial Sequence
  Description of Artificial Sequence: Synthetic oligonucleotide
  Target: PCSK9; (-) strand; PAM type: NRG; PAM sequence: AGG
ctgccacagcattcttggtt

SEQ ID NO: 10126 - DNA, 20 bp, Artificial Sequence
  Description of Artificial Sequence: Synthetic oligonucleotide
  Target: PCSK9; (-) strand; PAM type: NRG; PAM sequence: TAG
gctgccacagcattcttggt

SEQ ID NO: 10127 - DNA, 20 bp, Artificial Sequence
  Description of Artificial Sequence: Synthetic oligonucleotide
  Target: PCSK9; (-) strand; PAM type: NRG; PAM sequence: TGG
agaggctgccacagcattct

SEQ ID NO: 10128 - DNA, 20 bp, Artificial Sequence
  Description of Artificial Sequence: Synthetic oligonucleotide
  Target: PCSK9; (-) strand; PAM type: NRG; PAM sequence: CAG
ctctgcggcagaggctgcca

SEQ ID NO: 10129 - DNA, 20 bp, Artificial Sequence
  Description of Artificial Sequence: Synthetic oligonucleotide
  Target: PCSK9; (-) strand; PAM type: NRG; PAM sequence: AGG
gttctctggctctgcggcag

SEQ ID NO: 10130 - DNA, 20 bp, Artificial Sequence
  Description of Artificial Sequence: Synthetic oligonucleotide
  Target: PCSK9; (-) strand; PAM type: NRG; PAM sequence: GAG
ggttctctggctctgcggca

SEQ ID NO: 10131 - DNA, 20 bp, Artificial Sequence
  Description of Artificial Sequence: Synthetic oligonucleotide
  Target: PCSK9; (-) strand; PAM type: NRG; PAM sequence: CAG
ctggttctctggctctgcgg

SEQ ID NO: 10132 - DNA, 20 bp, Artificial Sequence
  Description of Artificial Sequence: Synthetic oligonucleotide
  Target: PCSK9; (-) strand; PAM type: NRG; PAM sequence: CGG
actctggttctctggctctg

SEQ ID NO: 10133 - DNA, 20 bp, Artificial Sequence
  Description of Artificial Sequence: Synthetic oligonucleotide
  Target: PCSK9; (-) strand; PAM type: NRG; PAM sequence: TGG
gccttggcactctggttctc

SEQ ID NO: 10134 - DNA, 20 bp, Artificial Sequence
  Description of Artificial Sequence: Synthetic oligonucleotide
  Target: PCSK9; (-) strand; PAM type: NRG; PAM sequence: TGG
ccctgccagccttggcactc

SEQ ID NO: 10135 - DNA, 20 bp, Artificial Sequence
  Description of Artificial Sequence: Synthetic oligonucleotide
  Target: PCSK9; (-) strand; PAM type: NRG; PAM sequence: TGG
actgggaaccctgccagcct

SEQ ID NO: 10136 - DNA, 20 bp, Artificial Sequence
  Description of Artificial Sequence: Synthetic oligonucleotide
  Target: PCSK9; (-) strand; PAM type: NRG; PAM sequence: CAG
gtggccactgggaaccctgc

SEQ ID NO: 10137 - DNA, 20 bp, Artificial Sequence
  Description of Artificial Sequence: Synthetic oligonucleotide
  Target: PCSK9; (-) strand; PAM type: NRG; PAM sequence: GGG
catctgcactcgtggccact

SEQ ID NO: 10138 - DNA, 20 bp, Artificial Sequence
  Description of Artificial Sequence: Synthetic oligonucleotide
  Target: PCSK9; (-) strand; PAM type: NRG; PAM sequence: TGG
tcatctgcactcgtggccac

SEQ ID NO: 10139 - DNA, 20 bp, Artificial Sequence
  Description of Artificial Sequence: Synthetic oligonucleotide
  Target: PCSK9; (-) strand; PAM type: NRG; PAM sequence: TGG
ggtttcttcatctgcactcg

SEQ ID NO: 10140 - DNA, 20 bp, Artificial Sequence
  Description of Artificial Sequence: Synthetic oligonucleotide
  Target: PCSK9; (-) strand; PAM type: NRG; PAM sequence: GGG
gcatgaccctcttggggcct

SEQ ID NO: 10141 - DNA, 20 bp, Artificial Sequence
  Description of Artificial Sequence: Synthetic oligonucleotide
  Target: PCSK9; (-) strand; PAM type: NRG; PAM sequence: TGG
tgcatgaccctcttggggcc

SEQ ID NO: 10142 - DNA, 20 bp, Artificial Sequence
  Description of Artificial Sequence: Synthetic oligonucleotide
  Target: PCSK9; (-) strand; PAM type: NRG; PAM sequence: GGG
ctacctgcatgaccctcttg

SEQ ID NO: 10143 - DNA, 20 bp, Artificial Sequence
  Description of Artificial Sequence: Synthetic oligonucleotide
  Target: PCSK9; (-) strand; PAM type: NRG; PAM sequence: GGG
gctacctgcatgaccctctt

SEQ ID NO: 10144 - DNA, 20 bp, Artificial Sequence
  Description of Artificial Sequence: Synthetic oligonucleotide
  Target: PCSK9; (-) strand; PAM type: NRG; PAM sequence: TGG
ggctacctgcatgaccctct

SEQ ID NO: 10145 - DNA, 20 bp, Artificial Sequence
  Description of Artificial Sequence: Synthetic oligonucleotide
  Target: PCSK9; (-) strand; PAM type: NRG; PAM sequence: GGG
gggtcaaggctgaactccct

SEQ ID NO: 10146 - DNA, 20 bp, Artificial Sequence
  Description of Artificial Sequence: Synthetic oligonucleotide
  Target: PCSK9; (-) strand; PAM type: NRG; PAM sequence: TGG
agggtcaaggctgaactccc

SEQ ID NO: 10147 - DNA, 20 bp, Artificial Sequence
  Description of Artificial Sequence: Synthetic oligonucleotide
  Target: PCSK9; (-) strand; PAM type: NRG; PAM sequence: AGG
aggtcattgacccagggtca

SEQ ID NO: 10148 - DNA, 20 bp, Artificial Sequence
  Description of Artificial Sequence: Synthetic oligonucleotide
  Target: PCSK9; (-) strand; PAM type: NRG; PAM sequence: AAG
aaggtcattgacccagggtc

SEQ ID NO: 10149 - DNA, 20 bp, Artificial Sequence
  Description of Artificial Sequence: Synthetic oligonucleotide
  Target: PCSK9; (-) strand; PAM type: NRG; PAM sequence: GGG
gtggaaaggtcattgaccca

SEQ ID NO: 10150 - DNA, 20 bp, Artificial Sequence
  Description of Artificial Sequence: Synthetic oligonucleotide
  Target: PCSK9; (-) strand; PAM type: NRG; PAM sequence: AGG
tgtggaaaggtcattgaccc

SEQ ID NO: 10151 - DNA, 20 bp, Artificial Sequence
  Description of Artificial Sequence: Synthetic oligonucleotide
  Target: PCSK9; (-) strand; PAM type: NRG; PAM sequence: CAG
ctgtggaaaggtcattgacc

SEQ ID NO: 10152 - DNA, 20 bp, Artificial Sequence
  Description of Artificial Sequence: Synthetic oligonucleotide
  Target: PCSK9; (-) strand; PAM type: NRG; PAM sequence: AGG
agcagtgtggaactgtggaa

SEQ ID NO: 10153 - DNA, 20 bp, Artificial Sequence
  Description of Artificial Sequence: Synthetic oligonucleotide
  Target: PCSK9; (-) strand; PAM type: NRG; PAM sequence: AAG
gagcagtgtggaactgtgga

SEQ ID NO: 10154 - DNA, 20 bp, Artificial Sequence
  Description of Artificial Sequence: Synthetic oligonucleotide
  Target: PCSK9; (-) strand; PAM type: NRG; PAM sequence: TGG
aggggagcagtgtggaactg

SEQ ID NO: 10155 - DNA, 20 bp, Artificial Sequence
  Description of Artificial Sequence: Synthetic oligonucleotide
  Target: PCSK9; (-) strand; PAM type: NRG; PAM sequence: TGG
attttaaaaggggagcagtg

SEQ ID NO: 10156 - DNA, 20 bp, Artificial Sequence
  Description of Artificial Sequence: Synthetic oligonucleotide
  Target: PCSK9; (-) strand; PAM type: NRG; PAM sequence: CAG
accggattttaaaaggggag

SEQ ID NO: 10157 - DNA, 20 bp, Artificial Sequence
  Description of Artificial Sequence: Synthetic oligonucleotide
  Target: PCSK9; (-) strand; PAM type: NRG; PAM sequence: GAG
atcaccggattttaaaaggg

SEQ ID NO: 10158 - DNA, 20 bp, Artificial Sequence
  Description of Artificial Sequence: Synthetic oligonucleotide
  Target: PCSK9; (-) strand; PAM type: NRG; PAM sequence: GGG
acatcaccggattttaaaag

SEQ ID NO: 10159 - DNA, 20 bp, Artificial Sequence
  Description of Artificial Sequence: Synthetic oligonucleotide
  Target: PCSK9; (-) strand; PAM type: NRG; PAM sequence: GGG
gacatcaccggattttaaaa

SEQ ID NO: 10160 - DNA, 20 bp, Artificial Sequence
  Description of Artificial Sequence: Synthetic oligonucleotide
  Target: PCSK9; (-) strand; PAM type: NRG; PAM sequence: AGG
agacatcaccggattttaaa

SEQ ID NO: 10161 - DNA, 20 bp, Artificial Sequence
  Description of Artificial Sequence: Synthetic oligonucleotide
  Target: PCSK9; (-) strand; PAM type: NRG; PAM sequence: AAG
aagacatcaccggattttaa

SEQ ID NO: 10162 - DNA, 20 bp, Artificial Sequence
  Description of Artificial Sequence: Synthetic oligonucleotide
  Target: PCSK9; (-) strand; PAM type: NRG; PAM sequence: CGG
aaaagacataaagacatcac

SEQ ID NO: 10163 - DNA, 20 bp, Artificial Sequence
  Description of Artificial Sequence: Synthetic oligonucleotide
  Target: PCSK9; (-) strand; PAM type: NRG; PAM sequence: AAG
ataacataacaaaagacata

SEQ ID NO: 10164 - DNA, 20 bp, Artificial Sequence
  Description of Artificial Sequence: Synthetic oligonucleotide
  Target: PCSK9; (-) strand; PAM type: NRG; PAM sequence: AAG
cattgaagataacataacaa

SEQ ID NO: 10165 - DNA, 20 bp, Artificial Sequence
  Description of Artificial Sequence: Synthetic oligonucleotide
  Target: PCSK9; (-) strand; PAM type: NRG; PAM sequence: AAG
cctcgagtccctccacattg

SEQ ID NO: 10166 - DNA, 20 bp, Artificial Sequence
  Description of Artificial Sequence: Synthetic oligonucleotide
  Target: PCSK9; (-) strand; PAM type: NRG; PAM sequence: GAG
aagtttgcttagatcacctc

SEQ ID NO: 10167 - DNA, 20 bp, Artificial Sequence
  Description of Artificial Sequence: Synthetic oligonucleotide
  Target: PCSK9; (-) strand; PAM type: NRG; PAM sequence: TAG
gaagatagaaaaagtttgct

SEQ ID NO: 10168 - DNA, 20 bp, Artificial Sequence
  Description of Artificial Sequence: Synthetic oligonucleotide
  Target: PCSK9; (-) strand; PAM type: NRG; PAM sequence: AAG
atgcaagcagaagatagaaa

SEQ ID NO: 10169 - DNA, 20 bp, Artificial Sequence
  Description of Artificial Sequence: Synthetic oligonucleotide
  Target: PCSK9; (-) strand; PAM type: NRG; PAM sequence: TAG
agaggtatgcaagcagaaga

SEQ ID NO: 10170 - DNA, 20 bp, Artificial Sequence
  Description of Artificial Sequence: Synthetic oligonucleotide
  Target: PCSK9; (-) strand; PAM type: NRG; PAM sequence: AAG
tctcagaggtatgcaagcag

SEQ ID NO: 10171 - DNA, 20 bp, Artificial Sequence
  Description of Artificial Sequence: Synthetic oligonucleotide
  Target: PCSK9; (-) strand; PAM type: NRG; PAM sequence: CAG
tggtctcagaggtatgcaag

SEQ ID NO: 10172 - DNA, 20 bp, Artificial Sequence
  Description of Artificial Sequence: Synthetic oligonucleotide
  Target: PCSK9; (-) strand; PAM type: NRG; PAM sequence: AAG
ccctggtctcagaggtatgc

SEQ ID NO: 10173 - DNA, 20 bp, Artificial Sequence
  Description of Artificial Sequence: Synthetic oligonucleotide
  Target: PCSK9; (-) strand; PAM type: NRG; PAM sequence: AGG
agtgagtcccctggtctcag

SEQ ID NO: 10174 - DNA, 20 bp, Artificial Sequence
  Description of Artificial Sequence: Synthetic oligonucleotide
  Target: PCSK9; (-) strand; PAM type: NRG; PAM sequence: GAG
gagtgagtcccctggtctca

SEQ ID NO: 10175 - DNA, 20 bp, Artificial Sequence
  Description of Artificial Sequence: Synthetic oligonucleotide
  Target: PCSK9; (-) strand; PAM type: NRG; PAM sequence: CAG
gtgagtgagtcccctggtct

SEQ ID NO: 10176 - DNA, 20 bp, Artificial Sequence
  Description of Artificial Sequence: Synthetic oligonucleotide
  Target: PCSK9; (-) strand; PAM type: NRG; PAM sequence: TGG
atgcaagtgagtgagtcccc

SEQ ID NO: 10177 - DNA, 20 bp, Artificial Sequence
  Description of Artificial Sequence: Synthetic oligonucleotide
  Target: PCSK9; (-) strand; PAM type: NRG; PAM sequence: GAG
gcccagtcatgcaagtgagt

SEQ ID NO: 10178 - DNA, 20 bp, Artificial Sequence
  Description of Artificial Sequence: Synthetic oligonucleotide
  Target: PCSK9; (-) strand; PAM type: NRG; PAM sequence: GAG
cagggcccagtcatgcaagt

SEQ ID NO: 10179 - DNA, 20 bp, Artificial Sequence
  Description of Artificial Sequence: Synthetic oligonucleotide
  Target: PCSK9; (-) strand; PAM type: NRG; PAM sequence: AAG
cctgcagggcccagtcatgc

SEQ ID NO: 10180 - DNA, 20 bp, Artificial Sequence
  Description of Artificial Sequence: Synthetic oligonucleotide
  Target: PCSK9; (-) strand; PAM type: NRG; PAM sequence: CAG
ccagtgtgacctgcagggcc

SEQ ID NO: 10181 - DNA, 20 bp, Artificial Sequence
  Description of Artificial Sequence: Synthetic oligonucleotide
  Target: PCSK9; (-) strand; PAM type: NRG; PAM sequence: GGG
cctggccagtgtgacctgca

SEQ ID NO: 10182 - DNA, 20 bp, Artificial Sequence
  Description of Artificial Sequence: Synthetic oligonucleotide
  Target: PCSK9; (-) strand; PAM type: NRG; PAM sequence: AGG
gcctggccagtgtgacctgc

SEQ ID NO: 10183 - DNA, 20 bp, Artificial Sequence
  Description of Artificial Sequence: Synthetic oligonucleotide
  Target: PCSK9; (-) strand; PAM type: NRG; PAM sequence: CAG
tgcctggccagtgtgacctg

SEQ ID NO: 10184 - DNA, 20 bp, Artificial Sequence
  Description of Artificial Sequence: Synthetic oligonucleotide
  Target: PCSK9; (-) strand; PAM type: NRG; PAM sequence: CAG
ctccaccacatctgcctggc

SEQ ID NO: 10185 - DNA, 20 bp, Artificial Sequence
  Description of Artificial Sequence: Synthetic oligonucleotide
  Target: PCSK9; (-) strand; PAM type: NRG; PAM sequence: TGG
gttcctccaccacatctgcc

SEQ ID NO: 10186 - DNA, 20 bp, Artificial Sequence
  Description of Artificial Sequence: Synthetic oligonucleotide
  Target: PCSK9; (-) strand; PAM type: NRG; PAM sequence: CAG
gtctagaaaaagtcctctgc

SEQ ID NO: 10187 - DNA, 20 bp, Artificial Sequence
  Description of Artificial Sequence: Synthetic oligonucleotide
  Target: PCSK9; (-) strand; PAM type: NRG; PAM sequence: AAG
atgtagtcacagtctagaaa

SEQ ID NO: 10188 - DNA, 20 bp, Artificial Sequence
  Description of Artificial Sequence: Synthetic oligonucleotide
  Target: PCSK9; (-) strand; PAM type: NRG; PAM sequence: TAG
gactaaatgtagtcacagtc

SEQ ID NO: 10189 - DNA, 20 bp, Artificial Sequence
  Description of Artificial Sequence: Synthetic oligonucleotide
  Target: PCSK9; (-) strand; PAM type: NRG; PAM sequence: CAG
gggtggactaaatgtagtca

SEQ ID NO: 10190 - DNA, 20 bp, Artificial Sequence
  Description of Artificial Sequence: Synthetic oligonucleotide
  Target: PCSK9; (-) strand; PAM type: NRG; PAM sequence: TAG
gccgctgggtggactaaatg

SEQ ID NO: 10191 - DNA, 20 bp, Artificial Sequence
  Description of Artificial Sequence: Synthetic oligonucleotide
  Target: PCSK9; (-) strand; PAM type: NRG; PAM sequence: TGG
ttcataggggggccgctggg

SEQ ID NO: 10192 - DNA, 20 bp, Artificial Sequence
  Description of Artificial Sequence: Synthetic oligonucleotide
  Target: PCSK9; (-) strand; PAM type: NRG; PAM sequence: GGG
gacttcataggggggccgct

SEQ ID NO: 10193 - DNA, 20 bp, Artificial Sequence
  Description of Artificial Sequence: Synthetic oligonucleotide
  Target: PCSK9; (-) strand; PAM type: NRG; PAM sequence: TGG
ggacttcataggggggccgc

SEQ ID NO: 10194 - DNA, 20 bp, Artificial Sequence
  Description of Artificial Sequence: Synthetic oligonucleotide
  Target: PCSK9; (-) strand; PAM type: NRG; PAM sequence: GGG
ctcaactggacttcataggg

SEQ ID NO: 10195 - DNA, 20 bp, Artificial Sequence
  Description of Artificial Sequence: Synthetic oligonucleotide
  Target: PCSK9; (-) strand; PAM type: NRG; PAM sequence: GGG
tctcaactggacttcatagg

SEQ ID NO: 10196 - DNA, 20 bp, Artificial Sequence
  Description of Artificial Sequence: Synthetic oligonucleotide
  Target: PCSK9; (-) strand; PAM type: NRG; PAM sequence: GGG
ttctcaactggacttcatag

SEQ ID NO: 10197 - DNA, 20 bp, Artificial Sequence
  Description of Artificial Sequence: Synthetic oligonucleotide
  Target: PCSK9; (-) strand; PAM type: NRG; PAM sequence: GGG
gttctcaactggacttcata

SEQ ID NO: 10198 - DNA, 20 bp, Artificial Sequence
  Description of Artificial Sequence: Synthetic oligonucleotide
  Target: PCSK9; (-) strand; PAM type: NRG; PAM sequence: AGG
agttctcaactggacttcat

SEQ ID NO: 10199 - DNA, 20 bp, Artificial Sequence
  Description of Artificial Sequence: Synthetic oligonucleotide
  Target: PCSK9; (-) strand; PAM type: NRG; PAM sequence: TAG
tagttctcaactggacttca

SEQ ID NO: 10200 - DNA, 20 bp, Artificial Sequence
  Description of Artificial Sequence: Synthetic oligonucleotide
  Target: PCSK9; (-) strand; PAM type: NRG; PAM sequence: TGG
ccagagtcctagttctcaac

SEQ ID NO: 10201 - DNA, 20 bp, Artificial Sequence
  Description of Artificial Sequence: Synthetic oligonucleotide
  Target: PCSK9; (-) strand; PAM type: NRG; PAM sequence: TAG
tccaccggcccccagagtcc

SEQ ID NO: 10202 - DNA, 20 bp, Artificial Sequence
  Description of Artificial Sequence: Synthetic oligonucleotide
  Target: PCSK9; (-) strand; PAM type: NRG; PAM sequence: GAG
tctctgtccaccggccccca

SEQ ID NO: 10203 - DNA, 20 bp, Artificial Sequence
  Description of Artificial Sequence: Synthetic oligonucleotide
  Target: PCSK9; (-) strand; PAM type: NRG; PAM sequence: CAG
cttctctgtccaccggcccc

SEQ ID NO: 10204 - DNA, 20 bp, Artificial Sequence
  Description of Artificial Sequence: Synthetic oligonucleotide
  Target: PCSK9; (-) strand; PAM type: NRG; PAM sequence: CGG
cctccctcttctctgtccac

SEQ ID NO: 10205 - DNA, 20 bp, Artificial Sequence
  Description of Artificial Sequence: Synthetic oligonucleotide
  Target: PCSK9; (-) strand; PAM type: NRG; PAM sequence: GAG
agaaggaagtcagtaaggga

SEQ ID NO: 10206 - DNA, 20 bp, Artificial Sequence
  Description of Artificial Sequence: Synthetic oligonucleotide
  Target: PCSK9; (-) strand; PAM type: NRG; PAM sequence: GAG
acagaaggaagtcagtaagg

SEQ ID NO: 10207 - DNA, 20 bp, Artificial Sequence
  Description of Artificial Sequence: Synthetic oligonucleotide
  Target: PCSK9; (-) strand; PAM type: NRG; PAM sequence: GGG
ccacagaaggaagtcagtaa

SEQ ID NO: 10208 - DNA, 20 bp, Artificial Sequence
  Description of Artificial Sequence: Synthetic oligonucleotide
  Target: PCSK9; (-) strand; PAM type: NRG; PAM sequence: AGG
gccacagaaggaagtcagta

SEQ ID NO: 10209 - DNA, 20 bp, Artificial Sequence
  Description of Artificial Sequence: Synthetic oligonucleotide
  Target: PCSK9; (-) strand; PAM type: NRG; PAM sequence: AAG
ggccacagaaggaagtcagt

SEQ ID NO: 10210 - DNA, 20 bp, Artificial Sequence
  Description of Artificial Sequence: Synthetic oligonucleotide
  Target: PCSK9; (-) strand; PAM type: NRG; PAM sequence: CAG
gtctggccacagaaggaagt

SEQ ID NO: 10211 - DNA, 20 bp, Artificial Sequence
  Description of Artificial Sequence: Synthetic oligonucleotide
  Target: PCSK9; (-) strand; PAM type: NRG; PAM sequence: AAG
caatgtctggccacagaagg

SEQ ID NO: 10212 - DNA, 20 bp, Artificial Sequence
  Description of Artificial Sequence: Synthetic oligonucleotide
  Target: PCSK9; (-) strand; PAM type: NRG; PAM sequence: AGG
gctcaatgtctggccacaga

SEQ ID NO: 10213 - DNA, 20 bp, Artificial Sequence
  Description of Artificial Sequence: Synthetic oligonucleotide
  Target: PCSK9; (-) strand; PAM type: NRG; PAM sequence: AAG
tgctcaatgtctggccacag

SEQ ID NO: 10214 - DNA, 20 bp, Artificial Sequence
  Description of Artificial Sequence: Synthetic oligonucleotide
  Target: PCSK9; (-) strand; PAM type: NRG; PAM sequence: CAG
ccttgctcaatgtctggcca

SEQ ID NO: 10215 - DNA, 20 bp, Artificial Sequence
  Description of Artificial Sequence: Synthetic oligonucleotide
  Target: PCSK9; (-) strand; PAM type: NRG; PAM sequence: TGG
cagaggccttgctcaatgtc

SEQ ID NO: 10216 - DNA, 20 bp, Artificial Sequence
  Description of Artificial Sequence: Synthetic oligonucleotide
  Target: PCSK9; (-) strand; PAM type: NRG; PAM sequence: AGG
ccccaggacatgctgtacag

SEQ ID NO: 10217 - DNA, 20 bp, Artificial Sequence
  Description of Artificial Sequence: Synthetic oligonucleotide
  Target: PCSK9; (-) strand; PAM type: NRG; PAM sequence: GAG
gccccaggacatgctgtaca

SEQ ID NO: 10218 - DNA, 20 bp, Artificial Sequence
  Description of Artificial Sequence: Synthetic oligonucleotide
  Target: PCSK9; (-) strand; PAM type: NRG; PAM sequence: CAG
cagccccaggacatgctgta

SEQ ID NO: 10219 - DNA, 20 bp, Artificial Sequence
  Description of Artificial Sequence: Synthetic oligonucleotide
  Target: PCSK9; (-) strand; PAM type: NRG; PAM sequence: AGG
gctacggcaaggccagcccc

SEQ ID NO: 10220 - DNA, 20 bp, Artificial Sequence
  Description of Artificial Sequence: Synthetic oligonucleotide
  Target: PCSK9; (-) strand; PAM type: NRG; PAM sequence: CAG
agctacggcaaggccagccc

SEQ ID NO: 10221 - DNA, 20 bp, Artificial Sequence
  Description of Artificial Sequence: Synthetic oligonucleotide
  Target: PCSK9; (-) strand; PAM type: NRG; PAM sequence: CAG
tttagcagctacggcaaggc

SEQ ID NO: 10222 - DNA, 20 bp, Artificial Sequence
  Description of Artificial Sequence: Synthetic oligonucleotide
  Target: PCSK9; (-) strand; PAM type: NRG; PAM sequence: AGG
actatttagcagctacggca

SEQ ID NO: 10223 - DNA, 20 bp, Artificial Sequence
  Description of Artificial Sequence: Synthetic oligonucleotide
  Target: PCSK9; (-) strand; PAM type: NRG; PAM sequence: AAG
aactatttagcagctacggc

SEQ ID NO: 10224 - DNA, 20 bp, Artificial Sequence
  Description of Artificial Sequence: Synthetic oligonucleotide
  Target: PCSK9; (-) strand; PAM type: NRG; PAM sequence: CGG
cgtcaactatttagcagcta

SEQ ID NO: 10225 - DNA, 20 bp, Artificial Sequence
  Description of Artificial Sequence: Synthetic oligonucleotide
  Target: PCSK9; (-) strand; PAM type: NRG; PAM sequence: CAG
tggtttcgtcaactatttag

SEQ ID NO: 10226 - DNA, 20 bp, Artificial Sequence
  Description of Artificial Sequence: Synthetic oligonucleotide
  Target: PCSK9; (-) strand; PAM type: NRG; PAM sequence: TAG
gactggtttcgtcaactatt

SEQ ID NO: 10227 - DNA, 20 bp, Artificial Sequence
  Description of Artificial Sequence: Synthetic oligonucleotide
  Target: PCSK9; (-) strand; PAM type: NRG; PAM sequence: TGG
gtcacctcccctctctggac

SEQ ID NO: 10228 - DNA, 20 bp, Artificial Sequence
  Description of Artificial Sequence: Synthetic oligonucleotide
  Target: PCSK9; (-) strand; PAM type: NRG; PAM sequence: TGG
tggcagtcacctcccctctc

SEQ ID NO: 10229 - DNA, 20 bp, Artificial Sequence
  Description of Artificial Sequence: Synthetic oligonucleotide
  Target: PCSK9; (-) strand; PAM type: NRG; PAM sequence: CAG
cttgagctgtgcgaccctgg

SEQ ID NO: 10230 - DNA, 20 bp, Artificial Sequence
  Description of Artificial Sequence: Synthetic oligonucleotide
  Target: PCSK9; (-) strand; PAM type: NRG; PAM sequence: TGG
cagcttgagctgtgcgaccc

SEQ ID NO: 10231 - DNA, 20 bp, Artificial Sequence
  Description of Artificial Sequence: Synthetic oligonucleotide
  Target: PCSK9; (-) strand; PAM type: NRG; PAM sequence: GAG
cccagcgagttccccagctt

SEQ ID NO: 10232 - DNA, 20 bp, Artificial Sequence
  Description of Artificial Sequence: Synthetic oligonucleotide
  Target: PCSK9; (-) strand; PAM type: NRG; PAM sequence: CAG
agttttcccagcgagttccc

SEQ ID NO: 10233 - DNA, 20 bp, Artificial Sequence
  Description of Artificial Sequence: Synthetic oligonucleotide
  Target: PCSK9; (-) strand; PAM type: NRG; PAM sequence: GAG
gagctgacagttttcccagc

SEQ ID NO: 10234 - DNA, 20 bp, Artificial Sequence
  Description of Artificial Sequence: Synthetic oligonucleotide
  Target: PCSK9; (-) strand; PAM type: NRG; PAM sequence: CAG
cccagagctgacagttttcc

SEQ ID NO: 10235 - DNA, 20 bp, Artificial Sequence
  Description of Artificial Sequence: Synthetic oligonucleotide
  Target: PCSK9; (-) strand; PAM type: NRG; PAM sequence: CAG
aagctgctgcccagagctga

SEQ ID NO: 10236 - DNA, 20 bp, Artificial Sequence
  Description of Artificial Sequence: Synthetic oligonucleotide
  Target: PCSK9; (-) strand; PAM type: NRG; PAM sequence: GAG
ggaagtcaagctgctgccca

SEQ ID NO: 10237 - DNA, 20 bp, Artificial Sequence
  Description of Artificial Sequence: Synthetic oligonucleotide
  Target: PCSK9; (-) strand; PAM type: NRG; PAM sequence: CAG
gtggaagtcaagctgctgcc

SEQ ID NO: 10238 - DNA, 20 bp, Artificial Sequence
  Description of Artificial Sequence: Synthetic oligonucleotide
  Target: PCSK9; (-) strand; PAM type: NRG; PAM sequence: AAG
tggggcttacagtggaagtc

SEQ ID NO: 10239 - DNA, 20 bp, Artificial Sequence
  Description of Artificial Sequence: Synthetic oligonucleotide
  Target: PCSK9; (-) strand; PAM type: NRG; PAM sequence: AAG
ggggctggggcttacagtgg

SEQ ID NO: 10240 - DNA, 20 bp, Artificial Sequence
  Description of Artificial Sequence: Synthetic oligonucleotide
  Target: PCSK9; (-) strand; PAM type: NRG; PAM sequence: TGG
ctgggggctggggcttacag

SEQ ID NO: 10241 - DNA, 20 bp, Artificial Sequence
  Description of Artificial Sequence: Synthetic oligonucleotide
  Target: PCSK9; (-) strand; PAM type: NRG; PAM sequence: CAG
accctgggggctggggctta

SEQ ID NO: 10242 - DNA, 20 bp, Artificial Sequence
  Description of Artificial Sequence: Synthetic oligonucleotide
  Target: PCSK9; (-) strand; PAM type: NRG; PAM sequence: GGG
gtgtttgaccctgggggctg

SEQ ID NO: 10243 - DNA, 20 bp, Artificial Sequence
  Description of Artificial Sequence: Synthetic oligonucleotide
  Target: PCSK9; (-) strand; PAM type: NRG; PAM sequence: GGG
agtgtttgaccctgggggct

SEQ ID NO: 10244 - DNA, 20 bp, Artificial Sequence
  Description of Artificial Sequence: Synthetic oligonucleotide
  Target: PCSK9; (-) strand; PAM type: NRG; PAM sequence: TGG
cagtgtttgaccctgggggc

SEQ ID NO: 10245 - DNA, 20 bp, Artificial Sequence
  Description of Artificial Sequence: Synthetic oligonucleotide
  Target: PCSK9; (-) strand; PAM type: NRG; PAM sequence: GGG
gagccagtgtttgaccctgg

SEQ ID NO: 10246 - DNA, 20 bp, Artificial Sequence
  Description of Artificial Sequence: Synthetic oligonucleotide
  Target: PCSK9; (-) strand; PAM type: NRG; PAM sequence: GGG
agagccagtgtttgaccctg

SEQ ID NO: 10247 - DNA, 20 bp, Artificial Sequence
  Description of Artificial Sequence: Synthetic oligonucleotide
  Target: PCSK9; (-) strand; PAM type: NRG; PAM sequence: GGG
cagagccagtgtttgaccct

SEQ ID NO: 10248 - DNA, 20 bp, Artificial Sequence
  Description of Artificial Sequence: Synthetic oligonucleotide
  Target: PCSK9; (-) strand; PAM type: NRG; PAM sequence: TGG
ccagagccagtgtttgaccc

SEQ ID NO: 10249 - DNA, 20 bp, Artificial Sequence
  Description of Artificial Sequence: Synthetic oligonucleotide
  Target: PCSK9; (-) strand; PAM type: NRG; PAM sequence: CAG
gcctctgccagcaccagagc

SEQ ID NO: 10250 - DNA, 20 bp, Artificial Sequence
  Description of Artificial Sequence: Synthetic oligonucleotide
  Target: PCSK9; (-) strand; PAM type: NRG; PAM sequence: GAG
ggctgcctctgccagcacca

SEQ ID NO: 10251 - DNA, 20 bp, Artificial Sequence
  Description of Artificial Sequence: Synthetic oligonucleotide
  Target: PCSK9; (-) strand; PAM type: NRG; PAM sequence: CAG
tgggctgcctctgccagcac

SEQ ID NO: 10252 - DNA, 20 bp, Artificial Sequence
  Description of Artificial Sequence: Synthetic oligonucleotide
  Target: PCSK9; (-) strand; PAM type: NRG; PAM sequence: CAG
ggctagtgggctgcctctgc

SEQ ID NO: 10253 - DNA, 20 bp, Artificial Sequence
  Description of Artificial Sequence: Synthetic oligonucleotide
  Target: PCSK9; (-) strand; PAM type: NRG; PAM sequence: GGG
agcctttgaaacaggctagt

SEQ ID NO: 10254 - DNA, 20 bp, Artificial Sequence
  Description of Artificial Sequence: Synthetic oligonucleotide
  Target: PCSK9; (-) strand; PAM type: NRG; PAM sequence: TGG
cagcctttgaaacaggctag

SEQ ID NO: 10255 - DNA, 20 bp, Artificial Sequence
  Description of Artificial Sequence: Synthetic oligonucleotide
  Target: PCSK9; (-) strand; PAM type: NRG; PAM sequence: TAG
tctcagcctttgaaacaggc

SEQ ID NO: 10256 - DNA, 20 bp, Artificial Sequence
  Description of Artificial Sequence: Synthetic oligonucleotide
  Target: PCSK9; (-) strand; PAM type: NRG; PAM sequence: AGG
gccttctcagcctttgaaac

SEQ ID NO: 10257 - DNA, 20 bp, Artificial Sequence
  Description of Artificial Sequence: Synthetic oligonucleotide
  Target: PCSK9; (-) strand; PAM type: NRG; PAM sequence: CAG
ggccttctcagcctttgaaa

SEQ ID NO: 10258 - DNA, 20 bp, Artificial Sequence
  Description of Artificial Sequence: Synthetic oligonucleotide
  Target: PCSK9; (-) strand; PAM type: NRG; PAM sequence: CAG
ggcagactcctgggccttct

SEQ ID NO: 10259 - DNA, 20 bp, Artificial Sequence
  Description of Artificial Sequence: Synthetic oligonucleotide
  Target: PCSK9; (-) strand; PAM type: NRG; PAM sequence: GGG
ggagcacagggcagactcct

SEQ ID NO: 10260 - DNA, 20 bp, Artificial Sequence
  Description of Artificial Sequence: Synthetic oligonucleotide
  Target: PCSK9; (-) strand; PAM type: NRG; PAM sequence: TGG
tggagcacagggcagactcc

SEQ ID NO: 10261 - DNA, 20 bp, Artificial Sequence
  Description of Artificial Sequence: Synthetic oligonucleotide
  Target: PCSK9; (-) strand; PAM type: NRG; PAM sequence: CAG
agaactggtggagcacaggg

SEQ ID NO: 10262 - DNA, 20 bp, Artificial Sequence
  Description of Artificial Sequence: Synthetic oligonucleotide
  Target: PCSK9; (-) strand; PAM type: NRG; PAM sequence: GGG
ggcagaactggtggagcaca

SEQ ID NO: 10263 - DNA, 20 bp, Artificial Sequence
  Description of Artificial Sequence: Synthetic oligonucleotide
  Target: PCSK9; (-) strand; PAM type: NRG; PAM sequence: AGG
gggcagaactggtggagcac

SEQ ID NO: 10264 - DNA, 20 bp, Artificial Sequence
  Description of Artificial Sequence: Synthetic oligonucleotide
  Target: PCSK9; (-) strand; PAM type: NRG; PAM sequence: CAG
agggcagaactggtggagca

SEQ ID NO: 10265 - DNA, 20 bp, Artificial Sequence
  Description of Artificial Sequence: Synthetic oligonucleotide
  Target: PCSK9; (-) strand; PAM type: NRG; PAM sequence: GAG
gtctcagggcagaactggtg

SEQ ID NO: 10266 - DNA, 20 bp, Artificial Sequence
  Description of Artificial Sequence: Synthetic oligonucleotide
  Target: PCSK9; (-) strand; PAM type: NRG; PAM sequence: TGG
aagtctcagggcagaactgg

SEQ ID NO: 10267 - DNA, 20 bp, Artificial Sequence
  Description of Artificial Sequence: Synthetic oligonucleotide
  Target: PCSK9; (-) strand; PAM type: NRG; PAM sequence: TGG
ggaaagtctcagggcagaac

SEQ ID NO: 10268 - DNA, 20 bp, Artificial Sequence
  Description of Artificial Sequence: Synthetic oligonucleotide
  Target: PCSK9; (-) strand; PAM type: NRG; PAM sequence: CAG
tctgtaggaaagtctcaggg

SEQ ID NO: 10269 - DNA, 20 bp, Artificial Sequence
  Description of Artificial Sequence: Synthetic oligonucleotide
  Target: PCSK9; (-) strand; PAM type: NRG; PAM sequence: GGG
tactctgtaggaaagtctca

SEQ ID NO: 10270 - DNA, 20 bp, Artificial Sequence
  Description of Artificial Sequence: Synthetic oligonucleotide
  Target: PCSK9; (-) strand; PAM type: NRG; PAM sequence: AGG
gtactctgtaggaaagtctc

SEQ ID NO: 10271 - DNA, 20 bp, Artificial Sequence
  Description of Artificial Sequence: Synthetic oligonucleotide
  Target: PCSK9; (-) strand; PAM type: NRG; PAM sequence: CAG
tgtactctgtaggaaagtct

SEQ ID NO: 10272 - DNA, 20 bp, Artificial Sequence
  Description of Artificial Sequence: Synthetic oligonucleotide
  Target: PCSK9; (-) strand; PAM type: NRG; PAM sequence: AAG
aaaacctgtactctgtagga

SEQ ID NO: 10273 - DNA, 20 bp, Artificial Sequence
  Description of Artificial Sequence: Synthetic oligonucleotide
  Target: PCSK9; (-) strand; PAM type: NRG; PAM sequence: AGG
catcaaaacctgtactctgt

SEQ ID NO: 10274 - DNA, 20 bp, Artificial Sequence
  Description of Artificial Sequence: Synthetic oligonucleotide
  Target: PCSK9; (-) strand; PAM type: NRG; PAM sequence: TAG
acatcaaaacctgtactctg

SEQ ID NO: 10275 - DNA, 20 bp, Artificial Sequence
  Description of Artificial Sequence: Synthetic oligonucleotide
  Target: PCSK9; (-) strand; PAM type: NRG; PAM sequence: AGG
gggtcacctgatggggcaga

SEQ ID NO: 10276 - DNA, 20 bp, Artificial Sequence
  Description of Artificial Sequence: Synthetic oligonucleotide
  Target: PCSK9; (-) strand; PAM type: NRG; PAM sequence: AAG
ggggtcacctgatggggcag

SEQ ID NO: 10277 - DNA, 20 bp, Artificial Sequence
  Description of Artificial Sequence: Synthetic oligonucleotide
  Target: PCSK9; (-) strand; PAM type: NRG; PAM sequence: CAG
caaggggtcacctgatgggg

SEQ ID NO: 10278 - DNA, 20 bp, Artificial Sequence
  Description of Artificial Sequence: Synthetic oligonucleotide
  Target: PCSK9; (-) strand; PAM type: NRG; PAM sequence: GGG
gcacaaggggtcacctgatg

SEQ ID NO: 10279 - DNA, 20 bp, Artificial Sequence
  Description of Artificial Sequence: Synthetic oligonucleotide
  Target: PCSK9; (-) strand; PAM type: NRG; PAM sequence: GGG
ggcacaaggggtcacctgat

SEQ ID NO: 10280 - DNA, 20 bp, Artificial Sequence
  Description of Artificial Sequence: Synthetic oligonucleotide
  Target: PCSK9; (-) strand; PAM type: NRG; PAM sequence: TGG
aggcacaaggggtcacctga

SEQ ID NO: 10281 - DNA, 20 bp, Artificial Sequence
  Description of Artificial Sequence: Synthetic oligonucleotide
  Target: PCSK9; (-) strand; PAM type: NRG; PAM sequence: GGG
aggggtgggacaggcacaag

SEQ ID NO: 10282 - DNA, 20 bp, Artificial Sequence
  Description of Artificial Sequence: Synthetic oligonucleotide
  Target: PCSK9; (-) strand; PAM type: NRG; PAM sequence: GGG
aaggggtgggacaggcacaa

SEQ ID NO: 10283 - DNA, 20 bp, Artificial Sequence
  Description of Artificial Sequence: Synthetic oligonucleotide
  Target: PCSK9; (-) strand; PAM type: NRG; PAM sequence: AGG
aaaggggtgggacaggcaca

SEQ ID NO: 10284 - DNA, 20 bp, Artificial Sequence
  Description of Artificial Sequence: Synthetic oligonucleotide
  Target: PCSK9; (-) strand; PAM type: NRG; PAM sequence: AAG
taaaggggtgggacaggcac

SEQ ID NO: 10285 - DNA, 20 bp, Artificial Sequence
  Description of Artificial Sequence: Synthetic oligonucleotide
  Target: PCSK9; (-) strand; PAM type: NRG; PAM sequence: AGG
agtcaataaaggggtgggac

SEQ ID NO: 10286 - DNA, 20 bp, Artificial Sequence
  Description of Artificial Sequence: Synthetic oligonucleotide
  Target: PCSK9; (-) strand; PAM type: NRG; PAM sequence: CAG
cagtcaataaaggggtggga

SEQ ID NO: 10287 - DNA, 20 bp, Artificial Sequence
  Description of Artificial Sequence: Synthetic oligonucleotide
  Target: PCSK9; (-) strand; PAM type: NRG; PAM sequence: GGG
aggtcagtcaataaaggggt

SEQ ID NO: 10288 - DNA, 20 bp, Artificial Sequence
  Description of Artificial Sequence: Synthetic oligonucleotide
  Target: PCSK9; (-) strand; PAM type: NRG; PAM sequence: TGG
gaggtcagtcaataaagggg

SEQ ID NO: 10289 - DNA, 20 bp, Artificial Sequence
  Description of Artificial Sequence: Synthetic oligonucleotide
  Target: PCSK9; (-) strand; PAM type: NRG; PAM sequence: GGG
gccgaggtcagtcaataaag

SEQ ID NO: 10290 - DNA, 20 bp, Artificial Sequence
  Description of Artificial Sequence: Synthetic oligonucleotide
  Target: PCSK9; (-) strand; PAM type: NRG; PAM sequence: GGG
agccgaggtcagtcaataaa

SEQ ID NO: 10291 - DNA, 20 bp, Artificial Sequence
  Description of Artificial Sequence: Synthetic oligonucleotide
  Target: PCSK9; (-) strand; PAM type: NRG; PAM sequence: AGG
gagccgaggtcagtcaataa

SEQ ID NO: 10292 - DNA, 20 bp, Artificial Sequence
  Description of Artificial Sequence: Synthetic oligonucleotide
  Target: PCSK9; (-) strand; PAM type: NRG; PAM sequence: AAG
tgagccgaggtcagtcaata

SEQ ID NO: 10293 - DNA, 20 bp, Artificial Sequence
  Description of Artificial Sequence: Synthetic oligonucleotide
  Target: PCSK9; (-) strand; PAM type: NRG; PAM sequence: CAG
tgacctgactgagccgaggt

SEQ ID NO: 10294 - DNA, 20 bp, Artificial Sequence
  Description of Artificial Sequence: Synthetic oligonucleotide
  Target: PCSK9; (-) strand; PAM type: NRG; PAM sequence: AGG
gaactgacctgactgagccg

SEQ ID NO: 10295 - DNA, 20 bp, Artificial Sequence
  Description of Artificial Sequence: Synthetic oligonucleotide
  Target: PCSK9; (-) strand; PAM type: NRG; PAM sequence: GAG
ggaactgacctgactgagcc

SEQ ID NO: 10296 - DNA, 20 bp, Artificial Sequence
  Description of Artificial Sequence: Synthetic oligonucleotide
  Target: PCSK9; (-) strand; PAM type: NRG; PAM sequence: GAG
cttcaggaactgacctgact

SEQ ID NO: 10297 - DNA, 20 bp, Artificial Sequence
  Description of Artificial Sequence: Synthetic oligonucleotide
  Target: PCSK9; (-) strand; PAM type: NRG; PAM sequence: AGG
ccctccacacactgaccttc

SEQ ID NO: 10298 - DNA, 20 bp, Artificial Sequence
  Description of Artificial Sequence: Synthetic oligonucleotide
  Target: PCSK9; (-) strand; PAM type: NRG; PAM sequence: CAG
cccctccacacactgacctt

SEQ ID NO: 10299 - DNA, 20 bp, Artificial Sequence
  Description of Artificial Sequence: Synthetic oligonucleotide
  Target: PCSK9; (-) strand; PAM type: NRG; PAM sequence: CAG
aaggcctttctgggaaagaa

SEQ ID NO: 10300 - DNA, 20 bp, Artificial Sequence
  Description of Artificial Sequence: Synthetic oligonucleotide
  Target: PCSK9; (-) strand; PAM type: NRG; PAM sequence: AAG
tggggaaggcctttctggga

SEQ ID NO: 10301 - DNA, 20 bp, Artificial Sequence
  Description of Artificial Sequence: Synthetic oligonucleotide
  Target: PCSK9; (-) strand; PAM type: NRG; PAM sequence: GGG
ggcctggggaaggcctttct

SEQ ID NO: 10302 - DNA, 20 bp, Artificial Sequence
  Description of Artificial Sequence: Synthetic oligonucleotide
  Target: PCSK9; (-) strand; PAM type: NRG; PAM sequence: TGG
aggcctggggaaggcctttc

SEQ ID NO: 10303 - DNA, 20 bp, Artificial Sequence
  Description of Artificial Sequence: Synthetic oligonucleotide
  Target: PCSK9; (-) strand; PAM type: NRG; PAM sequence: AGG
cagagcaccaggcctgggga

SEQ ID NO: 10304 - DNA, 20 bp, Artificial Sequence
  Description of Artificial Sequence: Synthetic oligonucleotide
  Target: PCSK9; (-) strand; PAM type: NRG; PAM sequence: AAG
ccagagcaccaggcctgggg

SEQ ID NO: 10305 - DNA, 20 bp, Artificial Sequence
  Description of Artificial Sequence: Synthetic oligonucleotide
  Target: PCSK9; (-) strand; PAM type: NRG; PAM sequence: GGG
aggccagagcaccaggcctg

SEQ ID NO: 10306 - DNA, 20 bp, Artificial Sequence
  Description of Artificial Sequence: Synthetic oligonucleotide
  Target: PCSK9; (-) strand; PAM type: NRG; PAM sequence: GGG
gaggccagagcaccaggcct

SEQ ID NO: 10307 - DNA, 20 bp, Artificial Sequence
  Description of Artificial Sequence: Synthetic oligonucleotide
  Target: PCSK9; (-) strand; PAM type: NRG; PAM sequence: TGG
agaggccagagcaccaggcc

SEQ ID NO: 10308 - DNA, 20 bp, Artificial Sequence
  Description of Artificial Sequence: Synthetic oligonucleotide
  Target: PCSK9; (-) strand; PAM type: NRG; PAM sequence: AGG
cctccagaggccagagcacc

SEQ ID NO: 10309 - DNA, 20 bp, Artificial Sequence
  Description of Artificial Sequence: Synthetic oligonucleotide
  Target: PCSK9; (-) strand; PAM type: NRG; PAM sequence: CAG
tcctccagaggccagagcac

SEQ ID NO: 10310 - DNA, 20 bp, Artificial Sequence
  Description of Artificial Sequence: Synthetic oligonucleotide
  Target: PCSK9; (-) strand; PAM type: NRG; PAM sequence: GAG
aggaagtcctccagaggcca

SEQ ID NO: 10311 - DNA, 20 bp, Artificial Sequence
  Description of Artificial Sequence: Synthetic oligonucleotide
  Target: PCSK9; (-) strand; PAM type: NRG; PAM sequence: CAG
ccaggaagtcctccagaggc

SEQ ID NO: 10312 - DNA, 20 bp, Artificial Sequence
  Description of Artificial Sequence: Synthetic oligonucleotide
  Target: PCSK9; (-) strand; PAM type: NRG; PAM sequence: AGG
ttctccaggaagtcctccag

SEQ ID NO: 10313 - DNA, 20 bp, Artificial Sequence
  Description of Artificial Sequence: Synthetic oligonucleotide
  Target: PCSK9; (-) strand; PAM type: NRG; PAM sequence: GAG
cttctccaggaagtcctcca

SEQ ID NO: 10314 - DNA, 20 bp, Artificial Sequence
  Description of Artificial Sequence: Synthetic oligonucleotide
  Target: PCSK9; (-) strand; PAM type: NRG; PAM sequence: CAG
gacttctccaggaagtcctc

SEQ ID NO: 10315 - DNA, 20 bp, Artificial Sequence
  Description of Artificial Sequence: Synthetic oligonucleotide
  Target: PCSK9; (-) strand; PAM type: NRG; PAM sequence: AAG
aaagaagggacttctccagg

SEQ ID NO: 10316 - DNA, 20 bp, Artificial Sequence
  Description of Artificial Sequence: Synthetic oligonucleotide
  Target: PCSK9; (-) strand; PAM type: NRG; PAM sequence: AGG
cccaaagaagggacttctcc

SEQ ID NO: 10317 - DNA, 20 bp, Artificial Sequence
  Description of Artificial Sequence: Synthetic oligonucleotide
  Target: PCSK9; (-) strand; PAM type: NRG; PAM sequence: CAG
ccccaaagaagggacttctc

SEQ ID NO: 10318 - DNA, 20 bp, Artificial Sequence
  Description of Artificial Sequence: Synthetic oligonucleotide
  Target: PCSK9; (-) strand; PAM type: NRG; PAM sequence: GGG
ctgactgggaccccaaagaa

SEQ ID NO: 10319 - DNA, 20 bp, Artificial Sequence
  Description of Artificial Sequence: Synthetic oligonucleotide
  Target: PCSK9; (-) strand; PAM type: NRG; PAM sequence: AGG
actgactgggaccccaaaga

SEQ ID NO: 10320 - DNA, 20 bp, Artificial Sequence
  Description of Artificial Sequence: Synthetic oligonucleotide
  Target: PCSK9; (-) strand; PAM type: NRG; PAM sequence: AAG
cactgactgggaccccaaag

SEQ ID NO: 10321 - DNA, 20 bp, Artificial Sequence
  Description of Artificial Sequence: Synthetic oligonucleotide
  Target: PCSK9; (-) strand; PAM type: NRG; PAM sequence: AAG
atacactgactgggacccca

SEQ ID NO: 10322 - DNA, 20 bp, Artificial Sequence
  Description of Artificial Sequence: Synthetic oligonucleotide
  Target: PCSK9; (-) strand; PAM type: NRG; PAM sequence: GGG
gggcttcccatacactgact

SEQ ID NO: 10323 - DNA, 20 bp, Artificial Sequence
  Description of Artificial Sequence: Synthetic oligonucleotide
  Target: PCSK9; (-) strand; PAM type: NRG; PAM sequence: TGG
agggcttcccatacactgac

SEQ ID NO: 10324 - DNA, 20 bp, Artificial Sequence
  Description of Artificial Sequence: Synthetic oligonucleotide
  Target: PCSK9; (-) strand; PAM type: NRG; PAM sequence: GGG
cgtgccaggtcatgcaataa

SEQ ID NO: 10325 - DNA, 20 bp, Artificial Sequence
  Description of Artificial Sequence: Synthetic oligonucleotide
  Target: PCSK9; (-) strand; PAM type: NRG; PAM sequence: AGG
ccgtgccaggtcatgcaata

SEQ ID NO: 10326 - DNA, 20 bp, Artificial Sequence
  Description of Artificial Sequence: Synthetic oligonucleotide
  Target: PCSK9; (-) strand; PAM type: NRG; PAM sequence: AAG
cccgtgccaggtcatgcaat

SEQ ID NO: 10327 - DNA, 20 bp, Artificial Sequence
  Description of Artificial Sequence: Synthetic oligonucleotide
  Target: PCSK9; (-) strand; PAM type: NRG; PAM sequence: AGG
ttgagcccctgccccgtgcc

SEQ ID NO: 10328 - DNA, 20 bp, Artificial Sequence
  Description of Artificial Sequence: Synthetic oligonucleotide
  Target: PCSK9; (-) strand; PAM type: NRG; PAM sequence: CAG
gttgagcccctgccccgtgc

SEQ ID NO: 10329 - DNA, 20 bp, Artificial Sequence
  Description of Artificial Sequence: Synthetic oligonucleotide
  Target: PCSK9; (-) strand; PAM type: NRG; PAM sequence: GAG
ggaaggcaatagtgactgtt

SEQ ID NO: 10330 - DNA, 20 bp, Artificial Sequence
  Description of Artificial Sequence: Synthetic oligonucleotide
  Target: PCSK9; (-) strand; PAM type: NRG; PAM sequence: TAG
ggcagtggcaaggaaggcaa

SEQ ID NO: 10331 - DNA, 20 bp, Artificial Sequence
  Description of Artificial Sequence: Synthetic oligonucleotide
  Target: PCSK9; (-) strand; PAM type: NRG; PAM sequence: AGG
ggaaatggcagtggcaagga

SEQ ID NO: 10332 - DNA, 20 bp, Artificial Sequence
  Description of Artificial Sequence: Synthetic oligonucleotide
  Target: PCSK9; (-) strand; PAM type: NRG; PAM sequence: AAG
aggaaatggcagtggcaagg

SEQ ID NO: 10333 - DNA, 20 bp, Artificial Sequence
  Description of Artificial Sequence: Synthetic oligonucleotide
  Target: PCSK9; (-) strand; PAM type: NRG; PAM sequence: AGG
aggaggaaatggcagtggca

SEQ ID NO: 10334 - DNA, 20 bp, Artificial Sequence
  Description of Artificial Sequence: Synthetic oligonucleotide
  Target: PCSK9; (-) strand; PAM type: NRG; PAM sequence: AAG
gaggaggaaatggcagtggc

SEQ ID NO: 10335 - DNA, 20 bp, Artificial Sequence
  Description of Artificial Sequence: Synthetic oligonucleotide
  Target: PCSK9; (-) strand; PAM type: NRG; PAM sequence: TGG
tacagaggaggaaatggcag

SEQ ID NO: 10336 - DNA, 20 bp, Artificial Sequence
  Description of Artificial Sequence: Synthetic oligonucleotide
  Target: PCSK9; (-) strand; PAM type: NRG; PAM sequence: CAG
gcttacagaggaggaaatgg

SEQ ID NO: 10337 - DNA, 20 bp, Artificial Sequence
  Description of Artificial Sequence: Synthetic oligonucleotide
  Target: PCSK9; (-) strand; PAM type: NRG; PAM sequence: TGG
cctgcttacagaggaggaaa

SEQ ID NO: 10338 - DNA, 20 bp, Artificial Sequence
  Description of Artificial Sequence: Synthetic oligonucleotide
  Target: PCSK9; (-) strand; PAM type: NRG; PAM sequence: AGG
caatcacctgcttacagagg

SEQ ID NO: 10339 - DNA, 20 bp, Artificial Sequence
  Description of Artificial Sequence: Synthetic oligonucleotide
  Target: PCSK9; (-) strand; PAM type: NRG; PAM sequence: GAG
acaatcacctgcttacagag

SEQ ID NO: 10340 - DNA, 20 bp, Artificial Sequence
  Description of Artificial Sequence: Synthetic oligonucleotide
  Target: PCSK9; (-) strand; PAM type: NRG; PAM sequence: AGG
acacaatcacctgcttacag

SEQ ID NO: 10341 - DNA, 20 bp, Artificial Sequence
  Description of Artificial Sequence: Synthetic oligonucleotide
  Target: PCSK9; (-) strand; PAM type: NRG; PAM sequence: GAG
cacacaatcacctgcttaca

SEQ ID NO: 10342 - DNA, 20 bp, Artificial Sequence
  Description of Artificial Sequence: Synthetic oligonucleotide
  Target: PCSK9; (-) strand; PAM type: NRG; PAM sequence: CAG
gacacacaatcacctgctta

SEQ ID NO: 10343 - DNA, 20 bp, Artificial Sequence
  Description of Artificial Sequence: Synthetic oligonucleotide
  Target: PCSK9; (-) strand; PAM type: NRG; PAM sequence: TGG
gcttatctctgtgctcagac

SEQ ID NO: 10344 - DNA, 20 bp, Artificial Sequence
  Description of Artificial Sequence: Synthetic oligonucleotide
  Target: PCSK9; (-) strand; PAM type: NRG; PAM sequence: CAG
tgtgtgcttatctctgtgct

SEQ ID NO: 10345 - DNA, 20 bp, Artificial Sequence
  Description of Artificial Sequence: Synthetic oligonucleotide
  Target: PCSK9; (-) strand; PAM type: NRG; PAM sequence: AAG
gcctacagctgctagttatt

SEQ ID NO: 10346 - DNA, 20 bp, Artificial Sequence
  Description of Artificial Sequence: Synthetic oligonucleotide
  Target: PCSK9; (-) strand; PAM type: NRG; PAM sequence: TAG
cgcgcccagcctacagctgc

SEQ ID NO: 10347 - DNA, 20 bp, Artificial Sequence
  Description of Artificial Sequence: Synthetic oligonucleotide
  Target: PCSK9; (-) strand; PAM type: NRG; PAM sequence: CAG
gagccaccgcgcccagccta

SEQ ID NO: 10348 - DNA, 20 bp, Artificial Sequence
  Description of Artificial Sequence: Synthetic oligonucleotide
  Target: PCSK9; (-) strand; PAM type: NRG; PAM sequence: CAG
caggcatgagccaccgcgcc

SEQ ID NO: 10349 - DNA, 20 bp, Artificial Sequence
  Description of Artificial Sequence: Synthetic oligonucleotide
  Target: PCSK9; (-) strand; PAM type: NRG; PAM sequence: GAG
agtgctgggattacaggcat

SEQ ID NO: 10350 - DNA, 20 bp, Artificial Sequence
  Description of Artificial Sequence: Synthetic oligonucleotide
  Target: PCSK9; (-) strand; PAM type: NRG; PAM sequence: AGG
tcccaaagtgctgggattac

SEQ ID NO: 10351 - DNA, 20 bp, Artificial Sequence
  Description of Artificial Sequence: Synthetic oligonucleotide
  Target: PCSK9; (-) strand; PAM type: NRG; PAM sequence: CAG
ctcccaaagtgctgggatta

SEQ ID NO: 10352 - DNA, 20 bp, Artificial Sequence
  Description of Artificial Sequence: Synthetic oligonucleotide
  Target: PCSK9; (-) strand; PAM type: NRG; PAM sequence: GGG
cctcggcctcccaaagtgct

SEQ ID NO: 10353 - DNA, 20 bp, Artificial Sequence
  Description of Artificial Sequence: Synthetic oligonucleotide
  Target: PCSK9; (-) strand; PAM type: NRG; PAM sequence: TGG
acctcggcctcccaaagtgc

SEQ ID NO: 10354 - DNA, 20 bp, Artificial Sequence
  Description of Artificial Sequence: Synthetic oligonucleotide
  Target: PCSK9; (-) strand; PAM type: NRG; PAM sequence: AAG
ctgcccacctcggcctccca

SEQ ID NO: 10355 - DNA, 20 bp, Artificial Sequence
  Description of Artificial Sequence: Synthetic oligonucleotide
  Target: PCSK9; (-) strand; PAM type: NRG; PAM sequence: CGG
ctcaggtgatctgcccacct

SEQ ID NO: 10356 - DNA, 20 bp, Artificial Sequence
  Description of Artificial Sequence: Synthetic oligonucleotide
  Target: PCSK9; (-) strand; PAM type: NRG; PAM sequence: AGG
ggtctcgaactcctgacctc

SEQ ID NO: 10357 - DNA, 20 bp, Artificial Sequence
  Description of Artificial Sequence: Synthetic oligonucleotide
  Target: PCSK9; (-) strand; PAM type: NRG; PAM sequence: CAG
tggtctcgaactcctgacct

SEQ ID NO: 10358 - DNA, 20 bp, Artificial Sequence
  Description of Artificial Sequence: Synthetic oligonucleotide
  Target: PCSK9; (-) strand; PAM type: NRG; PAM sequence: TGG
tttcaccatgttgaacaggc

SEQ ID NO: 10359 - DNA, 20 bp, Artificial Sequence
  Description of Artificial Sequence: Synthetic oligonucleotide
  Target: PCSK9; (-) strand; PAM type: NRG; PAM sequence: AGG
ggggtttcaccatgttgaac

SEQ ID NO: 10360 - DNA, 20 bp, Artificial Sequence
  Description of Artificial Sequence: Synthetic oligonucleotide
  Target: PCSK9; (-) strand; PAM type: NRG; PAM sequence: CAG
cggggtttcaccatgttgaa

SEQ ID NO: 10361 - DNA, 20 bp, Artificial Sequence
  Description of Artificial Sequence: Synthetic oligonucleotide
  Target: PCSK9; (-) strand; PAM type: NRG; PAM sequence: GGG
ttgtatttttagtagagacg

SEQ ID NO: 10362 - DNA, 20 bp, Artificial Sequence
  Description of Artificial Sequence: Synthetic oligonucleotide
  Target: PCSK9; (-) strand; PAM type: NRG; PAM sequence: GGG
tttgtatttttagtagagac

SEQ ID NO: 10363 - DNA, 20 bp, Artificial Sequence
  Description of Artificial Sequence: Synthetic oligonucleotide
  Target: PCSK9; (-) strand; PAM type: NRG; PAM sequence: CGG
ttttgtatttttagtagaga

SEQ ID NO: 10364 - DNA, 20 bp, Artificial Sequence
  Description of Artificial Sequence: Synthetic oligonucleotide
  Target: PCSK9; (-) strand; PAM type: NRG; PAM sequence: GAG
taatttttgtatttttagta

SEQ ID NO: 10365 - DNA, 20 bp, Artificial Sequence
  Description of Artificial Sequence: Synthetic oligonucleotide
  Target: PCSK9; (-) strand; PAM type: NRG; PAM sequence: TAG
gctaatttttgtatttttag

SEQ ID NO: 10366 - DNA, 20 bp, Artificial Sequence
  Description of Artificial Sequence: Synthetic oligonucleotide
  Target: PCSK9; (-) strand; PAM type: NRG; PAM sequence: TAG
ctggctaatttttgtatttt

SEQ ID NO: 10367 - DNA, 20 bp, Artificial Sequence
  Description of Artificial Sequence: Synthetic oligonucleotide
  Target: PCSK9; (-) strand; PAM type: NRG; PAM sequence: TGG
cagacacccaccaccatgcc

SEQ ID NO: 10368 - DNA, 20 bp, Artificial Sequence
  Description of Artificial Sequence: Synthetic oligonucleotide
  Target: PCSK9; (-) strand; PAM type: NRG; PAM sequence: CAG
cctcccaagtagctgggata

SEQ ID NO: 10369 - DNA, 20 bp, Artificial Sequence
  Description of Artificial Sequence: Synthetic oligonucleotide
  Target: PCSK9; (-) strand; PAM type: NRG; PAM sequence: GGG
ccttagcctcccaagtagct

SEQ ID NO: 10370 - DNA, 20 bp, Artificial Sequence
  Description of Artificial Sequence: Synthetic oligonucleotide
  Target: PCSK9; (-) strand; PAM type: NRG; PAM sequence: TGG
gccttagcctcccaagtagc

SEQ ID NO: 10371 - DNA, 20 bp, Artificial Sequence
  Description of Artificial Sequence: Synthetic oligonucleotide
  Target: PCSK9; (-) strand; PAM type: NRG; PAM sequence: TAG
tcctgccttagcctcccaag

SEQ ID NO: 10372 - DNA, 20 bp, Artificial Sequence
  Description of Artificial Sequence: Synthetic oligonucleotide
  Target: PCSK9; (-) strand; PAM type: NRG; PAM sequence: AAG
ttctcctgccttagcctccc

SEQ ID NO: 10373 - DNA, 20 bp, Artificial Sequence
  Description of Artificial Sequence: Synthetic oligonucleotide
  Target: PCSK9; (-) strand; PAM type: NRG; PAM sequence: TAG
ttcaagcgattctcctgcct

SEQ ID NO: 10374 - DNA, 20 bp, Artificial Sequence
  Description of Artificial Sequence: Synthetic oligonucleotide
  Target: PCSK9; (-) strand; PAM type: NRG; PAM sequence: AAG
aacctccacctcctgggttc

SEQ ID NO: 10375 - DNA, 20 bp, Artificial Sequence
  Description of Artificial Sequence: Synthetic oligonucleotide
  Target: PCSK9; (-) strand; PAM type: NRG; PAM sequence: GGG
cactgcaacctccacctcct

SEQ ID NO: 10376 - DNA, 20 bp, Artificial Sequence
  Description of Artificial Sequence: Synthetic oligonucleotide
  Target: PCSK9; (-) strand; PAM type: NRG; PAM sequence: TGG
tcactgcaacctccacctcc

SEQ ID NO: 10377 - DNA, 20 bp, Artificial Sequence
  Description of Artificial Sequence: Synthetic oligonucleotide
  Target: PCSK9; (-) strand; PAM type: NRG; PAM sequence: CAG
ggattgcagtggcacgatct

SEQ ID NO: 10378 - DNA, 20 bp, Artificial Sequence
  Description of Artificial Sequence: Synthetic oligonucleotide
  Target: PCSK9; (-) strand; PAM type: NRG; PAM sequence: TGG
tcactcaggctggattgcag

SEQ ID NO: 10379 - DNA, 20 bp, Artificial Sequence
  Description of Artificial Sequence: Synthetic oligonucleotide
  Target: PCSK9; (-) strand; PAM type: NRG; PAM sequence: CAG
ctatcactcaggctggattg

SEQ ID NO: 10380 - DNA, 20 bp, Artificial Sequence
  Description of Artificial Sequence: Synthetic oligonucleotide
  Target: PCSK9; (-) strand; PAM type: NRG; PAM sequence: TGG
tctcgctctatcactcaggc

SEQ ID NO: 10381 - DNA, 20 bp, Artificial Sequence
  Description of Artificial Sequence: Synthetic oligonucleotide
  Target: PCSK9; (-) strand; PAM type: NRG; PAM sequence: AGG
ggaatctcgctctatcactc

SEQ ID NO: 10382 - DNA, 20 bp, Artificial Sequence
  Description of Artificial Sequence: Synthetic oligonucleotide
  Target: PCSK9; (-) strand; PAM type: NRG; PAM sequence: CAG
tggaatctcgctctatcact

SEQ ID NO: 10383 - DNA, 20 bp, Artificial Sequence
  Description of Artificial Sequence: Synthetic oligonucleotide
  Target: PCSK9; (-) strand; PAM type: NRG; PAM sequence: TGG
ttacttatttatttttgaga

SEQ ID NO: 10384 - DNA, 20 bp, Artificial Sequence
  Description of Artificial Sequence: Synthetic oligonucleotide
  Target: PCSK9; (-) strand; PAM type: NRG; PAM sequence: GAG
ttatttacttatttattttt

SEQ ID NO: 10385 - DNA, 20 bp, Artificial Sequence
  Description of Artificial Sequence: Synthetic oligonucleotide
  Target: PCSK9; (-) strand; PAM type: NRG; PAM sequence: TAG
acagccacatttacagctgc

SEQ ID NO: 10386 - DNA, 20 bp, Artificial Sequence
  Description of Artificial Sequence: Synthetic oligonucleotide
  Target: PCSK9; (-) strand; PAM type: NRG; PAM sequence: CAG
aagaacaacagccacattta

SEQ ID NO: 10387 - DNA, 20 bp, Artificial Sequence
  Description of Artificial Sequence: Synthetic oligonucleotide
  Target: PCSK9; (-) strand; PAM type: NRG; PAM sequence: CAG
agtgtggaggtgaagaacaa

SEQ ID NO: 10388 - DNA, 20 bp, Artificial Sequence
  Description of Artificial Sequence: Synthetic oligonucleotide
  Target: PCSK9; (-) strand; PAM type: NRG; PAM sequence: AAG
tggcactgagtgtggaggtg

SEQ ID NO: 10389 - DNA, 20 bp, Artificial Sequence
  Description of Artificial Sequence: Synthetic oligonucleotide
  Target: PCSK9; (-) strand; PAM type: NRG; PAM sequence: AGG
tggagtggcactgagtgtgg

SEQ ID NO: 10390 - DNA, 20 bp, Artificial Sequence
  Description of Artificial Sequence: Synthetic oligonucleotide
  Target: PCSK9; (-) strand; PAM type: NRG; PAM sequence: GAG
gtggagtggcactgagtgtg

SEQ ID NO: 10391 - DNA, 20 bp, Artificial Sequence
  Description of Artificial Sequence: Synthetic oligonucleotide
  Target: PCSK9; (-) strand; PAM type: NRG; PAM sequence: TGG
gagtggagtggcactgagtg

SEQ ID NO: 10392 - DNA, 20 bp, Artificial Sequence
  Description of Artificial Sequence: Synthetic oligonucleotide
  Target: PCSK9; (-) strand; PAM type: NRG; PAM sequence: GAG
ggagggagtggagtggcact

SEQ ID NO: 10393 - DNA, 20 bp, Artificial Sequence
  Description of Artificial Sequence: Synthetic oligonucleotide
  Target: PCSK9; (-) strand; PAM type: NRG; PAM sequence: TGG
cacggagggagggagtggag

SEQ ID NO: 10394 - DNA, 20 bp, Artificial Sequence
  Description of Artificial Sequence: Synthetic oligonucleotide
  Target: PCSK9; (-) strand; PAM type: NRG; PAM sequence: GAG
caccacggagggagggagtg

SEQ ID NO: 10395 - DNA, 20 bp, Artificial Sequence
  Description of Artificial Sequence: Synthetic oligonucleotide
  Target: PCSK9; (-) strand; PAM type: NRG; PAM sequence: TGG
cacaccacggagggagggag

SEQ ID NO: 10396 - DNA, 20 bp, Artificial Sequence
  Description of Artificial Sequence: Synthetic oligonucleotide
  Target: PCSK9; (-) strand; PAM type: NRG; PAM sequence: GAG
cctcacaccacggagggagg

SEQ ID NO: 10397 - DNA, 20 bp, Artificial Sequence
  Description of Artificial Sequence: Synthetic oligonucleotide
  Target: PCSK9; (-) strand; PAM type: NRG; PAM sequence: GGG
cccctcacaccacggaggga

SEQ ID NO: 10398 - DNA, 20 bp, Artificial Sequence
  Description of Artificial Sequence: Synthetic oligonucleotide
  Target: PCSK9; (-) strand; PAM type: NRG; PAM sequence: AGG
gcccctcacaccacggaggg

SEQ ID NO: 10399 - DNA, 20 bp, Artificial Sequence
  Description of Artificial Sequence: Synthetic oligonucleotide
  Target: PCSK9; (-) strand; PAM type: NRG; PAM sequence: GAG
ggcccctcacaccacggagg

SEQ ID NO: 10400 - DNA, 20 bp, Artificial Sequence
  Description of Artificial Sequence: Synthetic oligonucleotide
  Target: PCSK9; (-) strand; PAM type: NRG; PAM sequence: GGG
gaggcccctcacaccacgga

SEQ ID NO: 10401 - DNA, 20 bp, Artificial Sequence
  Description of Artificial Sequence: Synthetic oligonucleotide
  Target: PCSK9; (-) strand; PAM type: NRG; PAM sequence: AGG
tgaggcccctcacaccacgg

SEQ ID NO: 10402 - DNA, 20 bp, Artificial Sequence
  Description of Artificial Sequence: Synthetic oligonucleotide
  Target: PCSK9; (-) strand; PAM type: NRG; PAM sequence: GAG
gtgaggcccctcacaccacg

SEQ ID NO: 10403 - DNA, 20 bp, Artificial Sequence
  Description of Artificial Sequence: Synthetic oligonucleotide
  Target: PCSK9; (-) strand; PAM type: NRG; PAM sequence: CGG
tagtgaggcccctcacacca

SEQ ID NO: 10404 - DNA, 20 bp, Artificial Sequence
  Description of Artificial Sequence: Synthetic oligonucleotide
  Target: PCSK9; (-) strand; PAM type: NRG; PAM sequence: AGG
ctcctaggagacagctagtg

SEQ ID NO: 10405 - DNA, 20 bp, Artificial Sequence
  Description of Artificial Sequence: Synthetic oligonucleotide
  Target: PCSK9; (-) strand; PAM type: NRG; PAM sequence: GAG
cctcctaggagacagctagt

SEQ ID NO: 10406 - DNA, 20 bp, Artificial Sequence
  Description of Artificial Sequence: Synthetic oligonucleotide
  Target: PCSK9; (-) strand; PAM type: NRG; PAM sequence: TAG
tgctcctcctaggagacagc

SEQ ID NO: 10407 - DNA, 20 bp, Artificial Sequence
  Description of Artificial Sequence: Synthetic oligonucleotide
  Target: PCSK9; (-) strand; PAM type: NRG; PAM sequence: CAG
gccatgctcctcctaggaga

SEQ ID NO: 10408 - DNA, 20 bp, Artificial Sequence
  Description of Artificial Sequence: Synthetic oligonucleotide
  Target: PCSK9; (-) strand; PAM type: NRG; PAM sequence: GAG
cacagccatgctcctcctag

SEQ ID NO: 10409 - DNA, 20 bp, Artificial Sequence
  Description of Artificial Sequence: Synthetic oligonucleotide
  Target: PCSK9; (-) strand; PAM type: NRG; PAM sequence: AGG
ctcacagccatgctcctcct

SEQ ID NO: 10410 - DNA, 20 bp, Artificial Sequence
  Description of Artificial Sequence: Synthetic oligonucleotide
  Target: PCSK9; (-) strand; PAM type: NRG; PAM sequence: TAG
tctcacagccatgctcctcc

SEQ ID NO: 10411 - DNA, 20 bp, Artificial Sequence
  Description of Artificial Sequence: Synthetic oligonucleotide
  Target: PCSK9; (-) strand; PAM type: NRG; PAM sequence: CAG
aggatggagctggaatctca

SEQ ID NO: 10412 - DNA, 20 bp, Artificial Sequence
  Description of Artificial Sequence: Synthetic oligonucleotide
  Target: PCSK9; (-) strand; PAM type: NRG; PAM sequence: TGG
gccgtggccaaggatggagc

SEQ ID NO: 10413 - DNA, 20 bp, Artificial Sequence
  Description of Artificial Sequence: Synthetic oligonucleotide
  Target: PCSK9; (-) strand; PAM type: NRG; PAM sequence: GAG
aggagccgtggccaaggatg

SEQ ID NO: 10414 - DNA, 20 bp, Artificial Sequence
  Description of Artificial Sequence: Synthetic oligonucleotide
  Target: PCSK9; (-) strand; PAM type: NRG; PAM sequence: TGG
ccaggagccgtggccaagga

SEQ ID NO: 10415 - DNA, 20 bp, Artificial Sequence
  Description of Artificial Sequence: Synthetic oligonucleotide
  Target: PCSK9; (-) strand; PAM type: NRG; PAM sequence: AGG
gtctccaggagccgtggcca

SEQ ID NO: 10416 - DNA, 20 bp, Artificial Sequence
  Description of Artificial Sequence: Synthetic oligonucleotide
  Target: PCSK9; (-) strand; PAM type: NRG; PAM sequence: AAG
tgtctccaggagccgtggcc

SEQ ID NO: 10417 - DNA, 20 bp, Artificial Sequence
  Description of Artificial Sequence: Synthetic oligonucleotide
  Target: PCSK9; (-) strand; PAM type: NRG; PAM sequence: TGG
taagatgtctccaggagccg

SEQ ID NO: 10418 - DNA, 20 bp, Artificial Sequence
  Description of Artificial Sequence: Synthetic oligonucleotide
  Target: PCSK9; (-) strand; PAM type: NRG; PAM sequence: GAG
ggcctctaagatgtctccag

SEQ ID NO: 10419 - DNA, 20 bp, Artificial Sequence
  Description of Artificial Sequence: Synthetic oligonucleotide
  Target: PCSK9; (-) strand; PAM type: NRG; PAM sequence: AGG
ctggcctctaagatgtctcc

SEQ ID NO: 10420 - DNA, 20 bp, Artificial Sequence
  Description of Artificial Sequence: Synthetic oligonucleotide
  Target: PCSK9; (-) strand; PAM type: NRG; PAM sequence: CAG
cctggcctctaagatgtctc

SEQ ID NO: 10421 - DNA, 20 bp, Artificial Sequence
  Description of Artificial Sequence: Synthetic oligonucleotide
  Target: PCSK9; (-) strand; PAM type: NRG; PAM sequence: AAG
ccttctggatcctggcctct

SEQ ID NO: 10422 - DNA, 20 bp, Artificial Sequence
  Description of Artificial Sequence: Synthetic oligonucleotide
  Target: PCSK9; (-) strand; PAM type: NRG; PAM sequence: TGG
tgtgggagccttctggatcc

SEQ ID NO: 10423 - DNA, 20 bp, Artificial Sequence
  Description of Artificial Sequence: Synthetic oligonucleotide
  Target: PCSK9; (-) strand; PAM type: NRG; PAM sequence: TGG
aatgaggtgtgggagccttc

SEQ ID NO: 10424 - DNA, 20 bp, Artificial Sequence
  Description of Artificial Sequence: Synthetic oligonucleotide
  Target: PCSK9; (-) strand; PAM type: NRG; PAM sequence: GAG
ccctgtcaaatgaggtgtgg

SEQ ID NO: 10425 - DNA, 20 bp, Artificial Sequence
  Description of Artificial Sequence: Synthetic oligonucleotide
  Target: PCSK9; (-) strand; PAM type: NRG; PAM sequence: GGG
tcccctgtcaaatgaggtgt

SEQ ID NO: 10426 - DNA, 20 bp, Artificial Sequence
  Description of Artificial Sequence: Synthetic oligonucleotide
  Target: PCSK9; (-) strand; PAM type: NRG; PAM sequence: TGG
ctcccctgtcaaatgaggtg

SEQ ID NO: 10427 - DNA, 20 bp, Artificial Sequence
  Description of Artificial Sequence: Synthetic oligonucleotide
  Target: PCSK9; (-) strand; PAM type: NRG; PAM sequence: AGG
agcttctcccctgtcaaatg

SEQ ID NO: 10428 - DNA, 20 bp, Artificial Sequence
  Description of Artificial Sequence: Synthetic oligonucleotide
  Target: PCSK9; (-) strand; PAM type: NRG; PAM sequence: GAG
cagcttctcccctgtcaaat

SEQ ID NO: 10429 - DNA, 20 bp, Artificial Sequence
  Description of Artificial Sequence: Synthetic oligonucleotide
  Target: PCSK9; (-) strand; PAM type: NRG; PAM sequence: CAG
gcaaggggacctggaactga

SEQ ID NO: 10430 - DNA, 20 bp, Artificial Sequence
  Description of Artificial Sequence: Synthetic oligonucleotide
  Target: PCSK9; (-) strand; PAM type: NRG; PAM sequence: TGG
ccctgatgtgcaaggggacc

SEQ ID NO: 10431 - DNA, 20 bp, Artificial Sequence
  Description of Artificial Sequence: Synthetic oligonucleotide
  Target: PCSK9; (-) strand; PAM type: NRG; PAM sequence: GGG
ctctggccctgatgtgcaag

SEQ ID NO: 10432 - DNA, 20 bp, Artificial Sequence
  Description of Artificial Sequence: Synthetic oligonucleotide
  Target: PCSK9; (-) strand; PAM type: NRG; PAM sequence: GGG
gctctggccctgatgtgcaa

SEQ ID NO: 10433 - DNA, 20 bp, Artificial Sequence
  Description of Artificial Sequence: Synthetic oligonucleotide
  Target: PCSK9; (-) strand; PAM type: NRG; PAM sequence: AGG
agctctggccctgatgtgca

SEQ ID NO: 10434 - DNA, 20 bp, Artificial Sequence
  Description of Artificial Sequence: Synthetic oligonucleotide
  Target: PCSK9; (-) strand; PAM type: NRG; PAM sequence: AAG
cagctctggccctgatgtgc

SEQ ID NO: 10435 - DNA, 20 bp, Artificial Sequence
  Description of Artificial Sequence: Synthetic oligonucleotide
  Target: PCSK9; (-) strand; PAM type: NRG; PAM sequence: TGG
ctggaggcctaacgcagctc

SEQ ID NO: 10436 - DNA, 20 bp, Artificial Sequence
  Description of Artificial Sequence: Synthetic oligonucleotide
  Target: PCSK9; (-) strand; PAM type: NRG; PAM sequence: CAG
tggagactggaggcctaacg

SEQ ID NO: 10437 - DNA, 20 bp, Artificial Sequence
  Description of Artificial Sequence: Synthetic oligonucleotide
  Target: PCSK9; (-) strand; PAM type: NRG; PAM sequence: AGG
cccagtggcctggagactgg

SEQ ID NO: 10438 - DNA, 20 bp, Artificial Sequence
  Description of Artificial Sequence: Synthetic oligonucleotide
  Target: PCSK9; (-) strand; PAM type: NRG; PAM sequence: GAG
gcccagtggcctggagactg

SEQ ID NO: 10439 - DNA, 20 bp, Artificial Sequence
  Description of Artificial Sequence: Synthetic oligonucleotide
  Target: PCSK9; (-) strand; PAM type: NRG; PAM sequence: TGG
tggcccagtggcctggagac

SEQ ID NO: 10440 - DNA, 20 bp, Artificial Sequence
  Description of Artificial Sequence: Synthetic oligonucleotide
  Target: PCSK9; (-) strand; PAM type: NRG; PAM sequence: GAG
agctctggcccagtggcctg

SEQ ID NO: 10441 - DNA, 20 bp, Artificial Sequence
  Description of Artificial Sequence: Synthetic oligonucleotide
  Target: PCSK9; (-) strand; PAM type: NRG; PAM sequence: TGG
tgagctctggcccagtggcc

SEQ ID NO: 10442 - DNA, 20 bp, Artificial Sequence
  Description of Artificial Sequence: Synthetic oligonucleotide
  Target: PCSK9; (-) strand; PAM type: NRG; PAM sequence: TGG
gcctgtgagctctggcccag

SEQ ID NO: 10443 - DNA, 20 bp, Artificial Sequence
  Description of Artificial Sequence: Synthetic oligonucleotide
  Target: PCSK9; (-) strand; PAM type: NRG; PAM sequence: CAG
ccagcctgtgagctctggcc

SEQ ID NO: 10444 - DNA, 20 bp, Artificial Sequence
  Description of Artificial Sequence: Synthetic oligonucleotide
  Target: PCSK9; (-) strand; PAM type: NRG; PAM sequence: TGG
ctctgccagcctgtgagctc

SEQ ID NO: 10445 - DNA, 20 bp, Artificial Sequence
  Description of Artificial Sequence: Synthetic oligonucleotide
  Target: PCSK9; (-) strand; PAM type: NRG; PAM sequence: GAG
ctaaccctctgccagcctgt

SEQ ID NO: 10446 - DNA, 20 bp, Artificial Sequence
  Description of Artificial Sequence: Synthetic oligonucleotide
  Target: PCSK9; (-) strand; PAM type: NRG; PAM sequence: CAG
taacagttctaaccctctgc

SEQ ID NO: 10447 - DNA, 20 bp, Artificial Sequence
  Description of Artificial Sequence: Synthetic oligonucleotide
  Target: PCSK9; (-) strand; PAM type: NRG; PAM sequence: CAG
ctgcacccagccaccagtaa

SEQ ID NO: 10448 - DNA, 20 bp, Artificial Sequence
  Description of Artificial Sequence: Synthetic oligonucleotide
  Target: PCSK9; (-) strand; PAM type: NRG; PAM sequence: CAG
gagccactgcacccagccac

SEQ ID NO: 10449 - DNA, 20 bp, Artificial Sequence
  Description of Artificial Sequence: Synthetic oligonucleotide
  Target: PCSK9; (-) strand; PAM type: NRG; PAM sequence: CAG
caggcgtgagccactgcacc

SEQ ID NO: 10450 - DNA, 20 bp, Artificial Sequence
  Description of Artificial Sequence: Synthetic oligonucleotide
  Target: PCSK9; (-) strand; PAM type: NRG; PAM sequence: GAG
agtgctaagattacaggcgt

SEQ ID NO: 10451 - DNA, 20 bp, Artificial Sequence
  Description of Artificial Sequence: Synthetic oligonucleotide
  Target: PCSK9; (-) strand; PAM type: NRG; PAM sequence: AGG
tcccaaagtgctaagattac

SEQ ID NO: 10452 - DNA, 20 bp, Artificial Sequence
  Description of Artificial Sequence: Synthetic oligonucleotide
  Target: PCSK9; (-) strand; PAM type: NRG; PAM sequence: CAG
ctcccaaagtgctaagatta

SEQ ID NO: 10453 - DNA, 20 bp, Artificial Sequence
  Description of Artificial Sequence: Synthetic oligonucleotide
  Target: PCSK9; (-) strand; PAM type: NRG; PAM sequence: AAG
ccttgccctcccaaagtgct

SEQ ID NO: 10454 - DNA, 20 bp, Artificial Sequence
  Description of Artificial Sequence: Synthetic oligonucleotide
  Target: PCSK9; (-) strand; PAM type: NRG; PAM sequence: AAG
cctcccgccttgccctccca

SEQ ID NO: 10455 - DNA, 20 bp, Artificial Sequence
  Description of Artificial Sequence: Synthetic oligonucleotide
  Target: PCSK9; (-) strand; PAM type: NRG; PAM sequence: TGG
cttcaccgtgttagcaagga

SEQ ID NO: 10456 - DNA, 20 bp, Artificial Sequence
  Description of Artificial Sequence: Synthetic oligonucleotide
  Target: PCSK9; (-) strand; PAM type: NRG; PAM sequence: AGG
ggggcttcaccgtgttagca

SEQ ID NO: 10457 - DNA, 20 bp, Artificial Sequence
  Description of Artificial Sequence: Synthetic oligonucleotide
  Target: PCSK9; (-) strand; PAM type: NRG; PAM sequence: AAG
cggggcttcaccgtgttagc

SEQ ID NO: 10458 - DNA, 20 bp, Artificial Sequence
  Description of Artificial Sequence: Synthetic oligonucleotide
  Target: PCSK9; (-) strand; PAM type: NRG; PAM sequence: TAG
gagacggggcttcaccgtgt

SEQ ID NO: 10459 - DNA, 20 bp, Artificial Sequence
  Description of Artificial Sequence: Synthetic oligonucleotide
  Target: PCSK9; (-) strand; PAM type: NRG; PAM sequence: GGG
ttgtagttttagtagagacg

SEQ ID NO: 10460 - DNA, 20 bp, Artificial Sequence
  Description of Artificial Sequence: Synthetic oligonucleotide
  Target: PCSK9; (-) strand; PAM type: NRG; PAM sequence: GGG
tttgtagttttagtagagac

SEQ ID NO: 10461 - DNA, 20 bp, Artificial Sequence
  Description of Artificial Sequence: Synthetic oligonucleotide
  Target: PCSK9; (-) strand; PAM type: NRG; PAM sequence: CGG
ttttgtagttttagtagaga

SEQ ID NO: 10462 - DNA, 20 bp, Artificial Sequence
  Description of Artificial Sequence: Synthetic oligonucleotide
  Target: PCSK9; (-) strand; PAM type: NRG; PAM sequence: GAG
aattttttgtagttttagta

SEQ ID NO: 10463 - DNA, 20 bp, Artificial Sequence
  Description of Artificial Sequence: Synthetic oligonucleotide
  Target: PCSK9; (-) strand; PAM type: NRG; PAM sequence: TAG
ctaattttttgtagttttag

SEQ ID NO: 10464 - DNA, 20 bp, Artificial Sequence
  Description of Artificial Sequence: Synthetic oligonucleotide
  Target: PCSK9; (-) strand; PAM type: NRG; PAM sequence: TAG
cggctaattttttgtagttt

SEQ ID NO: 10465 - DNA, 20 bp, Artificial Sequence
  Description of Artificial Sequence: Synthetic oligonucleotide
  Target: PCSK9; (-) strand; PAM type: NRG; PAM sequence: TAG
cacgcccggctaattttttg

SEQ ID NO: 10466 - DNA, 20 bp, Artificial Sequence
  Description of Artificial Sequence: Synthetic oligonucleotide
  Target: PCSK9; (-) strand; PAM type: NRG; PAM sequence: CGG
caggcgcctgccaccacgcc

SEQ ID NO: 10467 - DNA, 20 bp, Artificial Sequence
  Description of Artificial Sequence: Synthetic oligonucleotide
  Target: PCSK9; (-) strand; PAM type: NRG; PAM sequence: AGG
tcctgagtagctgggactac

SEQ ID NO: 10468 - DNA, 20 bp, Artificial Sequence
  Description of Artificial Sequence: Synthetic oligonucleotide
  Target: PCSK9; (-) strand; PAM type: NRG; PAM sequence: CAG
ctcctgagtagctgggacta

SEQ ID NO: 10469 - DNA, 20 bp, Artificial Sequence
  Description of Artificial Sequence: Synthetic oligonucleotide
  Target: PCSK9; (-) strand; PAM type: NRG; PAM sequence: GGG
cctcagcctcctgagtagct

SEQ ID NO: 10470 - DNA, 20 bp, Artificial Sequence
  Description of Artificial Sequence: Synthetic oligonucleotide
  Target: PCSK9; (-) strand; PAM type: NRG; PAM sequence: TGG
gcctcagcctcctgagtagc

SEQ ID NO: 10471 - DNA, 20 bp, Artificial Sequence
  Description of Artificial Sequence: Synthetic oligonucleotide
  Target: PCSK9; (-) strand; PAM type: NRG; PAM sequence: TAG
tcctgcctcagcctcctgag

SEQ ID NO: 10472 - DNA, 20 bp, Artificial Sequence
  Description of Artificial Sequence: Synthetic oligonucleotide
  Target: PCSK9; (-) strand; PAM type: NRG; PAM sequence: GAG
ttctcctgcctcagcctcct

SEQ ID NO: 10473 - DNA, 20 bp, Artificial Sequence
  Description of Artificial Sequence: Synthetic oligonucleotide
  Target: PCSK9; (-) strand; PAM type: NRG; PAM sequence: CAG
ttcacgccattctcctgcct

SEQ ID NO: 10474 - DNA, 20 bp, Artificial Sequence
  Description of Artificial Sequence: Synthetic oligonucleotide
  Target: PCSK9; (-) strand; PAM type: NRG; PAM sequence: GGG
cactgcaagctccgcctccc

SEQ ID NO: 10475 - DNA, 20 bp, Artificial Sequence
  Description of Artificial Sequence: Synthetic oligonucleotide
  Target: PCSK9; (-) strand; PAM type: NRG; PAM sequence: CGG
tcactgcaagctccgcctcc

SEQ ID NO: 10476 - DNA, 20 bp, Artificial Sequence
  Description of Artificial Sequence: Synthetic oligonucleotide
  Target: PCSK9; (-) strand; PAM type: NRG; PAM sequence: AAG
gcgcaatctcggctcactgc

SEQ ID NO: 10477 - DNA, 20 bp, Artificial Sequence
  Description of Artificial Sequence: Synthetic oligonucleotide
  Target: PCSK9; (-) strand; PAM type: NRG; PAM sequence: CGG
ggagtgcagtggcgcaatct

SEQ ID NO: 10478 - DNA, 20 bp, Artificial Sequence
  Description of Artificial Sequence: Synthetic oligonucleotide
  Target: PCSK9; (-) strand; PAM type: NRG; PAM sequence: TGG
ttgcccaggctggagtgcag

SEQ ID NO: 10479 - DNA, 20 bp, Artificial Sequence
  Description of Artificial Sequence: Synthetic oligonucleotide
  Target: PCSK9; (-) strand; PAM type: NRG; PAM sequence: CAG
ctattgcccaggctggagtg

SEQ ID NO: 10480 - DNA, 20 bp, Artificial Sequence
  Description of Artificial Sequence: Synthetic oligonucleotide
  Target: PCSK9; (-) strand; PAM type: NRG; PAM sequence: GAG
tcgctctattgcccaggctg

SEQ ID NO: 10481 - DNA, 20 bp, Artificial Sequence
  Description of Artificial Sequence: Synthetic oligonucleotide
  Target: PCSK9; (-) strand; PAM type: NRG; PAM sequence: TGG
tctcgctctattgcccaggc

SEQ ID NO: 10482 - DNA, 20 bp, Artificial Sequence
  Description of Artificial Sequence: Synthetic oligonucleotide
  Target: PCSK9; (-) strand; PAM type: NRG; PAM sequence: AGG
ggagtctcgctctattgccc

SEQ ID NO: 10483 - DNA, 20 bp, Artificial Sequence
  Description of Artificial Sequence: Synthetic oligonucleotide
  Target: PCSK9; (-) strand; PAM type: NRG; PAM sequence: CAG
cggagtctcgctctattgcc

SEQ ID NO: 10484 - DNA, 20 bp, Artificial Sequence
  Description of Artificial Sequence: Synthetic oligonucleotide
  Target: PCSK9; (-) strand; PAM type: NRG; PAM sequence: GAG
tttttttttctttccagacg

SEQ ID NO: 10485 - DNA, 20 bp, Artificial Sequence
  Description of Artificial Sequence: Synthetic oligonucleotide
  Target: PCSK9; (-) strand; PAM type: NRG; PAM sequence: CGG
tttttttttttctttccaga

SEQ ID NO: 10486 - DNA, 20 bp, Artificial Sequence
  Description of Artificial Sequence: Synthetic oligonucleotide
  Target: PCSK9; (-) strand; PAM type: NRG; PAM sequence: CAG
cttttttttttttttctttc

SEQ ID NO: 10487 - DNA, 20 bp, Artificial Sequence
  Description of Artificial Sequence: Synthetic oligonucleotide
  Target: PCSK9; (-) strand; PAM type: NRG; PAM sequence: CAG
catgctactgtcaacagtaa

SEQ ID NO: 10488 - DNA, 20 bp, Artificial Sequence
  Description of Artificial Sequence: Synthetic oligonucleotide
  Target: PCSK9; (-) strand; PAM type: NRG; PAM sequence: CAG
ctacctcatgctactgtcaa

SEQ ID NO: 10489 - DNA, 20 bp, Artificial Sequence
  Description of Artificial Sequence: Synthetic oligonucleotide
  Target: PCSK9; (-) strand; PAM type: NRG; PAM sequence: TGG
ccccattttggtgcaggcca

SEQ ID NO: 10490 - DNA, 20 bp, Artificial Sequence
  Description of Artificial Sequence: Synthetic oligonucleotide
  Target: PCSK9; (-) strand; PAM type: NRG; PAM sequence: AGG
ccactcccccattttggtgc

SEQ ID NO: 10491 - DNA, 20 bp, Artificial Sequence
  Description of Artificial Sequence: Synthetic oligonucleotide
  Target: PCSK9; (-) strand; PAM type: NRG; PAM sequence: CAG
tccactcccccattttggtg

SEQ ID NO: 10492 - DNA, 20 bp, Artificial Sequence
  Description of Artificial Sequence: Synthetic oligonucleotide
  Target: PCSK9; (-) strand; PAM type: NRG; PAM sequence: TGG
ggcactccactcccccattt

SEQ ID NO: 10493 - DNA, 20 bp, Artificial Sequence
  Description of Artificial Sequence: Synthetic oligonucleotide
  Target: PCSK9; (-) strand; PAM type: NRG; PAM sequence: TGG
gtggttccttctggcctcag

SEQ ID NO: 10494 - DNA, 20 bp, Artificial Sequence
  Description of Artificial Sequence: Synthetic oligonucleotide
  Target: PCSK9; (-) strand; PAM type: NRG; PAM sequence: CAG
ggtgtggttccttctggcct

SEQ ID NO: 10495 - DNA, 20 bp, Artificial Sequence
  Description of Artificial Sequence: Synthetic oligonucleotide
  Target: PCSK9; (-) strand; PAM type: NRG; PAM sequence: TGG
cttgagggtgtggttccttc

SEQ ID NO: 10496 - DNA, 20 bp, Artificial Sequence
  Description of Artificial Sequence: Synthetic oligonucleotide
  Target: PCSK9; (-) strand; PAM type: NRG; PAM sequence: TGG
actccccacccttgagggtg

SEQ ID NO: 10497 - DNA, 20 bp, Artificial Sequence
  Description of Artificial Sequence: Synthetic oligonucleotide
  Target: PCSK9; (-) strand; PAM type: NRG; PAM sequence: GGG
ccataactccccacccttga

SEQ ID NO: 10498 - DNA, 20 bp, Artificial Sequence
  Description of Artificial Sequence: Synthetic oligonucleotide
  Target: PCSK9; (-) strand; PAM type: NRG; PAM sequence: AGG
accataactccccacccttg

SEQ ID NO: 10499 - DNA, 20 bp, Artificial Sequence
  Description of Artificial Sequence: Synthetic oligonucleotide
  Target: PCSK9; (-) strand; PAM type: NRG; PAM sequence: GAG
taccataactccccaccctt

SEQ ID NO: 10500 - DNA, 20 bp, Artificial Sequence
  Description of Artificial Sequence: Synthetic oligonucleotide
  Target: PCSK9; (-) strand; PAM type: NRG; PAM sequence: AGG
aattaaaagactccatgcct

SEQ ID NO: 10501 - DNA, 20 bp, Artificial Sequence
  Description of Artificial Sequence: Synthetic oligonucleotide
  Target: PCSK9; (-) strand; PAM type: NRG; PAM sequence: TAG
gaattaaaagactccatgcc

SEQ ID NO: 10502 - DNA, 20 bp, Artificial Sequence
  Description of Artificial Sequence: Synthetic oligonucleotide
  Target: PCSK9; (-) strand; PAM type: NRG; PAM sequence: AAG
aggattgtctaaagaattaa

SEQ ID NO: 10503 - DNA, 20 bp, Artificial Sequence
  Description of Artificial Sequence: Synthetic oligonucleotide
  Target: PCSK9; (-) strand; PAM type: NRG; PAM sequence: AAG
gttgctcccaggattgtcta

SEQ ID NO: 10504 - DNA, 20 bp, Artificial Sequence
  Description of Artificial Sequence: Synthetic oligonucleotide
  Target: PCSK9; (-) strand; PAM type: NRG; PAM sequence: AGG
aaacagggacagttgctccc

SEQ ID NO: 10505 - DNA, 20 bp, Artificial Sequence
  Description of Artificial Sequence: Synthetic oligonucleotide
  Target: PCSK9; (-) strand; PAM type: NRG; PAM sequence: CAG
gaaacagggacagttgctcc

SEQ ID NO: 10506 - DNA, 20 bp, Artificial Sequence
  Description of Artificial Sequence: Synthetic oligonucleotide
  Target: PCSK9; (-) strand; PAM type: NRG; PAM sequence: CAG
cgccctctgtgaaacaggga

SEQ ID NO: 10507 - DNA, 20 bp, Artificial Sequence
  Description of Artificial Sequence: Synthetic oligonucleotide
  Target: PCSK9; (-) strand; PAM type: NRG; PAM sequence: GGG
gccccgccctctgtgaaaca

SEQ ID NO: 10508 - DNA, 20 bp, Artificial Sequence
  Description of Artificial Sequence: Synthetic oligonucleotide
  Target: PCSK9; (-) strand; PAM type: NRG; PAM sequence: AGG
ggccccgccctctgtgaaac

SEQ ID NO: 10509 - DNA, 20 bp, Artificial Sequence
  Description of Artificial Sequence: Synthetic oligonucleotide
  Target: PCSK9; (-) strand; PAM type: NRG; PAM sequence: CAG
tggccccgccctctgtgaaa

SEQ ID NO: 10510 - DNA, 20 bp, Artificial Sequence
  Description of Artificial Sequence: Synthetic oligonucleotide
  Target: PCSK9; (-) strand; PAM type: NRG; PAM sequence: TGG
ctgcccactcaccagctgtg

SEQ ID NO: 10511 - DNA, 20 bp, Artificial Sequence
  Description of Artificial Sequence: Synthetic oligonucleotide
  Target: PCSK9; (-) strand; PAM type: NRG; PAM sequence: CAG
agtcttggctgcccactcac

SEQ ID NO: 10512 - DNA, 20 bp, Artificial Sequence
  Description of Artificial Sequence: Synthetic oligonucleotide
  Target: PCSK9; (-) strand; PAM type: NRG; PAM sequence: TGG
cacaaacttgaacagagtct

SEQ ID NO: 10513 - DNA, 20 bp, Artificial Sequence
  Description of Artificial Sequence: Synthetic oligonucleotide
  Target: PCSK9; (-) strand; PAM type: NRG; PAM sequence: GAG
gacccacacaaacttgaaca

SEQ ID NO: 10514 - DNA, 20 bp, Artificial Sequence
  Description of Artificial Sequence: Synthetic oligonucleotide
  Target: PCSK9; (-) strand; PAM type: NRG; PAM sequence: CAG
tggacccacacaaacttgaa

SEQ ID NO: 10515 - DNA, 20 bp, Artificial Sequence
  Description of Artificial Sequence: Synthetic oligonucleotide
  Target: PCSK9; (-) strand; PAM type: NRG; PAM sequence: TGG
tccaccgtggccgcaagtgt

SEQ ID NO: 10516 - DNA, 20 bp, Artificial Sequence
  Description of Artificial Sequence: Synthetic oligonucleotide
  Target: PCSK9; (-) strand; PAM type: NRG; PAM sequence: AAG
tgcccctccaccgtggccgc

SEQ ID NO: 10517 - DNA, 20 bp, Artificial Sequence
  Description of Artificial Sequence: Synthetic oligonucleotide
  Target: PCSK9; (-) strand; PAM type: NRG; PAM sequence: TGG
gctcagatgcccctccaccg

SEQ ID NO: 10518 - DNA, 20 bp, Artificial Sequence
  Description of Artificial Sequence: Synthetic oligonucleotide
  Target: PCSK9; (-) strand; PAM type: NRG; PAM sequence: CAG
ccactctctgaggcctggct

SEQ ID NO: 10519 - DNA, 20 bp, Artificial Sequence
  Description of Artificial Sequence: Synthetic oligonucleotide
  Target: PCSK9; (-) strand; PAM type: NRG; PAM sequence: TGG
ccccgccactctctgaggcc

SEQ ID NO: 10520 - DNA, 20 bp, Artificial Sequence
  Description of Artificial Sequence: Synthetic oligonucleotide
  Target: PCSK9; (-) strand; PAM type: NRG; PAM sequence: AGG
acttcccccgccactctctg

SEQ ID NO: 10521 - DNA, 20 bp, Artificial Sequence
  Description of Artificial Sequence: Synthetic oligonucleotide
  Target: PCSK9; (-) strand; PAM type: NRG; PAM sequence: GAG
aacttcccccgccactctct

SEQ ID NO: 10522 - DNA, 20 bp, Artificial Sequence
  Description of Artificial Sequence: Synthetic oligonucleotide
  Target: PCSK9; (-) strand; PAM type: NRG; PAM sequence: GGG
gagcctcagaggaatgagaa

SEQ ID NO: 10523 - DNA, 20 bp, Artificial Sequence
  Description of Artificial Sequence: Synthetic oligonucleotide
  Target: PCSK9; (-) strand; PAM type: NRG; PAM sequence: AGG
tgagcctcagaggaatgaga

SEQ ID NO: 10524 - DNA, 20 bp, Artificial Sequence
  Description of Artificial Sequence: Synthetic oligonucleotide
  Target: PCSK9; (-) strand; PAM type: NRG; PAM sequence: AAG
atgagcctcagaggaatgag

SEQ ID NO: 10525 - DNA, 20 bp, Artificial Sequence
  Description of Artificial Sequence: Synthetic oligonucleotide
  Target: PCSK9; (-) strand; PAM type: NRG; PAM sequence: GAG
aggatgagcctcagaggaat

SEQ ID NO: 10526 - DNA, 20 bp, Artificial Sequence
  Description of Artificial Sequence: Synthetic oligonucleotide
  Target: PCSK9; (-) strand; PAM type: NRG; PAM sequence: AGG
accaagaggatgagcctcag

SEQ ID NO: 10527 - DNA, 20 bp, Artificial Sequence
  Description of Artificial Sequence: Synthetic oligonucleotide
  Target: PCSK9; (-) strand; PAM type: NRG; PAM sequence: GAG
caccaagaggatgagcctca

SEQ ID NO: 10528 - DNA, 20 bp, Artificial Sequence
  Description of Artificial Sequence: Synthetic oligonucleotide
  Target: PCSK9; (-) strand; PAM type: NRG; PAM sequence: CAG
ggcaccaagaggatgagcct

SEQ ID NO: 10529 - DNA, 20 bp, Artificial Sequence
  Description of Artificial Sequence: Synthetic oligonucleotide
  Target: PCSK9; (-) strand; PAM type: NRG; PAM sequence: GAG
aagagaggcaccaagaggat

SEQ ID NO: 10530 - DNA, 20 bp, Artificial Sequence
  Description of Artificial Sequence: Synthetic oligonucleotide
  Target: PCSK9; (-) strand; PAM type: NRG; PAM sequence: AGG
catgaaagagaggcaccaag

SEQ ID NO: 10531 - DNA, 20 bp, Artificial Sequence
  Description of Artificial Sequence: Synthetic oligonucleotide
  Target: PCSK9; (-) strand; PAM type: NRG; PAM sequence: GAG
ccatgaaagagaggcaccaa

SEQ ID NO: 10532 - DNA, 20 bp, Artificial Sequence
  Description of Artificial Sequence: Synthetic oligonucleotide
  Target: PCSK9; (-) strand; PAM type: NRG; PAM sequence: AAG
ttccatgaaagagaggcacc

SEQ ID NO: 10533 - DNA, 20 bp, Artificial Sequence
  Description of Artificial Sequence: Synthetic oligonucleotide
  Target: PCSK9; (-) strand; PAM type: NRG; PAM sequence: AGG
tatccctttccatgaaagag

SEQ ID NO: 10534 - DNA, 20 bp, Artificial Sequence
  Description of Artificial Sequence: Synthetic oligonucleotide
  Target: PCSK9; (-) strand; PAM type: NRG; PAM sequence: GAG
ttatccctttccatgaaaga

SEQ ID NO: 10535 - DNA, 20 bp, Artificial Sequence
  Description of Artificial Sequence: Synthetic oligonucleotide
  Target: PCSK9; (-) strand; PAM type: NRG; PAM sequence: GAG
tattatccctttccatgaaa

SEQ ID NO: 10536 - DNA, 20 bp, Artificial Sequence
  Description of Artificial Sequence: Synthetic oligonucleotide
  Target: PCSK9; (-) strand; PAM type: NRG; PAM sequence: AAG
cttattatccctttccatga

SEQ ID NO: 10537 - DNA, 20 bp, Artificial Sequence
  Description of Artificial Sequence: Synthetic oligonucleotide
  Target: PCSK9; (-) strand; PAM type: NRG; PAM sequence: GGG
gtctgaatatacgaactcag

SEQ ID NO: 10538 - DNA, 20 bp, Artificial Sequence
  Description of Artificial Sequence: Synthetic oligonucleotide
  Target: PCSK9; (-) strand; PAM type: NRG; PAM sequence: GGG
cgtctgaatatacgaactca

SEQ ID NO: 10539 - DNA, 20 bp, Artificial Sequence
  Description of Artificial Sequence: Synthetic oligonucleotide
  Target: PCSK9; (-) strand; PAM type: NRG; PAM sequence: AGG
gcgtctgaatatacgaactc

SEQ ID NO: 10540 - DNA, 20 bp, Artificial Sequence
  Description of Artificial Sequence: Synthetic oligonucleotide
  Target: PCSK9; (-) strand; PAM type: NRG; PAM sequence: CAG
agcgtctgaatatacgaact

SEQ ID NO: 10541 - DNA, 20 bp, Artificial Sequence
  Description of Artificial Sequence: Synthetic oligonucleotide
  Target: PCSK9; (-) strand; PAM type: NRG; PAM sequence: AAG
ctctgtgcctggctctgtct

SEQ ID NO: 10542 - DNA, 20 bp, Artificial Sequence
  Description of Artificial Sequence: Synthetic oligonucleotide
  Target: PCSK9; (-) strand; PAM type: NRG; PAM sequence: TGG
cccgggcccttctctgtgcc

SEQ ID NO: 10543 - DNA, 20 bp, Artificial Sequence
  Description of Artificial Sequence: Synthetic oligonucleotide
  Target: PCSK9; (-) strand; PAM type: NRG; PAM sequence: GGG
caatcaaactagccaacccc

SEQ ID NO: 10544 - DNA, 20 bp, Artificial Sequence
  Description of Artificial Sequence: Synthetic oligonucleotide
  Target: PCSK9; (-) strand; PAM type: NRG; PAM sequence: CGG
gcaatcaaactagccaaccc

SEQ ID NO: 10545 - DNA, 20 bp, Artificial Sequence
  Description of Artificial Sequence: Synthetic oligonucleotide
  Target: PCSK9; (-) strand; PAM type: NRG; PAM sequence: TAG
aattacaccagcaatcaaac

SEQ ID NO: 10546 - DNA, 20 bp, Artificial Sequence
  Description of Artificial Sequence: Synthetic oligonucleotide
  Target: PCSK9; (-) strand; PAM type: NRG; PAM sequence: CAG
gaagatattagcaattacac

SEQ ID NO: 10547 - DNA, 20 bp, Artificial Sequence
  Description of Artificial Sequence: Synthetic oligonucleotide
  Target: PCSK9; (-) strand; PAM type: NRG; PAM sequence: TAG
caatacaaactggaagatat

SEQ ID NO: 10548 - DNA, 20 bp, Artificial Sequence
  Description of Artificial Sequence: Synthetic oligonucleotide
  Target: PCSK9; (-) strand; PAM type: NRG; PAM sequence: AAG
ccttgaccaatacaaactgg

SEQ ID NO: 10549 - DNA, 20 bp, Artificial Sequence
  Description of Artificial Sequence: Synthetic oligonucleotide
  Target: PCSK9; (-) strand; PAM type: NRG; PAM sequence: TGG
gaaccttgaccaatacaaac

SEQ ID NO: 10550 - DNA, 20 bp, Artificial Sequence
  Description of Artificial Sequence: Synthetic oligonucleotide
  Target: PCSK9; (-) strand; PAM type: NRG; PAM sequence: CAG
ctactggttctgcttctctg

SEQ ID NO: 10551 - DNA, 20 bp, Artificial Sequence
  Description of Artificial Sequence: Synthetic oligonucleotide
  Target: PCSK9; (-) strand; PAM type: NRG; PAM sequence: TGG
tcttaatatatacatcctac

SEQ ID NO: 10552 - DNA, 20 bp, Artificial Sequence
  Description of Artificial Sequence: Synthetic oligonucleotide
  Target: PCSK9; (-) strand; PAM type: NRG; PAM sequence: GAG
gccagcccgcacggtcacat

SEQ ID NO: 10553 - DNA, 20 bp, Artificial Sequence
  Description of Artificial Sequence: Synthetic oligonucleotide
  Target: PCSK9; (-) strand; PAM type: NRG; PAM sequence: CGG
ttcagacttgccagcccgca

SEQ ID NO: 10554 - DNA, 20 bp, Artificial Sequence
  Description of Artificial Sequence: Synthetic oligonucleotide
  Target: PCSK9; (-) strand; PAM type: NRG; PAM sequence: CAG
cctgcggatttcagacttgc

SEQ ID NO: 10555 - DNA, 20 bp, Artificial Sequence
  Description of Artificial Sequence: Synthetic oligonucleotide
  Target: PCSK9; (-) strand; PAM type: NRG; PAM sequence: CAG
ctggcctgccctgcggattt

SEQ ID NO: 10556 - DNA, 20 bp, Artificial Sequence
  Description of Artificial Sequence: Synthetic oligonucleotide
  Target: PCSK9; (-) strand; PAM type: NRG; PAM sequence: CGG
agcctgcctggcctgccctg

SEQ ID NO: 10557 - DNA, 20 bp, Artificial Sequence
  Description of Artificial Sequence: Synthetic oligonucleotide
  Target: PCSK9; (-) strand; PAM type: NRG; PAM sequence: TGG
gcaggaattgccagcctgcc

SEQ ID NO: 10558 - DNA, 20 bp, Artificial Sequence
  Description of Artificial Sequence: Synthetic oligonucleotide
  Target: PCSK9; (-) strand; PAM type: NRG; PAM sequence: CAG
tcaaattctgcaggaattgc

SEQ ID NO: 10559 - DNA, 20 bp, Artificial Sequence
  Description of Artificial Sequence: Synthetic oligonucleotide
  Target: PCSK9; (-) strand; PAM type: NRG; PAM sequence: AGG
attgcaacatcaaattctgc

SEQ ID NO: 10560 - DNA, 20 bp, Artificial Sequence
  Description of Artificial Sequence: Synthetic oligonucleotide
  Target: PCSK9; (-) strand; PAM type: NRG; PAM sequence: CAG
tattgcaacatcaaattctg

SEQ ID NO: 10561 - DNA, 20 bp, Artificial Sequence
  Description of Artificial Sequence: Synthetic oligonucleotide
  Target: PCSK9; (-) strand; PAM type: NRG; PAM sequence: CAG
cccaggactgccttaggact

SEQ ID NO: 10562 - DNA, 20 bp, Artificial Sequence
  Description of Artificial Sequence: Synthetic oligonucleotide
  Target: PCSK9; (-) strand; PAM type: NRG; PAM sequence: AGG
ttctgccccaggactgcctt

SEQ ID NO: 10563 - DNA, 20 bp, Artificial Sequence
  Description of Artificial Sequence: Synthetic oligonucleotide
  Target: PCSK9; (-) strand; PAM type: NRG; PAM sequence: TAG
attctgccccaggactgcct

SEQ ID NO: 10564 - DNA, 20 bp, Artificial Sequence
  Description of Artificial Sequence: Synthetic oligonucleotide
  Target: PCSK9; (-) strand; PAM type: NRG; PAM sequence: AGG
ggaagaaggaattctgcccc

SEQ ID NO: 10565 - DNA, 20 bp, Artificial Sequence
  Description of Artificial Sequence: Synthetic oligonucleotide
  Target: PCSK9; (-) strand; PAM type: NRG; PAM sequence: CAG
gggaagaaggaattctgccc

SEQ ID NO: 10566 - DNA, 20 bp, Artificial Sequence
  Description of Artificial Sequence: Synthetic oligonucleotide
  Target: PCSK9; (-) strand; PAM type: NRG; PAM sequence: AGG
ctgaggcctcccagggaaga

SEQ ID NO: 10567 - DNA, 20 bp, Artificial Sequence
  Description of Artificial Sequence: Synthetic oligonucleotide
  Target: PCSK9; (-) strand; PAM type: NRG; PAM sequence: AAG
actgaggcctcccagggaag

SEQ ID NO: 10568 - DNA, 20 bp, Artificial Sequence
  Description of Artificial Sequence: Synthetic oligonucleotide
  Target: PCSK9; (-) strand; PAM type: NRG; PAM sequence: AAG
cagactgaggcctcccaggg

SEQ ID NO: 10569 - DNA, 20 bp, Artificial Sequence
  Description of Artificial Sequence: Synthetic oligonucleotide
  Target: PCSK9; (-) strand; PAM type: NRG; PAM sequence: GGG
gaacagactgaggcctccca

SEQ ID NO: 10570 - DNA, 20 bp, Artificial Sequence
  Description of Artificial Sequence: Synthetic oligonucleotide
  Target: PCSK9; (-) strand; PAM type: NRG; PAM sequence: AGG
agaacagactgaggcctccc

SEQ ID NO: 10571 - DNA, 20 bp, Artificial Sequence
  Description of Artificial Sequence: Synthetic oligonucleotide
  Target: PCSK9; (-) strand; PAM type: NRG; PAM sequence: CAG
gagaacagactgaggcctcc

SEQ ID NO: 10572 - DNA, 20 bp, Artificial Sequence
  Description of Artificial Sequence: Synthetic oligonucleotide
  Target: PCSK9; (-) strand; PAM type: NRG; PAM sequence: AGG
ggccttaagagaacagactg

SEQ ID NO: 10573 - DNA, 20 bp, Artificial Sequence
  Description of Artificial Sequence: Synthetic oligonucleotide
  Target: PCSK9; (-) strand; PAM type: NRG; PAM sequence: GAG
aggccttaagagaacagact

SEQ ID NO: 10574 - DNA, 20 bp, Artificial Sequence
  Description of Artificial Sequence: Synthetic oligonucleotide
  Target: PCSK9; (-) strand; PAM type: NRG; PAM sequence: CAG
agttgaaggccttaagagaa

SEQ ID NO: 10575 - DNA, 20 bp, Artificial Sequence
  Description of Artificial Sequence: Synthetic oligonucleotide
  Target: PCSK9; (-) strand; PAM type: NRG; PAM sequence: GAG
taatcagttgaaggccttaa

SEQ ID NO: 10576 - DNA, 20 bp, Artificial Sequence
  Description of Artificial Sequence: Synthetic oligonucleotide
  Target: PCSK9; (-) strand; PAM type: NRG; PAM sequence: AAG
tttaatcagttgaaggcctt

SEQ ID NO: 10577 - DNA, 20 bp, Artificial Sequence
  Description of Artificial Sequence: Synthetic oligonucleotide
  Target: PCSK9; (-) strand; PAM type: NRG; PAM sequence: AGG
ggcctcatttaatcagttga

SEQ ID NO: 10578 - DNA, 20 bp, Artificial Sequence
  Description of Artificial Sequence: Synthetic oligonucleotide
  Target: PCSK9; (-) strand; PAM type: NRG; PAM sequence: AAG
aggcctcatttaatcagttg

SEQ ID NO: 10579 - DNA, 20 bp, Artificial Sequence
  Description of Artificial Sequence: Synthetic oligonucleotide
  Target: PCSK9; (-) strand; PAM type: NRG; PAM sequence: CAG
ttgggcaggcctcatttaat

SEQ ID NO: 10580 - DNA, 20 bp, Artificial Sequence
  Description of Artificial Sequence: Synthetic oligonucleotide
  Target: PCSK9; (-) strand; PAM type: NRG; PAM sequence: AGG
ttactctctataacttgggc

SEQ ID NO: 10581 - DNA, 20 bp, Artificial Sequence
  Description of Artificial Sequence: Synthetic oligonucleotide
  Target: PCSK9; (-) strand; PAM type: NRG; PAM sequence: CAG
gttactctctataacttggg

SEQ ID NO: 10582 - DNA, 20 bp, Artificial Sequence
  Description of Artificial Sequence: Synthetic oligonucleotide
  Target: PCSK9; (-) strand; PAM type: NRG; PAM sequence: GGG
caggttactctctataactt

SEQ ID NO: 10583 - DNA, 20 bp, Artificial Sequence
  Description of Artificial Sequence: Synthetic oligonucleotide
  Target: PCSK9; (-) strand; PAM type: NRG; PAM sequence: TGG
gcaggttactctctataact

SEQ ID NO: 10584 - DNA, 20 bp, Artificial Sequence
  Description of Artificial Sequence: Synthetic oligonucleotide
  Target: PCSK9; (-) strand; PAM type: NRG; PAM sequence: AGG
atcagaagacggagtaaggc

SEQ ID NO: 10585 - DNA, 20 bp, Artificial Sequence
  Description of Artificial Sequence: Synthetic oligonucleotide
  Target: PCSK9; (-) strand; PAM type: NRG; PAM sequence: CAG
aatcagaagacggagtaagg

SEQ ID NO: 10586 - DNA, 20 bp, Artificial Sequence
  Description of Artificial Sequence: Synthetic oligonucleotide
  Target: PCSK9; (-) strand; PAM type: NRG; PAM sequence: AGG
ttaaatcagaagacggagta

SEQ ID NO: 10587 - DNA, 20 bp, Artificial Sequence
  Description of Artificial Sequence: Synthetic oligonucleotide
  Target: PCSK9; (-) strand; PAM type: NRG; PAM sequence: AAG
tttaaatcagaagacggagt

SEQ ID NO: 10588 - DNA, 20 bp, Artificial Sequence
  Description of Artificial Sequence: Synthetic oligonucleotide
  Target: PCSK9; (-) strand; PAM type: NRG; PAM sequence: GAG
aacatttaaatcagaagacg

SEQ ID NO: 10589 - DNA, 20 bp, Artificial Sequence
  Description of Artificial Sequence: Synthetic oligonucleotide
  Target: PCSK9; (-) strand; PAM type: NRG; PAM sequence: CGG
ctaacatttaaatcagaaga

SEQ ID NO: 10590 - DNA, 20 bp, Artificial Sequence
  Description of Artificial Sequence: Synthetic oligonucleotide
  Target: PCSK9; (-) strand; PAM type: NRG; PAM sequence: AAG
gtgactaacatttaaatcag

SEQ ID NO: 10591 - DNA, 20 bp, Artificial Sequence
  Description of Artificial Sequence: Synthetic oligonucleotide
  Target: PCSK9; (-) strand; PAM type: NRG; PAM sequence: CAG
gatgtgactaacatttaaat

SEQ ID NO: 10592 - DNA, 20 bp, Artificial Sequence
  Description of Artificial Sequence: Synthetic oligonucleotide
  Target: PCSK9; (-) strand; PAM type: NRG; PAM sequence: TAG
gctgctgcgaaaatattttt

SEQ ID NO: 10593 - DNA, 20 bp, Artificial Sequence
  Description of Artificial Sequence: Synthetic oligonucleotide
  Target: PCSK9; (-) strand; PAM type: NRG; PAM sequence: TGG
gatgtttggtcaaaagccag

SEQ ID NO: 10594 - DNA, 20 bp, Artificial Sequence
  Description of Artificial Sequence: Synthetic oligonucleotide
  Target: PCSK9; (-) strand; PAM type: NRG; PAM sequence: CAG
cctgatgtttggtcaaaagc

SEQ ID NO: 10595 - DNA, 20 bp, Artificial Sequence
  Description of Artificial Sequence: Synthetic oligonucleotide
  Target: PCSK9; (-) strand; PAM type: NRG; PAM sequence: AAG
gtggcctgatgtttggtcaa

SEQ ID NO: 10596 - DNA, 20 bp, Artificial Sequence
  Description of Artificial Sequence: Synthetic oligonucleotide
  Target: PCSK9; (-) strand; PAM type: NRG; PAM sequence: TGG
caactttgtggcctgatgtt

SEQ ID NO: 10597 - DNA, 20 bp, Artificial Sequence
  Description of Artificial Sequence: Synthetic oligonucleotide
  Target: PCSK9; (-) strand; PAM type: NRG; PAM sequence: TGG
aattttggggatcaactttg

SEQ ID NO: 10598 - DNA, 20 bp, Artificial Sequence
  Description of Artificial Sequence: Synthetic oligonucleotide
  Target: PCSK9; (-) strand; PAM type: NRG; PAM sequence: GGG
cagagtgatggttaattttg

SEQ ID NO: 10599 - DNA, 20 bp, Artificial Sequence
  Description of Artificial Sequence: Synthetic oligonucleotide
  Target: PCSK9; (-) strand; PAM type: NRG; PAM sequence: GGG
acagagtgatggttaatttt

SEQ ID NO: 10600 - DNA, 20 bp, Artificial Sequence
  Description of Artificial Sequence: Synthetic oligonucleotide
  Target: PCSK9; (-) strand; PAM type: NRG; PAM sequence: TGG
cacagagtgatggttaattt

SEQ ID NO: 10601 - DNA, 20 bp, Artificial Sequence
  Description of Artificial Sequence: Synthetic oligonucleotide
  Target: PCSK9; (-) strand; PAM type: NRG; PAM sequence: TGG
cccttacaggcacagagtga

SEQ ID NO: 10602 - DNA, 20 bp, Artificial Sequence
  Description of Artificial Sequence: Synthetic oligonucleotide
  Target: PCSK9; (-) strand; PAM type: NRG; PAM sequence: GAG
gcccctcccttacaggcaca

SEQ ID NO: 10603 - DNA, 20 bp, Artificial Sequence
  Description of Artificial Sequence: Synthetic oligonucleotide
  Target: PCSK9; (-) strand; PAM type: NRG; PAM sequence: CAG
cagcccctcccttacaggca

SEQ ID NO: 10604 - DNA, 20 bp, Artificial Sequence
  Description of Artificial Sequence: Synthetic oligonucleotide
  Target: PCSK9; (-) strand; PAM type: NRG; PAM sequence: AGG
tttcccagcccctcccttac

SEQ ID NO: 10605 - DNA, 20 bp, Artificial Sequence
  Description of Artificial Sequence: Synthetic oligonucleotide
  Target: PCSK9; (-) strand; PAM type: NRG; PAM sequence: CAG
ctttcccagcccctccctta

SEQ ID NO: 10606 - DNA, 20 bp, Artificial Sequence
  Description of Artificial Sequence: Synthetic oligonucleotide
  Target: PCSK9; (-) strand; PAM type: NRG; PAM sequence: CAG
ggagacctgctcccctttcc

SEQ ID NO: 10607 - DNA, 20 bp, Artificial Sequence
  Description of Artificial Sequence: Synthetic oligonucleotide
  Target: PCSK9; (-) strand; PAM type: NRG; PAM sequence: GAG
agccaaggtcaccccttggg

SEQ ID NO: 10608 - DNA, 20 bp, Artificial Sequence
  Description of Artificial Sequence: Synthetic oligonucleotide
  Target: PCSK9; (-) strand; PAM type: NRG; PAM sequence: GGG
aaagccaaggtcaccccttg

SEQ ID NO: 10609 - DNA, 20 bp, Artificial Sequence
  Description of Artificial Sequence: Synthetic oligonucleotide
  Target: PCSK9; (-) strand; PAM type: NRG; PAM sequence: GGG
caaagccaaggtcacccctt

SEQ ID NO: 10610 - DNA, 20 bp, Artificial Sequence
  Description of Artificial Sequence: Synthetic oligonucleotide
  Target: PCSK9; (-) strand; PAM type: NRG; PAM sequence: TGG
acaaagccaaggtcacccct

SEQ ID NO: 10611 - DNA, 20 bp, Artificial Sequence
  Description of Artificial Sequence: Synthetic oligonucleotide
  Target: PCSK9; (-) strand; PAM type: NRG; PAM sequence: AGG
gcctgggaggaacaaagcca

SEQ ID NO: 10612 - DNA, 20 bp, Artificial Sequence
  Description of Artificial Sequence: Synthetic oligonucleotide
  Target: PCSK9; (-) strand; PAM type: NRG; PAM sequence: AAG
ggcctgggaggaacaaagcc

SEQ ID NO: 10613 - DNA, 20 bp, Artificial Sequence
  Description of Artificial Sequence: Synthetic oligonucleotide
  Target: PCSK9; (-) strand; PAM type: NRG; PAM sequence: AAG
ctccaggcctgggaggaaca

SEQ ID NO: 10614 - DNA, 20 bp, Artificial Sequence
  Description of Artificial Sequence: Synthetic oligonucleotide
  Target: PCSK9; (-) strand; PAM type: NRG; PAM sequence: AGG
gaataaactccaggcctggg

SEQ ID NO: 10615 - DNA, 20 bp, Artificial Sequence
  Description of Artificial Sequence: Synthetic oligonucleotide
  Target: PCSK9; (-) strand; PAM type: NRG; PAM sequence: GAG
cgaataaactccaggcctgg

SEQ ID NO: 10616 - DNA, 20 bp, Artificial Sequence
  Description of Artificial Sequence: Synthetic oligonucleotide
  Target: PCSK9; (-) strand; PAM type: NRG; PAM sequence: GGG
tccgaataaactccaggcct

SEQ ID NO: 10617 - DNA, 20 bp, Artificial Sequence
  Description of Artificial Sequence: Synthetic oligonucleotide
  Target: PCSK9; (-) strand; PAM type: NRG; PAM sequence: TGG
ttccgaataaactccaggcc

SEQ ID NO: 10618 - DNA, 20 bp, Artificial Sequence
  Description of Artificial Sequence: Synthetic oligonucleotide
  Target: PCSK9; (-) strand; PAM type: NRG; PAM sequence: AGG
ggcttttccgaataaactcc

SEQ ID NO: 10619 - DNA, 20 bp, Artificial Sequence
  Description of Artificial Sequence: Synthetic oligonucleotide
  Target: PCSK9; (-) strand; PAM type: NRG; PAM sequence: CAG
tggcttttccgaataaactc

SEQ ID NO: 10620 - DNA, 20 bp, Artificial Sequence
  Description of Artificial Sequence: Synthetic oligonucleotide
  Target: PCSK9; (-) strand; PAM type: NRG; PAM sequence: TGG
gccccacaggctggaccagc

SEQ ID NO: 10621 - DNA, 20 bp, Artificial Sequence
  Description of Artificial Sequence: Synthetic oligonucleotide
  Target: PCSK9; (-) strand; PAM type: NRG; PAM sequence: CAG
agtggccccacaggctggac

SEQ ID NO: 10622 - DNA, 20 bp, Artificial Sequence
  Description of Artificial Sequence: Synthetic oligonucleotide
  Target: PCSK9; (-) strand; PAM type: NRG; PAM sequence: TGG
ccaccagtggccccacaggc

SEQ ID NO: 10623 - DNA, 20 bp, Artificial Sequence
  Description of Artificial Sequence: Synthetic oligonucleotide
  Target: PCSK9; (-) strand; PAM type: NRG; PAM sequence: AGG
agcaccaccagtggccccac

SEQ ID NO: 10624 - DNA, 20 bp, Artificial Sequence
  Description of Artificial Sequence: Synthetic oligonucleotide
  Target: PCSK9; (-) strand; PAM type: NRG; PAM sequence: CAG
cagcaccaccagtggcccca

SEQ ID NO: 10625 - DNA, 20 bp, Artificial Sequence
  Description of Artificial Sequence: Synthetic oligonucleotide
  Target: PCSK9; (-) strand; PAM type: NRG; PAM sequence: TGG
aggggcagcagcaccaccag

SEQ ID NO: 10626 - DNA, 20 bp, Artificial Sequence
  Description of Artificial Sequence: Synthetic oligonucleotide
  Target: PCSK9; (-) strand; PAM type: NRG; PAM sequence: CAG
gccaggggcagcagcaccac

SEQ ID NO: 10627 - DNA, 20 bp, Artificial Sequence
  Description of Artificial Sequence: Synthetic oligonucleotide
  Target: PCSK9; (-) strand; PAM type: NRG; PAM sequence: CAG
tacccacccgccaggggcag

SEQ ID NO: 10628 - DNA, 20 bp, Artificial Sequence
  Description of Artificial Sequence: Synthetic oligonucleotide
  Target: PCSK9; (-) strand; PAM type: NRG; PAM sequence: CAG
ctgtacccacccgccagggg

SEQ ID NO: 10629 - DNA, 20 bp, Artificial Sequence
  Description of Artificial Sequence: Synthetic oligonucleotide
  Target: PCSK9; (-) strand; PAM type: NRG; PAM sequence: GGG
cggctgtacccacccgccag

SEQ ID NO: 10630 - DNA, 20 bp, Artificial Sequence
  Description of Artificial Sequence: Synthetic oligonucleotide
  Target: PCSK9; (-) strand; PAM type: NRG; PAM sequence: GGG
gcggctgtacccacccgcca

SEQ ID NO: 10631 - DNA, 20 bp, Artificial Sequence
  Description of Artificial Sequence: Synthetic oligonucleotide
  Target: PCSK9; (-) strand; PAM type: NRG; PAM sequence: AGG
cgcggctgtacccacccgcc

SEQ ID NO: 10632 - DNA, 20 bp, Artificial Sequence
  Description of Artificial Sequence: Synthetic oligonucleotide
  Target: PCSK9; (-) strand; PAM type: NRG; PAM sequence: CAG
acgcggctgtacccacccgc

SEQ ID NO: 10633 - DNA, 20 bp, Artificial Sequence
  Description of Artificial Sequence: Synthetic oligonucleotide
  Target: PCSK9; (-) strand; PAM type: NRG; PAM sequence: CGG
ggcaggcggcgttgaggacg

SEQ ID NO: 10634 - DNA, 20 bp, Artificial Sequence
  Description of Artificial Sequence: Synthetic oligonucleotide
  Target: PCSK9; (-) strand; PAM type: NRG; PAM sequence: AGG
ggcgctggcaggcggcgttg

SEQ ID NO: 10635 - DNA, 20 bp, Artificial Sequence
  Description of Artificial Sequence: Synthetic oligonucleotide
  Target: PCSK9; (-) strand; PAM type: NRG; PAM sequence: GAG
aggcgctggcaggcggcgtt

SEQ ID NO: 10636 - DNA, 20 bp, Artificial Sequence
  Description of Artificial Sequence: Synthetic oligonucleotide
  Target: PCSK9; (-) strand; PAM type: NRG; PAM sequence: CGG
cctcgccaggcgctggcagg

SEQ ID NO: 10637 - DNA, 20 bp, Artificial Sequence
  Description of Artificial Sequence: Synthetic oligonucleotide
  Target: PCSK9; (-) strand; PAM type: NRG; PAM sequence: AGG
agccctcgccaggcgctggc

SEQ ID NO: 10638 - DNA, 20 bp, Artificial Sequence
  Description of Artificial Sequence: Synthetic oligonucleotide
  Target: PCSK9; (-) strand; PAM type: NRG; PAM sequence: CAG
cagccctcgccaggcgctgg

SEQ ID NO: 10639 - DNA, 20 bp, Artificial Sequence
  Description of Artificial Sequence: Synthetic oligonucleotide
  Target: PCSK9; (-) strand; PAM type: NRG; PAM sequence: TGG
ccccagccctcgccaggcgc

SEQ ID NO: 10640 - DNA, 20 bp, Artificial Sequence
  Description of Artificial Sequence: Synthetic oligonucleotide
  Target: PCSK9; (-) strand; PAM type: NRG; PAM sequence: AGG
gcacgaccccagccctcgcc

SEQ ID NO: 10641 - DNA, 20 bp, Artificial Sequence
  Description of Artificial Sequence: Synthetic oligonucleotide
  Target: PCSK9; (-) strand; PAM type: NRG; PAM sequence: CAG
agcacgaccccagccctcgc

SEQ ID NO: 10642 - DNA, 20 bp, Artificial Sequence
  Description of Artificial Sequence: Synthetic oligonucleotide
  Target: PCSK9; (-) strand; PAM type: NRG; PAM sequence: CAG
agcggtgaccagcacgaccc

SEQ ID NO: 10643 - DNA, 20 bp, Artificial Sequence
  Description of Artificial Sequence: Synthetic oligonucleotide
  Target: PCSK9; (-) strand; PAM type: NRG; PAM sequence: CAG
aagttgccggcagcggtgac

SEQ ID NO: 10644 - DNA, 20 bp, Artificial Sequence
  Description of Artificial Sequence: Synthetic oligonucleotide
  Target: PCSK9; (-) strand; PAM type: NRG; PAM sequence: CGG
gtcccggaagttgccggcag

SEQ ID NO: 10645 - DNA, 20 bp, Artificial Sequence
  Description of Artificial Sequence: Synthetic oligonucleotide
  Target: PCSK9; (-) strand; PAM type: NRG; PAM sequence: CAG
atcgtcccggaagttgccgg

SEQ ID NO: 10646 - DNA, 20 bp, Artificial Sequence
  Description of Artificial Sequence: Synthetic oligonucleotide
  Target: PCSK9; (-) strand; PAM type: NRG; PAM sequence: CGG
ggcatcgtcccggaagttgc

SEQ ID NO: 10647 - DNA, 20 bp, Artificial Sequence
  Description of Artificial Sequence: Synthetic oligonucleotide
  Target: PCSK9; (-) strand; PAM type: NRG; PAM sequence: AAG
agaggcaggcatcgtcccgg

SEQ ID NO: 10648 - DNA, 20 bp, Artificial Sequence
  Description of Artificial Sequence: Synthetic oligonucleotide
  Target: PCSK9; (-) strand; PAM type: NRG; PAM sequence: CGG
agtagaggcaggcatcgtcc

SEQ ID NO: 10649 - DNA, 20 bp, Artificial Sequence
  Description of Artificial Sequence: Synthetic oligonucleotide
  Target: PCSK9; (-) strand; PAM type: NRG; PAM sequence: AGG
tgaggctggggagtagaggc

SEQ ID NO: 10650 - DNA, 20 bp, Artificial Sequence
  Description of Artificial Sequence: Synthetic oligonucleotide
  Target: PCSK9; (-) strand; PAM type: NRG; PAM sequence: CAG
ctgaggctggggagtagagg

SEQ ID NO: 10651 - DNA, 20 bp, Artificial Sequence
  Description of Artificial Sequence: Synthetic oligonucleotide
  Target: PCSK9; (-) strand; PAM type: NRG; PAM sequence: AGG
gagctgaggctggggagtag

SEQ ID NO: 10652 - DNA, 20 bp, Artificial Sequence
  Description of Artificial Sequence: Synthetic oligonucleotide
  Target: PCSK9; (-) strand; PAM type: NRG; PAM sequence: GAG
ggagctgaggctggggagta

SEQ ID NO: 10653 - DNA, 20 bp, Artificial Sequence
  Description of Artificial Sequence: Synthetic oligonucleotide
  Target: PCSK9; (-) strand; PAM type: NRG; PAM sequence: TAG
cgggagctgaggctggggag

SEQ ID NO: 10654 - DNA, 20 bp, Artificial Sequence
  Description of Artificial Sequence: Synthetic oligonucleotide
  Target: PCSK9; (-) strand; PAM type: NRG; PAM sequence: GAG
cctcgggagctgaggctggg

SEQ ID NO: 10655 - DNA, 20 bp, Artificial Sequence
  Description of Artificial Sequence: Synthetic oligonucleotide
  Target: PCSK9; (-) strand; PAM type: NRG; PAM sequence: GGG
tacctcgggagctgaggctg

SEQ ID NO: 10656 - DNA, 20 bp, Artificial Sequence
  Description of Artificial Sequence: Synthetic oligonucleotide
  Target: PCSK9; (-) strand; PAM type: NRG; PAM sequence: GGG
ctacctcgggagctgaggct

SEQ ID NO: 10657 - DNA, 20 bp, Artificial Sequence
  Description of Artificial Sequence: Synthetic oligonucleotide
  Target: PCSK9; (-) strand; PAM type: NRG; PAM sequence: TGG
cctacctcgggagctgaggc

SEQ ID NO: 10658 - DNA, 20 bp, Artificial Sequence
  Description of Artificial Sequence: Synthetic oligonucleotide
  Target: PCSK9; (-) strand; PAM type: NRG; PAM sequence: AGG
agcacctacctcgggagctg

SEQ ID NO: 10659 - DNA, 20 bp, Artificial Sequence
  Description of Artificial Sequence: Synthetic oligonucleotide
  Target: PCSK9; (-) strand; PAM type: NRG; PAM sequence: GAG
cagcacctacctcgggagct

SEQ ID NO: 10660 - DNA, 20 bp, Artificial Sequence
  Description of Artificial Sequence: Synthetic oligonucleotide
  Target: PCSK9; (-) strand; PAM type: NRG; PAM sequence: GAG
agccccagcacctacctcgg

SEQ ID NO: 10661 - DNA, 20 bp, Artificial Sequence
  Description of Artificial Sequence: Synthetic oligonucleotide
  Target: PCSK9; (-) strand; PAM type: NRG; PAM sequence: GGG
gcagccccagcacctacctc

SEQ ID NO: 10662 - DNA, 20 bp, Artificial Sequence
  Description of Artificial Sequence: Synthetic oligonucleotide
  Target: PCSK9; (-) strand; PAM type: NRG; PAM sequence: CGG
agcagccccagcacctacct

SEQ ID NO: 10663 - DNA, 20 bp, Artificial Sequence
  Description of Artificial Sequence: Synthetic oligonucleotide
  Target: PCSK9; (-) strand; PAM type: NRG; PAM sequence: CAG
gcgccttggggcagcagccc

SEQ ID NO: 10664 - DNA, 20 bp, Artificial Sequence
  Description of Artificial Sequence: Synthetic oligonucleotide
  Target: PCSK9; (-) strand; PAM type: NRG; PAM sequence: CAG
ctacccgcgccttggggcag

SEQ ID NO: 10665 - DNA, 20 bp, Artificial Sequence
  Description of Artificial Sequence: Synthetic oligonucleotide
  Target: PCSK9; (-) strand; PAM type: NRG; PAM sequence: CAG
cccctacccgcgccttgggg

SEQ ID NO: 10666 - DNA, 20 bp, Artificial Sequence
  Description of Artificial Sequence: Synthetic oligonucleotide
  Target: PCSK9; (-) strand; PAM type: NRG; PAM sequence: GGG
cgccccctacccgcgccttg

SEQ ID NO: 10667 - DNA, 20 bp, Artificial Sequence
  Description of Artificial Sequence: Synthetic oligonucleotide
  Target: PCSK9; (-) strand; PAM type: NRG; PAM sequence: GGG
ccgccccctacccgcgcctt

SEQ ID NO: 10668 - DNA, 20 bp, Artificial Sequence
  Description of Artificial Sequence: Synthetic oligonucleotide
  Target: PCSK9; (-) strand; PAM type: NRG; PAM sequence: TGG
tccgccccctacccgcgcct

SEQ ID NO: 10669 - DNA, 20 bp, Artificial Sequence
  Description of Artificial Sequence: Synthetic oligonucleotide
  Target: PCSK9; (-) strand; PAM type: NRG; PAM sequence: AAG
agaagcccacgtgccacaag

SEQ ID NO: 10670 - DNA, 20 bp, Artificial Sequence
  Description of Artificial Sequence: Synthetic oligonucleotide
  Target: PCSK9; (-) strand; PAM type: NRG; PAM sequence: AAG
acaagaagcccacgtgccac

SEQ ID NO: 10671 - DNA, 20 bp, Artificial Sequence
  Description of Artificial Sequence: Synthetic oligonucleotide
  Target: PCSK9; (-) strand; PAM type: NRG; PAM sequence: AAG
ctccaggaacgtgccacaag

SEQ ID NO: 10672 - DNA, 20 bp, Artificial Sequence
  Description of Artificial Sequence: Synthetic oligonucleotide
  Target: PCSK9; (-) strand; PAM type: NRG; PAM sequence: AAG
ggcctccaggaacgtgccac

SEQ ID NO: 10673 - DNA, 20 bp, Artificial Sequence
  Description of Artificial Sequence: Synthetic oligonucleotide
  Target: PCSK9; (-) strand; PAM type: NRG; PAM sequence: AGG
gccagaagggttcggcctcc

SEQ ID NO: 10674 - DNA, 20 bp, Artificial Sequence
  Description of Artificial Sequence: Synthetic oligonucleotide
  Target: PCSK9; (-) strand; PAM type: NRG; PAM sequence: CAG
agccagaagggttcggcctc

SEQ ID NO: 10675 - DNA, 20 bp, Artificial Sequence
  Description of Artificial Sequence: Synthetic oligonucleotide
  Target: PCSK9; (-) strand; PAM type: NRG; PAM sequence: CGG
cttccaaagccagaagggtt

SEQ ID NO: 10676 - DNA, 20 bp, Artificial Sequence
  Description of Artificial Sequence: Synthetic oligonucleotide
  Target: PCSK9; (-) strand; PAM type: NRG; PAM sequence: GGG
gactccttccaaagccagaa

SEQ ID NO: 10677 - DNA, 20 bp, Artificial Sequence
  Description of Artificial Sequence: Synthetic oligonucleotide
  Target: PCSK9; (-) strand; PAM type: NRG; PAM sequence: AGG
cgactccttccaaagccaga

SEQ ID NO: 10678 - DNA, 20 bp, Artificial Sequence
  Description of Artificial Sequence: Synthetic oligonucleotide
  Target: PCSK9; (-) strand; PAM type: NRG; PAM sequence: AAG
acgactccttccaaagccag

SEQ ID NO: 10679 - DNA, 20 bp, Artificial Sequence
  Description of Artificial Sequence: Synthetic oligonucleotide
  Target: PCSK9; (-) strand; PAM type: NRG; PAM sequence: CAG
ctgacgactccttccaaagc

SEQ ID NO: 10680 - DNA, 20 bp, Artificial Sequence
  Description of Artificial Sequence: Synthetic oligonucleotide
  Target: PCSK9; (-) strand; PAM type: NRG; PAM sequence: AAG
gtctctgacgactccttcca

SEQ ID NO: 10681 - DNA, 20 bp, Artificial Sequence
  Description of Artificial Sequence: Synthetic oligonucleotide
  Target: PCSK9; (-) strand; PAM type: NRG; PAM sequence: GGG
cccagcctcccgcatggcgg

SEQ ID NO: 10682 - DNA, 20 bp, Artificial Sequence
  Description of Artificial Sequence: Synthetic oligonucleotide
  Target: PCSK9; (-) strand; PAM type: NRG; PAM sequence: GGG
ccccagcctcccgcatggcg

SEQ ID NO: 10683 - DNA, 20 bp, Artificial Sequence
  Description of Artificial Sequence: Synthetic oligonucleotide
  Target: PCSK9; (-) strand; PAM type: NRG; PAM sequence: GGG
tccccagcctcccgcatggc

SEQ ID NO: 10684 - DNA, 20 bp, Artificial Sequence
  Description of Artificial Sequence: Synthetic oligonucleotide
  Target: PCSK9; (-) strand; PAM type: NRG; PAM sequence: CGG
ctccccagcctcccgcatgg

SEQ ID NO: 10685 - DNA, 20 bp, Artificial Sequence
  Description of Artificial Sequence: Synthetic oligonucleotide
  Target: PCSK9; (-) strand; PAM type: NRG; PAM sequence: TGG
ttcctccccagcctcccgca

SEQ ID NO: 10686 - DNA, 20 bp, Artificial Sequence
  Description of Artificial Sequence: Synthetic oligonucleotide
  Target: PCSK9; (-) strand; PAM type: NRG; PAM sequence: CAG
gtttcgagccccttcctccc

SEQ ID NO: 10687 - DNA, 20 bp, Artificial Sequence
  Description of Artificial Sequence: Synthetic oligonucleotide
  Target: PCSK9; (-) strand; PAM type: NRG; PAM sequence: GAG
tctgcgatgatggaggtttc

SEQ ID NO: 10688 - DNA, 20 bp, Artificial Sequence
  Description of Artificial Sequence: Synthetic oligonucleotide
  Target: PCSK9; (-) strand; PAM type: NRG; PAM sequence: AGG
ttcagactctgcgatgatgg

SEQ ID NO: 10689 - DNA, 20 bp, Artificial Sequence
  Description of Artificial Sequence: Synthetic oligonucleotide
  Target: PCSK9; (-) strand; PAM type: NRG; PAM sequence: GAG
attcagactctgcgatgatg

SEQ ID NO: 10690 - DNA, 20 bp, Artificial Sequence
  Description of Artificial Sequence: Synthetic oligonucleotide
  Target: PCSK9; (-) strand; PAM type: NRG; PAM sequence: TGG
ctattcagactctgcgatga

SEQ ID NO: 10691 - DNA, 20 bp, Artificial Sequence
  Description of Artificial Sequence: Synthetic oligonucleotide
  Target: PCSK9; (-) strand; PAM type: NRG; PAM sequence: CAG
atggcggggccactgctatt

SEQ ID NO: 10692 - DNA, 20 bp, Artificial Sequence
  Description of Artificial Sequence: Synthetic oligonucleotide
  Target: PCSK9; (-) strand; PAM type: NRG; PAM sequence: GGG
cgctacgtgggcgcatggcg

SEQ ID NO: 10693 - DNA, 20 bp, Artificial Sequence
  Description of Artificial Sequence: Synthetic oligonucleotide
  Target: PCSK9; (-) strand; PAM type: NRG; PAM sequence: GGG
ccgctacgtgggcgcatggc

SEQ ID NO: 10694 - DNA, 20 bp, Artificial Sequence
  Description of Artificial Sequence: Synthetic oligonucleotide
  Target: PCSK9; (-) strand; PAM type: NRG; PAM sequence: CGG
gccgctacgtgggcgcatgg

SEQ ID NO: 10695 - DNA, 20 bp, Artificial Sequence
  Description of Artificial Sequence: Synthetic oligonucleotide
  Target: PCSK9; (-) strand; PAM type: NRG; PAM sequence: TGG
ggcgccgctacgtgggcgca

SEQ ID NO: 10696 - DNA, 20 bp, Artificial Sequence
  Description of Artificial Sequence: Synthetic oligonucleotide
  Target: PCSK9; (-) strand; PAM type: NRG; PAM sequence: GGG
ctacgtaggcgccgctacgt

SEQ ID NO: 10697 - DNA, 20 bp, Artificial Sequence
  Description of Artificial Sequence: Synthetic oligonucleotide
  Target: PCSK9; (-) strand; PAM type: NRG; PAM sequence: TGG
gctacgtaggcgccgctacg

SEQ ID NO: 10698 - DNA, 20 bp, Artificial Sequence
  Description of Artificial Sequence: Synthetic oligonucleotide
  Target: PCSK9; (-) strand; PAM type: NRG; PAM sequence: AGG
gtgtgggggcgtggctacgt

SEQ ID NO: 10699 - DNA, 20 bp, Artificial Sequence
  Description of Artificial Sequence: Synthetic oligonucleotide
  Target: PCSK9; (-) strand; PAM type: NRG; PAM sequence: TAG
ggtgtgggggcgtggctacg

SEQ ID NO: 10700 - DNA, 20 bp, Artificial Sequence
  Description of Artificial Sequence: Synthetic oligonucleotide
  Target: PCSK9; (-) strand; PAM type: NRG; PAM sequence: TGG
caggacggggtgtgggggcg

SEQ ID NO: 10701 - DNA, 20 bp, Artificial Sequence
  Description of Artificial Sequence: Synthetic oligonucleotide
  Target: PCSK9; (-) strand; PAM type: NRG; PAM sequence: GGG
gtggccaggacggggtgtgg

SEQ ID NO: 10702 - DNA, 20 bp, Artificial Sequence
  Description of Artificial Sequence: Synthetic oligonucleotide
  Target: PCSK9; (-) strand; PAM type: NRG; PAM sequence: GGG
agtggccaggacggggtgtg

SEQ ID NO: 10703 - DNA, 20 bp, Artificial Sequence
  Description of Artificial Sequence: Synthetic oligonucleotide
  Target: PCSK9; (-) strand; PAM type: NRG; PAM sequence: GGG
gagtggccaggacggggtgt

SEQ ID NO: 10704 - DNA, 20 bp, Artificial Sequence
  Description of Artificial Sequence: Synthetic oligonucleotide
  Target: PCSK9; (-) strand; PAM type: NRG; PAM sequence: TGG
agagtggccaggacggggtg

SEQ ID NO: 10705 - DNA, 20 bp, Artificial Sequence
  Description of Artificial Sequence: Synthetic oligonucleotide
  Target: PCSK9; (-) strand; PAM type: NRG; PAM sequence: GGG
gagggagagtggccaggacg

SEQ ID NO: 10706 - DNA, 20 bp, Artificial Sequence
  Description of Artificial Sequence: Synthetic oligonucleotide
  Target: PCSK9; (-) strand; PAM type: NRG; PAM sequence: GGG
ggagggagagtggccaggac

SEQ ID NO: 10707 - DNA, 20 bp, Artificial Sequence
  Description of Artificial Sequence: Synthetic oligonucleotide
  Target: PCSK9; (-) strand; PAM type: NRG; PAM sequence: CGG
aggagggagagtggccagga

SEQ ID NO: 10708 - DNA, 20 bp, Artificial Sequence
  Description of Artificial Sequence: Synthetic oligonucleotide
  Target: PCSK9; (-) strand; PAM type: NRG; PAM sequence: AGG
cttcaggagggagagtggcc

SEQ ID NO: 10709 - DNA, 20 bp, Artificial Sequence
  Description of Artificial Sequence: Synthetic oligonucleotide
  Target: PCSK9; (-) strand; PAM type: NRG; PAM sequence: CAG
ccttcaggagggagagtggc

SEQ ID NO: 10710 - DNA, 20 bp, Artificial Sequence
  Description of Artificial Sequence: Synthetic oligonucleotide
  Target: PCSK9; (-) strand; PAM type: NRG; PAM sequence: TGG
aagaccttcaggagggagag

SEQ ID NO: 10711 - DNA, 20 bp, Artificial Sequence
  Description of Artificial Sequence: Synthetic oligonucleotide
  Target: PCSK9; (-) strand; PAM type: NRG; PAM sequence: GAG
cagaagaccttcaggaggga

SEQ ID NO: 10712 - DNA, 20 bp, Artificial Sequence
  Description of Artificial Sequence: Synthetic oligonucleotide
  Target: PCSK9; (-) strand; PAM type: NRG; PAM sequence: GAG
accagaagaccttcaggagg

SEQ ID NO: 10713 - DNA, 20 bp, Artificial Sequence
  Description of Artificial Sequence: Synthetic oligonucleotide
  Target: PCSK9; (-) strand; PAM type: NRG; PAM sequence: GGG
gtaccagaagaccttcagga

SEQ ID NO: 10714 - DNA, 20 bp, Artificial Sequence
  Description of Artificial Sequence: Synthetic oligonucleotide
  Target: PCSK9; (-) strand; PAM type: NRG; PAM sequence: AGG
ggtaccagaagaccttcagg

SEQ ID NO: 10715 - DNA, 20 bp, Artificial Sequence
  Description of Artificial Sequence: Synthetic oligonucleotide
  Target: PCSK9; (-) strand; PAM type: NRG; PAM sequence: GAG
gggtaccagaagaccttcag

SEQ ID NO: 10716 - DNA, 20 bp, Artificial Sequence
  Description of Artificial Sequence: Synthetic oligonucleotide
  Target: PCSK9; (-) strand; PAM type: NRG; PAM sequence: AGG
gcgggtaccagaagaccttc

SEQ ID NO: 10717 - DNA, 20 bp, Artificial Sequence
  Description of Artificial Sequence: Synthetic oligonucleotide
  Target: PCSK9; (-) strand; PAM type: NRG; PAM sequence: CAG
ggcgggtaccagaagacctt

SEQ ID NO: 10718 - DNA, 20 bp, Artificial Sequence
  Description of Artificial Sequence: Synthetic oligonucleotide
  Target: PCSK9; (-) strand; PAM type: NRG; PAM sequence: AAG
ggggagggggcgggtaccag

SEQ ID NO: 10719 - DNA, 20 bp, Artificial Sequence
  Description of Artificial Sequence: Synthetic oligonucleotide
  Target: PCSK9; (-) strand; PAM type: NRG; PAM sequence: CAG
gatggggagggggcgggtac

SEQ ID NO: 10720 - DNA, 20 bp, Artificial Sequence
  Description of Artificial Sequence: Synthetic oligonucleotide
  Target: PCSK9; (-) strand; PAM type: NRG; PAM sequence: GGG
gatggagatggggagggggc

SEQ ID NO: 10721 - DNA, 20 bp, Artificial Sequence
  Description of Artificial Sequence: Synthetic oligonucleotide
  Target: PCSK9; (-) strand; PAM type: NRG; PAM sequence: CGG
ggatggagatggggaggggg

SEQ ID NO: 10722 - DNA, 20 bp, Artificial Sequence
  Description of Artificial Sequence: Synthetic oligonucleotide
  Target: PCSK9; (-) strand; PAM type: NRG; PAM sequence: GGG
tggggatggagatggggagg

SEQ ID NO: 10723 - DNA, 20 bp, Artificial Sequence
  Description of Artificial Sequence: Synthetic oligonucleotide
  Target: PCSK9; (-) strand; PAM type: NRG; PAM sequence: GGG
ctggggatggagatggggag

SEQ ID NO: 10724 - DNA, 20 bp, Artificial Sequence
  Description of Artificial Sequence: Synthetic oligonucleotide
  Target: PCSK9; (-) strand; PAM type: NRG; PAM sequence: GGG
cctggggatggagatgggga

SEQ ID NO: 10725 - DNA, 20 bp, Artificial Sequence
  Description of Artificial Sequence: Synthetic oligonucleotide
  Target: PCSK9; (-) strand; PAM type: NRG; PAM sequence: AGG
gcctggggatggagatgggg

SEQ ID NO: 10726 - DNA, 20 bp, Artificial Sequence
  Description of Artificial Sequence: Synthetic oligonucleotide
  Target: PCSK9; (-) strand; PAM type: NRG; PAM sequence: GAG
ggcctggggatggagatggg

SEQ ID NO: 10727 - DNA, 20 bp, Artificial Sequence
  Description of Artificial Sequence: Synthetic oligonucleotide
  Target: PCSK9; (-) strand; PAM type: NRG; PAM sequence: GGG
agggcctggggatggagatg

SEQ ID NO: 10728 - DNA, 20 bp, Artificial Sequence
  Description of Artificial Sequence: Synthetic oligonucleotide
  Target: PCSK9; (-) strand; PAM type: NRG; PAM sequence: GGG
cagggcctggggatggagat

SEQ ID NO: 10729 - DNA, 20 bp, Artificial Sequence
  Description of Artificial Sequence: Synthetic oligonucleotide
  Target: PCSK9; (-) strand; PAM type: NRG; PAM sequence: TGG
gcagggcctggggatggaga

SEQ ID NO: 10730 - DNA, 20 bp, Artificial Sequence
  Description of Artificial Sequence: Synthetic oligonucleotide
  Target: PCSK9; (-) strand; PAM type: NRG; PAM sequence: GAG
ggacgcagggcctggggatg

SEQ ID NO: 10731 - DNA, 20 bp, Artificial Sequence
  Description of Artificial Sequence: Synthetic oligonucleotide
  Target: PCSK9; (-) strand; PAM type: NRG; PAM sequence: TGG
gaggacgcagggcctgggga

SEQ ID NO: 10732 - DNA, 20 bp, Artificial Sequence
  Description of Artificial Sequence: Synthetic oligonucleotide
  Target: PCSK9; (-) strand; PAM type: NRG; PAM sequence: GGG
ggcagaggacgcagggcctg

SEQ ID NO: 10733 - DNA, 20 bp, Artificial Sequence
  Description of Artificial Sequence: Synthetic oligonucleotide
  Target: PCSK9; (-) strand; PAM type: NRG; PAM sequence: GGG
gggcagaggacgcagggcct

SEQ ID NO: 10734 - DNA, 20 bp, Artificial Sequence
  Description of Artificial Sequence: Synthetic oligonucleotide
  Target: PCSK9; (-) strand; PAM type: NRG; PAM sequence: TGG
tgggcagaggacgcagggcc

SEQ ID NO: 10735 - DNA, 20 bp, Artificial Sequence
  Description of Artificial Sequence: Synthetic oligonucleotide
  Target: PCSK9; (-) strand; PAM type: NRG; PAM sequence: GGG
agtattgggcagaggacgca

SEQ ID NO: 10736 - DNA, 20 bp, Artificial Sequence
  Description of Artificial Sequence: Synthetic oligonucleotide
  Target: PCSK9; (-) strand; PAM type: NRG; PAM sequence: AGG
gagtattgggcagaggacgc

SEQ ID NO: 10737 - DNA, 20 bp, Artificial Sequence
  Description of Artificial Sequence: Synthetic oligonucleotide
  Target: PCSK9; (-) strand; PAM type: NRG; PAM sequence: CAG
agagtattgggcagaggacg

SEQ ID NO: 10738 - DNA, 20 bp, Artificial Sequence
  Description of Artificial Sequence: Synthetic oligonucleotide
  Target: PCSK9; (-) strand; PAM type: NRG; PAM sequence: AGG
gcccaaagagtattgggcag

SEQ ID NO: 10739 - DNA, 20 bp, Artificial Sequence
  Description of Artificial Sequence: Synthetic oligonucleotide
  Target: PCSK9; (-) strand; PAM type: NRG; PAM sequence: GAG
ggcccaaagagtattgggca

SEQ ID NO: 10740 - DNA, 20 bp, Artificial Sequence
  Description of Artificial Sequence: Synthetic oligonucleotide
  Target: PCSK9; (-) strand; PAM type: NRG; PAM sequence: CAG
gaggcccaaagagtattggg

SEQ ID NO: 10741 - DNA, 20 bp, Artificial Sequence
  Description of Artificial Sequence: Synthetic oligonucleotide
  Target: PCSK9; (-) strand; PAM type: NRG; PAM sequence: GGG
agggaggcccaaagagtatt

SEQ ID NO: 10742 - DNA, 20 bp, Artificial Sequence
  Description of Artificial Sequence: Synthetic oligonucleotide
  Target: PCSK9; (-) strand; PAM type: NRG; PAM sequence: TGG
cagggaggcccaaagagtat

SEQ ID NO: 10743 - DNA, 20 bp, Artificial Sequence
  Description of Artificial Sequence: Synthetic oligonucleotide
  Target: PCSK9; (-) strand; PAM type: NRG; PAM sequence: GAG
ggacaacagggaggcccaaa

SEQ ID NO: 10744 - DNA, 20 bp, Artificial Sequence
  Description of Artificial Sequence: Synthetic oligonucleotide
  Target: PCSK9; (-) strand; PAM type: NRG; PAM sequence: AAG
ctggacaacagggaggccca

SEQ ID NO: 10745 - DNA, 20 bp, Artificial Sequence
  Description of Artificial Sequence: Synthetic oligonucleotide
  Target: PCSK9; (-) strand; PAM type: NRG; PAM sequence: AGG
gagagagctggacaacaggg

SEQ ID NO: 10746 - DNA, 20 bp, Artificial Sequence
  Description of Artificial Sequence: Synthetic oligonucleotide
  Target: PCSK9; (-) strand; PAM type: NRG; PAM sequence: GAG
ggagagagctggacaacagg

SEQ ID NO: 10747 - DNA, 20 bp, Artificial Sequence
  Description of Artificial Sequence: Synthetic oligonucleotide
  Target: PCSK9; (-) strand; PAM type: NRG; PAM sequence: GGG
gcggagagagctggacaaca

SEQ ID NO: 10748 - DNA, 20 bp, Artificial Sequence
  Description of Artificial Sequence: Synthetic oligonucleotide
  Target: PCSK9; (-) strand; PAM type: NRG; PAM sequence: AGG
cgcggagagagctggacaac

SEQ ID NO: 10749 - DNA, 20 bp, Artificial Sequence
  Description of Artificial Sequence: Synthetic oligonucleotide
  Target: PCSK9; (-) strand; PAM type: NRG; PAM sequence: CAG
ccgcggagagagctggacaa

SEQ ID NO: 10750 - DNA, 20 bp, Artificial Sequence
  Description of Artificial Sequence: Synthetic oligonucleotide
  Target: PCSK9; (-) strand; PAM type: NRG; PAM sequence: TGG
catggagccgcggagagagc

SEQ ID NO: 10751 - DNA, 20 bp, Artificial Sequence
  Description of Artificial Sequence: Synthetic oligonucleotide
  Target: PCSK9; (-) strand; PAM type: NRG; PAM sequence: GAG
cagtcatggagccgcggaga

SEQ ID NO: 10752 - DNA, 20 bp, Artificial Sequence
  Description of Artificial Sequence: Synthetic oligonucleotide
  Target: PCSK9; (-) strand; PAM type: NRG; PAM sequence: GAG
gtcagtcatggagccgcgga

SEQ ID NO: 10753 - DNA, 20 bp, Artificial Sequence
  Description of Artificial Sequence: Synthetic oligonucleotide
  Target: PCSK9; (-) strand; PAM type: NRG; PAM sequence: GAG
ttgtcagtcatggagccgcg

SEQ ID NO: 10754 - DNA, 20 bp, Artificial Sequence
  Description of Artificial Sequence: Synthetic oligonucleotide
  Target: PCSK9; (-) strand; PAM type: NRG; PAM sequence: CGG
agttgtcagtcatggagccg

SEQ ID NO: 10755 - DNA, 20 bp, Artificial Sequence
  Description of Artificial Sequence: Synthetic oligonucleotide
  Target: PCSK9; (-) strand; PAM type: NRG; PAM sequence: GAG
tgctcaagttgtcagtcatg

SEQ ID NO: 10756 - DNA, 20 bp, Artificial Sequence
  Description of Artificial Sequence: Synthetic oligonucleotide
  Target: PCSK9; (-) strand; PAM type: NRG; PAM sequence: TGG
cttgctcaagttgtcagtca

SEQ ID NO: 10757 - DNA, 20 bp, Artificial Sequence
  Description of Artificial Sequence: Synthetic oligonucleotide
  Target: PCSK9; (-) strand; PAM type: NRG; PAM sequence: CAG
attagccttgctcaagttgt

SEQ ID NO: 10758 - DNA, 20 bp, Artificial Sequence
  Description of Artificial Sequence: Synthetic oligonucleotide
  Target: PCSK9; (-) strand; PAM type: NRG; PAM sequence: AAG
cattcacattagccttgctc

SEQ ID NO: 10759 - DNA, 20 bp, Artificial Sequence
  Description of Artificial Sequence: Synthetic oligonucleotide
  Target: PCSK9; (-) strand; PAM type: NRG; PAM sequence: TAG
tcaaccgctcccattcacat

SEQ ID NO: 10760 - DNA, 20 bp, Artificial Sequence
  Description of Artificial Sequence: Synthetic oligonucleotide
  Target: PCSK9; (-) strand; PAM type: NRG; PAM sequence: GAG
gttcctcgggtgagaggtct

SEQ ID NO: 10761 - DNA, 20 bp, Artificial Sequence
  Description of Artificial Sequence: Synthetic oligonucleotide
  Target: PCSK9; (-) strand; PAM type: NRG; PAM sequence: AGG
gtggatgttcctcgggtgag

SEQ ID NO: 10762 - DNA, 20 bp, Artificial Sequence
  Description of Artificial Sequence: Synthetic oligonucleotide
  Target: PCSK9; (-) strand; PAM type: NRG; PAM sequence: GAG
tgtggatgttcctcgggtga

SEQ ID NO: 10763 - DNA, 20 bp, Artificial Sequence
  Description of Artificial Sequence: Synthetic oligonucleotide
  Target: PCSK9; (-) strand; PAM type: NRG; PAM sequence: GAG
tctgtggatgttcctcgggt

SEQ ID NO: 10764 - DNA, 20 bp, Artificial Sequence
  Description of Artificial Sequence: Synthetic oligonucleotide
  Target: PCSK9; (-) strand; PAM type: NRG; PAM sequence: GGG
acactctgtggatgttcctc

SEQ ID NO: 10765 - DNA, 20 bp, Artificial Sequence
  Description of Artificial Sequence: Synthetic oligonucleotide
  Target: PCSK9; (-) strand; PAM type: NRG; PAM sequence: CGG
cacactctgtggatgttcct

SEQ ID NO: 10766 - DNA, 20 bp, Artificial Sequence
  Description of Artificial Sequence: Synthetic oligonucleotide
  Target: PCSK9; (-) strand; PAM type: NRG; PAM sequence: TGG
cgggcatgcggcacactctg

SEQ ID NO: 10767 - DNA, 20 bp, Artificial Sequence
  Description of Artificial Sequence: Synthetic oligonucleotide
  Target: PCSK9; (-) strand; PAM type: NRG; PAM sequence: CGG
gccacactgcaccgggcatg

SEQ ID NO: 10768 - DNA, 20 bp, Artificial Sequence
  Description of Artificial Sequence: Synthetic oligonucleotide
  Target: PCSK9; (-) strand; PAM type: NRG; PAM sequence: GGG
ccccgcagccacactgcacc

SEQ ID NO: 10769 - DNA, 20 bp, Artificial Sequence
  Description of Artificial Sequence: Synthetic oligonucleotide
  Target: PCSK9; (-) strand; PAM type: NRG; PAM sequence: CGG
tccccgcagccacactgcac

SEQ ID NO: 10770 - DNA, 20 bp, Artificial Sequence
  Description of Artificial Sequence: Synthetic oligonucleotide
  Target: PCSK9; (-) strand; PAM type: NRG; PAM sequence: CAG
gctccgtgtctgtgtccccg

SEQ ID NO: 10771 - DNA, 20 bp, Artificial Sequence
  Description of Artificial Sequence: Synthetic oligonucleotide
  Target: PCSK9; (-) strand; PAM type: NRG; PAM sequence: AGG
cccccagctcctcagggccg

SEQ ID NO: 10772 - DNA, 20 bp, Artificial Sequence
  Description of Artificial Sequence: Synthetic oligonucleotide
  Target: PCSK9; (-) strand; PAM type: NRG; PAM sequence: GAG
ccccccagctcctcagggcc

SEQ ID NO: 10773 - DNA, 20 bp, Artificial Sequence
  Description of Artificial Sequence: Synthetic oligonucleotide
  Target: PCSK9; (-) strand; PAM type: NRG; PAM sequence: GGG
cactgccccccagctcctca

SEQ ID NO: 10774 - DNA, 20 bp, Artificial Sequence
  Description of Artificial Sequence: Synthetic oligonucleotide
  Target: PCSK9; (-) strand; PAM type: NRG; PAM sequence: AGG
tcactgccccccagctcctc

SEQ ID NO: 10775 - DNA, 20 bp, Artificial Sequence
  Description of Artificial Sequence: Synthetic oligonucleotide
  Target: PCSK9; (-) strand; PAM type: NRG; PAM sequence: CAG
gtcactgccccccagctcct

SEQ ID NO: 10776 - DNA, 20 bp, Artificial Sequence
  Description of Artificial Sequence: Synthetic oligonucleotide
  Target: PCSK9; (-) strand; PAM type: NRG; PAM sequence: CAG
gagggacggtcactgccccc

SEQ ID NO: 10777 - DNA, 20 bp, Artificial Sequence
  Description of Artificial Sequence: Synthetic oligonucleotide
  Target: PCSK9; (-) strand; PAM type: NRG; PAM sequence: CGG
gtggtgggtcagaggaggga

SEQ ID NO: 10778 - DNA, 20 bp, Artificial Sequence
  Description of Artificial Sequence: Synthetic oligonucleotide
  Target: PCSK9; (-) strand; PAM type: NRG; PAM sequence: GGG
aggagtggtgggtcagagga

SEQ ID NO: 10779 - DNA, 20 bp, Artificial Sequence
  Description of Artificial Sequence: Synthetic oligonucleotide
  Target: PCSK9; (-) strand; PAM type: NRG; PAM sequence: AGG
gaggagtggtgggtcagagg

SEQ ID NO: 10780 - DNA, 20 bp, Artificial Sequence
  Description of Artificial Sequence: Synthetic oligonucleotide
  Target: PCSK9; (-) strand; PAM type: NRG; PAM sequence: GAG
ggaggagtggtgggtcagag

SEQ ID NO: 10781 - DNA, 20 bp, Artificial Sequence
  Description of Artificial Sequence: Synthetic oligonucleotide
  Target: PCSK9; (-) strand; PAM type: NRG; PAM sequence: AGG
ctggaggagtggtgggtcag

SEQ ID NO: 10782 - DNA, 20 bp, Artificial Sequence
  Description of Artificial Sequence: Synthetic oligonucleotide
  Target: PCSK9; (-) strand; PAM type: NRG; PAM sequence: GAG
actggaggagtggtgggtca

SEQ ID NO: 10783 - DNA, 20 bp, Artificial Sequence
  Description of Artificial Sequence: Synthetic oligonucleotide
  Target: PCSK9; (-) strand; PAM type: NRG; PAM sequence: CAG
acactggaggagtggtgggt

SEQ ID NO: 10784 - DNA, 20 bp, Artificial Sequence
  Description of Artificial Sequence: Synthetic oligonucleotide
  Target: PCSK9; (-) strand; PAM type: NRG; PAM sequence: GGG
cctgacactggaggagtggt

SEQ ID NO: 10785 - DNA, 20 bp, Artificial Sequence
  Description of Artificial Sequence: Synthetic oligonucleotide
  Target: PCSK9; (-) strand; PAM type: NRG; PAM sequence: TGG
tcctgacactggaggagtgg

SEQ ID NO: 10786 - DNA, 20 bp, Artificial Sequence
  Description of Artificial Sequence: Synthetic oligonucleotide
  Target: PCSK9; (-) strand; PAM type: NRG; PAM sequence: TGG
gtgtcctgacactggaggag

SEQ ID NO: 10787 - DNA, 20 bp, Artificial Sequence
  Description of Artificial Sequence: Synthetic oligonucleotide
  Target: PCSK9; (-) strand; PAM type: NRG; PAM sequence: GAG
gcagtgtcctgacactggag

SEQ ID NO: 10788 - DNA, 20 bp, Artificial Sequence
  Description of Artificial Sequence: Synthetic oligonucleotide
  Target: PCSK9; (-) strand; PAM type: NRG; PAM sequence: AGG
ccgcagtgtcctgacactgg

SEQ ID NO: 10789 - DNA, 20 bp, Artificial Sequence
  Description of Artificial Sequence: Synthetic oligonucleotide
  Target: PCSK9; (-) strand; PAM type: NRG; PAM sequence: GAG
cccgcagtgtcctgacactg

SEQ ID NO: 10790 - DNA, 20 bp, Artificial Sequence
  Description of Artificial Sequence: Synthetic oligonucleotide
  Target: PCSK9; (-) strand; PAM type: NRG; PAM sequence: TGG
tacccgcagtgtcctgacac

SEQ ID NO: 10791 - DNA, 20 bp, Artificial Sequence
  Description of Artificial Sequence: Synthetic oligonucleotide
  Target: PCSK9; (-) strand; PAM type: NRG; PAM sequence: CAG
ttccttcccctagatacccg

SEQ ID NO: 10792 - DNA, 20 bp, Artificial Sequence
  Description of Artificial Sequence: Synthetic oligonucleotide
  Target: PCSK9; (-) strand; PAM type: NRG; PAM sequence: TAG
tggaacaagattccttcccc

SEQ ID NO: 10793 - DNA, 20 bp, Artificial Sequence
  Description of Artificial Sequence: Synthetic oligonucleotide
  Target: PCSK9; (-) strand; PAM type: NRG; PAM sequence: AAG
ttccagacttgaagtggaac

SEQ ID NO: 10794 - DNA, 20 bp, Artificial Sequence
  Description of Artificial Sequence: Synthetic oligonucleotide
  Target: PCSK9; (-) strand; PAM type: NRG; PAM sequence: TGG
ttgaagttccagacttgaag

SEQ ID NO: 10795 - DNA, 20 bp, Artificial Sequence
  Description of Artificial Sequence: Synthetic oligonucleotide
  Target: PCSK9; (-) strand; PAM type: NRG; PAM sequence: AAG
gacttgaagttccagacttg

SEQ ID NO: 10796 - DNA, 20 bp, Artificial Sequence
  Description of Artificial Sequence: Synthetic oligonucleotide
  Target: PCSK9; (-) strand; PAM type: NRG; PAM sequence: CAG
cacacacagacttgaagttc

SEQ ID NO: 10797 - DNA, 20 bp, Artificial Sequence
  Description of Artificial Sequence: Synthetic oligonucleotide
  Target: PCSK9; (-) strand; PAM type: NRG; PAM sequence: AAG
cacgcacacacacagacttg

SEQ ID NO: 10798 - DNA, 20 bp, Artificial Sequence
  Description of Artificial Sequence: Synthetic oligonucleotide
  Target: PCSK9; (-) strand; PAM type: NRG; PAM sequence: CAG
cgcgcgcgcacgcacacaca

SEQ ID NO: 10799 - DNA, 20 bp, Artificial Sequence
  Description of Artificial Sequence: Synthetic oligonucleotide
  Target: PCSK9; (-) strand; PAM type: NRG; PAM sequence: AGG
ggacctaggttaccgctgtc

SEQ ID NO: 10800 - DNA, 20 bp, Artificial Sequence
  Description of Artificial Sequence: Synthetic oligonucleotide
  Target: PCSK9; (-) strand; PAM type: NRG; PAM sequence: CAG
gggacctaggttaccgctgt

SEQ ID NO: 10801 - DNA, 20 bp, Artificial Sequence
  Description of Artificial Sequence: Synthetic oligonucleotide
  Target: PCSK9; (-) strand; PAM type: NRG; PAM sequence: AGG
tgataggccaggggggacct

SEQ ID NO: 10802 - DNA, 20 bp, Artificial Sequence
  Description of Artificial Sequence: Synthetic oligonucleotide
  Target: PCSK9; (-) strand; PAM type: NRG; PAM sequence: TAG
ttgataggccaggggggacc

SEQ ID NO: 10803 - DNA, 20 bp, Artificial Sequence
  Description of Artificial Sequence: Synthetic oligonucleotide
  Target: PCSK9; (-) strand; PAM type: NRG; PAM sequence: GGG
gaagccttgataggccaggg

SEQ ID NO: 10804 - DNA, 20 bp, Artificial Sequence
  Description of Artificial Sequence: Synthetic oligonucleotide
  Target: PCSK9; (-) strand; PAM type: NRG; PAM sequence: GGG
ggaagccttgataggccagg

SEQ ID NO: 10805 - DNA, 20 bp, Artificial Sequence
  Description of Artificial Sequence: Synthetic oligonucleotide
  Target: PCSK9; (-) strand; PAM type: NRG; PAM sequence: GGG
gggaagccttgataggccag

SEQ ID NO: 10806 - DNA, 20 bp, Artificial Sequence
  Description of Artificial Sequence: Synthetic oligonucleotide
  Target: PCSK9; (-) strand; PAM type: NRG; PAM sequence: GGG
agggaagccttgataggcca

SEQ ID NO: 10807 - DNA, 20 bp, Artificial Sequence
  Description of Artificial Sequence: Synthetic oligonucleotide
  Target: PCSK9; (-) strand; PAM type: NRG; PAM sequence: AGG
cagggaagccttgataggcc

SEQ ID NO: 10808 - DNA, 20 bp, Artificial Sequence
  Description of Artificial Sequence: Synthetic oligonucleotide
  Target: PCSK9; (-) strand; PAM type: NRG; PAM sequence: CAG
ccagggaagccttgataggc

SEQ ID NO: 10809 - DNA, 20 bp, Artificial Sequence
  Description of Artificial Sequence: Synthetic oligonucleotide
  Target: PCSK9; (-) strand; PAM type: NRG; PAM sequence: AGG
gccgccagggaagccttgat

SEQ ID NO: 10810 - DNA, 20 bp, Artificial Sequence
  Description of Artificial Sequence: Synthetic oligonucleotide
  Target: PCSK9; (-) strand; PAM type: NRG; PAM sequence: TAG
ggccgccagggaagccttga

SEQ ID NO: 10811 - DNA, 20 bp, Artificial Sequence
  Description of Artificial Sequence: Synthetic oligonucleotide
  Target: PCSK9; (-) strand; PAM type: NRG; PAM sequence: AAG
tttaaattcggccgccaggg

SEQ ID NO: 10812 - DNA, 20 bp, Artificial Sequence
  Description of Artificial Sequence: Synthetic oligonucleotide
  Target: PCSK9; (-) strand; PAM type: NRG; PAM sequence: GGG
gcctttaaattcggccgcca

SEQ ID NO: 10813 - DNA, 20 bp, Artificial Sequence
  Description of Artificial Sequence: Synthetic oligonucleotide
  Target: PCSK9; (-) strand; PAM type: NRG; PAM sequence: AGG
tgcctttaaattcggccgcc

SEQ ID NO: 10814 - DNA, 20 bp, Artificial Sequence
  Description of Artificial Sequence: Synthetic oligonucleotide
  Target: PCSK9; (-) strand; PAM type: NRG; PAM sequence: CAG
atgcctttaaattcggccgc

SEQ ID NO: 10815 - DNA, 20 bp, Artificial Sequence
  Description of Artificial Sequence: Synthetic oligonucleotide
  Target: PCSK9; (-) strand; PAM type: NRG; PAM sequence: CGG
ttgcttgatgcctttaaatt

SEQ ID NO: 10816 - DNA, 20 bp, Artificial Sequence
  Description of Artificial Sequence: Synthetic oligonucleotide
  Target: PCSK9; (-) strand; PAM type: NRG; PAM sequence: GGG
ggacaaggcagagatgtgtt

SEQ ID NO: 10817 - DNA, 20 bp, Artificial Sequence
  Description of Artificial Sequence: Synthetic oligonucleotide
  Target: PCSK9; (-) strand; PAM type: NRG; PAM sequence: TGG
aggacaaggcagagatgtgt

SEQ ID NO: 10818 - DNA, 20 bp, Artificial Sequence
  Description of Artificial Sequence: Synthetic oligonucleotide
  Target: PCSK9; (-) strand; PAM type: NRG; PAM sequence: GAG
gaaactgagaggacaaggca

SEQ ID NO: 10819 - DNA, 20 bp, Artificial Sequence
  Description of Artificial Sequence: Synthetic oligonucleotide
  Target: PCSK9; (-) strand; PAM type: NRG; PAM sequence: CAG
gggaaactgagaggacaagg

SEQ ID NO: 10820 - DNA, 20 bp, Artificial Sequence
  Description of Artificial Sequence: Synthetic oligonucleotide
  Target: PCSK9; (-) strand; PAM type: NRG; PAM sequence: AGG
ggggggaaactgagaggaca

SEQ ID NO: 10821 - DNA, 20 bp, Artificial Sequence
  Description of Artificial Sequence: Synthetic oligonucleotide
  Target: PCSK9; (-) strand; PAM type: NRG; PAM sequence: AAG
cggggggaaactgagaggac

SEQ ID NO: 10822 - DNA, 20 bp, Artificial Sequence
  Description of Artificial Sequence: Synthetic oligonucleotide
  Target: PCSK9; (-) strand; PAM type: NRG; PAM sequence: AGG
tgccacggggggaaactgag

SEQ ID NO: 10823 - DNA, 20 bp, Artificial Sequence
  Description of Artificial Sequence: Synthetic oligonucleotide
  Target: PCSK9; (-) strand; PAM type: NRG; PAM sequence: GAG
gtgccacggggggaaactga

SEQ ID NO: 10824 - DNA, 20 bp, Artificial Sequence
  Description of Artificial Sequence: Synthetic oligonucleotide
  Target: PCSK9; (-) strand; PAM type: NRG; PAM sequence: GAG
aagtgccacggggggaaact

SEQ ID NO: 10825 - DNA, 20 bp, Artificial Sequence
  Description of Artificial Sequence: Synthetic oligonucleotide
  Target: PCSK9; (-) strand; PAM type: NRG; PAM sequence: GGG
gtggttctaagtgccacggg

SEQ ID NO: 10826 - DNA, 20 bp, Artificial Sequence
  Description of Artificial Sequence: Synthetic oligonucleotide
  Target: PCSK9; (-) strand; PAM type: NRG; PAM sequence: GGG
agtggttctaagtgccacgg

SEQ ID NO: 10827 - DNA, 20 bp, Artificial Sequence
  Description of Artificial Sequence: Synthetic oligonucleotide
  Target: PCSK9; (-) strand; PAM type: NRG; PAM sequence: GGG
aagtggttctaagtgccacg

SEQ ID NO: 10828 - DNA, 20 bp, Artificial Sequence
  Description of Artificial Sequence: Synthetic oligonucleotide
  Target: PCSK9; (-) strand; PAM type: NRG; PAM sequence: GGG
caagtggttctaagtgccac

SEQ ID NO: 10829 - DNA, 20 bp, Artificial Sequence
  Description of Artificial Sequence: Synthetic oligonucleotide
  Target: PCSK9; (-) strand; PAM type: NRG; PAM sequence: CGG
tcaagtggttctaagtgcca

SEQ ID NO: 10830 - DNA, 20 bp, Artificial Sequence
  Description of Artificial Sequence: Synthetic oligonucleotide
  Target: PCSK9; (-) strand; PAM type: NRG; PAM sequence: AAG
tcggtgtatcaagtggttct

SEQ ID NO: 10831 - DNA, 20 bp, Artificial Sequence
  Description of Artificial Sequence: Synthetic oligonucleotide
  Target: PCSK9; (-) strand; PAM type: NRG; PAM sequence: TGG
aaactattcggtgtatcaag

SEQ ID NO: 10832 - DNA, 20 bp, Artificial Sequence
  Description of Artificial Sequence: Synthetic oligonucleotide
  Target: PCSK9; (-) strand; PAM type: NRG; PAM sequence: AAG
aggaaactattcggtgtatc

SEQ ID NO: 10833 - DNA, 20 bp, Artificial Sequence
  Description of Artificial Sequence: Synthetic oligonucleotide
  Target: PCSK9; (-) strand; PAM type: NRG; PAM sequence: CGG
gggggagataggaaactatt

SEQ ID NO: 10834 - DNA, 20 bp, Artificial Sequence
  Description of Artificial Sequence: Synthetic oligonucleotide
  Target: PCSK9; (-) strand; PAM type: NRG; PAM sequence: AGG
tacatcctagtgggggagat

SEQ ID NO: 10835 - DNA, 20 bp, Artificial Sequence
  Description of Artificial Sequence: Synthetic oligonucleotide
  Target: PCSK9; (-) strand; PAM type: NRG; PAM sequence: TAG
ttacatcctagtgggggaga

SEQ ID NO: 10836 - DNA, 20 bp, Artificial Sequence
  Description of Artificial Sequence: Synthetic oligonucleotide
  Target: PCSK9; (-) strand; PAM type: NRG; PAM sequence: GAG
gagtttacatcctagtgggg

SEQ ID NO: 10837 - DNA, 20 bp, Artificial Sequence
  Description of Artificial Sequence: Synthetic oligonucleotide
  Target: PCSK9; (-) strand; PAM type: NRG; PAM sequence: GGG
tggagtttacatcctagtgg

SEQ ID NO: 10838 - DNA, 20 bp, Artificial Sequence
  Description of Artificial Sequence: Synthetic oligonucleotide
  Target: PCSK9; (-) strand; PAM type: NRG; PAM sequence: GGG
gtggagtttacatcctagtg

SEQ ID NO: 10839 - DNA, 20 bp, Artificial Sequence
  Description of Artificial Sequence: Synthetic oligonucleotide
  Target: PCSK9; (-) strand; PAM type: NRG; PAM sequence: GGG
tgtggagtttacatcctagt

SEQ ID NO: 10840 - DNA, 20 bp, Artificial Sequence
  Description of Artificial Sequence: Synthetic oligonucleotide
  Target: PCSK9; (-) strand; PAM type: NRG; PAM sequence: TGG
ctgtggagtttacatcctag

SEQ ID NO: 10841 - DNA, 20 bp, Artificial Sequence
  Description of Artificial Sequence: Synthetic oligonucleotide
  Target: PCSK9; (-) strand; PAM type: NRG; PAM sequence: TAG
cccctgtggagtttacatcc

SEQ ID NO: 10842 - DNA, 20 bp, Artificial Sequence
  Description of Artificial Sequence: Synthetic oligonucleotide
  Target: PCSK9; (-) strand; PAM type: NRG; PAM sequence: GAG
gcattcccaatgcccctgtg

SEQ ID NO: 10843 - DNA, 20 bp, Artificial Sequence
  Description of Artificial Sequence: Synthetic oligonucleotide
  Target: PCSK9; (-) strand; PAM type: NRG; PAM sequence: TGG
cagcattcccaatgcccctg

SEQ ID NO: 10844 - DNA, 20 bp, Artificial Sequence
  Description of Artificial Sequence: Synthetic oligonucleotide
  Target: PCSK9; (-) strand; PAM type: NRG; PAM sequence: CAG
ctgtccctaccatagccagg

SEQ ID NO: 10845 - DNA, 20 bp, Artificial Sequence
  Description of Artificial Sequence: Synthetic oligonucleotide
  Target: PCSK9; (-) strand; PAM type: NRG; PAM sequence: AGG
cctctgtccctaccatagcc

SEQ ID NO: 10846 - DNA, 20 bp, Artificial Sequence
  Description of Artificial Sequence: Synthetic oligonucleotide
  Target: PCSK9; (-) strand; PAM type: NRG; PAM sequence: CAG
ccctctgtccctaccatagc

SEQ ID NO: 10847 - DNA, 20 bp, Artificial Sequence
  Description of Artificial Sequence: Synthetic oligonucleotide
  Target: PCSK9; (-) strand; PAM type: NRG; PAM sequence: TAG
gctcccctctgtccctacca

SEQ ID NO: 10848 - DNA, 20 bp, Artificial Sequence
  Description of Artificial Sequence: Synthetic oligonucleotide
  Target: PCSK9; (-) strand; PAM type: NRG; PAM sequence: TGG
ctggcacccctgccccgccc

SEQ ID NO: 10849 - DNA, 20 bp, Artificial Sequence
  Description of Artificial Sequence: Synthetic oligonucleotide
  Target: PCSK9; (-) strand; PAM type: NRG; PAM sequence: TGG
tgactgcccaggcagaactc

SEQ ID NO: 10850 - DNA, 20 bp, Artificial Sequence
  Description of Artificial Sequence: Synthetic oligonucleotide
  Target: PCSK9; (-) strand; PAM type: NRG; PAM sequence: CAG
ggaaaatctgactgcccagg

SEQ ID NO: 10851 - DNA, 20 bp, Artificial Sequence
  Description of Artificial Sequence: Synthetic oligonucleotide
  Target: PCSK9; (-) strand; PAM type: NRG; PAM sequence: AGG
taaggaaaatctgactgccc

SEQ ID NO: 10852 - DNA, 20 bp, Artificial Sequence
  Description of Artificial Sequence: Synthetic oligonucleotide
  Target: PCSK9; (-) strand; PAM type: NRG; PAM sequence: CAG
ctaaggaaaatctgactgcc

SEQ ID NO: 10853 - DNA, 20 bp, Artificial Sequence
  Description of Artificial Sequence: Synthetic oligonucleotide
  Target: PCSK9; (-) strand; PAM type: NRG; PAM sequence: AGG
cactcaaatgtcccctccta

SEQ ID NO: 10854 - DNA, 20 bp, Artificial Sequence
  Description of Artificial Sequence: Synthetic oligonucleotide
  Target: PCSK9; (-) strand; PAM type: NRG; PAM sequence: AAG
ccactcaaatgtcccctcct

SEQ ID NO: 10855 - DNA, 20 bp, Artificial Sequence
  Description of Artificial Sequence: Synthetic oligonucleotide
  Target: PCSK9; (-) strand; PAM type: NRG; PAM sequence: GGG
caactgctatacacctgttt

SEQ ID NO: 10856 - DNA, 20 bp, Artificial Sequence
  Description of Artificial Sequence: Synthetic oligonucleotide
  Target: PCSK9; (-) strand; PAM type: NRG; PAM sequence: TGG
acaactgctatacacctgtt

SEQ ID NO: 10857 - DNA, 20 bp, Artificial Sequence
  Description of Artificial Sequence: Synthetic oligonucleotide
  Target: PCSK9; (-) strand; PAM type: NRG; PAM sequence: TGG
tcaggccttgccagctgggc

SEQ ID NO: 10858 - DNA, 20 bp, Artificial Sequence
  Description of Artificial Sequence: Synthetic oligonucleotide
  Target: PCSK9; (-) strand; PAM type: NRG; PAM sequence: GGG
agactcaggccttgccagct

SEQ ID NO: 10859 - DNA, 20 bp, Artificial Sequence
  Description of Artificial Sequence: Synthetic oligonucleotide
  Target: PCSK9; (-) strand; PAM type: NRG; PAM sequence: TGG
cagactcaggccttgccagc

SEQ ID NO: 10860 - DNA, 20 bp, Artificial Sequence
  Description of Artificial Sequence: Synthetic oligonucleotide
  Target: PCSK9; (-) strand; PAM type: NRG; PAM sequence: CAG
gaggcagactcaggccttgc

SEQ ID NO: 10861 - DNA, 20 bp, Artificial Sequence
  Description of Artificial Sequence: Synthetic oligonucleotide
  Target: PCSK9; (-) strand; PAM type: NRG; PAM sequence: AGG
ggggttgcagaggcagactc

SEQ ID NO: 10862 - DNA, 20 bp, Artificial Sequence
  Description of Artificial Sequence: Synthetic oligonucleotide
  Target: PCSK9; (-) strand; PAM type: NRG; PAM sequence: CAG
aggggttgcagaggcagact

SEQ ID NO: 10863 - DNA, 20 bp, Artificial Sequence
  Description of Artificial Sequence: Synthetic oligonucleotide
  Target: PCSK9; (-) strand; PAM type: NRG; PAM sequence: CAG
caagagaggggttgcagagg

SEQ ID NO: 10864 - DNA, 20 bp, Artificial Sequence
  Description of Artificial Sequence: Synthetic oligonucleotide
  Target: PCSK9; (-) strand; PAM type: NRG; PAM sequence: AGG
gcccaagagaggggttgcag

SEQ ID NO: 10865 - DNA, 20 bp, Artificial Sequence
  Description of Artificial Sequence: Synthetic oligonucleotide
  Target: PCSK9; (-) strand; PAM type: NRG; PAM sequence: GAG
agcccaagagaggggttgca

SEQ ID NO: 10866 - DNA, 20 bp, Artificial Sequence
  Description of Artificial Sequence: Synthetic oligonucleotide
  Target: PCSK9; (-) strand; PAM type: NRG; PAM sequence: CAG
ggagcccaagagaggggttg

SEQ ID NO: 10867 - DNA, 20 bp, Artificial Sequence
  Description of Artificial Sequence: Synthetic oligonucleotide
  Target: PCSK9; (-) strand; PAM type: NRG; PAM sequence: GGG
gagaaaggagcccaagagag

SEQ ID NO: 10868 - DNA, 20 bp, Artificial Sequence
  Description of Artificial Sequence: Synthetic oligonucleotide
  Target: PCSK9; (-) strand; PAM type: NRG; PAM sequence: GGG
agagaaaggagcccaagaga

SEQ ID NO: 10869 - DNA, 20 bp, Artificial Sequence
  Description of Artificial Sequence: Synthetic oligonucleotide
  Target: PCSK9; (-) strand; PAM type: NRG; PAM sequence: AGG
cagagaaaggagcccaagag

SEQ ID NO: 10870 - DNA, 20 bp, Artificial Sequence
  Description of Artificial Sequence: Synthetic oligonucleotide
  Target: PCSK9; (-) strand; PAM type: NRG; PAM sequence: GAG
gcagagaaaggagcccaaga

SEQ ID NO: 10871 - DNA, 20 bp, Artificial Sequence
  Description of Artificial Sequence: Synthetic oligonucleotide
  Target: PCSK9; (-) strand; PAM type: NRG; PAM sequence: GAG
tggcagagaaaggagcccaa

SEQ ID NO: 10872 - DNA, 20 bp, Artificial Sequence
  Description of Artificial Sequence: Synthetic oligonucleotide
  Target: PCSK9; (-) strand; PAM type: NRG; PAM sequence: AAG
ggtggcagagaaaggagccc

SEQ ID NO: 10873 - DNA, 20 bp, Artificial Sequence
  Description of Artificial Sequence: Synthetic oligonucleotide
  Target: PCSK9; (-) strand; PAM type: NRG; PAM sequence: GAG
gaggtgggtggcagagaaag

SEQ ID NO: 10874 - DNA, 20 bp, Artificial Sequence
  Description of Artificial Sequence: Synthetic oligonucleotide
  Target: PCSK9; (-) strand; PAM type: NRG; PAM sequence: AGG
aggaggtgggtggcagagaa

SEQ ID NO: 10875 - DNA, 20 bp, Artificial Sequence
  Description of Artificial Sequence: Synthetic oligonucleotide
  Target: PCSK9; (-) strand; PAM type: NRG; PAM sequence: AAG
gaggaggtgggtggcagaga

SEQ ID NO: 10876 - DNA, 20 bp, Artificial Sequence
  Description of Artificial Sequence: Synthetic oligonucleotide
  Target: PCSK9; (-) strand; PAM type: NRG; PAM sequence: GAG
aggtgaggaggtgggtggca

SEQ ID NO: 10877 - DNA, 20 bp, Artificial Sequence
  Description of Artificial Sequence: Synthetic oligonucleotide
  Target: PCSK9; (-) strand; PAM type: NRG; PAM sequence: CAG
aaaggtgaggaggtgggtgg

SEQ ID NO: 10878 - DNA, 20 bp, Artificial Sequence
  Description of Artificial Sequence: Synthetic oligonucleotide
  Target: PCSK9; (-) strand; PAM type: NRG; PAM sequence: TGG
tggaaaggtgaggaggtggg

SEQ ID NO: 10879 - DNA, 20 bp, Artificial Sequence
  Description of Artificial Sequence: Synthetic oligonucleotide
  Target: PCSK9; (-) strand; PAM type: NRG; PAM sequence: GGG
acctggaaaggtgaggaggt

SEQ ID NO: 10880 - DNA, 20 bp, Artificial Sequence
  Description of Artificial Sequence: Synthetic oligonucleotide
  Target: PCSK9; (-) strand; PAM type: NRG; PAM sequence: TGG
gacctggaaaggtgaggagg

SEQ ID NO: 10881 - DNA, 20 bp, Artificial Sequence
  Description of Artificial Sequence: Synthetic oligonucleotide
  Target: PCSK9; (-) strand; PAM type: NRG; PAM sequence: AGG
gatgacctggaaaggtgagg

SEQ ID NO: 10882 - DNA, 20 bp, Artificial Sequence
  Description of Artificial Sequence: Synthetic oligonucleotide
  Target: PCSK9; (-) strand; PAM type: NRG; PAM sequence: GAG
tgatgacctggaaaggtgag

SEQ ID NO: 10883 - DNA, 20 bp, Artificial Sequence
  Description of Artificial Sequence: Synthetic oligonucleotide
  Target: PCSK9; (-) strand; PAM type: NRG; PAM sequence: AGG
tgtgatgacctggaaaggtg

SEQ ID NO: 10884 - DNA, 20 bp, Artificial Sequence
  Description of Artificial Sequence: Synthetic oligonucleotide
  Target: PCSK9; (-) strand; PAM type: NRG; PAM sequence: GAG
ctgtgatgacctggaaaggt

SEQ ID NO: 10885 - DNA, 20 bp, Artificial Sequence
  Description of Artificial Sequence: Synthetic oligonucleotide
  Target: PCSK9; (-) strand; PAM type: NRG; PAM sequence: AGG
ccaactgtgatgacctggaa

SEQ ID NO: 10886 - DNA, 20 bp, Artificial Sequence
  Description of Artificial Sequence: Synthetic oligonucleotide
  Target: PCSK9; (-) strand; PAM type: NRG; PAM sequence: AAG
cccaactgtgatgacctgga

SEQ ID NO: 10887 - DNA, 20 bp, Artificial Sequence
  Description of Artificial Sequence: Synthetic oligonucleotide
  Target: PCSK9; (-) strand; PAM type: NRG; PAM sequence: TGG
tggccccaactgtgatgacc

SEQ ID NO: 10888 - DNA, 20 bp, Artificial Sequence
  Description of Artificial Sequence: Synthetic oligonucleotide
  Target: PCSK9; (-) strand; PAM type: NRG; PAM sequence: TGG
cggctggtcttgggcattgg

SEQ ID NO: 10889 - DNA, 20 bp, Artificial Sequence
  Description of Artificial Sequence: Synthetic oligonucleotide
  Target: PCSK9; (-) strand; PAM type: NRG; PAM sequence: TGG
caccggctggtcttgggcat

SEQ ID NO: 10890 - DNA, 20 bp, Artificial Sequence
  Description of Artificial Sequence: Synthetic oligonucleotide
  Target: PCSK9; (-) strand; PAM type: NRG; PAM sequence: GGG
cagggtcaccggctggtctt

SEQ ID NO: 10891 - DNA, 20 bp, Artificial Sequence
  Description of Artificial Sequence: Synthetic oligonucleotide
  Target: PCSK9; (-) strand; PAM type: NRG; PAM sequence: TGG
ccagggtcaccggctggtct

SEQ ID NO: 10892 - DNA, 20 bp, Artificial Sequence
  Description of Artificial Sequence: Synthetic oligonucleotide
  Target: PCSK9; (-) strand; PAM type: NRG; PAM sequence: TGG
aagtccccagggtcaccggc

SEQ ID NO: 10893 - DNA, 20 bp, Artificial Sequence
  Description of Artificial Sequence: Synthetic oligonucleotide
  Target: PCSK9; (-) strand; PAM type: NRG; PAM sequence: CGG
cccaaagtccccagggtcac

SEQ ID NO: 10894 - DNA, 20 bp, Artificial Sequence
  Description of Artificial Sequence: Synthetic oligonucleotide
  Target: PCSK9; (-) strand; PAM type: NRG; PAM sequence: GGG
gttggtccccaaagtcccca

SEQ ID NO: 10895 - DNA, 20 bp, Artificial Sequence
  Description of Artificial Sequence: Synthetic oligonucleotide
  Target: PCSK9; (-) strand; PAM type: NRG; PAM sequence: AGG
agttggtccccaaagtcccc

SEQ ID NO: 10896 - DNA, 20 bp, Artificial Sequence
  Description of Artificial Sequence: Synthetic oligonucleotide
  Target: PCSK9; (-) strand; PAM type: NRG; PAM sequence: CAG
aagttggtccccaaagtccc

SEQ ID NO: 10897 - DNA, 20 bp, Artificial Sequence
  Description of Artificial Sequence: Synthetic oligonucleotide
  Target: PCSK9; (-) strand; PAM type: NRG; PAM sequence: AAG
gcggccaaagttggtcccca

SEQ ID NO: 10898 - DNA, 20 bp, Artificial Sequence
  Description of Artificial Sequence: Synthetic oligonucleotide
  Target: PCSK9; (-) strand; PAM type: NRG; PAM sequence: TGG
gtccacacagcggccaaagt

SEQ ID NO: 10899 - DNA, 20 bp, Artificial Sequence
  Description of Artificial Sequence: Synthetic oligonucleotide
  Target: PCSK9; (-) strand; PAM type: NRG; PAM sequence: AAG
agaggtccacacagcggcca

SEQ ID NO: 10900 - DNA, 20 bp, Artificial Sequence
  Description of Artificial Sequence: Synthetic oligonucleotide
  Target: PCSK9; (-) strand; PAM type: NRG; PAM sequence: CGG
gggcaaagaggtccacacag

SEQ ID NO: 10901 - DNA, 20 bp, Artificial Sequence
  Description of Artificial Sequence: Synthetic oligonucleotide
  Target: PCSK9; (-) strand; PAM type: NRG; PAM sequence: CAG
ctggggcaaagaggtccaca

SEQ ID NO: 10902 - DNA, 20 bp, Artificial Sequence
  Description of Artificial Sequence: Synthetic oligonucleotide
  Target: PCSK9; (-) strand; PAM type: NRG; PAM sequence: AGG
tgtcctcccctggggcaaag

SEQ ID NO: 10903 - DNA, 20 bp, Artificial Sequence
  Description of Artificial Sequence: Synthetic oligonucleotide
  Target: PCSK9; (-) strand; PAM type: NRG; PAM sequence: GAG
atgtcctcccctggggcaaa

SEQ ID NO: 10904 - DNA, 20 bp, Artificial Sequence
  Description of Artificial Sequence: Synthetic oligonucleotide
  Target: PCSK9; (-) strand; PAM type: NRG; PAM sequence: AAG
tgatgtcctcccctggggca

SEQ ID NO: 10905 - DNA, 20 bp, Artificial Sequence
  Description of Artificial Sequence: Synthetic oligonucleotide
  Target: PCSK9; (-) strand; PAM type: NRG; PAM sequence: GGG
accaatgatgtcctcccctg

SEQ ID NO: 10906 - DNA, 20 bp, Artificial Sequence
  Description of Artificial Sequence: Synthetic oligonucleotide
  Target: PCSK9; (-) strand; PAM type: NRG; PAM sequence: GGG
caccaatgatgtcctcccct

SEQ ID NO: 10907 - DNA, 20 bp, Artificial Sequence
  Description of Artificial Sequence: Synthetic oligonucleotide
  Target: PCSK9; (-) strand; PAM type: NRG; PAM sequence: TGG
gcaccaatgatgtcctcccc

SEQ ID NO: 10908 - DNA, 20 bp, Artificial Sequence
  Description of Artificial Sequence: Synthetic oligonucleotide
  Target: PCSK9; (-) strand; PAM type: NRG; PAM sequence: AGG
gcaggtgctgcagtcgctgg

SEQ ID NO: 10909 - DNA, 20 bp, Artificial Sequence
  Description of Artificial Sequence: Synthetic oligonucleotide
  Target: PCSK9; (-) strand; PAM type: NRG; PAM sequence: GAG
agcaggtgctgcagtcgctg

SEQ ID NO: 10910 - DNA, 20 bp, Artificial Sequence
  Description of Artificial Sequence: Synthetic oligonucleotide
  Target: PCSK9; (-) strand; PAM type: NRG; PAM sequence: TGG
aaagcaggtgctgcagtcgc

SEQ ID NO: 10911 - DNA, 20 bp, Artificial Sequence
  Description of Artificial Sequence: Synthetic oligonucleotide
  Target: PCSK9; (-) strand; PAM type: NRG; PAM sequence: CAG
gtgacacaaagcaggtgctg

SEQ ID NO: 10912 - DNA, 20 bp, Artificial Sequence
  Description of Artificial Sequence: Synthetic oligonucleotide
  Target: PCSK9; (-) strand; PAM type: NRG; PAM sequence: AGG
cccactctgtgacacaaagc

SEQ ID NO: 10913 - DNA, 20 bp, Artificial Sequence
  Description of Artificial Sequence: Synthetic oligonucleotide
  Target: PCSK9; (-) strand; PAM type: NRG; PAM sequence: CAG
tcccactctgtgacacaaag

SEQ ID NO: 10914 - DNA, 20 bp, Artificial Sequence
  Description of Artificial Sequence: Synthetic oligonucleotide
  Target: PCSK9; (-) strand; PAM type: NRG; PAM sequence: AAG
atgtcccactctgtgacaca

SEQ ID NO: 10915 - DNA, 20 bp, Artificial Sequence
  Description of Artificial Sequence: Synthetic oligonucleotide
  Target: PCSK9; (-) strand; PAM type: NRG; PAM sequence: CAG
cttaccagccacgtgggcag

SEQ ID NO: 10916 - DNA, 20 bp, Artificial Sequence
  Description of Artificial Sequence: Synthetic oligonucleotide
  Target: PCSK9; (-) strand; PAM type: NRG; PAM sequence: CAG
tgacttaccagccacgtggg

SEQ ID NO: 10917 - DNA, 20 bp, Artificial Sequence
  Description of Artificial Sequence: Synthetic oligonucleotide
  Target: PCSK9; (-) strand; PAM type: NRG; PAM sequence: GGG
tggtgacttaccagccacgt

SEQ ID NO: 10918 - DNA, 20 bp, Artificial Sequence
  Description of Artificial Sequence: Synthetic oligonucleotide
  Target: PCSK9; (-) strand; PAM type: NRG; PAM sequence: TGG
gtggtgacttaccagccacg

SEQ ID NO: 10919 - DNA, 20 bp, Artificial Sequence
  Description of Artificial Sequence: Synthetic oligonucleotide
  Target: PCSK9; (-) strand; PAM type: NRG; PAM sequence: CAG
gcagtggggtggtgacttac

SEQ ID NO: 10920 - DNA, 20 bp, Artificial Sequence
  Description of Artificial Sequence: Synthetic oligonucleotide
  Target: PCSK9; (-) strand; PAM type: NRG; PAM sequence: TGG
cggtggccgaggcagtgggg

SEQ ID NO: 10921 - DNA, 20 bp, Artificial Sequence
  Description of Artificial Sequence: Synthetic oligonucleotide
  Target: PCSK9; (-) strand; PAM type: NRG; PAM sequence: GGG
tcacggtggccgaggcagtg

SEQ ID NO: 10922 - DNA, 20 bp, Artificial Sequence
  Description of Artificial Sequence: Synthetic oligonucleotide
  Target: PCSK9; (-) strand; PAM type: NRG; PAM sequence: GGG
atcacggtggccgaggcagt

SEQ ID NO: 10923 - DNA, 20 bp, Artificial Sequence
  Description of Artificial Sequence: Synthetic oligonucleotide
  Target: PCSK9; (-) strand; PAM type: NRG; PAM sequence: TGG
catcacggtggccgaggcag

SEQ ID NO: 10924 - DNA, 20 bp, Artificial Sequence
  Description of Artificial Sequence: Synthetic oligonucleotide
  Target: PCSK9; (-) strand; PAM type: NRG; PAM sequence: CAG
tagcatcacggtggccgagg

SEQ ID NO: 10925 - DNA, 20 bp, Artificial Sequence
  Description of Artificial Sequence: Synthetic oligonucleotide
  Target: PCSK9; (-) strand; PAM type: NRG; PAM sequence: AGG
tgttagcatcacggtggccg

SEQ ID NO: 10926 - DNA, 20 bp, Artificial Sequence
  Description of Artificial Sequence: Synthetic oligonucleotide
  Target: PCSK9; (-) strand; PAM type: NRG; PAM sequence: GAG
ctgttagcatcacggtggcc

SEQ ID NO: 10927 - DNA, 20 bp, Artificial Sequence
  Description of Artificial Sequence: Synthetic oligonucleotide
  Target: PCSK9; (-) strand; PAM type: NRG; PAM sequence: TGG
aggggctgttagcatcacgg

SEQ ID NO: 10928 - DNA, 20 bp, Artificial Sequence
  Description of Artificial Sequence: Synthetic oligonucleotide
  Target: PCSK9; (-) strand; PAM type: NRG; PAM sequence: CGG
caaaggggctgttagcatca

SEQ ID NO: 10929 - DNA, 20 bp, Artificial Sequence
  Description of Artificial Sequence: Synthetic oligonucleotide
  Target: PCSK9; (-) strand; PAM type: NRG; PAM sequence: TAG
ctgactgccaaaggggctgt

SEQ ID NO: 10930 - DNA, 20 bp, Artificial Sequence
  Description of Artificial Sequence: Synthetic oligonucleotide
  Target: PCSK9; (-) strand; PAM type: NRG; PAM sequence: GGG
acagaccctgactgccaaag

SEQ ID NO: 10931 - DNA, 20 bp, Artificial Sequence
  Description of Artificial Sequence: Synthetic oligonucleotide
  Target: PCSK9; (-) strand; PAM type: NRG; PAM sequence: GGG
cacagaccctgactgccaaa

SEQ ID NO: 10932 - DNA, 20 bp, Artificial Sequence
  Description of Artificial Sequence: Synthetic oligonucleotide
  Target: PCSK9; (-) strand; PAM type: NRG; PAM sequence: AGG
gcacagaccctgactgccaa

SEQ ID NO: 10933 - DNA, 20 bp, Artificial Sequence
  Description of Artificial Sequence: Synthetic oligonucleotide
  Target: PCSK9; (-) strand; PAM type: NRG; PAM sequence: AAG
ggcacagaccctgactgcca

SEQ ID NO: 10934 - DNA, 20 bp, Artificial Sequence
  Description of Artificial Sequence: Synthetic oligonucleotide
  Target: PCSK9; (-) strand; PAM type: NRG; PAM sequence: CAG
tggcactggaggtcccggca

SEQ ID NO: 10935 - DNA, 20 bp, Artificial Sequence
  Description of Artificial Sequence: Synthetic oligonucleotide
  Target: PCSK9; (-) strand; PAM type: NRG; PAM sequence: CGG
gagcctggcactggaggtcc

SEQ ID NO: 10936 - DNA, 20 bp, Artificial Sequence
  Description of Artificial Sequence: Synthetic oligonucleotide
  Target: PCSK9; (-) strand; PAM type: NRG; PAM sequence: AGG
tgcacagagcctggcactgg

SEQ ID NO: 10937 - DNA, 20 bp, Artificial Sequence
  Description of Artificial Sequence: Synthetic oligonucleotide
  Target: PCSK9; (-) strand; PAM type: NRG; PAM sequence: GAG
ctgcacagagcctggcactg

SEQ ID NO: 10938 - DNA, 20 bp, Artificial Sequence
  Description of Artificial Sequence: Synthetic oligonucleotide
  Target: PCSK9; (-) strand; PAM type: NRG; PAM sequence: TGG
ccctgcacagagcctggcac

SEQ ID NO: 10939 - DNA, 20 bp, Artificial Sequence
  Description of Artificial Sequence: Synthetic oligonucleotide
  Target: PCSK9; (-) strand; PAM type: NRG; PAM sequence: TGG
tggtccccctgcacagagcc

SEQ ID NO: 10940 - DNA, 20 bp, Artificial Sequence
  Description of Artificial Sequence: Synthetic oligonucleotide
  Target: PCSK9; (-) strand; PAM type: NRG; PAM sequence: GAG
atctctggtccccctgcaca

SEQ ID NO: 10941 - DNA, 20 bp, Artificial Sequence
  Description of Artificial Sequence: Synthetic oligonucleotide
  Target: PCSK9; (-) strand; PAM type: NRG; PAM sequence: CAG
tcatctctggtccccctgca

SEQ ID NO: 10942 - DNA, 20 bp, Artificial Sequence
  Description of Artificial Sequence: Synthetic oligonucleotide
  Target: PCSK9; (-) strand; PAM type: NRG; PAM sequence: TGG
catcaggcctacttcatctc

SEQ ID NO: 10943 - DNA, 20 bp, Artificial Sequence
  Description of Artificial Sequence: Synthetic oligonucleotide
  Target: PCSK9; (-) strand; PAM type: NRG; PAM sequence: AGG
gtgtccttgaaggcaccatc

SEQ ID NO: 10944 - DNA, 20 bp, Artificial Sequence
  Description of Artificial Sequence: Synthetic oligonucleotide
  Target: PCSK9; (-) strand; PAM type: NRG; PAM sequence: CAG
agtgtccttgaaggcaccat

SEQ ID NO: 10945 - DNA, 20 bp, Artificial Sequence
  Description of Artificial Sequence: Synthetic oligonucleotide
  Target: PCSK9; (-) strand; PAM type: NRG; PAM sequence: AGG
atcagactgagtgtccttga

SEQ ID NO: 10946 - DNA, 20 bp, Artificial Sequence
  Description of Artificial Sequence: Synthetic oligonucleotide
  Target: PCSK9; (-) strand; PAM type: NRG; PAM sequence: AAG
catcagactgagtgtccttg

SEQ ID NO: 10947 - DNA, 20 bp, Artificial Sequence
  Description of Artificial Sequence: Synthetic oligonucleotide
  Target: PCSK9; (-) strand; PAM type: NRG; PAM sequence: GAG
ctcgcctccctcatcagact

SEQ ID NO: 10948 - DNA, 20 bp, Artificial Sequence
  Description of Artificial Sequence: Synthetic oligonucleotide
  Target: PCSK9; (-) strand; PAM type: NRG; PAM sequence: CAG
tgtgcactcgcctccctcat

SEQ ID NO: 10949 - DNA, 20 bp, Artificial Sequence
  Description of Artificial Sequence: Synthetic oligonucleotide
  Target: PCSK9; (-) strand; PAM type: NRG; PAM sequence: CAG
cctctgggctccctctaata

SEQ ID NO: 10950 - DNA, 20 bp, Artificial Sequence
  Description of Artificial Sequence: Synthetic oligonucleotide
  Target: PCSK9; (-) strand; PAM type: NRG; PAM sequence: GGG
gctgggcaggtgcctcctct

SEQ ID NO: 10951 - DNA, 20 bp, Artificial Sequence
  Description of Artificial Sequence: Synthetic oligonucleotide
  Target: PCSK9; (-) strand; PAM type: NRG; PAM sequence: TGG
ggctgggcaggtgcctcctc

SEQ ID NO: 10952 - DNA, 20 bp, Artificial Sequence
  Description of Artificial Sequence: Synthetic oligonucleotide
  Target: PCSK9; (-) strand; PAM type: NRG; PAM sequence: AGG
ctctgaccctcgggctgggc

SEQ ID NO: 10953 - DNA, 20 bp, Artificial Sequence
  Description of Artificial Sequence: Synthetic oligonucleotide
  Target: PCSK9; (-) strand; PAM type: NRG; PAM sequence: CAG
tctctgaccctcgggctggg

SEQ ID NO: 10954 - DNA, 20 bp, Artificial Sequence
  Description of Artificial Sequence: Synthetic oligonucleotide
  Target: PCSK9; (-) strand; PAM type: NRG; PAM sequence: GGG
ccttctctgaccctcgggct

SEQ ID NO: 10955 - DNA, 20 bp, Artificial Sequence
  Description of Artificial Sequence: Synthetic oligonucleotide
  Target: PCSK9; (-) strand; PAM type: NRG; PAM sequence: TGG
gccttctctgaccctcgggc

SEQ ID NO: 10956 - DNA, 20 bp, Artificial Sequence
  Description of Artificial Sequence: Synthetic oligonucleotide
  Target: PCSK9; (-) strand; PAM type: NRG; PAM sequence: GGG
agatgccttctctgaccctc

SEQ ID NO: 10957 - DNA, 20 bp, Artificial Sequence
  Description of Artificial Sequence: Synthetic oligonucleotide
  Target: PCSK9; (-) strand; PAM type: NRG; PAM sequence: CGG
aagatgccttctctgaccct

SEQ ID NO: 10958 - DNA, 20 bp, Artificial Sequence
  Description of Artificial Sequence: Synthetic oligonucleotide
  Target: PCSK9; (-) strand; PAM type: NRG; PAM sequence: AAG
cgatcaaatgtccctcctcc

SEQ ID NO: 10959 - DNA, 20 bp, Artificial Sequence
  Description of Artificial Sequence: Synthetic oligonucleotide
  Target: PCSK9; (-) strand; PAM type: NRG; PAM sequence: AAG
tgaactcctattcatccatc

SEQ ID NO: 10960 - DNA, 20 bp, Artificial Sequence
  Description of Artificial Sequence: Synthetic oligonucleotide
  Target: PCSK9; (-) strand; PAM type: NRG; PAM sequence: AGG
tagttgctgtcttatcggcc

SEQ ID NO: 10961 - DNA, 20 bp, Artificial Sequence
  Description of Artificial Sequence: Synthetic oligonucleotide
  Target: PCSK9; (-) strand; PAM type: NRG; PAM sequence: CAG
gtagttgctgtcttatcggc

SEQ ID NO: 10962 - DNA, 20 bp, Artificial Sequence
  Description of Artificial Sequence: Synthetic oligonucleotide
  Target: PCSK9; (-) strand; PAM type: NRG; PAM sequence: CGG
cttggtagttgctgtcttat

SEQ ID NO: 10963 - DNA, 20 bp, Artificial Sequence
  Description of Artificial Sequence: Synthetic oligonucleotide
  Target: PCSK9; (-) strand; PAM type: NRG; PAM sequence: TAG
ctcacacctctaagccttgg

SEQ ID NO: 10964 - DNA, 20 bp, Artificial Sequence
  Description of Artificial Sequence: Synthetic oligonucleotide
  Target: PCSK9; (-) strand; PAM type: NRG; PAM sequence: TGG
cctctcacacctctaagcct

SEQ ID NO: 10965 - DNA, 20 bp, Artificial Sequence
  Description of Artificial Sequence: Synthetic oligonucleotide
  Target: PCSK9; (-) strand; PAM type: NRG; PAM sequence: AAG
cagcctcctctcacacctct

SEQ ID NO: 10966 - DNA, 20 bp, Artificial Sequence
  Description of Artificial Sequence: Synthetic oligonucleotide
  Target: PCSK9; (-) strand; PAM type: NRG; PAM sequence: CAG
ccttactcagtgaggtaaga

SEQ ID NO: 10967 - DNA, 20 bp, Artificial Sequence
  Description of Artificial Sequence: Synthetic oligonucleotide
  Target: PCSK9; (-) strand; PAM type: NRG; PAM sequence: AAG
cagtccttactcagtgaggt

SEQ ID NO: 10968 - DNA, 20 bp, Artificial Sequence
  Description of Artificial Sequence: Synthetic oligonucleotide
  Target: PCSK9; (-) strand; PAM type: NRG; PAM sequence: AGG
cctgcagtccttactcagtg

SEQ ID NO: 10969 - DNA, 20 bp, Artificial Sequence
  Description of Artificial Sequence: Synthetic oligonucleotide
  Target: PCSK9; (-) strand; PAM type: NRG; PAM sequence: GAG
gcctgcagtccttactcagt

SEQ ID NO: 10970 - DNA, 20 bp, Artificial Sequence
  Description of Artificial Sequence: Synthetic oligonucleotide
  Target: PCSK9; (-) strand; PAM type: NRG; PAM sequence: CAG
agccgcctgcagtccttact

SEQ ID NO: 10971 - DNA, 20 bp, Artificial Sequence
  Description of Artificial Sequence: Synthetic oligonucleotide
  Target: PCSK9; (-) strand; PAM type: NRG; PAM sequence: CAG
tctcgaaggtaagccgcctg

SEQ ID NO: 10972 - DNA, 20 bp, Artificial Sequence
  Description of Artificial Sequence: Synthetic oligonucleotide
  Target: PCSK9; (-) strand; PAM type: NRG; PAM sequence: AAG
taagctctcttctcgaaggt

SEQ ID NO: 10973 - DNA, 20 bp, Artificial Sequence
  Description of Artificial Sequence: Synthetic oligonucleotide
  Target: PCSK9; (-) strand; PAM type: NRG; PAM sequence: AGG
acactaagctctcttctcga

SEQ ID NO: 10974 - DNA, 20 bp, Artificial Sequence
  Description of Artificial Sequence: Synthetic oligonucleotide
  Target: PCSK9; (-) strand; PAM type: NRG; PAM sequence: AAG
gacactaagctctcttctcg

SEQ ID NO: 10975 - DNA, 20 bp, Artificial Sequence
  Description of Artificial Sequence: Synthetic oligonucleotide
  Target: PCSK9; (-) strand; PAM type: NRG; PAM sequence: AAG
cacacgtgcacacagacact

SEQ ID NO: 10976 - DNA, 20 bp, Artificial Sequence
  Description of Artificial Sequence: Synthetic oligonucleotide
  Target: PCSK9; (-) strand; PAM type: NRG; PAM sequence: CAG
cacacaaacacacgtgcaca

SEQ ID NO: 10977 - DNA, 20 bp, Artificial Sequence
  Description of Artificial Sequence: Synthetic oligonucleotide
  Target: PCSK9; (-) strand; PAM type: NRG; PAM sequence: CAG
ccccagcaggggactcctgc

SEQ ID NO: 10978 - DNA, 20 bp, Artificial Sequence
  Description of Artificial Sequence: Synthetic oligonucleotide
  Target: PCSK9; (-) strand; PAM type: NRG; PAM sequence: GGG
cggccctcctgccccagcag

SEQ ID NO: 10979 - DNA, 20 bp, Artificial Sequence
  Description of Artificial Sequence: Synthetic oligonucleotide
  Target: PCSK9; (-) strand; PAM type: NRG; PAM sequence: GGG
ccggccctcctgccccagca

SEQ ID NO: 10980 - DNA, 20 bp, Artificial Sequence
  Description of Artificial Sequence: Synthetic oligonucleotide
  Target: PCSK9; (-) strand; PAM type: NRG; PAM sequence: AGG
cccggccctcctgccccagc

SEQ ID NO: 10981 - DNA, 20 bp, Artificial Sequence
  Description of Artificial Sequence: Synthetic oligonucleotide
  Target: PCSK9; (-) strand; PAM type: NRG; PAM sequence: CAG
gcccggccctcctgccccag

SEQ ID NO: 10982 - DNA, 20 bp, Artificial Sequence
  Description of Artificial Sequence: Synthetic oligonucleotide
  Target: PCSK9; (-) strand; PAM type: NRG; PAM sequence: CAG
atggcccggccctcctgccc

SEQ ID NO: 10983 - DNA, 20 bp, Artificial Sequence
  Description of Artificial Sequence: Synthetic oligonucleotide
  Target: PCSK9; (-) strand; PAM type: NRG; PAM sequence: CGG
ggtgaaagatggtgatggcc

SEQ ID NO: 10984 - DNA, 20 bp, Artificial Sequence
  Description of Artificial Sequence: Synthetic oligonucleotide
  Target: PCSK9; (-) strand; PAM type: NRG; PAM sequence: TGG
tgaatggtgaaagatggtga

SEQ ID NO: 10985 - DNA, 20 bp, Artificial Sequence
  Description of Artificial Sequence: Synthetic oligonucleotide
  Target: PCSK9; (-) strand; PAM type: NRG; PAM sequence: TGG
caggggtgaatggtgaaaga

SEQ ID NO: 10986 - DNA, 20 bp, Artificial Sequence
  Description of Artificial Sequence: Synthetic oligonucleotide
  Target: PCSK9; (-) strand; PAM type: NRG; PAM sequence: AAG
ggtgcaggggtgaatggtga

SEQ ID NO: 10987 - DNA, 20 bp, Artificial Sequence
  Description of Artificial Sequence: Synthetic oligonucleotide
  Target: PCSK9; (-) strand; PAM type: NRG; PAM sequence: TGG
atgcctggtgcaggggtgaa

SEQ ID NO: 10988 - DNA, 20 bp, Artificial Sequence
  Description of Artificial Sequence: Synthetic oligonucleotide
  Target: PCSK9; (-) strand; PAM type: NRG; PAM sequence: GGG
ggctgcaatgcctggtgcag

SEQ ID NO: 10989 - DNA, 20 bp, Artificial Sequence
  Description of Artificial Sequence: Synthetic oligonucleotide
  Target: PCSK9; (-) strand; PAM type: NRG; PAM sequence: GGG
tggctgcaatgcctggtgca

SEQ ID NO: 10990 - DNA, 20 bp, Artificial Sequence
  Description of Artificial Sequence: Synthetic oligonucleotide
  Target: PCSK9; (-) strand; PAM type: NRG; PAM sequence: AGG
atggctgcaatgcctggtgc

SEQ ID NO: 10991 - DNA, 20 bp, Artificial Sequence
  Description of Artificial Sequence: Synthetic oligonucleotide
  Target: PCSK9; (-) strand; PAM type: NRG; PAM sequence: CAG
catggctgcaatgcctggtg

SEQ ID NO: 10992 - DNA, 20 bp, Artificial Sequence
  Description of Artificial Sequence: Synthetic oligonucleotide
  Target: PCSK9; (-) strand; PAM type: NRG; PAM sequence: TGG
agcatcatggctgcaatgcc

SEQ ID NO: 10993 - DNA, 20 bp, Artificial Sequence
  Description of Artificial Sequence: Synthetic oligonucleotide
  Target: PCSK9; (-) strand; PAM type: NRG; PAM sequence: TGG
cggctcggcagacagcatca

SEQ ID NO: 10994 - DNA, 20 bp, Artificial Sequence
  Description of Artificial Sequence: Synthetic oligonucleotide
  Target: PCSK9; (-) strand; PAM type: NRG; PAM sequence: CAG
gtgagctccggctcggcaga

SEQ ID NO: 10995 - DNA, 20 bp, Artificial Sequence
  Description of Artificial Sequence: Synthetic oligonucleotide
  Target: PCSK9; (-) strand; PAM type: NRG; PAM sequence: CAG
cagggtgagctccggctcgg

SEQ ID NO: 10996 - DNA, 20 bp, Artificial Sequence
  Description of Artificial Sequence: Synthetic oligonucleotide
  Target: PCSK9; (-) strand; PAM type: NRG; PAM sequence: CGG
ggccagggtgagctccggct

SEQ ID NO: 10997 - DNA, 20 bp, Artificial Sequence
  Description of Artificial Sequence: Synthetic oligonucleotide
  Target: PCSK9; (-) strand; PAM type: NRG; PAM sequence: CGG
aactcggccagggtgagctc

SEQ ID NO: 10998 - DNA, 20 bp, Artificial Sequence
  Description of Artificial Sequence: Synthetic oligonucleotide
  Target: PCSK9; (-) strand; PAM type: NRG; PAM sequence: GAG
tgcctcaactcggccagggt

SEQ ID NO: 10999 - DNA, 20 bp, Artificial Sequence
  Description of Artificial Sequence: Synthetic oligonucleotide
  Target: PCSK9; (-) strand; PAM type: NRG; PAM sequence: GGG
tctctgcctcaactcggcca

SEQ ID NO: 11000 - DNA, 20 bp, Artificial Sequence
  Description of Artificial Sequence: Synthetic oligonucleotide
  Target: PCSK9; (-) strand; PAM type: NRG; PAM sequence: AGG
gtctctgcctcaactcggcc

SEQ ID NO: 11001 - DNA, 20 bp, Artificial Sequence
  Description of Artificial Sequence: Synthetic oligonucleotide
  Target: PCSK9; (-) strand; PAM type: NRG; PAM sequence: CAG
agtctctgcctcaactcggc

SEQ ID NO: 11002 - DNA, 20 bp, Artificial Sequence
  Description of Artificial Sequence: Synthetic oligonucleotide
  Target: PCSK9; (-) strand; PAM type: NRG; PAM sequence: CGG
gatcagtctctgcctcaact

SEQ ID NO: 11003 - DNA, 20 bp, Artificial Sequence
  Description of Artificial Sequence: Synthetic oligonucleotide
  Target: PCSK9; (-) strand; PAM type: NRG; PAM sequence: CAG
tctttggcagagaagtggat

SEQ ID NO: 11004 - DNA, 20 bp, Artificial Sequence
  Description of Artificial Sequence: Synthetic oligonucleotide
  Target: PCSK9; (-) strand; PAM type: NRG; PAM sequence: TGG
tgacatctttggcagagaag

SEQ ID NO: 11005 - DNA, 20 bp, Artificial Sequence
  Description of Artificial Sequence: Synthetic oligonucleotide
  Target: PCSK9; (-) strand; PAM type: NRG; PAM sequence: AAG
tgatgacatctttggcagag

SEQ ID NO: 11006 - DNA, 20 bp, Artificial Sequence
  Description of Artificial Sequence: Synthetic oligonucleotide
  Target: PCSK9; (-) strand; PAM type: NRG; PAM sequence: GAG
cattgatgacatctttggca

SEQ ID NO: 11007 - DNA, 20 bp, Artificial Sequence
  Description of Artificial Sequence: Synthetic oligonucleotide
  Target: PCSK9; (-) strand; PAM type: NRG; PAM sequence: CAG
ctcattgatgacatctttgg

SEQ ID NO: 11008 - DNA, 20 bp, Artificial Sequence
  Description of Artificial Sequence: Synthetic oligonucleotide
  Target: PCSK9; (-) strand; PAM type: NRG; PAM sequence: TGG
ggcctcattgatgacatctt

SEQ ID NO: 11009 - DNA, 20 bp, Artificial Sequence
  Description of Artificial Sequence: Synthetic oligonucleotide
  Target: PCSK9; (-) strand; PAM type: NRG; PAM sequence: AGG
ccgctggtcctcagggaacc

SEQ ID NO: 11010 - DNA, 20 bp, Artificial Sequence
  Description of Artificial Sequence: Synthetic oligonucleotide
  Target: PCSK9; (-) strand; PAM type: NRG; PAM sequence: CAG
cccgctggtcctcagggaac

SEQ ID NO: 11011 - DNA, 20 bp, Artificial Sequence
  Description of Artificial Sequence: Synthetic oligonucleotide
  Target: PCSK9; (-) strand; PAM type: NRG; PAM sequence: GGG
tcagtacccgctggtcctca

SEQ ID NO: 11012 - DNA, 20 bp, Artificial Sequence
  Description of Artificial Sequence: Synthetic oligonucleotide
  Target: PCSK9; (-) strand; PAM type: NRG; PAM sequence: AGG
gtcagtacccgctggtcctc

SEQ ID NO: 11013 - DNA, 20 bp, Artificial Sequence
  Description of Artificial Sequence: Synthetic oligonucleotide
  Target: PCSK9; (-) strand; PAM type: NRG; PAM sequence: CAG
ggtcagtacccgctggtcct

SEQ ID NO: 11014 - DNA, 20 bp, Artificial Sequence
  Description of Artificial Sequence: Synthetic oligonucleotide
  Target: PCSK9; (-) strand; PAM type: NRG; PAM sequence: TGG
ggttgggggtcagtacccgc

SEQ ID NO: 11015 - DNA, 20 bp, Artificial Sequence
  Description of Artificial Sequence: Synthetic oligonucleotide
  Target: PCSK9; (-) strand; PAM type: NRG; PAM sequence: CAG
gcggccaccaggttgggggt

SEQ ID NO: 11016 - DNA, 20 bp, Artificial Sequence
  Description of Artificial Sequence: Synthetic oligonucleotide
  Target: PCSK9; (-) strand; PAM type: NRG; PAM sequence: GGG
cagggcggccaccaggttgg

SEQ ID NO: 11017 - DNA, 20 bp, Artificial Sequence
  Description of Artificial Sequence: Synthetic oligonucleotide
  Target: PCSK9; (-) strand; PAM type: NRG; PAM sequence: GGG
gcagggcggccaccaggttg

SEQ ID NO: 11018 - DNA, 20 bp, Artificial Sequence
  Description of Artificial Sequence: Synthetic oligonucleotide
  Target: PCSK9; (-) strand; PAM type: NRG; PAM sequence: GGG
ggcagggcggccaccaggtt

SEQ ID NO: 11019 - DNA, 20 bp, Artificial Sequence
  Description of Artificial Sequence: Synthetic oligonucleotide
  Target: PCSK9; (-) strand; PAM type: NRG; PAM sequence: TGG
gggcagggcggccaccaggt

SEQ ID NO: 11020 - DNA, 20 bp, Artificial Sequence
  Description of Artificial Sequence: Synthetic oligonucleotide
  Target: PCSK9; (-) strand; PAM type: NRG; PAM sequence: AGG
tggggggcagggcggccacc

SEQ ID NO: 11021 - DNA, 20 bp, Artificial Sequence
  Description of Artificial Sequence: Synthetic oligonucleotide
  Target: PCSK9; (-) strand; PAM type: NRG; PAM sequence: CAG
ctggggggcagggcggccac

SEQ ID NO: 11022 - DNA, 20 bp, Artificial Sequence
  Description of Artificial Sequence: Synthetic oligonucleotide
  Target: PCSK9; (-) strand; PAM type: NRG; PAM sequence: CGG
atgggtgctggggggcaggg

SEQ ID NO: 11023 - DNA, 20 bp, Artificial Sequence
  Description of Artificial Sequence: Synthetic oligonucleotide
  Target: PCSK9; (-) strand; PAM type: NRG; PAM sequence: GGG
cccatgggtgctggggggca

SEQ ID NO: 11024 - DNA, 20 bp, Artificial Sequence
  Description of Artificial Sequence: Synthetic oligonucleotide
  Target: PCSK9; (-) strand; PAM type: NRG; PAM sequence: AGG
ccccatgggtgctggggggc

SEQ ID NO: 11025 - DNA, 20 bp, Artificial Sequence
  Description of Artificial Sequence: Synthetic oligonucleotide
  Target: PCSK9; (-) strand; PAM type: NRG; PAM sequence: CAG
gccccatgggtgctgggggg

SEQ ID NO: 11026 - DNA, 20 bp, Artificial Sequence
  Description of Artificial Sequence: Synthetic oligonucleotide
  Target: PCSK9; (-) strand; PAM type: NRG; PAM sequence: GGG
cctgccccatgggtgctggg

SEQ ID NO: 11027 - DNA, 20 bp, Artificial Sequence
  Description of Artificial Sequence: Synthetic oligonucleotide
  Target: PCSK9; (-) strand; PAM type: NRG; PAM sequence: GGG
acctgccccatgggtgctgg

SEQ ID NO: 11028 - DNA, 20 bp, Artificial Sequence
  Description of Artificial Sequence: Synthetic oligonucleotide
  Target: PCSK9; (-) strand; PAM type: NRG; PAM sequence: GGG
tacctgccccatgggtgctg

SEQ ID NO: 11029 - DNA, 20 bp, Artificial Sequence
  Description of Artificial Sequence: Synthetic oligonucleotide
  Target: PCSK9; (-) strand; PAM type: NRG; PAM sequence: GGG
ttacctgccccatgggtgct

SEQ ID NO: 11030 - DNA, 20 bp, Artificial Sequence
  Description of Artificial Sequence: Synthetic oligonucleotide
  Target: PCSK9; (-) strand; PAM type: NRG; PAM sequence: TGG
cttacctgccccatgggtgc

SEQ ID NO: 11031 - DNA, 20 bp, Artificial Sequence
  Description of Artificial Sequence: Synthetic oligonucleotide
  Target: PCSK9; (-) strand; PAM type: NRG; PAM sequence: GGG
atcctgcttacctgccccat

SEQ ID NO: 11032 - DNA, 20 bp, Artificial Sequence
  Description of Artificial Sequence: Synthetic oligonucleotide
  Target: PCSK9; (-) strand; PAM type: NRG; PAM sequence: TGG
catcctgcttacctgcccca

SEQ ID NO: 11033 - DNA, 20 bp, Artificial Sequence
  Description of Artificial Sequence: Synthetic oligonucleotide
  Target: PCSK9; (-) strand; PAM type: NRG; PAM sequence: TGG
agacctcccaagccccagcc

SEQ ID NO: 11034 - DNA, 20 bp, Artificial Sequence
  Description of Artificial Sequence: Synthetic oligonucleotide
  Target: PCSK9; (-) strand; PAM type: NRG; PAM sequence: CAG
cacacagacctcccaagccc

SEQ ID NO: 11035 - DNA, 20 bp, Artificial Sequence
  Description of Artificial Sequence: Synthetic oligonucleotide
  Target: PCSK9; (-) strand; PAM type: NRG; PAM sequence: AAG
caaggtcacacagacctccc

SEQ ID NO: 11036 - DNA, 20 bp, Artificial Sequence
  Description of Artificial Sequence: Synthetic oligonucleotide
  Target: PCSK9; (-) strand; PAM type: NRG; PAM sequence: CAG
gagagactgtcaaggtcaca

SEQ ID NO: 11037 - DNA, 20 bp, Artificial Sequence
  Description of Artificial Sequence: Synthetic oligonucleotide
  Target: PCSK9; (-) strand; PAM type: NRG; PAM sequence: AGG
ggagaagggagagactgtca

SEQ ID NO: 11038 - DNA, 20 bp, Artificial Sequence
  Description of Artificial Sequence: Synthetic oligonucleotide
  Target: PCSK9; (-) strand; PAM type: NRG; PAM sequence: AAG
gggagaagggagagactgtc

SEQ ID NO: 11039 - DNA, 20 bp, Artificial Sequence
  Description of Artificial Sequence: Synthetic oligonucleotide
  Target: PCSK9; (-) strand; PAM type: NRG; PAM sequence: GAG
cacagacaagggagaaggga

SEQ ID NO: 11040 - DNA, 20 bp, Artificial Sequence
  Description of Artificial Sequence: Synthetic oligonucleotide
  Target: PCSK9; (-) strand; PAM type: NRG; PAM sequence: GAG
tacacagacaagggagaagg

SEQ ID NO: 11041 - DNA, 20 bp, Artificial Sequence
  Description of Artificial Sequence: Synthetic oligonucleotide
  Target: PCSK9; (-) strand; PAM type: NRG; PAM sequence: GGG
cttacacagacaagggagaa

SEQ ID NO: 11042 - DNA, 20 bp, Artificial Sequence
  Description of Artificial Sequence: Synthetic oligonucleotide
  Target: PCSK9; (-) strand; PAM type: NRG; PAM sequence: AGG
ccttacacagacaagggaga

SEQ ID NO: 11043 - DNA, 20 bp, Artificial Sequence
  Description of Artificial Sequence: Synthetic oligonucleotide
  Target: PCSK9; (-) strand; PAM type: NRG; PAM sequence: AAG
tccttacacagacaagggag

SEQ ID NO: 11044 - DNA, 20 bp, Artificial Sequence
  Description of Artificial Sequence: Synthetic oligonucleotide
  Target: PCSK9; (-) strand; PAM type: NRG; PAM sequence: GAG
tcctccttacacagacaagg

SEQ ID NO: 11045 - DNA, 20 bp, Artificial Sequence
  Description of Artificial Sequence: Synthetic oligonucleotide
  Target: PCSK9; (-) strand; PAM type: NRG; PAM sequence: GGG
catcctccttacacagacaa

SEQ ID NO: 11046 - DNA, 20 bp, Artificial Sequence
  Description of Artificial Sequence: Synthetic oligonucleotide
  Target: PCSK9; (-) strand; PAM type: NRG; PAM sequence: AGG
tcatcctccttacacagaca

SEQ ID NO: 11047 - DNA, 20 bp, Artificial Sequence
  Description of Artificial Sequence: Synthetic oligonucleotide
  Target: PCSK9; (-) strand; PAM type: NRG; PAM sequence: AAG
gtcatcctccttacacagac

SEQ ID NO: 11048 - DNA, 20 bp, Artificial Sequence
  Description of Artificial Sequence: Synthetic oligonucleotide
  Target: PCSK9; (-) strand; PAM type: NRG; PAM sequence: CAG
gtggcgtcatcctccttaca

SEQ ID NO: 11049 - DNA, 20 bp, Artificial Sequence
  Description of Artificial Sequence: Synthetic oligonucleotide
  Target: PCSK9; (-) strand; PAM type: NRG; PAM sequence: TGG
tcatttaatcctatttaagg

SEQ ID NO: 11050 - DNA, 20 bp, Artificial Sequence
  Description of Artificial Sequence: Synthetic oligonucleotide
  Target: PCSK9; (-) strand; PAM type: NRG; PAM sequence: AGG
ttctcatttaatcctattta

SEQ ID NO: 11051 - DNA, 20 bp, Artificial Sequence
  Description of Artificial Sequence: Synthetic oligonucleotide
  Target: PCSK9; (-) strand; PAM type: NRG; PAM sequence: AAG
attctcatttaatcctattt

SEQ ID NO: 11052 - DNA, 20 bp, Artificial Sequence
  Description of Artificial Sequence: Synthetic oligonucleotide
  Target: PCSK9; (-) strand; PAM type: NRG; PAM sequence: GAG
aatattgcacagccctttca

SEQ ID NO: 11053 - DNA, 20 bp, Artificial Sequence
  Description of Artificial Sequence: Synthetic oligonucleotide
  Target: PCSK9; (-) strand; PAM type: NRG; PAM sequence: CAG
aaaatattgcacagcccttt

SEQ ID NO: 11054 - DNA, 20 bp, Artificial Sequence
  Description of Artificial Sequence: Synthetic oligonucleotide
  Target: PCSK9; (-) strand; PAM type: NRG; PAM sequence: CAG
cacgttatgaaaatattgca

SEQ ID NO: 11055 - DNA, 20 bp, Artificial Sequence
  Description of Artificial Sequence: Synthetic oligonucleotide
  Target: PCSK9; (-) strand; PAM type: NRG; PAM sequence: AAG
gtaggagagaggagggctta

SEQ ID NO: 11056 - DNA, 20 bp, Artificial Sequence
  Description of Artificial Sequence: Synthetic oligonucleotide
  Target: PCSK9; (-) strand; PAM type: NRG; PAM sequence: GGG
gttcatggtaggagagagga

SEQ ID NO: 11057 - DNA, 20 bp, Artificial Sequence
  Description of Artificial Sequence: Synthetic oligonucleotide
  Target: PCSK9; (-) strand; PAM type: NRG; PAM sequence: AGG
agttcatggtaggagagagg

SEQ ID NO: 11058 - DNA, 20 bp, Artificial Sequence
  Description of Artificial Sequence: Synthetic oligonucleotide
  Target: PCSK9; (-) strand; PAM type: NRG; PAM sequence: GAG
tagttcatggtaggagagag

SEQ ID NO: 11059 - DNA, 20 bp, Artificial Sequence
  Description of Artificial Sequence: Synthetic oligonucleotide
  Target: PCSK9; (-) strand; PAM type: NRG; PAM sequence: AGG
tttagttcatggtaggagag

SEQ ID NO: 11060 - DNA, 20 bp, Artificial Sequence
  Description of Artificial Sequence: Synthetic oligonucleotide
  Target: PCSK9; (-) strand; PAM type: NRG; PAM sequence: GAG
ctttagttcatggtaggaga

SEQ ID NO: 11061 - DNA, 20 bp, Artificial Sequence
  Description of Artificial Sequence: Synthetic oligonucleotide
  Target: PCSK9; (-) strand; PAM type: NRG; PAM sequence: GAG
atctttagttcatggtagga

SEQ ID NO: 11062 - DNA, 20 bp, Artificial Sequence
  Description of Artificial Sequence: Synthetic oligonucleotide
  Target: PCSK9; (-) strand; PAM type: NRG; PAM sequence: GAG
aaatctttagttcatggtag

SEQ ID NO: 11063 - DNA, 20 bp, Artificial Sequence
  Description of Artificial Sequence: Synthetic oligonucleotide
  Target: PCSK9; (-) strand; PAM type: NRG; PAM sequence: AGG
agaaatctttagttcatggt

SEQ ID NO: 11064 - DNA, 20 bp, Artificial Sequence
  Description of Artificial Sequence: Synthetic oligonucleotide
  Target: PCSK9; (-) strand; PAM type: NRG; PAM sequence: TAG
cagaaatctttagttcatgg

SEQ ID NO: 11065 - DNA, 20 bp, Artificial Sequence
  Description of Artificial Sequence: Synthetic oligonucleotide
  Target: PCSK9; (-) strand; PAM type: NRG; PAM sequence: TGG
ccacagaaatctttagttca

SEQ ID NO: 11066 - DNA, 20 bp, Artificial Sequence
  Description of Artificial Sequence: Synthetic oligonucleotide
  Target: PCSK9; (-) strand; PAM type: NRG; PAM sequence: TAG
gggacctccacagaaatctt

SEQ ID NO: 11067 - DNA, 20 bp, Artificial Sequence
  Description of Artificial Sequence: Synthetic oligonucleotide
  Target: PCSK9; (-) strand; PAM type: NRG; PAM sequence: CAG
tgggagtgaggggacctcca

SEQ ID NO: 11068 - DNA, 20 bp, Artificial Sequence
  Description of Artificial Sequence: Synthetic oligonucleotide
  Target: PCSK9; (-) strand; PAM type: NRG; PAM sequence: GGG
gagggggtgctgggagtgag

SEQ ID NO: 11069 - DNA, 20 bp, Artificial Sequence
  Description of Artificial Sequence: Synthetic oligonucleotide
  Target: PCSK9; (-) strand; PAM type: NRG; PAM sequence: GGG
ggagggggtgctgggagtga

SEQ ID NO: 11070 - DNA, 20 bp, Artificial Sequence
  Description of Artificial Sequence: Synthetic oligonucleotide
  Target: PCSK9; (-) strand; PAM type: NRG; PAM sequence: AGG
aggagggggtgctgggagtg

SEQ ID NO: 11071 - DNA, 20 bp, Artificial Sequence
  Description of Artificial Sequence: Synthetic oligonucleotide
  Target: PCSK9; (-) strand; PAM type: NRG; PAM sequence: GAG
gaggagggggtgctgggagt

SEQ ID NO: 11072 - DNA, 20 bp, Artificial Sequence
  Description of Artificial Sequence: Synthetic oligonucleotide
  Target: PCSK9; (-) strand; PAM type: NRG; PAM sequence: GAG
ggatgaggagggggtgctgg

SEQ ID NO: 11073 - DNA, 20 bp, Artificial Sequence
  Description of Artificial Sequence: Synthetic oligonucleotide
  Target: PCSK9; (-) strand; PAM type: NRG; PAM sequence: GGG
tgggatgaggagggggtgct

SEQ ID NO: 11074 - DNA, 20 bp, Artificial Sequence
  Description of Artificial Sequence: Synthetic oligonucleotide
  Target: PCSK9; (-) strand; PAM type: NRG; PAM sequence: TGG
ctgggatgaggagggggtgc

SEQ ID NO: 11075 - DNA, 20 bp, Artificial Sequence
  Description of Artificial Sequence: Synthetic oligonucleotide
  Target: PCSK9; (-) strand; PAM type: NRG; PAM sequence: GGG
aagggcctgggatgaggagg

SEQ ID NO: 11076 - DNA, 20 bp, Artificial Sequence
  Description of Artificial Sequence: Synthetic oligonucleotide
  Target: PCSK9; (-) strand; PAM type: NRG; PAM sequence: GGG
aaagggcctgggatgaggag

SEQ ID NO: 11077 - DNA, 20 bp, Artificial Sequence
  Description of Artificial Sequence: Synthetic oligonucleotide
  Target: PCSK9; (-) strand; PAM type: NRG; PAM sequence: GGG
aaaagggcctgggatgagga

SEQ ID NO: 11078 - DNA, 20 bp, Artificial Sequence
  Description of Artificial Sequence: Synthetic oligonucleotide
  Target: PCSK9; (-) strand; PAM type: NRG; PAM sequence: AGG
aaaaagggcctgggatgagg

SEQ ID NO: 11079 - DNA, 20 bp, Artificial Sequence
  Description of Artificial Sequence: Synthetic oligonucleotide
  Target: PCSK9; (-) strand; PAM type: NRG; PAM sequence: GAG
caaaaagggcctgggatgag

SEQ ID NO: 11080 - DNA, 20 bp, Artificial Sequence
  Description of Artificial Sequence: Synthetic oligonucleotide
  Target: PCSK9; (-) strand; PAM type: NRG; PAM sequence: AGG
tgcaaaaagggcctgggatg

SEQ ID NO: 11081 - DNA, 20 bp, Artificial Sequence
  Description of Artificial Sequence: Synthetic oligonucleotide
  Target: PCSK9; (-) strand; PAM type: NRG; PAM sequence: GAG
ctgcaaaaagggcctgggat

SEQ ID NO: 11082 - DNA, 20 bp, Artificial Sequence
  Description of Artificial Sequence: Synthetic oligonucleotide
  Target: PCSK9; (-) strand; PAM type: NRG; PAM sequence: GGG
ccaacctgcaaaaagggcct

SEQ ID NO: 11083 - DNA, 20 bp, Artificial Sequence
  Description of Artificial Sequence: Synthetic oligonucleotide
  Target: PCSK9; (-) strand; PAM type: NRG; PAM sequence: TGG
gccaacctgcaaaaagggcc

SEQ ID NO: 11084 - DNA, 20 bp, Artificial Sequence
  Description of Artificial Sequence: Synthetic oligonucleotide
  Target: PCSK9; (-) strand; PAM type: NRG; PAM sequence: GGG
cagctgccaacctgcaaaaa

SEQ ID NO: 11085 - DNA, 20 bp, Artificial Sequence
  Description of Artificial Sequence: Synthetic oligonucleotide
  Target: PCSK9; (-) strand; PAM type: NRG; PAM sequence: AGG
acagctgccaacctgcaaaa

SEQ ID NO: 11086 - DNA, 20 bp, Artificial Sequence
  Description of Artificial Sequence: Synthetic oligonucleotide
  Target: PCSK9; (-) strand; PAM type: NRG; PAM sequence: AAG
aacagctgccaacctgcaaa

SEQ ID NO: 11087 - DNA, 20 bp, Artificial Sequence
  Description of Artificial Sequence: Synthetic oligonucleotide
  Target: PCSK9; (-) strand; PAM type: NRG; PAM sequence: CAG
gaccatacagtcctgcaaaa

SEQ ID NO: 11088 - DNA, 20 bp, Artificial Sequence
  Description of Artificial Sequence: Synthetic oligonucleotide
  Target: PCSK9; (-) strand; PAM type: NRG; PAM sequence: CAG
ccccgagtgtgctgaccata

SEQ ID NO: 11089 - DNA, 20 bp, Artificial Sequence
  Description of Artificial Sequence: Synthetic oligonucleotide
  Target: PCSK9; (-) strand; PAM type: NRG; PAM sequence: GAG
tggccatccgtgtaggcccc

SEQ ID NO: 11090 - DNA, 20 bp, Artificial Sequence
  Description of Artificial Sequence: Synthetic oligonucleotide
  Target: PCSK9; (-) strand; PAM type: NRG; PAM sequence: AGG
acggctgtggccatccgtgt

SEQ ID NO: 11091 - DNA, 20 bp, Artificial Sequence
  Description of Artificial Sequence: Synthetic oligonucleotide
  Target: PCSK9; (-) strand; PAM type: NRG; PAM sequence: TAG
gacggctgtggccatccgtg

SEQ ID NO: 11092 - DNA, 20 bp, Artificial Sequence
  Description of Artificial Sequence: Synthetic oligonucleotide
  Target: PCSK9; (-) strand; PAM type: NRG; PAM sequence: TGG
ggcgcagcgggcgacggctg

SEQ ID NO: 11093 - DNA, 20 bp, Artificial Sequence
  Description of Artificial Sequence: Synthetic oligonucleotide
  Target: PCSK9; (-) strand; PAM type: NRG; PAM sequence: CGG
atctggggcgcagcgggcga

SEQ ID NO: 11094 - DNA, 20 bp, Artificial Sequence
  Description of Artificial Sequence: Synthetic oligonucleotide
  Target: PCSK9; (-) strand; PAM type: NRG; PAM sequence: GGG
ctcctcatctggggcgcagc

SEQ ID NO: 11095 - DNA, 20 bp, Artificial Sequence
  Description of Artificial Sequence: Synthetic oligonucleotide
  Target: PCSK9; (-) strand; PAM type: NRG; PAM sequence: CGG
gctcctcatctggggcgcag

SEQ ID NO: 11096 - DNA, 20 bp, Artificial Sequence
  Description of Artificial Sequence: Synthetic oligonucleotide
  Target: PCSK9; (-) strand; PAM type: NRG; PAM sequence: CAG
gcagctcctcatctggggcg

SEQ ID NO: 11097 - DNA, 20 bp, Artificial Sequence
  Description of Artificial Sequence: Synthetic oligonucleotide
  Target: PCSK9; (-) strand; PAM type: NRG; PAM sequence: GGG
gctcagcagctcctcatctg

SEQ ID NO: 11098 - DNA, 20 bp, Artificial Sequence
  Description of Artificial Sequence: Synthetic oligonucleotide
  Target: PCSK9; (-) strand; PAM type: NRG; PAM sequence: GGG
agctcagcagctcctcatct

SEQ ID NO: 11099 - DNA, 20 bp, Artificial Sequence
  Description of Artificial Sequence: Synthetic oligonucleotide
  Target: PCSK9; (-) strand; PAM type: NRG; PAM sequence: TGG
cagctcagcagctcctcatc

SEQ ID NO: 11100 - DNA, 20 bp, Artificial Sequence
  Description of Artificial Sequence: Synthetic oligonucleotide
  Target: PCSK9; (-) strand; PAM type: NRG; PAM sequence: CAG
gagaaactggagcagctcag

SEQ ID NO: 11101 - DNA, 20 bp, Artificial Sequence
  Description of Artificial Sequence: Synthetic oligonucleotide
  Target: PCSK9; (-) strand; PAM type: NRG; PAM sequence: CAG
ctggagaaactggagcagct

SEQ ID NO: 11102 - DNA, 20 bp, Artificial Sequence
  Description of Artificial Sequence: Synthetic oligonucleotide
  Target: PCSK9; (-) strand; PAM type: NRG; PAM sequence: CAG
cactcctggagaaactggag

SEQ ID NO: 11103 - DNA, 20 bp, Artificial Sequence
  Description of Artificial Sequence: Synthetic oligonucleotide
  Target: PCSK9; (-) strand; PAM type: NRG; PAM sequence: GAG
tcccactcctggagaaactg

SEQ ID NO: 11104 - DNA, 20 bp, Artificial Sequence
  Description of Artificial Sequence: Synthetic oligonucleotide
  Target: PCSK9; (-) strand; PAM type: NRG; PAM sequence: TGG
cttcccactcctggagaaac

SEQ ID NO: 11105 - DNA, 20 bp, Artificial Sequence
  Description of Artificial Sequence: Synthetic oligonucleotide
  Target: PCSK9; (-) strand; PAM type: NRG; PAM sequence: GAG
cccgccgcttcccactcctg

SEQ ID NO: 11106 - DNA, 20 bp, Artificial Sequence
  Description of Artificial Sequence: Synthetic oligonucleotide
  Target: PCSK9; (-) strand; PAM type: NRG; PAM sequence: TGG
gccccgccgcttcccactcc

SEQ ID NO: 11107 - DNA, 20 bp, Artificial Sequence
  Description of Artificial Sequence: Synthetic oligonucleotide
  Target: PCSK9; (-) strand; PAM type: NRG; PAM sequence: CAG
acacacacgaaggaggggta

SEQ ID NO: 11108 - DNA, 20 bp, Artificial Sequence
  Description of Artificial Sequence: Synthetic oligonucleotide
  Target: PCSK9; (-) strand; PAM type: NRG; PAM sequence: GGG
cacacacacacacgaaggag

SEQ ID NO: 11109 - DNA, 20 bp, Artificial Sequence
  Description of Artificial Sequence: Synthetic oligonucleotide
  Target: PCSK9; (-) strand; PAM type: NRG; PAM sequence: GGG
acacacacacacacgaagga

SEQ ID NO: 11110 - DNA, 20 bp, Artificial Sequence
  Description of Artificial Sequence: Synthetic oligonucleotide
  Target: PCSK9; (-) strand; PAM type: NRG; PAM sequence: AGG
cacacacacacacacgaagg

SEQ ID NO: 11111 - DNA, 20 bp, Artificial Sequence
  Description of Artificial Sequence: Synthetic oligonucleotide
  Target: PCSK9; (-) strand; PAM type: NRG; PAM sequence: GAG
acacacacacacacacgaag

SEQ ID NO: 11112 - DNA, 20 bp, Artificial Sequence
  Description of Artificial Sequence: Synthetic oligonucleotide
  Target: PCSK9; (-) strand; PAM type: NRG; PAM sequence: AGG
acacacacacacacacacga

SEQ ID NO: 11113 - DNA, 20 bp, Artificial Sequence
  Description of Artificial Sequence: Synthetic oligonucleotide
  Target: PCSK9; (-) strand; PAM type: NRG; PAM sequence: AAG
cacacacacacacacacacg

SEQ ID NO: 11114 - DNA, 20 bp, Artificial Sequence
  Description of Artificial Sequence: Synthetic oligonucleotide
  Target: PCSK9; (-) strand; PAM type: NRG; PAM sequence: CAG
gctgggggtccctgagggcc

SEQ ID NO: 11115 - DNA, 20 bp, Artificial Sequence
  Description of Artificial Sequence: Synthetic oligonucleotide
  Target: PCSK9; (-) strand; PAM type: NRG; PAM sequence: GGG
ggcttgctgggggtccctga

SEQ ID NO: 11116 - DNA, 20 bp, Artificial Sequence
  Description of Artificial Sequence: Synthetic oligonucleotide
  Target: PCSK9; (-) strand; PAM type: NRG; PAM sequence: AGG
gggcttgctgggggtccctg

SEQ ID NO: 11117 - DNA, 20 bp, Artificial Sequence
  Description of Artificial Sequence: Synthetic oligonucleotide
  Target: PCSK9; (-) strand; PAM type: NRG; PAM sequence: GAG
ggggcttgctgggggtccct

SEQ ID NO: 11118 - DNA, 20 bp, Artificial Sequence
  Description of Artificial Sequence: Synthetic oligonucleotide
  Target: PCSK9; (-) strand; PAM type: NRG; PAM sequence: GGG
aggatggaggggcttgctgg

SEQ ID NO: 11119 - DNA, 20 bp, Artificial Sequence
  Description of Artificial Sequence: Synthetic oligonucleotide
  Target: PCSK9; (-) strand; PAM type: NRG; PAM sequence: GGG
gaggatggaggggcttgctg

SEQ ID NO: 11120 - DNA, 20 bp, Artificial Sequence
  Description of Artificial Sequence: Synthetic oligonucleotide
  Target: PCSK9; (-) strand; PAM type: NRG; PAM sequence: GGG
ggaggatggaggggcttgct

SEQ ID NO: 11121 - DNA, 20 bp, Artificial Sequence
  Description of Artificial Sequence: Synthetic oligonucleotide
  Target: PCSK9; (-) strand; PAM type: NRG; PAM sequence: TGG
tggaggatggaggggcttgc

SEQ ID NO: 11122 - DNA, 20 bp, Artificial Sequence
  Description of Artificial Sequence: Synthetic oligonucleotide
  Target: PCSK9; (-) strand; PAM type: NRG; PAM sequence: GGG
ctggagtctggaggatggag

SEQ ID NO: 11123 - DNA, 20 bp, Artificial Sequence
  Description of Artificial Sequence: Synthetic oligonucleotide
  Target: PCSK9; (-) strand; PAM type: NRG; PAM sequence: GGG
gctggagtctggaggatgga

SEQ ID NO: 11124 - DNA, 20 bp, Artificial Sequence
  Description of Artificial Sequence: Synthetic oligonucleotide
  Target: PCSK9; (-) strand; PAM type: NRG; PAM sequence: AGG
agctggagtctggaggatgg

SEQ ID NO: 11125 - DNA, 20 bp, Artificial Sequence
  Description of Artificial Sequence: Synthetic oligonucleotide
  Target: PCSK9; (-) strand; PAM type: NRG; PAM sequence: GAG
gagctggagtctggaggatg

SEQ ID NO: 11126 - DNA, 20 bp, Artificial Sequence
  Description of Artificial Sequence: Synthetic oligonucleotide
  Target: PCSK9; (-) strand; PAM type: NRG; PAM sequence: TGG
aagagctggagtctggagga

SEQ ID NO: 11127 - DNA, 20 bp, Artificial Sequence
  Description of Artificial Sequence: Synthetic oligonucleotide
  Target: PCSK9; (-) strand; PAM type: NRG; PAM sequence: AGG
acagaagagctggagtctgg

SEQ ID NO: 11128 - DNA, 20 bp, Artificial Sequence
  Description of Artificial Sequence: Synthetic oligonucleotide
  Target: PCSK9; (-) strand; PAM type: NRG; PAM sequence: GAG
tacagaagagctggagtctg

SEQ ID NO: 11129 - DNA, 20 bp, Artificial Sequence
  Description of Artificial Sequence: Synthetic oligonucleotide
  Target: PCSK9; (-) strand; PAM type: NRG; PAM sequence: TGG
cttacagaagagctggagtc

SEQ ID NO: 11130 - DNA, 20 bp, Artificial Sequence
  Description of Artificial Sequence: Synthetic oligonucleotide
  Target: PCSK9; (-) strand; PAM type: NRG; PAM sequence: GAG
gtaagcttacagaagagctg

SEQ ID NO: 11131 - DNA, 20 bp, Artificial Sequence
  Description of Artificial Sequence: Synthetic oligonucleotide
  Target: PCSK9; (-) strand; PAM type: NRG; PAM sequence: TGG
ctgtaagcttacagaagagc

SEQ ID NO: 11132 - DNA, 20 bp, Artificial Sequence
  Description of Artificial Sequence: Synthetic oligonucleotide
  Target: PCSK9; (-) strand; PAM type: NRG; PAM sequence: GAG
agccctgtaagcttacagaa

SEQ ID NO: 11133 - DNA, 20 bp, Artificial Sequence
  Description of Artificial Sequence: Synthetic oligonucleotide
  Target: PCSK9; (-) strand; PAM type: NRG; PAM sequence: AAG
ccagccctgtaagcttacag

SEQ ID NO: 11134 - DNA, 20 bp, Artificial Sequence
  Description of Artificial Sequence: Synthetic oligonucleotide
  Target: PCSK9; (-) strand; PAM type: NRG; PAM sequence: CAG
tggccagccctgtaagctta

SEQ ID NO: 11135 - DNA, 20 bp, Artificial Sequence
  Description of Artificial Sequence: Synthetic oligonucleotide
  Target: PCSK9; (-) strand; PAM type: NRG; PAM sequence: AAG
cctggtctggccagccctgt

SEQ ID NO: 11136 - DNA, 20 bp, Artificial Sequence
  Description of Artificial Sequence: Synthetic oligonucleotide
  Target: PCSK9; (-) strand; PAM type: NRG; PAM sequence: CAG
tgccccactcctggtctggc

SEQ ID NO: 11137 - DNA, 20 bp, Artificial Sequence
  Description of Artificial Sequence: Synthetic oligonucleotide
  Target: PCSK9; (-) strand; PAM type: NRG; PAM sequence: TGG
ggagtgccccactcctggtc

SEQ ID NO: 11138 - DNA, 20 bp, Artificial Sequence
  Description of Artificial Sequence: Synthetic oligonucleotide
  Target: PCSK9; (-) strand; PAM type: NRG; PAM sequence: TGG
agtgaggagtgccccactcc

SEQ ID NO: 11139 - DNA, 20 bp, Artificial Sequence
  Description of Artificial Sequence: Synthetic oligonucleotide
  Target: PCSK9; (-) strand; PAM type: NRG; PAM sequence: GAG
ccccagccgcgtgaagtgag

SEQ ID NO: 11140 - DNA, 20 bp, Artificial Sequence
  Description of Artificial Sequence: Synthetic oligonucleotide
  Target: PCSK9; (-) strand; PAM type: NRG; PAM sequence: AGG
gcccccagccgcgtgaagtg

SEQ ID NO: 11141 - DNA, 20 bp, Artificial Sequence
  Description of Artificial Sequence: Synthetic oligonucleotide
  Target: PCSK9; (-) strand; PAM type: NRG; PAM sequence: GAG
agcccccagccgcgtgaagt

SEQ ID NO: 11142 - DNA, 20 bp, Artificial Sequence
  Description of Artificial Sequence: Synthetic oligonucleotide
  Target: PCSK9; (-) strand; PAM type: NRG; PAM sequence: AAG
cagcagcccccagccgcgtg

SEQ ID NO: 11143 - DNA, 20 bp, Artificial Sequence
  Description of Artificial Sequence: Synthetic oligonucleotide
  Target: PCSK9; (-) strand; PAM type: NRG; PAM sequence: CAG
tggctctctccagcagcccc

SEQ ID NO: 11144 - DNA, 20 bp, Artificial Sequence
  Description of Artificial Sequence: Synthetic oligonucleotide
  Target: PCSK9; (-) strand; PAM type: NRG; PAM sequence: CAG
cccgctgtggctctctccag

SEQ ID NO: 11145 - DNA, 20 bp, Artificial Sequence
  Description of Artificial Sequence: Synthetic oligonucleotide
  Target: PCSK9; (-) strand; PAM type: NRG; PAM sequence: CAG
cttcccgctgtggctctctc

SEQ ID NO: 11146 - DNA, 20 bp, Artificial Sequence
  Description of Artificial Sequence: Synthetic oligonucleotide
  Target: PCSK9; (-) strand; PAM type: NRG; PAM sequence: TGG
ctaggaaacccttcccgctg

SEQ ID NO: 11147 - DNA, 20 bp, Artificial Sequence
  Description of Artificial Sequence: Synthetic oligonucleotide
  Target: PCSK9; (-) strand; PAM type: NRG; PAM sequence: AGG
agcactgtcctgcagcctct

SEQ ID NO: 11148 - DNA, 20 bp, Artificial Sequence
  Description of Artificial Sequence: Synthetic oligonucleotide
  Target: PCSK9; (-) strand; PAM type: NRG; PAM sequence: TAG
cagcactgtcctgcagcctc

SEQ ID NO: 11149 - DNA, 20 bp, Artificial Sequence
  Description of Artificial Sequence: Synthetic oligonucleotide
  Target: PCSK9; (-) strand; PAM type: NRG; PAM sequence: CAG
atccatccagcactgtcctg

SEQ ID NO: 11150 - DNA, 20 bp, Artificial Sequence
  Description of Artificial Sequence: Synthetic oligonucleotide
  Target: PCSK9; (-) strand; PAM type: NRG; PAM sequence: CAG
gtgagcattgaaaatccatc

SEQ ID NO: 11151 - DNA, 20 bp, Artificial Sequence
  Description of Artificial Sequence: Synthetic oligonucleotide
  Target: PCSK9; (-) strand; PAM type: NRG; PAM sequence: GAG
ccgcacgctcacacccaggt

SEQ ID NO: 11152 - DNA, 20 bp, Artificial Sequence
  Description of Artificial Sequence: Synthetic oligonucleotide
  Target: PCSK9; (-) strand; PAM type: NRG; PAM sequence: AGG
cctgccgcacgctcacaccc

SEQ ID NO: 11153 - DNA, 20 bp, Artificial Sequence
  Description of Artificial Sequence: Synthetic oligonucleotide
  Target: PCSK9; (-) strand; PAM type: NRG; PAM sequence: CAG
ccctgccgcacgctcacacc

SEQ ID NO: 11154 - DNA, 20 bp, Artificial Sequence
  Description of Artificial Sequence: Synthetic oligonucleotide
  Target: PCSK9; (-) strand; PAM type: NRG; PAM sequence: CGG
gcagatcgctgaccctcacg

SEQ ID NO: 11155 - DNA, 20 bp, Artificial Sequence
  Description of Artificial Sequence: Synthetic oligonucleotide
  Target: PCSK9; (-) strand; PAM type: NRG; PAM sequence: CAG
gatggctgagtccagagtag

SEQ ID NO: 11156 - DNA, 20 bp, Artificial Sequence
  Description of Artificial Sequence: Synthetic oligonucleotide
  Target: PCSK9; (-) strand; PAM type: NRG; PAM sequence: TAG
agagatggctgagtccagag

SEQ ID NO: 11157 - DNA, 20 bp, Artificial Sequence
  Description of Artificial Sequence: Synthetic oligonucleotide
  Target: PCSK9; (-) strand; PAM type: NRG; PAM sequence: GAG
cctagagatggctgagtcca

SEQ ID NO: 11158 - DNA, 20 bp, Artificial Sequence
  Description of Artificial Sequence: Synthetic oligonucleotide
  Target: PCSK9; (-) strand; PAM type: NRG; PAM sequence: CAG
ggcctagagatggctgagtc

SEQ ID NO: 11159 - DNA, 20 bp, Artificial Sequence
  Description of Artificial Sequence: Synthetic oligonucleotide
  Target: PCSK9; (-) strand; PAM type: NRG; PAM sequence: GAG
agaggggcctagagatggct

SEQ ID NO: 11160 - DNA, 20 bp, Artificial Sequence
  Description of Artificial Sequence: Synthetic oligonucleotide
  Target: PCSK9; (-) strand; PAM type: NRG; PAM sequence: TGG
gagtgagaggggcctagaga

SEQ ID NO: 11161 - DNA, 20 bp, Artificial Sequence
  Description of Artificial Sequence: Synthetic oligonucleotide
  Target: PCSK9; (-) strand; PAM type: NRG; PAM sequence: GAG
acctgagtgagaggggccta

SEQ ID NO: 11162 - DNA, 20 bp, Artificial Sequence
  Description of Artificial Sequence: Synthetic oligonucleotide
  Target: PCSK9; (-) strand; PAM type: NRG; PAM sequence: TAG
gcacctgagtgagaggggcc

SEQ ID NO: 11163 - DNA, 20 bp, Artificial Sequence
  Description of Artificial Sequence: Synthetic oligonucleotide
  Target: PCSK9; (-) strand; PAM type: NRG; PAM sequence: GGG
atggagcacctgagtgagag

SEQ ID NO: 11164 - DNA, 20 bp, Artificial Sequence
  Description of Artificial Sequence: Synthetic oligonucleotide
  Target: PCSK9; (-) strand; PAM type: NRG; PAM sequence: GGG
catggagcacctgagtgaga

SEQ ID NO: 11165 - DNA, 20 bp, Artificial Sequence
  Description of Artificial Sequence: Synthetic oligonucleotide
  Target: PCSK9; (-) strand; PAM type: NRG; PAM sequence: AGG
ccatggagcacctgagtgag

SEQ ID NO: 11166 - DNA, 20 bp, Artificial Sequence
  Description of Artificial Sequence: Synthetic oligonucleotide
  Target: PCSK9; (-) strand; PAM type: NRG; PAM sequence: GAG
accatggagcacctgagtga

SEQ ID NO: 11167 - DNA, 20 bp, Artificial Sequence
  Description of Artificial Sequence: Synthetic oligonucleotide
  Target: PCSK9; (-) strand; PAM type: NRG; PAM sequence: GAG
gaaccatggagcacctgagt

SEQ ID NO: 11168 - DNA, 20 bp, Artificial Sequence
  Description of Artificial Sequence: Synthetic oligonucleotide
  Target: PCSK9; (-) strand; PAM type: NRG; PAM sequence: GAG
cccagaaccatggagcacct

SEQ ID NO: 11169 - DNA, 20 bp, Artificial Sequence
  Description of Artificial Sequence: Synthetic oligonucleotide
  Target: PCSK9; (-) strand; PAM type: NRG; PAM sequence: GAG
tctcagctcccagaaccatg

SEQ ID NO: 11170 - DNA, 20 bp, Artificial Sequence
  Description of Artificial Sequence: Synthetic oligonucleotide
  Target: PCSK9; (-) strand; PAM type: NRG; PAM sequence: TGG
tttctcagctcccagaacca

SEQ ID NO: 11171 - DNA, 20 bp, Artificial Sequence
  Description of Artificial Sequence: Synthetic oligonucleotide
  Target: PCSK9; (-) strand; PAM type: NRG; PAM sequence: CAG
gtttgagatttctcagctcc

SEQ ID NO: 11172 - DNA, 20 bp, Artificial Sequence
  Description of Artificial Sequence: Synthetic oligonucleotide
  Target: PCSK9; (-) strand; PAM type: NRG; PAM sequence: CAG
tttgctggtttgagatttct

SEQ ID NO: 11173 - DNA, 20 bp, Artificial Sequence
  Description of Artificial Sequence: Synthetic oligonucleotide
  Target: PCSK9; (-) strand; PAM type: NRG; PAM sequence: GAG
ttccacttttttgctggttt

SEQ ID NO: 11174 - DNA, 20 bp, Artificial Sequence
  Description of Artificial Sequence: Synthetic oligonucleotide
  Target: PCSK9; (-) strand; PAM type: NRG; PAM sequence: TGG
catcaattccacttttttgc

SEQ ID NO: 11175 - DNA, 20 bp, Artificial Sequence
  Description of Artificial Sequence: Synthetic oligonucleotide
  Target: PCSK9; (-) strand; PAM type: NRG; PAM sequence: TAG
ggcatctgtgcactatcctg

SEQ ID NO: 11176 - DNA, 20 bp, Artificial Sequence
  Description of Artificial Sequence: Synthetic oligonucleotide
  Target: PCSK9; (-) strand; PAM type: NRG; PAM sequence: TGG
accaaaatgctgcaaccaga

SEQ ID NO: 11177 - DNA, 20 bp, Artificial Sequence
  Description of Artificial Sequence: Synthetic oligonucleotide
  Target: PCSK9; (-) strand; PAM type: NRG; PAM sequence: CAG
ttccaccaaaatgctgcaac

SEQ ID NO: 11178 - DNA, 20 bp, Artificial Sequence
  Description of Artificial Sequence: Synthetic oligonucleotide
  Target: PCSK9; (-) strand; PAM type: NRG; PAM sequence: GGG
ccctcctcactctcctagct

SEQ ID NO: 11179 - DNA, 20 bp, Artificial Sequence
  Description of Artificial Sequence: Synthetic oligonucleotide
  Target: PCSK9; (-) strand; PAM type: NRG; PAM sequence: TGG
cccctcctcactctcctagc

SEQ ID NO: 11180 - DNA, 20 bp, Artificial Sequence
  Description of Artificial Sequence: Synthetic oligonucleotide
  Target: PCSK9; (-) strand; PAM type: NRG; PAM sequence: TAG
cctgcccctcctcactctcc

SEQ ID NO: 11181 - DNA, 20 bp, Artificial Sequence
  Description of Artificial Sequence: Synthetic oligonucleotide
  Target: PCSK9; (-) strand; PAM type: NRG; PAM sequence: CAG
aagaccccatctcctcaagc

SEQ ID NO: 11182 - DNA, 20 bp, Artificial Sequence
  Description of Artificial Sequence: Synthetic oligonucleotide
  Target: PCSK9; (-) strand; PAM type: NRG; PAM sequence: AAG
cattaagaccccatctcctc

SEQ ID NO: 11183 - DNA, 20 bp, Artificial Sequence
  Description of Artificial Sequence: Synthetic oligonucleotide
  Target: PCSK9; (-) strand; PAM type: NRG; PAM sequence: AAG
ctgcctctcacacgagcatt

SEQ ID NO: 11184 - DNA, 20 bp, Artificial Sequence
  Description of Artificial Sequence: Synthetic oligonucleotide
  Target: PCSK9; (-) strand; PAM type: NRG; PAM sequence: GAG
acccactctgcctctcacac

SEQ ID NO: 11185 - DNA, 20 bp, Artificial Sequence
  Description of Artificial Sequence: Synthetic oligonucleotide
  Target: PCSK9; (-) strand; PAM type: NRG; PAM sequence: CAG
ggccaaagcaaggatccagc

SEQ ID NO: 11186 - DNA, 20 bp, Artificial Sequence
  Description of Artificial Sequence: Synthetic oligonucleotide
  Target: PCSK9; (-) strand; PAM type: NRG; PAM sequence: CAG
aggaggccaaagcaaggatc

SEQ ID NO: 11187 - DNA, 20 bp, Artificial Sequence
  Description of Artificial Sequence: Synthetic oligonucleotide
  Target: PCSK9; (-) strand; PAM type: NRG; PAM sequence: AGG
aaatccaggaggccaaagca

SEQ ID NO: 11188 - DNA, 20 bp, Artificial Sequence
  Description of Artificial Sequence: Synthetic oligonucleotide
  Target: PCSK9; (-) strand; PAM type: NRG; PAM sequence: AAG
gaaatccaggaggccaaagc

SEQ ID NO: 11189 - DNA, 20 bp, Artificial Sequence
  Description of Artificial Sequence: Synthetic oligonucleotide
  Target: PCSK9; (-) strand; PAM type: NRG; PAM sequence: AAG
gagagaaatccaggaggcca

SEQ ID NO: 11190 - DNA, 20 bp, Artificial Sequence
  Description of Artificial Sequence: Synthetic oligonucleotide
  Target: PCSK9; (-) strand; PAM type: NRG; PAM sequence: AGG
gagatagagagaaatccagg

SEQ ID NO: 11191 - DNA, 20 bp, Artificial Sequence
  Description of Artificial Sequence: Synthetic oligonucleotide
  Target: PCSK9; (-) strand; PAM type: NRG; PAM sequence: GAG
ggagatagagagaaatccag

SEQ ID NO: 11192 - DNA, 20 bp, Artificial Sequence
  Description of Artificial Sequence: Synthetic oligonucleotide
  Target: PCSK9; (-) strand; PAM type: NRG; PAM sequence: AGG
atggagatagagagaaatcc

SEQ ID NO: 11193 - DNA, 20 bp, Artificial Sequence
  Description of Artificial Sequence: Synthetic oligonucleotide
  Target: PCSK9; (-) strand; PAM type: NRG; PAM sequence: CAG
aatggagatagagagaaatc

SEQ ID NO: 11194 - DNA, 20 bp, Artificial Sequence
  Description of Artificial Sequence: Synthetic oligonucleotide
  Target: PCSK9; (-) strand; PAM type: NRG; PAM sequence: GAG
ggtttcaaaatggagataga

SEQ ID NO: 11195 - DNA, 20 bp, Artificial Sequence
  Description of Artificial Sequence: Synthetic oligonucleotide
  Target: PCSK9; (-) strand; PAM type: NRG; PAM sequence: GAG
gtggtttcaaaatggagata

SEQ ID NO: 11196 - DNA, 20 bp, Artificial Sequence
  Description of Artificial Sequence: Synthetic oligonucleotide
  Target: PCSK9; (-) strand; PAM type: NRG; PAM sequence: TAG
gagtggtttcaaaatggaga

SEQ ID NO: 11197 - DNA, 20 bp, Artificial Sequence
  Description of Artificial Sequence: Synthetic oligonucleotide
  Target: PCSK9; (-) strand; PAM type: NRG; PAM sequence: GAG
cacagagtggtttcaaaatg

SEQ ID NO: 11198 - DNA, 20 bp, Artificial Sequence
  Description of Artificial Sequence: Synthetic oligonucleotide
  Target: PCSK9; (-) strand; PAM type: NRG; PAM sequence: TGG
aacacagagtggtttcaaaa

SEQ ID NO: 11199 - DNA, 20 bp, Artificial Sequence
  Description of Artificial Sequence: Synthetic oligonucleotide
  Target: PCSK9; (-) strand; PAM type: NRG; PAM sequence: TGG
aagttcttccaaacacagag

SEQ ID NO: 11200 - DNA, 20 bp, Artificial Sequence
  Description of Artificial Sequence: Synthetic oligonucleotide
  Target: PCSK9; (-) strand; PAM type: NRG; PAM sequence: GAG
caaaagttcttccaaacaca

SEQ ID NO: 11201 - DNA, 20 bp, Artificial Sequence
  Description of Artificial Sequence: Synthetic oligonucleotide
  Target: PCSK9; (-) strand; PAM type: NRG; PAM sequence: CAG
ctcaaaagttcttccaaaca

SEQ ID NO: 11202 - DNA, 20 bp, Artificial Sequence
  Description of Artificial Sequence: Synthetic oligonucleotide
  Target: PCSK9; (-) strand; PAM type: NRG; PAM sequence: AAG
gggcagctctgaatactcaa

SEQ ID NO: 11203 - DNA, 20 bp, Artificial Sequence
  Description of Artificial Sequence: Synthetic oligonucleotide
  Target: PCSK9; (-) strand; PAM type: NRG; PAM sequence: CAG
aagactgttctgccagtggg

SEQ ID NO: 11204 - DNA, 20 bp, Artificial Sequence
  Description of Artificial Sequence: Synthetic oligonucleotide
  Target: PCSK9; (-) strand; PAM type: NRG; PAM sequence: GGG
aggaagactgttctgccagt

SEQ ID NO: 11205 - DNA, 20 bp, Artificial Sequence
  Description of Artificial Sequence: Synthetic oligonucleotide
  Target: PCSK9; (-) strand; PAM type: NRG; PAM sequence: TGG
aaggaagactgttctgccag

SEQ ID NO: 11206 - DNA, 20 bp, Artificial Sequence
  Description of Artificial Sequence: Synthetic oligonucleotide
  Target: PCSK9; (-) strand; PAM type: NRG; PAM sequence: CAG
cccaaggaagactgttctgc

SEQ ID NO: 11207 - DNA, 20 bp, Artificial Sequence
  Description of Artificial Sequence: Synthetic oligonucleotide
  Target: PCSK9; (-) strand; PAM type: NRG; PAM sequence: AAG
gagctcactcctgcccaagg

SEQ ID NO: 11208 - DNA, 20 bp, Artificial Sequence
  Description of Artificial Sequence: Synthetic oligonucleotide
  Target: PCSK9; (-) strand; PAM type: NRG; PAM sequence: AGG
aaggagctcactcctgccca

SEQ ID NO: 11209 - DNA, 20 bp, Artificial Sequence
  Description of Artificial Sequence: Synthetic oligonucleotide
  Target: PCSK9; (-) strand; PAM type: NRG; PAM sequence: AAG
caaggagctcactcctgccc

SEQ ID NO: 11210 - DNA, 20 bp, Artificial Sequence
  Description of Artificial Sequence: Synthetic oligonucleotide
  Target: PCSK9; (-) strand; PAM type: NRG; PAM sequence: GAG
cccagccttctggggacaag

SEQ ID NO: 11211 - DNA, 20 bp, Artificial Sequence
  Description of Artificial Sequence: Synthetic oligonucleotide
  Target: PCSK9; (-) strand; PAM type: NRG; PAM sequence: AGG
gacccagccttctggggaca

SEQ ID NO: 11212 - DNA, 20 bp, Artificial Sequence
  Description of Artificial Sequence: Synthetic oligonucleotide
  Target: PCSK9; (-) strand; PAM type: NRG; PAM sequence: AAG
agacccagccttctggggac

SEQ ID NO: 11213 - DNA, 20 bp, Artificial Sequence
  Description of Artificial Sequence: Synthetic oligonucleotide
  Target: PCSK9; (-) strand; PAM type: NRG; PAM sequence: GGG
cagccagacccagccttctg

SEQ ID NO: 11214 - DNA, 20 bp, Artificial Sequence
  Description of Artificial Sequence: Synthetic oligonucleotide
  Target: PCSK9; (-) strand; PAM type: NRG; PAM sequence: GGG
ccagccagacccagccttct

SEQ ID NO: 11215 - DNA, 20 bp, Artificial Sequence
  Description of Artificial Sequence: Synthetic oligonucleotide
  Target: PCSK9; (-) strand; PAM type: NRG; PAM sequence: TGG
gccagccagacccagccttc

SEQ ID NO: 11216 - DNA, 20 bp, Artificial Sequence
  Description of Artificial Sequence: Synthetic oligonucleotide
  Target: PCSK9; (-) strand; PAM type: NRG; PAM sequence: CAG
tgccaggggccagccagacc

SEQ ID NO: 11217 - DNA, 20 bp, Artificial Sequence
  Description of Artificial Sequence: Synthetic oligonucleotide
  Target: PCSK9; (-) strand; PAM type: NRG; PAM sequence: CAG
tgtccctgccaggggccagc

SEQ ID NO: 11218 - DNA, 20 bp, Artificial Sequence
  Description of Artificial Sequence: Synthetic oligonucleotide
  Target: PCSK9; (-) strand; PAM type: NRG; PAM sequence: CAG
tcagtgtccctgccaggggc

SEQ ID NO: 11219 - DNA, 20 bp, Artificial Sequence
  Description of Artificial Sequence: Synthetic oligonucleotide
  Target: PCSK9; (-) strand; PAM type: NRG; PAM sequence: GGG
ctcatcagtgtccctgccag

SEQ ID NO: 11220 - DNA, 20 bp, Artificial Sequence
  Description of Artificial Sequence: Synthetic oligonucleotide
  Target: PCSK9; (-) strand; PAM type: NRG; PAM sequence: GGG
cctcatcagtgtccctgcca

SEQ ID NO: 11221 - DNA, 20 bp, Artificial Sequence
  Description of Artificial Sequence: Synthetic oligonucleotide
  Target: PCSK9; (-) strand; PAM type: NRG; PAM sequence: AGG
ccctcatcagtgtccctgcc

SEQ ID NO: 11222 - DNA, 20 bp, Artificial Sequence
  Description of Artificial Sequence: Synthetic oligonucleotide
  Target: PCSK9; (-) strand; PAM type: NRG; PAM sequence: CAG
accctcatcagtgtccctgc

SEQ ID NO: 11223 - DNA, 20 bp, Artificial Sequence
  Description of Artificial Sequence: Synthetic oligonucleotide
  Target: PCSK9; (-) strand; PAM type: NRG; PAM sequence: CAG
atcaactcaagcaccctcat

SEQ ID NO: 11224 - DNA, 20 bp, Artificial Sequence
  Description of Artificial Sequence: Synthetic oligonucleotide
  Target: PCSK9; (-) strand; PAM type: NRG; PAM sequence: AAG
ggactagacaggatcaactc

SEQ ID NO: 11225 - DNA, 20 bp, Artificial Sequence
  Description of Artificial Sequence: Synthetic oligonucleotide
  Target: PCSK9; (-) strand; PAM type: NRG; PAM sequence: AGG
aacacagaaagggactagac

SEQ ID NO: 11226 - DNA, 20 bp, Artificial Sequence
  Description of Artificial Sequence: Synthetic oligonucleotide
  Target: PCSK9; (-) strand; PAM type: NRG; PAM sequence: CAG
aaacacagaaagggactaga

SEQ ID NO: 11227 - DNA, 20 bp, Artificial Sequence
  Description of Artificial Sequence: Synthetic oligonucleotide
  Target: PCSK9; (-) strand; PAM type: NRG; PAM sequence: TAG
ttgaaaacacagaaagggac

SEQ ID NO: 11228 - DNA, 20 bp, Artificial Sequence
  Description of Artificial Sequence: Synthetic oligonucleotide
  Target: PCSK9; (-) strand; PAM type: NRG; PAM sequence: GGG
gggctttgaaaacacagaaa

SEQ ID NO: 11229 - DNA, 20 bp, Artificial Sequence
  Description of Artificial Sequence: Synthetic oligonucleotide
  Target: PCSK9; (-) strand; PAM type: NRG; PAM sequence: AGG
tgggctttgaaaacacagaa

SEQ ID NO: 11230 - DNA, 20 bp, Artificial Sequence
  Description of Artificial Sequence: Synthetic oligonucleotide
  Target: PCSK9; (-) strand; PAM type: NRG; PAM sequence: AAG
atgggctttgaaaacacaga

SEQ ID NO: 11231 - DNA, 20 bp, Artificial Sequence
  Description of Artificial Sequence: Synthetic oligonucleotide
  Target: PCSK9; (-) strand; PAM type: NRG; PAM sequence: CAG
tagaatgggctttgaaaaca

SEQ ID NO: 11232 - DNA, 20 bp, Artificial Sequence
  Description of Artificial Sequence: Synthetic oligonucleotide
  Target: PCSK9; (-) strand; PAM type: NRG; PAM sequence: GGG
atgggaatctgctttagaat

SEQ ID NO: 11233 - DNA, 20 bp, Artificial Sequence
  Description of Artificial Sequence: Synthetic oligonucleotide
  Target: PCSK9; (-) strand; PAM type: NRG; PAM sequence: TGG
aatgggaatctgctttagaa

SEQ ID NO: 11234 - DNA, 20 bp, Artificial Sequence
  Description of Artificial Sequence: Synthetic oligonucleotide
  Target: PCSK9; (-) strand; PAM type: NRG; PAM sequence: TAG
acggaaatgggaatctgctt

SEQ ID NO: 11235 - DNA, 20 bp, Artificial Sequence
  Description of Artificial Sequence: Synthetic oligonucleotide
  Target: PCSK9; (-) strand; PAM type: NRG; PAM sequence: GGG
ttagagtcaaagacggaaat

SEQ ID NO: 11236 - DNA, 20 bp, Artificial Sequence
  Description of Artificial Sequence: Synthetic oligonucleotide
  Target: PCSK9; (-) strand; PAM type: NRG; PAM sequence: TGG
cttagagtcaaagacggaaa

SEQ ID NO: 11237 - DNA, 20 bp, Artificial Sequence
  Description of Artificial Sequence: Synthetic oligonucleotide
  Target: PCSK9; (-) strand; PAM type: NRG; PAM sequence: CGG
ttgggccttagagtcaaaga

SEQ ID NO: 11238 - DNA, 20 bp, Artificial Sequence
  Description of Artificial Sequence: Synthetic oligonucleotide
  Target: PCSK9; (-) strand; PAM type: NRG; PAM sequence: AAG
ccccttgggccttagagtca

SEQ ID NO: 11239 - DNA, 20 bp, Artificial Sequence
  Description of Artificial Sequence: Synthetic oligonucleotide
  Target: PCSK9; (-) strand; PAM type: NRG; PAM sequence: GAG
gcttgcccccttgggcctta

SEQ ID NO: 11240 - DNA, 20 bp, Artificial Sequence
  Description of Artificial Sequence: Synthetic oligonucleotide
  Target: PCSK9; (-) strand; PAM type: NRG; PAM sequence: TAG
cagcttgcccccttgggcct

SEQ ID NO: 11241 - DNA, 20 bp, Artificial Sequence
  Description of Artificial Sequence: Synthetic oligonucleotide
  Target: PCSK9; (-) strand; PAM type: NRG; PAM sequence: GGG
gcagaccagcttgccccctt

SEQ ID NO: 11242 - DNA, 20 bp, Artificial Sequence
  Description of Artificial Sequence: Synthetic oligonucleotide
  Target: PCSK9; (-) strand; PAM type: NRG; PAM sequence: TGG
ggcagaccagcttgccccct

SEQ ID NO: 11243 - DNA, 20 bp, Artificial Sequence
  Description of Artificial Sequence: Synthetic oligonucleotide
  Target: PCSK9; (-) strand; PAM type: NRG; PAM sequence: CAG
gcgttgtgggcccggcagac

SEQ ID NO: 11244 - DNA, 20 bp, Artificial Sequence
  Description of Artificial Sequence: Synthetic oligonucleotide
  Target: PCSK9; (-) strand; PAM type: NRG; PAM sequence: CAG
caaaagcgttgtgggcccgg

SEQ ID NO: 11245 - DNA, 20 bp, Artificial Sequence
  Description of Artificial Sequence: Synthetic oligonucleotide
  Target: PCSK9; (-) strand; PAM type: NRG; PAM sequence: CGG
ccccaaaagcgttgtgggcc

SEQ ID NO: 11246 - DNA, 20 bp, Artificial Sequence
  Description of Artificial Sequence: Synthetic oligonucleotide
  Target: PCSK9; (-) strand; PAM type: NRG; PAM sequence: GGG
ctcacccccaaaagcgttgt

SEQ ID NO: 11247 - DNA, 20 bp, Artificial Sequence
  Description of Artificial Sequence: Synthetic oligonucleotide
  Target: PCSK9; (-) strand; PAM type: NRG; PAM sequence: TGG
cctcacccccaaaagcgttg

SEQ ID NO: 11248 - DNA, 20 bp, Artificial Sequence
  Description of Artificial Sequence: Synthetic oligonucleotide
  Target: PCSK9; (-) strand; PAM type: NRG; PAM sequence: AAG
gtagacaccctcacccccaa

SEQ ID NO: 11249 - DNA, 20 bp, Artificial Sequence
  Description of Artificial Sequence: Synthetic oligonucleotide
  Target: PCSK9; (-) strand; PAM type: NRG; PAM sequence: TAG
ggcagcacctggcaatggcg

SEQ ID NO: 11250 - DNA, 20 bp, Artificial Sequence
  Description of Artificial Sequence: Synthetic oligonucleotide
  Target: PCSK9; (-) strand; PAM type: NRG; PAM sequence: TGG
tagcaggcagcacctggcaa

SEQ ID NO: 11251 - DNA, 20 bp, Artificial Sequence
  Description of Artificial Sequence: Synthetic oligonucleotide
  Target: PCSK9; (-) strand; PAM type: NRG; PAM sequence: TGG
ctggggtagcaggcagcacc

SEQ ID NO: 11252 - DNA, 20 bp, Artificial Sequence
  Description of Artificial Sequence: Synthetic oligonucleotide
  Target: PCSK9; (-) strand; PAM type: NRG; PAM sequence: CAG
agttggcctggggtagcagg

SEQ ID NO: 11253 - DNA, 20 bp, Artificial Sequence
  Description of Artificial Sequence: Synthetic oligonucleotide
  Target: PCSK9; (-) strand; PAM type: NRG; PAM sequence: AGG
tgcagttggcctggggtagc

SEQ ID NO: 11254 - DNA, 20 bp, Artificial Sequence
  Description of Artificial Sequence: Synthetic oligonucleotide
  Target: PCSK9; (-) strand; PAM type: NRG; PAM sequence: CAG
ctgcagttggcctggggtag

SEQ ID NO: 11255 - DNA, 20 bp, Artificial Sequence
  Description of Artificial Sequence: Synthetic oligonucleotide
  Target: PCSK9; (-) strand; PAM type: NRG; PAM sequence: TAG
acgctgcagttggcctgggg

SEQ ID NO: 11256 - DNA, 20 bp, Artificial Sequence
  Description of Artificial Sequence: Synthetic oligonucleotide
  Target: PCSK9; (-) strand; PAM type: NRG; PAM sequence: GGG
tggacgctgcagttggcctg

SEQ ID NO: 11257 - DNA, 20 bp, Artificial Sequence
  Description of Artificial Sequence: Synthetic oligonucleotide
  Target: PCSK9; (-) strand; PAM type: NRG; PAM sequence: GGG
gtggacgctgcagttggcct

SEQ ID NO: 11258 - DNA, 20 bp, Artificial Sequence
  Description of Artificial Sequence: Synthetic oligonucleotide
  Target: PCSK9; (-) strand; PAM type: NRG; PAM sequence: TGG
tgtggacgctgcagttggcc

SEQ ID NO: 11259 - DNA, 20 bp, Artificial Sequence
  Description of Artificial Sequence: Synthetic oligonucleotide
  Target: PCSK9; (-) strand; PAM type: NRG; PAM sequence: TGG
agctgtgtggacgctgcagt

SEQ ID NO: 11260 - DNA, 20 bp, Artificial Sequence
  Description of Artificial Sequence: Synthetic oligonucleotide
  Target: PCSK9; (-) strand; PAM type: NRG; PAM sequence: CAG
gtggagctgtgtggacgctg

SEQ ID NO: 11261 - DNA, 20 bp, Artificial Sequence
  Description of Artificial Sequence: Synthetic oligonucleotide
  Target: PCSK9; (-) strand; PAM type: NRG; PAM sequence: TGG
cctcagctggtggagctgtg

SEQ ID NO: 11262 - DNA, 20 bp, Artificial Sequence
  Description of Artificial Sequence: Synthetic oligonucleotide
  Target: PCSK9; (-) strand; PAM type: NRG; PAM sequence: GAG
catgctggcctcagctggtg

SEQ ID NO: 11263 - DNA, 20 bp, Artificial Sequence
  Description of Artificial Sequence: Synthetic oligonucleotide
  Target: PCSK9; (-) strand; PAM type: NRG; PAM sequence: TGG
cccatgctggcctcagctgg

SEQ ID NO: 11264 - DNA, 20 bp, Artificial Sequence
  Description of Artificial Sequence: Synthetic oligonucleotide
  Target: PCSK9; (-) strand; PAM type: NRG; PAM sequence: TGG
gtccccatgctggcctcagc

SEQ ID NO: 11265 - DNA, 20 bp, Artificial Sequence
  Description of Artificial Sequence: Synthetic oligonucleotide
  Target: PCSK9; (-) strand; PAM type: NRG; PAM sequence: CAG
acgggtccccatgctggcct

SEQ ID NO: 11266 - DNA, 20 bp, Artificial Sequence
  Description of Artificial Sequence: Synthetic oligonucleotide
  Target: PCSK9; (-) strand; PAM type: NRG; PAM sequence: TGG
gtggacacgggtccccatgc

SEQ ID NO: 11267 - DNA, 20 bp, Artificial Sequence
  Description of Artificial Sequence: Synthetic oligonucleotide
  Target: PCSK9; (-) strand; PAM type: NRG; PAM sequence: GGG
ctgttggtggcagtggacac

SEQ ID NO: 11268 - DNA, 20 bp, Artificial Sequence
  Description of Artificial Sequence: Synthetic oligonucleotide
  Target: PCSK9; (-) strand; PAM type: NRG; PAM sequence: CGG
cctgttggtggcagtggaca

SEQ ID NO: 11269 - DNA, 20 bp, Artificial Sequence
  Description of Artificial Sequence: Synthetic oligonucleotide
  Target: PCSK9; (-) strand; PAM type: NRG; PAM sequence: TGG
cgtggccctgttggtggcag

SEQ ID NO: 11270 - DNA, 20 bp, Artificial Sequence
  Description of Artificial Sequence: Synthetic oligonucleotide
  Target: PCSK9; (-) strand; PAM type: NRG; PAM sequence: CAG
ggacgtggccctgttggtgg

SEQ ID NO: 11271 - DNA, 20 bp, Artificial Sequence
  Description of Artificial Sequence: Synthetic oligonucleotide
  Target: PCSK9; (-) strand; PAM type: NRG; PAM sequence: TGG
tgaggacgtggccctgttgg

SEQ ID NO: 11272 - DNA, 20 bp, Artificial Sequence
  Description of Artificial Sequence: Synthetic oligonucleotide
  Target: PCSK9; (-) strand; PAM type: NRG; PAM sequence: TGG
ctgtgaggacgtggccctgt

SEQ ID NO: 11273 - DNA, 20 bp, Artificial Sequence
  Description of Artificial Sequence: Synthetic oligonucleotide
  Target: PCSK9; (-) strand; PAM type: NRG; PAM sequence: TGG
gcctcctacctgtgaggacg

SEQ ID NO: 11274 - DNA, 20 bp, Artificial Sequence
  Description of Artificial Sequence: Synthetic oligonucleotide
  Target: PCSK9; (-) strand; PAM type: NRG; PAM sequence: AGG
agcccagcctcctacctgtg

SEQ ID NO: 11275 - DNA, 20 bp, Artificial Sequence
  Description of Artificial Sequence: Synthetic oligonucleotide
  Target: PCSK9; (-) strand; PAM type: NRG; PAM sequence: GAG
aagcccagcctcctacctgt

SEQ ID NO: 11276 - DNA, 20 bp, Artificial Sequence
  Description of Artificial Sequence: Synthetic oligonucleotide
  Target: PCSK9; (-) strand; PAM type: NRG; PAM sequence: CAG
tcctcaccccagggcaagcc

SEQ ID NO: 11277 - DNA, 20 bp, Artificial Sequence
  Description of Artificial Sequence: Synthetic oligonucleotide
  Target: PCSK9; (-) strand; PAM type: NRG; PAM sequence: AAG
acccctcctcaccccagggc

SEQ ID NO: 11278 - DNA, 20 bp, Artificial Sequence
  Description of Artificial Sequence: Synthetic oligonucleotide
  Target: PCSK9; (-) strand; PAM type: NRG; PAM sequence: GGG
agagacccctcctcacccca

SEQ ID NO: 11279 - DNA, 20 bp, Artificial Sequence
  Description of Artificial Sequence: Synthetic oligonucleotide
  Target: PCSK9; (-) strand; PAM type: NRG; PAM sequence: AGG
aagagacccctcctcacccc

SEQ ID NO: 11280 - DNA, 20 bp, Artificial Sequence
  Description of Artificial Sequence: Synthetic oligonucleotide
  Target: PCSK9; (-) strand; PAM type: NRG; PAM sequence: CAG
aaagagacccctcctcaccc

SEQ ID NO: 11281 - DNA, 20 bp, Artificial Sequence
  Description of Artificial Sequence: Synthetic oligonucleotide
  Target: PCSK9; (-) strand; PAM type: NRG; PAM sequence: GAG
agtgggtgcataaggagaaa

SEQ ID NO: 11282 - DNA, 20 bp, Artificial Sequence
  Description of Artificial Sequence: Synthetic oligonucleotide
  Target: PCSK9; (-) strand; PAM type: NRG; PAM sequence: AAG
gcagtgggtgcataaggaga

SEQ ID NO: 11283 - DNA, 20 bp, Artificial Sequence
  Description of Artificial Sequence: Synthetic oligonucleotide
  Target: PCSK9; (-) strand; PAM type: NRG; PAM sequence: GAG
gcgggcagtgggtgcataag

SEQ ID NO: 11284 - DNA, 20 bp, Artificial Sequence
  Description of Artificial Sequence: Synthetic oligonucleotide
  Target: PCSK9; (-) strand; PAM type: NRG; PAM sequence: AGG
tcgcgggcagtgggtgcata

SEQ ID NO: 11285 - DNA, 20 bp, Artificial Sequence
  Description of Artificial Sequence: Synthetic oligonucleotide
  Target: PCSK9; (-) strand; PAM type: NRG; PAM sequence: AAG
ctcgcgggcagtgggtgcat

SEQ ID NO: 11286 - DNA, 20 bp, Artificial Sequence
  Description of Artificial Sequence: Synthetic oligonucleotide
  Target: PCSK9; (-) strand; PAM type: NRG; PAM sequence: GGG
gaccaagcctcgcgggcagt

SEQ ID NO: 11287 - DNA, 20 bp, Artificial Sequence
  Description of Artificial Sequence: Synthetic oligonucleotide
  Target: PCSK9; (-) strand; PAM type: NRG; PAM sequence: TGG
ggaccaagcctcgcgggcag

SEQ ID NO: 11288 - DNA, 20 bp, Artificial Sequence
  Description of Artificial Sequence: Synthetic oligonucleotide
  Target: PCSK9; (-) strand; PAM type: NRG; PAM sequence: CAG
tgaggaccaagcctcgcggg

SEQ ID NO: 11289 - DNA, 20 bp, Artificial Sequence
  Description of Artificial Sequence: Synthetic oligonucleotide
  Target: PCSK9; (-) strand; PAM type: NRG; PAM sequence: GGG
ttgtgaggaccaagcctcgc

SEQ ID NO: 11290 - DNA, 20 bp, Artificial Sequence
  Description of Artificial Sequence: Synthetic oligonucleotide
  Target: PCSK9; (-) strand; PAM type: NRG; PAM sequence: CGG
cttgtgaggaccaagcctcg

SEQ ID NO: 11291 - DNA, 20 bp, Artificial Sequence
  Description of Artificial Sequence: Synthetic oligonucleotide
  Target: PCSK9; (-) strand; PAM type: NRG; PAM sequence: AAG
ggatcacacttgtgaggacc

SEQ ID NO: 11292 - DNA, 20 bp, Artificial Sequence
  Description of Artificial Sequence: Synthetic oligonucleotide
  Target: PCSK9; (-) strand; PAM type: NRG; PAM sequence: AGG
tctcatggatcacacttgtg

SEQ ID NO: 11293 - DNA, 20 bp, Artificial Sequence
  Description of Artificial Sequence: Synthetic oligonucleotide
  Target: PCSK9; (-) strand; PAM type: NRG; PAM sequence: GAG
gtctcatggatcacacttgt

SEQ ID NO: 11294 - DNA, 20 bp, Artificial Sequence
  Description of Artificial Sequence: Synthetic oligonucleotide
  Target: PCSK9; (-) strand; PAM type: NRG; PAM sequence: TGG
caagtcaggcttgagtctca

SEQ ID NO: 11295 - DNA, 20 bp, Artificial Sequence
  Description of Artificial Sequence: Synthetic oligonucleotide
  Target: PCSK9; (-) strand; PAM type: NRG; PAM sequence: GAG
tggaactgcaagtcaggctt

SEQ ID NO: 11296 - DNA, 20 bp, Artificial Sequence
  Description of Artificial Sequence: Synthetic oligonucleotide
  Target: PCSK9; (-) strand; PAM type: NRG; PAM sequence: AGG
agagtatggaactgcaagtc

SEQ ID NO: 11297 - DNA, 20 bp, Artificial Sequence
  Description of Artificial Sequence: Synthetic oligonucleotide
  Target: PCSK9; (-) strand; PAM type: NRG; PAM sequence: CAG
cagagtatggaactgcaagt

SEQ ID NO: 11298 - DNA, 20 bp, Artificial Sequence
  Description of Artificial Sequence: Synthetic oligonucleotide
  Target: PCSK9; (-) strand; PAM type: NRG; PAM sequence: AAG
gaaccagagtatggaactgc

SEQ ID NO: 11299 - DNA, 20 bp, Artificial Sequence
  Description of Artificial Sequence: Synthetic oligonucleotide
  Target: PCSK9; (-) strand; PAM type: NRG; PAM sequence: TGG
gaagtggcagaaccagagta

SEQ ID NO: 11300 - DNA, 20 bp, Artificial Sequence
  Description of Artificial Sequence: Synthetic oligonucleotide
  Target: PCSK9; (-) strand; PAM type: NRG; PAM sequence: GAG
gcatggaagtggcagaacca

SEQ ID NO: 11301 - DNA, 20 bp, Artificial Sequence
  Description of Artificial Sequence: Synthetic oligonucleotide
  Target: PCSK9; (-) strand; PAM type: NRG; PAM sequence: CAG
gggcatggaagtggcagaac

SEQ ID NO: 11302 - DNA, 20 bp, Artificial Sequence
  Description of Artificial Sequence: Synthetic oligonucleotide
  Target: PCSK9; (-) strand; PAM type: NRG; PAM sequence: CAG
ctcaaagggcatggaagtgg

SEQ ID NO: 11303 - DNA, 20 bp, Artificial Sequence
  Description of Artificial Sequence: Synthetic oligonucleotide
  Target: PCSK9; (-) strand; PAM type: NRG; PAM sequence: TGG
aggctcaaagggcatggaag

SEQ ID NO: 11304 - DNA, 20 bp, Artificial Sequence
  Description of Artificial Sequence: Synthetic oligonucleotide
  Target: PCSK9; (-) strand; PAM type: NRG; PAM sequence: AAG
cccaggctcaaagggcatgg

SEQ ID NO: 11305 - DNA, 20 bp, Artificial Sequence
  Description of Artificial Sequence: Synthetic oligonucleotide
  Target: PCSK9; (-) strand; PAM type: NRG; PAM sequence: TGG
ctgcccaggctcaaagggca

SEQ ID NO: 11306 - DNA, 20 bp, Artificial Sequence
  Description of Artificial Sequence: Synthetic oligonucleotide
  Target: PCSK9; (-) strand; PAM type: NRG; PAM sequence: GGG
gtcacctgcccaggctcaaa

SEQ ID NO: 11307 - DNA, 20 bp, Artificial Sequence
  Description of Artificial Sequence: Synthetic oligonucleotide
  Target: PCSK9; (-) strand; PAM type: NRG; PAM sequence: AGG
ggtcacctgcccaggctcaa

SEQ ID NO: 11308 - DNA, 20 bp, Artificial Sequence
  Description of Artificial Sequence: Synthetic oligonucleotide
  Target: PCSK9; (-) strand; PAM type: NRG; PAM sequence: AAG
aggtcacctgcccaggctca

SEQ ID NO: 11309 - DNA, 20 bp, Artificial Sequence
  Description of Artificial Sequence: Synthetic oligonucleotide
  Target: PCSK9; (-) strand; PAM type: NRG; PAM sequence: AGG
agaagtaaggtcacctgccc

SEQ ID NO: 11310 - DNA, 20 bp, Artificial Sequence
  Description of Artificial Sequence: Synthetic oligonucleotide
  Target: PCSK9; (-) strand; PAM type: NRG; PAM sequence: CAG
gagaagtaaggtcacctgcc

SEQ ID NO: 11311 - DNA, 20 bp, Artificial Sequence
  Description of Artificial Sequence: Synthetic oligonucleotide
  Target: PCSK9; (-) strand; PAM type: NRG; PAM sequence: AGG
agctgagatgaggagaagta

SEQ ID NO: 11312 - DNA, 20 bp, Artificial Sequence
  Description of Artificial Sequence: Synthetic oligonucleotide
  Target: PCSK9; (-) strand; PAM type: NRG; PAM sequence: AAG
aagctgagatgaggagaagt

SEQ ID NO: 11313 - DNA, 20 bp, Artificial Sequence
  Description of Artificial Sequence: Synthetic oligonucleotide
  Target: PCSK9; (-) strand; PAM type: NRG; PAM sequence: AAG
gaggaagctgagatgaggag

SEQ ID NO: 11314 - DNA, 20 bp, Artificial Sequence
  Description of Artificial Sequence: Synthetic oligonucleotide
  Target: PCSK9; (-) strand; PAM type: NRG; PAM sequence: GAG
gaggaggaagctgagatgag

SEQ ID NO: 11315 - DNA, 20 bp, Artificial Sequence
  Description of Artificial Sequence: Synthetic oligonucleotide
  Target: PCSK9; (-) strand; PAM type: NRG; PAM sequence: AGG
tggaggaggaagctgagatg

SEQ ID NO: 11316 - DNA, 20 bp, Artificial Sequence
  Description of Artificial Sequence: Synthetic oligonucleotide
  Target: PCSK9; (-) strand; PAM type: NRG; PAM sequence: GAG
atggaggaggaagctgagat

SEQ ID NO: 11317 - DNA, 20 bp, Artificial Sequence
  Description of Artificial Sequence: Synthetic oligonucleotide
  Target: PCSK9; (-) strand; PAM type: NRG; PAM sequence: GAG
ctcttatggaggaggaagct

SEQ ID NO: 11318 - DNA, 20 bp, Artificial Sequence
  Description of Artificial Sequence: Synthetic oligonucleotide
  Target: PCSK9; (-) strand; PAM type: NRG; PAM sequence: AAG
tttccctcttatggaggagg

SEQ ID NO: 11319 - DNA, 20 bp, Artificial Sequence
  Description of Artificial Sequence: Synthetic oligonucleotide
  Target: PCSK9; (-) strand; PAM type: NRG; PAM sequence: AGG
ctttttccctcttatggagg

SEQ ID NO: 11320 - DNA, 20 bp, Artificial Sequence
  Description of Artificial Sequence: Synthetic oligonucleotide
  Target: PCSK9; (-) strand; PAM type: NRG; PAM sequence: GAG
cctttttccctcttatggag

SEQ ID NO: 11321 - DNA, 20 bp, Artificial Sequence
  Description of Artificial Sequence: Synthetic oligonucleotide
  Target: PCSK9; (-) strand; PAM type: NRG; PAM sequence: AGG
tacctttttccctcttatgg

SEQ ID NO: 11322 - DNA, 20 bp, Artificial Sequence
  Description of Artificial Sequence: Synthetic oligonucleotide
  Target: PCSK9; (-) strand; PAM type: NRG; PAM sequence: GAG
atacctttttccctcttatg

SEQ ID NO: 11323 - DNA, 20 bp, Artificial Sequence
  Description of Artificial Sequence: Synthetic oligonucleotide
  Target: PCSK9; (-) strand; PAM type: NRG; PAM sequence: TGG
taatacctttttccctctta

SEQ ID NO: 11324 - DNA, 20 bp, Artificial Sequence
  Description of Artificial Sequence: Synthetic oligonucleotide
  Target: PCSK9; (-) strand; PAM type: NRG; PAM sequence: AGG
tccttgcaacacaatgaggc

SEQ ID NO: 11325 - DNA, 20 bp, Artificial Sequence
  Description of Artificial Sequence: Synthetic oligonucleotide
  Target: PCSK9; (-) strand; PAM type: NRG; PAM sequence: CAG
ctccttgcaacacaatgagg

SEQ ID NO: 11326 - DNA, 20 bp, Artificial Sequence
  Description of Artificial Sequence: Synthetic oligonucleotide
  Target: PCSK9; (-) strand; PAM type: NRG; PAM sequence: AGG
catctccttgcaacacaatg

SEQ ID NO: 11327 - DNA, 20 bp, Artificial Sequence
  Description of Artificial Sequence: Synthetic oligonucleotide
  Target: PCSK9; (-) strand; PAM type: NRG; PAM sequence: GAG
ccatctccttgcaacacaat

SEQ ID NO: 11328 - DNA, 20 bp, Artificial Sequence
  Description of Artificial Sequence: Synthetic oligonucleotide
  Target: PCSK9; (-) strand; PAM type: NRG; PAM sequence: TAG
gatactccaggccagtgccc

SEQ ID NO: 11329 - DNA, 20 bp, Artificial Sequence
  Description of Artificial Sequence: Synthetic oligonucleotide
  Target: PCSK9; (-) strand; PAM type: NRG; PAM sequence: CAG
gcacctgcgatactccaggc

SEQ ID NO: 11330 - DNA, 20 bp, Artificial Sequence
  Description of Artificial Sequence: Synthetic oligonucleotide
  Target: PCSK9; (-) strand; PAM type: NRG; PAM sequence: AGG
caaagcacctgcgatactcc

SEQ ID NO: 11331 - DNA, 20 bp, Artificial Sequence
  Description of Artificial Sequence: Synthetic oligonucleotide
  Target: PCSK9; (-) strand; PAM type: NRG; PAM sequence: CAG
gcaaagcacctgcgatactc

SEQ ID NO: 11332 - DNA, 20 bp, Artificial Sequence
  Description of Artificial Sequence: Synthetic oligonucleotide
  Target: PCSK9; (-) strand; PAM type: NRG; PAM sequence: AAG
ggactgcaccaccttaggca

SEQ ID NO: 11333 - DNA, 20 bp, Artificial Sequence
  Description of Artificial Sequence: Synthetic oligonucleotide
  Target: PCSK9; (-) strand; PAM type: NRG; PAM sequence: AGG
ctcctggactgcaccacctt

SEQ ID NO: 11334 - DNA, 20 bp, Artificial Sequence
  Description of Artificial Sequence: Synthetic oligonucleotide
  Target: PCSK9; (-) strand; PAM type: NRG; PAM sequence: TAG
tctcctggactgcaccacct

SEQ ID NO: 11335 - DNA, 20 bp, Artificial Sequence
  Description of Artificial Sequence: Synthetic oligonucleotide
  Target: PCSK9; (-) strand; PAM type: NRG; PAM sequence: TGG
ctctctggagctgcctctcc

SEQ ID NO: 11336 - DNA, 20 bp, Artificial Sequence
  Description of Artificial Sequence: Synthetic oligonucleotide
  Target: PCSK9; (-) strand; PAM type: NRG; PAM sequence: GAG
cagccgggggcctctctctg

SEQ ID NO: 11337 - DNA, 20 bp, Artificial Sequence
  Description of Artificial Sequence: Synthetic oligonucleotide
  Target: PCSK9; (-) strand; PAM type: NRG; PAM sequence: TGG
cccagccgggggcctctctc

SEQ ID NO: 11338 - DNA, 20 bp, Artificial Sequence
  Description of Artificial Sequence: Synthetic oligonucleotide
  Target: PCSK9; (-) strand; PAM type: NRG; PAM sequence: GGG
ctcctttcagccccagccgg

SEQ ID NO: 11339 - DNA, 20 bp, Artificial Sequence
  Description of Artificial Sequence: Synthetic oligonucleotide
  Target: PCSK9; (-) strand; PAM type: NRG; PAM sequence: GGG
cctcctttcagccccagccg

SEQ ID NO: 11340 - DNA, 20 bp, Artificial Sequence
  Description of Artificial Sequence: Synthetic oligonucleotide
  Target: PCSK9; (-) strand; PAM type: NRG; PAM sequence: GGG
ccctcctttcagccccagcc

SEQ ID NO: 11341 - DNA, 20 bp, Artificial Sequence
  Description of Artificial Sequence: Synthetic oligonucleotide
  Target: PCSK9; (-) strand; PAM type: NRG; PAM sequence: CGG
gccctcctttcagccccagc

SEQ ID NO: 11342 - DNA, 20 bp, Artificial Sequence
  Description of Artificial Sequence: Synthetic oligonucleotide
  Target: PCSK9; (-) strand; PAM type: NRG; PAM sequence: CAG
gtctgccctcctttcagccc

SEQ ID NO: 11343 - DNA, 20 bp, Artificial Sequence
  Description of Artificial Sequence: Synthetic oligonucleotide
  Target: PCSK9; (-) strand; PAM type: NRG; PAM sequence: CAG
accgaggtctgccctccttt

SEQ ID NO: 11344 - DNA, 20 bp, Artificial Sequence
  Description of Artificial Sequence: Synthetic oligonucleotide
  Target: PCSK9; (-) strand; PAM type: NRG; PAM sequence: AGG
gcagggtgaaattcaaaccg

SEQ ID NO: 11345 - DNA, 20 bp, Artificial Sequence
  Description of Artificial Sequence: Synthetic oligonucleotide
  Target: PCSK9; (-) strand; PAM type: NRG; PAM sequence: GAG
ggcagggtgaaattcaaacc

SEQ ID NO: 11346 - DNA, 20 bp, Artificial Sequence
  Description of Artificial Sequence: Synthetic oligonucleotide
  Target: PCSK9; (-) strand; PAM type: NRG; PAM sequence: GGG
cacacagctatagagcggca

SEQ ID NO: 11347 - DNA, 20 bp, Artificial Sequence
  Description of Artificial Sequence: Synthetic oligonucleotide
  Target: PCSK9; (-) strand; PAM type: NRG; PAM sequence: AGG
tcacacagctatagagcggc

SEQ ID NO: 11348 - DNA, 20 bp, Artificial Sequence
  Description of Artificial Sequence: Synthetic oligonucleotide
  Target: PCSK9; (-) strand; PAM type: NRG; PAM sequence: CAG
gtcacacagctatagagcgg

SEQ ID NO: 11349 - DNA, 20 bp, Artificial Sequence
  Description of Artificial Sequence: Synthetic oligonucleotide
  Target: PCSK9; (-) strand; PAM type: NRG; PAM sequence: CGG
caagtcacacagctatagag

SEQ ID NO: 11350 - DNA, 20 bp, Artificial Sequence
  Description of Artificial Sequence: Synthetic oligonucleotide
  Target: PCSK9; (-) strand; PAM type: NRG; PAM sequence: GAG
gcccaagtcacacagctata

SEQ ID NO: 11351 - DNA, 20 bp, Artificial Sequence
  Description of Artificial Sequence: Synthetic oligonucleotide
  Target: PCSK9; (-) strand; PAM type: NRG; PAM sequence: TAG
ttgcccaagtcacacagcta

SEQ ID NO: 11352 - DNA, 20 bp, Artificial Sequence
  Description of Artificial Sequence: Synthetic oligonucleotide
  Target: PCSK9; (-) strand; PAM type: NRG; PAM sequence: CAG
agtaatttgcccaagtcaca

SEQ ID NO: 11353 - DNA, 20 bp, Artificial Sequence
  Description of Artificial Sequence: Synthetic oligonucleotide
  Target: PCSK9; (-) strand; PAM type: NRG; PAM sequence: AAG
agatgttaagtaatttgccc

SEQ ID NO: 11354 - DNA, 20 bp, Artificial Sequence
  Description of Artificial Sequence: Synthetic oligonucleotide
  Target: PCSK9; (-) strand; PAM type: NRG; PAM sequence: AAG
tttcctcatacagagatgtt

SEQ ID NO: 11355 - DNA, 20 bp, Artificial Sequence
  Description of Artificial Sequence: Synthetic oligonucleotide
  Target: PCSK9; (-) strand; PAM type: NRG; PAM sequence: GAG
actcatcatttcctcataca

SEQ ID NO: 11356 - DNA, 20 bp, Artificial Sequence
  Description of Artificial Sequence: Synthetic oligonucleotide
  Target: PCSK9; (-) strand; PAM type: NRG; PAM sequence: CAG
gcactcatcatttcctcata

SEQ ID NO: 11357 - DNA, 20 bp, Artificial Sequence
  Description of Artificial Sequence: Synthetic oligonucleotide
  Target: PCSK9; (-) strand; PAM type: NRG; PAM sequence: TAG
ccggcactaagctaagtgct

SEQ ID NO: 11358 - DNA, 20 bp, Artificial Sequence
  Description of Artificial Sequence: Synthetic oligonucleotide
  Target: PCSK9; (-) strand; PAM type: NRG; PAM sequence: AAG
tattgtcccggcactaagct

SEQ ID NO: 11359 - DNA, 20 bp, Artificial Sequence
  Description of Artificial Sequence: Synthetic oligonucleotide
  Target: PCSK9; (-) strand; PAM type: NRG; PAM sequence: AAG
atttatattgtcccggcact

SEQ ID NO: 11360 - DNA, 20 bp, Artificial Sequence
  Description of Artificial Sequence: Synthetic oligonucleotide
  Target: PCSK9; (-) strand; PAM type: NRG; PAM sequence: CGG
agctagaatttatattgtcc

SEQ ID NO: 11361 - DNA, 20 bp, Artificial Sequence
  Description of Artificial Sequence: Synthetic oligonucleotide
  Target: PCSK9; (-) strand; PAM type: NRG; PAM sequence: TAG
aaaacaatagtaacgatagc

SEQ ID NO: 11362 - DNA, 20 bp, Artificial Sequence
  Description of Artificial Sequence: Synthetic oligonucleotide
  Target: PCSK9; (-) strand; PAM type: NRG; PAM sequence: TAG
gatgaaaacaatagtaacga

SEQ ID NO: 11363 - DNA, 20 bp, Artificial Sequence
  Description of Artificial Sequence: Synthetic oligonucleotide
  Target: PCSK9; (-) strand; PAM type: NRG; PAM sequence: TAG
gcaacgggtgatgaaaacaa

SEQ ID NO: 11364 - DNA, 20 bp, Artificial Sequence
  Description of Artificial Sequence: Synthetic oligonucleotide
  Target: PCSK9; (-) strand; PAM type: NRG; PAM sequence: GGG
aggctggattttaaagcaac

SEQ ID NO: 11365 - DNA, 20 bp, Artificial Sequence
  Description of Artificial Sequence: Synthetic oligonucleotide
  Target: PCSK9; (-) strand; PAM type: NRG; PAM sequence: CGG
gaggctggattttaaagcaa

SEQ ID NO: 11366 - DNA, 20 bp, Artificial Sequence
  Description of Artificial Sequence: Synthetic oligonucleotide
  Target: PCSK9; (-) strand; PAM type: NRG; PAM sequence: AAG
ataccagaggctggatttta

SEQ ID NO: 11367 - DNA, 20 bp, Artificial Sequence
  Description of Artificial Sequence: Synthetic oligonucleotide
  Target: PCSK9; (-) strand; PAM type: NRG; PAM sequence: TGG
tagttgcctataccagaggc

SEQ ID NO: 11368 - DNA, 20 bp, Artificial Sequence
  Description of Artificial Sequence: Synthetic oligonucleotide
  Target: PCSK9; (-) strand; PAM type: NRG; PAM sequence: AGG
tcaatagttgcctataccag

SEQ ID NO: 11369 - DNA, 20 bp, Artificial Sequence
  Description of Artificial Sequence: Synthetic oligonucleotide
  Target: PCSK9; (-) strand; PAM type: NRG; PAM sequence: GAG
gtcaatagttgcctatacca

SEQ ID NO: 11370 - DNA, 20 bp, Artificial Sequence
  Description of Artificial Sequence: Synthetic oligonucleotide
  Target: PCSK9; (-) strand; PAM type: NRG; PAM sequence: CAG
ccgtcaatagttgcctatac

SEQ ID NO: 11371 - DNA, 20 bp, Artificial Sequence
  Description of Artificial Sequence: Synthetic oligonucleotide
  Target: PCSK9; (-) strand; PAM type: NRG; PAM sequence: TAG
gacacagggtagcccgtcaa

SEQ ID NO: 11372 - DNA, 20 bp, Artificial Sequence
  Description of Artificial Sequence: Synthetic oligonucleotide
  Target: PCSK9; (-) strand; PAM type: NRG; PAM sequence: TAG
ggcatgttttcgacacaggg

SEQ ID NO: 11373 - DNA, 20 bp, Artificial Sequence
  Description of Artificial Sequence: Synthetic oligonucleotide
  Target: PCSK9; (-) strand; PAM type: NRG; PAM sequence: GGG
ctgggcatgttttcgacaca

SEQ ID NO: 11374 - DNA, 20 bp, Artificial Sequence
  Description of Artificial Sequence: Synthetic oligonucleotide
  Target: PCSK9; (-) strand; PAM type: NRG; PAM sequence: AGG
cctgggcatgttttcgacac

SEQ ID NO: 11375 - DNA, 20 bp, Artificial Sequence
  Description of Artificial Sequence: Synthetic oligonucleotide
  Target: PCSK9; (-) strand; PAM type: NRG; PAM sequence: CAG
gcctgggcatgttttcgaca

SEQ ID NO: 11376 - DNA, 20 bp, Artificial Sequence
  Description of Artificial Sequence: Synthetic oligonucleotide
  Target: PCSK9; (-) strand; PAM type: NRG; PAM sequence: GGG
tgacttcctgctacctgcct

SEQ ID NO: 11377 - DNA, 20 bp, Artificial Sequence
  Description of Artificial Sequence: Synthetic oligonucleotide
  Target: PCSK9; (-) strand; PAM type: NRG; PAM sequence: TGG
gtgacttcctgctacctgcc

SEQ ID NO: 11378 - DNA, 20 bp, Artificial Sequence
  Description of Artificial Sequence: Synthetic oligonucleotide
  Target: PCSK9; (-) strand; PAM type: NRG; PAM sequence: AGG
ccatcccttgatgccccaag

SEQ ID NO: 11379 - DNA, 20 bp, Artificial Sequence
  Description of Artificial Sequence: Synthetic oligonucleotide
  Target: PCSK9; (-) strand; PAM type: NRG; PAM sequence: GAG
accatcccttgatgccccaa

SEQ ID NO: 11380 - DNA, 20 bp, Artificial Sequence
  Description of Artificial Sequence: Synthetic oligonucleotide
  Target: PCSK9; (-) strand; PAM type: NRG; PAM sequence: AAG
gcaccatcccttgatgcccc

SEQ ID NO: 11381 - DNA, 20 bp, Artificial Sequence
  Description of Artificial Sequence: Synthetic oligonucleotide
  Target: PCSK9; (-) strand; PAM type: NRG; PAM sequence: GGG
accagaacagctcagcctca

SEQ ID NO: 11382 - DNA, 20 bp, Artificial Sequence
  Description of Artificial Sequence: Synthetic oligonucleotide
  Target: PCSK9; (-) strand; PAM type: NRG; PAM sequence: AGG
aaccagaacagctcagcctc

SEQ ID NO: 11383 - DNA, 20 bp, Artificial Sequence
  Description of Artificial Sequence: Synthetic oligonucleotide
  Target: PCSK9; (-) strand; PAM type: NRG; PAM sequence: CAG
caaccagaacagctcagcct

SEQ ID NO: 11384 - DNA, 20 bp, Artificial Sequence
  Description of Artificial Sequence: Synthetic oligonucleotide
  Target: PCSK9; (-) strand; PAM type: NRG; PAM sequence: CAG
tccacccaaccagaacagct

SEQ ID NO: 11385 - DNA, 20 bp, Artificial Sequence
  Description of Artificial Sequence: Synthetic oligonucleotide
  Target: PCSK9; (-) strand; PAM type: NRG; PAM sequence: CAG
catgctccacccaaccagaa

SEQ ID NO: 11386 - DNA, 20 bp, Artificial Sequence
  Description of Artificial Sequence: Synthetic oligonucleotide
  Target: PCSK9; (-) strand; PAM type: NRG; PAM sequence: CAG
cctctcatgctccacccaac

SEQ ID NO: 11387 - DNA, 20 bp, Artificial Sequence
  Description of Artificial Sequence: Synthetic oligonucleotide
  Target: PCSK9; (-) strand; PAM type: NRG; PAM sequence: CAG
ctggagtcccactgtcttcc

SEQ ID NO: 11388 - DNA, 20 bp, Artificial Sequence
  Description of Artificial Sequence: Synthetic oligonucleotide
  Target: PCSK9; (-) strand; PAM type: NRG; PAM sequence: GAG
gagcctcttattccaggctg

SEQ ID NO: 11389 - DNA, 20 bp, Artificial Sequence
  Description of Artificial Sequence: Synthetic oligonucleotide
  Target: PCSK9; (-) strand; PAM type: NRG; PAM sequence: TGG
ctgagcctcttattccaggc

SEQ ID NO: 11390 - DNA, 20 bp, Artificial Sequence
  Description of Artificial Sequence: Synthetic oligonucleotide
  Target: PCSK9; (-) strand; PAM type: NRG; PAM sequence: AGG
aactctgagcctcttattcc

SEQ ID NO: 11391 - DNA, 20 bp, Artificial Sequence
  Description of Artificial Sequence: Synthetic oligonucleotide
  Target: PCSK9; (-) strand; PAM type: NRG; PAM sequence: CAG
caactctgagcctcttattc

SEQ ID NO: 11392 - DNA, 20 bp, Artificial Sequence
  Description of Artificial Sequence: Synthetic oligonucleotide
  Target: PCSK9; (-) strand; PAM type: NRG; PAM sequence: GAG
ctcagacgagaatcaactct

SEQ ID NO: 11393 - DNA, 20 bp, Artificial Sequence
  Description of Artificial Sequence: Synthetic oligonucleotide
  Target: PCSK9; (-) strand; PAM type: NRG; PAM sequence: GAG
tcccctggacgtgctcagac

SEQ ID NO: 11394 - DNA, 20 bp, Artificial Sequence
  Description of Artificial Sequence: Synthetic oligonucleotide
  Target: PCSK9; (-) strand; PAM type: NRG; PAM sequence: CAG
gtggttcccctggacgtgct

SEQ ID NO: 11395 - DNA, 20 bp, Artificial Sequence
  Description of Artificial Sequence: Synthetic oligonucleotide
  Target: PCSK9; (-) strand; PAM type: NRG; PAM sequence: TGG
caaaccctcagtggttcccc

SEQ ID NO: 11396 - DNA, 20 bp, Artificial Sequence
  Description of Artificial Sequence: Synthetic oligonucleotide
  Target: PCSK9; (-) strand; PAM type: NRG; PAM sequence: TGG
tcctgttcccaaaccctcag

SEQ ID NO: 11397 - DNA, 20 bp, Artificial Sequence
  Description of Artificial Sequence: Synthetic oligonucleotide
  Target: PCSK9; (-) strand; PAM type: NRG; PAM sequence: CAG
ctctcctgttcccaaaccct

SEQ ID NO: 11398 - DNA, 20 bp, Artificial Sequence
  Description of Artificial Sequence: Synthetic oligonucleotide
  Target: PCSK9; (-) strand; PAM type: NRG; PAM sequence: AGG
agcctgctgtgcccagaacc

SEQ ID NO: 11399 - DNA, 20 bp, Artificial Sequence
  Description of Artificial Sequence: Synthetic oligonucleotide
  Target: PCSK9; (-) strand; PAM type: NRG; PAM sequence: CAG
cagcctgctgtgcccagaac

SEQ ID NO: 11400 - DNA, 20 bp, Artificial Sequence
  Description of Artificial Sequence: Synthetic oligonucleotide
  Target: PCSK9; (-) strand; PAM type: NRG; PAM sequence: CAG
acatgccagcctgctgtgcc

SEQ ID NO: 11401 - DNA, 20 bp, Artificial Sequence
  Description of Artificial Sequence: Synthetic oligonucleotide
  Target: PCSK9; (-) strand; PAM type: NRG; PAM sequence: CAG
tgaacatccatcctacatgc

SEQ ID NO: 11402 - DNA, 20 bp, Artificial Sequence
  Description of Artificial Sequence: Synthetic oligonucleotide
  Target: PCSK9; (-) strand; PAM type: NRG; PAM sequence: CAG
tctcccctggacaagggcac

SEQ ID NO: 11403 - DNA, 20 bp, Artificial Sequence
  Description of Artificial Sequence: Synthetic oligonucleotide
  Target: PCSK9; (-) strand; PAM type: NRG; PAM sequence: GGG
ggagcctctcccctggacaa

SEQ ID NO: 11404 - DNA, 20 bp, Artificial Sequence
  Description of Artificial Sequence: Synthetic oligonucleotide
  Target: PCSK9; (-) strand; PAM type: NRG; PAM sequence: AGG
cggagcctctcccctggaca

SEQ ID NO: 11405 - DNA, 20 bp, Artificial Sequence
  Description of Artificial Sequence: Synthetic oligonucleotide
  Target: PCSK9; (-) strand; PAM type: NRG; PAM sequence: AAG
acggagcctctcccctggac

SEQ ID NO: 11406 - DNA, 20 bp, Artificial Sequence
  Description of Artificial Sequence: Synthetic oligonucleotide
  Target: PCSK9; (-) strand; PAM type: NRG; PAM sequence: TGG
acctgacggagcctctcccc

SEQ ID NO: 11407 - DNA, 20 bp, Artificial Sequence
  Description of Artificial Sequence: Synthetic oligonucleotide
  Target: PCSK9; (-) strand; PAM type: NRG; PAM sequence: GAG
caggacccctgaacctgacg

SEQ ID NO: 11408 - DNA, 20 bp, Artificial Sequence
  Description of Artificial Sequence: Synthetic oligonucleotide
  Target: PCSK9; (-) strand; PAM type: NRG; PAM sequence: CGG
gccaggacccctgaacctga

SEQ ID NO: 11409 - DNA, 20 bp, Artificial Sequence
  Description of Artificial Sequence: Synthetic oligonucleotide
  Target: PCSK9; (-) strand; PAM type: NRG; PAM sequence: AGG
ggcggacttccctccaagcc

SEQ ID NO: 11410 - DNA, 20 bp, Artificial Sequence
  Description of Artificial Sequence: Synthetic oligonucleotide
  Target: PCSK9; (-) strand; PAM type: NRG; PAM sequence: CAG
tggcggacttccctccaagc

SEQ ID NO: 11411 - DNA, 20 bp, Artificial Sequence
  Description of Artificial Sequence: Synthetic oligonucleotide
  Target: PCSK9; (-) strand; PAM type: NRG; PAM sequence: AAG
agcatggcggacttccctcc

SEQ ID NO: 11412 - DNA, 20 bp, Artificial Sequence
  Description of Artificial Sequence: Synthetic oligonucleotide
  Target: PCSK9; (-) strand; PAM type: NRG; PAM sequence: CGG
ggagcgtgattagagcatgg

SEQ ID NO: 11413 - DNA, 20 bp, Artificial Sequence
  Description of Artificial Sequence: Synthetic oligonucleotide
  Target: PCSK9; (-) strand; PAM type: NRG; PAM sequence: TGG
aggggagcgtgattagagca

SEQ ID NO: 11414 - DNA, 20 bp, Artificial Sequence
  Description of Artificial Sequence: Synthetic oligonucleotide
  Target: PCSK9; (-) strand; PAM type: NRG; PAM sequence: GAG
tccaaaggggagcgtgatta

SEQ ID NO: 11415 - DNA, 20 bp, Artificial Sequence
  Description of Artificial Sequence: Synthetic oligonucleotide
  Target: PCSK9; (-) strand; PAM type: NRG; PAM sequence: TAG
cttccaaaggggagcgtgat

SEQ ID NO: 11416 - DNA, 20 bp, Artificial Sequence
  Description of Artificial Sequence: Synthetic oligonucleotide
  Target: PCSK9; (-) strand; PAM type: NRG; PAM sequence: GAG
ggctgagcacttccaaaggg

SEQ ID NO: 11417 - DNA, 20 bp, Artificial Sequence
  Description of Artificial Sequence: Synthetic oligonucleotide
  Target: PCSK9; (-) strand; PAM type: NRG; PAM sequence: GGG
tcggctgagcacttccaaag

SEQ ID NO: 11418 - DNA, 20 bp, Artificial Sequence
  Description of Artificial Sequence: Synthetic oligonucleotide
  Target: PCSK9; (-) strand; PAM type: NRG; PAM sequence: GGG
atcggctgagcacttccaaa

SEQ ID NO: 11419 - DNA, 20 bp, Artificial Sequence
  Description of Artificial Sequence: Synthetic oligonucleotide
  Target: PCSK9; (-) strand; PAM type: NRG; PAM sequence: AGG
catcggctgagcacttccaa

SEQ ID NO: 11420 - DNA, 20 bp, Artificial Sequence
  Description of Artificial Sequence: Synthetic oligonucleotide
  Target: PCSK9; (-) strand; PAM type: NRG; PAM sequence: AAG
tcatcggctgagcacttcca

SEQ ID NO: 11421 - DNA, 20 bp, Artificial Sequence
  Description of Artificial Sequence: Synthetic oligonucleotide
  Target: PCSK9; (-) strand; PAM type: NRG; PAM sequence: GAG
tgcctgtgagctcatcggct

SEQ ID NO: 11422 - DNA, 20 bp, Artificial Sequence
  Description of Artificial Sequence: Synthetic oligonucleotide
  Target: PCSK9; (-) strand; PAM type: NRG; PAM sequence: CGG
acatgtgcctgtgagctcat

SEQ ID NO: 11423 - DNA, 20 bp, Artificial Sequence
  Description of Artificial Sequence: Synthetic oligonucleotide
  Target: PCSK9; (-) strand; PAM type: NRG; PAM sequence: GAG
tcaaactgacatgtgcctgt

SEQ ID NO: 11424 - DNA, 20 bp, Artificial Sequence
  Description of Artificial Sequence: Synthetic oligonucleotide
  Target: PCSK9; (-) strand; PAM type: NRG; PAM sequence: CAG
tgaggtgcgcttcatggagt

SEQ ID NO: 11425 - DNA, 20 bp, Artificial Sequence
  Description of Artificial Sequence: Synthetic oligonucleotide
  Target: PCSK9; (-) strand; PAM type: NRG; PAM sequence: GAG
tctttgaggtgcgcttcatg

SEQ ID NO: 11426 - DNA, 20 bp, Artificial Sequence
  Description of Artificial Sequence: Synthetic oligonucleotide
  Target: PCSK9; (-) strand; PAM type: NRG; PAM sequence: TGG
gctctttgaggtgcgcttca

SEQ ID NO: 11427 - DNA, 20 bp, Artificial Sequence
  Description of Artificial Sequence: Synthetic oligonucleotide
  Target: PCSK9; (-) strand; PAM type: NRG; PAM sequence: AGG
ctgcaaaatggtgctctttg

SEQ ID NO: 11428 - DNA, 20 bp, Artificial Sequence
  Description of Artificial Sequence: Synthetic oligonucleotide
  Target: PCSK9; (-) strand; PAM type: NRG; PAM sequence: GAG
gctgcaaaatggtgctcttt

SEQ ID NO: 11429 - DNA, 20 bp, Artificial Sequence
  Description of Artificial Sequence: Synthetic oligonucleotide
  Target: PCSK9; (-) strand; PAM type: NRG; PAM sequence: TGG
cagttcccttagctgcaaaa

SEQ ID NO: 11430 - DNA, 20 bp, Artificial Sequence
  Description of Artificial Sequence: Synthetic oligonucleotide
  Target: PCSK9; (-) strand; PAM type: NRG; PAM sequence: TAG
tgtccagcctgcagttccct

SEQ ID NO: 11431 - DNA, 20 bp, Artificial Sequence
  Description of Artificial Sequence: Synthetic oligonucleotide
  Target: PCSK9; (-) strand; PAM type: NRG; PAM sequence: CAG
cactcagcatgtccagcctg

SEQ ID NO: 11432 - DNA, 20 bp, Artificial Sequence
  Description of Artificial Sequence: Synthetic oligonucleotide
  Target: PCSK9; (-) strand; PAM type: NRG; PAM sequence: CAG
gggcagccactcagcatgtc

SEQ ID NO: 11433 - DNA, 20 bp, Artificial Sequence
  Description of Artificial Sequence: Synthetic oligonucleotide
  Target: PCSK9; (-) strand; PAM type: NRG; PAM sequence: CAG
aagggctcggggcagccact

SEQ ID NO: 11434 - DNA, 20 bp, Artificial Sequence
  Description of Artificial Sequence: Synthetic oligonucleotide
  Target: PCSK9; (-) strand; PAM type: NRG; PAM sequence: CAG
ctagctgcaagggctcgggg

SEQ ID NO: 11435 - DNA, 20 bp, Artificial Sequence
  Description of Artificial Sequence: Synthetic oligonucleotide
  Target: PCSK9; (-) strand; PAM type: NRG; PAM sequence: GGG
gtcctagctgcaagggctcg

SEQ ID NO: 11436 - DNA, 20 bp, Artificial Sequence
  Description of Artificial Sequence: Synthetic oligonucleotide
  Target: PCSK9; (-) strand; PAM type: NRG; PAM sequence: GGG
tgtcctagctgcaagggctc

SEQ ID NO: 11437 - DNA, 20 bp, Artificial Sequence
  Description of Artificial Sequence: Synthetic oligonucleotide
  Target: PCSK9; (-) strand; PAM type: NRG; PAM sequence: CGG
atgtcctagctgcaagggct

SEQ ID NO: 11438 - DNA, 20 bp, Artificial Sequence
  Description of Artificial Sequence: Synthetic oligonucleotide
  Target: PCSK9; (-) strand; PAM type: NRG; PAM sequence: GGG
tctctatgtcctagctgcaa

SEQ ID NO: 11439 - DNA, 20 bp, Artificial Sequence
  Description of Artificial Sequence: Synthetic oligonucleotide
  Target: PCSK9; (-) strand; PAM type: NRG; PAM sequence: AGG
ttctctatgtcctagctgca

SEQ ID NO: 11440 - DNA, 20 bp, Artificial Sequence
  Description of Artificial Sequence: Synthetic oligonucleotide
  Target: PCSK9; (-) strand; PAM type: NRG; PAM sequence: AAG
attctctatgtcctagctgc

SEQ ID NO: 11441 - DNA, 20 bp, Artificial Sequence
  Description of Artificial Sequence: Synthetic oligonucleotide
  Target: PCSK9; (-) strand; PAM type: NRG; PAM sequence: TAG
tactagcattctctatgtcc

SEQ ID NO: 11442 - DNA, 20 bp, Artificial Sequence
  Description of Artificial Sequence: Synthetic oligonucleotide
  Target: PCSK9; (-) strand; PAM type: NRG; PAM sequence: TAG
catggtagggttgtggttac

SEQ ID NO: 11443 - DNA, 20 bp, Artificial Sequence
  Description of Artificial Sequence: Synthetic oligonucleotide
  Target: PCSK9; (-) strand; PAM type: NRG; PAM sequence: TGG
ctctgaacatggtagggttg

SEQ ID NO: 11444 - DNA, 20 bp, Artificial Sequence
  Description of Artificial Sequence: Synthetic oligonucleotide
  Target: PCSK9; (-) strand; PAM type: NRG; PAM sequence: GGG
catgtgctctgaacatggta

SEQ ID NO: 11445 - DNA, 20 bp, Artificial Sequence
  Description of Artificial Sequence: Synthetic oligonucleotide
  Target: PCSK9; (-) strand; PAM type: NRG; PAM sequence: AGG
gcatgtgctctgaacatggt

SEQ ID NO: 11446 - DNA, 20 bp, Artificial Sequence
  Description of Artificial Sequence: Synthetic oligonucleotide
  Target: PCSK9; (-) strand; PAM type: NRG; PAM sequence: TAG
ggcatgtgctctgaacatgg

SEQ ID NO: 11447 - DNA, 20 bp, Artificial Sequence
  Description of Artificial Sequence: Synthetic oligonucleotide
  Target: PCSK9; (-) strand; PAM type: NRG; PAM sequence: TGG
cctggcatgtgctctgaaca

SEQ ID NO: 11448 - DNA, 20 bp, Artificial Sequence
  Description of Artificial Sequence: Synthetic oligonucleotide
  Target: PCSK9; (-) strand; PAM type: NRG; PAM sequence: TGG
cgaagccccagcatggagcc

SEQ ID NO: 11449 - DNA, 20 bp, Artificial Sequence
  Description of Artificial Sequence: Synthetic oligonucleotide
  Target: PCSK9; (-) strand; PAM type: NRG; PAM sequence: GAG
acgtgcgaagccccagcatg

SEQ ID NO: 11450 - DNA, 20 bp, Artificial Sequence
  Description of Artificial Sequence: Synthetic oligonucleotide
  Target: PCSK9; (-) strand; PAM type: NRG; PAM sequence: TGG
acacgtgcgaagccccagca

SEQ ID NO: 11451 - DNA, 20 bp, Artificial Sequence
  Description of Artificial Sequence: Synthetic oligonucleotide
  Target: PCSK9; (-) strand; PAM type: NRG; PAM sequence: CAG
agatgacacgtgcgaagccc

SEQ ID NO: 11452 - DNA, 20 bp, Artificial Sequence
  Description of Artificial Sequence: Synthetic oligonucleotide
  Target: PCSK9; (-) strand; PAM type: NRG; PAM sequence: AAG
ctgtgaagatgacacgtgcg

SEQ ID NO: 11453 - DNA, 20 bp, Artificial Sequence
  Description of Artificial Sequence: Synthetic oligonucleotide
  Target: PCSK9; (-) strand; PAM type: NRG; PAM sequence: AAG
ctactcacagggacactgtg

SEQ ID NO: 11454 - DNA, 20 bp, Artificial Sequence
  Description of Artificial Sequence: Synthetic oligonucleotide
  Target: PCSK9; (-) strand; PAM type: NRG; PAM sequence: GGG
agaaaccacacctactcaca

SEQ ID NO: 11455 - DNA, 20 bp, Artificial Sequence
  Description of Artificial Sequence: Synthetic oligonucleotide
  Target: PCSK9; (-) strand; PAM type: NRG; PAM sequence: AGG
gagaaaccacacctactcac

SEQ ID NO: 11456 - DNA, 20 bp, Artificial Sequence
  Description of Artificial Sequence: Synthetic oligonucleotide
  Target: PCSK9; (-) strand; PAM type: NRG; PAM sequence: CAG
agagaaaccacacctactca

SEQ ID NO: 11457 - DNA, 20 bp, Artificial Sequence
  Description of Artificial Sequence: Synthetic oligonucleotide
  Target: PCSK9; (-) strand; PAM type: NRG; PAM sequence: GAG
actcatttgtaagatggaaa

SEQ ID NO: 11458 - DNA, 20 bp, Artificial Sequence
  Description of Artificial Sequence: Synthetic oligonucleotide
  Target: PCSK9; (-) strand; PAM type: NRG; PAM sequence: AAG
ttactcatttgtaagatgga

SEQ ID NO: 11459 - DNA, 20 bp, Artificial Sequence
  Description of Artificial Sequence: Synthetic oligonucleotide
  Target: PCSK9; (-) strand; PAM type: NRG; PAM sequence: TGG
ctgtttactcatttgtaaga

SEQ ID NO: 11460 - DNA, 20 bp, Artificial Sequence
  Description of Artificial Sequence: Synthetic oligonucleotide
  Target: PCSK9; (-) strand; PAM type: NRG; PAM sequence: AAG
ggctctgtttactcatttgt

SEQ ID NO: 11461 - DNA, 20 bp, Artificial Sequence
  Description of Artificial Sequence: Synthetic oligonucleotide
  Target: PCSK9; (-) strand; PAM type: NRG; PAM sequence: AGG
gtggttacttagctacactg

SEQ ID NO: 11462 - DNA, 20 bp, Artificial Sequence
  Description of Artificial Sequence: Synthetic oligonucleotide
  Target: PCSK9; (-) strand; PAM type: NRG; PAM sequence: GAG
agtggttacttagctacact

SEQ ID NO: 11463 - DNA, 20 bp, Artificial Sequence
  Description of Artificial Sequence: Synthetic oligonucleotide
  Target: PCSK9; (-) strand; PAM type: NRG; PAM sequence: TAG
aacctaaaatagtggttact

SEQ ID NO: 11464 - DNA, 20 bp, Artificial Sequence
  Description of Artificial Sequence: Synthetic oligonucleotide
  Target: PCSK9; (-) strand; PAM type: NRG; PAM sequence: TGG
ggctaagaaacctaaaatag

SEQ ID NO: 11465 - DNA, 20 bp, Artificial Sequence
  Description of Artificial Sequence: Synthetic oligonucleotide
  Target: PCSK9; (-) strand; PAM type: NRG; PAM sequence: TAG
attggctaagaaacctaaaa

SEQ ID NO: 11466 - DNA, 20 bp, Artificial Sequence
  Description of Artificial Sequence: Synthetic oligonucleotide
  Target: PCSK9; (-) strand; PAM type: NRG; PAM sequence: AAG
gtcagacacacccattggct

SEQ ID NO: 11467 - DNA, 20 bp, Artificial Sequence
  Description of Artificial Sequence: Synthetic oligonucleotide
  Target: PCSK9; (-) strand; PAM type: NRG; PAM sequence: TGG
taggagtcagacacacccat

SEQ ID NO: 11468 - DNA, 20 bp, Artificial Sequence
  Description of Artificial Sequence: Synthetic oligonucleotide
  Target: PCSK9; (-) strand; PAM type: NRG; PAM sequence: CAG
ccctccatgggcttaggagt

SEQ ID NO: 11469 - DNA, 20 bp, Artificial Sequence
  Description of Artificial Sequence: Synthetic oligonucleotide
  Target: PCSK9; (-) strand; PAM type: NRG; PAM sequence: GAG
aatgccctccatgggcttag

SEQ ID NO: 11470 - DNA, 20 bp, Artificial Sequence
  Description of Artificial Sequence: Synthetic oligonucleotide
  Target: PCSK9; (-) strand; PAM type: NRG; PAM sequence: AGG
agaatgccctccatgggctt

SEQ ID NO: 11471 - DNA, 20 bp, Artificial Sequence
  Description of Artificial Sequence: Synthetic oligonucleotide
  Target: PCSK9; (-) strand; PAM type: NRG; PAM sequence: TAG
cagaatgccctccatgggct

SEQ ID NO: 11472 - DNA, 20 bp, Artificial Sequence
  Description of Artificial Sequence: Synthetic oligonucleotide
  Target: PCSK9; (-) strand; PAM type: NRG; PAM sequence: GGG
cacctcagaatgccctccat

SEQ ID NO: 11473 - DNA, 20 bp, Artificial Sequence
  Description of Artificial Sequence: Synthetic oligonucleotide
  Target: PCSK9; (-) strand; PAM type: NRG; PAM sequence: TGG
ccacctcagaatgccctcca

SEQ ID NO: 11474 - DNA, 20 bp, Artificial Sequence
  Description of Artificial Sequence: Synthetic oligonucleotide
  Target: PCSK9; (-) strand; PAM type: NRG; PAM sequence: CAG
ggggtctgtctgaaccacct

SEQ ID NO: 11475 - DNA, 20 bp, Artificial Sequence
  Description of Artificial Sequence: Synthetic oligonucleotide
  Target: PCSK9; (-) strand; PAM type: NRG; PAM sequence: GGG
agaagttcaagggtaagccg

SEQ ID NO: 11476 - DNA, 20 bp, Artificial Sequence
  Description of Artificial Sequence: Synthetic oligonucleotide
  Target: PCSK9; (-) strand; PAM type: NRG; PAM sequence: GGG
cagaagttcaagggtaagcc

SEQ ID NO: 11477 - DNA, 20 bp, Artificial Sequence
  Description of Artificial Sequence: Synthetic oligonucleotide
  Target: PCSK9; (-) strand; PAM type: NRG; PAM sequence: CGG
gcagaagttcaagggtaagc

SEQ ID NO: 11478 - DNA, 20 bp, Artificial Sequence
  Description of Artificial Sequence: Synthetic oligonucleotide
  Target: PCSK9; (-) strand; PAM type: NRG; PAM sequence: AAG
gcaggcagaagttcaagggt

SEQ ID NO: 11479 - DNA, 20 bp, Artificial Sequence
  Description of Artificial Sequence: Synthetic oligonucleotide
  Target: PCSK9; (-) strand; PAM type: NRG; PAM sequence: GGG
gccagcaggcagaagttcaa

SEQ ID NO: 11480 - DNA, 20 bp, Artificial Sequence
  Description of Artificial Sequence: Synthetic oligonucleotide
  Target: PCSK9; (-) strand; PAM type: NRG; PAM sequence: AGG
agccagcaggcagaagttca

SEQ ID NO: 11481 - DNA, 20 bp, Artificial Sequence
  Description of Artificial Sequence: Synthetic oligonucleotide
  Target: PCSK9; (-) strand; PAM type: NRG; PAM sequence: AAG
cagccagcaggcagaagttc

SEQ ID NO: 11482 - DNA, 20 bp, Artificial Sequence
  Description of Artificial Sequence: Synthetic oligonucleotide
  Target: PCSK9; (-) strand; PAM type: NRG; PAM sequence: AAG
cctatgcagccagcaggcag

SEQ ID NO: 11483 - DNA, 20 bp, Artificial Sequence
  Description of Artificial Sequence: Synthetic oligonucleotide
  Target: PCSK9; (-) strand; PAM type: NRG; PAM sequence: CAG
ctccctatgcagccagcagg

SEQ ID NO: 11484 - DNA, 20 bp, Artificial Sequence
  Description of Artificial Sequence: Synthetic oligonucleotide
  Target: PCSK9; (-) strand; PAM type: NRG; PAM sequence: AGG
cccctccctatgcagccagc

SEQ ID NO: 11485 - DNA, 20 bp, Artificial Sequence
  Description of Artificial Sequence: Synthetic oligonucleotide
  Target: PCSK9; (-) strand; PAM type: NRG; PAM sequence: CAG
gcccctccctatgcagccag

SEQ ID NO: 11486 - DNA, 20 bp, Artificial Sequence
  Description of Artificial Sequence: Synthetic oligonucleotide
  Target: PCSK9; (-) strand; PAM type: NRG; PAM sequence: CAG
ccagcccctccctatgcagc

SEQ ID NO: 11487 - DNA, 20 bp, Artificial Sequence
  Description of Artificial Sequence: Synthetic oligonucleotide
  Target: PCSK9; (-) strand; PAM type: NRG; PAM sequence: CAG
ccccccagcccctccctatg

SEQ ID NO: 11488 - DNA, 20 bp, Artificial Sequence
  Description of Artificial Sequence: Synthetic oligonucleotide
  Target: PCSK9; (-) strand; PAM type: NRG; PAM sequence: CAG
tgagatgctcaaactccccc

SEQ ID NO: 11489 - DNA, 20 bp, Artificial Sequence
  Description of Artificial Sequence: Synthetic oligonucleotide
  Target: PCSK9; (-) strand; PAM type: NRG; PAM sequence: GAG
aggcaggggctctatggcct

SEQ ID NO: 11490 - DNA, 20 bp, Artificial Sequence
  Description of Artificial Sequence: Synthetic oligonucleotide
  Target: PCSK9; (-) strand; PAM type: NRG; PAM sequence: TGG
acagtgaggcaggggctcta

SEQ ID NO: 11491 - DNA, 20 bp, Artificial Sequence
  Description of Artificial Sequence: Synthetic oligonucleotide
  Target: PCSK9; (-) strand; PAM type: NRG; PAM sequence: GGG
agatggagacagtgaggcag

SEQ ID NO: 11492 - DNA, 20 bp, Artificial Sequence
  Description of Artificial Sequence: Synthetic oligonucleotide
  Target: PCSK9; (-) strand; PAM type: NRG; PAM sequence: GGG
gagatggagacagtgaggca

SEQ ID NO: 11493 - DNA, 20 bp, Artificial Sequence
  Description of Artificial Sequence: Synthetic oligonucleotide
  Target: PCSK9; (-) strand; PAM type: NRG; PAM sequence: AGG
agagatggagacagtgaggc

SEQ ID NO: 11494 - DNA, 20 bp, Artificial Sequence
  Description of Artificial Sequence: Synthetic oligonucleotide
  Target: PCSK9; (-) strand; PAM type: NRG; PAM sequence: CAG
cagagatggagacagtgagg

SEQ ID NO: 11495 - DNA, 20 bp, Artificial Sequence
  Description of Artificial Sequence: Synthetic oligonucleotide
  Target: PCSK9; (-) strand; PAM type: NRG; PAM sequence: AGG
acccagagatggagacagtg

SEQ ID NO: 11496 - DNA, 20 bp, Artificial Sequence
  Description of Artificial Sequence: Synthetic oligonucleotide
  Target: PCSK9; (-) strand; PAM type: NRG; PAM sequence: GAG
cacccagagatggagacagt

SEQ ID NO: 11497 - DNA, 20 bp, Artificial Sequence
  Description of Artificial Sequence: Synthetic oligonucleotide
  Target: PCSK9; (-) strand; PAM type: NRG; PAM sequence: CAG
tttccacccagagatggaga

SEQ ID NO: 11498 - DNA, 20 bp, Artificial Sequence
  Description of Artificial Sequence: Synthetic oligonucleotide
  Target: PCSK9; (-) strand; PAM type: NRG; PAM sequence: GAG
catctttccacccagagatg

SEQ ID NO: 11499 - DNA, 20 bp, Artificial Sequence
  Description of Artificial Sequence: Synthetic oligonucleotide
  Target: PCSK9; (-) strand; PAM type: NRG; PAM sequence: TGG
accatctttccacccagaga

SEQ ID NO: 11500 - DNA, 20 bp, Artificial Sequence
  Description of Artificial Sequence: Synthetic oligonucleotide
  Target: PCSK9; (-) strand; PAM type: NRG; PAM sequence: GAG
aaacaccatctttccaccca

SEQ ID NO: 11501 - DNA, 20 bp, Artificial Sequence
  Description of Artificial Sequence: Synthetic oligonucleotide
  Target: PCSK9; (-) strand; PAM type: NRG; PAM sequence: CAG
gaaaacaccatctttccacc

SEQ ID NO: 11502 - DNA, 20 bp, Artificial Sequence
  Description of Artificial Sequence: Synthetic oligonucleotide
  Target: PCSK9; (-) strand; PAM type: NRG; PAM sequence: GGG
ctctgagccttagtttctca

SEQ ID NO: 11503 - DNA, 20 bp, Artificial Sequence
  Description of Artificial Sequence: Synthetic oligonucleotide
  Target: PCSK9; (-) strand; PAM type: NRG; PAM sequence: AGG
tctctgagccttagtttctc

SEQ ID NO: 11504 - DNA, 20 bp, Artificial Sequence
  Description of Artificial Sequence: Synthetic oligonucleotide
  Target: PCSK9; (-) strand; PAM type: NRG; PAM sequence: CAG
ctctctgagccttagtttct

SEQ ID NO: 11505 - DNA, 20 bp, Artificial Sequence
  Description of Artificial Sequence: Synthetic oligonucleotide
  Target: PCSK9; (-) strand; PAM type: NRG; PAM sequence: TAG
cattcaacctctctgagcct

SEQ ID NO: 11506 - DNA, 20 bp, Artificial Sequence
  Description of Artificial Sequence: Synthetic oligonucleotide
  Target: PCSK9; (-) strand; PAM type: NRG; PAM sequence: GAG
gagagccattcaacctctct

SEQ ID NO: 11507 - DNA, 20 bp, Artificial Sequence
  Description of Artificial Sequence: Synthetic oligonucleotide
  Target: PCSK9; (-) strand; PAM type: NRG; PAM sequence: GAG
ccagctgtgtgaccttggga

SEQ ID NO: 11508 - DNA, 20 bp, Artificial Sequence
  Description of Artificial Sequence: Synthetic oligonucleotide
  Target: PCSK9; (-) strand; PAM type: NRG; PAM sequence: GAG
gaccagctgtgtgaccttgg

SEQ ID NO: 11509 - DNA, 20 bp, Artificial Sequence
  Description of Artificial Sequence: Synthetic oligonucleotide
  Target: PCSK9; (-) strand; PAM type: NRG; PAM sequence: GGG
ctgaccagctgtgtgacctt

SEQ ID NO: 11510 - DNA, 20 bp, Artificial Sequence
  Description of Artificial Sequence: Synthetic oligonucleotide
  Target: PCSK9; (-) strand; PAM type: NRG; PAM sequence: TGG
gctgaccagctgtgtgacct

SEQ ID NO: 11511 - DNA, 20 bp, Artificial Sequence
  Description of Artificial Sequence: Synthetic oligonucleotide
  Target: PCSK9; (-) strand; PAM type: NRG; PAM sequence: CAG
ttctcaactctgcagctgac

SEQ ID NO: 11512 - DNA, 20 bp, Artificial Sequence
  Description of Artificial Sequence: Synthetic oligonucleotide
  Target: PCSK9; (-) strand; PAM type: NRG; PAM sequence: CAG
ctcctgtgttctcaactctg

SEQ ID NO: 11513 - DNA, 20 bp, Artificial Sequence
  Description of Artificial Sequence: Synthetic oligonucleotide
  Target: PCSK9; (-) strand; PAM type: NRG; PAM sequence: AGG
gagatgctggcctgagcacc

SEQ ID NO: 11514 - DNA, 20 bp, Artificial Sequence
  Description of Artificial Sequence: Synthetic oligonucleotide
  Target: PCSK9; (-) strand; PAM type: NRG; PAM sequence: CAG
agagatgctggcctgagcac

SEQ ID NO: 11515 - DNA, 20 bp, Artificial Sequence
  Description of Artificial Sequence: Synthetic oligonucleotide
  Target: PCSK9; (-) strand; PAM type: NRG; PAM sequence: GAG
aaaaaaagagatgctggcct

SEQ ID NO: 11516 - DNA, 20 bp, Artificial Sequence
  Description of Artificial Sequence: Synthetic oligonucleotide
  Target: PCSK9; (-) strand; PAM type: NRG; PAM sequence: TGG
tcaaagaaaaaaagagatgc

SEQ ID NO: 11517 - DNA, 20 bp, Artificial Sequence
  Description of Artificial Sequence: Synthetic oligonucleotide
  Target: PCSK9; (-) strand; PAM type: NRG; PAM sequence: GAG
aaacaactcaaagaaaaaaa

SEQ ID NO: 11518 - DNA, 20 bp, Artificial Sequence
  Description of Artificial Sequence: Synthetic oligonucleotide
  Target: PCSK9; (-) strand; PAM type: NRG; PAM sequence: AAG
agaaacaactcaaagaaaaa

SEQ ID NO: 11519 - DNA, 20 bp, Artificial Sequence
  Description of Artificial Sequence: Synthetic oligonucleotide
  Target: PCSK9; (-) strand; PAM type: NRG; PAM sequence: AAG
ggaaacctagaaacaactca

SEQ ID NO: 11520 - DNA, 20 bp, Artificial Sequence
  Description of Artificial Sequence: Synthetic oligonucleotide
  Target: PCSK9; (-) strand; PAM type: NRG; PAM sequence: TAG
gaggcaagagctaggaaacc

SEQ ID NO: 11521 - DNA, 20 bp, Artificial Sequence
  Description of Artificial Sequence: Synthetic oligonucleotide
  Target: PCSK9; (-) strand; PAM type: NRG; PAM sequence: AGG
taaggtctgaggcaagagct

SEQ ID NO: 11522 - DNA, 20 bp, Artificial Sequence
  Description of Artificial Sequence: Synthetic oligonucleotide
  Target: PCSK9; (-) strand; PAM type: NRG; PAM sequence: TAG
ttaaggtctgaggcaagagc

SEQ ID NO: 11523 - DNA, 20 bp, Artificial Sequence
  Description of Artificial Sequence: Synthetic oligonucleotide
  Target: PCSK9; (-) strand; PAM type: NRG; PAM sequence: GAG
ctctttaaggtctgaggcaa

SEQ ID NO: 11524 - DNA, 20 bp, Artificial Sequence
  Description of Artificial Sequence: Synthetic oligonucleotide
  Target: PCSK9; (-) strand; PAM type: NRG; PAM sequence: AAG
ctctctttaaggtctgaggc

SEQ ID NO: 11525 - DNA, 20 bp, Artificial Sequence
  Description of Artificial Sequence: Synthetic oligonucleotide
  Target: PCSK9; (-) strand; PAM type: NRG; PAM sequence: AGG
ccctctctctttaaggtctg

SEQ ID NO: 11526 - DNA, 20 bp, Artificial Sequence
  Description of Artificial Sequence: Synthetic oligonucleotide
  Target: PCSK9; (-) strand; PAM type: NRG; PAM sequence: GAG
accctctctctttaaggtct

SEQ ID NO: 11527 - DNA, 20 bp, Artificial Sequence
  Description of Artificial Sequence: Synthetic oligonucleotide
  Target: PCSK9; (-) strand; PAM type: NRG; PAM sequence: AGG
catcagaccctctctcttta

SEQ ID NO: 11528 - DNA, 20 bp, Artificial Sequence
  Description of Artificial Sequence: Synthetic oligonucleotide
  Target: PCSK9; (-) strand; PAM type: NRG; PAM sequence: AAG
ccatcagaccctctctcttt

SEQ ID NO: 11529 - DNA, 20 bp, Artificial Sequence
  Description of Artificial Sequence: Synthetic oligonucleotide
  Target: PCSK9; (-) strand; PAM type: NRG; PAM sequence: CAG
tctccagtgcccatccccat

SEQ ID NO: 11530 - DNA, 20 bp, Artificial Sequence
  Description of Artificial Sequence: Synthetic oligonucleotide
  Target: PCSK9; (-) strand; PAM type: NRG; PAM sequence: CAG
atgctgggatgctccgtctc

SEQ ID NO: 11531 - DNA, 20 bp, Artificial Sequence
  Description of Artificial Sequence: Synthetic oligonucleotide
  Target: PCSK9; (-) strand; PAM type: NRG; PAM sequence: GGG
cagctcagatgtgaaatgct

SEQ ID NO: 11532 - DNA, 20 bp, Artificial Sequence
  Description of Artificial Sequence: Synthetic oligonucleotide
  Target: PCSK9; (-) strand; PAM type: NRG; PAM sequence: TGG
ccagctcagatgtgaaatgc

SEQ ID NO: 11533 - DNA, 20 bp, Artificial Sequence
  Description of Artificial Sequence: Synthetic oligonucleotide
  Target: PCSK9; (-) strand; PAM type: NRG; PAM sequence: CAG
ggggcagaggaaagccagct

SEQ ID NO: 11534 - DNA, 20 bp, Artificial Sequence
  Description of Artificial Sequence: Synthetic oligonucleotide
  Target: PCSK9; (-) strand; PAM type: NRG; PAM sequence: CAG
agcctggggcagaggaaagc

SEQ ID NO: 11535 - DNA, 20 bp, Artificial Sequence
  Description of Artificial Sequence: Synthetic oligonucleotide
  Target: PCSK9; (-) strand; PAM type: NRG; PAM sequence: AAG
ctgcagcctggggcagagga

SEQ ID NO: 11536 - DNA, 20 bp, Artificial Sequence
  Description of Artificial Sequence: Synthetic oligonucleotide
  Target: PCSK9; (-) strand; PAM type: NRG; PAM sequence: AGG
ggagctgcagcctggggcag

SEQ ID NO: 11537 - DNA, 20 bp, Artificial Sequence
  Description of Artificial Sequence: Synthetic oligonucleotide
  Target: PCSK9; (-) strand; PAM type: NRG; PAM sequence: GAG
gggagctgcagcctggggca

SEQ ID NO: 11538 - DNA, 20 bp, Artificial Sequence
  Description of Artificial Sequence: Synthetic oligonucleotide
  Target: PCSK9; (-) strand; PAM type: NRG; PAM sequence: CAG
gtgggagctgcagcctgggg

SEQ ID NO: 11539 - DNA, 20 bp, Artificial Sequence
  Description of Artificial Sequence: Synthetic oligonucleotide
  Target: PCSK9; (-) strand; PAM type: NRG; PAM sequence: GGG
ccagtgggagctgcagcctg

SEQ ID NO: 11540 - DNA, 20 bp, Artificial Sequence
  Description of Artificial Sequence: Synthetic oligonucleotide
  Target: PCSK9; (-) strand; PAM type: NRG; PAM sequence: GGG
cccagtgggagctgcagcct

SEQ ID NO: 11541 - DNA, 20 bp, Artificial Sequence
  Description of Artificial Sequence: Synthetic oligonucleotide
  Target: PCSK9; (-) strand; PAM type: NRG; PAM sequence: TGG
tcccagtgggagctgcagcc

SEQ ID NO: 11542 - DNA, 20 bp, Artificial Sequence
  Description of Artificial Sequence: Synthetic oligonucleotide
  Target: PCSK9; (-) strand; PAM type: NRG; PAM sequence: CAG
ccacctcccagtgggagctg

SEQ ID NO: 11543 - DNA, 20 bp, Artificial Sequence
  Description of Artificial Sequence: Synthetic oligonucleotide
  Target: PCSK9; (-) strand; PAM type: NRG; PAM sequence: GAG
ggtcctccacctcccagtgg

SEQ ID NO: 11544 - DNA, 20 bp, Artificial Sequence
  Description of Artificial Sequence: Synthetic oligonucleotide
  Target: PCSK9; (-) strand; PAM type: NRG; PAM sequence: GGG
aaggtcctccacctcccagt

SEQ ID NO: 11545 - DNA, 20 bp, Artificial Sequence
  Description of Artificial Sequence: Synthetic oligonucleotide
  Target: PCSK9; (-) strand; PAM type: NRG; PAM sequence: TGG
caaggtcctccacctcccag

SEQ ID NO: 11546 - DNA, 20 bp, Artificial Sequence
  Description of Artificial Sequence: Synthetic oligonucleotide
  Target: PCSK9; (-) strand; PAM type: NRG; PAM sequence: CAG
tgccaaggtcctccacctcc

SEQ ID NO: 11547 - DNA, 20 bp, Artificial Sequence
  Description of Artificial Sequence: Synthetic oligonucleotide
  Target: PCSK9; (-) strand; PAM type: NRG; PAM sequence: AGG
caggcggcttgtgggtgcca

SEQ ID NO: 11548 - DNA, 20 bp, Artificial Sequence
  Description of Artificial Sequence: Synthetic oligonucleotide
  Target: PCSK9; (-) strand; PAM type: NRG; PAM sequence: AAG
acaggcggcttgtgggtgcc

SEQ ID NO: 11549 - DNA, 20 bp, Artificial Sequence
  Description of Artificial Sequence: Synthetic oligonucleotide
  Target: PCSK9; (-) strand; PAM type: NRG; PAM sequence: GGG
cctcagcacaggcggcttgt

SEQ ID NO: 11550 - DNA, 20 bp, Artificial Sequence
  Description of Artificial Sequence: Synthetic oligonucleotide
  Target: PCSK9; (-) strand; PAM type: NRG; PAM sequence: TGG
gcctcagcacaggcggcttg

SEQ ID NO: 11551 - DNA, 20 bp, Artificial Sequence
  Description of Artificial Sequence: Synthetic oligonucleotide
  Target: PCSK9; (-) strand; PAM type: NRG; PAM sequence: CGG
cctcgtggcctcagcacagg

SEQ ID NO: 11552 - DNA, 20 bp, Artificial Sequence
  Description of Artificial Sequence: Synthetic oligonucleotide
  Target: PCSK9; (-) strand; PAM type: NRG; PAM sequence: AGG
tgacctcgtggcctcagcac

SEQ ID NO: 11553 - DNA, 20 bp, Artificial Sequence
  Description of Artificial Sequence: Synthetic oligonucleotide
  Target: PCSK9; (-) strand; PAM type: NRG; PAM sequence: CAG
ctgacctcgtggcctcagca

SEQ ID NO: 11554 - DNA, 20 bp, Artificial Sequence
  Description of Artificial Sequence: Synthetic oligonucleotide
  Target: PCSK9; (-) strand; PAM type: NRG; PAM sequence: CAG
ttgggctgacctcgtggcct

SEQ ID NO: 11555 - DNA, 20 bp, Artificial Sequence
  Description of Artificial Sequence: Synthetic oligonucleotide
  Target: PCSK9; (-) strand; PAM type: NRG; PAM sequence: TGG
cactggttgggctgacctcg

SEQ ID NO: 11556 - DNA, 20 bp, Artificial Sequence
  Description of Artificial Sequence: Synthetic oligonucleotide
  Target: PCSK9; (-) strand; PAM type: NRG; PAM sequence: GGG
ctgtggcccacgcactggtt

SEQ ID NO: 11557 - DNA, 20 bp, Artificial Sequence
  Description of Artificial Sequence: Synthetic oligonucleotide
  Target: PCSK9; (-) strand; PAM type: NRG; PAM sequence: TGG
cctgtggcccacgcactggt

SEQ ID NO: 11558 - DNA, 20 bp, Artificial Sequence
  Description of Artificial Sequence: Synthetic oligonucleotide
  Target: PCSK9; (-) strand; PAM type: NRG; PAM sequence: TGG
cctccctgtggcccacgcac

SEQ ID NO: 11559 - DNA, 20 bp, Artificial Sequence
  Description of Artificial Sequence: Synthetic oligonucleotide
  Target: PCSK9; (-) strand; PAM type: NRG; PAM sequence: TGG
cgtggatgctggcctccctg

SEQ ID NO: 11560 - DNA, 20 bp, Artificial Sequence
  Description of Artificial Sequence: Synthetic oligonucleotide
  Target: PCSK9; (-) strand; PAM type: NRG; PAM sequence: TGG
gcagcaggaagcgtggatgc

SEQ ID NO: 11561 - DNA, 20 bp, Artificial Sequence
  Description of Artificial Sequence: Synthetic oligonucleotide
  Target: PCSK9; (-) strand; PAM type: NRG; PAM sequence: TGG
gggcatggcagcaggaagcg

SEQ ID NO: 11562 - DNA, 20 bp, Artificial Sequence
  Description of Artificial Sequence: Synthetic oligonucleotide
  Target: PCSK9; (-) strand; PAM type: NRG; PAM sequence: AAG
acctggggcatggcagcagg

SEQ ID NO: 11563 - DNA, 20 bp, Artificial Sequence
  Description of Artificial Sequence: Synthetic oligonucleotide
  Target: PCSK9; (-) strand; PAM type: NRG; PAM sequence: AGG
cagacctggggcatggcagc

SEQ ID NO: 11564 - DNA, 20 bp, Artificial Sequence
  Description of Artificial Sequence: Synthetic oligonucleotide
  Target: PCSK9; (-) strand; PAM type: NRG; PAM sequence: CAG
ccagacctggggcatggcag

SEQ ID NO: 11565 - DNA, 20 bp, Artificial Sequence
  Description of Artificial Sequence: Synthetic oligonucleotide
  Target: PCSK9; (-) strand; PAM type: NRG; PAM sequence: CAG
attccagacctggggcatgg

SEQ ID NO: 11566 - DNA, 20 bp, Artificial Sequence
  Description of Artificial Sequence: Synthetic oligonucleotide
  Target: PCSK9; (-) strand; PAM type: NRG; PAM sequence: TGG
tgcattccagacctggggca

SEQ ID NO: 11567 - DNA, 20 bp, Artificial Sequence
  Description of Artificial Sequence: Synthetic oligonucleotide
  Target: PCSK9; (-) strand; PAM type: NRG; PAM sequence: GGG
gactttgcattccagacctg

SEQ ID NO: 11568 - DNA, 20 bp, Artificial Sequence
  Description of Artificial Sequence: Synthetic oligonucleotide
  Target: PCSK9; (-) strand; PAM type: NRG; PAM sequence: GGG
tgactttgcattccagacct

SEQ ID NO: 11569 - DNA, 20 bp, Artificial Sequence
  Description of Artificial Sequence: Synthetic oligonucleotide
  Target: PCSK9; (-) strand; PAM type: NRG; PAM sequence: TGG
ttgactttgcattccagacc

SEQ ID NO: 11570 - DNA, 20 bp, Artificial Sequence
  Description of Artificial Sequence: Synthetic oligonucleotide
  Target: PCSK9; (-) strand; PAM type: NRG; PAM sequence: CAG
tgctccttgactttgcattc

SEQ ID NO: 11571 - DNA, 20 bp, Artificial Sequence
  Description of Artificial Sequence: Synthetic oligonucleotide
  Target: PCSK9; (-) strand; PAM type: NRG; PAM sequence: GGG
tcacctgctcctgaggggcc

SEQ ID NO: 11572 - DNA, 20 bp, Artificial Sequence
  Description of Artificial Sequence: Synthetic oligonucleotide
  Target: PCSK9; (-) strand; PAM type: NRG; PAM sequence: CGG
ttcacctgctcctgaggggc

SEQ ID NO: 11573 - DNA, 20 bp, Artificial Sequence
  Description of Artificial Sequence: Synthetic oligonucleotide
  Target: PCSK9; (-) strand; PAM type: NRG; PAM sequence: GGG
cctcttcacctgctcctgag

SEQ ID NO: 11574 - DNA, 20 bp, Artificial Sequence
  Description of Artificial Sequence: Synthetic oligonucleotide
  Target: PCSK9; (-) strand; PAM type: NRG; PAM sequence: GGG
gcctcttcacctgctcctga

SEQ ID NO: 11575 - DNA, 20 bp, Artificial Sequence
  Description of Artificial Sequence: Synthetic oligonucleotide
  Target: PCSK9; (-) strand; PAM type: NRG; PAM sequence: AGG
ggcctcttcacctgctcctg

SEQ ID NO: 11576 - DNA, 20 bp, Artificial Sequence
  Description of Artificial Sequence: Synthetic oligonucleotide
  Target: PCSK9; (-) strand; PAM type: NRG; PAM sequence: GAG
gggcctcttcacctgctcct

SEQ ID NO: 11577 - DNA, 20 bp, Artificial Sequence
  Description of Artificial Sequence: Synthetic oligonucleotide
  Target: PCSK9; (-) strand; PAM type: NRG; PAM sequence: GGG
ccccacccacccggcctcac

SEQ ID NO: 11578 - DNA, 20 bp, Artificial Sequence
  Description of Artificial Sequence: Synthetic oligonucleotide
  Target: PCSK9; (-) strand; PAM type: NRG; PAM sequence: CGG
accccacccacccggcctca

SEQ ID NO: 11579 - DNA, 20 bp, Artificial Sequence
  Description of Artificial Sequence: Synthetic oligonucleotide
  Target: PCSK9; (-) strand; PAM type: NRG; PAM sequence: CGG
cacgcagcaccccacccacc

SEQ ID NO: 11580 - DNA, 20 bp, Artificial Sequence
  Description of Artificial Sequence: Synthetic oligonucleotide
  Target: PCSK9; (-) strand; PAM type: NRG; PAM sequence: CAG
agctgtgcaggagagacacg

SEQ ID NO: 11581 - DNA, 20 bp, Artificial Sequence
  Description of Artificial Sequence: Synthetic oligonucleotide
  Target: PCSK9; (-) strand; PAM type: NRG; PAM sequence: GAG
cacagaaaagctgtgcagga

SEQ ID NO: 11582 - DNA, 20 bp, Artificial Sequence
  Description of Artificial Sequence: Synthetic oligonucleotide
  Target: PCSK9; (-) strand; PAM type: NRG; PAM sequence: GAG
gacacagaaaagctgtgcag

SEQ ID NO: 11583 - DNA, 20 bp, Artificial Sequence
  Description of Artificial Sequence: Synthetic oligonucleotide
  Target: PCSK9; (-) strand; PAM type: NRG; PAM sequence: AGG
ctgacacagaaaagctgtgc

SEQ ID NO: 11584 - DNA, 20 bp, Artificial Sequence
  Description of Artificial Sequence: Synthetic oligonucleotide
  Target: PCSK9; (-) strand; PAM type: NRG; PAM sequence: CAG
actgacacagaaaagctgtg

SEQ ID NO: 11585 - DNA, 20 bp, Artificial Sequence
  Description of Artificial Sequence: Synthetic oligonucleotide
  Target: PCSK9; (-) strand; PAM type: NRG; PAM sequence: AAG
tggcacaaactgacacagaa

SEQ ID NO: 11586 - DNA, 20 bp, Artificial Sequence
  Description of Artificial Sequence: Synthetic oligonucleotide
  Target: PCSK9; (-) strand; PAM type: NRG; PAM sequence: CAG
ggtggtggcacaaactgaca

SEQ ID NO: 11587 - DNA, 20 bp, Artificial Sequence
  Description of Artificial Sequence: Synthetic oligonucleotide
  Target: PCSK9; (-) strand; PAM type: NRG; PAM sequence: TGG
gatgcatggcggtatggtgg

SEQ ID NO: 11588 - DNA, 20 bp, Artificial Sequence
  Description of Artificial Sequence: Synthetic oligonucleotide
  Target: PCSK9; (-) strand; PAM type: NRG; PAM sequence: TGG
cctgatgcatggcggtatgg

SEQ ID NO: 11589 - DNA, 20 bp, Artificial Sequence
  Description of Artificial Sequence: Synthetic oligonucleotide
  Target: PCSK9; (-) strand; PAM type: NRG; PAM sequence: TGG
caccctgatgcatggcggta

SEQ ID NO: 11590 - DNA, 20 bp, Artificial Sequence
  Description of Artificial Sequence: Synthetic oligonucleotide
  Target: PCSK9; (-) strand; PAM type: NRG; PAM sequence: CGG
accgccaccctgatgcatgg

SEQ ID NO: 11591 - DNA, 20 bp, Artificial Sequence
  Description of Artificial Sequence: Synthetic oligonucleotide
  Target: PCSK9; (-) strand; PAM type: NRG; PAM sequence: TGG
caaaccgccaccctgatgca

SEQ ID NO: 11592 - DNA, 20 bp, Artificial Sequence
  Description of Artificial Sequence: Synthetic oligonucleotide
  Target: PCSK9; (-) strand; PAM type: NRG; PAM sequence: TGG
agctgcccacagcatctacc

SEQ ID NO: 11593 - DNA, 20 bp, Artificial Sequence
  Description of Artificial Sequence: Synthetic oligonucleotide
  Target: PCSK9; (-) strand; PAM type: NRG; PAM sequence: CAG
acaatggcggaagctgccca

SEQ ID NO: 11594 - DNA, 20 bp, Artificial Sequence
  Description of Artificial Sequence: Synthetic oligonucleotide
  Target: PCSK9; (-) strand; PAM type: NRG; PAM sequence: AAG
tgctgtccacacaatggcgg

SEQ ID NO: 11595 - DNA, 20 bp, Artificial Sequence
  Description of Artificial Sequence: Synthetic oligonucleotide
  Target: PCSK9; (-) strand; PAM type: NRG; PAM sequence: CGG
acatgctgtccacacaatgg

SEQ ID NO: 11596 - DNA, 20 bp, Artificial Sequence
  Description of Artificial Sequence: Synthetic oligonucleotide
  Target: PCSK9; (-) strand; PAM type: NRG; PAM sequence: TGG
tatacatgctgtccacacaa

SEQ ID NO: 11597 - DNA, 20 bp, Artificial Sequence
  Description of Artificial Sequence: Synthetic oligonucleotide
  Target: PCSK9; (-) strand; PAM type: NRG; PAM sequence: GAG
aaaacagacccagccacaca

SEQ ID NO: 11598 - DNA, 20 bp, Artificial Sequence
  Description of Artificial Sequence: Synthetic oligonucleotide
  Target: PCSK9; (-) strand; PAM type: NRG; PAM sequence: CAG
caaaaacagacccagccaca

SEQ ID NO: 11599 - DNA, 20 bp, Artificial Sequence
  Description of Artificial Sequence: Synthetic oligonucleotide
  Target: PCSK9; (-) strand; PAM type: NRG; PAM sequence: CAG
gacaaaagcaaaaacagacc

SEQ ID NO: 11600 - DNA, 20 bp, Artificial Sequence
  Description of Artificial Sequence: Synthetic oligonucleotide
  Target: PCSK9; (-) strand; PAM type: NRG; PAM sequence: CAG
gatctggacaaaagcaaaaa

SEQ ID NO: 11601 - DNA, 20 bp, Artificial Sequence
  Description of Artificial Sequence: Synthetic oligonucleotide
  Target: PCSK9; (-) strand; PAM type: NRG; PAM sequence: AAG
aaccttactgatctggacaa

SEQ ID NO: 11602 - DNA, 20 bp, Artificial Sequence
  Description of Artificial Sequence: Synthetic oligonucleotide
  Target: PCSK9; (-) strand; PAM type: NRG; PAM sequence: TGG
ggtagcaaaccttactgatc

SEQ ID NO: 11603 - DNA, 20 bp, Artificial Sequence
  Description of Artificial Sequence: Synthetic oligonucleotide
  Target: PCSK9; (-) strand; PAM type: NRG; PAM sequence: TAG
agtggagtggggtacccagg

SEQ ID NO: 11604 - DNA, 20 bp, Artificial Sequence
  Description of Artificial Sequence: Synthetic oligonucleotide
  Target: PCSK9; (-) strand; PAM type: NRG; PAM sequence: AGG
ccaagtggagtggggtaccc

SEQ ID NO: 11605 - DNA, 20 bp, Artificial Sequence
  Description of Artificial Sequence: Synthetic oligonucleotide
  Target: PCSK9; (-) strand; PAM type: NRG; PAM sequence: CAG
tccaagtggagtggggtacc

SEQ ID NO: 11606 - DNA, 20 bp, Artificial Sequence
  Description of Artificial Sequence: Synthetic oligonucleotide
  Target: PCSK9; (-) strand; PAM type: NRG; PAM sequence: GGG
attctactccaagtggagtg

SEQ ID NO: 11607 - DNA, 20 bp, Artificial Sequence
  Description of Artificial Sequence: Synthetic oligonucleotide
  Target: PCSK9; (-) strand; PAM type: NRG; PAM sequence: GGG
cattctactccaagtggagt

SEQ ID NO: 11608 - DNA, 20 bp, Artificial Sequence
  Description of Artificial Sequence: Synthetic oligonucleotide
  Target: PCSK9; (-) strand; PAM type: NRG; PAM sequence: TGG
acattctactccaagtggag

SEQ ID NO: 11609 - DNA, 20 bp, Artificial Sequence
  Description of Artificial Sequence: Synthetic oligonucleotide
  Target: PCSK9; (-) strand; PAM type: NRG; PAM sequence: GAG
tgcacattctactccaagtg

SEQ ID NO: 11610 - DNA, 20 bp, Artificial Sequence
  Description of Artificial Sequence: Synthetic oligonucleotide
  Target: PCSK9; (-) strand; PAM type: NRG; PAM sequence: TGG
tatgcacattctactccaag

SEQ ID NO: 11611 - DNA, 20 bp, Artificial Sequence
  Description of Artificial Sequence: Synthetic oligonucleotide
  Target: PCSK9; (-) strand; PAM type: NRG; PAM sequence: AAG
atttatgcacattctactcc

SEQ ID NO: 11612 - DNA, 20 bp, Artificial Sequence
  Description of Artificial Sequence: Synthetic oligonucleotide
  Target: PCSK9; (-) strand; PAM type: NRG; PAM sequence: TAG
gaccccatctcagaaaaaaa

SEQ ID NO: 11613 - DNA, 20 bp, Artificial Sequence
  Description of Artificial Sequence: Synthetic oligonucleotide
  Target: PCSK9; (-) strand; PAM type: NRG; PAM sequence: CAG
aacacagcaagaccccatct

SEQ ID NO: 11614 - DNA, 20 bp, Artificial Sequence
  Description of Artificial Sequence: Synthetic oligonucleotide
  Target: PCSK9; (-) strand; PAM type: NRG; PAM sequence: AAG
accagcctgggcaacacagc

SEQ ID NO: 11615 - DNA, 20 bp, Artificial Sequence
  Description of Artificial Sequence: Synthetic oligonucleotide
  Target: PCSK9; (-) strand; PAM type: NRG; PAM sequence: CAG
tgagaccagcctgggcaaca

SEQ ID NO: 11616 - DNA, 20 bp, Artificial Sequence
  Description of Artificial Sequence: Synthetic oligonucleotide
  Target: PCSK9; (-) strand; PAM type: NRG; PAM sequence: GGG
caggaatttgagaccagcct

SEQ ID NO: 11617 - DNA, 20 bp, Artificial Sequence
  Description of Artificial Sequence: Synthetic oligonucleotide
  Target: PCSK9; (-) strand; PAM type: NRG; PAM sequence: TGG
ccaggaatttgagaccagcc

SEQ ID NO: 11618 - DNA, 20 bp, Artificial Sequence
  Description of Artificial Sequence: Synthetic oligonucleotide
  Target: PCSK9; (-) strand; PAM type: NRG; PAM sequence: CAG
tgagcccaggaatttgagac

SEQ ID NO: 11619 - DNA, 20 bp, Artificial Sequence
  Description of Artificial Sequence: Synthetic oligonucleotide
  Target: PCSK9; (-) strand; PAM type: NRG; PAM sequence: GAG
ttgcttgagcccaggaattt

SEQ ID NO: 11620 - DNA, 20 bp, Artificial Sequence
  Description of Artificial Sequence: Synthetic oligonucleotide
  Target: PCSK9; (-) strand; PAM type: NRG; PAM sequence: AGG
ccagaggattgcttgagccc

SEQ ID NO: 11621 - DNA, 20 bp, Artificial Sequence
  Description of Artificial Sequence: Synthetic oligonucleotide
  Target: PCSK9; (-) strand; PAM type: NRG; PAM sequence: CAG
accagaggattgcttgagcc

SEQ ID NO: 11622 - DNA, 20 bp, Artificial Sequence
  Description of Artificial Sequence: Synthetic oligonucleotide
  Target: PCSK9; (-) strand; PAM type: NRG; PAM sequence: GAG
ctgagaccagaggattgctt

SEQ ID NO: 11623 - DNA, 20 bp, Artificial Sequence
  Description of Artificial Sequence: Synthetic oligonucleotide
  Target: PCSK9; (-) strand; PAM type: NRG; PAM sequence: AGG
cttggggaggctgagaccag

SEQ ID NO: 11624 - DNA, 20 bp, Artificial Sequence
  Description of Artificial Sequence: Synthetic oligonucleotide
  Target: PCSK9; (-) strand; PAM type: NRG; PAM sequence: GAG
acttggggaggctgagacca

SEQ ID NO: 11625 - DNA, 20 bp, Artificial Sequence
  Description of Artificial Sequence: Synthetic oligonucleotide
  Target: PCSK9; (-) strand; PAM type: NRG; PAM sequence: CAG
acacttggggaggctgagac

SEQ ID NO: 11626 - DNA, 20 bp, Artificial Sequence
  Description of Artificial Sequence: Synthetic oligonucleotide
  Target: PCSK9; (-) strand; PAM type: NRG; PAM sequence: GAG
tcccaacacttggggaggct

SEQ ID NO: 11627 - DNA, 20 bp, Artificial Sequence
  Description of Artificial Sequence: Synthetic oligonucleotide
  Target: PCSK9; (-) strand; PAM type: NRG; PAM sequence: AGG
tataatcccaacacttgggg

SEQ ID NO: 11628 - DNA, 20 bp, Artificial Sequence
  Description of Artificial Sequence: Synthetic oligonucleotide
  Target: PCSK9; (-) strand; PAM type: NRG; PAM sequence: GAG
ctataatcccaacacttggg

SEQ ID NO: 11629 - DNA, 20 bp, Artificial Sequence
  Description of Artificial Sequence: Synthetic oligonucleotide
  Target: PCSK9; (-) strand; PAM type: NRG; PAM sequence: GGG
gcctataatcccaacacttg

SEQ ID NO: 11630 - DNA, 20 bp, Artificial Sequence
  Description of Artificial Sequence: Synthetic oligonucleotide
  Target: PCSK9; (-) strand; PAM type: NRG; PAM sequence: GGG
tgcctataatcccaacactt

SEQ ID NO: 11631 - DNA, 20 bp, Artificial Sequence
  Description of Artificial Sequence: Synthetic oligonucleotide
  Target: PCSK9; (-) strand; PAM type: NRG; PAM sequence: TGG
atgcctataatcccaacact

SEQ ID NO: 11632 - DNA, 20 bp, Artificial Sequence
  Description of Artificial Sequence: Synthetic oligonucleotide
  Target: PCSK9; (-) strand; PAM type: NRG; PAM sequence: CGG
atcagagaggccaggtgcag

SEQ ID NO: 11633 - DNA, 20 bp, Artificial Sequence
  Description of Artificial Sequence: Synthetic oligonucleotide
  Target: PCSK9; (-) strand; PAM type: NRG; PAM sequence: CAG
tagatcagagaggccaggtg

SEQ ID NO: 11634 - DNA, 20 bp, Artificial Sequence
  Description of Artificial Sequence: Synthetic oligonucleotide
  Target: PCSK9; (-) strand; PAM type: NRG; PAM sequence: AGG
ttaaatagatcagagaggcc

SEQ ID NO: 11635 - DNA, 20 bp, Artificial Sequence
  Description of Artificial Sequence: Synthetic oligonucleotide
  Target: PCSK9; (-) strand; PAM type: NRG; PAM sequence: CAG
gttaaatagatcagagaggc

SEQ ID NO: 11636 - DNA, 20 bp, Artificial Sequence
  Description of Artificial Sequence: Synthetic oligonucleotide
  Target: PCSK9; (-) strand; PAM type: NRG; PAM sequence: AGG
gtttgttaaatagatcagag

SEQ ID NO: 11637 - DNA, 20 bp, Artificial Sequence
  Description of Artificial Sequence: Synthetic oligonucleotide
  Target: PCSK9; (-) strand; PAM type: NRG; PAM sequence: GAG
ggtttgttaaatagatcaga

SEQ ID NO: 11638 - DNA, 20 bp, Artificial Sequence
  Description of Artificial Sequence: Synthetic oligonucleotide
  Target: PCSK9; (-) strand; PAM type: NRG; PAM sequence: GAG
caggtttgttaaatagatca

SEQ ID NO: 11639 - DNA, 20 bp, Artificial Sequence
  Description of Artificial Sequence: Synthetic oligonucleotide
  Target: PCSK9; (-) strand; PAM type: NRG; PAM sequence: CAG
agcaggtttgttaaatagat

SEQ ID NO: 11640 - DNA, 20 bp, Artificial Sequence
  Description of Artificial Sequence: Synthetic oligonucleotide
  Target: PCSK9; (-) strand; PAM type: NRG; PAM sequence: TAG
ctcccagcaggtttgttaaa

SEQ ID NO: 11641 - DNA, 20 bp, Artificial Sequence
  Description of Artificial Sequence: Synthetic oligonucleotide
  Target: PCSK9; (-) strand; PAM type: NRG; PAM sequence: AGG
gaccctgagaccctcccagc

SEQ ID NO: 11642 - DNA, 20 bp, Artificial Sequence
  Description of Artificial Sequence: Synthetic oligonucleotide
  Target: PCSK9; (-) strand; PAM type: NRG; PAM sequence: CAG
tgaccctgagaccctcccag

SEQ ID NO: 11643 - DNA, 20 bp, Artificial Sequence
  Description of Artificial Sequence: Synthetic oligonucleotide
  Target: PCSK9; (-) strand; PAM type: NRG; PAM sequence: CAG
tcctgaccctgagaccctcc

SEQ ID NO: 11644 - DNA, 20 bp, Artificial Sequence
  Description of Artificial Sequence: Synthetic oligonucleotide
  Target: PCSK9; (-) strand; PAM type: NRG; PAM sequence: GAG
ccagtgctgctcctgaccct

SEQ ID NO: 11645 - DNA, 20 bp, Artificial Sequence
  Description of Artificial Sequence: Synthetic oligonucleotide
  Target: PCSK9; (-) strand; PAM type: NRG; PAM sequence: CAG
agctctgtgtcctcagagcc

SEQ ID NO: 11646 - DNA, 20 bp, Artificial Sequence
  Description of Artificial Sequence: Synthetic oligonucleotide
  Target: PCSK9; (-) strand; PAM type: NRG; PAM sequence: GAG
gagtgagctctgtgtcctca

SEQ ID NO: 11647 - DNA, 20 bp, Artificial Sequence
  Description of Artificial Sequence: Synthetic oligonucleotide
  Target: PCSK9; (-) strand; PAM type: NRG; PAM sequence: CAG
ctgagtgagctctgtgtcct

SEQ ID NO: 11648 - DNA, 20 bp, Artificial Sequence
  Description of Artificial Sequence: Synthetic oligonucleotide
  Target: PCSK9; (-) strand; PAM type: NRG; PAM sequence: GAG
cctctgggtcacggctgagt

SEQ ID NO: 11649 - DNA, 20 bp, Artificial Sequence
  Description of Artificial Sequence: Synthetic oligonucleotide
  Target: PCSK9; (-) strand; PAM type: NRG; PAM sequence: GAG
accccctctgggtcacggct

SEQ ID NO: 11650 - DNA, 20 bp, Artificial Sequence
  Description of Artificial Sequence: Synthetic oligonucleotide
  Target: PCSK9; (-) strand; PAM type: NRG; PAM sequence: CGG
caggcaccccctctgggtca

SEQ ID NO: 11651 - DNA, 20 bp, Artificial Sequence
  Description of Artificial Sequence: Synthetic oligonucleotide
  Target: PCSK9; (-) strand; PAM type: NRG; PAM sequence: GGG
gcagctcaggcaccccctct

SEQ ID NO: 11652 - DNA, 20 bp, Artificial Sequence
  Description of Artificial Sequence: Synthetic oligonucleotide
  Target: PCSK9; (-) strand; PAM type: NRG; PAM sequence: TGG
tgcagctcaggcaccccctc

SEQ ID NO: 11653 - DNA, 20 bp, Artificial Sequence
  Description of Artificial Sequence: Synthetic oligonucleotide
  Target: PCSK9; (-) strand; PAM type: NRG; PAM sequence: AGG
caaccttcagcatgcagctc

SEQ ID NO: 11654 - DNA, 20 bp, Artificial Sequence
  Description of Artificial Sequence: Synthetic oligonucleotide
  Target: PCSK9; (-) strand; PAM type: NRG; PAM sequence: CAG
acaaccttcagcatgcagct

SEQ ID NO: 11655 - DNA, 20 bp, Artificial Sequence
  Description of Artificial Sequence: Synthetic oligonucleotide
  Target: PCSK9; (-) strand; PAM type: NRG; PAM sequence: CAG
tgctaacaaccttcagcatg

SEQ ID NO: 11656 - DNA, 20 bp, Artificial Sequence
  Description of Artificial Sequence: Synthetic oligonucleotide
  Target: PCSK9; (-) strand; PAM type: NRG; PAM sequence: CAG
ctggtcatgctaacaacctt

SEQ ID NO: 11657 - DNA, 20 bp, Artificial Sequence
  Description of Artificial Sequence: Synthetic oligonucleotide
  Target: PCSK9; (-) strand; PAM type: NRG; PAM sequence: TGG
agggccttttcttgccttgc

SEQ ID NO: 11658 - DNA, 20 bp, Artificial Sequence
  Description of Artificial Sequence: Synthetic oligonucleotide
  Target: PCSK9; (-) strand; PAM type: NRG; PAM sequence: GGG
atgccttgctaatctcggca

SEQ ID NO: 11659 - DNA, 20 bp, Artificial Sequence
  Description of Artificial Sequence: Synthetic oligonucleotide
  Target: PCSK9; (-) strand; PAM type: NRG; PAM sequence: AGG
catgccttgctaatctcggc

SEQ ID NO: 11660 - DNA, 20 bp, Artificial Sequence
  Description of Artificial Sequence: Synthetic oligonucleotide
  Target: PCSK9; (-) strand; PAM type: NRG; PAM sequence: CAG
acatgccttgctaatctcgg

SEQ ID NO: 11661 - DNA, 20 bp, Artificial Sequence
  Description of Artificial Sequence: Synthetic oligonucleotide
  Target: PCSK9; (-) strand; PAM type: NRG; PAM sequence: CGG
ggcacatgccttgctaatct

SEQ ID NO: 11662 - DNA, 20 bp, Artificial Sequence
  Description of Artificial Sequence: Synthetic oligonucleotide
  Target: PCSK9; (-) strand; PAM type: NRG; PAM sequence: TGG
ggctgtcacattccagggct

SEQ ID NO: 11663 - DNA, 20 bp, Artificial Sequence
  Description of Artificial Sequence: Synthetic oligonucleotide
  Target: PCSK9; (-) strand; PAM type: NRG; PAM sequence: GGG
ggcccggctgtcacattcca

SEQ ID NO: 11664 - DNA, 20 bp, Artificial Sequence
  Description of Artificial Sequence: Synthetic oligonucleotide
  Target: PCSK9; (-) strand; PAM type: NRG; PAM sequence: AGG
aggcccggctgtcacattcc

SEQ ID NO: 11665 - DNA, 20 bp, Artificial Sequence
  Description of Artificial Sequence: Synthetic oligonucleotide
  Target: PCSK9; (-) strand; PAM type: NRG; PAM sequence: CAG
aaggcccggctgtcacattc

SEQ ID NO: 11666 - DNA, 20 bp, Artificial Sequence
  Description of Artificial Sequence: Synthetic oligonucleotide
  Target: PCSK9; (-) strand; PAM type: NRG; PAM sequence: CGG
actcaggtttctagaaggcc

SEQ ID NO: 11667 - DNA, 20 bp, Artificial Sequence
  Description of Artificial Sequence: Synthetic oligonucleotide
  Target: PCSK9; (-) strand; PAM type: NRG; PAM sequence: AGG
tatacactcaggtttctaga

SEQ ID NO: 11668 - DNA, 20 bp, Artificial Sequence
  Description of Artificial Sequence: Synthetic oligonucleotide
  Target: PCSK9; (-) strand; PAM type: NRG; PAM sequence: AAG
ttatacactcaggtttctag

SEQ ID NO: 11669 - DNA, 20 bp, Artificial Sequence
  Description of Artificial Sequence: Synthetic oligonucleotide
  Target: PCSK9; (-) strand; PAM type: NRG; PAM sequence: TAG
gagttatacactcaggtttc

SEQ ID NO: 11670 - DNA, 20 bp, Artificial Sequence
  Description of Artificial Sequence: Synthetic oligonucleotide
  Target: PCSK9; (-) strand; PAM type: NRG; PAM sequence: AGG
ttaaggagagttatacactc

SEQ ID NO: 11671 - DNA, 20 bp, Artificial Sequence
  Description of Artificial Sequence: Synthetic oligonucleotide
  Target: PCSK9; (-) strand; PAM type: NRG; PAM sequence: CAG
tttaaggagagttatacact

SEQ ID NO: 11672 - DNA, 20 bp, Artificial Sequence
  Description of Artificial Sequence: Synthetic oligonucleotide
  Target: PCSK9; (-) strand; PAM type: NRG; PAM sequence: GAG
ctcctactggcttttaagga

SEQ ID NO: 11673 - DNA, 20 bp, Artificial Sequence
  Description of Artificial Sequence: Synthetic oligonucleotide
  Target: PCSK9; (-) strand; PAM type: NRG; PAM sequence: GAG
agctcctactggcttttaag

SEQ ID NO: 11674 - DNA, 20 bp, Artificial Sequence
  Description of Artificial Sequence: Synthetic oligonucleotide
  Target: PCSK9; (-) strand; PAM type: NRG; PAM sequence: AGG
ggagctcctactggctttta

SEQ ID NO: 11675 - DNA, 20 bp, Artificial Sequence
  Description of Artificial Sequence: Synthetic oligonucleotide
  Target: PCSK9; (-) strand; PAM type: NRG; PAM sequence: AAG
aggagctcctactggctttt

SEQ ID NO: 11676 - DNA, 20 bp, Artificial Sequence
  Description of Artificial Sequence: Synthetic oligonucleotide
  Target: PCSK9; (-) strand; PAM type: NRG; PAM sequence: TGG
gccttttgaggagctcctac

SEQ ID NO: 11677 - DNA, 20 bp, Artificial Sequence
  Description of Artificial Sequence: Synthetic oligonucleotide
  Target: PCSK9; (-) strand; PAM type: NRG; PAM sequence: GAG
ccttagggctgccttttgag

SEQ ID NO: 11678 - DNA, 20 bp, Artificial Sequence
  Description of Artificial Sequence: Synthetic oligonucleotide
  Target: PCSK9; (-) strand; PAM type: NRG; PAM sequence: AGG
ctccttagggctgccttttg

SEQ ID NO: 11679 - DNA, 20 bp, Artificial Sequence
  Description of Artificial Sequence: Synthetic oligonucleotide
  Target: PCSK9; (-) strand; PAM type: NRG; PAM sequence: GAG
actccttagggctgcctttt

SEQ ID NO: 11680 - DNA, 20 bp, Artificial Sequence
  Description of Artificial Sequence: Synthetic oligonucleotide
  Target: PCSK9; (-) strand; PAM type: NRG; PAM sequence: GGG
atttaagagtggactcctta

SEQ ID NO: 11681 - DNA, 20 bp, Artificial Sequence
  Description of Artificial Sequence: Synthetic oligonucleotide
  Target: PCSK9; (-) strand; PAM type: NRG; PAM sequence: AGG
catttaagagtggactcctt

SEQ ID NO: 11682 - DNA, 20 bp, Artificial Sequence
  Description of Artificial Sequence: Synthetic oligonucleotide
  Target: PCSK9; (-) strand; PAM type: NRG; PAM sequence: TAG
tcatttaagagtggactcct

SEQ ID NO: 11683 - DNA, 20 bp, Artificial Sequence
  Description of Artificial Sequence: Synthetic oligonucleotide
  Target: PCSK9; (-) strand; PAM type: NRG; PAM sequence: TGG
actctgagttcatttaagag

SEQ ID NO: 11684 - DNA, 20 bp, Artificial Sequence
  Description of Artificial Sequence: Synthetic oligonucleotide
  Target: PCSK9; (-) strand; PAM type: NRG; PAM sequence: GAG
ctgactctgagttcatttaa

SEQ ID NO: 11685 - DNA, 20 bp, Artificial Sequence
  Description of Artificial Sequence: Synthetic oligonucleotide
  Target: PCSK9; (-) strand; PAM type: NRG; PAM sequence: AAG
aactgactctgagttcattt

SEQ ID NO: 11686 - DNA, 20 bp, Artificial Sequence
  Description of Artificial Sequence: Synthetic oligonucleotide
  Target: PCSK9; (-) strand; PAM type: NRG; PAM sequence: GAG
tgcattttaaaactgactct

SEQ ID NO: 11687 - DNA, 20 bp, Artificial Sequence
  Description of Artificial Sequence: Synthetic oligonucleotide
  Target: PCSK9; (-) strand; PAM type: NRG; PAM sequence: CAG
catccagaccagaatcaaca

SEQ ID NO: 11688 - DNA, 20 bp, Artificial Sequence
  Description of Artificial Sequence: Synthetic oligonucleotide
  Target: PCSK9; (-) strand; PAM type: NRG; PAM sequence: CAG
gaggaatgcaccatccagac

SEQ ID NO: 11689 - DNA, 20 bp, Artificial Sequence
  Description of Artificial Sequence: Synthetic oligonucleotide
  Target: PCSK9; (-) strand; PAM type: NRG; PAM sequence: CAG
ctctcgaggaatgcaccatc

SEQ ID NO: 11690 - DNA, 20 bp, Artificial Sequence
  Description of Artificial Sequence: Synthetic oligonucleotide
  Target: PCSK9; (-) strand; PAM type: NRG; PAM sequence: AGG
aagactgtcttttgctctcg

SEQ ID NO: 11691 - DNA, 20 bp, Artificial Sequence
  Description of Artificial Sequence: Synthetic oligonucleotide
  Target: PCSK9; (-) strand; PAM type: NRG; PAM sequence: GAG
caagactgtcttttgctctc

SEQ ID NO: 11692 - DNA, 20 bp, Artificial Sequence
  Description of Artificial Sequence: Synthetic oligonucleotide
  Target: PCSK9; (-) strand; PAM type: NRG; PAM sequence: AAG
gggcaagtggatccaagacc

SEQ ID NO: 11693 - DNA, 20 bp, Artificial Sequence
  Description of Artificial Sequence: Synthetic oligonucleotide
  Target: PCSK9; (-) strand; PAM type: NRG; PAM sequence: AAG
tacccagggcaagtggatcc

SEQ ID NO: 11694 - DNA, 20 bp, Artificial Sequence
  Description of Artificial Sequence: Synthetic oligonucleotide
  Target: PCSK9; (-) strand; PAM type: NRG; PAM sequence: TGG
ctcagtgtacccagggcaag

SEQ ID NO: 11695 - DNA, 20 bp, Artificial Sequence
  Description of Artificial Sequence: Synthetic oligonucleotide
  Target: PCSK9; (-) strand; PAM type: NRG; PAM sequence: AAG
gccctcagtgtacccagggc

SEQ ID NO: 11696 - DNA, 20 bp, Artificial Sequence
  Description of Artificial Sequence: Synthetic oligonucleotide
  Target: PCSK9; (-) strand; PAM type: NRG; PAM sequence: GGG
agcagccctcagtgtaccca

SEQ ID NO: 11697 - DNA, 20 bp, Artificial Sequence
  Description of Artificial Sequence: Synthetic oligonucleotide
  Target: PCSK9; (-) strand; PAM type: NRG; PAM sequence: AGG
tagcagccctcagtgtaccc

SEQ ID NO: 11698 - DNA, 20 bp, Artificial Sequence
  Description of Artificial Sequence: Synthetic oligonucleotide
  Target: PCSK9; (-) strand; PAM type: NRG; PAM sequence: CAG
ctagcagccctcagtgtacc

SEQ ID NO: 11699 - DNA, 20 bp, Artificial Sequence
  Description of Artificial Sequence: Synthetic oligonucleotide
  Target: PCSK9; (-) strand; PAM type: NRG; PAM sequence: CAG
acctggaacctagcagccct

SEQ ID NO: 11700 - DNA, 20 bp, Artificial Sequence
  Description of Artificial Sequence: Synthetic oligonucleotide
  Target: PCSK9; (-) strand; PAM type: NRG; PAM sequence: CAG
gaagagcacctggaacctag

SEQ ID NO: 11701 - DNA, 20 bp, Artificial Sequence
  Description of Artificial Sequence: Synthetic oligonucleotide
  Target: PCSK9; (-) strand; PAM type: NRG; PAM sequence: TAG
caggaagagcacctggaacc

SEQ ID NO: 11702 - DNA, 20 bp, Artificial Sequence
  Description of Artificial Sequence: Synthetic oligonucleotide
  Target: PCSK9; (-) strand; PAM type: NRG; PAM sequence: TGG
ccagtgccaggaagagcacc

SEQ ID NO: 11703 - DNA, 20 bp, Artificial Sequence
  Description of Artificial Sequence: Synthetic oligonucleotide
  Target: PCSK9; (-) strand; PAM type: NRG; PAM sequence: GAG
tccctccccagtgccaggaa

SEQ ID NO: 11704 - DNA, 20 bp, Artificial Sequence
  Description of Artificial Sequence: Synthetic oligonucleotide
  Target: PCSK9; (-) strand; PAM type: NRG; PAM sequence: AAG
tatccctccccagtgccagg

SEQ ID NO: 11705 - DNA, 20 bp, Artificial Sequence
  Description of Artificial Sequence: Synthetic oligonucleotide
  Target: PCSK9; (-) strand; PAM type: NRG; PAM sequence: AGG
ctgtatccctccccagtgcc

SEQ ID NO: 11706 - DNA, 20 bp, Artificial Sequence
  Description of Artificial Sequence: Synthetic oligonucleotide
  Target: PCSK9; (-) strand; PAM type: NRG; PAM sequence: CAG
cctgtatccctccccagtgc

SEQ ID NO: 11707 - DNA, 20 bp, Artificial Sequence
  Description of Artificial Sequence: Synthetic oligonucleotide
  Target: PCSK9; (-) strand; PAM type: NRG; PAM sequence: CAG
cttgggcctgtatccctccc

SEQ ID NO: 11708 - DNA, 20 bp, Artificial Sequence
  Description of Artificial Sequence: Synthetic oligonucleotide
  Target: PCSK9; (-) strand; PAM type: NRG; PAM sequence: GGG
gggagaacagcatgtctctt

SEQ ID NO: 11709 - DNA, 20 bp, Artificial Sequence
  Description of Artificial Sequence: Synthetic oligonucleotide
  Target: PCSK9; (-) strand; PAM type: NRG; PAM sequence: TGG
agggagaacagcatgtctct

SEQ ID NO: 11710 - DNA, 20 bp, Artificial Sequence
  Description of Artificial Sequence: Synthetic oligonucleotide
  Target: PCSK9; (-) strand; PAM type: NRG; PAM sequence: CAG
agatgctccaggagggagaa

SEQ ID NO: 11711 - DNA, 20 bp, Artificial Sequence
  Description of Artificial Sequence: Synthetic oligonucleotide
  Target: PCSK9; (-) strand; PAM type: NRG; PAM sequence: GAG
aaaatagatgctccaggagg

SEQ ID NO: 11712 - DNA, 20 bp, Artificial Sequence
  Description of Artificial Sequence: Synthetic oligonucleotide
  Target: PCSK9; (-) strand; PAM type: NRG; PAM sequence: GGG
ctaaaatagatgctccagga

SEQ ID NO: 11713 - DNA, 20 bp, Artificial Sequence
  Description of Artificial Sequence: Synthetic oligonucleotide
  Target: PCSK9; (-) strand; PAM type: NRG; PAM sequence: AGG
actaaaatagatgctccagg

SEQ ID NO: 11714 - DNA, 20 bp, Artificial Sequence
  Description of Artificial Sequence: Synthetic oligonucleotide
  Target: PCSK9; (-) strand; PAM type: NRG; PAM sequence: GAG
cactaaaatagatgctccag

SEQ ID NO: 11715 - DNA, 20 bp, Artificial Sequence
  Description of Artificial Sequence: Synthetic oligonucleotide
  Target: PCSK9; (-) strand; PAM type: NRG; PAM sequence: AGG
tccactaaaatagatgctcc

SEQ ID NO: 11716 - DNA, 20 bp, Artificial Sequence
  Description of Artificial Sequence: Synthetic oligonucleotide
  Target: PCSK9; (-) strand; PAM type: NRG; PAM sequence: CAG
ctccactaaaatagatgctc

SEQ ID NO: 11717 - DNA, 20 bp, Artificial Sequence
  Description of Artificial Sequence: Synthetic oligonucleotide
  Target: PCSK9; (-) strand; PAM type: NRG; PAM sequence: TAG
tctgtcttcctccactaaaa

SEQ ID NO: 11718 - DNA, 20 bp, Artificial Sequence
  Description of Artificial Sequence: Synthetic oligonucleotide
  Target: PCSK9; (-) strand; PAM type: NRG; PAM sequence: TGG
ttttcagtactctatattaa

SEQ ID NO: 11719 - DNA, 20 bp, Artificial Sequence
  Description of Artificial Sequence: Synthetic oligonucleotide
  Target: PCSK9; (-) strand; PAM type: NRG; PAM sequence: CAG
ttttctccatcgcatctttt

SEQ ID NO: 11720 - DNA, 20 bp, Artificial Sequence
  Description of Artificial Sequence: Synthetic oligonucleotide
  Target: PCSK9; (-) strand; PAM type: NRG; PAM sequence: TAG
ccccattcccttccttgcta

SEQ ID NO: 11721 - DNA, 20 bp, Artificial Sequence
  Description of Artificial Sequence: Synthetic oligonucleotide
  Target: PCSK9; (-) strand; PAM type: NRG; PAM sequence: GAG
gtttcgtccaccttgtcagc

SEQ ID NO: 11722 - DNA, 20 bp, Artificial Sequence
  Description of Artificial Sequence: Synthetic oligonucleotide
  Target: PCSK9; (-) strand; PAM type: NRG; PAM sequence: CAG
gcctgtttcgtccaccttgt

SEQ ID NO: 11723 - DNA, 20 bp, Artificial Sequence
  Description of Artificial Sequence: Synthetic oligonucleotide
  Target: PCSK9; (-) strand; PAM type: NRG; PAM sequence: TGG
ggaacatgttctctgcctca

SEQ ID NO: 11724 - DNA, 20 bp, Artificial Sequence
  Description of Artificial Sequence: Synthetic oligonucleotide
  Target: PCSK9; (-) strand; PAM type: NRG; PAM sequence: TGG
ctgggggcctttgctttgcc

SEQ ID NO: 11725 - DNA, 20 bp, Artificial Sequence
  Description of Artificial Sequence: Synthetic oligonucleotide
  Target: PCSK9; (-) strand; PAM type: NRG; PAM sequence: GGG
ccctgcacatccccacctgg

SEQ ID NO: 11726 - DNA, 20 bp, Artificial Sequence
  Description of Artificial Sequence: Synthetic oligonucleotide
  Target: PCSK9; (-) strand; PAM type: NRG; PAM sequence: GGG
tccctgcacatccccacctg

SEQ ID NO: 11727 - DNA, 20 bp, Artificial Sequence
  Description of Artificial Sequence: Synthetic oligonucleotide
  Target: PCSK9; (-) strand; PAM type: NRG; PAM sequence: GGG
ctccctgcacatccccacct

SEQ ID NO: 11728 - DNA, 20 bp, Artificial Sequence
  Description of Artificial Sequence: Synthetic oligonucleotide
  Target: PCSK9; (-) strand; PAM type: NRG; PAM sequence: TGG
actccctgcacatccccacc

SEQ ID NO: 11729 - DNA, 20 bp, Artificial Sequence
  Description of Artificial Sequence: Synthetic oligonucleotide
  Target: PCSK9; (-) strand; PAM type: NRG; PAM sequence: TGG
ttcccacctctctggtttcc

SEQ ID NO: 11730 - DNA, 20 bp, Artificial Sequence
  Description of Artificial Sequence: Synthetic oligonucleotide
  Target: PCSK9; (-) strand; PAM type: NRG; PAM sequence: TGG
cataactattcccacctctc

SEQ ID NO: 11731 - DNA, 20 bp, Artificial Sequence
  Description of Artificial Sequence: Synthetic oligonucleotide
  Target: PCSK9; (-) strand; PAM type: NRG; PAM sequence: AGG
acttggccctgtcccctctg

SEQ ID NO: 11732 - DNA, 20 bp, Artificial Sequence
  Description of Artificial Sequence: Synthetic oligonucleotide
  Target: PCSK9; (-) strand; PAM type: NRG; PAM sequence: GAG
gacttggccctgtcccctct

SEQ ID NO: 11733 - DNA, 20 bp, Artificial Sequence
  Description of Artificial Sequence: Synthetic oligonucleotide
  Target: PCSK9; (-) strand; PAM type: NRG; PAM sequence: TGG
ccctcaggtctcacctgact

SEQ ID NO: 11734 - DNA, 20 bp, Artificial Sequence
  Description of Artificial Sequence: Synthetic oligonucleotide
  Target: PCSK9; (-) strand; PAM type: NRG; PAM sequence: AGG
cactgctgactgtgaccctc

SEQ ID NO: 11735 - DNA, 20 bp, Artificial Sequence
  Description of Artificial Sequence: Synthetic oligonucleotide
  Target: PCSK9; (-) strand; PAM type: NRG; PAM sequence: CAG
tcactgctgactgtgaccct

SEQ ID NO: 11736 - DNA, 20 bp, Artificial Sequence
  Description of Artificial Sequence: Synthetic oligonucleotide
  Target: PCSK9; (-) strand; PAM type: NRG; PAM sequence: CAG
gccagacccctgcatggccc

SEQ ID NO: 11737 - DNA, 20 bp, Artificial Sequence
  Description of Artificial Sequence: Synthetic oligonucleotide
  Target: PCSK9; (-) strand; PAM type: NRG; PAM sequence: TGG
tctgaggccagacccctgca

SEQ ID NO: 11738 - DNA, 20 bp, Artificial Sequence
  Description of Artificial Sequence: Synthetic oligonucleotide
  Target: PCSK9; (-) strand; PAM type: NRG; PAM sequence: CAG
agaccacactcctctgaggc

SEQ ID NO: 11739 - DNA, 20 bp, Artificial Sequence
  Description of Artificial Sequence: Synthetic oligonucleotide
  Target: PCSK9; (-) strand; PAM type: NRG; PAM sequence: AGG
ggccagaccacactcctctg

SEQ ID NO: 11740 - DNA, 20 bp, Artificial Sequence
  Description of Artificial Sequence: Synthetic oligonucleotide
  Target: PCSK9; (-) strand; PAM type: NRG; PAM sequence: GAG
aggccagaccacactcctct

SEQ ID NO: 11741 - DNA, 20 bp, Artificial Sequence
  Description of Artificial Sequence: Synthetic oligonucleotide
  Target: PCSK9; (-) strand; PAM type: NRG; PAM sequence: CAG
tgagaggttcagatccaggc

SEQ ID NO: 11742 - DNA, 20 bp, Artificial Sequence
  Description of Artificial Sequence: Synthetic oligonucleotide
  Target: PCSK9; (-) strand; PAM type: NRG; PAM sequence: AGG
acagtgagaggttcagatcc

SEQ ID NO: 11743 - DNA, 20 bp, Artificial Sequence
  Description of Artificial Sequence: Synthetic oligonucleotide
  Target: PCSK9; (-) strand; PAM type: NRG; PAM sequence: CAG
cacagtgagaggttcagatc

SEQ ID NO: 11744 - DNA, 20 bp, Artificial Sequence
  Description of Artificial Sequence: Synthetic oligonucleotide
  Target: PCSK9; (-) strand; PAM type: NRG; PAM sequence: CAG
ctaggccacagtgagaggtt

SEQ ID NO: 11745 - DNA, 20 bp, Artificial Sequence
  Description of Artificial Sequence: Synthetic oligonucleotide
  Target: PCSK9; (-) strand; PAM type: NRG; PAM sequence: AGG
agcagctaggccacagtgag

SEQ ID NO: 11746 - DNA, 20 bp, Artificial Sequence
  Description of Artificial Sequence: Synthetic oligonucleotide
  Target: PCSK9; (-) strand; PAM type: NRG; PAM sequence: GAG
cagcagctaggccacagtga

SEQ ID NO: 11747 - DNA, 20 bp, Artificial Sequence
  Description of Artificial Sequence: Synthetic oligonucleotide
  Target: PCSK9; (-) strand; PAM type: NRG; PAM sequence: GAG
ctcagcagctaggccacagt

SEQ ID NO: 11748 - DNA, 20 bp, Artificial Sequence
  Description of Artificial Sequence: Synthetic oligonucleotide
  Target: PCSK9; (-) strand; PAM type: NRG; PAM sequence: CAG
tcagctcagcagctaggcca

SEQ ID NO: 11749 - DNA, 20 bp, Artificial Sequence
  Description of Artificial Sequence: Synthetic oligonucleotide
  Target: PCSK9; (-) strand; PAM type: NRG; PAM sequence: AGG
ctcttctcagctcagcagct

SEQ ID NO: 11750 - DNA, 20 bp, Artificial Sequence
  Description of Artificial Sequence: Synthetic oligonucleotide
  Target: PCSK9; (-) strand; PAM type: NRG; PAM sequence: TAG
tctcttctcagctcagcagc

SEQ ID NO: 11751 - DNA, 20 bp, Artificial Sequence
  Description of Artificial Sequence: Synthetic oligonucleotide
  Target: PCSK9; (-) strand; PAM type: NRG; PAM sequence: CAG
gtcatctcttctcagctcag

SEQ ID NO: 11752 - DNA, 20 bp, Artificial Sequence
  Description of Artificial Sequence: Synthetic oligonucleotide
  Target: PCSK9; (-) strand; PAM type: NRG; PAM sequence: CAG
cttgtcatctcttctcagct

SEQ ID NO: 11753 - DNA, 20 bp, Artificial Sequence
  Description of Artificial Sequence: Synthetic oligonucleotide
  Target: PCSK9; (-) strand; PAM type: NRG; PAM sequence: CAG
aggtccttgtcatctcttct

SEQ ID NO: 11754 - DNA, 20 bp, Artificial Sequence
  Description of Artificial Sequence: Synthetic oligonucleotide
  Target: PCSK9; (-) strand; PAM type: NRG; PAM sequence: AGG
agtctccctgcttctgccca

SEQ ID NO: 11755 - DNA, 20 bp, Artificial Sequence
  Description of Artificial Sequence: Synthetic oligonucleotide
  Target: PCSK9; (-) strand; PAM type: NRG; PAM sequence: AAG
cagtctccctgcttctgccc

SEQ ID NO: 11756 - DNA, 20 bp, Artificial Sequence
  Description of Artificial Sequence: Synthetic oligonucleotide
  Target: PCSK9; (-) strand; PAM type: NRG; PAM sequence: CAG
gaccctccaccgcctccctc

SEQ ID NO: 11757 - DNA, 20 bp, Artificial Sequence
  Description of Artificial Sequence: Synthetic oligonucleotide
  Target: PCSK9; (-) strand; PAM type: NRG; PAM sequence: TGG
ctgagccccgccccaacgcc

SEQ ID NO: 11758 - DNA, 20 bp, Artificial Sequence
  Description of Artificial Sequence: Synthetic oligonucleotide
  Target: PCSK9; (-) strand; PAM type: NRG; PAM sequence: GAG
ctcccttcagactccagcct

SEQ ID NO: 11759 - DNA, 20 bp, Artificial Sequence
  Description of Artificial Sequence: Synthetic oligonucleotide
  Target: PCSK9; (-) strand; PAM type: NRG; PAM sequence: CAG
tgcaggctcccttcagactc

SEQ ID NO: 11760 - DNA, 20 bp, Artificial Sequence
  Description of Artificial Sequence: Synthetic oligonucleotide
  Target: PCSK9; (-) strand; PAM type: NRG; PAM sequence: CAG
ccaggcctgcaggctccctt

SEQ ID NO: 11761 - DNA, 20 bp, Artificial Sequence
  Description of Artificial Sequence: Synthetic oligonucleotide
  Target: PCSK9; (-) strand; PAM type: NRG; PAM sequence: AGG
catccacccaccaggcctgc

SEQ ID NO: 11762 - DNA, 20 bp, Artificial Sequence
  Description of Artificial Sequence: Synthetic oligonucleotide
  Target: PCSK9; (-) strand; PAM type: NRG; PAM sequence: CAG
acatccacccaccaggcctg

SEQ ID NO: 11763 - DNA, 20 bp, Artificial Sequence
  Description of Artificial Sequence: Synthetic oligonucleotide
  Target: PCSK9; (-) strand; PAM type: NRG; PAM sequence: AGG
cccacccacatccacccacc

SEQ ID NO: 11764 - DNA, 20 bp, Artificial Sequence
  Description of Artificial Sequence: Synthetic oligonucleotide
  Target: PCSK9; (-) strand; PAM type: NRG; PAM sequence: CAG
tcccacccacatccacccac

SEQ ID NO: 11765 - DNA, 20 bp, Artificial Sequence
  Description of Artificial Sequence: Synthetic oligonucleotide
  Target: PCSK9; (-) strand; PAM type: NRG; PAM sequence: TGG
ctgtccaggggcccgagcct

SEQ ID NO: 11766 - DNA, 20 bp, Artificial Sequence
  Description of Artificial Sequence: Synthetic oligonucleotide
  Target: PCSK9; (-) strand; PAM type: NRG; PAM sequence: GAG
ctccatctgtccaggggccc

SEQ ID NO: 11767 - DNA, 20 bp, Artificial Sequence
  Description of Artificial Sequence: Synthetic oligonucleotide
  Target: PCSK9; (-) strand; PAM type: NRG; PAM sequence: GGG
tggcaactccatctgtccag

SEQ ID NO: 11768 - DNA, 20 bp, Artificial Sequence
  Description of Artificial Sequence: Synthetic oligonucleotide
  Target: PCSK9; (-) strand; PAM type: NRG; PAM sequence: GGG
atggcaactccatctgtcca

SEQ ID NO: 11769 - DNA, 20 bp, Artificial Sequence
  Description of Artificial Sequence: Synthetic oligonucleotide
  Target: PCSK9; (-) strand; PAM type: NRG; PAM sequence: AGG
aatggcaactccatctgtcc

SEQ ID NO: 11770 - DNA, 20 bp, Artificial Sequence
  Description of Artificial Sequence: Synthetic oligonucleotide
  Target: PCSK9; (-) strand; PAM type: NRG; PAM sequence: CAG
taatggcaactccatctgtc

SEQ ID NO: 11771 - DNA, 20 bp, Artificial Sequence
  Description of Artificial Sequence: Synthetic oligonucleotide
  Target: PCSK9; (-) strand; PAM type: NRG; PAM sequence: TGG
gcctgccccatcccacttaa

SEQ ID NO: 11772 - DNA, 20 bp, Artificial Sequence
  Description of Artificial Sequence: Synthetic oligonucleotide
  Target: PCSK9; (-) strand; PAM type: NRG; PAM sequence: TAG
ctctgaaactgatggcccca

SEQ ID NO: 11773 - DNA, 20 bp, Artificial Sequence
  Description of Artificial Sequence: Synthetic oligonucleotide
  Target: PCSK9; (-) strand; PAM type: NRG; PAM sequence: TGG
actcatccctctgaaactga

SEQ ID NO: 11774 - DNA, 20 bp, Artificial Sequence
  Description of Artificial Sequence: Synthetic oligonucleotide
  Target: PCSK9; (-) strand; PAM type: NRG; PAM sequence: CAG
tagacagatgcctaccatgc

SEQ ID NO: 11775 - DNA, 20 bp, Artificial Sequence
  Description of Artificial Sequence: Synthetic oligonucleotide
  Target: PCSK9; (-) strand; PAM type: NRG; PAM sequence: CAG
ttgagggccgtggagataga

SEQ ID NO: 11776 - DNA, 20 bp, Artificial Sequence
  Description of Artificial Sequence: Synthetic oligonucleotide
  Target: PCSK9; (-) strand; PAM type: NRG; PAM sequence: TAG
tggtttgagggccgtggaga

SEQ ID NO: 11777 - DNA, 20 bp, Artificial Sequence
  Description of Artificial Sequence: Synthetic oligonucleotide
  Target: PCSK9; (-) strand; PAM type: NRG; PAM sequence: GAG
tgcctggtttgagggccgtg

SEQ ID NO: 11778 - DNA, 20 bp, Artificial Sequence
  Description of Artificial Sequence: Synthetic oligonucleotide
  Target: PCSK9; (-) strand; PAM type: NRG; PAM sequence: TGG
catgcctggtttgagggccg

SEQ ID NO: 11779 - DNA, 20 bp, Artificial Sequence
  Description of Artificial Sequence: Synthetic oligonucleotide
  Target: PCSK9; (-) strand; PAM type: NRG; PAM sequence: GGG
ctgcttcatgcctggtttga

SEQ ID NO: 11780 - DNA, 20 bp, Artificial Sequence
  Description of Artificial Sequence: Synthetic oligonucleotide
  Target: PCSK9; (-) strand; PAM type: NRG; PAM sequence: AGG
cctgcttcatgcctggtttg

SEQ ID NO: 11781 - DNA, 20 bp, Artificial Sequence
  Description of Artificial Sequence: Synthetic oligonucleotide
  Target: PCSK9; (-) strand; PAM type: NRG; PAM sequence: GAG
tcctgcttcatgcctggttt

SEQ ID NO: 11782 - DNA, 20 bp, Artificial Sequence
  Description of Artificial Sequence: Synthetic oligonucleotide
  Target: PCSK9; (-) strand; PAM type: NRG; PAM sequence: TGG
gtgagctcctgcttcatgcc

SEQ ID NO: 11783 - DNA, 20 bp, Artificial Sequence
  Description of Artificial Sequence: Synthetic oligonucleotide
  Target: PCSK9; (-) strand; PAM type: NRG; PAM sequence: GAG
ccatggctgaccaaacacgt

SEQ ID NO: 11784 - DNA, 20 bp, Artificial Sequence
  Description of Artificial Sequence: Synthetic oligonucleotide
  Target: PCSK9; (-) strand; PAM type: NRG; PAM sequence: TGG
acccaggcggttctgcacca

SEQ ID NO: 11785 - DNA, 20 bp, Artificial Sequence
  Description of Artificial Sequence: Synthetic oligonucleotide
  Target: PCSK9; (-) strand; PAM type: NRG; PAM sequence: CGG
ccccgcacctcccacccagg

SEQ ID NO: 11786 - DNA, 20 bp, Artificial Sequence
  Description of Artificial Sequence: Synthetic oligonucleotide
  Target: PCSK9; (-) strand; PAM type: NRG; PAM sequence: AGG
ccaccccgcacctcccaccc

SEQ ID NO: 11787 - DNA, 20 bp, Artificial Sequence
  Description of Artificial Sequence: Synthetic oligonucleotide
  Target: PCSK9; (-) strand; PAM type: NRG; PAM sequence: CAG
cccaccccgcacctcccacc

SEQ ID NO: 11788 - DNA, 20 bp, Artificial Sequence
  Description of Artificial Sequence: Synthetic oligonucleotide
  Target: PCSK9; (-) strand; PAM type: NRG; PAM sequence: GGG
cgctggctcagagcccattt

SEQ ID NO: 11789 - DNA, 20 bp, Artificial Sequence
  Description of Artificial Sequence: Synthetic oligonucleotide
  Target: PCSK9; (-) strand; PAM type: NRG; PAM sequence: TGG
tcgctggctcagagcccatt

SEQ ID NO: 11790 - DNA, 20 bp, Artificial Sequence
  Description of Artificial Sequence: Synthetic oligonucleotide
  Target: PCSK9; (-) strand; PAM type: NRG; PAM sequence: GAG
agacggccctcgctggctca

SEQ ID NO: 11791 - DNA, 20 bp, Artificial Sequence
  Description of Artificial Sequence: Synthetic oligonucleotide
  Target: PCSK9; (-) strand; PAM type: NRG; PAM sequence: CAG
gcagacggccctcgctggct

SEQ ID NO: 11792 - DNA, 20 bp, Artificial Sequence
  Description of Artificial Sequence: Synthetic oligonucleotide
  Target: PCSK9; (-) strand; PAM type: NRG; PAM sequence: TGG
aaagtgcagacggccctcgc

SEQ ID NO: 11793 - DNA, 20 bp, Artificial Sequence
  Description of Artificial Sequence: Synthetic oligonucleotide
  Target: PCSK9; (-) strand; PAM type: NRG; PAM sequence: CGG
ctgtgaggccaaagtgcaga

SEQ ID NO: 11794 - DNA, 20 bp, Artificial Sequence
  Description of Artificial Sequence: Synthetic oligonucleotide
  Target: PCSK9; (-) strand; PAM type: NRG; PAM sequence: CAG
ccttctgtgaggccaaagtg

SEQ ID NO: 11795 - DNA, 20 bp, Artificial Sequence
  Description of Artificial Sequence: Synthetic oligonucleotide
  Target: PCSK9; (-) strand; PAM type: NRG; PAM sequence: AAG
gacatccttctgtgaggcca

SEQ ID NO: 11796 - DNA, 20 bp, Artificial Sequence
  Description of Artificial Sequence: Synthetic oligonucleotide
  Target: PCSK9; (-) strand; PAM type: NRG; PAM sequence: AGG
ccctccgacatccttctgtg

SEQ ID NO: 11797 - DNA, 20 bp, Artificial Sequence
  Description of Artificial Sequence: Synthetic oligonucleotide
  Target: PCSK9; (-) strand; PAM type: NRG; PAM sequence: GAG
tccctccgacatccttctgt

SEQ ID NO: 11798 - DNA, 20 bp, Artificial Sequence
  Description of Artificial Sequence: Synthetic oligonucleotide
  Target: PCSK9; (-) strand; PAM type: NRG; PAM sequence: GGG
gcacatgtctagcgtggccc

SEQ ID NO: 11799 - DNA, 20 bp, Artificial Sequence
  Description of Artificial Sequence: Synthetic oligonucleotide
  Target: PCSK9; (-) strand; PAM type: NRG; PAM sequence: CGG
agcacatgtctagcgtggcc

SEQ ID NO: 11800 - DNA, 20 bp, Artificial Sequence
  Description of Artificial Sequence: Synthetic oligonucleotide
  Target: PCSK9; (-) strand; PAM type: NRG; PAM sequence: TGG
aagaaagcacatgtctagcg

SEQ ID NO: 11801 - DNA, 20 bp, Artificial Sequence
  Description of Artificial Sequence: Synthetic oligonucleotide
  Target: PCSK9; (-) strand; PAM type: NRG; PAM sequence: TAG
aggaaaagaaagcacatgtc

SEQ ID NO: 11802 - DNA, 20 bp, Artificial Sequence
  Description of Artificial Sequence: Synthetic oligonucleotide
  Target: PCSK9; (-) strand; PAM type: NRG; PAM sequence: AAG
gccagagcccgaggaaaaga

SEQ ID NO: 11803 - DNA, 20 bp, Artificial Sequence
  Description of Artificial Sequence: Synthetic oligonucleotide
  Target: PCSK9; (-) strand; PAM type: NRG; PAM sequence: AAG
acctgccagagcccgaggaa

SEQ ID NO: 11804 - DNA, 20 bp, Artificial Sequence
  Description of Artificial Sequence: Synthetic oligonucleotide
  Target: PCSK9; (-) strand; PAM type: NRG; PAM sequence: AGG
cggtcacctgccagagcccg

SEQ ID NO: 11805 - DNA, 20 bp, Artificial Sequence
  Description of Artificial Sequence: Synthetic oligonucleotide
  Target: PCSK9; (-) strand; PAM type: NRG; PAM sequence: GAG
acggtcacctgccagagccc

SEQ ID NO: 11806 - DNA, 20 bp, Artificial Sequence
  Description of Artificial Sequence: Synthetic oligonucleotide
  Target: PCSK9; (-) strand; PAM type: NRG; PAM sequence: GAG
caggccacggtcacctgcca

SEQ ID NO: 11807 - DNA, 20 bp, Artificial Sequence
  Description of Artificial Sequence: Synthetic oligonucleotide
  Target: PCSK9; (-) strand; PAM type: NRG; PAM sequence: CAG
cgcaggccacggtcacctgc

SEQ ID NO: 11808 - DNA, 20 bp, Artificial Sequence
  Description of Artificial Sequence: Synthetic oligonucleotide
  Target: PCSK9; (-) strand; PAM type: NRG; PAM sequence: CGG
ccagccctcctcgcaggcca

SEQ ID NO: 11809 - DNA, 20 bp, Artificial Sequence
  Description of Artificial Sequence: Synthetic oligonucleotide
  Target: PCSK9; (-) strand; PAM type: NRG; PAM sequence: AGG
cagggtccagccctcctcgc

SEQ ID NO: 11810 - DNA, 20 bp, Artificial Sequence
  Description of Artificial Sequence: Synthetic oligonucleotide
  Target: PCSK9; (-) strand; PAM type: NRG; PAM sequence: CAG
tcagggtccagccctcctcg

SEQ ID NO: 11811 - DNA, 20 bp, Artificial Sequence
  Description of Artificial Sequence: Synthetic oligonucleotide
  Target: PCSK9; (-) strand; PAM type: NRG; PAM sequence: CAG
cactgcagccagtcagggtc

SEQ ID NO: 11812 - DNA, 20 bp, Artificial Sequence
  Description of Artificial Sequence: Synthetic oligonucleotide
  Target: PCSK9; (-) strand; PAM type: NRG; PAM sequence: GGG
gagggcactgcagccagtca

SEQ ID NO: 11813 - DNA, 20 bp, Artificial Sequence
  Description of Artificial Sequence: Synthetic oligonucleotide
  Target: PCSK9; (-) strand; PAM type: NRG; PAM sequence: AGG
ggagggcactgcagccagtc

SEQ ID NO: 11814 - DNA, 20 bp, Artificial Sequence
  Description of Artificial Sequence: Synthetic oligonucleotide
  Target: PCSK9; (-) strand; PAM type: NRG; PAM sequence: CAG
gggagggcactgcagccagt

SEQ ID NO: 11815 - DNA, 20 bp, Artificial Sequence
  Description of Artificial Sequence: Synthetic oligonucleotide
  Target: PCSK9; (-) strand; PAM type: NRG; PAM sequence: CAG
cccagggagggcactgcagc

SEQ ID NO: 11816 - DNA, 20 bp, Artificial Sequence
  Description of Artificial Sequence: Synthetic oligonucleotide
  Target: PCSK9; (-) strand; PAM type: NRG; PAM sequence: CAG
aggtcccagggagggcactg

SEQ ID NO: 11817 - DNA, 20 bp, Artificial Sequence
  Description of Artificial Sequence: Synthetic oligonucleotide
  Target: PCSK9; (-) strand; PAM type: NRG; PAM sequence: GGG
gacgtgggaggtcccaggga

SEQ ID NO: 11818 - DNA, 20 bp, Artificial Sequence
  Description of Artificial Sequence: Synthetic oligonucleotide
  Target: PCSK9; (-) strand; PAM type: NRG; PAM sequence: AGG
ggacgtgggaggtcccaggg

SEQ ID NO: 11819 - DNA, 20 bp, Artificial Sequence
  Description of Artificial Sequence: Synthetic oligonucleotide
  Target: PCSK9; (-) strand; PAM type: NRG; PAM sequence: GAG
aggacgtgggaggtcccagg

SEQ ID NO: 11820 - DNA, 20 bp, Artificial Sequence
  Description of Artificial Sequence: Synthetic oligonucleotide
  Target: PCSK9; (-) strand; PAM type: NRG; PAM sequence: GGG
ccaggacgtgggaggtccca

SEQ ID NO: 11821 - DNA, 20 bp, Artificial Sequence
  Description of Artificial Sequence: Synthetic oligonucleotide
  Target: PCSK9; (-) strand; PAM type: NRG; PAM sequence: AGG
cccaggacgtgggaggtccc

SEQ ID NO: 11822 - DNA, 20 bp, Artificial Sequence
  Description of Artificial Sequence: Synthetic oligonucleotide
  Target: PCSK9; (-) strand; PAM type: NRG; PAM sequence: CAG
ccccaggacgtgggaggtcc

SEQ ID NO: 11823 - DNA, 20 bp, Artificial Sequence
  Description of Artificial Sequence: Synthetic oligonucleotide
  Target: PCSK9; (-) strand; PAM type: NRG; PAM sequence: AGG
gtaggcccccaggacgtggg

SEQ ID NO: 11824 - DNA, 20 bp, Artificial Sequence
  Description of Artificial Sequence: Synthetic oligonucleotide
  Target: PCSK9; (-) strand; PAM type: NRG; PAM sequence: GAG
cgtaggcccccaggacgtgg

SEQ ID NO: 11825 - DNA, 20 bp, Artificial Sequence
  Description of Artificial Sequence: Synthetic oligonucleotide
  Target: PCSK9; (-) strand; PAM type: NRG; PAM sequence: GGG
ggcgtaggcccccaggacgt

SEQ ID NO: 11826 - DNA, 20 bp, Artificial Sequence
  Description of Artificial Sequence: Synthetic oligonucleotide
  Target: PCSK9; (-) strand; PAM type: NRG; PAM sequence: TGG
cggcgtaggcccccaggacg

SEQ ID NO: 11827 - DNA, 20 bp, Artificial Sequence
  Description of Artificial Sequence: Synthetic oligonucleotide
  Target: PCSK9; (-) strand; PAM type: NRG; PAM sequence: AGG
tgtctacggcgtaggccccc

SEQ ID NO: 11828 - DNA, 20 bp, Artificial Sequence
  Description of Artificial Sequence: Synthetic oligonucleotide
  Target: PCSK9; (-) strand; PAM type: NRG; PAM sequence: CAG
ttgtctacggcgtaggcccc

SEQ ID NO: 11829 - DNA, 20 bp, Artificial Sequence
  Description of Artificial Sequence: Synthetic oligonucleotide
  Target: PCSK9; (-) strand; PAM type: NRG; PAM sequence: AGG
acacgtgttgtctacggcgt

SEQ ID NO: 11830 - DNA, 20 bp, Artificial Sequence
  Description of Artificial Sequence: Synthetic oligonucleotide
  Target: PCSK9; (-) strand; PAM type: NRG; PAM sequence: TAG
cacacgtgttgtctacggcg

SEQ ID NO: 11831 - DNA, 20 bp, Artificial Sequence
  Description of Artificial Sequence: Synthetic oligonucleotide
  Target: PCSK9; (-) strand; PAM type: NRG; PAM sequence: CGG
gactacacacgtgttgtcta

SEQ ID NO: 11832 - DNA, 20 bp, Artificial Sequence
  Description of Artificial Sequence: Synthetic oligonucleotide
  Target: PCSK9; (-) strand; PAM type: NRG; PAM sequence: CGG
tgcctgtagtgctgacgtcc

SEQ ID NO: 11833 - DNA, 20 bp, Artificial Sequence
  Description of Artificial Sequence: Synthetic oligonucleotide
  Target: PCSK9; (-) strand; PAM type: NRG; PAM sequence: TAG
cccttcgctggtgctgcctg

SEQ ID NO: 11834 - DNA, 20 bp, Artificial Sequence
  Description of Artificial Sequence: Synthetic oligonucleotide
  Target: PCSK9; (-) strand; PAM type: NRG; PAM sequence: TGG
ggctgtcacggccccttcgc

SEQ ID NO: 11835 - DNA, 20 bp, Artificial Sequence
  Description of Artificial Sequence: Synthetic oligonucleotide
  Target: PCSK9; (-) strand; PAM type: NRG; PAM sequence: CGG
gcagatggcaacggctgtca

SEQ ID NO: 11836 - DNA, 20 bp, Artificial Sequence
  Description of Artificial Sequence: Synthetic oligonucleotide
  Target: PCSK9; (-) strand; PAM type: NRG; PAM sequence: CGG
gctccggcagcagatggcaa

SEQ ID NO: 11837 - DNA, 20 bp, Artificial Sequence
  Description of Artificial Sequence: Synthetic oligonucleotide
  Target: PCSK9; (-) strand; PAM type: NRG; PAM sequence: TGG
gtgccggctccggcagcaga

SEQ ID NO: 11838 - DNA, 20 bp, Artificial Sequence
  Description of Artificial Sequence: Synthetic oligonucleotide
  Target: PCSK9; (-) strand; PAM type: NRG; PAM sequence: CAG
ccaggtgccggctccggcag

SEQ ID NO: 11839 - DNA, 20 bp, Artificial Sequence
  Description of Artificial Sequence: Synthetic oligonucleotide
  Target: PCSK9; (-) strand; PAM type: NRG; PAM sequence: CAG
gcgccaggtgccggctccgg

SEQ ID NO: 11840 - DNA, 20 bp, Artificial Sequence
  Description of Artificial Sequence: Synthetic oligonucleotide
  Target: PCSK9; (-) strand; PAM type: NRG; PAM sequence: CGG
cctgcgccaggtgccggctc

SEQ ID NO: 11841 - DNA, 20 bp, Artificial Sequence
  Description of Artificial Sequence: Synthetic oligonucleotide
  Target: PCSK9; (-) strand; PAM type: NRG; PAM sequence: CGG
gggaggcctgcgccaggtgc

SEQ ID NO: 11842 - DNA, 20 bp, Artificial Sequence
  Description of Artificial Sequence: Synthetic oligonucleotide
  Target: PCSK9; (-) strand; PAM type: NRG; PAM sequence: AGG
gctcctgggaggcctgcgcc

SEQ ID NO: 11843 - DNA, 20 bp, Artificial Sequence
  Description of Artificial Sequence: Synthetic oligonucleotide
  Target: PCSK9; (-) strand; PAM type: NRG; PAM sequence: CAG
agctcctgggaggcctgcgc

SEQ ID NO: 11844 - DNA, 20 bp, Artificial Sequence
  Description of Artificial Sequence: Synthetic oligonucleotide
  Target: PCSK9; (-) strand; PAM type: NRG; PAM sequence: AGG
ctgtcactggagctcctggg

SEQ ID NO: 11845 - DNA, 20 bp, Artificial Sequence
  Description of Artificial Sequence: Synthetic oligonucleotide
  Target: PCSK9; (-) strand; PAM type: NRG; PAM sequence: GAG
gctgtcactggagctcctgg

SEQ ID NO: 11846 - DNA, 20 bp, Artificial Sequence
  Description of Artificial Sequence: Synthetic oligonucleotide
  Target: PCSK9; (-) strand; PAM type: NRG; PAM sequence: GGG
gggctgtcactggagctcct

SEQ ID NO: 11847 - DNA, 20 bp, Artificial Sequence
  Description of Artificial Sequence: Synthetic oligonucleotide
  Target: PCSK9; (-) strand; PAM type: NRG; PAM sequence: TGG
ggggctgtcactggagctcc

SEQ ID NO: 11848 - DNA, 20 bp, Artificial Sequence
  Description of Artificial Sequence: Synthetic oligonucleotide
  Target: PCSK9; (-) strand; PAM type: NRG; PAM sequence: GAG
ctgggatggggctgtcactg

SEQ ID NO: 11849 - DNA, 20 bp, Artificial Sequence
  Description of Artificial Sequence: Synthetic oligonucleotide
  Target: PCSK9; (-) strand; PAM type: NRG; PAM sequence: TGG
tcctgggatggggctgtcac

SEQ ID NO: 11850 - DNA, 20 bp, Artificial Sequence
  Description of Artificial Sequence: Synthetic oligonucleotide
  Target: PCSK9; (-) strand; PAM type: NRG; PAM sequence: GGG
cagacacccatcctgggatg

SEQ ID NO: 11851 - DNA, 20 bp, Artificial Sequence
  Description of Artificial Sequence: Synthetic oligonucleotide
  Target: PCSK9; (-) strand; PAM type: NRG; PAM sequence: GGG
ccagacacccatcctgggat

SEQ ID NO: 11852 - DNA, 20 bp, Artificial Sequence
  Description of Artificial Sequence: Synthetic oligonucleotide
  Target: PCSK9; (-) strand; PAM type: NRG; PAM sequence: TGG
cccagacacccatcctggga

SEQ ID NO: 11853 - DNA, 20 bp, Artificial Sequence
  Description of Artificial Sequence: Synthetic oligonucleotide
  Target: PCSK9; (-) strand; PAM type: NRG; PAM sequence: GGG
cctccccagacacccatcct

SEQ ID NO: 11854 - DNA, 20 bp, Artificial Sequence
  Description of Artificial Sequence: Synthetic oligonucleotide
  Target: PCSK9; (-) strand; PAM type: NRG; PAM sequence: TGG
ccctccccagacacccatcc

SEQ ID NO: 11855 - DNA, 20 bp, Artificial Sequence
  Description of Artificial Sequence: Synthetic oligonucleotide
  Target: PCSK9; (-) strand; PAM type: NRG; PAM sequence: CAG
ccccagcccttgaccctccc

SEQ ID NO: 11856 - DNA, 20 bp, Artificial Sequence
  Description of Artificial Sequence: Synthetic oligonucleotide
  Target: PCSK9; (-) strand; PAM type: NRG; PAM sequence: CAG
accattttaaagctcagccc

SEQ ID NO: 11857 - DNA, 20 bp, Artificial Sequence
  Description of Artificial Sequence: Synthetic oligonucleotide
  Target: PCSK9; (-) strand; PAM type: NRG; PAM sequence: CAG
gtcggaaccattttaaagct

SEQ ID NO: 11858 - DNA, 20 bp, Artificial Sequence
  Description of Artificial Sequence: Synthetic oligonucleotide
  Target: PCSK9; (-) strand; PAM type: NRG; PAM sequence: AAG
gacaagtcggaaccatttta

SEQ ID NO: 11859 - DNA, 20 bp, Artificial Sequence
  Description of Artificial Sequence: Synthetic oligonucleotide
  Target: PCSK9; (-) strand; PAM type: NRG; PAM sequence: CGG
gggctgagagagggacaagt

SEQ ID NO: 11860 - DNA, 20 bp, Artificial Sequence
  Description of Artificial Sequence: Synthetic oligonucleotide
  Target: PCSK9; (-) strand; PAM type: NRG; PAM sequence: AAG
tggagggctgagagagggac

SEQ ID NO: 11861 - DNA, 20 bp, Artificial Sequence
  Description of Artificial Sequence: Synthetic oligonucleotide
  Target: PCSK9; (-) strand; PAM type: NRG; PAM sequence: GGG
ggccatggagggctgagaga

SEQ ID NO: 11862 - DNA, 20 bp, Artificial Sequence
  Description of Artificial Sequence: Synthetic oligonucleotide
  Target: PCSK9; (-) strand; PAM type: NRG; PAM sequence: AGG
aggccatggagggctgagag

SEQ ID NO: 11863 - DNA, 20 bp, Artificial Sequence
  Description of Artificial Sequence: Synthetic oligonucleotide
  Target: PCSK9; (-) strand; PAM type: NRG; PAM sequence: GAG
caggccatggagggctgaga

SEQ ID NO: 11864 - DNA, 20 bp, Artificial Sequence
  Description of Artificial Sequence: Synthetic oligonucleotide
  Target: PCSK9; (-) strand; PAM type: NRG; PAM sequence: GAG
gccaggccatggagggctga

SEQ ID NO: 11865 - DNA, 20 bp, Artificial Sequence
  Description of Artificial Sequence: Synthetic oligonucleotide
  Target: PCSK9; (-) strand; PAM type: NRG; PAM sequence: GAG
gtgccaggccatggagggct

SEQ ID NO: 11866 - DNA, 20 bp, Artificial Sequence
  Description of Artificial Sequence: Synthetic oligonucleotide
  Target: PCSK9; (-) strand; PAM type: NRG; PAM sequence: GGG
ccctcgtgccaggccatgga

SEQ ID NO: 11867 - DNA, 20 bp, Artificial Sequence
  Description of Artificial Sequence: Synthetic oligonucleotide
  Target: PCSK9; (-) strand; PAM type: NRG; PAM sequence: AGG
cccctcgtgccaggccatgg

SEQ ID NO: 11868 - DNA, 20 bp, Artificial Sequence
  Description of Artificial Sequence: Synthetic oligonucleotide
  Target: PCSK9; (-) strand; PAM type: NRG; PAM sequence: GAG
tcccctcgtgccaggccatg

SEQ ID NO: 11869 - DNA, 20 bp, Artificial Sequence
  Description of Artificial Sequence: Synthetic oligonucleotide
  Target: PCSK9; (-) strand; PAM type: NRG; PAM sequence: TGG
catcccctcgtgccaggcca

SEQ ID NO: 11870 - DNA, 20 bp, Artificial Sequence
  Description of Artificial Sequence: Synthetic oligonucleotide
  Target: PCSK9; (-) strand; PAM type: NRG; PAM sequence: AGG
catccccatcccctcgtgcc

SEQ ID NO: 11871 - DNA, 20 bp, Artificial Sequence
  Description of Artificial Sequence: Synthetic oligonucleotide
  Target: PCSK9; (-) strand; PAM type: NRG; PAM sequence: CAG
gcatccccatcccctcgtgc

SEQ ID NO: 11872 - DNA, 20 bp, Artificial Sequence
  Description of Artificial Sequence: Synthetic oligonucleotide
  Target: PCSK9; (-) strand; PAM type: NRG; PAM sequence: AAG
cagcagccccggaaaggcgg

SEQ ID NO: 11873 - DNA, 20 bp, Artificial Sequence
  Description of Artificial Sequence: Synthetic oligonucleotide
  Target: PCSK9; (-) strand; PAM type: NRG; PAM sequence: CGG
ggccagcagccccggaaagg

SEQ ID NO: 11874 - DNA, 20 bp, Artificial Sequence
  Description of Artificial Sequence: Synthetic oligonucleotide
  Target: PCSK9; (-) strand; PAM type: NRG; PAM sequence: AGG
ccaggccagcagccccggaa

SEQ ID NO: 11875 - DNA, 20 bp, Artificial Sequence
  Description of Artificial Sequence: Synthetic oligonucleotide
  Target: PCSK9; (-) strand; PAM type: NRG; PAM sequence: AAG
gccaggccagcagccccgga

SEQ ID NO: 11876 - DNA, 20 bp, Artificial Sequence
  Description of Artificial Sequence: Synthetic oligonucleotide
  Target: PCSK9; (-) strand; PAM type: NRG; PAM sequence: CGG
aagggccaggccagcagccc

SEQ ID NO: 11877 - DNA, 20 bp, Artificial Sequence
  Description of Artificial Sequence: Synthetic oligonucleotide
  Target: PCSK9; (-) strand; PAM type: NRG; PAM sequence: CAG
ccactcaagggccaggccag

SEQ ID NO: 11878 - DNA, 20 bp, Artificial Sequence
  Description of Artificial Sequence: Synthetic oligonucleotide
  Target: PCSK9; (-) strand; PAM type: NRG; PAM sequence: CAG
gccccactcaagggccaggc

SEQ ID NO: 11879 - DNA, 20 bp, Artificial Sequence
  Description of Artificial Sequence: Synthetic oligonucleotide
  Target: PCSK9; (-) strand; PAM type: NRG; PAM sequence: AGG
ggctgccccactcaagggcc

SEQ ID NO: 11880 - DNA, 20 bp, Artificial Sequence
  Description of Artificial Sequence: Synthetic oligonucleotide
  Target: PCSK9; (-) strand; PAM type: NRG; PAM sequence: CAG
aggctgccccactcaagggc

SEQ ID NO: 11881 - DNA, 20 bp, Artificial Sequence
  Description of Artificial Sequence: Synthetic oligonucleotide
  Target: PCSK9; (-) strand; PAM type: NRG; PAM sequence: GGG
aaggaggctgccccactcaa

SEQ ID NO: 11882 - DNA, 20 bp, Artificial Sequence
  Description of Artificial Sequence: Synthetic oligonucleotide
  Target: PCSK9; (-) strand; PAM type: NRG; PAM sequence: AGG
caaggaggctgccccactca

SEQ ID NO: 11883 - DNA, 20 bp, Artificial Sequence
  Description of Artificial Sequence: Synthetic oligonucleotide
  Target: PCSK9; (-) strand; PAM type: NRG; PAM sequence: AAG
gcaaggaggctgccccactc

SEQ ID NO: 11884 - DNA, 20 bp, Artificial Sequence
  Description of Artificial Sequence: Synthetic oligonucleotide
  Target: PCSK9; (-) strand; PAM type: NRG; PAM sequence: AGG
tgagtgagttccaggcaagg

SEQ ID NO: 11885 - DNA, 20 bp, Artificial Sequence
  Description of Artificial Sequence: Synthetic oligonucleotide
  Target: PCSK9; (-) strand; PAM type: NRG; PAM sequence: GAG
gtgagtgagttccaggcaag

SEQ ID NO: 11886 - DNA, 20 bp, Artificial Sequence
  Description of Artificial Sequence: Synthetic oligonucleotide
  Target: PCSK9; (-) strand; PAM type: NRG; PAM sequence: AGG
gagtgagtgagttccaggca

SEQ ID NO: 11887 - DNA, 20 bp, Artificial Sequence
  Description of Artificial Sequence: Synthetic oligonucleotide
  Target: PCSK9; (-) strand; PAM type: NRG; PAM sequence: AAG
agagtgagtgagttccaggc

SEQ ID NO: 11888 - DNA, 20 bp, Artificial Sequence
  Description of Artificial Sequence: Synthetic oligonucleotide
  Target: PCSK9; (-) strand; PAM type: NRG; PAM sequence: AGG
acccagagtgagtgagttcc

SEQ ID NO: 11889 - DNA, 20 bp, Artificial Sequence
  Description of Artificial Sequence: Synthetic oligonucleotide
  Target: PCSK9; (-) strand; PAM type: NRG; PAM sequence: CAG
cacccagagtgagtgagttc

SEQ ID NO: 11890 - DNA, 20 bp, Artificial Sequence
  Description of Artificial Sequence: Synthetic oligonucleotide
  Target: PCSK9; (-) strand; PAM type: NRG; PAM sequence: GAG
aggaggcacccagagtgagt

SEQ ID NO: 11891 - DNA, 20 bp, Artificial Sequence
  Description of Artificial Sequence: Synthetic oligonucleotide
  Target: PCSK9; (-) strand; PAM type: NRG; PAM sequence: GAG
ggggaggaggcacccagagt

SEQ ID NO: 11892 - DNA, 20 bp, Artificial Sequence
  Description of Artificial Sequence: Synthetic oligonucleotide
  Target: PCSK9; (-) strand; PAM type: NRG; PAM sequence: GAG
acctggggaggaggcaccca

SEQ ID NO: 11893 - DNA, 20 bp, Artificial Sequence
  Description of Artificial Sequence: Synthetic oligonucleotide
  Target: PCSK9; (-) strand; PAM type: NRG; PAM sequence: CAG
ccacctggggaggaggcacc

SEQ ID NO: 11894 - DNA, 20 bp, Artificial Sequence
  Description of Artificial Sequence: Synthetic oligonucleotide
  Target: PCSK9; (-) strand; PAM type: NRG; PAM sequence: AGG
ggcacctccacctggggagg

SEQ ID NO: 11895 - DNA, 20 bp, Artificial Sequence
  Description of Artificial Sequence: Synthetic oligonucleotide
  Target: PCSK9; (-) strand; PAM type: NRG; PAM sequence: GAG
tggcacctccacctggggag

SEQ ID NO: 11896 - DNA, 20 bp, Artificial Sequence
  Description of Artificial Sequence: Synthetic oligonucleotide
  Target: PCSK9; (-) strand; PAM type: NRG; PAM sequence: AGG
cctggcacctccacctgggg

SEQ ID NO: 11897 - DNA, 20 bp, Artificial Sequence
  Description of Artificial Sequence: Synthetic oligonucleotide
  Target: PCSK9; (-) strand; PAM type: NRG; PAM sequence: GAG
tcctggcacctccacctggg

SEQ ID NO: 11898 - DNA, 20 bp, Artificial Sequence
  Description of Artificial Sequence: Synthetic oligonucleotide
  Target: PCSK9; (-) strand; PAM type: NRG; PAM sequence: GGG
cttcctggcacctccacctg

SEQ ID NO: 11899 - DNA, 20 bp, Artificial Sequence
  Description of Artificial Sequence: Synthetic oligonucleotide
  Target: PCSK9; (-) strand; PAM type: NRG; PAM sequence: GGG
gcttcctggcacctccacct

SEQ ID NO: 11900 - DNA, 20 bp, Artificial Sequence
  Description of Artificial Sequence: Synthetic oligonucleotide
  Target: PCSK9; (-) strand; PAM type: NRG; PAM sequence: TGG
agcttcctggcacctccacc

SEQ ID NO: 11901 - DNA, 20 bp, Artificial Sequence
  Description of Artificial Sequence: Synthetic oligonucleotide
  Target: PCSK9; (-) strand; PAM type: NRG; PAM sequence: TGG
cagtgagggagggagcttcc

SEQ ID NO: 11902 - DNA, 20 bp, Artificial Sequence
  Description of Artificial Sequence: Synthetic oligonucleotide
  Target: PCSK9; (-) strand; PAM type: NRG; PAM sequence: GAG
atgccccacagtgagggagg

SEQ ID NO: 11903 - DNA, 20 bp, Artificial Sequence
  Description of Artificial Sequence: Synthetic oligonucleotide
  Target: PCSK9; (-) strand; PAM type: NRG; PAM sequence: GGG
aaatgccccacagtgaggga

SEQ ID NO: 11904 - DNA, 20 bp, Artificial Sequence
  Description of Artificial Sequence: Synthetic oligonucleotide
  Target: PCSK9; (-) strand; PAM type: NRG; PAM sequence: AGG
gaaatgccccacagtgaggg

SEQ ID NO: 11905 - DNA, 20 bp, Artificial Sequence
  Description of Artificial Sequence: Synthetic oligonucleotide
  Target: PCSK9; (-) strand; PAM type: NRG; PAM sequence: GAG
tgaaatgccccacagtgagg

SEQ ID NO: 11906 - DNA, 20 bp, Artificial Sequence
  Description of Artificial Sequence: Synthetic oligonucleotide
  Target: PCSK9; (-) strand; PAM type: NRG; PAM sequence: GGG
ggtgaaatgccccacagtga

SEQ ID NO: 11907 - DNA, 20 bp, Artificial Sequence
  Description of Artificial Sequence: Synthetic oligonucleotide
  Target: PCSK9; (-) strand; PAM type: NRG; PAM sequence: AGG
tggtgaaatgccccacagtg

SEQ ID NO: 11908 - DNA, 20 bp, Artificial Sequence
  Description of Artificial Sequence: Synthetic oligonucleotide
  Target: PCSK9; (-) strand; PAM type: NRG; PAM sequence: GAG
atggtgaaatgccccacagt

SEQ ID NO: 11909 - DNA, 20 bp, Artificial Sequence
  Description of Artificial Sequence: Synthetic oligonucleotide
  Target: PCSK9; (-) strand; PAM type: NRG; PAM sequence: CAG
ttgaatggtgaaatgcccca

SEQ ID NO: 11910 - DNA, 20 bp, Artificial Sequence
  Description of Artificial Sequence: Synthetic oligonucleotide
  Target: PCSK9; (-) strand; PAM type: NRG; PAM sequence: TGG
cacagctcgacctgtttgaa

SEQ ID NO: 11911 - DNA, 20 bp, Artificial Sequence
  Description of Artificial Sequence: Synthetic oligonucleotide
  Target: PCSK9; (-) strand; PAM type: NRG; PAM sequence: CAG
cagctggcagcacccgagca

SEQ ID NO: 11912 - DNA, 20 bp, Artificial Sequence
  Description of Artificial Sequence: Synthetic oligonucleotide
  Target: PCSK9; (-) strand; PAM type: NRG; PAM sequence: GAG
gggagcagctggcagcaccc

SEQ ID NO: 11913 - DNA, 20 bp, Artificial Sequence
  Description of Artificial Sequence: Synthetic oligonucleotide
  Target: PCSK9; (-) strand; PAM type: NRG; PAM sequence: CAG
ggcacattgggagcagctgg

SEQ ID NO: 11914 - DNA, 20 bp, Artificial Sequence
  Description of Artificial Sequence: Synthetic oligonucleotide
  Target: PCSK9; (-) strand; PAM type: NRG; PAM sequence: TGG
atcggcacattgggagcagc

SEQ ID NO: 11915 - DNA, 20 bp, Artificial Sequence
  Description of Artificial Sequence: Synthetic oligonucleotide
  Target: PCSK9; (-) strand; PAM type: NRG; PAM sequence: CAG
ggacatcggcacattgggag

SEQ ID NO: 11916 - DNA, 20 bp, Artificial Sequence
  Description of Artificial Sequence: Synthetic oligonucleotide
  Target: PCSK9; (-) strand; PAM type: NRG; PAM sequence: GAG
cacggacatcggcacattgg

SEQ ID NO: 11917 - DNA, 20 bp, Artificial Sequence
  Description of Artificial Sequence: Synthetic oligonucleotide
  Target: PCSK9; (-) strand; PAM type: NRG; PAM sequence: GGG
cccacggacatcggcacatt

SEQ ID NO: 11918 - DNA, 20 bp, Artificial Sequence
  Description of Artificial Sequence: Synthetic oligonucleotide
  Target: PCSK9; (-) strand; PAM type: NRG; PAM sequence: TGG
gcccacggacatcggcacat

SEQ ID NO: 11919 - DNA, 20 bp, Artificial Sequence
  Description of Artificial Sequence: Synthetic oligonucleotide
  Target: PCSK9; (-) strand; PAM type: NRG; PAM sequence: CGG
gtcattctgcccacggacat

SEQ ID NO: 11920 - DNA, 20 bp, Artificial Sequence
  Description of Artificial Sequence: Synthetic oligonucleotide
  Target: PCSK9; (-) strand; PAM type: NRG; PAM sequence: CGG
aataaaagtcattctgccca

SEQ ID NO: 11921 - DNA, 20 bp, Artificial Sequence
  Description of Artificial Sequence: Synthetic oligonucleotide
  Target: PCSK9; (-) strand; PAM type: NRG; PAM sequence: AAG
acggaacaagagctcaataa

SEQ ID NO: 11922 - DNA, 20 bp, Artificial Sequence
  Description of Artificial Sequence: Synthetic oligonucleotide
  Target: PCSK9; (-) strand; PAM type: NRG; PAM sequence: GAG
gaatgcctggcacggaacaa

SEQ ID NO: 11923 - DNA, 20 bp, Artificial Sequence
  Description of Artificial Sequence: Synthetic oligonucleotide
  Target: PCSK9; (-) strand; PAM type: NRG; PAM sequence: AAG
ttgaatgcctggcacggaac

SEQ ID NO: 11924 - DNA, 20 bp, Artificial Sequence
  Description of Artificial Sequence: Synthetic oligonucleotide
  Target: PCSK9; (-) strand; PAM type: NRG; PAM sequence: CGG
tgaggattgaatgcctggca

SEQ ID NO: 11925 - DNA, 20 bp, Artificial Sequence
  Description of Artificial Sequence: Synthetic oligonucleotide
  Target: PCSK9; (-) strand; PAM type: NRG; PAM sequence: TGG
agacctgaggattgaatgcc

SEQ ID NO: 11926 - DNA, 20 bp, Artificial Sequence
  Description of Artificial Sequence: Synthetic oligonucleotide
  Target: PCSK9; (-) strand; PAM type: NRG; PAM sequence: AGG
gcctccttggtggagacctg

SEQ ID NO: 11927 - DNA, 20 bp, Artificial Sequence
  Description of Artificial Sequence: Synthetic oligonucleotide
  Target: PCSK9; (-) strand; PAM type: NRG; PAM sequence: GAG
tgcctccttggtggagacct

SEQ ID NO: 11928 - DNA, 20 bp, Artificial Sequence
  Description of Artificial Sequence: Synthetic oligonucleotide
  Target: PCSK9; (-) strand; PAM type: NRG; PAM sequence: GAG
agaatcctgcctccttggtg

SEQ ID NO: 11929 - DNA, 20 bp, Artificial Sequence
  Description of Artificial Sequence: Synthetic oligonucleotide
  Target: PCSK9; (-) strand; PAM type: NRG; PAM sequence: TGG
gaagaatcctgcctccttgg

SEQ ID NO: 11930 - DNA, 20 bp, Artificial Sequence
  Description of Artificial Sequence: Synthetic oligonucleotide
  Target: PCSK9; (-) strand; PAM type: NRG; PAM sequence: TGG
tgggaagaatcctgcctcct

SEQ ID NO: 11931 - DNA, 20 bp, Artificial Sequence
  Description of Artificial Sequence: Synthetic oligonucleotide
  Target: PCSK9; (-) strand; PAM type: NRG; PAM sequence: AAG
ccccctcccctatccatggg

SEQ ID NO: 11932 - DNA, 20 bp, Artificial Sequence
  Description of Artificial Sequence: Synthetic oligonucleotide
  Target: PCSK9; (-) strand; PAM type: NRG; PAM sequence: GGG
ccgccccctcccctatccat

SEQ ID NO: 11933 - DNA, 20 bp, Artificial Sequence
  Description of Artificial Sequence: Synthetic oligonucleotide
  Target: PCSK9; (-) strand; PAM type: NRG; PAM sequence: TGG
accgccccctcccctatcca

SEQ ID NO: 11934 - DNA, 20 bp, Artificial Sequence
  Description of Artificial Sequence: Synthetic oligonucleotide
  Target: PCSK9; (-) strand; PAM type: NRG; PAM sequence: CAG
cccaacgatgtttgtccctg

SEQ ID NO: 11935 - DNA, 20 bp, Artificial Sequence
  Description of Artificial Sequence: Synthetic oligonucleotide
  Target: PCSK9; (-) strand; PAM type: NRG; PAM sequence: CAG
tagctggagatgagggccat

SEQ ID NO: 11936 - DNA, 20 bp, Artificial Sequence
  Description of Artificial Sequence: Synthetic oligonucleotide
  Target: PCSK9; (-) strand; PAM type: NRG; PAM sequence: GGG
ccacagttagctggagatga

SEQ ID NO: 11937 - DNA, 20 bp, Artificial Sequence
  Description of Artificial Sequence: Synthetic oligonucleotide
  Target: PCSK9; (-) strand; PAM type: NRG; PAM sequence: AGG
tccacagttagctggagatg

SEQ ID NO: 11938 - DNA, 20 bp, Artificial Sequence
  Description of Artificial Sequence: Synthetic oligonucleotide
  Target: PCSK9; (-) strand; PAM type: NRG; PAM sequence: GAG
ctccacagttagctggagat

SEQ ID NO: 11939 - DNA, 20 bp, Artificial Sequence
  Description of Artificial Sequence: Synthetic oligonucleotide
  Target: PCSK9; (-) strand; PAM type: NRG; PAM sequence: GAG
ggcttctccacagttagctg

SEQ ID NO: 11940 - DNA, 20 bp, Artificial Sequence
  Description of Artificial Sequence: Synthetic oligonucleotide
  Target: PCSK9; (-) strand; PAM type: NRG; PAM sequence: TGG
ggggcttctccacagttagc

SEQ ID NO: 11941 - DNA, 20 bp, Artificial Sequence
  Description of Artificial Sequence: Synthetic oligonucleotide
  Target: PCSK9; (-) strand; PAM type: NRG; PAM sequence: TAG
cccaggggcttctccacagt

SEQ ID NO: 11942 - DNA, 20 bp, Artificial Sequence
  Description of Artificial Sequence: Synthetic oligonucleotide
  Target: PCSK9; (-) strand; PAM type: NRG; PAM sequence: CAG
agcccccaggggcttctcca

SEQ ID NO: 11943 - DNA, 20 bp, Artificial Sequence
  Description of Artificial Sequence: Synthetic oligonucleotide
  Target: PCSK9; (-) strand; PAM type: NRG; PAM sequence: GGG
attaatcagggagcccccag

SEQ ID NO: 11944 - DNA, 20 bp, Artificial Sequence
  Description of Artificial Sequence: Synthetic oligonucleotide
  Target: PCSK9; (-) strand; PAM type: NRG; PAM sequence: GGG
cattaatcagggagccccca

SEQ ID NO: 11945 - DNA, 20 bp, Artificial Sequence
  Description of Artificial Sequence: Synthetic oligonucleotide
  Target: PCSK9; (-) strand; PAM type: NRG; PAM sequence: AGG
ccattaatcagggagccccc

SEQ ID NO: 11946 - DNA, 20 bp, Artificial Sequence
  Description of Artificial Sequence: Synthetic oligonucleotide
  Target: PCSK9; (-) strand; PAM type: NRG; PAM sequence: CAG
tccattaatcagggagcccc

SEQ ID NO: 11947 - DNA, 20 bp, Artificial Sequence
  Description of Artificial Sequence: Synthetic oligonucleotide
  Target: PCSK9; (-) strand; PAM type: NRG; PAM sequence: GAG
ctaagcctccattaatcagg

SEQ ID NO: 11948 - DNA, 20 bp, Artificial Sequence
  Description of Artificial Sequence: Synthetic oligonucleotide
  Target: PCSK9; (-) strand; PAM type: NRG; PAM sequence: GGG
agctaagcctccattaatca

SEQ ID NO: 11949 - DNA, 20 bp, Artificial Sequence
  Description of Artificial Sequence: Synthetic oligonucleotide
  Target: PCSK9; (-) strand; PAM type: NRG; PAM sequence: AGG
aagctaagcctccattaatc

SEQ ID NO: 11950 - DNA, 20 bp, Artificial Sequence
  Description of Artificial Sequence: Synthetic oligonucleotide
  Target: PCSK9; (-) strand; PAM type: NRG; PAM sequence: CAG
aaagctaagcctccattaat

SEQ ID NO: 11951 - DNA, 20 bp, Artificial Sequence
  Description of Artificial Sequence: Synthetic oligonucleotide
  Target: PCSK9; (-) strand; PAM type: NRG; PAM sequence: AAG
tagatgccatccagaaagct

SEQ ID NO: 11952 - DNA, 20 bp, Artificial Sequence
  Description of Artificial Sequence: Synthetic oligonucleotide
  Target: PCSK9; (-) strand; PAM type: NRG; PAM sequence: AAG
ctggctagatgccatccaga

SEQ ID NO: 11953 - DNA, 20 bp, Artificial Sequence
  Description of Artificial Sequence: Synthetic oligonucleotide
  Target: PCSK9; (-) strand; PAM type: NRG; PAM sequence: CAG
gcctctggctagatgccatc

SEQ ID NO: 11954 - DNA, 20 bp, Artificial Sequence
  Description of Artificial Sequence: Synthetic oligonucleotide
  Target: PCSK9; (-) strand; PAM type: NRG; PAM sequence: TAG
acctgtctccagcctctggc

SEQ ID NO: 11955 - DNA, 20 bp, Artificial Sequence
  Description of Artificial Sequence: Synthetic oligonucleotide
  Target: PCSK9; (-) strand; PAM type: NRG; PAM sequence: TGG
gcgcacctgtctccagcctc

SEQ ID NO: 11956 - DNA, 20 bp, Artificial Sequence
  Description of Artificial Sequence: Synthetic oligonucleotide
  Target: PCSK9; (-) strand; PAM type: NRG; PAM sequence: CAG
accaggggcgcacctgtctc

SEQ ID NO: 11957 - DNA, 20 bp, Artificial Sequence
  Description of Artificial Sequence: Synthetic oligonucleotide
  Target: PCSK9; (-) strand; PAM type: NRG; PAM sequence: GGG
gcacagcctgtgaccaccag

SEQ ID NO: 11958 - DNA, 20 bp, Artificial Sequence
  Description of Artificial Sequence: Synthetic oligonucleotide
  Target: PCSK9; (-) strand; PAM type: NRG; PAM sequence: GGG
ggcacagcctgtgaccacca

SEQ ID NO: 11959 - DNA, 20 bp, Artificial Sequence
  Description of Artificial Sequence: Synthetic oligonucleotide
  Target: PCSK9; (-) strand; PAM type: NRG; PAM sequence: AGG
aggcacagcctgtgaccacc

SEQ ID NO: 11960 - DNA, 20 bp, Artificial Sequence
  Description of Artificial Sequence: Synthetic oligonucleotide
  Target: PCSK9; (-) strand; PAM type: NRG; PAM sequence: CAG
aaggcacagcctgtgaccac

SEQ ID NO: 11961 - DNA, 20 bp, Artificial Sequence
  Description of Artificial Sequence: Synthetic oligonucleotide
  Target: PCSK9; (-) strand; PAM type: NRG; PAM sequence: CAG
tggctcaggaaaccaaggca

SEQ ID NO: 11962 - DNA, 20 bp, Artificial Sequence
  Description of Artificial Sequence: Synthetic oligonucleotide
  Target: PCSK9; (-) strand; PAM type: NRG; PAM sequence: AGG
aaaggtggctcaggaaacca

SEQ ID NO: 11963 - DNA, 20 bp, Artificial Sequence
  Description of Artificial Sequence: Synthetic oligonucleotide
  Target: PCSK9; (-) strand; PAM type: NRG; PAM sequence: AAG
taaaggtggctcaggaaacc

SEQ ID NO: 11964 - DNA, 20 bp, Artificial Sequence
  Description of Artificial Sequence: Synthetic oligonucleotide
  Target: PCSK9; (-) strand; PAM type: NRG; PAM sequence: AGG
gagcagagtaaaggtggctc

SEQ ID NO: 11965 - DNA, 20 bp, Artificial Sequence
  Description of Artificial Sequence: Synthetic oligonucleotide
  Target: PCSK9; (-) strand; PAM type: NRG; PAM sequence: CAG
agagcagagtaaaggtggct

SEQ ID NO: 11966 - DNA, 20 bp, Artificial Sequence
  Description of Artificial Sequence: Synthetic oligonucleotide
  Target: PCSK9; (-) strand; PAM type: NRG; PAM sequence: TGG
ggcatagagcagagtaaagg

SEQ ID NO: 11967 - DNA, 20 bp, Artificial Sequence
  Description of Artificial Sequence: Synthetic oligonucleotide
  Target: PCSK9; (-) strand; PAM type: NRG; PAM sequence: AGG
cctggcatagagcagagtaa

SEQ ID NO: 11968 - DNA, 20 bp, Artificial Sequence
  Description of Artificial Sequence: Synthetic oligonucleotide
  Target: PCSK9; (-) strand; PAM type: NRG; PAM sequence: AAG
gcctggcatagagcagagta

SEQ ID NO: 11969 - DNA, 20 bp, Artificial Sequence
  Description of Artificial Sequence: Synthetic oligonucleotide
  Target: PCSK9; (-) strand; PAM type: NRG; PAM sequence: GAG
gcacagcctggcatagagca

SEQ ID NO: 11970 - DNA, 20 bp, Artificial Sequence
  Description of Artificial Sequence: Synthetic oligonucleotide
  Target: PCSK9; (-) strand; PAM type: NRG; PAM sequence: CAG
tagcacagcctggcatagag

SEQ ID NO: 11971 - DNA, 20 bp, Artificial Sequence
  Description of Artificial Sequence: Synthetic oligonucleotide
  Target: PCSK9; (-) strand; PAM type: NRG; PAM sequence: GAG
tgctagcacagcctggcata

SEQ ID NO: 11972 - DNA, 20 bp, Artificial Sequence
  Description of Artificial Sequence: Synthetic oligonucleotide
  Target: PCSK9; (-) strand; PAM type: NRG; PAM sequence: TAG
gttgctagcacagcctggca

SEQ ID NO: 11973 - DNA, 20 bp, Artificial Sequence
  Description of Artificial Sequence: Synthetic oligonucleotide
  Target: PCSK9; (-) strand; PAM type: NRG; PAM sequence: TGG
tgggtgttgctagcacagcc

SEQ ID NO: 11974 - DNA, 20 bp, Artificial Sequence
  Description of Artificial Sequence: Synthetic oligonucleotide
  Target: PCSK9; (-) strand; PAM type: NRG; PAM sequence: CAG
acctttgggtgttgctagca

SEQ ID NO: 11975 - DNA, 20 bp, Artificial Sequence
  Description of Artificial Sequence: Synthetic oligonucleotide
  Target: PCSK9; (-) strand; PAM type: NRG; PAM sequence: TAG
aggccacctttgggtgttgc

SEQ ID NO: 11976 - DNA, 20 bp, Artificial Sequence
  Description of Artificial Sequence: Synthetic oligonucleotide
  Target: PCSK9; (-) strand; PAM type: NRG; PAM sequence: GGG
gctccccgcaggccaccttt

SEQ ID NO: 11977 - DNA, 20 bp, Artificial Sequence
  Description of Artificial Sequence: Synthetic oligonucleotide
  Target: PCSK9; (-) strand; PAM type: NRG; PAM sequence: TGG
ggctccccgcaggccacctt

SEQ ID NO: 11978 - DNA, 20 bp, Artificial Sequence
  Description of Artificial Sequence: Synthetic oligonucleotide
  Target: PCSK9; (-) strand; PAM type: NRG; PAM sequence: AGG
cctaggtgatggctccccgc

SEQ ID NO: 11979 - DNA, 20 bp, Artificial Sequence
  Description of Artificial Sequence: Synthetic oligonucleotide
  Target: PCSK9; (-) strand; PAM type: NRG; PAM sequence: CAG
tcctaggtgatggctccccg

SEQ ID NO: 11980 - DNA, 20 bp, Artificial Sequence
  Description of Artificial Sequence: Synthetic oligonucleotide
  Target: PCSK9; (-) strand; PAM type: NRG; PAM sequence: TGG
gccgagtcagtcctaggtga

SEQ ID NO: 11981 - DNA, 20 bp, Artificial Sequence
  Description of Artificial Sequence: Synthetic oligonucleotide
  Target: PCSK9; (-) strand; PAM type: NRG; PAM sequence: AGG
cacactgccgagtcagtcct

SEQ ID NO: 11982 - DNA, 20 bp, Artificial Sequence
  Description of Artificial Sequence: Synthetic oligonucleotide
  Target: PCSK9; (-) strand; PAM type: NRG; PAM sequence: TAG
gcacactgccgagtcagtcc

SEQ ID NO: 11983 - DNA, 20 bp, Artificial Sequence
  Description of Artificial Sequence: Synthetic oligonucleotide
  Target: PCSK9; (-) strand; PAM type: NRG; PAM sequence: CAG
accactgcacactgccgagt

SEQ ID NO: 11984 - DNA, 20 bp, Artificial Sequence
  Description of Artificial Sequence: Synthetic oligonucleotide
  Target: PCSK9; (-) strand; PAM type: NRG; PAM sequence: GAG
atgcaccactgcacactgcc

SEQ ID NO: 11985 - DNA, 20 bp, Artificial Sequence
  Description of Artificial Sequence: Synthetic oligonucleotide
  Target: PCSK9; (-) strand; PAM type: NRG; PAM sequence: CAG
gtggagcgggttggctgaga

SEQ ID NO: 11986 - DNA, 20 bp, Artificial Sequence
  Description of Artificial Sequence: Synthetic oligonucleotide
  Target: PCSK9; (-) strand; PAM type: NRG; PAM sequence: GAG
ggtagtggagcgggttggct

SEQ ID NO: 11987 - DNA, 20 bp, Artificial Sequence
  Description of Artificial Sequence: Synthetic oligonucleotide
  Target: PCSK9; (-) strand; PAM type: NRG; PAM sequence: TGG
tgccgggtagtggagcgggt

SEQ ID NO: 11988 - DNA, 20 bp, Artificial Sequence
  Description of Artificial Sequence: Synthetic oligonucleotide
  Target: PCSK9; (-) strand; PAM type: NRG; PAM sequence: GGG
accctgccgggtagtggagc

SEQ ID NO: 11989 - DNA, 20 bp, Artificial Sequence
  Description of Artificial Sequence: Synthetic oligonucleotide
  Target: PCSK9; (-) strand; PAM type: NRG; PAM sequence: CGG
taccctgccgggtagtggag

SEQ ID NO: 11990 - DNA, 20 bp, Artificial Sequence
  Description of Artificial Sequence: Synthetic oligonucleotide
  Target: PCSK9; (-) strand; PAM type: NRG; PAM sequence: GAG
gtgtaccctgccgggtagtg

SEQ ID NO: 11991 - DNA, 20 bp, Artificial Sequence
  Description of Artificial Sequence: Synthetic oligonucleotide
  Target: PCSK9; (-) strand; PAM type: NRG; PAM sequence: TGG
atgtgtaccctgccgggtag

SEQ ID NO: 11992 - DNA, 20 bp, Artificial Sequence
  Description of Artificial Sequence: Synthetic oligonucleotide
  Target: PCSK9; (-) strand; PAM type: NRG; PAM sequence: TAG
cgaatgtgtaccctgccggg

SEQ ID NO: 11993 - DNA, 20 bp, Artificial Sequence
  Description of Artificial Sequence: Synthetic oligonucleotide
  Target: PCSK9; (-) strand; PAM type: NRG; PAM sequence: GGG
gtgcgaatgtgtaccctgcc

SEQ ID NO: 11994 - DNA, 20 bp, Artificial Sequence
  Description of Artificial Sequence: Synthetic oligonucleotide
  Target: PCSK9; (-) strand; PAM type: NRG; PAM sequence: CGG
ggtgcgaatgtgtaccctgc

SEQ ID NO: 11995 - DNA, 20 bp, Artificial Sequence
  Description of Artificial Sequence: Synthetic oligonucleotide
  Target: PCSK9; (-) strand; PAM type: NRG; PAM sequence: GGG
tttcttcctctgtgaagtag

SEQ ID NO: 11996 - DNA, 20 bp, Artificial Sequence
  Description of Artificial Sequence: Synthetic oligonucleotide
  Target: PCSK9; (-) strand; PAM type: NRG; PAM sequence: GGG
gtttcttcctctgtgaagta

SEQ ID NO: 11997 - DNA, 20 bp, Artificial Sequence
  Description of Artificial Sequence: Synthetic oligonucleotide
  Target: PCSK9; (-) strand; PAM type: NRG; PAM sequence: AGG
ggtttcttcctctgtgaagt

SEQ ID NO: 11998 - DNA, 20 bp, Artificial Sequence
  Description of Artificial Sequence: Synthetic oligonucleotide
  Target: PCSK9; (-) strand; PAM type: NRG; PAM sequence: TAG
aggtttcttcctctgtgaag

SEQ ID NO: 11999 - DNA, 20 bp, Artificial Sequence
  Description of Artificial Sequence: Synthetic oligonucleotide
  Target: PCSK9; (-) strand; PAM type: NRG; PAM sequence: AAG
tccaggtttcttcctctgtg

SEQ ID NO: 12000 - DNA, 20 bp, Artificial Sequence
  Description of Artificial Sequence: Synthetic oligonucleotide
  Target: PCSK9; (-) strand; PAM type: NRG; PAM sequence: AGG
ggcacgccccctctggttcc

SEQ ID NO: 12001 - DNA, 20 bp, Artificial Sequence
  Description of Artificial Sequence: Synthetic oligonucleotide
  Target: PCSK9; (-) strand; PAM type: NRG; PAM sequence: CAG
aggcacgccccctctggttc

SEQ ID NO: 12002 - DNA, 20 bp, Artificial Sequence
  Description of Artificial Sequence: Synthetic oligonucleotide
  Target: PCSK9; (-) strand; PAM type: NRG; PAM sequence: TGG
cttggcaggcacgccccctc

SEQ ID NO: 12003 - DNA, 20 bp, Artificial Sequence
  Description of Artificial Sequence: Synthetic oligonucleotide
  Target: PCSK9; (-) strand; PAM type: NRG; PAM sequence: AGG
tcctgctgtgtgagcttggc

SEQ ID NO: 12004 - DNA, 20 bp, Artificial Sequence
  Description of Artificial Sequence: Synthetic oligonucleotide
  Target: PCSK9; (-) strand; PAM type: NRG; PAM sequence: CAG
ttcctgctgtgtgagcttgg

SEQ ID NO: 12005 - DNA, 20 bp, Artificial Sequence
  Description of Artificial Sequence: Synthetic oligonucleotide
  Target: PCSK9; (-) strand; PAM type: NRG; PAM sequence: TGG
cagttcctgctgtgtgagct

SEQ ID NO: 12006 - DNA, 20 bp, Artificial Sequence
  Description of Artificial Sequence: Synthetic oligonucleotide
  Target: PCSK9; (-) strand; PAM type: NRG; PAM sequence: GAG
tggctcagttcctgctgtgt

SEQ ID NO: 12007 - DNA, 20 bp, Artificial Sequence
  Description of Artificial Sequence: Synthetic oligonucleotide
  Target: PCSK9; (-) strand; PAM type: NRG; PAM sequence: CAG
cccaatctgcgtttctggct

SEQ ID NO: 12008 - DNA, 20 bp, Artificial Sequence
  Description of Artificial Sequence: Synthetic oligonucleotide
  Target: PCSK9; (-) strand; PAM type: NRG; PAM sequence: TGG
gccagcccaatctgcgtttc

SEQ ID NO: 12009 - DNA, 20 bp, Artificial Sequence
  Description of Artificial Sequence: Synthetic oligonucleotide
  Target: PCSK9; (-) strand; PAM type: NRG; PAM sequence: CAG
aagaggcttggcttcagagc

SEQ ID NO: 12010 - DNA, 20 bp, Artificial Sequence
  Description of Artificial Sequence: Synthetic oligonucleotide
  Target: PCSK9; (-) strand; PAM type: NRG; PAM sequence: GAG
taagaagaggcttggcttca

SEQ ID NO: 12011 - DNA, 20 bp, Artificial Sequence
  Description of Artificial Sequence: Synthetic oligonucleotide
  Target: PCSK9; (-) strand; PAM type: NRG; PAM sequence: CAG
agtaagaagaggcttggctt

SEQ ID NO: 12012 - DNA, 20 bp, Artificial Sequence
  Description of Artificial Sequence: Synthetic oligonucleotide
  Target: PCSK9; (-) strand; PAM type: NRG; PAM sequence: TGG
gggtgaagtaagaagaggct

SEQ ID NO: 12013 - DNA, 20 bp, Artificial Sequence
  Description of Artificial Sequence: Synthetic oligonucleotide
  Target: PCSK9; (-) strand; PAM type: NRG; PAM sequence: AGG
cagccgggtgaagtaagaag

SEQ ID NO: 12014 - DNA, 20 bp, Artificial Sequence
  Description of Artificial Sequence: Synthetic oligonucleotide
  Target: PCSK9; (-) strand; PAM type: NRG; PAM sequence: GAG
ccagccgggtgaagtaagaa

SEQ ID NO: 12015 - DNA, 20 bp, Artificial Sequence
  Description of Artificial Sequence: Synthetic oligonucleotide
  Target: PCSK9; (-) strand; PAM type: NRG; PAM sequence: AAG
gcccagccgggtgaagtaag

SEQ ID NO: 12016 - DNA, 20 bp, Artificial Sequence
  Description of Artificial Sequence: Synthetic oligonucleotide
  Target: PCSK9; (-) strand; PAM type: NRG; PAM sequence: AAG
ggagcccagccgggtgaagt

SEQ ID NO: 12017 - DNA, 20 bp, Artificial Sequence
  Description of Artificial Sequence: Synthetic oligonucleotide
  Target: PCSK9; (-) strand; PAM type: NRG; PAM sequence: AAG
atgaggagcccagccgggtg

SEQ ID NO: 12018 - DNA, 20 bp, Artificial Sequence
  Description of Artificial Sequence: Synthetic oligonucleotide
  Target: PCSK9; (-) strand; PAM type: NRG; PAM sequence: GGG
taaaaatgaggagcccagcc

SEQ ID NO: 12019 - DNA, 20 bp, Artificial Sequence
  Description of Artificial Sequence: Synthetic oligonucleotide
  Target: PCSK9; (-) strand; PAM type: NRG; PAM sequence: CGG
gtaaaaatgaggagcccagc

SEQ ID NO: 12020 - DNA, 20 bp, Artificial Sequence
  Description of Artificial Sequence: Synthetic oligonucleotide
  Target: PCSK9; (-) strand; PAM type: NRG; PAM sequence: CAG
acccgtaaaaatgaggagcc

SEQ ID NO: 12021 - DNA, 20 bp, Artificial Sequence
  Description of Artificial Sequence: Synthetic oligonucleotide
  Target: PCSK9; (-) strand; PAM type: NRG; PAM sequence: GAG
ctgttacccgtaaaaatgag

SEQ ID NO: 12022 - DNA, 20 bp, Artificial Sequence
  Description of Artificial Sequence: Synthetic oligonucleotide
  Target: PCSK9; (-) strand; PAM type: NRG; PAM sequence: AGG
cactgttacccgtaaaaatg

SEQ ID NO: 12023 - DNA, 20 bp, Artificial Sequence
  Description of Artificial Sequence: Synthetic oligonucleotide
  Target: PCSK9; (-) strand; PAM type: NRG; PAM sequence: GAG
tcactgttacccgtaaaaat

SEQ ID NO: 12024 - DNA, 20 bp, Artificial Sequence
  Description of Artificial Sequence: Synthetic oligonucleotide
  Target: PCSK9; (-) strand; PAM type: NRG; PAM sequence: CAG
ctggtctgtgttccccttcc

SEQ ID NO: 12025 - DNA, 20 bp, Artificial Sequence
  Description of Artificial Sequence: Synthetic oligonucleotide
  Target: PCSK9; (-) strand; PAM type: NRG; PAM sequence: TGG
ccatcactcaccgagcttcc

SEQ ID NO: 12026 - DNA, 20 bp, Artificial Sequence
  Description of Artificial Sequence: Synthetic oligonucleotide
  Target: PCSK9; (-) strand; PAM type: NRG; PAM sequence: GAG
tcgttctgccatcactcacc

SEQ ID NO: 12027 - DNA, 20 bp, Artificial Sequence
  Description of Artificial Sequence: Synthetic oligonucleotide
  Target: PCSK9; (-) strand; PAM type: NRG; PAM sequence: AGG
ggaaaaagttccatgcctgc

SEQ ID NO: 12028 - DNA, 20 bp, Artificial Sequence
  Description of Artificial Sequence: Synthetic oligonucleotide
  Target: PCSK9; (-) strand; PAM type: NRG; PAM sequence: CAG
cggaaaaagttccatgcctg

SEQ ID NO: 12029 - DNA, 20 bp, Artificial Sequence
  Description of Artificial Sequence: Synthetic oligonucleotide
  Target: PCSK9; (-) strand; PAM type: NRG; PAM sequence: AAG
ggcctgggtgataacggaaa

SEQ ID NO: 12030 - DNA, 20 bp, Artificial Sequence
  Description of Artificial Sequence: Synthetic oligonucleotide
  Target: PCSK9; (-) strand; PAM type: NRG; PAM sequence: CGG
gaatcaggcctgggtgataa

SEQ ID NO: 12031 - DNA, 20 bp, Artificial Sequence
  Description of Artificial Sequence: Synthetic oligonucleotide
  Target: PCSK9; (-) strand; PAM type: NRG; PAM sequence: GGG
caggccagtgaatcaggcct

SEQ ID NO: 12032 - DNA, 20 bp, Artificial Sequence
  Description of Artificial Sequence: Synthetic oligonucleotide
  Target: PCSK9; (-) strand; PAM type: NRG; PAM sequence: TGG
ccaggccagtgaatcaggcc

SEQ ID NO: 12033 - DNA, 20 bp, Artificial Sequence
  Description of Artificial Sequence: Synthetic oligonucleotide
  Target: PCSK9; (-) strand; PAM type: NRG; PAM sequence: AGG
ctccgccaggccagtgaatc

SEQ ID NO: 12034 - DNA, 20 bp, Artificial Sequence
  Description of Artificial Sequence: Synthetic oligonucleotide
  Target: PCSK9; (-) strand; PAM type: NRG; PAM sequence: CAG
tctccgccaggccagtgaat

SEQ ID NO: 12035 - DNA, 20 bp, Artificial Sequence
  Description of Artificial Sequence: Synthetic oligonucleotide
  Target: PCSK9; (-) strand; PAM type: NRG; PAM sequence: CAG
tagaagcatctccgccaggc

SEQ ID NO: 12036 - DNA, 20 bp, Artificial Sequence
  Description of Artificial Sequence: Synthetic oligonucleotide
  Target: PCSK9; (-) strand; PAM type: NRG; PAM sequence: AGG
gccttagaagcatctccgcc

SEQ ID NO: 12037 - DNA, 20 bp, Artificial Sequence
  Description of Artificial Sequence: Synthetic oligonucleotide
  Target: PCSK9; (-) strand; PAM type: NRG; PAM sequence: CAG
tgccttagaagcatctccgc

SEQ ID NO: 12038 - DNA, 20 bp, Artificial Sequence
  Description of Artificial Sequence: Synthetic oligonucleotide
  Target: PCSK9; (-) strand; PAM type: NRG; PAM sequence: AAG
ctcccccgaccatgccttag

SEQ ID NO: 12039 - DNA, 20 bp, Artificial Sequence
  Description of Artificial Sequence: Synthetic oligonucleotide
  Target: PCSK9; (-) strand; PAM type: NRG; PAM sequence: TAG
cctctcccccgaccatgcct

SEQ ID NO: 12040 - DNA, 20 bp, Artificial Sequence
  Description of Artificial Sequence: Synthetic oligonucleotide
  Target: PCSK9; (-) strand; PAM type: NRG; PAM sequence: TGG
gctcaaggagggacagttgt

SEQ ID NO: 12041 - DNA, 20 bp, Artificial Sequence
  Description of Artificial Sequence: Synthetic oligonucleotide
  Target: PCSK9; (-) strand; PAM type: NRG; PAM sequence: CAG
ggctggtgctcaaggaggga

SEQ ID NO: 12042 - DNA, 20 bp, Artificial Sequence
  Description of Artificial Sequence: Synthetic oligonucleotide
  Target: PCSK9; (-) strand; PAM type: NRG; PAM sequence: GGG
gtggggctggtgctcaagga

SEQ ID NO: 12043 - DNA, 20 bp, Artificial Sequence
  Description of Artificial Sequence: Synthetic oligonucleotide
  Target: PCSK9; (-) strand; PAM type: NRG; PAM sequence: AGG
ggtggggctggtgctcaagg

SEQ ID NO: 12044 - DNA, 20 bp, Artificial Sequence
  Description of Artificial Sequence: Synthetic oligonucleotide
  Target: PCSK9; (-) strand; PAM type: NRG; PAM sequence: GAG
gggtggggctggtgctcaag

SEQ ID NO: 12045 - DNA, 20 bp, Artificial Sequence
  Description of Artificial Sequence: Synthetic oligonucleotide
  Target: PCSK9; (-) strand; PAM type: NRG; PAM sequence: AGG
ttgggtggggctggtgctca

SEQ ID NO: 12046 - DNA, 20 bp, Artificial Sequence
  Description of Artificial Sequence: Synthetic oligonucleotide
  Target: PCSK9; (-) strand; PAM type: NRG; PAM sequence: AAG
cttgggtggggctggtgctc

SEQ ID NO: 12047 - DNA, 20 bp, Artificial Sequence
  Description of Artificial Sequence: Synthetic oligonucleotide
  Target: PCSK9; (-) strand; PAM type: NRG; PAM sequence: TGG
tctgcttgcttgggtggggc

SEQ ID NO: 12048 - DNA, 20 bp, Artificial Sequence
  Description of Artificial Sequence: Synthetic oligonucleotide
  Target: PCSK9; (-) strand; PAM type: NRG; PAM sequence: GGG
aatgtctgcttgcttgggtg

SEQ ID NO: 12049 - DNA, 20 bp, Artificial Sequence
  Description of Artificial Sequence: Synthetic oligonucleotide
  Target: PCSK9; (-) strand; PAM type: NRG; PAM sequence: GGG
aaatgtctgcttgcttgggt

SEQ ID NO: 12050 - DNA, 20 bp, Artificial Sequence
  Description of Artificial Sequence: Synthetic oligonucleotide
  Target: PCSK9; (-) strand; PAM type: NRG; PAM sequence: TGG
taaatgtctgcttgcttggg

SEQ ID NO: 12051 - DNA, 20 bp, Artificial Sequence
  Description of Artificial Sequence: Synthetic oligonucleotide
  Target: PCSK9; (-) strand; PAM type: NRG; PAM sequence: GGG
agataaatgtctgcttgctt

SEQ ID NO: 12052 - DNA, 20 bp, Artificial Sequence
  Description of Artificial Sequence: Synthetic oligonucleotide
  Target: PCSK9; (-) strand; PAM type: NRG; PAM sequence: TGG
aagataaatgtctgcttgct

SEQ ID NO: 12053 - DNA, 20 bp, Artificial Sequence
  Description of Artificial Sequence: Synthetic oligonucleotide
  Target: PCSK9; (-) strand; PAM type: NRG; PAM sequence: AAG
aacagagaggacagacccaa

SEQ ID NO: 12054 - DNA, 20 bp, Artificial Sequence
  Description of Artificial Sequence: Synthetic oligonucleotide
  Target: PCSK9; (-) strand; PAM type: NRG; PAM sequence: CAG
taaaaaggcaacagagagga

SEQ ID NO: 12055 - DNA, 20 bp, Artificial Sequence
  Description of Artificial Sequence: Synthetic oligonucleotide
  Target: PCSK9; (-) strand; PAM type: NRG; PAM sequence: AGG
gctgtaaaaaggcaacagag

SEQ ID NO: 12056 - DNA, 20 bp, Artificial Sequence
  Description of Artificial Sequence: Synthetic oligonucleotide
  Target: PCSK9; (-) strand; PAM type: NRG; PAM sequence: GAG
ggctgtaaaaaggcaacaga

SEQ ID NO: 12057 - DNA, 20 bp, Artificial Sequence
  Description of Artificial Sequence: Synthetic oligonucleotide
  Target: PCSK9; (-) strand; PAM type: NRG; PAM sequence: GAG
ttggctgtaaaaaggcaaca

SEQ ID NO: 12058 - DNA, 20 bp, Artificial Sequence
  Description of Artificial Sequence: Synthetic oligonucleotide
  Target: PCSK9; (-) strand; PAM type: NRG; PAM sequence: CAG
agttggctgtaaaaaggcaa

SEQ ID NO: 12059 - DNA, 20 bp, Artificial Sequence
  Description of Artificial Sequence: Synthetic oligonucleotide
  Target: PCSK9; (-) strand; PAM type: NRG; PAM sequence: AGG
tagaaaagttggctgtaaaa

SEQ ID NO: 12060 - DNA, 20 bp, Artificial Sequence
  Description of Artificial Sequence: Synthetic oligonucleotide
  Target: PCSK9; (-) strand; PAM type: NRG; PAM sequence: AAG
ctagaaaagttggctgtaaa

SEQ ID NO: 12061 - DNA, 20 bp, Artificial Sequence
  Description of Artificial Sequence: Synthetic oligonucleotide
  Target: PCSK9; (-) strand; PAM type: NRG; PAM sequence: TGG
caaaacaggtctagaaaagt

SEQ ID NO: 12062 - DNA, 20 bp, Artificial Sequence
  Description of Artificial Sequence: Synthetic oligonucleotide
  Target: PCSK9; (-) strand; PAM type: NRG; PAM sequence: AAG
aaagcaaaacaggtctagaa

SEQ ID NO: 12063 - DNA, 20 bp, Artificial Sequence
  Description of Artificial Sequence: Synthetic oligonucleotide
  Target: PCSK9; (-) strand; PAM type: NRG; PAM sequence: TAG
ttacaaaagcaaaacaggtc

SEQ ID NO: 12064 - DNA, 20 bp, Artificial Sequence
  Description of Artificial Sequence: Synthetic oligonucleotide
  Target: PCSK9; (-) strand; PAM type: NRG; PAM sequence: AGG
tcaagttacaaaagcaaaac

SEQ ID NO: 12065 - DNA, 20 bp, Artificial Sequence
  Description of Artificial Sequence: Synthetic oligonucleotide
  Target: PCSK9; (-) strand; PAM type: NRG; PAM sequence: CAG
ttcaagttacaaaagcaaaa

SEQ ID NO: 12066 - DNA, 20 bp, Artificial Sequence
  Description of Artificial Sequence: Synthetic oligonucleotide
  Target: PCSK9; (-) strand; PAM type: NRG; PAM sequence: AAG
taaatatcttcaagttacaa

SEQ ID NO: 12067 - DNA, 20 bp, Artificial Sequence
  Description of Artificial Sequence: Synthetic oligonucleotide
  Target: PCSK9; (-) strand; PAM type: NRG; PAM sequence: AAG
aacccagaataaatatcttc

SEQ ID NO: 12068 - DNA, 20 bp, Artificial Sequence
  Description of Artificial Sequence: Synthetic oligonucleotide
  Target: PCSK9; (-) strand; PAM type: NRG; PAM sequence: CAG
aataaaaatgctacaaaacc

SEQ ID NO: 12069 - DNA, 20 bp, Artificial Sequence
  Description of Artificial Sequence: Synthetic oligonucleotide
  Target: PCSK9; (-) strand; PAM type: NRG; PAM sequence: AAG
ttgtttgtttttattttaaa

SEQ ID NO: 12070 - DNA, 20 bp, Artificial Sequence
  Description of Artificial Sequence: Synthetic oligonucleotide
  Target: PCSK9; (-) strand; PAM type: NRG; PAM sequence: AGG
gtcaagtctatgcaagagtt

SEQ ID NO: 12071 - DNA, 20 bp, Artificial Sequence
  Description of Artificial Sequence: Synthetic oligonucleotide
  Target: PCSK9; (-) strand; PAM type: NRG; PAM sequence: TAG
agtcaagtctatgcaagagt

SEQ ID NO: 12072 - DNA, 20 bp, Artificial Sequence
  Description of Artificial Sequence: Synthetic oligonucleotide
  Target: PCSK9; (-) strand; PAM type: NRG; PAM sequence: GAG
aggcagtcaagtctatgcaa

SEQ ID NO: 12073 - DNA, 20 bp, Artificial Sequence
  Description of Artificial Sequence: Synthetic oligonucleotide
  Target: PCSK9; (-) strand; PAM type: NRG; PAM sequence: AAG
ctaggcagtcaagtctatgc

SEQ ID NO: 12074 - DNA, 20 bp, Artificial Sequence
  Description of Artificial Sequence: Synthetic oligonucleotide
  Target: PCSK9; (-) strand; PAM type: NRG; PAM sequence: AAG
aggcatcaccctaggcagtc

SEQ ID NO: 12075 - DNA, 20 bp, Artificial Sequence
  Description of Artificial Sequence: Synthetic oligonucleotide
  Target: PCSK9; (-) strand; PAM type: NRG; PAM sequence: CAG
aagcaaggcatcaccctagg

SEQ ID NO: 12076 - DNA, 20 bp, Artificial Sequence
  Description of Artificial Sequence: Synthetic oligonucleotide
  Target: PCSK9; (-) strand; PAM type: NRG; PAM sequence: AGG
tataagcaaggcatcaccct

SEQ ID NO: 12077 - DNA, 20 bp, Artificial Sequence
  Description of Artificial Sequence: Synthetic oligonucleotide
  Target: PCSK9; (-) strand; PAM type: NRG; PAM sequence: TAG
gtataagcaaggcatcaccc

SEQ ID NO: 12078 - DNA, 20 bp, Artificial Sequence
  Description of Artificial Sequence: Synthetic oligonucleotide
  Target: PCSK9; (-) strand; PAM type: NRG; PAM sequence: AGG
cccagttcctagtataagca

SEQ ID NO: 12079 - DNA, 20 bp, Artificial Sequence
  Description of Artificial Sequence: Synthetic oligonucleotide
  Target: PCSK9; (-) strand; PAM type: NRG; PAM sequence: AAG
acccagttcctagtataagc

SEQ ID NO: 12080 - DNA, 20 bp, Artificial Sequence
  Description of Artificial Sequence: Synthetic oligonucleotide
  Target: PCSK9; (-) strand; PAM type: NRG; PAM sequence: AAG
acttacccagttcctagtat

SEQ ID NO: 12081 - DNA, 20 bp, Artificial Sequence
  Description of Artificial Sequence: Synthetic oligonucleotide
  Target: PCSK9; (-) strand; PAM type: NRG; PAM sequence: TAG
caacaaacttacccagttcc

SEQ ID NO: 12082 - DNA, 20 bp, Artificial Sequence
  Description of Artificial Sequence: Synthetic oligonucleotide
  Target: PCSK9; (-) strand; PAM type: NRG; PAM sequence: CAG
aactattcaacaaacttacc

SEQ ID NO: 12083 - DNA, 20 bp, Artificial Sequence
  Description of Artificial Sequence: Synthetic oligonucleotide
  Target: PCSK9; (-) strand; PAM type: NRG; PAM sequence: TGG
aaaagtactcatcaaatact

SEQ ID NO: 12084 - DNA, 20 bp, Artificial Sequence
  Description of Artificial Sequence: Synthetic oligonucleotide
  Target: PCSK9; (-) strand; PAM type: NRG; PAM sequence: AAG
aatacttgtactcaagataa

SEQ ID NO: 12085 - DNA, 20 bp, Artificial Sequence
  Description of Artificial Sequence: Synthetic oligonucleotide
  Target: PCSK9; (-) strand; PAM type: NRG; PAM sequence: AAG
cttgcccaatacttgtactc

SEQ ID NO: 12086 - DNA, 20 bp, Artificial Sequence
  Description of Artificial Sequence: Synthetic oligonucleotide
  Target: PCSK9; (-) strand; PAM type: NRG; PAM sequence: CAG
aaggagtaagttcacatcac

SEQ ID NO: 12087 - DNA, 20 bp, Artificial Sequence
  Description of Artificial Sequence: Synthetic oligonucleotide
  Target: PCSK9; (-) strand; PAM type: NRG; PAM sequence: AAG
ctaggataggcacaaggagt

SEQ ID NO: 12088 - DNA, 20 bp, Artificial Sequence
  Description of Artificial Sequence: Synthetic oligonucleotide
  Target: PCSK9; (-) strand; PAM type: NRG; PAM sequence: GAG
attcctaggataggcacaag

SEQ ID NO: 12089 - DNA, 20 bp, Artificial Sequence
  Description of Artificial Sequence: Synthetic oligonucleotide
  Target: PCSK9; (-) strand; PAM type: NRG; PAM sequence: AGG
tcattcctaggataggcaca

SEQ ID NO: 12090 - DNA, 20 bp, Artificial Sequence
  Description of Artificial Sequence: Synthetic oligonucleotide
  Target: PCSK9; (-) strand; PAM type: NRG; PAM sequence: AAG
ttcattcctaggataggcac

SEQ ID NO: 12091 - DNA, 20 bp, Artificial Sequence
  Description of Artificial Sequence: Synthetic oligonucleotide
  Target: PCSK9; (-) strand; PAM type: NRG; PAM sequence: AGG
attcatttcattcctaggat

SEQ ID NO: 12092 - DNA, 20 bp, Artificial Sequence
  Description of Artificial Sequence: Synthetic oligonucleotide
  Target: PCSK9; (-) strand; PAM type: NRG; PAM sequence: TAG
cattcatttcattcctagga

SEQ ID NO: 12093 - DNA, 20 bp, Artificial Sequence
  Description of Artificial Sequence: Synthetic oligonucleotide
  Target: PCSK9; (-) strand; PAM type: NRG; PAM sequence: AGG
aagacattcatttcattcct

SEQ ID NO: 12094 - DNA, 20 bp, Artificial Sequence
  Description of Artificial Sequence: Synthetic oligonucleotide
  Target: PCSK9; (-) strand; PAM type: NRG; PAM sequence: TAG
gaagacattcatttcattcc

SEQ ID NO: 12095 - DNA, 20 bp, Artificial Sequence
  Description of Artificial Sequence: Synthetic oligonucleotide
  Target: PCSK9; (-) strand; PAM type: NRG; PAM sequence: AAG
gtggtcaggggagctgcagg

SEQ ID NO: 12096 - DNA, 20 bp, Artificial Sequence
  Description of Artificial Sequence: Synthetic oligonucleotide
  Target: PCSK9; (-) strand; PAM type: NRG; PAM sequence: AGG
agggtggtcaggggagctgc

SEQ ID NO: 12097 - DNA, 20 bp, Artificial Sequence
  Description of Artificial Sequence: Synthetic oligonucleotide
  Target: PCSK9; (-) strand; PAM type: NRG; PAM sequence: CAG
cagggtggtcaggggagctg

SEQ ID NO: 12098 - DNA, 20 bp, Artificial Sequence
  Description of Artificial Sequence: Synthetic oligonucleotide
  Target: PCSK9; (-) strand; PAM type: NRG; PAM sequence: GAG
gactgtcagggtggtcaggg

SEQ ID NO: 12099 - DNA, 20 bp, Artificial Sequence
  Description of Artificial Sequence: Synthetic oligonucleotide
  Target: PCSK9; (-) strand; PAM type: NRG; PAM sequence: GGG
ttgactgtcagggtggtcag

SEQ ID NO: 12100 - DNA, 20 bp, Artificial Sequence
  Description of Artificial Sequence: Synthetic oligonucleotide
  Target: PCSK9; (-) strand; PAM type: NRG; PAM sequence: GGG
tttgactgtcagggtggtca

SEQ ID NO: 12101 - DNA, 20 bp, Artificial Sequence
  Description of Artificial Sequence: Synthetic oligonucleotide
  Target: PCSK9; (-) strand; PAM type: NRG; PAM sequence: AGG
ctttgactgtcagggtggtc

SEQ ID NO: 12102 - DNA, 20 bp, Artificial Sequence
  Description of Artificial Sequence: Synthetic oligonucleotide
  Target: PCSK9; (-) strand; PAM type: NRG; PAM sequence: CAG
actttgactgtcagggtggt

SEQ ID NO: 12103 - DNA, 20 bp, Artificial Sequence
  Description of Artificial Sequence: Synthetic oligonucleotide
  Target: PCSK9; (-) strand; PAM type: NRG; PAM sequence: TGG
aggcactttgactgtcaggg

SEQ ID NO: 12104 - DNA, 20 bp, Artificial Sequence
  Description of Artificial Sequence: Synthetic oligonucleotide
  Target: PCSK9; (-) strand; PAM type: NRG; PAM sequence: GGG
aggaggcactttgactgtca

SEQ ID NO: 12105 - DNA, 20 bp, Artificial Sequence
  Description of Artificial Sequence: Synthetic oligonucleotide
  Target: PCSK9; (-) strand; PAM type: NRG; PAM sequence: AGG
gaggaggcactttgactgtc

SEQ ID NO: 12106 - DNA, 20 bp, Artificial Sequence
  Description of Artificial Sequence: Synthetic oligonucleotide
  Target: PCSK9; (-) strand; PAM type: NRG; PAM sequence: CAG
ggaggaggcactttgactgt

SEQ ID NO: 12107 - DNA, 20 bp, Artificial Sequence
  Description of Artificial Sequence: Synthetic oligonucleotide
  Target: PCSK9; (-) strand; PAM type: NRG; PAM sequence: AGG
ggcacctgtcaccaaggagg

SEQ ID NO: 12108 - DNA, 20 bp, Artificial Sequence
  Description of Artificial Sequence: Synthetic oligonucleotide
  Target: PCSK9; (-) strand; PAM type: NRG; PAM sequence: GAG
gggcacctgtcaccaaggag

SEQ ID NO: 12109 - DNA, 20 bp, Artificial Sequence
  Description of Artificial Sequence: Synthetic oligonucleotide
  Target: PCSK9; (-) strand; PAM type: NRG; PAM sequence: AGG
tagggcacctgtcaccaagg

SEQ ID NO: 12110 - DNA, 20 bp, Artificial Sequence
  Description of Artificial Sequence: Synthetic oligonucleotide
  Target: PCSK9; (-) strand; PAM type: NRG; PAM sequence: GAG
gtagggcacctgtcaccaag

SEQ ID NO: 12111 - DNA, 20 bp, Artificial Sequence
  Description of Artificial Sequence: Synthetic oligonucleotide
  Target: PCSK9; (-) strand; PAM type: NRG; PAM sequence: AGG
ctgtagggcacctgtcacca

SEQ ID NO: 12112 - DNA, 20 bp, Artificial Sequence
  Description of Artificial Sequence: Synthetic oligonucleotide
  Target: PCSK9; (-) strand; PAM type: NRG; PAM sequence: AAG
gctgtagggcacctgtcacc

SEQ ID NO: 12113 - DNA, 20 bp, Artificial Sequence
  Description of Artificial Sequence: Synthetic oligonucleotide
  Target: PCSK9; (-) strand; PAM type: NRG; PAM sequence: GGG
agagcatctagagtgctgta

SEQ ID NO: 12114 - DNA, 20 bp, Artificial Sequence
  Description of Artificial Sequence: Synthetic oligonucleotide
  Target: PCSK9; (-) strand; PAM type: NRG; PAM sequence: AGG
cagagcatctagagtgctgt

SEQ ID NO: 12115 - DNA, 20 bp, Artificial Sequence
  Description of Artificial Sequence: Synthetic oligonucleotide
  Target: PCSK9; (-) strand; PAM type: NRG; PAM sequence: TAG
acagagcatctagagtgctg

SEQ ID NO: 12116 - DNA, 20 bp, Artificial Sequence
  Description of Artificial Sequence: Synthetic oligonucleotide
  Target: PCSK9; (-) strand; PAM type: NRG; PAM sequence: GAG
tcaggacaacagagcatcta

SEQ ID NO: 12117 - DNA, 20 bp, Artificial Sequence
  Description of Artificial Sequence: Synthetic oligonucleotide
  Target: PCSK9; (-) strand; PAM type: NRG; PAM sequence: TAG
ggtcaggacaacagagcatc

SEQ ID NO: 12118 - DNA, 20 bp, Artificial Sequence
  Description of Artificial Sequence: Synthetic oligonucleotide
  Target: PCSK9; (-) strand; PAM type: NRG; PAM sequence: GAG
attgggaggtcaggacaaca

SEQ ID NO: 12119 - DNA, 20 bp, Artificial Sequence
  Description of Artificial Sequence: Synthetic oligonucleotide
  Target: PCSK9; (-) strand; PAM type: NRG; PAM sequence: CAG
gcattgggaggtcaggacaa

SEQ ID NO: 12120 - DNA, 20 bp, Artificial Sequence
  Description of Artificial Sequence: Synthetic oligonucleotide
  Target: PCSK9; (-) strand; PAM type: NRG; PAM sequence: AGG
gaaaagggcattgggaggtc

SEQ ID NO: 12121 - DNA, 20 bp, Artificial Sequence
  Description of Artificial Sequence: Synthetic oligonucleotide
  Target: PCSK9; (-) strand; PAM type: NRG; PAM sequence: CAG
tgaaaagggcattgggaggt

SEQ ID NO: 12122 - DNA, 20 bp, Artificial Sequence
  Description of Artificial Sequence: Synthetic oligonucleotide
  Target: PCSK9; (-) strand; PAM type: NRG; PAM sequence: AGG
agaatgaaaagggcattggg

SEQ ID NO: 12123 - DNA, 20 bp, Artificial Sequence
  Description of Artificial Sequence: Synthetic oligonucleotide
  Target: PCSK9; (-) strand; PAM type: NRG; PAM sequence: GAG
aagaatgaaaagggcattgg

SEQ ID NO: 12124 - DNA, 20 bp, Artificial Sequence
  Description of Artificial Sequence: Synthetic oligonucleotide
  Target: PCSK9; (-) strand; PAM type: NRG; PAM sequence: GGG
aaaagaatgaaaagggcatt

SEQ ID NO: 12125 - DNA, 20 bp, Artificial Sequence
  Description of Artificial Sequence: Synthetic oligonucleotide
  Target: PCSK9; (-) strand; PAM type: NRG; PAM sequence: TGG
gaaaagaatgaaaagggcat

SEQ ID NO: 12126 - DNA, 20 bp, Artificial Sequence
  Description of Artificial Sequence: Synthetic oligonucleotide
  Target: PCSK9; (-) strand; PAM type: NRG; PAM sequence: GGG
tggggagaaaagaatgaaaa

SEQ ID NO: 12127 - DNA, 20 bp, Artificial Sequence
  Description of Artificial Sequence: Synthetic oligonucleotide
  Target: PCSK9; (-) strand; PAM type: NRG; PAM sequence: AGG
ctggggagaaaagaatgaaa

SEQ ID NO: 12128 - DNA, 20 bp, Artificial Sequence
  Description of Artificial Sequence: Synthetic oligonucleotide
  Target: PCSK9; (-) strand; PAM type: NRG; PAM sequence: AAG
actggggagaaaagaatgaa

SEQ ID NO: 12129 - DNA, 20 bp, Artificial Sequence
  Description of Artificial Sequence: Synthetic oligonucleotide
  Target: PCSK9; (-) strand; PAM type: NRG; PAM sequence: AAG
gtgccaggtactggggagaa

SEQ ID NO: 12130 - DNA, 20 bp, Artificial Sequence
  Description of Artificial Sequence: Synthetic oligonucleotide
  Target: PCSK9; (-) strand; PAM type: NRG; PAM sequence: GAG
gctgtgtgccaggtactggg

SEQ ID NO: 12131 - DNA, 20 bp, Artificial Sequence
  Description of Artificial Sequence: Synthetic oligonucleotide
  Target: PCSK9; (-) strand; PAM type: NRG; PAM sequence: GGG
aggctgtgtgccaggtactg

SEQ ID NO: 12132 - DNA, 20 bp, Artificial Sequence
  Description of Artificial Sequence: Synthetic oligonucleotide
  Target: PCSK9; (-) strand; PAM type: NRG; PAM sequence: GGG
caggctgtgtgccaggtact

SEQ ID NO: 12133 - DNA, 20 bp, Artificial Sequence
  Description of Artificial Sequence: Synthetic oligonucleotide
  Target: PCSK9; (-) strand; PAM type: NRG; PAM sequence: TGG
ccaggctgtgtgccaggtac

SEQ ID NO: 12134 - DNA, 20 bp, Artificial Sequence
  Description of Artificial Sequence: Synthetic oligonucleotide
  Target: PCSK9; (-) strand; PAM type: NRG; PAM sequence: AGG
ctcgggccaggctgtgtgcc

SEQ ID NO: 12135 - DNA, 20 bp, Artificial Sequence
  Description of Artificial Sequence: Synthetic oligonucleotide
  Target: PCSK9; (-) strand; PAM type: NRG; PAM sequence: CAG
actcgggccaggctgtgtgc

SEQ ID NO: 12136 - DNA, 20 bp, Artificial Sequence
  Description of Artificial Sequence: Synthetic oligonucleotide
  Target: PCSK9; (-) strand; PAM type: NRG; PAM sequence: AGG
attccgtaaatactcgggcc

SEQ ID NO: 12137 - DNA, 20 bp, Artificial Sequence
  Description of Artificial Sequence: Synthetic oligonucleotide
  Target: PCSK9; (-) strand; PAM type: NRG; PAM sequence: CAG
tattccgtaaatactcgggc

SEQ ID NO: 12138 - DNA, 20 bp, Artificial Sequence
  Description of Artificial Sequence: Synthetic oligonucleotide
  Target: PCSK9; (-) strand; PAM type: NRG; PAM sequence: GGG
aacttattccgtaaatactc

SEQ ID NO: 12139 - DNA, 20 bp, Artificial Sequence
  Description of Artificial Sequence: Synthetic oligonucleotide
  Target: PCSK9; (-) strand; PAM type: NRG; PAM sequence: CGG
taacttattccgtaaatact

SEQ ID NO: 12140 - DNA, 20 bp, Artificial Sequence
  Description of Artificial Sequence: Synthetic oligonucleotide
  Target: PCSK9; (-) strand; PAM type: NRG; PAM sequence: TGG
tggctcattacagaagcatc

SEQ ID NO: 12141 - DNA, 20 bp, Artificial Sequence
  Description of Artificial Sequence: Synthetic oligonucleotide
  Target: PCSK9; (-) strand; PAM type: NRG; PAM sequence: AAG
ttagcactggctcattacag

SEQ ID NO: 12142 - DNA, 20 bp, Artificial Sequence
  Description of Artificial Sequence: Synthetic oligonucleotide
  Target: PCSK9; (-) strand; PAM type: NRG; PAM sequence: CAG
gacttagcactggctcatta

SEQ ID NO: 12143 - DNA, 20 bp, Artificial Sequence
  Description of Artificial Sequence: Synthetic oligonucleotide
  Target: PCSK9; (-) strand; PAM type: NRG; PAM sequence: TGG
aaaagccatggacttagcac

SEQ ID NO: 12144 - DNA, 20 bp, Artificial Sequence
  Description of Artificial Sequence: Synthetic oligonucleotide
  Target: PCSK9; (-) strand; PAM type: NRG; PAM sequence: TAG
catgaaaaaagccatggact

SEQ ID NO: 12145 - DNA, 20 bp, Artificial Sequence
  Description of Artificial Sequence: Synthetic oligonucleotide
  Target: PCSK9; (-) strand; PAM type: NRG; PAM sequence: TGG
ttaaatcatgaaaaaagcca

SEQ ID NO: 12146 - DNA, 20 bp, Artificial Sequence
  Description of Artificial Sequence: Synthetic oligonucleotide
  Target: PCSK9; (-) strand; PAM type: NRG; PAM sequence: AAG
tgaattttaaatcatgaaaa

SEQ ID NO: 12147 - DNA, 20 bp, Artificial Sequence
  Description of Artificial Sequence: Synthetic oligonucleotide
  Target: PCSK9; (-) strand; PAM type: NRG; PAM sequence: GAG
tgagccattgcacccaatct

SEQ ID NO: 12148 - DNA, 20 bp, Artificial Sequence
  Description of Artificial Sequence: Synthetic oligonucleotide
  Target: PCSK9; (-) strand; PAM type: NRG; PAM sequence: GAG
agtactgagattacaggtgt

SEQ ID NO: 12149 - DNA, 20 bp, Artificial Sequence
  Description of Artificial Sequence: Synthetic oligonucleotide
  Target: PCSK9; (-) strand; PAM type: NRG; PAM sequence: AGG
tcccaaagtactgagattac

SEQ ID NO: 12150 - DNA, 20 bp, Artificial Sequence
  Description of Artificial Sequence: Synthetic oligonucleotide
  Target: PCSK9; (-) strand; PAM type: NRG; PAM sequence: CAG
ctcccaaagtactgagatta

SEQ ID NO: 12151 - DNA, 20 bp, Artificial Sequence
  Description of Artificial Sequence: Synthetic oligonucleotide
  Target: PCSK9; (-) strand; PAM type: NRG; PAM sequence: GAG
cctcagcctcccaaagtact

SEQ ID NO: 12152 - DNA, 20 bp, Artificial Sequence
  Description of Artificial Sequence: Synthetic oligonucleotide
  Target: PCSK9; (-) strand; PAM type: NRG; PAM sequence: AAG
cctcctgcctcagcctccca

SEQ ID NO: 12153 - DNA, 20 bp, Artificial Sequence
  Description of Artificial Sequence: Synthetic oligonucleotide
  Target: PCSK9; (-) strand; PAM type: NRG; PAM sequence: CAG
cacaagcaatcctcctgcct

SEQ ID NO: 12154 - DNA, 20 bp, Artificial Sequence
  Description of Artificial Sequence: Synthetic oligonucleotide
  Target: PCSK9; (-) strand; PAM type: NRG; PAM sequence: AAG
ggtcttgaattcctaaacac

SEQ ID NO: 12155 - DNA, 20 bp, Artificial Sequence
  Description of Artificial Sequence: Synthetic oligonucleotide
  Target: PCSK9; (-) strand; PAM type: NRG; PAM sequence: GGG
cggggtctcactgttgccca

SEQ ID NO: 12156 - DNA, 20 bp, Artificial Sequence
  Description of Artificial Sequence: Synthetic oligonucleotide
  Target: PCSK9; (-) strand; PAM type: NRG; PAM sequence: AGG
acggggtctcactgttgccc

SEQ ID NO: 12157 - DNA, 20 bp, Artificial Sequence
  Description of Artificial Sequence: Synthetic oligonucleotide
  Target: PCSK9; (-) strand; PAM type: NRG; PAM sequence: CAG
gacggggtctcactgttgcc

SEQ ID NO: 12158 - DNA, 20 bp, Artificial Sequence
  Description of Artificial Sequence: Synthetic oligonucleotide
  Target: PCSK9; (-) strand; PAM type: NRG; PAM sequence: GGG
taaatttttttatagagacg

SEQ ID NO: 12159 - DNA, 20 bp, Artificial Sequence
  Description of Artificial Sequence: Synthetic oligonucleotide
  Target: PCSK9; (-) strand; PAM type: NRG; PAM sequence: GGG
ttaaatttttttatagagac

SEQ ID NO: 12160 - DNA, 20 bp, Artificial Sequence
  Description of Artificial Sequence: Synthetic oligonucleotide
  Target: PCSK9; (-) strand; PAM type: NRG; PAM sequence: CGG
tttaaatttttttatagaga

SEQ ID NO: 12161 - DNA, 20 bp, Artificial Sequence
  Description of Artificial Sequence: Synthetic oligonucleotide
  Target: PCSK9; (-) strand; PAM type: NRG; PAM sequence: GAG
atcttttaaatttttttata

SEQ ID NO: 12162 - DNA, 20 bp, Artificial Sequence
  Description of Artificial Sequence: Synthetic oligonucleotide
  Target: PCSK9; (-) strand; PAM type: NRG; PAM sequence: TAG
taatcttttaaattttttta

SEQ ID NO: 12163 - DNA, 20 bp, Artificial Sequence
  Description of Artificial Sequence: Synthetic oligonucleotide
  Target: PCSK9; (-) strand; PAM type: NRG; PAM sequence: AGG
tcctgagtagccgggaccac

SEQ ID NO: 12164 - DNA, 20 bp, Artificial Sequence
  Description of Artificial Sequence: Synthetic oligonucleotide
  Target: PCSK9; (-) strand; PAM type: NRG; PAM sequence: CAG
ctcctgagtagccgggacca

SEQ ID NO: 12165 - DNA, 20 bp, Artificial Sequence
  Description of Artificial Sequence: Synthetic oligonucleotide
  Target: PCSK9; (-) strand; PAM type: NRG; PAM sequence: GGG
tatcagcctcctgagtagcc

SEQ ID NO: 12166 - DNA, 20 bp, Artificial Sequence
  Description of Artificial Sequence: Synthetic oligonucleotide
  Target: PCSK9; (-) strand; PAM type: NRG; PAM sequence: CGG
atatcagcctcctgagtagc

SEQ ID NO: 12167 - DNA, 20 bp, Artificial Sequence
  Description of Artificial Sequence: Synthetic oligonucleotide
  Target: PCSK9; (-) strand; PAM type: NRG; PAM sequence: TAG
tcccatatcagcctcctgag

SEQ ID NO: 12168 - DNA, 20 bp, Artificial Sequence
  Description of Artificial Sequence: Synthetic oligonucleotide
  Target: PCSK9; (-) strand; PAM type: NRG; PAM sequence: GAG
gcctcccatatcagcctcct

SEQ ID NO: 12169 - DNA, 20 bp, Artificial Sequence
  Description of Artificial Sequence: Synthetic oligonucleotide
  Target: PCSK9; (-) strand; PAM type: NRG; PAM sequence: CAG
ctcaagcaagcctcccatat

SEQ ID NO: 12170 - DNA, 20 bp, Artificial Sequence
  Description of Artificial Sequence: Synthetic oligonucleotide
  Target: PCSK9; (-) strand; PAM type: NRG; PAM sequence: AAG
ctcagcctcccagctcaagc

SEQ ID NO: 12171 - DNA, 20 bp, Artificial Sequence
  Description of Artificial Sequence: Synthetic oligonucleotide
  Target: PCSK9; (-) strand; PAM type: NRG; PAM sequence: AAG
caccctcagcctcccagctc

SEQ ID NO: 12172 - DNA, 20 bp, Artificial Sequence
  Description of Artificial Sequence: Synthetic oligonucleotide
  Target: PCSK9; (-) strand; PAM type: NRG; PAM sequence: CAG
tcactgcaccctcagcctcc

SEQ ID NO: 12173 - DNA, 20 bp, Artificial Sequence
  Description of Artificial Sequence: Synthetic oligonucleotide
  Target: PCSK9; (-) strand; PAM type: NRG; PAM sequence: CAG
attacagctcactgcaccct

SEQ ID NO: 12174 - DNA, 20 bp, Artificial Sequence
  Description of Artificial Sequence: Synthetic oligonucleotide
  Target: PCSK9; (-) strand; PAM type: NRG; PAM sequence: CAG
gtgcagtgatgatgtaatta

SEQ ID NO: 12175 - DNA, 20 bp, Artificial Sequence
  Description of Artificial Sequence: Synthetic oligonucleotide
  Target: PCSK9; (-) strand; PAM type: NRG; PAM sequence: CAG
ctgtaacccaggctgcagtg

SEQ ID NO: 12176 - DNA, 20 bp, Artificial Sequence
  Description of Artificial Sequence: Synthetic oligonucleotide
  Target: PCSK9; (-) strand; PAM type: NRG; PAM sequence: CAG
gcactctgtaacccaggctg

SEQ ID NO: 12177 - DNA, 20 bp, Artificial Sequence
  Description of Artificial Sequence: Synthetic oligonucleotide
  Target: PCSK9; (-) strand; PAM type: NRG; PAM sequence: AGG
cattatgcactctgtaaccc

SEQ ID NO: 12178 - DNA, 20 bp, Artificial Sequence
  Description of Artificial Sequence: Synthetic oligonucleotide
  Target: PCSK9; (-) strand; PAM type: NRG; PAM sequence: CAG
tcattatgcactctgtaacc

SEQ ID NO: 12179 - DNA, 20 bp, Artificial Sequence
  Description of Artificial Sequence: Synthetic oligonucleotide
  Target: PCSK9; (-) strand; PAM type: NRG; PAM sequence: GGG
ctggaggtcccacattgaat

SEQ ID NO: 12180 - DNA, 20 bp, Artificial Sequence
  Description of Artificial Sequence: Synthetic oligonucleotide
  Target: PCSK9; (-) strand; PAM type: NRG; PAM sequence: TGG
cctggaggtcccacattgaa

SEQ ID NO: 12181 - DNA, 20 bp, Artificial Sequence
  Description of Artificial Sequence: Synthetic oligonucleotide
  Target: PCSK9; (-) strand; PAM type: NRG; PAM sequence: AGG
ccttagagtggagggcctgg

SEQ ID NO: 12182 - DNA, 20 bp, Artificial Sequence
  Description of Artificial Sequence: Synthetic oligonucleotide
  Target: PCSK9; (-) strand; PAM type: NRG; PAM sequence: GAG
gccttagagtggagggcctg

SEQ ID NO: 12183 - DNA, 20 bp, Artificial Sequence
  Description of Artificial Sequence: Synthetic oligonucleotide
  Target: PCSK9; (-) strand; PAM type: NRG; PAM sequence: TGG
cagccttagagtggagggcc

SEQ ID NO: 12184 - DNA, 20 bp, Artificial Sequence
  Description of Artificial Sequence: Synthetic oligonucleotide
  Target: PCSK9; (-) strand; PAM type: NRG; PAM sequence: GGG
ttcaccagccttagagtgga

SEQ ID NO: 12185 - DNA, 20 bp, Artificial Sequence
  Description of Artificial Sequence: Synthetic oligonucleotide
  Target: PCSK9; (-) strand; PAM type: NRG; PAM sequence: AGG
attcaccagccttagagtgg

SEQ ID NO: 12186 - DNA, 20 bp, Artificial Sequence
  Description of Artificial Sequence: Synthetic oligonucleotide
  Target: PCSK9; (-) strand; PAM type: NRG; PAM sequence: GAG
tattcaccagccttagagtg

SEQ ID NO: 12187 - DNA, 20 bp, Artificial Sequence
  Description of Artificial Sequence: Synthetic oligonucleotide
  Target: PCSK9; (-) strand; PAM type: NRG; PAM sequence: TGG
tatattcaccagccttagag

SEQ ID NO: 12188 - DNA, 20 bp, Artificial Sequence
  Description of Artificial Sequence: Synthetic oligonucleotide
  Target: PCSK9; (-) strand; PAM type: NRG; PAM sequence: GAG
agctatattcaccagcctta

SEQ ID NO: 12189 - DNA, 20 bp, Artificial Sequence
  Description of Artificial Sequence: Synthetic oligonucleotide
  Target: PCSK9; (-) strand; PAM type: NRG; PAM sequence: TAG
acagctatattcaccagcct

SEQ ID NO: 12190 - DNA, 20 bp, Artificial Sequence
  Description of Artificial Sequence: Synthetic oligonucleotide
  Target: PCSK9; (-) strand; PAM type: NRG; PAM sequence: CAG
cttaagacagctatattcac

SEQ ID NO: 12191 - DNA, 20 bp, Artificial Sequence
  Description of Artificial Sequence: Synthetic oligonucleotide
  Target: PCSK9; (-) strand; PAM type: NRG; PAM sequence: CAG
gagagagaacttgcttaaga

SEQ ID NO: 12192 - DNA, 20 bp, Artificial Sequence
  Description of Artificial Sequence: Synthetic oligonucleotide
  Target: PCSK9; (-) strand; PAM type: NRG; PAM sequence: AAG
gagagagagagaacttgctt

SEQ ID NO: 12193 - DNA, 20 bp, Artificial Sequence
  Description of Artificial Sequence: Synthetic oligonucleotide
  Target: PCSK9; (-) strand; PAM type: NRG; PAM sequence: GAG
atgggctgtctagagagaga

SEQ ID NO: 12194 - DNA, 20 bp, Artificial Sequence
  Description of Artificial Sequence: Synthetic oligonucleotide
  Target: PCSK9; (-) strand; PAM type: NRG; PAM sequence: GAG
acatgggctgtctagagaga

SEQ ID NO: 12195 - DNA, 20 bp, Artificial Sequence
  Description of Artificial Sequence: Synthetic oligonucleotide
  Target: PCSK9; (-) strand; PAM type: NRG; PAM sequence: GAG
tgacatgggctgtctagaga

SEQ ID NO: 12196 - DNA, 20 bp, Artificial Sequence
  Description of Artificial Sequence: Synthetic oligonucleotide
  Target: PCSK9; (-) strand; PAM type: NRG; PAM sequence: GAG
tatgacatgggctgtctaga

SEQ ID NO: 12197 - DNA, 20 bp, Artificial Sequence
  Description of Artificial Sequence: Synthetic oligonucleotide
  Target: PCSK9; (-) strand; PAM type: NRG; PAM sequence: GAG
cttatgacatgggctgtcta

SEQ ID NO: 12198 - DNA, 20 bp, Artificial Sequence
  Description of Artificial Sequence: Synthetic oligonucleotide
  Target: PCSK9; (-) strand; PAM type: NRG; PAM sequence: TAG
tccttatgacatgggctgtc

SEQ ID NO: 12199 - DNA, 20 bp, Artificial Sequence
  Description of Artificial Sequence: Synthetic oligonucleotide
  Target: PCSK9; (-) strand; PAM type: NRG; PAM sequence: GGG
cctgagattccttatgacat

SEQ ID NO: 12200 - DNA, 20 bp, Artificial Sequence
  Description of Artificial Sequence: Synthetic oligonucleotide
  Target: PCSK9; (-) strand; PAM type: NRG; PAM sequence: TGG
gcctgagattccttatgaca

SEQ ID NO: 12201 - DNA, 20 bp, Artificial Sequence
  Description of Artificial Sequence: Synthetic oligonucleotide
  Target: PCSK9; (-) strand; PAM type: NRG; PAM sequence: GAG
atctgggaggaattttgcct

SEQ ID NO: 12202 - DNA, 20 bp, Artificial Sequence
  Description of Artificial Sequence: Synthetic oligonucleotide
  Target: PCSK9; (-) strand; PAM type: NRG; PAM sequence: AGG
gtcagaaaatgtaatctggg

SEQ ID NO: 12203 - DNA, 20 bp, Artificial Sequence
  Description of Artificial Sequence: Synthetic oligonucleotide
  Target: PCSK9; (-) strand; PAM type: NRG; PAM sequence: GAG
tgtcagaaaatgtaatctgg

SEQ ID NO: 12204 - DNA, 20 bp, Artificial Sequence
  Description of Artificial Sequence: Synthetic oligonucleotide
  Target: PCSK9; (-) strand; PAM type: NRG; PAM sequence: GGG
attgtcagaaaatgtaatct

SEQ ID NO: 12205 - DNA, 20 bp, Artificial Sequence
  Description of Artificial Sequence: Synthetic oligonucleotide
  Target: PCSK9; (-) strand; PAM type: NRG; PAM sequence: TGG
aattgtcagaaaatgtaatc

SEQ ID NO: 12206 - DNA, 20 bp, Artificial Sequence
  Description of Artificial Sequence: Synthetic oligonucleotide
  Target: PCSK9; (-) strand; PAM type: NRG; PAM sequence: CAG
catatatgacactgaattgt

SEQ ID NO: 12207 - DNA, 20 bp, Artificial Sequence
  Description of Artificial Sequence: Synthetic oligonucleotide
  Target: PCSK9; (-) strand; PAM type: NRG; PAM sequence: AAG
gataacacagttgggtgttc

SEQ ID NO: 12208 - DNA, 20 bp, Artificial Sequence
  Description of Artificial Sequence: Synthetic oligonucleotide
  Target: PCSK9; (-) strand; PAM type: NRG; PAM sequence: GGG
cgggcagagataacacagtt

SEQ ID NO: 12209 - DNA, 20 bp, Artificial Sequence
  Description of Artificial Sequence: Synthetic oligonucleotide
  Target: PCSK9; (-) strand; PAM type: NRG; PAM sequence: TGG
acgggcagagataacacagt

SEQ ID NO: 12210 - DNA, 20 bp, Artificial Sequence
  Description of Artificial Sequence: Synthetic oligonucleotide
  Target: PCSK9; (-) strand; PAM type: NRG; PAM sequence: CAG
tccaacgggcagagataaca

SEQ ID NO: 12211 - DNA, 20 bp, Artificial Sequence
  Description of Artificial Sequence: Synthetic oligonucleotide
  Target: PCSK9; (-) strand; PAM type: NRG; PAM sequence: GAG
ggcctaggttccaacgggca

SEQ ID NO: 12212 - DNA, 20 bp, Artificial Sequence
  Description of Artificial Sequence: Synthetic oligonucleotide
  Target: PCSK9; (-) strand; PAM type: NRG; PAM sequence: CAG
caggcctaggttccaacggg

SEQ ID NO: 12213 - DNA, 20 bp, Artificial Sequence
  Description of Artificial Sequence: Synthetic oligonucleotide
  Target: PCSK9; (-) strand; PAM type: NRG; PAM sequence: GGG
ccacaggcctaggttccaac

SEQ ID NO: 12214 - DNA, 20 bp, Artificial Sequence
  Description of Artificial Sequence: Synthetic oligonucleotide
  Target: PCSK9; (-) strand; PAM type: NRG; PAM sequence: CGG
accacaggcctaggttccaa

SEQ ID NO: 12215 - DNA, 20 bp, Artificial Sequence
  Description of Artificial Sequence: Synthetic oligonucleotide
  Target: PCSK9; (-) strand; PAM type: NRG; PAM sequence: AGG
tagggttgcaccacaggcct

SEQ ID NO: 12216 - DNA, 20 bp, Artificial Sequence
  Description of Artificial Sequence: Synthetic oligonucleotide
  Target: PCSK9; (-) strand; PAM type: NRG; PAM sequence: TAG
ctagggttgcaccacaggcc

SEQ ID NO: 12217 - DNA, 20 bp, Artificial Sequence
  Description of Artificial Sequence: Synthetic oligonucleotide
  Target: PCSK9; (-) strand; PAM type: NRG; PAM sequence: AGG
agagtctagggttgcaccac

SEQ ID NO: 12218 - DNA, 20 bp, Artificial Sequence
  Description of Artificial Sequence: Synthetic oligonucleotide
  Target: PCSK9; (-) strand; PAM type: NRG; PAM sequence: CAG
gagagtctagggttgcacca

SEQ ID NO: 12219 - DNA, 20 bp, Artificial Sequence
  Description of Artificial Sequence: Synthetic oligonucleotide
  Target: PCSK9; (-) strand; PAM type: NRG; PAM sequence: GGG
ggggaaggagagagagtcta

SEQ ID NO: 12220 - DNA, 20 bp, Artificial Sequence
  Description of Artificial Sequence: Synthetic oligonucleotide
  Target: PCSK9; (-) strand; PAM type: NRG; PAM sequence: AGG
aggggaaggagagagagtct

SEQ ID NO: 12221 - DNA, 20 bp, Artificial Sequence
  Description of Artificial Sequence: Synthetic oligonucleotide
  Target: PCSK9; (-) strand; PAM type: NRG; PAM sequence: TAG
gaggggaaggagagagagtc

SEQ ID NO: 12222 - DNA, 20 bp, Artificial Sequence
  Description of Artificial Sequence: Synthetic oligonucleotide
  Target: PCSK9; (-) strand; PAM type: NRG; PAM sequence: GAG
ctgtggaggggaaggagaga

SEQ ID NO: 12223 - DNA, 20 bp, Artificial Sequence
  Description of Artificial Sequence: Synthetic oligonucleotide
  Target: PCSK9; (-) strand; PAM type: NRG; PAM sequence: GAG
ttctgtggaggggaaggaga

SEQ ID NO: 12224 - DNA, 20 bp, Artificial Sequence
  Description of Artificial Sequence: Synthetic oligonucleotide
  Target: PCSK9; (-) strand; PAM type: NRG; PAM sequence: GAG
gattctgtggaggggaagga

SEQ ID NO: 12225 - DNA, 20 bp, Artificial Sequence
  Description of Artificial Sequence: Synthetic oligonucleotide
  Target: PCSK9; (-) strand; PAM type: NRG; PAM sequence: GAG
ttgattctgtggaggggaag

SEQ ID NO: 12226 - DNA, 20 bp, Artificial Sequence
  Description of Artificial Sequence: Synthetic oligonucleotide
  Target: PCSK9; (-) strand; PAM type: NRG; PAM sequence: AGG
acttgattctgtggagggga

SEQ ID NO: 12227 - DNA, 20 bp, Artificial Sequence
  Description of Artificial Sequence: Synthetic oligonucleotide
  Target: PCSK9; (-) strand; PAM type: NRG; PAM sequence: AAG
tacttgattctgtggagggg

SEQ ID NO: 12228 - DNA, 20 bp, Artificial Sequence
  Description of Artificial Sequence: Synthetic oligonucleotide
  Target: PCSK9; (-) strand; PAM type: NRG; PAM sequence: GGG
tgatacttgattctgtggag

SEQ ID NO: 12229 - DNA, 20 bp, Artificial Sequence
  Description of Artificial Sequence: Synthetic oligonucleotide
  Target: PCSK9; (-) strand; PAM type: NRG; PAM sequence: GGG
ctgatacttgattctgtgga

SEQ ID NO: 12230 - DNA, 20 bp, Artificial Sequence
  Description of Artificial Sequence: Synthetic oligonucleotide
  Target: PCSK9; (-) strand; PAM type: NRG; PAM sequence: AGG
gctgatacttgattctgtgg

SEQ ID NO: 12231 - DNA, 20 bp, Artificial Sequence
  Description of Artificial Sequence: Synthetic oligonucleotide
  Target: PCSK9; (-) strand; PAM type: NRG; PAM sequence: GAG
agctgatacttgattctgtg

SEQ ID NO: 12232 - DNA, 20 bp, Artificial Sequence
  Description of Artificial Sequence: Synthetic oligonucleotide
  Target: PCSK9; (-) strand; PAM type: NRG; PAM sequence: TGG
ccagctgatacttgattctg

SEQ ID NO: 12233 - DNA, 20 bp, Artificial Sequence
  Description of Artificial Sequence: Synthetic oligonucleotide
  Target: PCSK9; (-) strand; PAM type: NRG; PAM sequence: CAG
tcagggtgtggatctctaac

SEQ ID NO: 12234 - DNA, 20 bp, Artificial Sequence
  Description of Artificial Sequence: Synthetic oligonucleotide
  Target: PCSK9; (-) strand; PAM type: NRG; PAM sequence: TGG
atcacagagctgtcagggtg

SEQ ID NO: 12235 - DNA, 20 bp, Artificial Sequence
  Description of Artificial Sequence: Synthetic oligonucleotide
  Target: PCSK9; (-) strand; PAM type: NRG; PAM sequence: GGG
ccaacatcacagagctgtca

SEQ ID NO: 12236 - DNA, 20 bp, Artificial Sequence
  Description of Artificial Sequence: Synthetic oligonucleotide
  Target: PCSK9; (-) strand; PAM type: NRG; PAM sequence: AGG
tccaacatcacagagctgtc

SEQ ID NO: 12237 - DNA, 20 bp, Artificial Sequence
  Description of Artificial Sequence: Synthetic oligonucleotide
  Target: PCSK9; (-) strand; PAM type: NRG; PAM sequence: CAG
ttccaacatcacagagctgt

SEQ ID NO: 12238 - DNA, 20 bp, Artificial Sequence
  Description of Artificial Sequence: Synthetic oligonucleotide
  Target: PCSK9; (-) strand; PAM type: NRG; PAM sequence: GAG
caagttgttccaacatcaca

SEQ ID NO: 12239 - DNA, 20 bp, Artificial Sequence
  Description of Artificial Sequence: Synthetic oligonucleotide
  Target: PCSK9; (-) strand; PAM type: NRG; PAM sequence: CAG
accaagttgttccaacatca

SEQ ID NO: 12240 - DNA, 20 bp, Artificial Sequence
  Description of Artificial Sequence: Synthetic oligonucleotide
  Target: PCSK9; (-) strand; PAM type: NRG; PAM sequence: AAG
gctaaccctctgcaagaacc

SEQ ID NO: 12241 - DNA, 20 bp, Artificial Sequence
  Description of Artificial Sequence: Synthetic oligonucleotide
  Target: PCSK9; (-) strand; PAM type: NRG; PAM sequence: AAG
accacctgctaaccctctgc

SEQ ID NO: 12242 - DNA, 20 bp, Artificial Sequence
  Description of Artificial Sequence: Synthetic oligonucleotide
  Target: PCSK9; (-) strand; PAM type: NRG; PAM sequence: TGG
accccttcctccccgatccc

SEQ ID NO: 12243 - DNA, 20 bp, Artificial Sequence
  Description of Artificial Sequence: Synthetic oligonucleotide
  Target: PCSK9; (-) strand; PAM type: NRG; PAM sequence: AAG
ccagattttcgccttcctgc

SEQ ID NO: 12244 - DNA, 20 bp, Artificial Sequence
  Description of Artificial Sequence: Synthetic oligonucleotide
  Target: PCSK9; (-) strand; PAM type: NRG; PAM sequence: CAG
cccttccctatttgctagtc

SEQ ID NO: 12245 - DNA, 20 bp, Artificial Sequence
  Description of Artificial Sequence: Synthetic oligonucleotide
  Target: PCSK9; (-) strand; PAM type: NRG; PAM sequence: TAG
gggtccccttccctatttgc

SEQ ID NO: 12246 - DNA, 20 bp, Artificial Sequence
  Description of Artificial Sequence: Synthetic oligonucleotide
  Target: PCSK9; (-) strand; PAM type: NRG; PAM sequence: GGG
gtggccagcgttgctcacat

SEQ ID NO: 12247 - DNA, 20 bp, Artificial Sequence
  Description of Artificial Sequence: Synthetic oligonucleotide
  Target: PCSK9; (-) strand; PAM type: NRG; PAM sequence: TGG
agtggccagcgttgctcaca

SEQ ID NO: 12248 - DNA, 20 bp, Artificial Sequence
  Description of Artificial Sequence: Synthetic oligonucleotide
  Target: PCSK9; (-) strand; PAM type: NRG; PAM sequence: CAG
tcagtctcattcctagtggc

SEQ ID NO: 12249 - DNA, 20 bp, Artificial Sequence
  Description of Artificial Sequence: Synthetic oligonucleotide
  Target: PCSK9; (-) strand; PAM type: NRG; PAM sequence: TGG
ggtctcagtctcattcctag

SEQ ID NO: 12250 - DNA, 20 bp, Artificial Sequence
  Description of Artificial Sequence: Synthetic oligonucleotide
  Target: PCSK9; (-) strand; PAM type: NRG; PAM sequence: TAG
acaggtctcagtctcattcc

SEQ ID NO: 12251 - DNA, 20 bp, Artificial Sequence
  Description of Artificial Sequence: Synthetic oligonucleotide
  Target: PCSK9; (-) strand; PAM type: NRG; PAM sequence: CAG
ttgctagatcccacaggtct

SEQ ID NO: 12252 - DNA, 20 bp, Artificial Sequence
  Description of Artificial Sequence: Synthetic oligonucleotide
  Target: PCSK9; (-) strand; PAM type: NRG; PAM sequence: AGG
ggcttcttgctagatcccac

SEQ ID NO: 12253 - DNA, 20 bp, Artificial Sequence
  Description of Artificial Sequence: Synthetic oligonucleotide
  Target: PCSK9; (-) strand; PAM type: NRG; PAM sequence: CAG
gggcttcttgctagatccca

SEQ ID NO: 12254 - DNA, 20 bp, Artificial Sequence
  Description of Artificial Sequence: Synthetic oligonucleotide
  Target: PCSK9; (-) strand; PAM type: NRG; PAM sequence: TAG
ggtcacactgggcttcttgc

SEQ ID NO: 12255 - DNA, 20 bp, Artificial Sequence
  Description of Artificial Sequence: Synthetic oligonucleotide
  Target: PCSK9; (-) strand; PAM type: NRG; PAM sequence: GGG
atcgtgtcgctggtcacact

SEQ ID NO: 12256 - DNA, 20 bp, Artificial Sequence
  Description of Artificial Sequence: Synthetic oligonucleotide
  Target: PCSK9; (-) strand; PAM type: NRG; PAM sequence: TGG
gatcgtgtcgctggtcacac

SEQ ID NO: 12257 - DNA, 20 bp, Artificial Sequence
  Description of Artificial Sequence: Synthetic oligonucleotide
  Target: PCSK9; (-) strand; PAM type: NRG; PAM sequence: TGG
cccagcatagatcgtgtcgc

SEQ ID NO: 12258 - DNA, 20 bp, Artificial Sequence
  Description of Artificial Sequence: Synthetic oligonucleotide
  Target: PCSK9; (-) strand; PAM type: NRG; PAM sequence: TAG
ctcccaagtggtccccagca

SEQ ID NO: 12259 - DNA, 20 bp, Artificial Sequence
  Description of Artificial Sequence: Synthetic oligonucleotide
  Target: PCSK9; (-) strand; PAM type: NRG; PAM sequence: CAG
tggctctcccaagtggtccc

SEQ ID NO: 12260 - DNA, 20 bp, Artificial Sequence
  Description of Artificial Sequence: Synthetic oligonucleotide
  Target: PCSK9; (-) strand; PAM type: NRG; PAM sequence: TGG
aagcttttggctctcccaag

SEQ ID NO: 12261 - DNA, 20 bp, Artificial Sequence
  Description of Artificial Sequence: Synthetic oligonucleotide
  Target: PCSK9; (-) strand; PAM type: NRG; PAM sequence: AAG
ccaaagcttttggctctccc

SEQ ID NO: 12262 - DNA, 20 bp, Artificial Sequence
  Description of Artificial Sequence: Synthetic oligonucleotide
  Target: PCSK9; (-) strand; PAM type: NRG; PAM sequence: TGG
ttcatctccaccaaagcttt

SEQ ID NO: 12263 - DNA, 20 bp, Artificial Sequence
  Description of Artificial Sequence: Synthetic oligonucleotide
  Target: PCSK9; (-) strand; PAM type: NRG; PAM sequence: AAG
gtctccattcatctccacca

SEQ ID NO: 12264 - DNA, 20 bp, Artificial Sequence
  Description of Artificial Sequence: Synthetic oligonucleotide
  Target: PCSK9; (-) strand; PAM type: NRG; PAM sequence: TGG
ggatgctgaacttaggttga

SEQ ID NO: 12265 - DNA, 20 bp, Artificial Sequence
  Description of Artificial Sequence: Synthetic oligonucleotide
  Target: PCSK9; (-) strand; PAM type: NRG; PAM sequence: AGG
tagaggaggatgctgaactt

SEQ ID NO: 12266 - DNA, 20 bp, Artificial Sequence
  Description of Artificial Sequence: Synthetic oligonucleotide
  Target: PCSK9; (-) strand; PAM type: NRG; PAM sequence: TAG
ttagaggaggatgctgaact

SEQ ID NO: 12267 - DNA, 20 bp, Artificial Sequence
  Description of Artificial Sequence: Synthetic oligonucleotide
  Target: PCSK9; (-) strand; PAM type: NRG; PAM sequence: AGG
tcatctgcaaagcttagagg

SEQ ID NO: 12268 - DNA, 20 bp, Artificial Sequence
  Description of Artificial Sequence: Synthetic oligonucleotide
  Target: PCSK9; (-) strand; PAM type: NRG; PAM sequence: GAG
ttcatctgcaaagcttagag

SEQ ID NO: 12269 - DNA, 20 bp, Artificial Sequence
  Description of Artificial Sequence: Synthetic oligonucleotide
  Target: PCSK9; (-) strand; PAM type: NRG; PAM sequence: AGG
gattcatctgcaaagcttag

SEQ ID NO: 12270 - DNA, 20 bp, Artificial Sequence
  Description of Artificial Sequence: Synthetic oligonucleotide
  Target: PCSK9; (-) strand; PAM type: NRG; PAM sequence: GAG
ggattcatctgcaaagctta

SEQ ID NO: 12271 - DNA, 20 bp, Artificial Sequence
  Description of Artificial Sequence: Synthetic oligonucleotide
  Target: PCSK9; (-) strand; PAM type: NRG; PAM sequence: TAG
caggattcatctgcaaagct

SEQ ID NO: 12272 - DNA, 20 bp, Artificial Sequence
  Description of Artificial Sequence: Synthetic oligonucleotide
  Target: PCSK9; (-) strand; PAM type: NRG; PAM sequence: AAG
catttcaggattcatctgca

SEQ ID NO: 12273 - DNA, 20 bp, Artificial Sequence
  Description of Artificial Sequence: Synthetic oligonucleotide
  Target: PCSK9; (-) strand; PAM type: NRG; PAM sequence: AGG
ctggaggggctgaccatttc

SEQ ID NO: 12274 - DNA, 20 bp, Artificial Sequence
  Description of Artificial Sequence: Synthetic oligonucleotide
  Target: PCSK9; (-) strand; PAM type: NRG; PAM sequence: CAG
tctggaggggctgaccattt

SEQ ID NO: 12275 - DNA, 20 bp, Artificial Sequence
  Description of Artificial Sequence: Synthetic oligonucleotide
  Target: PCSK9; (-) strand; PAM type: NRG; PAM sequence: GGG
tgctgttcttttctctggag

SEQ ID NO: 12276 - DNA, 20 bp, Artificial Sequence
  Description of Artificial Sequence: Synthetic oligonucleotide
  Target: PCSK9; (-) strand; PAM type: NRG; PAM sequence: GGG
ttgctgttcttttctctgga

SEQ ID NO: 12277 - DNA, 20 bp, Artificial Sequence
  Description of Artificial Sequence: Synthetic oligonucleotide
  Target: PCSK9; (-) strand; PAM type: NRG; PAM sequence: AGG
gttgctgttcttttctctgg

SEQ ID NO: 12278 - DNA, 20 bp, Artificial Sequence
  Description of Artificial Sequence: Synthetic oligonucleotide
  Target: PCSK9; (-) strand; PAM type: NRG; PAM sequence: GAG
tgttgctgttcttttctctg

SEQ ID NO: 12279 - DNA, 20 bp, Artificial Sequence
  Description of Artificial Sequence: Synthetic oligonucleotide
  Target: PCSK9; (-) strand; PAM type: NRG; PAM sequence: TGG
cctgttgctgttcttttctc

SEQ ID NO: 12280 - DNA, 20 bp, Artificial Sequence
  Description of Artificial Sequence: Synthetic oligonucleotide
  Target: PCSK9; (-) strand; PAM type: NRG; PAM sequence: GAG
aaggggactgtgggtcctct

SEQ ID NO: 12281 - DNA, 20 bp, Artificial Sequence
  Description of Artificial Sequence: Synthetic oligonucleotide
  Target: PCSK9; (-) strand; PAM type: NRG; PAM sequence: GGG
acactaataaaggggactgt

SEQ ID NO: 12282 - DNA, 20 bp, Artificial Sequence
  Description of Artificial Sequence: Synthetic oligonucleotide
  Target: PCSK9; (-) strand; PAM type: NRG; PAM sequence: TGG
tacactaataaaggggactg

SEQ ID NO: 12283 - DNA, 20 bp, Artificial Sequence
  Description of Artificial Sequence: Synthetic oligonucleotide
  Target: PCSK9; (-) strand; PAM type: NRG; PAM sequence: GGG
agtactttacactaataaag

SEQ ID NO: 12284 - DNA, 20 bp, Artificial Sequence
  Description of Artificial Sequence: Synthetic oligonucleotide
  Target: PCSK9; (-) strand; PAM type: NRG; PAM sequence: GGG
tagtactttacactaataaa

SEQ ID NO: 12285 - DNA, 20 bp, Artificial Sequence
  Description of Artificial Sequence: Synthetic oligonucleotide
  Target: PCSK9; (-) strand; PAM type: NRG; PAM sequence: AGG
ttagtactttacactaataa

SEQ ID NO: 12286 - DNA, 20 bp, Artificial Sequence
  Description of Artificial Sequence: Synthetic oligonucleotide
  Target: PCSK9; (-) strand; PAM type: NRG; PAM sequence: AAG
cttagtactttacactaata

SEQ ID NO: 12287 - DNA, 20 bp, Artificial Sequence
  Description of Artificial Sequence: Synthetic oligonucleotide
  Target: PCSK9; (-) strand; PAM type: NRG; PAM sequence: TAG
taaatgctgttgattcctct

SEQ ID NO: 12288 - DNA, 20 bp, Artificial Sequence
  Description of Artificial Sequence: Synthetic oligonucleotide
  Target: PCSK9; (-) strand; PAM type: NRG; PAM sequence: TGG
ggggaacacgagcctgtgcc

SEQ ID NO: 12289 - DNA, 20 bp, Artificial Sequence
  Description of Artificial Sequence: Synthetic oligonucleotide
  Target: PCSK9; (-) strand; PAM type: NRG; PAM sequence: GAG
cgtagtgggcgggggaacac

SEQ ID NO: 12290 - DNA, 20 bp, Artificial Sequence
  Description of Artificial Sequence: Synthetic oligonucleotide
  Target: PCSK9; (-) strand; PAM type: NRG; PAM sequence: GGG
aacacagccgtagtgggcgg

SEQ ID NO: 12291 - DNA, 20 bp, Artificial Sequence
  Description of Artificial Sequence: Synthetic oligonucleotide
  Target: PCSK9; (-) strand; PAM type: NRG; PAM sequence: GGG
gaacacagccgtagtgggcg

SEQ ID NO: 12292 - DNA, 20 bp, Artificial Sequence
  Description of Artificial Sequence: Synthetic oligonucleotide
  Target: PCSK9; (-) strand; PAM type: NRG; PAM sequence: GGG
agaacacagccgtagtgggc

SEQ ID NO: 12293 - DNA, 20 bp, Artificial Sequence
  Description of Artificial Sequence: Synthetic oligonucleotide
  Target: PCSK9; (-) strand; PAM type: NRG; PAM sequence: CGG
cagaacacagccgtagtggg

SEQ ID NO: 12294 - DNA, 20 bp, Artificial Sequence
  Description of Artificial Sequence: Synthetic oligonucleotide
  Target: PCSK9; (-) strand; PAM type: NRG; PAM sequence: GGG
tatcagaacacagccgtagt

SEQ ID NO: 12295 - DNA, 20 bp, Artificial Sequence
  Description of Artificial Sequence: Synthetic oligonucleotide
  Target: PCSK9; (-) strand; PAM type: NRG; PAM sequence: TGG
atatcagaacacagccgtag

SEQ ID NO: 12296 - DNA, 20 bp, Artificial Sequence
  Description of Artificial Sequence: Synthetic oligonucleotide
  Target: PCSK9; (-) strand; PAM type: NRG; PAM sequence: TAG
catatatcagaacacagccg

SEQ ID NO: 12297 - DNA, 20 bp, Artificial Sequence
  Description of Artificial Sequence: Synthetic oligonucleotide
  Target: PCSK9; (-) strand; PAM type: NRG; PAM sequence: CAG
attcttcatatatcagaaca

SEQ ID NO: 12298 - DNA, 20 bp, Artificial Sequence
  Description of Artificial Sequence: Synthetic oligonucleotide
  Target: PCSK9; (-) strand; PAM type: NRG; PAM sequence: CAG
tgccgccattcttcatatat

SEQ ID NO: 12299 - DNA, 20 bp, Artificial Sequence
  Description of Artificial Sequence: Synthetic oligonucleotide
  Target: PCSK9; (-) strand; PAM type: NRG; PAM sequence: GAG
atttttcaaaaacagagttg

SEQ ID NO: 12300 - DNA, 20 bp, Artificial Sequence
  Description of Artificial Sequence: Synthetic oligonucleotide
  Target: PCSK9; (-) strand; PAM type: NRG; PAM sequence: TGG
aaatttttcaaaaacagagt

SEQ ID NO: 12301 - DNA, 20 bp, Artificial Sequence
  Description of Artificial Sequence: Synthetic oligonucleotide
  Target: PCSK9; (-) strand; PAM type: NRG; PAM sequence: GAG
aaataaatttttcaaaaaca

SEQ ID NO: 12302 - DNA, 20 bp, Artificial Sequence
  Description of Artificial Sequence: Synthetic oligonucleotide
  Target: PCSK9; (-) strand; PAM type: NRG; PAM sequence: CAG
taaaataaatttttcaaaaa

SEQ ID NO: 12303 - DNA, 20 bp, Artificial Sequence
  Description of Artificial Sequence: Synthetic oligonucleotide
  Target: PCSK9; (-) strand; PAM type: NRG; PAM sequence: GAG
gcaaagttcttagcttctaa

SEQ ID NO: 12304 - DNA, 20 bp, Artificial Sequence
  Description of Artificial Sequence: Synthetic oligonucleotide
  Target: PCSK9; (-) strand; PAM type: NRG; PAM sequence: AAG
tggcaaagttcttagcttct

SEQ ID NO: 12305 - DNA, 20 bp, Artificial Sequence
  Description of Artificial Sequence: Synthetic oligonucleotide
  Target: PCSK9; (-) strand; PAM type: NRG; PAM sequence: TAG
ttcatgtgtggcaaagttct

SEQ ID NO: 12306 - DNA, 20 bp, Artificial Sequence
  Description of Artificial Sequence: Synthetic oligonucleotide
  Target: PCSK9; (-) strand; PAM type: NRG; PAM sequence: AAG
aatttggttcatgtgtggca

SEQ ID NO: 12307 - DNA, 20 bp, Artificial Sequence
  Description of Artificial Sequence: Synthetic oligonucleotide
  Target: PCSK9; (-) strand; PAM type: NRG; PAM sequence: TGG
ttctaaatttggttcatgtg

SEQ ID NO: 12308 - DNA, 20 bp, Artificial Sequence
  Description of Artificial Sequence: Synthetic oligonucleotide
  Target: PCSK9; (-) strand; PAM type: NRG; PAM sequence: TGG
aagaaccttaattctaaatt

SEQ ID NO: 12309 - DNA, 20 bp, Artificial Sequence
  Description of Artificial Sequence: Synthetic oligonucleotide
  Target: PCSK9; (-) strand; PAM type: NRG; PAM sequence: AAG
aggaagtagatacactaggg

SEQ ID NO: 12310 - DNA, 20 bp, Artificial Sequence
  Description of Artificial Sequence: Synthetic oligonucleotide
  Target: PCSK9; (-) strand; PAM type: NRG; PAM sequence: GGG
aaaaggaagtagatacacta

SEQ ID NO: 12311 - DNA, 20 bp, Artificial Sequence
  Description of Artificial Sequence: Synthetic oligonucleotide
  Target: PCSK9; (-) strand; PAM type: NRG; PAM sequence: AGG
caaaaggaagtagatacact

SEQ ID NO: 12312 - DNA, 20 bp, Artificial Sequence
  Description of Artificial Sequence: Synthetic oligonucleotide
  Target: PCSK9; (-) strand; PAM type: NRG; PAM sequence: TAG
tcaaaaggaagtagatacac

SEQ ID NO: 12313 - DNA, 20 bp, Artificial Sequence
  Description of Artificial Sequence: Synthetic oligonucleotide
  Target: PCSK9; (-) strand; PAM type: NRG; PAM sequence: TAG
tataaaatttcaaaaggaag

SEQ ID NO: 12314 - DNA, 20 bp, Artificial Sequence
  Description of Artificial Sequence: Synthetic oligonucleotide
  Target: PCSK9; (-) strand; PAM type: NRG; PAM sequence: AAG
gtttataaaatttcaaaagg

SEQ ID NO: 12315 - DNA, 20 bp, Artificial Sequence
  Description of Artificial Sequence: Synthetic oligonucleotide
  Target: PCSK9; (-) strand; PAM type: NRG; PAM sequence: AGG
cttgtttataaaatttcaaa

SEQ ID NO: 12316 - DNA, 20 bp, Artificial Sequence
  Description of Artificial Sequence: Synthetic oligonucleotide
  Target: PCSK9; (-) strand; PAM type: NRG; PAM sequence: AAG
tcttgtttataaaatttcaa

SEQ ID NO: 12317 - DNA, 20 bp, Artificial Sequence
  Description of Artificial Sequence: Synthetic oligonucleotide
  Target: PCSK9; (-) strand; PAM type: NRG; PAM sequence: TGG
tgagcttggaacaagcagac

SEQ ID NO: 12318 - DNA, 20 bp, Artificial Sequence
  Description of Artificial Sequence: Synthetic oligonucleotide
  Target: PCSK9; (-) strand; PAM type: NRG; PAM sequence: CAG
ccttctgagcttggaacaag

SEQ ID NO: 12319 - DNA, 20 bp, Artificial Sequence
  Description of Artificial Sequence: Synthetic oligonucleotide
  Target: PCSK9; (-) strand; PAM type: NRG; PAM sequence: AAG
ttaccttctgagcttggaac

SEQ ID NO: 12320 - DNA, 20 bp, Artificial Sequence
  Description of Artificial Sequence: Synthetic oligonucleotide
  Target: PCSK9; (-) strand; PAM type: NRG; PAM sequence: TGG
gtgcagttaccttctgagct

SEQ ID NO: 12321 - DNA, 20 bp, Artificial Sequence
  Description of Artificial Sequence: Synthetic oligonucleotide
  Target: PCSK9; (-) strand; PAM type: NRG; PAM sequence: GAG
ggtgtgtgcagttaccttct

SEQ ID NO: 12322 - DNA, 20 bp, Artificial Sequence
  Description of Artificial Sequence: Synthetic oligonucleotide
  Target: PCSK9; (-) strand; PAM type: NRG; PAM sequence: CAG
tgctaacatcgaggtgtgtg

SEQ ID NO: 12323 - DNA, 20 bp, Artificial Sequence
  Description of Artificial Sequence: Synthetic oligonucleotide
  Target: PCSK9; (-) strand; PAM type: NRG; PAM sequence: AGG
caccttccctgctaacatcg

SEQ ID NO: 12324 - DNA, 20 bp, Artificial Sequence
  Description of Artificial Sequence: Synthetic oligonucleotide
  Target: PCSK9; (-) strand; PAM type: NRG; PAM sequence: GAG
ccaccttccctgctaacatc

SEQ ID NO: 12325 - DNA, 20 bp, Artificial Sequence
  Description of Artificial Sequence: Synthetic oligonucleotide
  Target: PCSK9; (-) strand; PAM type: NRG; PAM sequence: CAG
gaactagagtgccgtatcat

SEQ ID NO: 12326 - DNA, 20 bp, Artificial Sequence
  Description of Artificial Sequence: Synthetic oligonucleotide
  Target: PCSK9; (-) strand; PAM type: NRG; PAM sequence: GAG
acagtcagttttaggaacta

SEQ ID NO: 12327 - DNA, 20 bp, Artificial Sequence
  Description of Artificial Sequence: Synthetic oligonucleotide
  Target: PCSK9; (-) strand; PAM type: NRG; PAM sequence: TAG
ctacagtcagttttaggaac

SEQ ID NO: 12328 - DNA, 20 bp, Artificial Sequence
  Description of Artificial Sequence: Synthetic oligonucleotide
  Target: PCSK9; (-) strand; PAM type: NRG; PAM sequence: AGG
tgacaactacagtcagtttt

SEQ ID NO: 12329 - DNA, 20 bp, Artificial Sequence
  Description of Artificial Sequence: Synthetic oligonucleotide
  Target: PCSK9; (-) strand; PAM type: NRG; PAM sequence: TAG
ctgacaactacagtcagttt

SEQ ID NO: 12330 - DNA, 20 bp, Artificial Sequence
  Description of Artificial Sequence: Synthetic oligonucleotide
  Target: PCSK9; (-) strand; PAM type: NRG; PAM sequence: CAG
cggtcactgacaactacagt

SEQ ID NO: 12331 - DNA, 20 bp, Artificial Sequence
  Description of Artificial Sequence: Synthetic oligonucleotide
  Target: PCSK9; (-) strand; PAM type: NRG; PAM sequence: CAG
cacacggtcactgacaacta

SEQ ID NO: 12332 - DNA, 20 bp, Artificial Sequence
  Description of Artificial Sequence: Synthetic oligonucleotide
  Target: PCSK9; (-) strand; PAM type: NRG; PAM sequence: CGG
cttctcctggagtcctcaca

SEQ ID NO: 12333 - DNA, 20 bp, Artificial Sequence
  Description of Artificial Sequence: Synthetic oligonucleotide
  Target: PCSK9; (-) strand; PAM type: NRG; PAM sequence: GAG
tctcaccacgacttctcctg

SEQ ID NO: 12334 - DNA, 20 bp, Artificial Sequence
  Description of Artificial Sequence: Synthetic oligonucleotide
  Target: PCSK9; (-) strand; PAM type: NRG; PAM sequence: TGG
catctcaccacgacttctcc

SEQ ID NO: 12335 - DNA, 20 bp, Artificial Sequence
  Description of Artificial Sequence: Synthetic oligonucleotide
  Target: PCSK9; (-) strand; PAM type: NRG; PAM sequence: GGG
aagaaaacaagcatcccagc

SEQ ID NO: 12336 - DNA, 20 bp, Artificial Sequence
  Description of Artificial Sequence: Synthetic oligonucleotide
  Target: PCSK9; (-) strand; PAM type: NRG; PAM sequence: CGG
aaagaaaacaagcatcccag

SEQ ID NO: 12337 - DNA, 20 bp, Artificial Sequence
  Description of Artificial Sequence: Synthetic oligonucleotide
  Target: PCSK9; (-) strand; PAM type: NRG; PAM sequence: CAG
gggaaagaaaacaagcatcc

SEQ ID NO: 12338 - DNA, 20 bp, Artificial Sequence
  Description of Artificial Sequence: Synthetic oligonucleotide
  Target: PCSK9; (-) strand; PAM type: NRG; PAM sequence: AAG
ggcatcctgggaaagaaaac

SEQ ID NO: 12339 - DNA, 20 bp, Artificial Sequence
  Description of Artificial Sequence: Synthetic oligonucleotide
  Target: PCSK9; (-) strand; PAM type: NRG; PAM sequence: AAG
ccgttgaaggcatcctggga

SEQ ID NO: 12340 - DNA, 20 bp, Artificial Sequence
  Description of Artificial Sequence: Synthetic oligonucleotide
  Target: PCSK9; (-) strand; PAM type: NRG; PAM sequence: GGG
ctgcccgttgaaggcatcct

SEQ ID NO: 12341 - DNA, 20 bp, Artificial Sequence
  Description of Artificial Sequence: Synthetic oligonucleotide
  Target: PCSK9; (-) strand; PAM type: NRG; PAM sequence: TGG
tctgcccgttgaaggcatcc

SEQ ID NO: 12342 - DNA, 20 bp, Artificial Sequence
  Description of Artificial Sequence: Synthetic oligonucleotide
  Target: PCSK9; (-) strand; PAM type: NRG; PAM sequence: AGG
tggccgattctgcccgttga

SEQ ID NO: 12343 - DNA, 20 bp, Artificial Sequence
  Description of Artificial Sequence: Synthetic oligonucleotide
  Target: PCSK9; (-) strand; PAM type: NRG; PAM sequence: AAG
atggccgattctgcccgttg

SEQ ID NO: 12344 - DNA, 20 bp, Artificial Sequence
  Description of Artificial Sequence: Synthetic oligonucleotide
  Target: PCSK9; (-) strand; PAM type: NRG; PAM sequence: TGG
tagtgaggccgatcttaaga

SEQ ID NO: 12345 - DNA, 20 bp, Artificial Sequence
  Description of Artificial Sequence: Synthetic oligonucleotide
  Target: PCSK9; (-) strand; PAM type: NRG; PAM sequence: AAG
cccttagtgaggccgatctt

SEQ ID NO: 12346 - DNA, 20 bp, Artificial Sequence
  Description of Artificial Sequence: Synthetic oligonucleotide
  Target: PCSK9; (-) strand; PAM type: NRG; PAM sequence: AGG
ctcaagaagctcccttagtg

SEQ ID NO: 12347 - DNA, 20 bp, Artificial Sequence
  Description of Artificial Sequence: Synthetic oligonucleotide
  Target: PCSK9; (-) strand; PAM type: NRG; PAM sequence: GAG
tctcaagaagctcccttagt

SEQ ID NO: 12348 - DNA, 20 bp, Artificial Sequence
  Description of Artificial Sequence: Synthetic oligonucleotide
  Target: PCSK9; (-) strand; PAM type: NRG; PAM sequence: TAG
gtgttctcaagaagctccct

SEQ ID NO: 12349 - DNA, 20 bp, Artificial Sequence
  Description of Artificial Sequence: Synthetic oligonucleotide
  Target: PCSK9; (-) strand; PAM type: NRG; PAM sequence: AAG
taatgctgtgtgttctcaag

SEQ ID NO: 12350 - DNA, 20 bp, Artificial Sequence
  Description of Artificial Sequence: Synthetic oligonucleotide
  Target: PCSK9; (-) strand; PAM type: NRG; PAM sequence: AAG
caataatgctgtgtgttctc

SEQ ID NO: 12351 - DNA, 20 bp, Artificial Sequence
  Description of Artificial Sequence: Synthetic oligonucleotide
  Target: PCSK9; (-) strand; PAM type: NRG; PAM sequence: AGG
aaatggtctgcaaacagagc

SEQ ID NO: 12352 - DNA, 20 bp, Artificial Sequence
  Description of Artificial Sequence: Synthetic oligonucleotide
  Target: PCSK9; (-) strand; PAM type: NRG; PAM sequence: CAG
aaaatggtctgcaaacagag

SEQ ID NO: 12353 - DNA, 20 bp, Artificial Sequence
  Description of Artificial Sequence: Synthetic oligonucleotide
  Target: PCSK9; (-) strand; PAM type: NRG; PAM sequence: GAG
ttcaaaatggtctgcaaaca

SEQ ID NO: 12354 - DNA, 20 bp, Artificial Sequence
  Description of Artificial Sequence: Synthetic oligonucleotide
  Target: PCSK9; (-) strand; PAM type: NRG; PAM sequence: CAG
ctttcaaaatggtctgcaaa

SEQ ID NO: 12355 - DNA, 20 bp, Artificial Sequence
  Description of Artificial Sequence: Synthetic oligonucleotide
  Target: PCSK9; (-) strand; PAM type: NRG; PAM sequence: TGG
tttttataaacctttcaaaa

SEQ ID NO: 12356 - DNA, 20 bp, Artificial Sequence
  Description of Artificial Sequence: Synthetic oligonucleotide
  Target: PCSK9; (-) strand; PAM type: NRG; PAM sequence: AAG
tactgccaattttttggatg

SEQ ID NO: 12357 - DNA, 20 bp, Artificial Sequence
  Description of Artificial Sequence: Synthetic oligonucleotide
  Target: PCSK9; (-) strand; PAM type: NRG; PAM sequence: TGG
catttttactgccaattttt

SEQ ID NO: 12358 - DNA, 20 bp, Artificial Sequence
  Description of Artificial Sequence: Synthetic oligonucleotide
  Target: PCSK9; (-) strand; PAM type: NRG; PAM sequence: GAG
atgacaggcttaccttggaa

SEQ ID NO: 12359 - DNA, 20 bp, Artificial Sequence
  Description of Artificial Sequence: Synthetic oligonucleotide
  Target: PCSK9; (-) strand; PAM type: NRG; PAM sequence: AAG
ttatgacaggcttaccttgg

SEQ ID NO: 12360 - DNA, 20 bp, Artificial Sequence
  Description of Artificial Sequence: Synthetic oligonucleotide
  Target: PCSK9; (-) strand; PAM type: NRG; PAM sequence: TGG
cagttatgacaggcttacct

SEQ ID NO: 12361 - DNA, 20 bp, Artificial Sequence
  Description of Artificial Sequence: Synthetic oligonucleotide
  Target: PCSK9; (-) strand; PAM type: NRG; PAM sequence: AGG
acaacagtgacagttatgac

SEQ ID NO: 12362 - DNA, 20 bp, Artificial Sequence
  Description of Artificial Sequence: Synthetic oligonucleotide
  Target: PCSK9; (-) strand; PAM type: NRG; PAM sequence: CAG
tacaacagtgacagttatga

SEQ ID NO: 12363 - DNA, 20 bp, Artificial Sequence
  Description of Artificial Sequence: Synthetic oligonucleotide
  Target: PCSK9; (-) strand; PAM type: NRG; PAM sequence: CAG
ttaatgtagtacaacagtga

SEQ ID NO: 12364 - DNA, 20 bp, Artificial Sequence
  Description of Artificial Sequence: Synthetic oligonucleotide
  Target: PCSK9; (-) strand; PAM type: NRG; PAM sequence: CAG
ctttttttaatgtagtacaa

SEQ ID NO: 12365 - DNA, 20 bp, Artificial Sequence
  Description of Artificial Sequence: Synthetic oligonucleotide
  Target: PCSK9; (-) strand; PAM type: NRG; PAM sequence: TAG
gctgatgactttttttaatg

SEQ ID NO: 12366 - DNA, 20 bp, Artificial Sequence
  Description of Artificial Sequence: Synthetic oligonucleotide
  Target: PCSK9; (-) strand; PAM type: NRG; PAM sequence: CAG
cacttgattgctgacagcta

SEQ ID NO: 12367 - DNA, 20 bp, Artificial Sequence
  Description of Artificial Sequence: Synthetic oligonucleotide
  Target: PCSK9; (-) strand; PAM type: NRG; PAM sequence: CAG
ggtaaccacttgattgctga

SEQ ID NO: 12368 - DNA, 20 bp, Artificial Sequence
  Description of Artificial Sequence: Synthetic oligonucleotide
  Target: PCSK9; (-) strand; PAM type: NRG; PAM sequence: TGG
gaccatcgttttcactttgc

SEQ ID NO: 12369 - DNA, 20 bp, Artificial Sequence
  Description of Artificial Sequence: Synthetic oligonucleotide
  Target: PCSK9; (-) strand; PAM type: NRG; PAM sequence: CAG
accgtgtatattatacgctt

SEQ ID NO: 12370 - DNA, 20 bp, Artificial Sequence
  Description of Artificial Sequence: Synthetic oligonucleotide
  Target: PCSK9; (-) strand; PAM type: NRG; PAM sequence: AGG
cctcactgtaaagcttcatc

SEQ ID NO: 12371 - DNA, 20 bp, Artificial Sequence
  Description of Artificial Sequence: Synthetic oligonucleotide
  Target: PCSK9; (-) strand; PAM type: NRG; PAM sequence: CAG
tcctcactgtaaagcttcat

SEQ ID NO: 12372 - DNA, 20 bp, Artificial Sequence
  Description of Artificial Sequence: Synthetic oligonucleotide
  Target: PCSK9; (-) strand; PAM type: NRG; PAM sequence: AAG
cacctgccgtcctcactgta

SEQ ID NO: 12373 - DNA, 20 bp, Artificial Sequence
  Description of Artificial Sequence: Synthetic oligonucleotide
  Target: PCSK9; (-) strand; PAM type: NRG; PAM sequence: TAG
aacaacgccttccgcacccc

SEQ ID NO: 12374 - DNA, 20 bp, Artificial Sequence
  Description of Artificial Sequence: Synthetic oligonucleotide
  Target: PCSK9; (-) strand; PAM type: NRG; PAM sequence: TGG
tctagtccccttatttccta

SEQ ID NO: 12375 - DNA, 20 bp, Artificial Sequence
  Description of Artificial Sequence: Synthetic oligonucleotide
  Target: PCSK9; (-) strand; PAM type: NRG; PAM sequence: TAG
aggagtgaaattgccacttc

SEQ ID NO: 12376 - DNA, 20 bp, Artificial Sequence
  Description of Artificial Sequence: Synthetic oligonucleotide
  Target: PCSK9; (-) strand; PAM type: NRG; PAM sequence: GAG
tctcaggagcccaaaatcag

SEQ ID NO: 12377 - DNA, 20 bp, Artificial Sequence
  Description of Artificial Sequence: Synthetic oligonucleotide
  Target: PCSK9; (-) strand; PAM type: NRG; PAM sequence: AGG
actctcaggagcccaaaatc

SEQ ID NO: 12378 - DNA, 20 bp, Artificial Sequence
  Description of Artificial Sequence: Synthetic oligonucleotide
  Target: PCSK9; (-) strand; PAM type: NRG; PAM sequence: CAG
cactctcaggagcccaaaat

SEQ ID NO: 12379 - DNA, 20 bp, Artificial Sequence
  Description of Artificial Sequence: Synthetic oligonucleotide
  Target: PCSK9; (-) strand; PAM type: NRG; PAM sequence: GAG
gctggcgactgcactctcag

SEQ ID NO: 12380 - DNA, 20 bp, Artificial Sequence
  Description of Artificial Sequence: Synthetic oligonucleotide
  Target: PCSK9; (-) strand; PAM type: NRG; PAM sequence: AGG
tcgctggcgactgcactctc

SEQ ID NO: 12381 - DNA, 20 bp, Artificial Sequence
  Description of Artificial Sequence: Synthetic oligonucleotide
  Target: PCSK9; (-) strand; PAM type: NRG; PAM sequence: CAG
atcgctggcgactgcactct

SEQ ID NO: 12382 - DNA, 20 bp, Artificial Sequence
  Description of Artificial Sequence: Synthetic oligonucleotide
  Target: PCSK9; (-) strand; PAM type: NRG; PAM sequence: TGG
ccacactgggatatcatcgc

SEQ ID NO: 12383 - DNA, 20 bp, Artificial Sequence
  Description of Artificial Sequence: Synthetic oligonucleotide
  Target: PCSK9; (-) strand; PAM type: NRG; PAM sequence: GGG
tgctggcgatgatccacact

SEQ ID NO: 12384 - DNA, 20 bp, Artificial Sequence
  Description of Artificial Sequence: Synthetic oligonucleotide
  Target: PCSK9; (-) strand; PAM type: NRG; PAM sequence: TGG
atgctggcgatgatccacac

SEQ ID NO: 12385 - DNA, 20 bp, Artificial Sequence
  Description of Artificial Sequence: Synthetic oligonucleotide
  Target: PCSK9; (-) strand; PAM type: NRG; PAM sequence: TGG
gggacatgaccttgaaatgc

SEQ ID NO: 12386 - DNA, 20 bp, Artificial Sequence
  Description of Artificial Sequence: Synthetic oligonucleotide
  Target: PCSK9; (-) strand; PAM type: NRG; PAM sequence: GGG
tcctcaccaagagattgtgt

SEQ ID NO: 12387 - DNA, 20 bp, Artificial Sequence
  Description of Artificial Sequence: Synthetic oligonucleotide
  Target: PCSK9; (-) strand; PAM type: NRG; PAM sequence: TGG
atcctcaccaagagattgtg

SEQ ID NO: 12388 - DNA, 20 bp, Artificial Sequence
  Description of Artificial Sequence: Synthetic oligonucleotide
  Target: PCSK9; (-) strand; PAM type: NRG; PAM sequence: GAG
tccgcccacatcctcaccaa

SEQ ID NO: 12389 - DNA, 20 bp, Artificial Sequence
  Description of Artificial Sequence: Synthetic oligonucleotide
  Target: PCSK9; (-) strand; PAM type: NRG; PAM sequence: AAG
tctccgcccacatcctcacc

SEQ ID NO: 12390 - DNA, 20 bp, Artificial Sequence
  Description of Artificial Sequence: Synthetic oligonucleotide
  Target: PCSK9; (-) strand; PAM type: NRG; PAM sequence: GAG
gatgttctaccattggtttt

SEQ ID NO: 12391 - DNA, 20 bp, Artificial Sequence
  Description of Artificial Sequence: Synthetic oligonucleotide
  Target: PCSK9; (-) strand; PAM type: NRG; PAM sequence: TGG
gaaatgtgatgttctaccat

SEQ ID NO: 12392 - DNA, 20 bp, Artificial Sequence
  Description of Artificial Sequence: Synthetic oligonucleotide
  Target: PCSK9; (-) strand; PAM type: NRG; PAM sequence: CAG
agacggttccaatggtcttg

SEQ ID NO: 12393 - DNA, 20 bp, Artificial Sequence
  Description of Artificial Sequence: Synthetic oligonucleotide
  Target: PCSK9; (-) strand; PAM type: NRG; PAM sequence: TGG
caaacttcagacggttccaa

SEQ ID NO: 12394 - DNA, 20 bp, Artificial Sequence
  Description of Artificial Sequence: Synthetic oligonucleotide
  Target: PCSK9; (-) strand; PAM type: NRG; PAM sequence: CGG
ggcgagtggcaaacttcaga

SEQ ID NO: 12395 - DNA, 20 bp, Artificial Sequence
  Description of Artificial Sequence: Synthetic oligonucleotide
  Target: PCSK9; (-) strand; PAM type: NRG; PAM sequence: CAG
cagaggcgagtggcaaactt

SEQ ID NO: 12396 - DNA, 20 bp, Artificial Sequence
  Description of Artificial Sequence: Synthetic oligonucleotide
  Target: PCSK9; (-) strand; PAM type: NRG; PAM sequence: TGG
gagaaacggacagaggcgag

SEQ ID NO: 12397 - DNA, 20 bp, Artificial Sequence
  Description of Artificial Sequence: Synthetic oligonucleotide
  Target: PCSK9; (-) strand; PAM type: NRG; PAM sequence: GAG
ttagagaaacggacagaggc

SEQ ID NO: 12398 - DNA, 20 bp, Artificial Sequence
  Description of Artificial Sequence: Synthetic oligonucleotide
  Target: PCSK9; (-) strand; PAM type: NRG; PAM sequence: AGG
acccttagagaaacggacag

SEQ ID NO: 12399 - DNA, 20 bp, Artificial Sequence
  Description of Artificial Sequence: Synthetic oligonucleotide
  Target: PCSK9; (-) strand; PAM type: NRG; PAM sequence: GAG
tacccttagagaaacggaca

SEQ ID NO: 12400 - DNA, 20 bp, Artificial Sequence
  Description of Artificial Sequence: Synthetic oligonucleotide
  Target: PCSK9; (-) strand; PAM type: NRG; PAM sequence: CAG
tgtacccttagagaaacgga

SEQ ID NO: 12401 - DNA, 20 bp, Artificial Sequence
  Description of Artificial Sequence: Synthetic oligonucleotide
  Target: PCSK9; (-) strand; PAM type: NRG; PAM sequence: CGG
gaactgtacccttagagaaa

SEQ ID NO: 12402 - DNA, 20 bp, Artificial Sequence
  Description of Artificial Sequence: Synthetic oligonucleotide
  Target: PCSK9; (-) strand; PAM type: NRG; PAM sequence: GAG
agagcagaactgtaccctta

SEQ ID NO: 12403 - DNA, 20 bp, Artificial Sequence
  Description of Artificial Sequence: Synthetic oligonucleotide
  Target: PCSK9; (-) strand; PAM type: NRG; PAM sequence: TAG
taagagcagaactgtaccct

SEQ ID NO: 12404 - DNA, 20 bp, Artificial Sequence
  Description of Artificial Sequence: Synthetic oligonucleotide
  Target: PCSK9; (-) strand; PAM type: NRG; PAM sequence: CAG
gaagggccagcacttaagag

SEQ ID NO: 12405 - DNA, 20 bp, Artificial Sequence
  Description of Artificial Sequence: Synthetic oligonucleotide
  Target: PCSK9; (-) strand; PAM type: NRG; PAM sequence: GAG
atggaagggccagcacttaa

SEQ ID NO: 12406 - DNA, 20 bp, Artificial Sequence
  Description of Artificial Sequence: Synthetic oligonucleotide
  Target: PCSK9; (-) strand; PAM type: NRG; PAM sequence: AAG
agatggaagggccagcactt

SEQ ID NO: 12407 - DNA, 20 bp, Artificial Sequence
  Description of Artificial Sequence: Synthetic oligonucleotide
  Target: PCSK9; (-) strand; PAM type: NRG; PAM sequence: CAG
cactgagaagatggaagggc

SEQ ID NO: 12408 - DNA, 20 bp, Artificial Sequence
  Description of Artificial Sequence: Synthetic oligonucleotide
  Target: PCSK9; (-) strand; PAM type: NRG; PAM sequence: GGG
aacacactgagaagatggaa

SEQ ID NO: 12409 - DNA, 20 bp, Artificial Sequence
  Description of Artificial Sequence: Synthetic oligonucleotide
  Target: PCSK9; (-) strand; PAM type: NRG; PAM sequence: AGG
aaacacactgagaagatgga

SEQ ID NO: 12410 - DNA, 20 bp, Artificial Sequence
  Description of Artificial Sequence: Synthetic oligonucleotide
  Target: PCSK9; (-) strand; PAM type: NRG; PAM sequence: AAG
caaacacactgagaagatgg

SEQ ID NO: 12411 - DNA, 20 bp, Artificial Sequence
  Description of Artificial Sequence: Synthetic oligonucleotide
  Target: PCSK9; (-) strand; PAM type: NRG; PAM sequence: TGG
tgtcaaacacactgagaaga

SEQ ID NO: 12412 - DNA, 20 bp, Artificial Sequence
  Description of Artificial Sequence: Synthetic oligonucleotide
  Target: PCSK9; (-) strand; PAM type: NRG; PAM sequence: AAG
cctttgtcaaacacactgag

SEQ ID NO: 12413 - DNA, 20 bp, Artificial Sequence
  Description of Artificial Sequence: Synthetic oligonucleotide
  Target: PCSK9; (-) strand; PAM type: NRG; PAM sequence: GAG
tggcctttgtcaaacacact

SEQ ID NO: 12414 - DNA, 20 bp, Artificial Sequence
  Description of Artificial Sequence: Synthetic oligonucleotide
  Target: PCSK9; (-) strand; PAM type: NRG; PAM sequence: TGG
gacttgctggaggttggcag

SEQ ID NO: 12415 - DNA, 20 bp, Artificial Sequence
  Description of Artificial Sequence: Synthetic oligonucleotide
  Target: PCSK9; (-) strand; PAM type: NRG; PAM sequence: CAG
tgtgacttgctggaggttgg

SEQ ID NO: 12416 - DNA, 20 bp, Artificial Sequence
  Description of Artificial Sequence: Synthetic oligonucleotide
  Target: PCSK9; (-) strand; PAM type: NRG; PAM sequence: TGG
ttctgtgacttgctggaggt

SEQ ID NO: 12417 - DNA, 20 bp, Artificial Sequence
  Description of Artificial Sequence: Synthetic oligonucleotide
  Target: PCSK9; (-) strand; PAM type: NRG; PAM sequence: AGG
gttattctgtgacttgctgg

SEQ ID NO: 12418 - DNA, 20 bp, Artificial Sequence
  Description of Artificial Sequence: Synthetic oligonucleotide
  Target: PCSK9; (-) strand; PAM type: NRG; PAM sequence: GAG
tgttattctgtgacttgctg

SEQ ID NO: 12419 - DNA, 20 bp, Artificial Sequence
  Description of Artificial Sequence: Synthetic oligonucleotide
  Target: PCSK9; (-) strand; PAM type: NRG; PAM sequence: TGG
attgttattctgtgacttgc

SEQ ID NO: 12420 - DNA, 20 bp, Artificial Sequence
  Description of Artificial Sequence: Synthetic oligonucleotide
  Target: PCSK9; (-) strand; PAM type: NRG; PAM sequence: CAG
agtgagggtttctgtgctgt

SEQ ID NO: 12421 - DNA, 20 bp, Artificial Sequence
  Description of Artificial Sequence: Synthetic oligonucleotide
  Target: PCSK9; (-) strand; PAM type: NRG; PAM sequence: GGG
ttttcattctctggcagtga

SEQ ID NO: 12422 - DNA, 20 bp, Artificial Sequence
  Description of Artificial Sequence: Synthetic oligonucleotide
  Target: PCSK9; (-) strand; PAM type: NRG; PAM sequence: AGG
cttttcattctctggcagtg

SEQ ID NO: 12423 - DNA, 20 bp, Artificial Sequence
  Description of Artificial Sequence: Synthetic oligonucleotide
  Target: PCSK9; (-) strand; PAM type: NRG; PAM sequence: GAG
tcttttcattctctggcagt

SEQ ID NO: 12424 - DNA, 20 bp, Artificial Sequence
  Description of Artificial Sequence: Synthetic oligonucleotide
  Target: PCSK9; (-) strand; PAM type: NRG; PAM sequence: CAG
ccagtcttttcattctctgg

SEQ ID NO: 12425 - DNA, 20 bp, Artificial Sequence
  Description of Artificial Sequence: Synthetic oligonucleotide
  Target: PCSK9; (-) strand; PAM type: NRG; PAM sequence: TGG
ggcccagtcttttcattctc

SEQ ID NO: 12426 - DNA, 20 bp, Artificial Sequence
  Description of Artificial Sequence: Synthetic oligonucleotide
  Target: PCSK9; (-) strand; PAM type: NRG; PAM sequence: CAG
actgtgctctcgccatggcc

SEQ ID NO: 12427 - DNA, 20 bp, Artificial Sequence
  Description of Artificial Sequence: Synthetic oligonucleotide
  Target: PCSK9; (-) strand; PAM type: NRG; PAM sequence: TGG
tcattactgtgctctcgcca

SEQ ID NO: 12428 - DNA, 20 bp, Artificial Sequence
  Description of Artificial Sequence: Synthetic oligonucleotide
  Target: PCSK9; (-) strand; PAM type: NRG; PAM sequence: TGG
tgggcatgtggccaggcaga

SEQ ID NO: 12429 - DNA, 20 bp, Artificial Sequence
  Description of Artificial Sequence: Synthetic oligonucleotide
  Target: PCSK9; (-) strand; PAM type: NRG; PAM sequence: CAG
tgtgtgggcatgtggccagg

SEQ ID NO: 12430 - DNA, 20 bp, Artificial Sequence
  Description of Artificial Sequence: Synthetic oligonucleotide
  Target: PCSK9; (-) strand; PAM type: NRG; PAM sequence: AGG
cattgtgtgggcatgtggcc

SEQ ID NO: 12431 - DNA, 20 bp, Artificial Sequence
  Description of Artificial Sequence: Synthetic oligonucleotide
  Target: PCSK9; (-) strand; PAM type: NRG; PAM sequence: CAG
gcattgtgtgggcatgtggc

SEQ ID NO: 12432 - DNA, 20 bp, Artificial Sequence
  Description of Artificial Sequence: Synthetic oligonucleotide
  Target: PCSK9; (-) strand; PAM type: NRG; PAM sequence: TGG
tgtggcattgtgtgggcatg

SEQ ID NO: 12433 - DNA, 20 bp, Artificial Sequence
  Description of Artificial Sequence: Synthetic oligonucleotide
  Target: PCSK9; (-) strand; PAM type: NRG; PAM sequence: GGG
tggctgctgtggcattgtgt

SEQ ID NO: 12434 - DNA, 20 bp, Artificial Sequence
  Description of Artificial Sequence: Synthetic oligonucleotide
  Target: PCSK9; (-) strand; PAM type: NRG; PAM sequence: TGG
ctggctgctgtggcattgtg

SEQ ID NO: 12435 - DNA, 20 bp, Artificial Sequence
  Description of Artificial Sequence: Synthetic oligonucleotide
  Target: PCSK9; (-) strand; PAM type: NRG; PAM sequence: TGG
aagtgcctgtctggctgctg

SEQ ID NO: 12436 - DNA, 20 bp, Artificial Sequence
  Description of Artificial Sequence: Synthetic oligonucleotide
  Target: PCSK9; (-) strand; PAM type: NRG; PAM sequence: TGG
ccagccctgaagtgcctgtc

SEQ ID NO: 12437 - DNA, 20 bp, Artificial Sequence
  Description of Artificial Sequence: Synthetic oligonucleotide
  Target: PCSK9; (-) strand; PAM type: NRG; PAM sequence: AAG
cagaggcgcagccagccctg

SEQ ID NO: 12438 - DNA, 20 bp, Artificial Sequence
  Description of Artificial Sequence: Synthetic oligonucleotide
  Target: PCSK9; (-) strand; PAM type: NRG; PAM sequence: CAG
ccaagtcacagaggcgcagc

SEQ ID NO: 12439 - DNA, 20 bp, Artificial Sequence
  Description of Artificial Sequence: Synthetic oligonucleotide
  Target: PCSK9; (-) strand; PAM type: NRG; PAM sequence: CAG
tttgccaagtcacagaggcg

SEQ ID NO: 12440 - DNA, 20 bp, Artificial Sequence
  Description of Artificial Sequence: Synthetic oligonucleotide
  Target: PCSK9; (-) strand; PAM type: NRG; PAM sequence: AGG
tcagatttgccaagtcacag

SEQ ID NO: 12441 - DNA, 20 bp, Artificial Sequence
  Description of Artificial Sequence: Synthetic oligonucleotide
  Target: PCSK9; (-) strand; PAM type: NRG; PAM sequence: GAG
gtcagatttgccaagtcaca

SEQ ID NO: 12442 - DNA, 20 bp, Artificial Sequence
  Description of Artificial Sequence: Synthetic oligonucleotide
  Target: PCSK9; (-) strand; PAM type: NRG; PAM sequence: CAG
ctgtcagatttgccaagtca

SEQ ID NO: 12443 - DNA, 20 bp, Artificial Sequence
  Description of Artificial Sequence: Synthetic oligonucleotide
  Target: PCSK9; (-) strand; PAM type: NRG; PAM sequence: AAG
ttttcactgtcagatttgcc

SEQ ID NO: 12444 - DNA, 20 bp, Artificial Sequence
  Description of Artificial Sequence: Synthetic oligonucleotide
  Target: PCSK9; (-) strand; PAM type: NRG; PAM sequence: CAG
aagtgccaggttttcactgt

SEQ ID NO: 12445 - DNA, 20 bp, Artificial Sequence
  Description of Artificial Sequence: Synthetic oligonucleotide
  Target: PCSK9; (-) strand; PAM type: NRG; PAM sequence: AGG
agggagccttaggaagtgcc

SEQ ID NO: 12446 - DNA, 20 bp, Artificial Sequence
  Description of Artificial Sequence: Synthetic oligonucleotide
  Target: PCSK9; (-) strand; PAM type: NRG; PAM sequence: CAG
tagggagccttaggaagtgc

SEQ ID NO: 12447 - DNA, 20 bp, Artificial Sequence
  Description of Artificial Sequence: Synthetic oligonucleotide
  Target: PCSK9; (-) strand; PAM type: NRG; PAM sequence: AAG
cagaactagggagccttagg

SEQ ID NO: 12448 - DNA, 20 bp, Artificial Sequence
  Description of Artificial Sequence: Synthetic oligonucleotide
  Target: PCSK9; (-) strand; PAM type: NRG; PAM sequence: AGG
gcacagaactagggagcctt

SEQ ID NO: 12449 - DNA, 20 bp, Artificial Sequence
  Description of Artificial Sequence: Synthetic oligonucleotide
  Target: PCSK9; (-) strand; PAM type: NRG; PAM sequence: TAG
tgcacagaactagggagcct

SEQ ID NO: 12450 - DNA, 20 bp, Artificial Sequence
  Description of Artificial Sequence: Synthetic oligonucleotide
  Target: PCSK9; (-) strand; PAM type: NRG; PAM sequence: GAG
tcaccatgcacagaactagg

SEQ ID NO: 12451 - DNA, 20 bp, Artificial Sequence
  Description of Artificial Sequence: Synthetic oligonucleotide
  Target: PCSK9; (-) strand; PAM type: NRG; PAM sequence: GGG
tctcaccatgcacagaacta

SEQ ID NO: 12452 - DNA, 20 bp, Artificial Sequence
  Description of Artificial Sequence: Synthetic oligonucleotide
  Target: PCSK9; (-) strand; PAM type: NRG; PAM sequence: AGG
atctcaccatgcacagaact

SEQ ID NO: 12453 - DNA, 20 bp, Artificial Sequence
  Description of Artificial Sequence: Synthetic oligonucleotide
  Target: PCSK9; (-) strand; PAM type: NRG; PAM sequence: TAG
catctcaccatgcacagaac

SEQ ID NO: 12454 - DNA, 20 bp, Artificial Sequence
  Description of Artificial Sequence: Synthetic oligonucleotide
  Target: PCSK9; (-) strand; PAM type: NRG; PAM sequence: CAG
tattttcatctcaccatgca

SEQ ID NO: 12455 - DNA, 20 bp, Artificial Sequence
  Description of Artificial Sequence: Synthetic oligonucleotide
  Target: PCSK9; (-) strand; PAM type: NRG; PAM sequence: AGG
cctgttttgcctttagttac

SEQ ID NO: 12456 - DNA, 20 bp, Artificial Sequence
  Description of Artificial Sequence: Synthetic oligonucleotide
  Target: PCSK9; (-) strand; PAM type: NRG; PAM sequence: CAG
ccctgttttgcctttagtta

SEQ ID NO: 12457 - DNA, 20 bp, Artificial Sequence
  Description of Artificial Sequence: Synthetic oligonucleotide
  Target: PCSK9; (-) strand; PAM type: NRG; PAM sequence: TAG
tttcggccctgttttgcctt

SEQ ID NO: 12458 - DNA, 20 bp, Artificial Sequence
  Description of Artificial Sequence: Synthetic oligonucleotide
  Target: PCSK9; (-) strand; PAM type: NRG; PAM sequence: CGG
ttttgaattgctcacatttt

SEQ ID NO: 12459 - DNA, 20 bp, Artificial Sequence
  Description of Artificial Sequence: Synthetic oligonucleotide
  Target: PCSK9; (-) strand; PAM type: NRG; PAM sequence: AGG
ccttttatggtgtgggggag

SEQ ID NO: 12460 - DNA, 20 bp, Artificial Sequence
  Description of Artificial Sequence: Synthetic oligonucleotide
  Target: PCSK9; (-) strand; PAM type: NRG; PAM sequence: GAG
cccttttatggtgtggggga

SEQ ID NO: 12461 - DNA, 20 bp, Artificial Sequence
  Description of Artificial Sequence: Synthetic oligonucleotide
  Target: PCSK9; (-) strand; PAM type: NRG; PAM sequence: GAG
ctcccttttatggtgtgggg

SEQ ID NO: 12462 - DNA, 20 bp, Artificial Sequence
  Description of Artificial Sequence: Synthetic oligonucleotide
  Target: PCSK9; (-) strand; PAM type: NRG; PAM sequence: GGG
agctcccttttatggtgtgg

SEQ ID NO: 12463 - DNA, 20 bp, Artificial Sequence
  Description of Artificial Sequence: Synthetic oligonucleotide
  Target: PCSK9; (-) strand; PAM type: NRG; PAM sequence: GGG
cagctcccttttatggtgtg

SEQ ID NO: 12464 - DNA, 20 bp, Artificial Sequence
  Description of Artificial Sequence: Synthetic oligonucleotide
  Target: PCSK9; (-) strand; PAM type: NRG; PAM sequence: GGG
ccagctcccttttatggtgt

SEQ ID NO: 12465 - DNA, 20 bp, Artificial Sequence
  Description of Artificial Sequence: Synthetic oligonucleotide
  Target: PCSK9; (-) strand; PAM type: NRG; PAM sequence: TGG
accagctcccttttatggtg

SEQ ID NO: 12466 - DNA, 20 bp, Artificial Sequence
  Description of Artificial Sequence: Synthetic oligonucleotide
  Target: PCSK9; (-) strand; PAM type: NRG; PAM sequence: TGG
tttataccagctccctttta

SEQ ID NO: 12467 - DNA, 20 bp, Artificial Sequence
  Description of Artificial Sequence: Synthetic oligonucleotide
  Target: PCSK9; (-) strand; PAM type: NRG; PAM sequence: CAG
caccattcactcatttatac

SEQ ID NO: 12468 - DNA, 20 bp, Artificial Sequence
  Description of Artificial Sequence: Synthetic oligonucleotide
  Target: PCSK9; (-) strand; PAM type: NRG; PAM sequence: TAG
ttagtcgtatttccaaagta

SEQ ID NO: 12469 - DNA, 20 bp, Artificial Sequence
  Description of Artificial Sequence: Synthetic oligonucleotide
  Target: PCSK9; (-) strand; PAM type: NRG; PAM sequence: AAG
tccatttagtcgtatttcca

SEQ ID NO: 12470 - DNA, 20 bp, Artificial Sequence
  Description of Artificial Sequence: Synthetic oligonucleotide
  Target: PCSK9; (-) strand; PAM type: NRG; PAM sequence: TAG
caattgaataaccatccatt

SEQ ID NO: 12471 - DNA, 20 bp, Artificial Sequence
  Description of Artificial Sequence: Synthetic oligonucleotide
  Target: PCSK9; (-) strand; PAM type: NRG; PAM sequence: AAG
ttttcccagaaataaatata

SEQ ID NO: 12472 - DNA, 20 bp, Artificial Sequence
  Description of Artificial Sequence: Synthetic oligonucleotide
  Target: PCSK9; (-) strand; PAM type: NRG; PAM sequence: CAG
aggtttaagatttattttcc

SEQ ID NO: 12473 - DNA, 20 bp, Artificial Sequence
  Description of Artificial Sequence: Synthetic oligonucleotide
  Target: PCSK9; (-) strand; PAM type: NRG; PAM sequence: AAG
tgaaaagtcagtcaaggttt

SEQ ID NO: 12474 - DNA, 20 bp, Artificial Sequence
  Description of Artificial Sequence: Synthetic oligonucleotide
  Target: PCSK9; (-) strand; PAM type: NRG; PAM sequence: AGG
taacactgaaaagtcagtca

SEQ ID NO: 12475 - DNA, 20 bp, Artificial Sequence
  Description of Artificial Sequence: Synthetic oligonucleotide
  Target: PCSK9; (-) strand; PAM type: NRG; PAM sequence: AAG
ttaacactgaaaagtcagtc

SEQ ID NO: 12476 - DNA, 20 bp, Artificial Sequence
  Description of Artificial Sequence: Synthetic oligonucleotide
  Target: PCSK9; (-) strand; PAM type: NRG; PAM sequence: CAG
actaattaacactgaaaagt

SEQ ID NO: 12477 - DNA, 20 bp, Artificial Sequence
  Description of Artificial Sequence: Synthetic oligonucleotide
  Target: PCSK9; (-) strand; PAM type: NRG; PAM sequence: AAG
catgactaattaacactgaa

SEQ ID NO: 12478 - DNA, 20 bp, Artificial Sequence
  Description of Artificial Sequence: Synthetic oligonucleotide
  Target: PCSK9; (-) strand; PAM type: NRG; PAM sequence: GAG
gtaatgcagagaaggaattt

SEQ ID NO: 12479 - DNA, 20 bp, Artificial Sequence
  Description of Artificial Sequence: Synthetic oligonucleotide
  Target: PCSK9; (-) strand; PAM type: NRG; PAM sequence: AGG
tagttattgtaatgcagaga

SEQ ID NO: 12480 - DNA, 20 bp, Artificial Sequence
  Description of Artificial Sequence: Synthetic oligonucleotide
  Target: PCSK9; (-) strand; PAM type: NRG; PAM sequence: AAG
atagttattgtaatgcagag

SEQ ID NO: 12481 - DNA, 20 bp, Artificial Sequence
  Description of Artificial Sequence: Synthetic oligonucleotide
  Target: PCSK9; (-) strand; PAM type: NRG; PAM sequence: GAG
ttcatagttattgtaatgca

SEQ ID NO: 12482 - DNA, 20 bp, Artificial Sequence
  Description of Artificial Sequence: Synthetic oligonucleotide
  Target: PCSK9; (-) strand; PAM type: NRG; PAM sequence: CAG
gtttcatagttattgtaatg

SEQ ID NO: 12483 - DNA, 20 bp, Artificial Sequence
  Description of Artificial Sequence: Synthetic oligonucleotide
  Target: PCSK9; (-) strand; PAM type: NRG; PAM sequence: TAG
cacactgcttgtgagtttca

SEQ ID NO: 12484 - DNA, 20 bp, Artificial Sequence
  Description of Artificial Sequence: Synthetic oligonucleotide
  Target: PCSK9; (-) strand; PAM type: NRG; PAM sequence: GAG
agttggtacacactgcttgt

SEQ ID NO: 12485 - DNA, 20 bp, Artificial Sequence
  Description of Artificial Sequence: Synthetic oligonucleotide
  Target: PCSK9; (-) strand; PAM type: NRG; PAM sequence: TGG
atgaagttaactatttgagt

SEQ ID NO: 12486 - DNA, 20 bp, Artificial Sequence
  Description of Artificial Sequence: Synthetic oligonucleotide
  Target: PCSK9; (-) strand; PAM type: NRG; PAM sequence: GAG
gtatatgaagttaactattt

SEQ ID NO: 12487 - DNA, 20 bp, Artificial Sequence
  Description of Artificial Sequence: Synthetic oligonucleotide
  Target: PCSK9; (-) strand; PAM type: NRG; PAM sequence: AAG
cttggtattggttgtatatg

SEQ ID NO: 12488 - DNA, 20 bp, Artificial Sequence
  Description of Artificial Sequence: Synthetic oligonucleotide
  Target: PCSK9; (-) strand; PAM type: NRG; PAM sequence: TGG
attactgaaacccttggtat

SEQ ID NO: 12489 - DNA, 20 bp, Artificial Sequence
  Description of Artificial Sequence: Synthetic oligonucleotide
  Target: PCSK9; (-) strand; PAM type: NRG; PAM sequence: TGG
aacataattactgaaaccct

SEQ ID NO: 12490 - DNA, 20 bp, Artificial Sequence
  Description of Artificial Sequence: Synthetic oligonucleotide
  Target: PCSK9; (-) strand; PAM type: NRG; PAM sequence: TAG
gagacatattgaataaactg

SEQ ID NO: 12491 - DNA, 20 bp, Artificial Sequence
  Description of Artificial Sequence: Synthetic oligonucleotide
  Target: PCSK9; (-) strand; PAM type: NRG; PAM sequence: GAG
aattatctttttaatgcttg

SEQ ID NO: 12492 - DNA, 20 bp, Artificial Sequence
  Description of Artificial Sequence: Synthetic oligonucleotide
  Target: PCSK9; (-) strand; PAM type: NRG; PAM sequence: TGG
agaattatctttttaatgct

SEQ ID NO: 12493 - DNA, 20 bp, Artificial Sequence
  Description of Artificial Sequence: Synthetic oligonucleotide
  Target: PCSK9; (-) strand; PAM type: NRG; PAM sequence: CAG
ttttactgagtttaacttca

SEQ ID NO: 12494 - DNA, 20 bp, Artificial Sequence
  Description of Artificial Sequence: Synthetic oligonucleotide
  Target: PCSK9; (-) strand; PAM type: NRG; PAM sequence: GAG
ctttaagatataattttact

SEQ ID NO: 12495 - DNA, 20 bp, Artificial Sequence
  Description of Artificial Sequence: Synthetic oligonucleotide
  Target: PCSK9; (-) strand; PAM type: NRG; PAM sequence: AAG
cagcaaaataaaagcacttt

SEQ ID NO: 12496 - DNA, 20 bp, Artificial Sequence
  Description of Artificial Sequence: Synthetic oligonucleotide
  Target: PCSK9; (-) strand; PAM type: NRG; PAM sequence: AAG
ttttaaaaacagcaaaataa

SEQ ID NO: 12497 - DNA, 20 bp, Artificial Sequence
  Description of Artificial Sequence: Synthetic oligonucleotide
  Target: PCSK9; (-) strand; PAM type: NRG; PAM sequence: CAG
ccccaaacagattttaaaaa

SEQ ID NO: 12498 - DNA, 20 bp, Artificial Sequence
  Description of Artificial Sequence: Synthetic oligonucleotide
  Target: PCSK9; (-) strand; PAM type: NRG; PAM sequence: CAG
gttatgagttgttccccaaa

SEQ ID NO: 12499 - DNA, 20 bp, Artificial Sequence
  Description of Artificial Sequence: Synthetic oligonucleotide
  Target: PCSK9; (-) strand; PAM type: NRG; PAM sequence: GAG
caattacttaaagaagttat

SEQ ID NO: 12500 - DNA, 20 bp, Artificial Sequence
  Description of Artificial Sequence: Synthetic oligonucleotide
  Target: PCSK9; (-) strand; PAM type: NRG; PAM sequence: AAG
ttgacatcaattacttaaag

SEQ ID NO: 12501 - DNA, 20 bp, Artificial Sequence
  Description of Artificial Sequence: Synthetic oligonucleotide
  Target: PCSK9; (-) strand; PAM type: NRG; PAM sequence: AAG
tatttgacatcaattactta

SEQ ID NO: 12502 - DNA, 20 bp, Artificial Sequence
  Description of Artificial Sequence: Synthetic oligonucleotide
  Target: PCSK9; (-) strand; PAM type: NRG; PAM sequence: GGG
ctgtgttctccagaagtaca

SEQ ID NO: 12503 - DNA, 20 bp, Artificial Sequence
  Description of Artificial Sequence: Synthetic oligonucleotide
  Target: PCSK9; (-) strand; PAM type: NRG; PAM sequence: AGG
gctgtgttctccagaagtac

SEQ ID NO: 12504 - DNA, 20 bp, Artificial Sequence
  Description of Artificial Sequence: Synthetic oligonucleotide
  Target: PCSK9; (-) strand; PAM type: NRG; PAM sequence: CAG
tgctgtgttctccagaagta

SEQ ID NO: 12505 - DNA, 20 bp, Artificial Sequence
  Description of Artificial Sequence: Synthetic oligonucleotide
  Target: PCSK9; (-) strand; PAM type: NRG; PAM sequence: AAG
gaaaatgctgtgttctccag

SEQ ID NO: 12506 - DNA, 20 bp, Artificial Sequence
  Description of Artificial Sequence: Synthetic oligonucleotide
  Target: PCSK9; (-) strand; PAM type: NRG; PAM sequence: CAG
tttgaaaatgctgtgttctc

SEQ ID NO: 12507 - DNA, 20 bp, Artificial Sequence
  Description of Artificial Sequence: Synthetic oligonucleotide
  Target: PCSK9; (-) strand; PAM type: NRG; PAM sequence: GAG
tgatataattagattgaaaa

SEQ ID NO: 12508 - DNA, 20 bp, Artificial Sequence
  Description of Artificial Sequence: Synthetic oligonucleotide
  Target: PCSK9; (-) strand; PAM type: NRG; PAM sequence: AAG
tctgatataattagattgaa

SEQ ID NO: 12509 - DNA, 20 bp, Artificial Sequence
  Description of Artificial Sequence: Synthetic oligonucleotide
  Target: PCSK9; (-) strand; PAM type: NRG; PAM sequence: TAG
agatatttttctgatataat

SEQ ID NO: 12510 - DNA, 20 bp, Artificial Sequence
  Description of Artificial Sequence: Synthetic oligonucleotide
  Target: PCSK9; (-) strand; PAM type: NRG; PAM sequence: AAG
tgggaaatactaagctcttg

SEQ ID NO: 12511 - DNA, 20 bp, Artificial Sequence
  Description of Artificial Sequence: Synthetic oligonucleotide
  Target: PCSK9; (-) strand; PAM type: NRG; PAM sequence: AAG
atcaaaaattgggaaatact

SEQ ID NO: 12512 - DNA, 20 bp, Artificial Sequence
  Description of Artificial Sequence: Synthetic oligonucleotide
  Target: PCSK9; (-) strand; PAM type: NRG; PAM sequence: GGG
caggatcaggatcaaaaatt

SEQ ID NO: 12513 - DNA, 20 bp, Artificial Sequence
  Description of Artificial Sequence: Synthetic oligonucleotide
  Target: PCSK9; (-) strand; PAM type: NRG; PAM sequence: TGG
ccaggatcaggatcaaaaat

SEQ ID NO: 12514 - DNA, 20 bp, Artificial Sequence
  Description of Artificial Sequence: Synthetic oligonucleotide
  Target: PCSK9; (-) strand; PAM type: NRG; PAM sequence: AGG
gatgaaaggttaccaggatc

SEQ ID NO: 12515 - DNA, 20 bp, Artificial Sequence
  Description of Artificial Sequence: Synthetic oligonucleotide
  Target: PCSK9; (-) strand; PAM type: NRG; PAM sequence: CAG
tgatgaaaggttaccaggat

SEQ ID NO: 12516 - DNA, 20 bp, Artificial Sequence
  Description of Artificial Sequence: Synthetic oligonucleotide
  Target: PCSK9; (-) strand; PAM type: NRG; PAM sequence: AGG
gatcttgatgaaaggttacc

SEQ ID NO: 12517 - DNA, 20 bp, Artificial Sequence
  Description of Artificial Sequence: Synthetic oligonucleotide
  Target: PCSK9; (-) strand; PAM type: NRG; PAM sequence: CAG
ggatcttgatgaaaggttac

SEQ ID NO: 12518 - DNA, 20 bp, Artificial Sequence
  Description of Artificial Sequence: Synthetic oligonucleotide
  Target: PCSK9; (-) strand; PAM type: NRG; PAM sequence: AGG
taagcttggatcttgatgaa

SEQ ID NO: 12519 - DNA, 20 bp, Artificial Sequence
  Description of Artificial Sequence: Synthetic oligonucleotide
  Target: PCSK9; (-) strand; PAM type: NRG; PAM sequence: AAG
ataagcttggatcttgatga

SEQ ID NO: 12520 - DNA, 20 bp, Artificial Sequence
  Description of Artificial Sequence: Synthetic oligonucleotide
  Target: PCSK9; (-) strand; PAM type: NRG; PAM sequence: TGG
gagaaccctatgcataagct

SEQ ID NO: 12521 - DNA, 20 bp, Artificial Sequence
  Description of Artificial Sequence: Synthetic oligonucleotide
  Target: PCSK9; (-) strand; PAM type: NRG; PAM sequence: AAG
tagatgagaaccctatgcat

SEQ ID NO: 12522 - DNA, 20 bp, Artificial Sequence
  Description of Artificial Sequence: Synthetic oligonucleotide
  Target: PCSK9; (-) strand; PAM type: NRG; PAM sequence: GAG
aatttcagatgggtctagat

SEQ ID NO: 12523 - DNA, 20 bp, Artificial Sequence
  Description of Artificial Sequence: Synthetic oligonucleotide
  Target: PCSK9; (-) strand; PAM type: NRG; PAM sequence: TAG
tatagaatttcagatgggtc

SEQ ID NO: 12524 - DNA, 20 bp, Artificial Sequence
  Description of Artificial Sequence: Synthetic oligonucleotide
  Target: PCSK9; (-) strand; PAM type: NRG; PAM sequence: GGG
atttgtatagaatttcagat

SEQ ID NO: 12525 - DNA, 20 bp, Artificial Sequence
  Description of Artificial Sequence: Synthetic oligonucleotide
  Target: PCSK9; (-) strand; PAM type: NRG; PAM sequence: TGG
tatttgtatagaatttcaga

SEQ ID NO: 12526 - DNA, 20 bp, Artificial Sequence
  Description of Artificial Sequence: Synthetic oligonucleotide
  Target: PCSK9; (-) strand; PAM type: NRG; PAM sequence: CAG
tccctatttgtatagaattt

SEQ ID NO: 12527 - DNA, 20 bp, Artificial Sequence
  Description of Artificial Sequence: Synthetic oligonucleotide
  Target: PCSK9; (-) strand; PAM type: NRG; PAM sequence: TAG
aatatgtctccctatttgta

SEQ ID NO: 12528 - DNA, 20 bp, Artificial Sequence
  Description of Artificial Sequence: Synthetic oligonucleotide
  Target: PCSK9; (-) strand; PAM type: NRG; PAM sequence: CAG
agtaattaagtcaatttaca

SEQ ID NO: 12529 - DNA, 20 bp, Artificial Sequence
  Description of Artificial Sequence: Synthetic oligonucleotide
  Target: PCSK9; (-) strand; PAM type: NRG; PAM sequence: AAG
ttcattgtaaaatagtaatt

SEQ ID NO: 12530 - DNA, 20 bp, Artificial Sequence
  Description of Artificial Sequence: Synthetic oligonucleotide
  Target: PCSK9; (-) strand; PAM type: NRG; PAM sequence: TAG
aattccttttcattgtaaaa

SEQ ID NO: 12531 - DNA, 20 bp, Artificial Sequence
  Description of Artificial Sequence: Synthetic oligonucleotide
  Target: PCSK9; (-) strand; PAM type: NRG; PAM sequence: AAG
atccaatttaaaatgatgta

SEQ ID NO: 12532 - DNA, 20 bp, Artificial Sequence
  Description of Artificial Sequence: Synthetic oligonucleotide
  Target: PCSK9; (-) strand; PAM type: NRG; PAM sequence: AGG
atcttgcagtaatattaaac

SEQ ID NO: 12533 - DNA, 20 bp, Artificial Sequence
  Description of Artificial Sequence: Synthetic oligonucleotide
  Target: PCSK9; (-) strand; PAM type: NRG; PAM sequence: CAG
aatcttgcagtaatattaaa

SEQ ID NO: 12534 - DNA, 20 bp, Artificial Sequence
  Description of Artificial Sequence: Synthetic oligonucleotide
  Target: PCSK9; (-) strand; PAM type: NRG; PAM sequence: CAG
ggggcaaatttttaatcttg

SEQ ID NO: 12535 - DNA, 20 bp, Artificial Sequence
  Description of Artificial Sequence: Synthetic oligonucleotide
  Target: PCSK9; (-) strand; PAM type: NRG; PAM sequence: GGG
agctgcttttagatatgtgg

SEQ ID NO: 12536 - DNA, 20 bp, Artificial Sequence
  Description of Artificial Sequence: Synthetic oligonucleotide
  Target: PCSK9; (-) strand; PAM type: NRG; PAM sequence: GGG
aagctgcttttagatatgtg

SEQ ID NO: 12537 - DNA, 20 bp, Artificial Sequence
  Description of Artificial Sequence: Synthetic oligonucleotide
  Target: PCSK9; (-) strand; PAM type: NRG; PAM sequence: GGG
caagctgcttttagatatgt

SEQ ID NO: 12538 - DNA, 20 bp, Artificial Sequence
  Description of Artificial Sequence: Synthetic oligonucleotide
  Target: PCSK9; (-) strand; PAM type: NRG; PAM sequence: TGG
gcaagctgcttttagatatg

SEQ ID NO: 12539 - DNA, 20 bp, Artificial Sequence
  Description of Artificial Sequence: Synthetic oligonucleotide
  Target: PCSK9; (-) strand; PAM type: NRG; PAM sequence: TAG
aagaaaaagcaagctgcttt

SEQ ID NO: 12540 - DNA, 20 bp, Artificial Sequence
  Description of Artificial Sequence: Synthetic oligonucleotide
  Target: PCSK9; (-) strand; PAM type: NRG; PAM sequence: AAG
tttatattttaagaaaaagc

SEQ ID NO: 12541 - DNA, 20 bp, Artificial Sequence
  Description of Artificial Sequence: Synthetic oligonucleotide
  Target: PCSK9; (-) strand; PAM type: NRG; PAM sequence: AAG
ggtttttatattttaagaaa

SEQ ID NO: 12542 - DNA, 20 bp, Artificial Sequence
  Description of Artificial Sequence: Synthetic oligonucleotide
  Target: PCSK9; (-) strand; PAM type: NRG; PAM sequence: AAG
tcctttggtttttatatttt

SEQ ID NO: 12543 - DNA, 20 bp, Artificial Sequence
  Description of Artificial Sequence: Synthetic oligonucleotide
  Target: PCSK9; (-) strand; PAM type: NRG; PAM sequence: TGG
tgctacaaaagaaattcctt

SEQ ID NO: 12544 - DNA, 20 bp, Artificial Sequence
  Description of Artificial Sequence: Synthetic oligonucleotide
  Target: PCSK9; (-) strand; PAM type: NRG; PAM sequence: AAG
ctttctctacgatgctacaa

SEQ ID NO: 12545 - DNA, 20 bp, Artificial Sequence
  Description of Artificial Sequence: Synthetic oligonucleotide
  Target: PCSK9; (-) strand; PAM type: NRG; PAM sequence: AAG
aacatacaagagtgagcata

SEQ ID NO: 12546 - DNA, 20 bp, Artificial Sequence
  Description of Artificial Sequence: Synthetic oligonucleotide
  Target: PCSK9; (-) strand; PAM type: NRG; PAM sequence: GAG
ttacacgaacatacaagagt

SEQ ID NO: 12547 - DNA, 20 bp, Artificial Sequence
  Description of Artificial Sequence: Synthetic oligonucleotide
  Target: PCSK9; (-) strand; PAM type: NRG; PAM sequence: GAG
tttgttacacgaacatacaa

SEQ ID NO: 12548 - DNA, 20 bp, Artificial Sequence
  Description of Artificial Sequence: Synthetic oligonucleotide
  Target: PCSK9; (-) strand; PAM type: NRG; PAM sequence: AAG
tttttgttacacgaacatac

SEQ ID NO: 12549 - DNA, 20 bp, Artificial Sequence
  Description of Artificial Sequence: Synthetic oligonucleotide
  Target: PCSK9; (-) strand; PAM type: NRG; PAM sequence: CAG
ttcggaaatagagccagtgg

SEQ ID NO: 12550 - DNA, 20 bp, Artificial Sequence
  Description of Artificial Sequence: Synthetic oligonucleotide
  Target: PCSK9; (-) strand; PAM type: NRG; PAM sequence: TGG
attttcggaaatagagccag

SEQ ID NO: 12551 - DNA, 20 bp, Artificial Sequence
  Description of Artificial Sequence: Synthetic oligonucleotide
  Target: PCSK9; (-) strand; PAM type: NRG; PAM sequence: CAG
gagattttcggaaatagagc

SEQ ID NO: 12552 - DNA, 20 bp, Artificial Sequence
  Description of Artificial Sequence: Synthetic oligonucleotide
  Target: PCSK9; (-) strand; PAM type: NRG; PAM sequence: GAG
tgtggagattttcggaaata

SEQ ID NO: 12553 - DNA, 20 bp, Artificial Sequence
  Description of Artificial Sequence: Synthetic oligonucleotide
  Target: PCSK9; (-) strand; PAM type: NRG; PAM sequence: TAG
tctgtggagattttcggaaa

SEQ ID NO: 12554 - DNA, 20 bp, Artificial Sequence
  Description of Artificial Sequence: Synthetic oligonucleotide
  Target: PCSK9; (-) strand; PAM type: NRG; PAM sequence: CGG
cacatttctgtggagatttt

SEQ ID NO: 12555 - DNA, 20 bp, Artificial Sequence
  Description of Artificial Sequence: Synthetic oligonucleotide
  Target: PCSK9; (-) strand; PAM type: NRG; PAM sequence: GAG
tgtggattcacatttctgtg

SEQ ID NO: 12556 - DNA, 20 bp, Artificial Sequence
  Description of Artificial Sequence: Synthetic oligonucleotide
  Target: PCSK9; (-) strand; PAM type: NRG; PAM sequence: TGG
tatgtggattcacatttctg

SEQ ID NO: 12557 - DNA, 20 bp, Artificial Sequence
  Description of Artificial Sequence: Synthetic oligonucleotide
  Target: PCSK9; (-) strand; PAM type: NRG; PAM sequence: TGG
ccgggagcgtggtctatatg

SEQ ID NO: 12558 - DNA, 20 bp, Artificial Sequence
  Description of Artificial Sequence: Synthetic oligonucleotide
  Target: PCSK9; (-) strand; PAM type: NRG; PAM sequence: TGG
gatcagctgtcccgggagcg

SEQ ID NO: 12559 - DNA, 20 bp, Artificial Sequence
  Description of Artificial Sequence: Synthetic oligonucleotide
  Target: PCSK9; (-) strand; PAM type: NRG; PAM sequence: GAG
atgtggatcagctgtcccgg

SEQ ID NO: 12560 - DNA, 20 bp, Artificial Sequence
  Description of Artificial Sequence: Synthetic oligonucleotide
  Target: PCSK9; (-) strand; PAM type: NRG; PAM sequence: GGG
gcatgtggatcagctgtccc

SEQ ID NO: 12561 - DNA, 20 bp, Artificial Sequence
  Description of Artificial Sequence: Synthetic oligonucleotide
  Target: PCSK9; (-) strand; PAM type: NRG; PAM sequence: CGG
ggcatgtggatcagctgtcc

SEQ ID NO: 12562 - DNA, 20 bp, Artificial Sequence
  Description of Artificial Sequence: Synthetic oligonucleotide
  Target: PCSK9; (-) strand; PAM type: NRG; PAM sequence: CAG
gagaactccggcatgtggat

SEQ ID NO: 12563 - DNA, 20 bp, Artificial Sequence
  Description of Artificial Sequence: Synthetic oligonucleotide
  Target: PCSK9; (-) strand; PAM type: NRG; PAM sequence: TGG
agtgggagaactccggcatg

SEQ ID NO: 12564 - DNA, 20 bp, Artificial Sequence
  Description of Artificial Sequence: Synthetic oligonucleotide
  Target: PCSK9; (-) strand; PAM type: NRG; PAM sequence: CGG
gtttggcagtgggagaactc

SEQ ID NO: 12565 - DNA, 20 bp, Artificial Sequence
  Description of Artificial Sequence: Synthetic oligonucleotide
  Target: PCSK9; (-) strand; PAM type: NRG; PAM sequence: GAG
tgggagctgtttggcagtgg

SEQ ID NO: 12566 - DNA, 20 bp, Artificial Sequence
  Description of Artificial Sequence: Synthetic oligonucleotide
  Target: PCSK9; (-) strand; PAM type: NRG; PAM sequence: GGG
tttgggagctgtttggcagt

SEQ ID NO: 12567 - DNA, 20 bp, Artificial Sequence
  Description of Artificial Sequence: Synthetic oligonucleotide
  Target: PCSK9; (-) strand; PAM type: NRG; PAM sequence: TGG
gtttgggagctgtttggcag

SEQ ID NO: 12568 - DNA, 20 bp, Artificial Sequence
  Description of Artificial Sequence: Synthetic oligonucleotide
  Target: PCSK9; (-) strand; PAM type: NRG; PAM sequence: CAG
aaggtttgggagctgtttgg

SEQ ID NO: 12569 - DNA, 20 bp, Artificial Sequence
  Description of Artificial Sequence: Synthetic oligonucleotide
  Target: PCSK9; (-) strand; PAM type: NRG; PAM sequence: TGG
tagaaggtttgggagctgtt

SEQ ID NO: 12570 - DNA, 20 bp, Artificial Sequence
  Description of Artificial Sequence: Synthetic oligonucleotide
  Target: PCSK9; (-) strand; PAM type: NRG; PAM sequence: GAG
taagccactagaaggtttgg

SEQ ID NO: 12571 - DNA, 20 bp, Artificial Sequence
  Description of Artificial Sequence: Synthetic oligonucleotide
  Target: PCSK9; (-) strand; PAM type: NRG; PAM sequence: GGG
tttaagccactagaaggttt

SEQ ID NO: 12572 - DNA, 20 bp, Artificial Sequence
  Description of Artificial Sequence: Synthetic oligonucleotide
  Target: PCSK9; (-) strand; PAM type: NRG; PAM sequence: TGG
ttttaagccactagaaggtt

SEQ ID NO: 12573 - DNA, 20 bp, Artificial Sequence
  Description of Artificial Sequence: Synthetic oligonucleotide
  Target: PCSK9; (-) strand; PAM type: NRG; PAM sequence: AGG
agcatttttaagccactaga

SEQ ID NO: 12574 - DNA, 20 bp, Artificial Sequence
  Description of Artificial Sequence: Synthetic oligonucleotide
  Target: PCSK9; (-) strand; PAM type: NRG; PAM sequence: AAG
aagcatttttaagccactag

SEQ ID NO: 12575 - DNA, 20 bp, Artificial Sequence
  Description of Artificial Sequence: Synthetic oligonucleotide
  Target: PCSK9; (-) strand; PAM type: NRG; PAM sequence: TAG
ggaaagcatttttaagccac

SEQ ID NO: 12576 - DNA, 20 bp, Artificial Sequence
  Description of Artificial Sequence: Synthetic oligonucleotide
  Target: PCSK9; (-) strand; PAM type: NRG; PAM sequence: AAG
ttctcaaggaaagcattttt

SEQ ID NO: 12577 - DNA, 20 bp, Artificial Sequence
  Description of Artificial Sequence: Synthetic oligonucleotide
  Target: PCSK9; (-) strand; PAM type: NRG; PAM sequence: AAG
gatcgtgtatttctcaagga

SEQ ID NO: 12578 - DNA, 20 bp, Artificial Sequence
  Description of Artificial Sequence: Synthetic oligonucleotide
  Target: PCSK9; (-) strand; PAM type: NRG; PAM sequence: AGG
ggcggatcgtgtatttctca

SEQ ID NO: 12579 - DNA, 20 bp, Artificial Sequence
  Description of Artificial Sequence: Synthetic oligonucleotide
  Target: PCSK9; (-) strand; PAM type: NRG; PAM sequence: AAG
gggcggatcgtgtatttctc

SEQ ID NO: 12580 - DNA, 20 bp, Artificial Sequence
  Description of Artificial Sequence: Synthetic oligonucleotide
  Target: PCSK9; (-) strand; PAM type: NRG; PAM sequence: CGG
gaaagctgctgtgacttggg

SEQ ID NO: 12581 - DNA, 20 bp, Artificial Sequence
  Description of Artificial Sequence: Synthetic oligonucleotide
  Target: PCSK9; (-) strand; PAM type: NRG; PAM sequence: GGG
tgggaaagctgctgtgactt

SEQ ID NO: 12582 - DNA, 20 bp, Artificial Sequence
  Description of Artificial Sequence: Synthetic oligonucleotide
  Target: PCSK9; (-) strand; PAM type: NRG; PAM sequence: TGG
ctgggaaagctgctgtgact

SEQ ID NO: 12583 - DNA, 20 bp, Artificial Sequence
  Description of Artificial Sequence: Synthetic oligonucleotide
  Target: PCSK9; (-) strand; PAM type: NRG; PAM sequence: AAG
gcctggagattggactggga

SEQ ID NO: 12584 - DNA, 20 bp, Artificial Sequence
  Description of Artificial Sequence: Synthetic oligonucleotide
  Target: PCSK9; (-) strand; PAM type: NRG; PAM sequence: GGG
aagagcctggagattggact

SEQ ID NO: 12585 - DNA, 20 bp, Artificial Sequence
  Description of Artificial Sequence: Synthetic oligonucleotide
  Target: PCSK9; (-) strand; PAM type: NRG; PAM sequence: TGG
gaagagcctggagattggac

SEQ ID NO: 12586 - DNA, 20 bp, Artificial Sequence
  Description of Artificial Sequence: Synthetic oligonucleotide
  Target: PCSK9; (-) strand; PAM type: NRG; PAM sequence: TGG
ctttggaagagcctggagat

SEQ ID NO: 12587 - DNA, 20 bp, Artificial Sequence
  Description of Artificial Sequence: Synthetic oligonucleotide
  Target: PCSK9; (-) strand; PAM type: NRG; PAM sequence: GAG
gaaccctttggaagagcctg

SEQ ID NO: 12588 - DNA, 20 bp, Artificial Sequence
  Description of Artificial Sequence: Synthetic oligonucleotide
  Target: PCSK9; (-) strand; PAM type: NRG; PAM sequence: TGG
tcgaaccctttggaagagcc

SEQ ID NO: 12589 - DNA, 20 bp, Artificial Sequence
  Description of Artificial Sequence: Synthetic oligonucleotide
  Target: PCSK9; (-) strand; PAM type: NRG; PAM sequence: GAG
gaatctcgaaccctttggaa

SEQ ID NO: 12590 - DNA, 20 bp, Artificial Sequence
  Description of Artificial Sequence: Synthetic oligonucleotide
  Target: PCSK9; (-) strand; PAM type: NRG; PAM sequence: AAG
cagaatctcgaaccctttgg

SEQ ID NO: 12591 - DNA, 20 bp, Artificial Sequence
  Description of Artificial Sequence: Synthetic oligonucleotide
  Target: PCSK9; (-) strand; PAM type: NRG; PAM sequence: TGG
aatcagaatctcgaaccctt

SEQ ID NO: 12592 - DNA, 20 bp, Artificial Sequence
  Description of Artificial Sequence: Synthetic oligonucleotide
  Target: PCSK9; (-) strand; PAM type: NRG; PAM sequence: CAG
gctcagcaccttcttggaat

SEQ ID NO: 12593 - DNA, 20 bp, Artificial Sequence
  Description of Artificial Sequence: Synthetic oligonucleotide
  Target: PCSK9; (-) strand; PAM type: NRG; PAM sequence: TGG
ctggatgctcagcaccttct

SEQ ID NO: 12594 - DNA, 20 bp, Artificial Sequence
  Description of Artificial Sequence: Synthetic oligonucleotide
  Target: PCSK9; (-) strand; PAM type: NRG; PAM sequence: CAG
aagacacaatactggatgct

SEQ ID NO: 12595 - DNA, 20 bp, Artificial Sequence
  Description of Artificial Sequence: Synthetic oligonucleotide
  Target: PCSK9; (-) strand; PAM type: NRG; PAM sequence: TGG
gaggagtcaagacacaatac

SEQ ID NO: 12596 - DNA, 20 bp, Artificial Sequence
  Description of Artificial Sequence: Synthetic oligonucleotide
  Target: PCSK9; (-) strand; PAM type: NRG; PAM sequence: AAG
tgcccagcctgagaggagtc

SEQ ID NO: 12597 - DNA, 20 bp, Artificial Sequence
  Description of Artificial Sequence: Synthetic oligonucleotide
  Target: PCSK9; (-) strand; PAM type: NRG; PAM sequence: GAG
gaacatgcccagcctgagag

SEQ ID NO: 12598 - DNA, 20 bp, Artificial Sequence
  Description of Artificial Sequence: Synthetic oligonucleotide
  Target: PCSK9; (-) strand; PAM type: NRG; PAM sequence: AGG
aggaacatgcccagcctgag

SEQ ID NO: 12599 - DNA, 20 bp, Artificial Sequence
  Description of Artificial Sequence: Synthetic oligonucleotide
  Target: PCSK9; (-) strand; PAM type: NRG; PAM sequence: GAG
gaggaacatgcccagcctga

SEQ ID NO: 12600 - DNA, 20 bp, Artificial Sequence
  Description of Artificial Sequence: Synthetic oligonucleotide
  Target: PCSK9; (-) strand; PAM type: NRG; PAM sequence: GAG
tagaggaacatgcccagcct

SEQ ID NO: 12601 - DNA, 20 bp, Artificial Sequence
  Description of Artificial Sequence: Synthetic oligonucleotide
  Target: PCSK9; (-) strand; PAM type: NRG; PAM sequence: CAG
gatccctagaggaacatgcc

SEQ ID NO: 12602 - DNA, 20 bp, Artificial Sequence
  Description of Artificial Sequence: Synthetic oligonucleotide
  Target: PCSK9; (-) strand; PAM type: NRG; PAM sequence: AGG
ttgatgatgttgatccctag

SEQ ID NO: 12603 - DNA, 20 bp, Artificial Sequence
  Description of Artificial Sequence: Synthetic oligonucleotide
  Target: PCSK9; (-) strand; PAM type: NRG; PAM sequence: GAG
cttgatgatgttgatcccta

SEQ ID NO: 12604 - DNA, 20 bp, Artificial Sequence
  Description of Artificial Sequence: Synthetic oligonucleotide
  Target: PCSK9; (-) strand; PAM type: NRG; PAM sequence: TAG
accttgatgatgttgatccc

SEQ ID NO: 12605 - DNA, 20 bp, Artificial Sequence
  Description of Artificial Sequence: Synthetic oligonucleotide
  Target: PCSK9; (-) strand; PAM type: NRG; PAM sequence: AAG
atgatgattggtgagttgag

SEQ ID NO: 12606 - DNA, 20 bp, Artificial Sequence
  Description of Artificial Sequence: Synthetic oligonucleotide
  Target: PCSK9; (-) strand; PAM type: NRG; PAM sequence: GAG
cccatgatgattggtgagtt

SEQ ID NO: 12607 - DNA, 20 bp, Artificial Sequence
  Description of Artificial Sequence: Synthetic oligonucleotide
  Target: PCSK9; (-) strand; PAM type: NRG; PAM sequence: GAG
aatctcccatgatgattggt

SEQ ID NO: 12608 - DNA, 20 bp, Artificial Sequence
  Description of Artificial Sequence: Synthetic oligonucleotide
  Target: PCSK9; (-) strand; PAM type: NRG; PAM sequence: TGG
tcagaatctcccatgatgat

SEQ ID NO: 12609 - DNA, 20 bp, Artificial Sequence
  Description of Artificial Sequence: Synthetic oligonucleotide
  Target: PCSK9; (-) strand; PAM type: NRG; PAM sequence: CAG
cttttcttttctgcagggtt

SEQ ID NO: 12610 - DNA, 20 bp, Artificial Sequence
  Description of Artificial Sequence: Synthetic oligonucleotide
  Target: PCSK9; (-) strand; PAM type: NRG; PAM sequence: GGG
acttccttttcttttctgca

SEQ ID NO: 12611 - DNA, 20 bp, Artificial Sequence
  Description of Artificial Sequence: Synthetic oligonucleotide
  Target: PCSK9; (-) strand; PAM type: NRG; PAM sequence: AGG
aacttccttttcttttctgc

SEQ ID NO: 12612 - DNA, 20 bp, Artificial Sequence
  Description of Artificial Sequence: Synthetic oligonucleotide
  Target: PCSK9; (-) strand; PAM type: NRG; PAM sequence: CAG
taacttccttttcttttctg

SEQ ID NO: 12613 - DNA, 20 bp, Artificial Sequence
  Description of Artificial Sequence: Synthetic oligonucleotide
  Target: PCSK9; (-) strand; PAM type: NRG; PAM sequence: TAG
ttgcagaacacaagtcagca

SEQ ID NO: 12614 - DNA, 20 bp, Artificial Sequence
  Description of Artificial Sequence: Synthetic oligonucleotide
  Target: PCSK9; (-) strand; PAM type: NRG; PAM sequence: CAG
ttaaattgcagaacacaagt

SEQ ID NO: 12615 - DNA, 20 bp, Artificial Sequence
  Description of Artificial Sequence: Synthetic oligonucleotide
  Target: PCSK9; (-) strand; PAM type: NRG; PAM sequence: AAG
atgtttaaattgcagaacac

SEQ ID NO: 12616 - DNA, 20 bp, Artificial Sequence
  Description of Artificial Sequence: Synthetic oligonucleotide
  Target: PCSK9; (-) strand; PAM type: NRG; PAM sequence: CAG
atgaagacatgtttaaattg

SEQ ID NO: 12617 - DNA, 20 bp, Artificial Sequence
  Description of Artificial Sequence: Synthetic oligonucleotide
  Target: PCSK9; (-) strand; PAM type: NRG; PAM sequence: AAG
ttgcattaagttgccagatg

SEQ ID NO: 12618 - DNA, 20 bp, Artificial Sequence
  Description of Artificial Sequence: Synthetic oligonucleotide
  Target: PCSK9; (-) strand; PAM type: NRG; PAM sequence: CAG
taaacattgcattaagttgc

SEQ ID NO: 12619 - DNA, 20 bp, Artificial Sequence
  Description of Artificial Sequence: Synthetic oligonucleotide
  Target: PCSK9; (-) strand; PAM type: NRG; PAM sequence: AAG
cctttgataaacattgcatt

SEQ ID NO: 12620 - DNA, 20 bp, Artificial Sequence
  Description of Artificial Sequence: Synthetic oligonucleotide
  Target: PCSK9; (-) strand; PAM type: NRG; PAM sequence: TAG
ttgtcaaatattagatgtaa

SEQ ID NO: 12621 - DNA, 20 bp, Artificial Sequence
  Description of Artificial Sequence: Synthetic oligonucleotide
  Target: PCSK9; (-) strand; PAM type: NRG; PAM sequence: TAG
aatcatgaattgtcaaatat

SEQ ID NO: 12622 - DNA, 20 bp, Artificial Sequence
  Description of Artificial Sequence: Synthetic oligonucleotide
  Target: PCSK9; (-) strand; PAM type: NRG; PAM sequence: TAG
tcactgactaaatgagatca

SEQ ID NO: 12623 - DNA, 20 bp, Artificial Sequence
  Description of Artificial Sequence: Synthetic oligonucleotide
  Target: PCSK9; (-) strand; PAM type: NRG; PAM sequence: GAG
ggttgtttcactgactaaat

SEQ ID NO: 12624 - DNA, 20 bp, Artificial Sequence
  Description of Artificial Sequence: Synthetic oligonucleotide
  Target: PCSK9; (-) strand; PAM type: NRG; PAM sequence: GGG
gtgactttagacaagtcgct

SEQ ID NO: 12625 - DNA, 20 bp, Artificial Sequence
  Description of Artificial Sequence: Synthetic oligonucleotide
  Target: PCSK9; (-) strand; PAM type: NRG; PAM sequence: TGG
tgtgactttagacaagtcgc

SEQ ID NO: 12626 - DNA, 20 bp, Artificial Sequence
  Description of Artificial Sequence: Synthetic oligonucleotide
  Target: PCSK9; (-) strand; PAM type: NRG; PAM sequence: AAG
gtagcattgtgactttagac

SEQ ID NO: 12627 - DNA, 20 bp, Artificial Sequence
  Description of Artificial Sequence: Synthetic oligonucleotide
  Target: PCSK9; (-) strand; PAM type: NRG; PAM sequence: TAG
gcagagtagcattgtgactt

SEQ ID NO: 12628 - DNA, 20 bp, Artificial Sequence
  Description of Artificial Sequence: Synthetic oligonucleotide
  Target: PCSK9; (-) strand; PAM type: NRG; PAM sequence: TAG
gttctcacatgggtgcagag

SEQ ID NO: 12629 - DNA, 20 bp, Artificial Sequence
  Description of Artificial Sequence: Synthetic oligonucleotide
  Target: PCSK9; (-) strand; PAM type: NRG; PAM sequence: GAG
tgcgttctcacatgggtgca

SEQ ID NO: 12630 - DNA, 20 bp, Artificial Sequence
  Description of Artificial Sequence: Synthetic oligonucleotide
  Target: PCSK9; (-) strand; PAM type: NRG; PAM sequence: CAG
tctgcgttctcacatgggtg

SEQ ID NO: 12631 - DNA, 20 bp, Artificial Sequence
  Description of Artificial Sequence: Synthetic oligonucleotide
  Target: PCSK9; (-) strand; PAM type: NRG; PAM sequence: GGG
actgctctgcgttctcacat

SEQ ID NO: 12632 - DNA, 20 bp, Artificial Sequence
  Description of Artificial Sequence: Synthetic oligonucleotide
  Target: PCSK9; (-) strand; PAM type: NRG; PAM sequence: TGG
cactgctctgcgttctcaca

SEQ ID NO: 12633 - DNA, 20 bp, Artificial Sequence
  Description of Artificial Sequence: Synthetic oligonucleotide
  Target: PCSK9; (-) strand; PAM type: NRG; PAM sequence: CAG
atggccatcaatgcctctcc

SEQ ID NO: 12634 - DNA, 20 bp, Artificial Sequence
  Description of Artificial Sequence: Synthetic oligonucleotide
  Target: PCSK9; (-) strand; PAM type: NRG; PAM sequence: TGG
ccaacgtgaagcgggcacaa

SEQ ID NO: 12635 - DNA, 20 bp, Artificial Sequence
  Description of Artificial Sequence: Synthetic oligonucleotide
  Target: PCSK9; (-) strand; PAM type: NRG; PAM sequence: GGG
cacagtgcccaacgtgaagc

SEQ ID NO: 12636 - DNA, 20 bp, Artificial Sequence
  Description of Artificial Sequence: Synthetic oligonucleotide
  Target: PCSK9; (-) strand; PAM type: NRG; PAM sequence: CGG
acacagtgcccaacgtgaag

SEQ ID NO: 12637 - DNA, 20 bp, Artificial Sequence
  Description of Artificial Sequence: Synthetic oligonucleotide
  Target: PCSK9; (-) strand; PAM type: NRG; PAM sequence: AAG
ctcacacagtgcccaacgtg

SEQ ID NO: 12638 - DNA, 20 bp, Artificial Sequence
  Description of Artificial Sequence: Synthetic oligonucleotide
  Target: PCSK9; (-) strand; PAM type: NRG; PAM sequence: CAG
gcagggcagggaggctcaca

SEQ ID NO: 12639 - DNA, 20 bp, Artificial Sequence
  Description of Artificial Sequence: Synthetic oligonucleotide
  Target: PCSK9; (-) strand; PAM type: NRG; PAM sequence: AGG
ttggcaggtgcagggcaggg

SEQ ID NO: 12640 - DNA, 20 bp, Artificial Sequence
  Description of Artificial Sequence: Synthetic oligonucleotide
  Target: PCSK9; (-) strand; PAM type: NRG; PAM sequence: GAG
tttggcaggtgcagggcagg

SEQ ID NO: 12641 - DNA, 20 bp, Artificial Sequence
  Description of Artificial Sequence: Synthetic oligonucleotide
  Target: PCSK9; (-) strand; PAM type: NRG; PAM sequence: GGG
tatttggcaggtgcagggca

SEQ ID NO: 12642 - DNA, 20 bp, Artificial Sequence
  Description of Artificial Sequence: Synthetic oligonucleotide
  Target: PCSK9; (-) strand; PAM type: NRG; PAM sequence: AGG
atatttggcaggtgcagggc

SEQ ID NO: 12643 - DNA, 20 bp, Artificial Sequence
  Description of Artificial Sequence: Synthetic oligonucleotide
  Target: PCSK9; (-) strand; PAM type: NRG; PAM sequence: CAG
catatttggcaggtgcaggg

SEQ ID NO: 12644 - DNA, 20 bp, Artificial Sequence
  Description of Artificial Sequence: Synthetic oligonucleotide
  Target: PCSK9; (-) strand; PAM type: NRG; PAM sequence: GGG
gcccatatttggcaggtgca

SEQ ID NO: 12645 - DNA, 20 bp, Artificial Sequence
  Description of Artificial Sequence: Synthetic oligonucleotide
  Target: PCSK9; (-) strand; PAM type: NRG; PAM sequence: AGG
agcccatatttggcaggtgc

SEQ ID NO: 12646 - DNA, 20 bp, Artificial Sequence
  Description of Artificial Sequence: Synthetic oligonucleotide
  Target: PCSK9; (-) strand; PAM type: NRG; PAM sequence: CAG
gagcccatatttggcaggtg

SEQ ID NO: 12647 - DNA, 20 bp, Artificial Sequence
  Description of Artificial Sequence: Synthetic oligonucleotide
  Target: PCSK9; (-) strand; PAM type: NRG; PAM sequence: AGG
acccagagcccatatttggc

SEQ ID NO: 12648 - DNA, 20 bp, Artificial Sequence
  Description of Artificial Sequence: Synthetic oligonucleotide
  Target: PCSK9; (-) strand; PAM type: NRG; PAM sequence: CAG
gacccagagcccatatttgg

SEQ ID NO: 12649 - DNA, 20 bp, Artificial Sequence
  Description of Artificial Sequence: Synthetic oligonucleotide
  Target: PCSK9; (-) strand; PAM type: NRG; PAM sequence: TGG
agtgacccagagcccatatt

SEQ ID NO: 12650 - DNA, 20 bp, Artificial Sequence
  Description of Artificial Sequence: Synthetic oligonucleotide
  Target: PCSK9; (-) strand; PAM type: NRG; PAM sequence: GAG
tcagacccaggagtgaccca

SEQ ID NO: 12651 - DNA, 20 bp, Artificial Sequence
  Description of Artificial Sequence: Synthetic oligonucleotide
  Target: PCSK9; (-) strand; PAM type: NRG; PAM sequence: CAG
cttcagacccaggagtgacc

SEQ ID NO: 12652 - DNA, 20 bp, Artificial Sequence
  Description of Artificial Sequence: Synthetic oligonucleotide
  Target: PCSK9; (-) strand; PAM type: NRG; PAM sequence: GAG
gaggtagccttcagacccag

SEQ ID NO: 12653 - DNA, 20 bp, Artificial Sequence
  Description of Artificial Sequence: Synthetic oligonucleotide
  Target: PCSK9; (-) strand; PAM type: NRG; PAM sequence: AGG
cagaggtagccttcagaccc

SEQ ID NO: 12654 - DNA, 20 bp, Artificial Sequence
  Description of Artificial Sequence: Synthetic oligonucleotide
  Target: PCSK9; (-) strand; PAM type: NRG; PAM sequence: CAG
acagaggtagccttcagacc

SEQ ID NO: 12655 - DNA, 20 bp, Artificial Sequence
  Description of Artificial Sequence: Synthetic oligonucleotide
  Target: PCSK9; (-) strand; PAM type: NRG; PAM sequence: CAG
atggtaacagaggtagcctt

SEQ ID NO: 12656 - DNA, 20 bp, Artificial Sequence
  Description of Artificial Sequence: Synthetic oligonucleotide
  Target: PCSK9; (-) strand; PAM type: NRG; PAM sequence: TAG
cacacagatggtaacagagg

SEQ ID NO: 12657 - DNA, 20 bp, Artificial Sequence
  Description of Artificial Sequence: Synthetic oligonucleotide
  Target: PCSK9; (-) strand; PAM type: NRG; PAM sequence: AGG
ggccacacagatggtaacag

SEQ ID NO: 12658 - DNA, 20 bp, Artificial Sequence
  Description of Artificial Sequence: Synthetic oligonucleotide
  Target: PCSK9; (-) strand; PAM type: NRG; PAM sequence: GAG
aggccacacagatggtaaca

SEQ ID NO: 12659 - DNA, 20 bp, Artificial Sequence
  Description of Artificial Sequence: Synthetic oligonucleotide
  Target: PCSK9; (-) strand; PAM type: NRG; PAM sequence: CAG
aaaggccacacagatggtaa

SEQ ID NO: 12660 - DNA, 20 bp, Artificial Sequence
  Description of Artificial Sequence: Synthetic oligonucleotide
  Target: PCSK9; (-) strand; PAM type: NRG; PAM sequence: TGG
taagccaaaggccacacaga

SEQ ID NO: 12661 - DNA, 20 bp, Artificial Sequence
  Description of Artificial Sequence: Synthetic oligonucleotide
  Target: PCSK9; (-) strand; PAM type: NRG; PAM sequence: CAG
tgtgtaagccaaaggccaca

SEQ ID NO: 12662 - DNA, 20 bp, Artificial Sequence
  Description of Artificial Sequence: Synthetic oligonucleotide
  Target: PCSK9; (-) strand; PAM type: NRG; PAM sequence: AGG
tcgccaagtgtgtaagccaa

SEQ ID NO: 12663 - DNA, 20 bp, Artificial Sequence
  Description of Artificial Sequence: Synthetic oligonucleotide
  Target: PCSK9; (-) strand; PAM type: NRG; PAM sequence: AAG
ttcgccaagtgtgtaagcca

SEQ ID NO: 12664 - DNA, 20 bp, Artificial Sequence
  Description of Artificial Sequence: Synthetic oligonucleotide
  Target: PCSK9; (-) strand; PAM type: NRG; PAM sequence: AAG
gaacgattcgccaagtgtgt

SEQ ID NO: 12665 - DNA, 20 bp, Artificial Sequence
  Description of Artificial Sequence: Synthetic oligonucleotide
  Target: PCSK9; (-) strand; PAM type: NRG; PAM sequence: AAG
agtattcagaacgattcgcc

SEQ ID NO: 12666 - DNA, 20 bp, Artificial Sequence
  Description of Artificial Sequence: Synthetic oligonucleotide
  Target: PCSK9; (-) strand; PAM type: NRG; PAM sequence: CAG
catggcacacggtgagtatt

SEQ ID NO: 12667 - DNA, 20 bp, Artificial Sequence
  Description of Artificial Sequence: Synthetic oligonucleotide
  Target: PCSK9; (-) strand; PAM type: NRG; PAM sequence: GAG
tcagccccatggcacacggt

SEQ ID NO: 12668 - DNA, 20 bp, Artificial Sequence
  Description of Artificial Sequence: Synthetic oligonucleotide
  Target: PCSK9; (-) strand; PAM type: NRG; PAM sequence: CGG
tagatcagccccatggcaca

SEQ ID NO: 12669 - DNA, 20 bp, Artificial Sequence
  Description of Artificial Sequence: Synthetic oligonucleotide
  Target: PCSK9; (-) strand; PAM type: NRG; PAM sequence: TGG
ctccaactagatcagcccca

SEQ ID NO: 12670 - DNA, 20 bp, Artificial Sequence
  Description of Artificial Sequence: Synthetic oligonucleotide
  Target: PCSK9; (-) strand; PAM type: NRG; PAM sequence: CAG
caccccagctccaactagat

SEQ ID NO: 12671 - DNA, 20 bp, Artificial Sequence
  Description of Artificial Sequence: Synthetic oligonucleotide
  Target: PCSK9; (-) strand; PAM type: NRG; PAM sequence: TAG
ctccccaccccagctccaac

SEQ ID NO: 12672 - DNA, 20 bp, Artificial Sequence
  Description of Artificial Sequence: Synthetic oligonucleotide
  Target: PCSK9; (-) strand; PAM type: NRG; PAM sequence: CAG
gtccttgctcctccccaccc

SEQ ID NO: 12673 - DNA, 20 bp, Artificial Sequence
  Description of Artificial Sequence: Synthetic oligonucleotide
  Target: PCSK9; (-) strand; PAM type: NRG; PAM sequence: GAG
gcttaggttgtcactttaga

SEQ ID NO: 12674 - DNA, 20 bp, Artificial Sequence
  Description of Artificial Sequence: Synthetic oligonucleotide
  Target: PCSK9; (-) strand; PAM type: NRG; PAM sequence: GAG
cagcttaggttgtcacttta

SEQ ID NO: 12675 - DNA, 20 bp, Artificial Sequence
  Description of Artificial Sequence: Synthetic oligonucleotide
  Target: PCSK9; (-) strand; PAM type: NRG; PAM sequence: TAG
ctcagcttaggttgtcactt

SEQ ID NO: 12676 - DNA, 20 bp, Artificial Sequence
  Description of Artificial Sequence: Synthetic oligonucleotide
  Target: PCSK9; (-) strand; PAM type: NRG; PAM sequence: AGG
ccccaactctcactcagctt

SEQ ID NO: 12677 - DNA, 20 bp, Artificial Sequence
  Description of Artificial Sequence: Synthetic oligonucleotide
  Target: PCSK9; (-) strand; PAM type: NRG; PAM sequence: TAG
cccccaactctcactcagct

SEQ ID NO: 12678 - DNA, 20 bp, Artificial Sequence
  Description of Artificial Sequence: Synthetic oligonucleotide
  Target: PCSK9; (-) strand; PAM type: NRG; PAM sequence: CAG
actcacccccaactctcact

SEQ ID NO: 12679 - DNA, 20 bp, Artificial Sequence
  Description of Artificial Sequence: Synthetic oligonucleotide
  Target: PCSK9; (-) strand; PAM type: NRG; PAM sequence: GGG
actctcttccttccacctca

SEQ ID NO: 12680 - DNA, 20 bp, Artificial Sequence
  Description of Artificial Sequence: Synthetic oligonucleotide
  Target: PCSK9; (-) strand; PAM type: NRG; PAM sequence: AGG
tactctcttccttccacctc

SEQ ID NO: 12681 - DNA, 20 bp, Artificial Sequence
  Description of Artificial Sequence: Synthetic oligonucleotide
  Target: PCSK9; (-) strand; PAM type: NRG; PAM sequence: CAG
gtactctcttccttccacct

SEQ ID NO: 12682 - DNA, 20 bp, Artificial Sequence
  Description of Artificial Sequence: Synthetic oligonucleotide
  Target: PCSK9; (-) strand; PAM type: NRG; PAM sequence: TGG
caggcataagcgactgtgcc

SEQ ID NO: 12683 - DNA, 20 bp, Artificial Sequence
  Description of Artificial Sequence: Synthetic oligonucleotide
  Target: PCSK9; (-) strand; PAM type: NRG; PAM sequence: AAG
gtagctgggattacaggcat

SEQ ID NO: 12684 - DNA, 20 bp, Artificial Sequence
  Description of Artificial Sequence: Synthetic oligonucleotide
  Target: PCSK9; (-) strand; PAM type: NRG; PAM sequence: AGG
tcccaagtagctgggattac

SEQ ID NO: 12685 - DNA, 20 bp, Artificial Sequence
  Description of Artificial Sequence: Synthetic oligonucleotide
  Target: PCSK9; (-) strand; PAM type: NRG; PAM sequence: CAG
ctcccaagtagctgggatta

SEQ ID NO: 12686 - DNA, 20 bp, Artificial Sequence
  Description of Artificial Sequence: Synthetic oligonucleotide
  Target: PCSK9; (-) strand; PAM type: NRG; PAM sequence: GGG
cctcagcctcccaagtagct

SEQ ID NO: 12687 - DNA, 20 bp, Artificial Sequence
  Description of Artificial Sequence: Synthetic oligonucleotide
  Target: PCSK9; (-) strand; PAM type: NRG; PAM sequence: TGG
gcctcagcctcccaagtagc

SEQ ID NO: 12688 - DNA, 20 bp, Artificial Sequence
  Description of Artificial Sequence: Synthetic oligonucleotide
  Target: PCSK9; (-) strand; PAM type: NRG; PAM sequence: TAG
ccttgcctcagcctcccaag

SEQ ID NO: 12689 - DNA, 20 bp, Artificial Sequence
  Description of Artificial Sequence: Synthetic oligonucleotide
  Target: PCSK9; (-) strand; PAM type: NRG; PAM sequence: AAG
tctccttgcctcagcctccc

SEQ ID NO: 12690 - DNA, 20 bp, Artificial Sequence
  Description of Artificial Sequence: Synthetic oligonucleotide
  Target: PCSK9; (-) strand; PAM type: NRG; PAM sequence: CAG
tccagcgattctccttgcct

SEQ ID NO: 12691 - DNA, 20 bp, Artificial Sequence
  Description of Artificial Sequence: Synthetic oligonucleotide
  Target: PCSK9; (-) strand; PAM type: NRG; PAM sequence: CAG
tacctccttctcccaggttc

SEQ ID NO: 12692 - DNA, 20 bp, Artificial Sequence
  Description of Artificial Sequence: Synthetic oligonucleotide
  Target: PCSK9; (-) strand; PAM type: NRG; PAM sequence: AGG
cactgctacctccttctccc

SEQ ID NO: 12693 - DNA, 20 bp, Artificial Sequence
  Description of Artificial Sequence: Synthetic oligonucleotide
  Target: PCSK9; (-) strand; PAM type: NRG; PAM sequence: CAG
tcactgctacctccttctcc

SEQ ID NO: 12694 - DNA, 20 bp, Artificial Sequence
  Description of Artificial Sequence: Synthetic oligonucleotide
  Target: PCSK9; (+) strand; PAM type: NRG; PAM sequence: CAG
taaatcttatgttgtttatg

SEQ ID NO: 12695 - DNA, 20 bp, Artificial Sequence
  Description of Artificial Sequence: Synthetic oligonucleotide
  Target: PCSK9; (+) strand; PAM type: NRG; PAM sequence: GAG
aatcttatgttgtttatgca

SEQ ID NO: 12696 - DNA, 20 bp, Artificial Sequence
  Description of Artificial Sequence: Synthetic oligonucleotide
  Target: PCSK9; (+) strand; PAM type: NRG; PAM sequence: TGG
atgtaaccactttattgaaa

SEQ ID NO: 12697 - DNA, 20 bp, Artificial Sequence
  Description of Artificial Sequence: Synthetic oligonucleotide
  Target: PCSK9; (+) strand; PAM type: NRG; PAM sequence: GGG
tgtaaccactttattgaaat

SEQ ID NO: 12698 - DNA, 20 bp, Artificial Sequence
  Description of Artificial Sequence: Synthetic oligonucleotide
  Target: PCSK9; (+) strand; PAM type: NRG; PAM sequence: AAG
gatcataacatgctgtttaa

SEQ ID NO: 12699 - DNA, 20 bp, Artificial Sequence
  Description of Artificial Sequence: Synthetic oligonucleotide
  Target: PCSK9; (+) strand; PAM type: NRG; PAM sequence: TGG
tgtttaaaagttattgatgt

SEQ ID NO: 12700 - DNA, 20 bp, Artificial Sequence
  Description of Artificial Sequence: Synthetic oligonucleotide
  Target: PCSK9; (+) strand; PAM type: NRG; PAM sequence: CAG
ctccatttatttctttttac

SEQ ID NO: 12701 - DNA, 20 bp, Artificial Sequence
  Description of Artificial Sequence: Synthetic oligonucleotide
  Target: PCSK9; (+) strand; PAM type: NRG; PAM sequence: CAG
caaatatcccaccatatgaa

SEQ ID NO: 12702 - DNA, 20 bp, Artificial Sequence
  Description of Artificial Sequence: Synthetic oligonucleotide
  Target: PCSK9; (+) strand; PAM type: NRG; PAM sequence: TGG
tccctccattgatgaatgtt

SEQ ID NO: 12703 - DNA, 20 bp, Artificial Sequence
  Description of Artificial Sequence: Synthetic oligonucleotide
  Target: PCSK9; (+) strand; PAM type: NRG; PAM sequence: TGG
tgtttggattgctgaacccc

SEQ ID NO: 12704 - DNA, 20 bp, Artificial Sequence
  Description of Artificial Sequence: Synthetic oligonucleotide
  Target: PCSK9; (+) strand; PAM type: NRG; PAM sequence: AAG
ttggattgctgaacccctgg

SEQ ID NO: 12705 - DNA, 20 bp, Artificial Sequence
  Description of Artificial Sequence: Synthetic oligonucleotide
  Target: PCSK9; (+) strand; PAM type: NRG; PAM sequence: AAG
acccctggaagaaattcaat

SEQ ID NO: 12706 - DNA, 20 bp, Artificial Sequence
  Description of Artificial Sequence: Synthetic oligonucleotide
  Target: PCSK9; (+) strand; PAM type: NRG; PAM sequence: GAG
ccctggaagaaattcaataa

SEQ ID NO: 12707 - DNA, 20 bp, Artificial Sequence
  Description of Artificial Sequence: Synthetic oligonucleotide
  Target: PCSK9; (+) strand; PAM type: NRG; PAM sequence: CAG
agaaattcaataagagcaaa

SEQ ID NO: 12708 - DNA, 20 bp, Artificial Sequence
  Description of Artificial Sequence: Synthetic oligonucleotide
  Target: PCSK9; (+) strand; PAM type: NRG; PAM sequence: AAG
aattcaataagagcaaacag

SEQ ID NO: 12709 - DNA, 20 bp, Artificial Sequence
  Description of Artificial Sequence: Synthetic oligonucleotide
  Target: PCSK9; (+) strand; PAM type: NRG; PAM sequence: TGG
aagtgtaatatatgacaccc

SEQ ID NO: 12710 - DNA, 20 bp, Artificial Sequence
  Description of Artificial Sequence: Synthetic oligonucleotide
  Target: PCSK9; (+) strand; PAM type: NRG; PAM sequence: CAG
tgtaatatatgacaccctgg

SEQ ID NO: 12711 - DNA, 20 bp, Artificial Sequence
  Description of Artificial Sequence: Synthetic oligonucleotide
  Target: PCSK9; (+) strand; PAM type: NRG; PAM sequence: AAG
tatgacaccctggcagatca

SEQ ID NO: 12712 - DNA, 20 bp, Artificial Sequence
  Description of Artificial Sequence: Synthetic oligonucleotide
  Target: PCSK9; (+) strand; PAM type: NRG; PAM sequence: GAG
acaccctggcagatcaaagt

SEQ ID NO: 12713 - DNA, 20 bp, Artificial Sequence
  Description of Artificial Sequence: Synthetic oligonucleotide
  Target: PCSK9; (+) strand; PAM type: NRG; PAM sequence: GAG
accctggcagatcaaagtga

SEQ ID NO: 12714 - DNA, 20 bp, Artificial Sequence
  Description of Artificial Sequence: Synthetic oligonucleotide
  Target: PCSK9; (+) strand; PAM type: NRG; PAM sequence: TAG
gatcaaagtgagagttttat

SEQ ID NO: 12715 - DNA, 20 bp, Artificial Sequence
  Description of Artificial Sequence: Synthetic oligonucleotide
  Target: PCSK9; (+) strand; PAM type: NRG; PAM sequence: GAG
tcaaagtgagagttttatta

SEQ ID NO: 12716 - DNA, 20 bp, Artificial Sequence
  Description of Artificial Sequence: Synthetic oligonucleotide
  Target: PCSK9; (+) strand; PAM type: NRG; PAM sequence: AGG
caaagtgagagttttattag

SEQ ID NO: 12717 - DNA, 20 bp, Artificial Sequence
  Description of Artificial Sequence: Synthetic oligonucleotide
  Target: PCSK9; (+) strand; PAM type: NRG; PAM sequence: GAG
aagtgagagttttattagag

SEQ ID NO: 12718 - DNA, 20 bp, Artificial Sequence
  Description of Artificial Sequence: Synthetic oligonucleotide
  Target: PCSK9; (+) strand; PAM type: NRG; PAM sequence: CAG
gagagttttattagaggaga

SEQ ID NO: 12719 - DNA, 20 bp, Artificial Sequence
  Description of Artificial Sequence: Synthetic oligonucleotide
  Target: PCSK9; (+) strand; PAM type: NRG; PAM sequence: AAG
ttttattagaggagacagta

SEQ ID NO: 12720 - DNA, 20 bp, Artificial Sequence
  Description of Artificial Sequence: Synthetic oligonucleotide
  Target: PCSK9; (+) strand; PAM type: NRG; PAM sequence: TGG
attagaggagacagtaaagc

SEQ ID NO: 12721 - DNA, 20 bp, Artificial Sequence
  Description of Artificial Sequence: Synthetic oligonucleotide
  Target: PCSK9; (+) strand; PAM type: NRG; PAM sequence: TGG
agaggagacagtaaagctgg

SEQ ID NO: 12722 - DNA, 20 bp, Artificial Sequence
  Description of Artificial Sequence: Synthetic oligonucleotide
  Target: PCSK9; (+) strand; PAM type: NRG; PAM sequence: GAG
aggagacagtaaagctggtg

SEQ ID NO: 12723 - DNA, 20 bp, Artificial Sequence
  Description of Artificial Sequence: Synthetic oligonucleotide
  Target: PCSK9; (+) strand; PAM type: NRG; PAM sequence: CGG
agacagtaaagctggtggag

SEQ ID NO: 12724 - DNA, 20 bp, Artificial Sequence
  Description of Artificial Sequence: Synthetic oligonucleotide
  Target: PCSK9; (+) strand; PAM type: NRG; PAM sequence: GGG
gacagtaaagctggtggagc

SEQ ID NO: 12725 - DNA, 20 bp, Artificial Sequence
  Description of Artificial Sequence: Synthetic oligonucleotide
  Target: PCSK9; (+) strand; PAM type: NRG; PAM sequence: GGG
acagtaaagctggtggagcg

SEQ ID NO: 12726 - DNA, 20 bp, Artificial Sequence
  Description of Artificial Sequence: Synthetic oligonucleotide
  Target: PCSK9; (+) strand; PAM type: NRG; PAM sequence: GAG
agtaaagctggtggagcggg

SEQ ID NO: 12727 - DNA, 20 bp, Artificial Sequence
  Description of Artificial Sequence: Synthetic oligonucleotide
  Target: PCSK9; (+) strand; PAM type: NRG; PAM sequence: GAG
taaagctggtggagcgggga

SEQ ID NO: 12728 - DNA, 20 bp, Artificial Sequence
  Description of Artificial Sequence: Synthetic oligonucleotide
  Target: PCSK9; (+) strand; PAM type: NRG; PAM sequence: AAG
ctggtggagcggggagagct

SEQ ID NO: 12729 - DNA, 20 bp, Artificial Sequence
  Description of Artificial Sequence: Synthetic oligonucleotide
  Target: PCSK9; (+) strand; PAM type: NRG; PAM sequence: CAG
ctaagtgaatcaacatgttg

SEQ ID NO: 12730 - DNA, 20 bp, Artificial Sequence
  Description of Artificial Sequence: Synthetic oligonucleotide
  Target: PCSK9; (+) strand; PAM type: NRG; PAM sequence: CGG
gtgaatcaacatgttgcagt

SEQ ID NO: 12731 - DNA, 20 bp, Artificial Sequence
  Description of Artificial Sequence: Synthetic oligonucleotide
  Target: PCSK9; (+) strand; PAM type: NRG; PAM sequence: GAG
gaatcaacatgttgcagtcg

SEQ ID NO: 12732 - DNA, 20 bp, Artificial Sequence
  Description of Artificial Sequence: Synthetic oligonucleotide
  Target: PCSK9; (+) strand; PAM type: NRG; PAM sequence: CAG
caacatgttgcagtcggagc

SEQ ID NO: 12733 - DNA, 20 bp, Artificial Sequence
  Description of Artificial Sequence: Synthetic oligonucleotide
  Target: PCSK9; (+) strand; PAM type: NRG; PAM sequence: AGG
aacatgttgcagtcggagcc

SEQ ID NO: 12734 - DNA, 20 bp, Artificial Sequence
  Description of Artificial Sequence: Synthetic oligonucleotide
  Target: PCSK9; (+) strand; PAM type: NRG; PAM sequence: AAG
gccaggactcataccacccc

SEQ ID NO: 12735 - DNA, 20 bp, Artificial Sequence
  Description of Artificial Sequence: Synthetic oligonucleotide
  Target: PCSK9; (+) strand; PAM type: NRG; PAM sequence: GAG
caggactcataccaccccaa

SEQ ID NO: 12736 - DNA, 20 bp, Artificial Sequence
  Description of Artificial Sequence: Synthetic oligonucleotide
  Target: PCSK9; (+) strand; PAM type: NRG; PAM sequence: AGG
aggactcataccaccccaag

SEQ ID NO: 12737 - DNA, 20 bp, Artificial Sequence
  Description of Artificial Sequence: Synthetic oligonucleotide
  Target: PCSK9; (+) strand; PAM type: NRG; PAM sequence: CAG
actcataccaccccaagagg

SEQ ID NO: 12738 - DNA, 20 bp, Artificial Sequence
  Description of Artificial Sequence: Synthetic oligonucleotide
  Target: PCSK9; (+) strand; PAM type: NRG; PAM sequence: AGG
ctcataccaccccaagaggc

SEQ ID NO: 12739 - DNA, 20 bp, Artificial Sequence
  Description of Artificial Sequence: Synthetic oligonucleotide
  Target: PCSK9; (+) strand; PAM type: NRG; PAM sequence: GAG
cataccaccccaagaggcag

SEQ ID NO: 12740 - DNA, 20 bp, Artificial Sequence
  Description of Artificial Sequence: Synthetic oligonucleotide
  Target: PCSK9; (+) strand; PAM type: NRG; PAM sequence: AGG
ataccaccccaagaggcagg

SEQ ID NO: 12741 - DNA, 20 bp, Artificial Sequence
  Description of Artificial Sequence: Synthetic oligonucleotide
  Target: PCSK9; (+) strand; PAM type: NRG; PAM sequence: CAG
ccaccccaagaggcaggagg

SEQ ID NO: 12742 - DNA, 20 bp, Artificial Sequence
  Description of Artificial Sequence: Synthetic oligonucleotide
  Target: PCSK9; (+) strand; PAM type: NRG; PAM sequence: CAG
ccaagaggcaggaggcagcg

SEQ ID NO: 12743 - DNA, 20 bp, Artificial Sequence
  Description of Artificial Sequence: Synthetic oligonucleotide
  Target: PCSK9; (+) strand; PAM type: NRG; PAM sequence: CAG
gaggcaggaggcagcgcagc

SEQ ID NO: 12744 - DNA, 20 bp, Artificial Sequence
  Description of Artificial Sequence: Synthetic oligonucleotide
  Target: PCSK9; (+) strand; PAM type: NRG; PAM sequence: AAG
gcaggaggcagcgcagccag

SEQ ID NO: 12745 - DNA, 20 bp, Artificial Sequence
  Description of Artificial Sequence: Synthetic oligonucleotide
  Target: PCSK9; (+) strand; PAM type: NRG; PAM sequence: AGG
caggaggcagcgcagccaga

SEQ ID NO: 12746 - DNA, 20 bp, Artificial Sequence
  Description of Artificial Sequence: Synthetic oligonucleotide
  Target: PCSK9; (+) strand; PAM type: NRG; PAM sequence: GGG
aggaggcagcgcagccagaa

SEQ ID NO: 12747 - DNA, 20 bp, Artificial Sequence
  Description of Artificial Sequence: Synthetic oligonucleotide
  Target: PCSK9; (+) strand; PAM type: NRG; PAM sequence: GAG
agcgcagccagaagggcact

SEQ ID NO: 12748 - DNA, 20 bp, Artificial Sequence
  Description of Artificial Sequence: Synthetic oligonucleotide
  Target: PCSK9; (+) strand; PAM type: NRG; PAM sequence: AGG
gcgcagccagaagggcactg

SEQ ID NO: 12749 - DNA, 20 bp, Artificial Sequence
  Description of Artificial Sequence: Synthetic oligonucleotide
  Target: PCSK9; (+) strand; PAM type: NRG; PAM sequence: GAG
gcagccagaagggcactgag

SEQ ID NO: 12750 - DNA, 20 bp, Artificial Sequence
  Description of Artificial Sequence: Synthetic oligonucleotide
  Target: PCSK9; (+) strand; PAM type: NRG; PAM sequence: TGG
agaagggcactgaggagcca

SEQ ID NO: 12751 - DNA, 20 bp, Artificial Sequence
  Description of Artificial Sequence: Synthetic oligonucleotide
  Target: PCSK9; (+) strand; PAM type: NRG; PAM sequence: CAG
gcactgaggagccatggcca

SEQ ID NO: 12752 - DNA, 20 bp, Artificial Sequence
  Description of Artificial Sequence: Synthetic oligonucleotide
  Target: PCSK9; (+) strand; PAM type: NRG; PAM sequence: TGG
gccatggccacagctccctg

SEQ ID NO: 12753 - DNA, 20 bp, Artificial Sequence
  Description of Artificial Sequence: Synthetic oligonucleotide
  Target: PCSK9; (+) strand; PAM type: NRG; PAM sequence: CAG
ccacagctccctgtggctcc

SEQ ID NO: 12754 - DNA, 20 bp, Artificial Sequence
  Description of Artificial Sequence: Synthetic oligonucleotide
  Target: PCSK9; (+) strand; PAM type: NRG; PAM sequence: CAG
cagctccctgtggctcccag

SEQ ID NO: 12755 - DNA, 20 bp, Artificial Sequence
  Description of Artificial Sequence: Synthetic oligonucleotide
  Target: PCSK9; (+) strand; PAM type: NRG; PAM sequence: CGG
ctccctgtggctcccagcag

SEQ ID NO: 12756 - DNA, 20 bp, Artificial Sequence
  Description of Artificial Sequence: Synthetic oligonucleotide
  Target: PCSK9; (+) strand; PAM type: NRG; PAM sequence: GGG
tccctgtggctcccagcagc

SEQ ID NO: 12757 - DNA, 20 bp, Artificial Sequence
  Description of Artificial Sequence: Synthetic oligonucleotide
  Target: PCSK9; (+) strand; PAM type: NRG; PAM sequence: CAG
gtggctcccagcagcgggac

SEQ ID NO: 12758 - DNA, 20 bp, Artificial Sequence
  Description of Artificial Sequence: Synthetic oligonucleotide
  Target: PCSK9; (+) strand; PAM type: NRG; PAM sequence: TGG
ttcccaccccaccacatgtc

SEQ ID NO: 12759 - DNA, 20 bp, Artificial Sequence
  Description of Artificial Sequence: Synthetic oligonucleotide
  Target: PCSK9; (+) strand; PAM type: NRG; PAM sequence: GGG
tcccaccccaccacatgtct

SEQ ID NO: 12760 - DNA, 20 bp, Artificial Sequence
  Description of Artificial Sequence: Synthetic oligonucleotide
  Target: PCSK9; (+) strand; PAM type: NRG; PAM sequence: CAG
tgggcttcctataccctgtt

SEQ ID NO: 12761 - DNA, 20 bp, Artificial Sequence
  Description of Artificial Sequence: Synthetic oligonucleotide
  Target: PCSK9; (+) strand; PAM type: NRG; PAM sequence: GAG
taccctgttcagtctttact

SEQ ID NO: 12762 - DNA, 20 bp, Artificial Sequence
  Description of Artificial Sequence: Synthetic oligonucleotide
  Target: PCSK9; (+) strand; PAM type: NRG; PAM sequence: CAG
ctgttcagtctttactgagt

SEQ ID NO: 12763 - DNA, 20 bp, Artificial Sequence
  Description of Artificial Sequence: Synthetic oligonucleotide
  Target: PCSK9; (+) strand; PAM type: NRG; PAM sequence: AAG
ttcagtctttactgagtcag

SEQ ID NO: 12764 - DNA, 20 bp, Artificial Sequence
  Description of Artificial Sequence: Synthetic oligonucleotide
  Target: PCSK9; (+) strand; PAM type: NRG; PAM sequence: AAG
actgagtcagaagctgtttt

SEQ ID NO: 12765 - DNA, 20 bp, Artificial Sequence
  Description of Artificial Sequence: Synthetic oligonucleotide
  Target: PCSK9; (+) strand; PAM type: NRG; PAM sequence: GAG
tgagtcagaagctgttttaa

SEQ ID NO: 12766 - DNA, 20 bp, Artificial Sequence
  Description of Artificial Sequence: Synthetic oligonucleotide
  Target: PCSK9; (+) strand; PAM type: NRG; PAM sequence: GAG
cagaagctgttttaagagct

SEQ ID NO: 12767 - DNA, 20 bp, Artificial Sequence
  Description of Artificial Sequence: Synthetic oligonucleotide
  Target: PCSK9; (+) strand; PAM type: NRG; PAM sequence: CAG
agctgagcacacccatttta

SEQ ID NO: 12768 - DNA, 20 bp, Artificial Sequence
  Description of Artificial Sequence: Synthetic oligonucleotide
  Target: PCSK9; (+) strand; PAM type: NRG; PAM sequence: CAG
tgagcacacccattttacag

SEQ ID NO: 12769 - DNA, 20 bp, Artificial Sequence
  Description of Artificial Sequence: Synthetic oligonucleotide
  Target: PCSK9; (+) strand; PAM type: NRG; PAM sequence: GAG
agcacacccattttacagca

SEQ ID NO: 12770 - DNA, 20 bp, Artificial Sequence
  Description of Artificial Sequence: Synthetic oligonucleotide
  Target: PCSK9; (+) strand; PAM type: NRG; PAM sequence: CGG
ttttacagcagagcttctta

SEQ ID NO: 12771 - DNA, 20 bp, Artificial Sequence
  Description of Artificial Sequence: Synthetic oligonucleotide
  Target: PCSK9; (+) strand; PAM type: NRG; PAM sequence: AAG
cagcagagcttcttacggaa

SEQ ID NO: 12772 - DNA, 20 bp, Artificial Sequence
  Description of Artificial Sequence: Synthetic oligonucleotide
  Target: PCSK9; (+) strand; PAM type: NRG; PAM sequence: TGG
ggaaaagcgtgctgctgtcc

SEQ ID NO: 12773 - DNA, 20 bp, Artificial Sequence
  Description of Artificial Sequence: Synthetic oligonucleotide
  Target: PCSK9; (+) strand; PAM type: NRG; PAM sequence: TGG
cctggaccctttgtccatcc

SEQ ID NO: 12774 - DNA, 20 bp, Artificial Sequence
  Description of Artificial Sequence: Synthetic oligonucleotide
  Target: PCSK9; (+) strand; PAM type: NRG; PAM sequence: GGG
ctggaccctttgtccatcct

SEQ ID NO: 12775 - DNA, 20 bp, Artificial Sequence
  Description of Artificial Sequence: Synthetic oligonucleotide
  Target: PCSK9; (+) strand; PAM type: NRG; PAM sequence: TGG
ctttgtccatcctgggccat

SEQ ID NO: 12776 - DNA, 20 bp, Artificial Sequence
  Description of Artificial Sequence: Synthetic oligonucleotide
  Target: PCSK9; (+) strand; PAM type: NRG; PAM sequence: GGG
tttgtccatcctgggccatt

SEQ ID NO: 12777 - DNA, 20 bp, Artificial Sequence
  Description of Artificial Sequence: Synthetic oligonucleotide
  Target: PCSK9; (+) strand; PAM type: NRG; PAM sequence: CAG
tccatcctgggccattgggc

SEQ ID NO: 12778 - DNA, 20 bp, Artificial Sequence
  Description of Artificial Sequence: Synthetic oligonucleotide
  Target: PCSK9; (+) strand; PAM type: NRG; PAM sequence: CAG
ctgggccattgggccagctc

SEQ ID NO: 12779 - DNA, 20 bp, Artificial Sequence
  Description of Artificial Sequence: Synthetic oligonucleotide
  Target: PCSK9; (+) strand; PAM type: NRG; PAM sequence: TGG
gctccagcctcatccttgaa

SEQ ID NO: 12780 - DNA, 20 bp, Artificial Sequence
  Description of Artificial Sequence: Synthetic oligonucleotide
  Target: PCSK9; (+) strand; PAM type: NRG; PAM sequence: TGG
ccagcctcatccttgaatgg

SEQ ID NO: 12781 - DNA, 20 bp, Artificial Sequence
  Description of Artificial Sequence: Synthetic oligonucleotide
  Target: PCSK9; (+) strand; PAM type: NRG; PAM sequence: GGG
cagcctcatccttgaatggt

SEQ ID NO: 12782 - DNA, 20 bp, Artificial Sequence
  Description of Artificial Sequence: Synthetic oligonucleotide
  Target: PCSK9; (+) strand; PAM type: NRG; PAM sequence: TGG
gaatggtgggtgtacatcgc

SEQ ID NO: 12783 - DNA, 20 bp, Artificial Sequence
  Description of Artificial Sequence: Synthetic oligonucleotide
  Target: PCSK9; (+) strand; PAM type: NRG; PAM sequence: GGG
aatggtgggtgtacatcgct

SEQ ID NO: 12784 - DNA, 20 bp, Artificial Sequence
  Description of Artificial Sequence: Synthetic oligonucleotide
  Target: PCSK9; (+) strand; PAM type: NRG; PAM sequence: GGG
atggtgggtgtacatcgctg

SEQ ID NO: 12785 - DNA, 20 bp, Artificial Sequence
  Description of Artificial Sequence: Synthetic oligonucleotide
  Target: PCSK9; (+) strand; PAM type: NRG; PAM sequence: TAG
tacatcgctggggtccttgc

SEQ ID NO: 12786 - DNA, 20 bp, Artificial Sequence
  Description of Artificial Sequence: Synthetic oligonucleotide
  Target: PCSK9; (+) strand; PAM type: NRG; PAM sequence: TAG
gggtccttgctagattatat

SEQ ID NO: 12787 - DNA, 20 bp, Artificial Sequence
  Description of Artificial Sequence: Synthetic oligonucleotide
  Target: PCSK9; (+) strand; PAM type: NRG; PAM sequence: AGG
ggtccttgctagattatatt

SEQ ID NO: 12788 - DNA, 20 bp, Artificial Sequence
  Description of Artificial Sequence: Synthetic oligonucleotide
  Target: PCSK9; (+) strand; PAM type: NRG; PAM sequence: GGG
gtccttgctagattatatta

SEQ ID NO: 12789 - DNA, 20 bp, Artificial Sequence
  Description of Artificial Sequence: Synthetic oligonucleotide
  Target: PCSK9; (+) strand; PAM type: NRG; PAM sequence: TAG
attagggcctccacacactt

SEQ ID NO: 12790 - DNA, 20 bp, Artificial Sequence
  Description of Artificial Sequence: Synthetic oligonucleotide
  Target: PCSK9; (+) strand; PAM type: NRG; PAM sequence: TAG
cacaatgatttctatatcat

SEQ ID NO: 12791 - DNA, 20 bp, Artificial Sequence
  Description of Artificial Sequence: Synthetic oligonucleotide
  Target: PCSK9; (+) strand; PAM type: NRG; PAM sequence: TAG
cacttgcctaattatttcct

SEQ ID NO: 12792 - DNA, 20 bp, Artificial Sequence
  Description of Artificial Sequence: Synthetic oligonucleotide
  Target: PCSK9; (+) strand; PAM type: NRG; PAM sequence: AGG
acttgcctaattatttcctt

SEQ ID NO: 12793 - DNA, 20 bp, Artificial Sequence
  Description of Artificial Sequence: Synthetic oligonucleotide
  Target: PCSK9; (+) strand; PAM type: NRG; PAM sequence: AAG
tttccttaggataaattcct

SEQ ID NO: 12794 - DNA, 20 bp, Artificial Sequence
  Description of Artificial Sequence: Synthetic oligonucleotide
  Target: PCSK9; (+) strand; PAM type: NRG; PAM sequence: TAG
taaattcctaagaaatcaaa

SEQ ID NO: 12795 - DNA, 20 bp, Artificial Sequence
  Description of Artificial Sequence: Synthetic oligonucleotide
  Target: PCSK9; (+) strand; PAM type: NRG; PAM sequence: TAG
ttcctaagaaatcaaatagc

SEQ ID NO: 12796 - DNA, 20 bp, Artificial Sequence
  Description of Artificial Sequence: Synthetic oligonucleotide
  Target: PCSK9; (+) strand; PAM type: NRG; PAM sequence: AGG
tcctaagaaatcaaatagct

SEQ ID NO: 12797 - DNA, 20 bp, Artificial Sequence
  Description of Artificial Sequence: Synthetic oligonucleotide
  Target: PCSK9; (+) strand; PAM type: NRG; PAM sequence: CAG
aagaaatcaaatagctaggt

SEQ ID NO: 12798 - DNA, 20 bp, Artificial Sequence
  Description of Artificial Sequence: Synthetic oligonucleotide
  Target: PCSK9; (+) strand; PAM type: NRG; PAM sequence: TAG
caaatagctaggtcagtata

SEQ ID NO: 12799 - DNA, 20 bp, Artificial Sequence
  Description of Artificial Sequence: Synthetic oligonucleotide
  Target: PCSK9; (+) strand; PAM type: NRG; PAM sequence: CAG
cagtatatagcacattttca

SEQ ID NO: 12800 - DNA, 20 bp, Artificial Sequence
  Description of Artificial Sequence: Synthetic oligonucleotide
  Target: PCSK9; (+) strand; PAM type: NRG; PAM sequence: TAG
tttcacagtttgctactgac

SEQ ID NO: 12801 - DNA, 20 bp, Artificial Sequence
  Description of Artificial Sequence: Synthetic oligonucleotide
  Target: PCSK9; (+) strand; PAM type: NRG; PAM sequence: GAG
tcacagtttgctactgacta

SEQ ID NO: 12802 - DNA, 20 bp, Artificial Sequence
  Description of Artificial Sequence: Synthetic oligonucleotide
  Target: PCSK9; (+) strand; PAM type: NRG; PAM sequence: AAG
gctactgactagagatatta

SEQ ID NO: 12803 - DNA, 20 bp, Artificial Sequence
  Description of Artificial Sequence: Synthetic oligonucleotide
  Target: PCSK9; (+) strand; PAM type: NRG; PAM sequence: AGG
ctactgactagagatattaa

SEQ ID NO: 12804 - DNA, 20 bp, Artificial Sequence
  Description of Artificial Sequence: Synthetic oligonucleotide
  Target: PCSK9; (+) strand; PAM type: NRG; PAM sequence: CAG
agatattaaaggtacaaaaa

SEQ ID NO: 12805 - DNA, 20 bp, Artificial Sequence
  Description of Artificial Sequence: Synthetic oligonucleotide
  Target: PCSK9; (+) strand; PAM type: NRG; PAM sequence: CAG
attaaaggtacaaaaacagc

SEQ ID NO: 12806 - DNA, 20 bp, Artificial Sequence
  Description of Artificial Sequence: Synthetic oligonucleotide
  Target: PCSK9; (+) strand; PAM type: NRG; PAM sequence: TAG
ggtacaaaaacagccagaat

SEQ ID NO: 12807 - DNA, 20 bp, Artificial Sequence
  Description of Artificial Sequence: Synthetic oligonucleotide
  Target: PCSK9; (+) strand; PAM type: NRG; PAM sequence: TAG
aaaacagccagaattagatg

SEQ ID NO: 12808 - DNA, 20 bp, Artificial Sequence
  Description of Artificial Sequence: Synthetic oligonucleotide
  Target: PCSK9; (+) strand; PAM type: NRG; PAM sequence: GAG
aacagccagaattagatgta

SEQ ID NO: 12809 - DNA, 20 bp, Artificial Sequence
  Description of Artificial Sequence: Synthetic oligonucleotide
  Target: PCSK9; (+) strand; PAM type: NRG; PAM sequence: AAG
agaattagatgtagagtcgc

SEQ ID NO: 12810 - DNA, 20 bp, Artificial Sequence
  Description of Artificial Sequence: Synthetic oligonucleotide
  Target: PCSK9; (+) strand; PAM type: NRG; PAM sequence: AGG
gaattagatgtagagtcgca

SEQ ID NO: 12811 - DNA, 20 bp, Artificial Sequence
  Description of Artificial Sequence: Synthetic oligonucleotide
  Target: PCSK9; (+) strand; PAM type: NRG; PAM sequence: GGG
aattagatgtagagtcgcaa

SEQ ID NO: 12812 - DNA, 20 bp, Artificial Sequence
  Description of Artificial Sequence: Synthetic oligonucleotide
  Target: PCSK9; (+) strand; PAM type: NRG; PAM sequence: GAG
ttagatgtagagtcgcaagg

SEQ ID NO: 12813 - DNA, 20 bp, Artificial Sequence
  Description of Artificial Sequence: Synthetic oligonucleotide
  Target: PCSK9; (+) strand; PAM type: NRG; PAM sequence: AAG
cgcaagggagttttgttact

SEQ ID NO: 12814 - DNA, 20 bp, Artificial Sequence
  Description of Artificial Sequence: Synthetic oligonucleotide
  Target: PCSK9; (+) strand; PAM type: NRG; PAM sequence: CAG
actaagacgtcatttctaat

SEQ ID NO: 12815 - DNA, 20 bp, Artificial Sequence
  Description of Artificial Sequence: Synthetic oligonucleotide
  Target: PCSK9; (+) strand; PAM type: NRG; PAM sequence: AGG
ctaagacgtcatttctaatc

SEQ ID NO: 12816 - DNA, 20 bp, Artificial Sequence
  Description of Artificial Sequence: Synthetic oligonucleotide
  Target: PCSK9; (+) strand; PAM type: NRG; PAM sequence: GGG
taagacgtcatttctaatca

SEQ ID NO: 12817 - DNA, 20 bp, Artificial Sequence
  Description of Artificial Sequence: Synthetic oligonucleotide
  Target: PCSK9; (+) strand; PAM type: NRG; PAM sequence: GAG
agacgtcatttctaatcagg

SEQ ID NO: 12818 - DNA, 20 bp, Artificial Sequence
  Description of Artificial Sequence: Synthetic oligonucleotide
  Target: PCSK9; (+) strand; PAM type: NRG; PAM sequence: GAG
tctaatcagggagaaaaaat

SEQ ID NO: 12819 - DNA, 20 bp, Artificial Sequence
  Description of Artificial Sequence: Synthetic oligonucleotide
  Target: PCSK9; (+) strand; PAM type: NRG; PAM sequence: CGG
cagggagaaaaaatgagtta

SEQ ID NO: 12820 - DNA, 20 bp, Artificial Sequence
  Description of Artificial Sequence: Synthetic oligonucleotide
  Target: PCSK9; (+) strand; PAM type: NRG; PAM sequence: CGG
aaaatgagttacggaataaa

SEQ ID NO: 12821 - DNA, 20 bp, Artificial Sequence
  Description of Artificial Sequence: Synthetic oligonucleotide
  Target: PCSK9; (+) strand; PAM type: NRG; PAM sequence: TGG
agttacggaataaacggtat

SEQ ID NO: 12822 - DNA, 20 bp, Artificial Sequence
  Description of Artificial Sequence: Synthetic oligonucleotide
  Target: PCSK9; (+) strand; PAM type: NRG; PAM sequence: TAG
aataaacggtattggaacaa

SEQ ID NO: 12823 - DNA, 20 bp, Artificial Sequence
  Description of Artificial Sequence: Synthetic oligonucleotide
  Target: PCSK9; (+) strand; PAM type: NRG; PAM sequence: AGG
ataaacggtattggaacaat

SEQ ID NO: 12824 - DNA, 20 bp, Artificial Sequence
  Description of Artificial Sequence: Synthetic oligonucleotide
  Target: PCSK9; (+) strand; PAM type: NRG; PAM sequence: TAG
acggtattggaacaataggc

SEQ ID NO: 12825 - DNA, 20 bp, Artificial Sequence
  Description of Artificial Sequence: Synthetic oligonucleotide
  Target: PCSK9; (+) strand; PAM type: NRG; PAM sequence: TGG
ggaacaataggctagccttc

SEQ ID NO: 12826 - DNA, 20 bp, Artificial Sequence
  Description of Artificial Sequence: Synthetic oligonucleotide
  Target: PCSK9; (+) strand; PAM type: NRG; PAM sequence: GAG
aacaataggctagccttctg

SEQ ID NO: 12827 - DNA, 20 bp, Artificial Sequence
  Description of Artificial Sequence: Synthetic oligonucleotide
  Target: PCSK9; (+) strand; PAM type: NRG; PAM sequence: AAG
taacctcactccttatacaa

SEQ ID NO: 12828 - DNA, 20 bp, Artificial Sequence
  Description of Artificial Sequence: Synthetic oligonucleotide
  Target: PCSK9; (+) strand; PAM type: NRG; PAM sequence: CAG
ccttatacaaaagtaaatcc

SEQ ID NO: 12829 - DNA, 20 bp, Artificial Sequence
  Description of Artificial Sequence: Synthetic oligonucleotide
  Target: PCSK9; (+) strand; PAM type: NRG; PAM sequence: TGG
tatacaaaagtaaatcccag

SEQ ID NO: 12830 - DNA, 20 bp, Artificial Sequence
  Description of Artificial Sequence: Synthetic oligonucleotide
  Target: PCSK9; (+) strand; PAM type: NRG; PAM sequence: AAG
acaaaagtaaatcccagtgg

SEQ ID NO: 12831 - DNA, 20 bp, Artificial Sequence
  Description of Artificial Sequence: Synthetic oligonucleotide
  Target: PCSK9; (+) strand; PAM type: NRG; PAM sequence: AAG
agtaaatcccagtggaagcc

SEQ ID NO: 12832 - DNA, 20 bp, Artificial Sequence
  Description of Artificial Sequence: Synthetic oligonucleotide
  Target: PCSK9; (+) strand; PAM type: NRG; PAM sequence: AAG
ggaagccaagatattaaaaa

SEQ ID NO: 12833 - DNA, 20 bp, Artificial Sequence
  Description of Artificial Sequence: Synthetic oligonucleotide
  Target: PCSK9; (+) strand; PAM type: NRG; PAM sequence: AAG
tattaaaaaaagatttaaaa

SEQ ID NO: 12834 - DNA, 20 bp, Artificial Sequence
  Description of Artificial Sequence: Synthetic oligonucleotide
  Target: PCSK9; (+) strand; PAM type: NRG; PAM sequence: AGG
attaaaaaaagatttaaaaa

SEQ ID NO: 12835 - DNA, 20 bp, Artificial Sequence
  Description of Artificial Sequence: Synthetic oligonucleotide
  Target: PCSK9; (+) strand; PAM type: NRG; PAM sequence: GAG
taaaaaaagatttaaaaaag

SEQ ID NO: 12836 - DNA, 20 bp, Artificial Sequence
  Description of Artificial Sequence: Synthetic oligonucleotide
  Target: PCSK9; (+) strand; PAM type: NRG; PAM sequence: AGG
aaaaaaagatttaaaaaagg

SEQ ID NO: 12837 - DNA, 20 bp, Artificial Sequence
  Description of Artificial Sequence: Synthetic oligonucleotide
  Target: PCSK9; (+) strand; PAM type: NRG; PAM sequence: AAG
aatttttatatgatcttgat

SEQ ID NO: 12838 - DNA, 20 bp, Artificial Sequence
  Description of Artificial Sequence: Synthetic oligonucleotide
  Target: PCSK9; (+) strand; PAM type: NRG; PAM sequence: AGG
atttttatatgatcttgata

SEQ ID NO: 12839 - DNA, 20 bp, Artificial Sequence
  Description of Artificial Sequence: Synthetic oligonucleotide
  Target: PCSK9; (+) strand; PAM type: NRG; PAM sequence: GAG
ttttatatgatcttgataag

SEQ ID NO: 12840 - DNA, 20 bp, Artificial Sequence
  Description of Artificial Sequence: Synthetic oligonucleotide
  Target: PCSK9; (+) strand; PAM type: NRG; PAM sequence: AGG
tttatatgatcttgataagg

SEQ ID NO: 12841 - DNA, 20 bp, Artificial Sequence
  Description of Artificial Sequence: Synthetic oligonucleotide
  Target: PCSK9; (+) strand; PAM type: NRG; PAM sequence: GAG
tatatgatcttgataaggag

SEQ ID NO: 12842 - DNA, 20 bp, Artificial Sequence
  Description of Artificial Sequence: Synthetic oligonucleotide
  Target: PCSK9; (+) strand; PAM type: NRG; PAM sequence: AGG
atatgatcttgataaggagg

SEQ ID NO: 12843 - DNA, 20 bp, Artificial Sequence
  Description of Artificial Sequence: Synthetic oligonucleotide
  Target: PCSK9; (+) strand; PAM type: NRG; PAM sequence: AAG
gataaggaggaggcctttct

SEQ ID NO: 12844 - DNA, 20 bp, Artificial Sequence
  Description of Artificial Sequence: Synthetic oligonucleotide
  Target: PCSK9; (+) strand; PAM type: NRG; PAM sequence: CAG
ggaggaggcctttctaagca

SEQ ID NO: 12845 - DNA, 20 bp, Artificial Sequence
  Description of Artificial Sequence: Synthetic oligonucleotide
  Target: PCSK9; (+) strand; PAM type: NRG; PAM sequence: AAG
tctaagcacagtacaaaatc

SEQ ID NO: 12846 - DNA, 20 bp, Artificial Sequence
  Description of Artificial Sequence: Synthetic oligonucleotide
  Target: PCSK9; (+) strand; PAM type: NRG; PAM sequence: AAG
aagcacagtacaaaatcaag

SEQ ID NO: 12847 - DNA, 20 bp, Artificial Sequence
  Description of Artificial Sequence: Synthetic oligonucleotide
  Target: PCSK9; (+) strand; PAM type: NRG; PAM sequence: AAG
atcaagaagtcatgaaataa

SEQ ID NO: 12848 - DNA, 20 bp, Artificial Sequence
  Description of Artificial Sequence: Synthetic oligonucleotide
  Target: PCSK9; (+) strand; PAM type: NRG; PAM sequence: AGG
tcaagaagtcatgaaataaa

SEQ ID NO: 12849 - DNA, 20 bp, Artificial Sequence
  Description of Artificial Sequence: Synthetic oligonucleotide
  Target: PCSK9; (+) strand; PAM type: NRG; PAM sequence: AAG
tcatgaaataaaaggctgat

SEQ ID NO: 12850 - DNA, 20 bp, Artificial Sequence
  Description of Artificial Sequence: Synthetic oligonucleotide
  Target: PCSK9; (+) strand; PAM type: NRG; PAM sequence: TGG
atgaaaattaaaattttcta

SEQ ID NO: 12851 - DNA, 20 bp, Artificial Sequence
  Description of Artificial Sequence: Synthetic oligonucleotide
  Target: PCSK9; (+) strand; PAM type: NRG; PAM sequence: AAG
ctatggaaaaaaatacaata

SEQ ID NO: 12852 - DNA, 20 bp, Artificial Sequence
  Description of Artificial Sequence: Synthetic oligonucleotide
  Target: PCSK9; (+) strand; PAM type: NRG; PAM sequence: TGG
tcaaaaatcaatcaacaaac

SEQ ID NO: 12853 - DNA, 20 bp, Artificial Sequence
  Description of Artificial Sequence: Synthetic oligonucleotide
  Target: PCSK9; (+) strand; PAM type: NRG; PAM sequence: TAG
tcaatcaacaaactggaaaa

SEQ ID NO: 12854 - DNA, 20 bp, Artificial Sequence
  Description of Artificial Sequence: Synthetic oligonucleotide
  Target: PCSK9; (+) strand; PAM type: NRG; PAM sequence: AAG
aatagatttgcaacatacat

SEQ ID NO: 12855 - DNA, 20 bp, Artificial Sequence
  Description of Artificial Sequence: Synthetic oligonucleotide
  Target: PCSK9; (+) strand; PAM type: NRG; PAM sequence: GAG
tagatttgcaacatacataa

SEQ ID NO: 12856 - DNA, 20 bp, Artificial Sequence
  Description of Artificial Sequence: Synthetic oligonucleotide
  Target: PCSK9; (+) strand; PAM type: NRG; PAM sequence: CAG
tttgcaacatacataagaga

SEQ ID NO: 12857 - DNA, 20 bp, Artificial Sequence
  Description of Artificial Sequence: Synthetic oligonucleotide
  Target: PCSK9; (+) strand; PAM type: NRG; PAM sequence: CAG
gcaacatacataagagacag

SEQ ID NO: 12858 - DNA, 20 bp, Artificial Sequence
  Description of Artificial Sequence: Synthetic oligonucleotide
  Target: PCSK9; (+) strand; PAM type: NRG; PAM sequence: AGG
caacatacataagagacagc

SEQ ID NO: 12859 - DNA, 20 bp, Artificial Sequence
  Description of Artificial Sequence: Synthetic oligonucleotide
  Target: PCSK9; (+) strand; PAM type: NRG; PAM sequence: TGG
aagagacagcaggctaattt

SEQ ID NO: 12860 - DNA, 20 bp, Artificial Sequence
  Description of Artificial Sequence: Synthetic oligonucleotide
  Target: PCSK9; (+) strand; PAM type: NRG; PAM sequence: AAG
attttggtattatacataaa

SEQ ID NO: 12861 - DNA, 20 bp, Artificial Sequence
  Description of Artificial Sequence: Synthetic oligonucleotide
  Target: PCSK9; (+) strand; PAM type: NRG; PAM sequence: AAG
tattacaaatcatcaaacaa

SEQ ID NO: 12862 - DNA, 20 bp, Artificial Sequence
  Description of Artificial Sequence: Synthetic oligonucleotide
  Target: PCSK9; (+) strand; PAM type: NRG; PAM sequence: CAG
atcatcaaacaaaagctcca

SEQ ID NO: 12863 - DNA, 20 bp, Artificial Sequence
  Description of Artificial Sequence: Synthetic oligonucleotide
  Target: PCSK9; (+) strand; PAM type: NRG; PAM sequence: AAG
acagccaaaatgaaaaaatg

SEQ ID NO: 12864 - DNA, 20 bp, Artificial Sequence
  Description of Artificial Sequence: Synthetic oligonucleotide
  Target: PCSK9; (+) strand; PAM type: NRG; PAM sequence: GAG
agccaaaatgaaaaaatgaa

SEQ ID NO: 12865 - DNA, 20 bp, Artificial Sequence
  Description of Artificial Sequence: Synthetic oligonucleotide
  Target: PCSK9; (+) strand; PAM type: NRG; PAM sequence: CAG
aaaatgaaaaaatgaagaga

SEQ ID NO: 12866 - DNA, 20 bp, Artificial Sequence
  Description of Artificial Sequence: Synthetic oligonucleotide
  Target: PCSK9; (+) strand; PAM type: NRG; PAM sequence: AAG
aaaaatgaagagacagttca

SEQ ID NO: 12867 - DNA, 20 bp, Artificial Sequence
  Description of Artificial Sequence: Synthetic oligonucleotide
  Target: PCSK9; (+) strand; PAM type: NRG; PAM sequence: TAG
agttcaaagacaaacaaatg

SEQ ID NO: 12868 - DNA, 20 bp, Artificial Sequence
  Description of Artificial Sequence: Synthetic oligonucleotide
  Target: PCSK9; (+) strand; PAM type: NRG; PAM sequence: AAG
tgtagataattgtttaactt

SEQ ID NO: 12869 - DNA, 20 bp, Artificial Sequence
  Description of Artificial Sequence: Synthetic oligonucleotide
  Target: PCSK9; (+) strand; PAM type: NRG; PAM sequence: AGG
gtagataattgtttaactta

SEQ ID NO: 12870 - DNA, 20 bp, Artificial Sequence
  Description of Artificial Sequence: Synthetic oligonucleotide
  Target: PCSK9; (+) strand; PAM type: NRG; PAM sequence: AAG
ataattgtttaacttaagga

SEQ ID NO: 12871 - DNA, 20 bp, Artificial Sequence
  Description of Artificial Sequence: Synthetic oligonucleotide
  Target: PCSK9; (+) strand; PAM type: NRG; PAM sequence: AGG
taattgtttaacttaaggaa

SEQ ID NO: 12872 - DNA, 20 bp, Artificial Sequence
  Description of Artificial Sequence: Synthetic oligonucleotide
  Target: PCSK9; (+) strand; PAM type: NRG; PAM sequence: TGG
taaggaaaggtcaaaatatt

SEQ ID NO: 12873 - DNA, 20 bp, Artificial Sequence
  Description of Artificial Sequence: Synthetic oligonucleotide
  Target: PCSK9; (+) strand; PAM type: NRG; PAM sequence: TGG
aatatttggcaactctgtgt

SEQ ID NO: 12874 - DNA, 20 bp, Artificial Sequence
  Description of Artificial Sequence: Synthetic oligonucleotide
  Target: PCSK9; (+) strand; PAM type: NRG; PAM sequence: TGG
ttggcaactctgtgttggcc

SEQ ID NO: 12875 - DNA, 20 bp, Artificial Sequence
  Description of Artificial Sequence: Synthetic oligonucleotide
  Target: PCSK9; (+) strand; PAM type: NRG; PAM sequence: GGG
tggcaactctgtgttggcct

SEQ ID NO: 12876 - DNA, 20 bp, Artificial Sequence
  Description of Artificial Sequence: Synthetic oligonucleotide
  Target: PCSK9; (+) strand; PAM type: NRG; PAM sequence: GAG
gttggcctgggtgtgaccat

SEQ ID NO: 12877 - DNA, 20 bp, Artificial Sequence
  Description of Artificial Sequence: Synthetic oligonucleotide
  Target: PCSK9; (+) strand; PAM type: NRG; PAM sequence: CGG
ggcctgggtgtgaccatgag

SEQ ID NO: 12878 - DNA, 20 bp, Artificial Sequence
  Description of Artificial Sequence: Synthetic oligonucleotide
  Target: PCSK9; (+) strand; PAM type: NRG; PAM sequence: TAG
ctgggtgtgaccatgagcgg

SEQ ID NO: 12879 - DNA, 20 bp, Artificial Sequence
  Description of Artificial Sequence: Synthetic oligonucleotide
  Target: PCSK9; (+) strand; PAM type: NRG; PAM sequence: CAG
tgaccatgagcggtagttgc

SEQ ID NO: 12880 - DNA, 20 bp, Artificial Sequence
  Description of Artificial Sequence: Synthetic oligonucleotide
  Target: PCSK9; (+) strand; PAM type: NRG; PAM sequence: TGG
ccatgagcggtagttgccag

SEQ ID NO: 12881 - DNA, 20 bp, Artificial Sequence
  Description of Artificial Sequence: Synthetic oligonucleotide
  Target: PCSK9; (+) strand; PAM type: NRG; PAM sequence: TGG
tataccctttctcctccttc

SEQ ID NO: 12882 - DNA, 20 bp, Artificial Sequence
  Description of Artificial Sequence: Synthetic oligonucleotide
  Target: PCSK9; (+) strand; PAM type: NRG; PAM sequence: GGG
ataccctttctcctccttct

SEQ ID NO: 12883 - DNA, 20 bp, Artificial Sequence
  Description of Artificial Sequence: Synthetic oligonucleotide
  Target: PCSK9; (+) strand; PAM type: NRG; PAM sequence: TGG
ttctcctccttctgggcact

SEQ ID NO: 12884 - DNA, 20 bp, Artificial Sequence
  Description of Artificial Sequence: Synthetic oligonucleotide
  Target: PCSK9; (+) strand; PAM type: NRG; PAM sequence: CAG
ctgggcacttggtgtgattg

SEQ ID NO: 12885 - DNA, 20 bp, Artificial Sequence
  Description of Artificial Sequence: Synthetic oligonucleotide
  Target: PCSK9; (+) strand; PAM type: NRG; PAM sequence: TAG
cagtttcctacatttgacct

SEQ ID NO: 12886 - DNA, 20 bp, Artificial Sequence
  Description of Artificial Sequence: Synthetic oligonucleotide
  Target: PCSK9; (+) strand; PAM type: NRG; PAM sequence: AGG
agtttcctacatttgacctt

SEQ ID NO: 12887 - DNA, 20 bp, Artificial Sequence
  Description of Artificial Sequence: Synthetic oligonucleotide
  Target: PCSK9; (+) strand; PAM type: NRG; PAM sequence: TGG
cctacatttgaccttaggtg

SEQ ID NO: 12888 - DNA, 20 bp, Artificial Sequence
  Description of Artificial Sequence: Synthetic oligonucleotide
  Target: PCSK9; (+) strand; PAM type: NRG; PAM sequence: TAG
gtgtggtcatgtgtctcgct

SEQ ID NO: 12889 - DNA, 20 bp, Artificial Sequence
  Description of Artificial Sequence: Synthetic oligonucleotide
  Target: PCSK9; (+) strand; PAM type: NRG; PAM sequence: AGG
tgtggtcatgtgtctcgctt

SEQ ID NO: 12890 - DNA, 20 bp, Artificial Sequence
  Description of Artificial Sequence: Synthetic oligonucleotide
  Target: PCSK9; (+) strand; PAM type: NRG; PAM sequence: GAG
tggtcatgtgtctcgcttag

SEQ ID NO: 12891 - DNA, 20 bp, Artificial Sequence
  Description of Artificial Sequence: Synthetic oligonucleotide
  Target: PCSK9; (+) strand; PAM type: NRG; PAM sequence: AAG
tcatgtgtctcgcttaggag

SEQ ID NO: 12892 - DNA, 20 bp, Artificial Sequence
  Description of Artificial Sequence: Synthetic oligonucleotide
  Target: PCSK9; (+) strand; PAM type: NRG; PAM sequence: AGG
catgtgtctcgcttaggaga

SEQ ID NO: 12893 - DNA, 20 bp, Artificial Sequence
  Description of Artificial Sequence: Synthetic oligonucleotide
  Target: PCSK9; (+) strand; PAM type: NRG; PAM sequence: CGG
ttaggagaaggaaatgtgaa

SEQ ID NO: 12894 - DNA, 20 bp, Artificial Sequence
  Description of Artificial Sequence: Synthetic oligonucleotide
  Target: PCSK9; (+) strand; PAM type: NRG; PAM sequence: AAG
ggagaaggaaatgtgaacgg

SEQ ID NO: 12895 - DNA, 20 bp, Artificial Sequence
  Description of Artificial Sequence: Synthetic oligonucleotide
  Target: PCSK9; (+) strand; PAM type: NRG; PAM sequence: TGG
aaatgtgaacggaagtgttg

SEQ ID NO: 12896 - DNA, 20 bp, Artificial Sequence
  Description of Artificial Sequence: Synthetic oligonucleotide
  Target: PCSK9; (+) strand; PAM type: NRG; PAM sequence: GGG
aatgtgaacggaagtgttgt

SEQ ID NO: 12897 - DNA, 20 bp, Artificial Sequence
  Description of Artificial Sequence: Synthetic oligonucleotide
  Target: PCSK9; (+) strand; PAM type: NRG; PAM sequence: TGG
tgttgtgggtcacttttgtg

SEQ ID NO: 12898 - DNA, 20 bp, Artificial Sequence
  Description of Artificial Sequence: Synthetic oligonucleotide
  Target: PCSK9; (+) strand; PAM type: NRG; PAM sequence: AAG
tgtgggtcacttttgtgtgg

SEQ ID NO: 12899 - DNA, 20 bp, Artificial Sequence
  Description of Artificial Sequence: Synthetic oligonucleotide
  Target: PCSK9; (+) strand; PAM type: NRG; PAM sequence: TGG
acttttgtgtggaagctgca

SEQ ID NO: 12900 - DNA, 20 bp, Artificial Sequence
  Description of Artificial Sequence: Synthetic oligonucleotide
  Target: PCSK9; (+) strand; PAM type: NRG; PAM sequence: GAG
ttttgtgtggaagctgcatg

SEQ ID NO: 12901 - DNA, 20 bp, Artificial Sequence
  Description of Artificial Sequence: Synthetic oligonucleotide
  Target: PCSK9; (+) strand; PAM type: NRG; PAM sequence: CAG
gtcacctctttgctttccgt

SEQ ID NO: 12902 - DNA, 20 bp, Artificial Sequence
  Description of Artificial Sequence: Synthetic oligonucleotide
  Target: PCSK9; (+) strand; PAM type: NRG; PAM sequence: CAG
tctttgctttccgtcagcct

SEQ ID NO: 12903 - DNA, 20 bp, Artificial Sequence
  Description of Artificial Sequence: Synthetic oligonucleotide
  Target: PCSK9; (+) strand; PAM type: NRG; PAM sequence: CAG
tttccgtcagcctcagtgtt

SEQ ID NO: 12904 - DNA, 20 bp, Artificial Sequence
  Description of Artificial Sequence: Synthetic oligonucleotide
  Target: PCSK9; (+) strand; PAM type: NRG; PAM sequence: TGG
ttcagcaatgttctgaatga

SEQ ID NO: 12905 - DNA, 20 bp, Artificial Sequence
  Description of Artificial Sequence: Synthetic oligonucleotide
  Target: PCSK9; (+) strand; PAM type: NRG; PAM sequence: CAG
ctgaatgatggttgctttat

SEQ ID NO: 12906 - DNA, 20 bp, Artificial Sequence
  Description of Artificial Sequence: Synthetic oligonucleotide
  Target: PCSK9; (+) strand; PAM type: NRG; PAM sequence: TGG
tgatggttgctttatcagtc

SEQ ID NO: 12907 - DNA, 20 bp, Artificial Sequence
  Description of Artificial Sequence: Synthetic oligonucleotide
  Target: PCSK9; (+) strand; PAM type: NRG; PAM sequence: TGG
ttgctttatcagtctggttc

SEQ ID NO: 12908 - DNA, 20 bp, Artificial Sequence
  Description of Artificial Sequence: Synthetic oligonucleotide
  Target: PCSK9; (+) strand; PAM type: NRG; PAM sequence: GGG
tgctttatcagtctggttct

SEQ ID NO: 12909 - DNA, 20 bp, Artificial Sequence
  Description of Artificial Sequence: Synthetic oligonucleotide
  Target: PCSK9; (+) strand; PAM type: NRG; PAM sequence: GGG
gctttatcagtctggttctg

SEQ ID NO: 12910 - DNA, 20 bp, Artificial Sequence
  Description of Artificial Sequence: Synthetic oligonucleotide
  Target: PCSK9; (+) strand; PAM type: NRG; PAM sequence: GAG
tatcagtctggttctggggt

SEQ ID NO: 12911 - DNA, 20 bp, Artificial Sequence
  Description of Artificial Sequence: Synthetic oligonucleotide
  Target: PCSK9; (+) strand; PAM type: NRG; PAM sequence: AGG
atcagtctggttctggggtg

SEQ ID NO: 12912 - DNA, 20 bp, Artificial Sequence
  Description of Artificial Sequence: Synthetic oligonucleotide
  Target: PCSK9; (+) strand; PAM type: NRG; PAM sequence: GGG
tcagtctggttctggggtga

SEQ ID NO: 12913 - DNA, 20 bp, Artificial Sequence
  Description of Artificial Sequence: Synthetic oligonucleotide
  Target: PCSK9; (+) strand; PAM type: NRG; PAM sequence: AAG
gttctggggtgagggtaatg

SEQ ID NO: 12914 - DNA, 20 bp, Artificial Sequence
  Description of Artificial Sequence: Synthetic oligonucleotide
  Target: PCSK9; (+) strand; PAM type: NRG; PAM sequence: TAG
ctggggtgagggtaatgaag

SEQ ID NO: 12915 - DNA, 20 bp, Artificial Sequence
  Description of Artificial Sequence: Synthetic oligonucleotide
  Target: PCSK9; (+) strand; PAM type: NRG; PAM sequence: AAG
gtgagggtaatgaagtagtg

SEQ ID NO: 12916 - DNA, 20 bp, Artificial Sequence
  Description of Artificial Sequence: Synthetic oligonucleotide
  Target: PCSK9; (+) strand; PAM type: NRG; PAM sequence: AAG
ggtaatgaagtagtgaagca

SEQ ID NO: 12917 - DNA, 20 bp, Artificial Sequence
  Description of Artificial Sequence: Synthetic oligonucleotide
  Target: PCSK9; (+) strand; PAM type: NRG; PAM sequence: TGG
tagtgaagcaaagtccttga

SEQ ID NO: 12918 - DNA, 20 bp, Artificial Sequence
  Description of Artificial Sequence: Synthetic oligonucleotide
  Target: PCSK9; (+) strand; PAM type: NRG; PAM sequence: GAG
aaagtccttgatggacatgt

SEQ ID NO: 12919 - DNA, 20 bp, Artificial Sequence
  Description of Artificial Sequence: Synthetic oligonucleotide
  Target: PCSK9; (+) strand; PAM type: NRG; PAM sequence: AGG
aagtccttgatggacatgtg

SEQ ID NO: 12920 - DNA, 20 bp, Artificial Sequence
  Description of Artificial Sequence: Synthetic oligonucleotide
  Target: PCSK9; (+) strand; PAM type: NRG; PAM sequence: GAG
ccttgatggacatgtgaggt

SEQ ID NO: 12921 - DNA, 20 bp, Artificial Sequence
  Description of Artificial Sequence: Synthetic oligonucleotide
  Target: PCSK9; (+) strand; PAM type: NRG; PAM sequence: CAG
gatggacatgtgaggtgaga

SEQ ID NO: 12922 - DNA, 20 bp, Artificial Sequence
  Description of Artificial Sequence: Synthetic oligonucleotide
  Target: PCSK9; (+) strand; PAM type: NRG; PAM sequence: AAG
aaataaacctttgacatttc

SEQ ID NO: 12923 - DNA, 20 bp, Artificial Sequence
  Description of Artificial Sequence: Synthetic oligonucleotide
  Target: PCSK9; (+) strand; PAM type: NRG; PAM sequence: GAG
ctttgacatttcaagcccct

SEQ ID NO: 12924 - DNA, 20 bp, Artificial Sequence
  Description of Artificial Sequence: Synthetic oligonucleotide
  Target: PCSK9; (+) strand; PAM type: NRG; PAM sequence: TGG
catttcaagcccctgagatt

SEQ ID NO: 12925 - DNA, 20 bp, Artificial Sequence
  Description of Artificial Sequence: Synthetic oligonucleotide
  Target: PCSK9; (+) strand; PAM type: NRG; PAM sequence: GGG
atttcaagcccctgagattt

SEQ ID NO: 12926 - DNA, 20 bp, Artificial Sequence
  Description of Artificial Sequence: Synthetic oligonucleotide
  Target: PCSK9; (+) strand; PAM type: NRG; PAM sequence: GGG
tttcaagcccctgagatttg

SEQ ID NO: 12927 - DNA, 20 bp, Artificial Sequence
  Description of Artificial Sequence: Synthetic oligonucleotide
  Target: PCSK9; (+) strand; PAM type: NRG; PAM sequence: TGG
gatttggggcgtgcatgtgc

SEQ ID NO: 12928 - DNA, 20 bp, Artificial Sequence
  Description of Artificial Sequence: Synthetic oligonucleotide
  Target: PCSK9; (+) strand; PAM type: NRG; PAM sequence: AAG
ttggggcgtgcatgtgctgg

SEQ ID NO: 12929 - DNA, 20 bp, Artificial Sequence
  Description of Artificial Sequence: Synthetic oligonucleotide
  Target: PCSK9; (+) strand; PAM type: NRG; PAM sequence: CAG
gggcgtgcatgtgctggaag

SEQ ID NO: 12930 - DNA, 20 bp, Artificial Sequence
  Description of Artificial Sequence: Synthetic oligonucleotide
  Target: PCSK9; (+) strand; PAM type: NRG; PAM sequence: TAG
catgtgctggaagcagaacc

SEQ ID NO: 12931 - DNA, 20 bp, Artificial Sequence
  Description of Artificial Sequence: Synthetic oligonucleotide
  Target: PCSK9; (+) strand; PAM type: NRG; PAM sequence: TGG
cagaacctagcctattctga

SEQ ID NO: 12932 - DNA, 20 bp, Artificial Sequence
  Description of Artificial Sequence: Synthetic oligonucleotide
  Target: PCSK9; (+) strand; PAM type: NRG; PAM sequence: CAG
cctattctgatggattcctc

SEQ ID NO: 12933 - DNA, 20 bp, Artificial Sequence
  Description of Artificial Sequence: Synthetic oligonucleotide
  Target: PCSK9; (+) strand; PAM type: NRG; PAM sequence: TGG
gattcctccagcactgctcg

SEQ ID NO: 12934 - DNA, 20 bp, Artificial Sequence
  Description of Artificial Sequence: Synthetic oligonucleotide
  Target: PCSK9; (+) strand; PAM type: NRG; PAM sequence: GGG
attcctccagcactgctcgt

SEQ ID NO: 12935 - DNA, 20 bp, Artificial Sequence
  Description of Artificial Sequence: Synthetic oligonucleotide
  Target: PCSK9; (+) strand; PAM type: NRG; PAM sequence: AAG
cctccagcactgctcgtggg

SEQ ID NO: 12936 - DNA, 20 bp, Artificial Sequence
  Description of Artificial Sequence: Synthetic oligonucleotide
  Target: PCSK9; (+) strand; PAM type: NRG; PAM sequence: TAG
gtgggaagacatcatcaata

SEQ ID NO: 12937 - DNA, 20 bp, Artificial Sequence
  Description of Artificial Sequence: Synthetic oligonucleotide
  Target: PCSK9; (+) strand; PAM type: NRG; PAM sequence: GAG
gggaagacatcatcaatata

SEQ ID NO: 12938 - DNA, 20 bp, Artificial Sequence
  Description of Artificial Sequence: Synthetic oligonucleotide
  Target: PCSK9; (+) strand; PAM type: NRG; PAM sequence: CAG
ttatctcgaaattccacttc

SEQ ID NO: 12939 - DNA, 20 bp, Artificial Sequence
  Description of Artificial Sequence: Synthetic oligonucleotide
  Target: PCSK9; (+) strand; PAM type: NRG; PAM sequence: AGG
tatctcgaaattccacttcc

SEQ ID NO: 12940 - DNA, 20 bp, Artificial Sequence
  Description of Artificial Sequence: Synthetic oligonucleotide
  Target: PCSK9; (+) strand; PAM type: NRG; PAM sequence: CAG
acttccaggaatttatgaaa

SEQ ID NO: 12941 - DNA, 20 bp, Artificial Sequence
  Description of Artificial Sequence: Synthetic oligonucleotide
  Target: PCSK9; (+) strand; PAM type: NRG; PAM sequence: CAG
gatactctcacatgtgcaaa

SEQ ID NO: 12942 - DNA, 20 bp, Artificial Sequence
  Description of Artificial Sequence: Synthetic oligonucleotide
  Target: PCSK9; (+) strand; PAM type: NRG; PAM sequence: TGG
ctcacatgtgcaaacagcta

SEQ ID NO: 12943 - DNA, 20 bp, Artificial Sequence
  Description of Artificial Sequence: Synthetic oligonucleotide
  Target: PCSK9; (+) strand; PAM type: NRG; PAM sequence: AAG
atgtgcaaacagctatggat

SEQ ID NO: 12944 - DNA, 20 bp, Artificial Sequence
  Description of Artificial Sequence: Synthetic oligonucleotide
  Target: PCSK9; (+) strand; PAM type: NRG; PAM sequence: AGG
tgtgcaaacagctatggata

SEQ ID NO: 12945 - DNA, 20 bp, Artificial Sequence
  Description of Artificial Sequence: Synthetic oligonucleotide
  Target: PCSK9; (+) strand; PAM type: NRG; PAM sequence: CAG
caaacagctatggataagga

SEQ ID NO: 12946 - DNA, 20 bp, Artificial Sequence
  Description of Artificial Sequence: Synthetic oligonucleotide
  Target: PCSK9; (+) strand; PAM type: NRG; PAM sequence: TGG
gctatggataaggacagaca

SEQ ID NO: 12947 - DNA, 20 bp, Artificial Sequence
  Description of Artificial Sequence: Synthetic oligonucleotide
  Target: PCSK9; (+) strand; PAM type: NRG; PAM sequence: TGG
taaggacagacatggcaact

SEQ ID NO: 12948 - DNA, 20 bp, Artificial Sequence
  Description of Artificial Sequence: Synthetic oligonucleotide
  Target: PCSK9; (+) strand; PAM type: NRG; PAM sequence: TAG
catggcaacttggattgcaa

SEQ ID NO: 12949 - DNA, 20 bp, Artificial Sequence
  Description of Artificial Sequence: Synthetic oligonucleotide
  Target: PCSK9; (+) strand; PAM type: NRG; PAM sequence: AAG
aacttggattgcaatagcaa

SEQ ID NO: 12950 - DNA, 20 bp, Artificial Sequence
  Description of Artificial Sequence: Synthetic oligonucleotide
  Target: PCSK9; (+) strand; PAM type: NRG; PAM sequence: CAG
tggattgcaatagcaaaaga

SEQ ID NO: 12951 - DNA, 20 bp, Artificial Sequence
  Description of Artificial Sequence: Synthetic oligonucleotide
  Target: PCSK9; (+) strand; PAM type: NRG; PAM sequence: CGG
caaaagacagaaacaaccaa

SEQ ID NO: 12952 - DNA, 20 bp, Artificial Sequence
  Description of Artificial Sequence: Synthetic oligonucleotide
  Target: PCSK9; (+) strand; PAM type: NRG; PAM sequence: TAG
ccaacggaaacaccaaccaa

SEQ ID NO: 12953 - DNA, 20 bp, Artificial Sequence
  Description of Artificial Sequence: Synthetic oligonucleotide
  Target: PCSK9; (+) strand; PAM type: NRG; PAM sequence: AGG
caacggaaacaccaaccaat

SEQ ID NO: 12954 - DNA, 20 bp, Artificial Sequence
  Description of Artificial Sequence: Synthetic oligonucleotide
  Target: PCSK9; (+) strand; PAM type: NRG; PAM sequence: TGG
aacaccaaccaataggaaat

SEQ ID NO: 12955 - DNA, 20 bp, Artificial Sequence
  Description of Artificial Sequence: Synthetic oligonucleotide
  Target: PCSK9; (+) strand; PAM type: NRG; PAM sequence: AAG
aaccaataggaaattggcta

SEQ ID NO: 12956 - DNA, 20 bp, Artificial Sequence
  Description of Artificial Sequence: Synthetic oligonucleotide
  Target: PCSK9; (+) strand; PAM type: NRG; PAM sequence: TAG
aagacattgtgaaacataca

SEQ ID NO: 12957 - DNA, 20 bp, Artificial Sequence
  Description of Artificial Sequence: Synthetic oligonucleotide
  Target: PCSK9; (+) strand; PAM type: NRG; PAM sequence: CAG
agaatgaaataatctgcaac

SEQ ID NO: 12958 - DNA, 20 bp, Artificial Sequence
  Description of Artificial Sequence: Synthetic oligonucleotide
  Target: PCSK9; (+) strand; PAM type: NRG; PAM sequence: AAG
taatctgcaaccagaaaaat

SEQ ID NO: 12959 - DNA, 20 bp, Artificial Sequence
  Description of Artificial Sequence: Synthetic oligonucleotide
  Target: PCSK9; (+) strand; PAM type: NRG; PAM sequence: AGG
aatctgcaaccagaaaaata

SEQ ID NO: 12960 - DNA, 20 bp, Artificial Sequence
  Description of Artificial Sequence: Synthetic oligonucleotide
  Target: PCSK9; (+) strand; PAM type: NRG; PAM sequence: CAG
ctgcaaccagaaaaataagg

SEQ ID NO: 12961 - DNA, 20 bp, Artificial Sequence
  Description of Artificial Sequence: Synthetic oligonucleotide
  Target: PCSK9; (+) strand; PAM type: NRG; PAM sequence: TAG
caaccagaaaaataaggcag

SEQ ID NO: 12962 - DNA, 20 bp, Artificial Sequence
  Description of Artificial Sequence: Synthetic oligonucleotide
  Target: PCSK9; (+) strand; PAM type: NRG; PAM sequence: CAG
ggcagtagatgtatgtgtac

SEQ ID NO: 12963 - DNA, 20 bp, Artificial Sequence
  Description of Artificial Sequence: Synthetic oligonucleotide
  Target: PCSK9; (+) strand; PAM type: NRG; PAM sequence: TGG
tagatgtatgtgtaccagtg

SEQ ID NO: 12964 - DNA, 20 bp, Artificial Sequence
  Description of Artificial Sequence: Synthetic oligonucleotide
  Target: PCSK9; (+) strand; PAM type: NRG; PAM sequence: GAG
accagtgtggtttttattcc

SEQ ID NO: 12965 - DNA, 20 bp, Artificial Sequence
  Description of Artificial Sequence: Synthetic oligonucleotide
  Target: PCSK9; (+) strand; PAM type: NRG; PAM sequence: TAG
tgtggtttttattccgagat

SEQ ID NO: 12966 - DNA, 20 bp, Artificial Sequence
  Description of Artificial Sequence: Synthetic oligonucleotide
  Target: PCSK9; (+) strand; PAM type: NRG; PAM sequence: AGG
gtggtttttattccgagatt

SEQ ID NO: 12967 - DNA, 20 bp, Artificial Sequence
  Description of Artificial Sequence: Synthetic oligonucleotide
  Target: PCSK9; (+) strand; PAM type: NRG; PAM sequence: GGG
tggtttttattccgagatta

SEQ ID NO: 12968 - DNA, 20 bp, Artificial Sequence
  Description of Artificial Sequence: Synthetic oligonucleotide
  Target: PCSK9; (+) strand; PAM type: NRG; PAM sequence: TAG
ttttattccgagattagggc

SEQ ID NO: 12969 - DNA, 20 bp, Artificial Sequence
  Description of Artificial Sequence: Synthetic oligonucleotide
  Target: PCSK9; (+) strand; PAM type: NRG; PAM sequence: AGG
tttattccgagattagggct

SEQ ID NO: 12970 - DNA, 20 bp, Artificial Sequence
  Description of Artificial Sequence: Synthetic oligonucleotide
  Target: PCSK9; (+) strand; PAM type: NRG; PAM sequence: AAG
tccgagattagggctaggtt

SEQ ID NO: 12971 - DNA, 20 bp, Artificial Sequence
  Description of Artificial Sequence: Synthetic oligonucleotide
  Target: PCSK9; (+) strand; PAM type: NRG; PAM sequence: CAG
ttagggctaggttaagacgt

SEQ ID NO: 12972 - DNA, 20 bp, Artificial Sequence
  Description of Artificial Sequence: Synthetic oligonucleotide
  Target: PCSK9; (+) strand; PAM type: NRG; PAM sequence: AAG
ctaggttaagacgtcagatt

SEQ ID NO: 12973 - DNA, 20 bp, Artificial Sequence
  Description of Artificial Sequence: Synthetic oligonucleotide
  Target: PCSK9; (+) strand; PAM type: NRG; PAM sequence: AAG
accccaccaatataaataaa

SEQ ID NO: 12974 - DNA, 20 bp, Artificial Sequence
  Description of Artificial Sequence: Synthetic oligonucleotide
  Target: PCSK9; (+) strand; PAM type: NRG; PAM sequence: AAG
caatataaataaaaagttaa

SEQ ID NO: 12975 - DNA, 20 bp, Artificial Sequence
  Description of Artificial Sequence: Synthetic oligonucleotide
  Target: PCSK9; (+) strand; PAM type: NRG; PAM sequence: AAG
actatttttacaattttaaa

SEQ ID NO: 12976 - DNA, 20 bp, Artificial Sequence
  Description of Artificial Sequence: Synthetic oligonucleotide
  Target: PCSK9; (+) strand; PAM type: NRG; PAM sequence: TGG
atttttacaattttaaaaag

SEQ ID NO: 12977 - DNA, 20 bp, Artificial Sequence
  Description of Artificial Sequence: Synthetic oligonucleotide
  Target: PCSK9; (+) strand; PAM type: NRG; PAM sequence: GGG
tttttacaattttaaaaagt

SEQ ID NO: 12978 - DNA, 20 bp, Artificial Sequence
  Description of Artificial Sequence: Synthetic oligonucleotide
  Target: PCSK9; (+) strand; PAM type: NRG; PAM sequence: AAG
caattttaaaaagtgggtta

SEQ ID NO: 12979 - DNA, 20 bp, Artificial Sequence
  Description of Artificial Sequence: Synthetic oligonucleotide
  Target: PCSK9; (+) strand; PAM type: NRG; PAM sequence: GAG
attttaaaaagtgggttaaa

SEQ ID NO: 12980 - DNA, 20 bp, Artificial Sequence
  Description of Artificial Sequence: Synthetic oligonucleotide
  Target: PCSK9; (+) strand; PAM type: NRG; PAM sequence: AAG
gtgggttaaagagcccatcc

SEQ ID NO: 12981 - DNA, 20 bp, Artificial Sequence
  Description of Artificial Sequence: Synthetic oligonucleotide
  Target: PCSK9; (+) strand; PAM type: NRG; PAM sequence: TAG
ggttaaagagcccatccaag

SEQ ID NO: 12982 - DNA, 20 bp, Artificial Sequence
  Description of Artificial Sequence: Synthetic oligonucleotide
  Target: PCSK9; (+) strand; PAM type: NRG; PAM sequence: AAG
ccatccaagtagttttataa

SEQ ID NO: 12983 - DNA, 20 bp, Artificial Sequence
  Description of Artificial Sequence: Synthetic oligonucleotide
  Target: PCSK9; (+) strand; PAM type: NRG; PAM sequence: TAG
tccaagtagttttataaaag

SEQ ID NO: 12984 - DNA, 20 bp, Artificial Sequence
  Description of Artificial Sequence: Synthetic oligonucleotide
  Target: PCSK9; (+) strand; PAM type: NRG; PAM sequence: AAG
aaaagtagactatctccgaa

SEQ ID NO: 12985 - DNA, 20 bp, Artificial Sequence
  Description of Artificial Sequence: Synthetic oligonucleotide
  Target: PCSK9; (+) strand; PAM type: NRG; PAM sequence: TAG
ccgaaaagatacccaataaa

SEQ ID NO: 12986 - DNA, 20 bp, Artificial Sequence
  Description of Artificial Sequence: Synthetic oligonucleotide
  Target: PCSK9; (+) strand; PAM type: NRG; PAM sequence: AGG
cgaaaagatacccaataaat

SEQ ID NO: 12987 - DNA, 20 bp, Artificial Sequence
  Description of Artificial Sequence: Synthetic oligonucleotide
  Target: PCSK9; (+) strand; PAM type: NRG; PAM sequence: TGG
aaataggtatattactttcc

SEQ ID NO: 12988 - DNA, 20 bp, Artificial Sequence
  Description of Artificial Sequence: Synthetic oligonucleotide
  Target: PCSK9; (+) strand; PAM type: NRG; PAM sequence: GGG
aataggtatattactttcct

SEQ ID NO: 12989 - DNA, 20 bp, Artificial Sequence
  Description of Artificial Sequence: Synthetic oligonucleotide
  Target: PCSK9; (+) strand; PAM type: NRG; PAM sequence: GGG
ataggtatattactttcctg

SEQ ID NO: 12990 - DNA, 20 bp, Artificial Sequence
  Description of Artificial Sequence: Synthetic oligonucleotide
  Target: PCSK9; (+) strand; PAM type: NRG; PAM sequence: AAG
tttcctggggctgttataac

SEQ ID NO: 12991 - DNA, 20 bp, Artificial Sequence
  Description of Artificial Sequence: Synthetic oligonucleotide
  Target: PCSK9; (+) strand; PAM type: NRG; PAM sequence: TGG
acaagtttctacaaatttgc

SEQ ID NO: 12992 - DNA, 20 bp, Artificial Sequence
  Description of Artificial Sequence: Synthetic oligonucleotide
  Target: PCSK9; (+) strand; PAM type: NRG; PAM sequence: CAG
aacaaaaacgtattctcttg

SEQ ID NO: 12993 - DNA, 20 bp, Artificial Sequence
  Description of Artificial Sequence: Synthetic oligonucleotide
  Target: PCSK9; (+) strand; PAM type: NRG; PAM sequence: TGG
aacgtattctcttgcagtta

SEQ ID NO: 12994 - DNA, 20 bp, Artificial Sequence
  Description of Artificial Sequence: Synthetic oligonucleotide
  Target: PCSK9; (+) strand; PAM type: NRG; PAM sequence: AAG
gtattctcttgcagttatgg

SEQ ID NO: 12995 - DNA, 20 bp, Artificial Sequence
  Description of Artificial Sequence: Synthetic oligonucleotide
  Target: PCSK9; (+) strand; PAM type: NRG; PAM sequence: CAG
tctcttgcagttatggaagc

SEQ ID NO: 12996 - DNA, 20 bp, Artificial Sequence
  Description of Artificial Sequence: Synthetic oligonucleotide
  Target: PCSK9; (+) strand; PAM type: NRG; PAM sequence: AAG
cttgcagttatggaagccag

SEQ ID NO: 12997 - DNA, 20 bp, Artificial Sequence
  Description of Artificial Sequence: Synthetic oligonucleotide
  Target: PCSK9; (+) strand; PAM type: NRG; PAM sequence: TGG
agttatggaagccagaagta

SEQ ID NO: 12998 - DNA, 20 bp, Artificial Sequence
  Description of Artificial Sequence: Synthetic oligonucleotide
  Target: PCSK9; (+) strand; PAM type: NRG; PAM sequence: AAG
gaagccagaagtatggaatg

SEQ ID NO: 12999 - DNA, 20 bp, Artificial Sequence
  Description of Artificial Sequence: Synthetic oligonucleotide
  Target: PCSK9; (+) strand; PAM type: NRG; PAM sequence: AGG
aagccagaagtatggaatga

SEQ ID NO: 13000 - DNA, 20 bp, Artificial Sequence
  Description of Artificial Sequence: Synthetic oligonucleotide
  Target: PCSK9; (+) strand; PAM type: NRG; PAM sequence: GGG
agccagaagtatggaatgaa

SEQ ID NO: 13001 - DNA, 20 bp, Artificial Sequence
  Description of Artificial Sequence: Synthetic oligonucleotide
  Target: PCSK9; (+) strand; PAM type: NRG; PAM sequence: CAG
aagtatggaatgaagggttg

SEQ ID NO: 13002 - DNA, 20 bp, Artificial Sequence
  Description of Artificial Sequence: Synthetic oligonucleotide
  Target: PCSK9; (+) strand; PAM type: NRG; PAM sequence: AGG
agtatggaatgaagggttgc

SEQ ID NO: 13003 - DNA, 20 bp, Artificial Sequence
  Description of Artificial Sequence: Synthetic oligonucleotide
  Target: PCSK9; (+) strand; PAM type: NRG; PAM sequence: GGG
gtatggaatgaagggttgca

SEQ ID NO: 13004 - DNA, 20 bp, Artificial Sequence
  Description of Artificial Sequence: Synthetic oligonucleotide
  Target: PCSK9; (+) strand; PAM type: NRG; PAM sequence: TGG
tggaatgaagggttgcaggg

SEQ ID NO: 13005 - DNA, 20 bp, Artificial Sequence
  Description of Artificial Sequence: Synthetic oligonucleotide
  Target: PCSK9; (+) strand; PAM type: NRG; PAM sequence: AAG
cagggtggtgccctctccca

SEQ ID NO: 13006 - DNA, 20 bp, Artificial Sequence
  Description of Artificial Sequence: Synthetic oligonucleotide
  Target: PCSK9; (+) strand; PAM type: NRG; PAM sequence: TAG
ggtgccctctcccaaagctc

SEQ ID NO: 13007 - DNA, 20 bp, Artificial Sequence
  Description of Artificial Sequence: Synthetic oligonucleotide
  Target: PCSK9; (+) strand; PAM type: NRG; PAM sequence: AGG
gtgccctctcccaaagctct

SEQ ID NO: 13008 - DNA, 20 bp, Artificial Sequence
  Description of Artificial Sequence: Synthetic oligonucleotide
  Target: PCSK9; (+) strand; PAM type: NRG; PAM sequence: GGG
tgccctctcccaaagctcta

SEQ ID NO: 13009 - DNA, 20 bp, Artificial Sequence
  Description of Artificial Sequence: Synthetic oligonucleotide
  Target: PCSK9; (+) strand; PAM type: NRG; PAM sequence: GGG
gccctctcccaaagctctag

SEQ ID NO: 13010 - DNA, 20 bp, Artificial Sequence
  Description of Artificial Sequence: Synthetic oligonucleotide
  Target: PCSK9; (+) strand; PAM type: NRG; PAM sequence: GAG
cctctcccaaagctctaggg

SEQ ID NO: 13011 - DNA, 20 bp, Artificial Sequence
  Description of Artificial Sequence: Synthetic oligonucleotide
  Target: PCSK9; (+) strand; PAM type: NRG; PAM sequence: AGG
ctctcccaaagctctagggg

SEQ ID NO: 13012 - DNA, 20 bp, Artificial Sequence
  Description of Artificial Sequence: Synthetic oligonucleotide
  Target: PCSK9; (+) strand; PAM type: NRG; PAM sequence: CAG
ggaacattccttgcttcttc

SEQ ID NO: 13013 - DNA, 20 bp, Artificial Sequence
  Description of Artificial Sequence: Synthetic oligonucleotide
  Target: PCSK9; (+) strand; PAM type: NRG; PAM sequence: TGG
cttgcttcttccagctcctt

SEQ ID NO: 13014 - DNA, 20 bp, Artificial Sequence
  Description of Artificial Sequence: Synthetic oligonucleotide
  Target: PCSK9; (+) strand; PAM type: NRG; PAM sequence: GGG
ttgcttcttccagctccttt

SEQ ID NO: 13015 - DNA, 20 bp, Artificial Sequence
  Description of Artificial Sequence: Synthetic oligonucleotide
  Target: PCSK9; (+) strand; PAM type: NRG; PAM sequence: GGG
tgcttcttccagctcctttg

SEQ ID NO: 13016 - DNA, 20 bp, Artificial Sequence
  Description of Artificial Sequence: Synthetic oligonucleotide
  Target: PCSK9; (+) strand; PAM type: NRG; PAM sequence: GGG
gcttcttccagctcctttgg

SEQ ID NO: 13017 - DNA, 20 bp, Artificial Sequence
  Description of Artificial Sequence: Synthetic oligonucleotide
  Target: PCSK9; (+) strand; PAM type: NRG; PAM sequence: TGG
ccagctcctttgggggctcc

SEQ ID NO: 13018 - DNA, 20 bp, Artificial Sequence
  Description of Artificial Sequence: Synthetic oligonucleotide
  Target: PCSK9; (+) strand; PAM type: NRG; PAM sequence: TGG
tgggggctcctggcattcct

SEQ ID NO: 13019 - DNA, 20 bp, Artificial Sequence
  Description of Artificial Sequence: Synthetic oligonucleotide
  Target: PCSK9; (+) strand; PAM type: NRG; PAM sequence: CGG
tggcattccttggcttatgt

SEQ ID NO: 13020 - DNA, 20 bp, Artificial Sequence
  Description of Artificial Sequence: Synthetic oligonucleotide
  Target: PCSK9; (+) strand; PAM type: NRG; PAM sequence: CAG
ttccttggcttatgtcggca

SEQ ID NO: 13021 - DNA, 20 bp, Artificial Sequence
  Description of Artificial Sequence: Synthetic oligonucleotide
  Target: PCSK9; (+) strand; PAM type: NRG; PAM sequence: CGG
tatgtcggcacagctctaat

SEQ ID NO: 13022 - DNA, 20 bp, Artificial Sequence
  Description of Artificial Sequence: Synthetic oligonucleotide
  Target: PCSK9; (+) strand; PAM type: NRG; PAM sequence: TAG
tcggcgcctccattgttaca

SEQ ID NO: 13023 - DNA, 20 bp, Artificial Sequence
  Description of Artificial Sequence: Synthetic oligonucleotide
  Target: PCSK9; (+) strand; PAM type: NRG; PAM sequence: AGG
cggcgcctccattgttacat

SEQ ID NO: 13024 - DNA, 20 bp, Artificial Sequence
  Description of Artificial Sequence: Synthetic oligonucleotide
  Target: PCSK9; (+) strand; PAM type: NRG; PAM sequence: AAG
cataggtgtttctgtgtctc

SEQ ID NO: 13025 - DNA, 20 bp, Artificial Sequence
  Description of Artificial Sequence: Synthetic oligonucleotide
  Target: PCSK9; (+) strand; PAM type: NRG; PAM sequence: CAG
tcccctttctcttctgatat

SEQ ID NO: 13026 - DNA, 20 bp, Artificial Sequence
  Description of Artificial Sequence: Synthetic oligonucleotide
  Target: PCSK9; (+) strand; PAM type: NRG; PAM sequence: TGG
tctcttctgatatcagtcat

SEQ ID NO: 13027 - DNA, 20 bp, Artificial Sequence
  Description of Artificial Sequence: Synthetic oligonucleotide
  Target: PCSK9; (+) strand; PAM type: NRG; PAM sequence: TAG
ctgatatcagtcattggatt

SEQ ID NO: 13028 - DNA, 20 bp, Artificial Sequence
  Description of Artificial Sequence: Synthetic oligonucleotide
  Target: PCSK9; (+) strand; PAM type: NRG; PAM sequence: AGG
tgatatcagtcattggattt

SEQ ID NO: 13029 - DNA, 20 bp, Artificial Sequence
  Description of Artificial Sequence: Synthetic oligonucleotide
  Target: PCSK9; (+) strand; PAM type: NRG; PAM sequence: GGG
gatatcagtcattggattta

SEQ ID NO: 13030 - DNA, 20 bp, Artificial Sequence
  Description of Artificial Sequence: Synthetic oligonucleotide
  Target: PCSK9; (+) strand; PAM type: NRG; PAM sequence: CAG
tttagggaccatcctaaacc

SEQ ID NO: 13031 - DNA, 20 bp, Artificial Sequence
  Description of Artificial Sequence: Synthetic oligonucleotide
  Target: PCSK9; (+) strand; PAM type: NRG; PAM sequence: AGG
ttagggaccatcctaaaccc

SEQ ID NO: 13032 - DNA, 20 bp, Artificial Sequence
  Description of Artificial Sequence: Synthetic oligonucleotide
  Target: PCSK9; (+) strand; PAM type: NRG; PAM sequence: GAG
acccaggataatctcctcat

SEQ ID NO: 13033 - DNA, 20 bp, Artificial Sequence
  Description of Artificial Sequence: Synthetic oligonucleotide
  Target: PCSK9; (+) strand; PAM type: NRG; PAM sequence: TAG
taatctcctcatgagatcct

SEQ ID NO: 13034 - DNA, 20 bp, Artificial Sequence
  Description of Artificial Sequence: Synthetic oligonucleotide
  Target: PCSK9; (+) strand; PAM type: NRG; PAM sequence: AGG
aatctcctcatgagatcctt

SEQ ID NO: 13035 - DNA, 20 bp, Artificial Sequence
  Description of Artificial Sequence: Synthetic oligonucleotide
  Target: PCSK9; (+) strand; PAM type: NRG; PAM sequence: AAG
ttaggtcaattacatctgca

SEQ ID NO: 13036 - DNA, 20 bp, Artificial Sequence
  Description of Artificial Sequence: Synthetic oligonucleotide
  Target: PCSK9; (+) strand; PAM type: NRG; PAM sequence: AAG
caaagatctcatttccaaat

SEQ ID NO: 13037 - DNA, 20 bp, Artificial Sequence
  Description of Artificial Sequence: Synthetic oligonucleotide
  Target: PCSK9; (+) strand; PAM type: NRG; PAM sequence: AGG
aaagatctcatttccaaata

SEQ ID NO: 13038 - DNA, 20 bp, Artificial Sequence
  Description of Artificial Sequence: Synthetic oligonucleotide
  Target: PCSK9; (+) strand; PAM type: NRG; PAM sequence: AAG
ccaaataaggtcacattcaa

SEQ ID NO: 13039 - DNA, 20 bp, Artificial Sequence
  Description of Artificial Sequence: Synthetic oligonucleotide
  Target: PCSK9; (+) strand; PAM type: NRG; PAM sequence: CAG
aaggtcacattcaaaagtac

SEQ ID NO: 13040 - DNA, 20 bp, Artificial Sequence
  Description of Artificial Sequence: Synthetic oligonucleotide
  Target: PCSK9; (+) strand; PAM type: NRG; PAM sequence: AGG
aggtcacattcaaaagtacc

SEQ ID NO: 13041 - DNA, 20 bp, Artificial Sequence
  Description of Artificial Sequence: Synthetic oligonucleotide
  Target: PCSK9; (+) strand; PAM type: NRG; PAM sequence: GGG
ggtcacattcaaaagtacca

SEQ ID NO: 13042 - DNA, 20 bp, Artificial Sequence
  Description of Artificial Sequence: Synthetic oligonucleotide
  Target: PCSK9; (+) strand; PAM type: NRG; PAM sequence: GGG
gtcacattcaaaagtaccag

SEQ ID NO: 13043 - DNA, 20 bp, Artificial Sequence
  Description of Artificial Sequence: Synthetic oligonucleotide
  Target: PCSK9; (+) strand; PAM type: NRG; PAM sequence: TAG
cattcaaaagtaccaggggt

SEQ ID NO: 13044 - DNA, 20 bp, Artificial Sequence
  Description of Artificial Sequence: Synthetic oligonucleotide
  Target: PCSK9; (+) strand; PAM type: NRG; PAM sequence: TAG
aaagtaccaggggttagtct

SEQ ID NO: 13045 - DNA, 20 bp, Artificial Sequence
  Description of Artificial Sequence: Synthetic oligonucleotide
  Target: PCSK9; (+) strand; PAM type: NRG; PAM sequence: TGG
tagtcttagacttatctttt

SEQ ID NO: 13046 - DNA, 20 bp, Artificial Sequence
  Description of Artificial Sequence: Synthetic oligonucleotide
  Target: PCSK9; (+) strand; PAM type: NRG; PAM sequence: GGG
agtcttagacttatcttttt

SEQ ID NO: 13047 - DNA, 20 bp, Artificial Sequence
  Description of Artificial Sequence: Synthetic oligonucleotide
  Target: PCSK9; (+) strand; PAM type: NRG; PAM sequence: GGG
gtcttagacttatctttttg

SEQ ID NO: 13048 - DNA, 20 bp, Artificial Sequence
  Description of Artificial Sequence: Synthetic oligonucleotide
  Target: PCSK9; (+) strand; PAM type: NRG; PAM sequence: GGG
tcttagacttatctttttgg

SEQ ID NO: 13049 - DNA, 20 bp, Artificial Sequence
  Description of Artificial Sequence: Synthetic oligonucleotide
  Target: PCSK9; (+) strand; PAM type: NRG; PAM sequence: TGG
cacgattcaacccactaccg

SEQ ID NO: 13050 - DNA, 20 bp, Artificial Sequence
  Description of Artificial Sequence: Synthetic oligonucleotide
  Target: PCSK9; (+) strand; PAM type: NRG; PAM sequence: GGG
acgattcaacccactaccgt

SEQ ID NO: 13051 - DNA, 20 bp, Artificial Sequence
  Description of Artificial Sequence: Synthetic oligonucleotide
  Target: PCSK9; (+) strand; PAM type: NRG; PAM sequence: CAG
caacccactaccgtgggtaa

SEQ ID NO: 13052 - DNA, 20 bp, Artificial Sequence
  Description of Artificial Sequence: Synthetic oligonucleotide
  Target: PCSK9; (+) strand; PAM type: NRG; PAM sequence: TGG
cccactaccgtgggtaacag

SEQ ID NO: 13053 - DNA, 20 bp, Artificial Sequence
  Description of Artificial Sequence: Synthetic oligonucleotide
  Target: PCSK9; (+) strand; PAM type: NRG; PAM sequence: CAG
gggtaacagtggttttccct

SEQ ID NO: 13054 - DNA, 20 bp, Artificial Sequence
  Description of Artificial Sequence: Synthetic oligonucleotide
  Target: PCSK9; (+) strand; PAM type: NRG; PAM sequence: AAG
taacagtggttttccctcag

SEQ ID NO: 13055 - DNA, 20 bp, Artificial Sequence
  Description of Artificial Sequence: Synthetic oligonucleotide
  Target: PCSK9; (+) strand; PAM type: NRG; PAM sequence: AGG
aacagtggttttccctcaga

SEQ ID NO: 13056 - DNA, 20 bp, Artificial Sequence
  Description of Artificial Sequence: Synthetic oligonucleotide
  Target: PCSK9; (+) strand; PAM type: NRG; PAM sequence: TGG
agtggttttccctcagaagg

SEQ ID NO: 13057 - DNA, 20 bp, Artificial Sequence
  Description of Artificial Sequence: Synthetic oligonucleotide
  Target: PCSK9; (+) strand; PAM type: NRG; PAM sequence: TGG
ggttttccctcagaaggtgg

SEQ ID NO: 13058 - DNA, 20 bp, Artificial Sequence
  Description of Artificial Sequence: Synthetic oligonucleotide
  Target: PCSK9; (+) strand; PAM type: NRG; PAM sequence: CAG
tccctcagaaggtggtggtt

SEQ ID NO: 13059 - DNA, 20 bp, Artificial Sequence
  Description of Artificial Sequence: Synthetic oligonucleotide
  Target: PCSK9; (+) strand; PAM type: NRG; PAM sequence: AGG
ccctcagaaggtggtggttc

SEQ ID NO: 13060 - DNA, 20 bp, Artificial Sequence
  Description of Artificial Sequence: Synthetic oligonucleotide
  Target: PCSK9; (+) strand; PAM type: NRG; PAM sequence: GAG
ctcagaaggtggtggttcag

SEQ ID NO: 13061 - DNA, 20 bp, Artificial Sequence
  Description of Artificial Sequence: Synthetic oligonucleotide
  Target: PCSK9; (+) strand; PAM type: NRG; PAM sequence: TGG
agaaggtggtggttcaggag

SEQ ID NO: 13062 - DNA, 20 bp, Artificial Sequence
  Description of Artificial Sequence: Synthetic oligonucleotide
  Target: PCSK9; (+) strand; PAM type: NRG; PAM sequence: GGG
gaaggtggtggttcaggagt

SEQ ID NO: 13063 - DNA, 20 bp, Artificial Sequence
  Description of Artificial Sequence: Synthetic oligonucleotide
  Target: PCSK9; (+) strand; PAM type: NRG; PAM sequence: GAG
aggtggtggttcaggagtgg

SEQ ID NO: 13064 - DNA, 20 bp, Artificial Sequence
  Description of Artificial Sequence: Synthetic oligonucleotide
  Target: PCSK9; (+) strand; PAM type: NRG; PAM sequence: AGG
ggtggtggttcaggagtggg

SEQ ID NO: 13065 - DNA, 20 bp, Artificial Sequence
  Description of Artificial Sequence: Synthetic oligonucleotide
  Target: PCSK9; (+) strand; PAM type: NRG; PAM sequence: AAG
ggtggttcaggagtgggagg

SEQ ID NO: 13066 - DNA, 20 bp, Artificial Sequence
  Description of Artificial Sequence: Synthetic oligonucleotide
  Target: PCSK9; (+) strand; PAM type: NRG; PAM sequence: AAG
aaattgaacattcacacaaa

SEQ ID NO: 13067 - DNA, 20 bp, Artificial Sequence
  Description of Artificial Sequence: Synthetic oligonucleotide
  Target: PCSK9; (+) strand; PAM type: NRG; PAM sequence: AAG
atgccccctcccttgcaaaa

SEQ ID NO: 13068 - DNA, 20 bp, Artificial Sequence
  Description of Artificial Sequence: Synthetic oligonucleotide
  Target: PCSK9; (+) strand; PAM type: NRG; PAM sequence: GAG
gccccctcccttgcaaaaaa

SEQ ID NO: 13069 - DNA, 20 bp, Artificial Sequence
  Description of Artificial Sequence: Synthetic oligonucleotide
  Target: PCSK9; (+) strand; PAM type: NRG; PAM sequence: CAG
aatgttgaaatgtacactca

SEQ ID NO: 13070 - DNA, 20 bp, Artificial Sequence
  Description of Artificial Sequence: Synthetic oligonucleotide
  Target: PCSK9; (+) strand; PAM type: NRG; PAM sequence: TGG
gaaatgtacactcacagcaa

SEQ ID NO: 13071 - DNA, 20 bp, Artificial Sequence
  Description of Artificial Sequence: Synthetic oligonucleotide
  Target: PCSK9; (+) strand; PAM type: NRG; PAM sequence: TGG
atgtacactcacagcaatgg

SEQ ID NO: 13072 - DNA, 20 bp, Artificial Sequence
  Description of Artificial Sequence: Synthetic oligonucleotide
  Target: PCSK9; (+) strand; PAM type: NRG; PAM sequence: CAG
actcacagcaatggtggctg

SEQ ID NO: 13073 - DNA, 20 bp, Artificial Sequence
  Description of Artificial Sequence: Synthetic oligonucleotide
  Target: PCSK9; (+) strand; PAM type: NRG; PAM sequence: AAG
caatggtggctgcagactcc

SEQ ID NO: 13074 - DNA, 20 bp, Artificial Sequence
  Description of Artificial Sequence: Synthetic oligonucleotide
  Target: PCSK9; (+) strand; PAM type: NRG; PAM sequence: GAG
gctgcagactccaagtttct

SEQ ID NO: 13075 - DNA, 20 bp, Artificial Sequence
  Description of Artificial Sequence: Synthetic oligonucleotide
  Target: PCSK9; (+) strand; PAM type: NRG; PAM sequence: AGG
ctgcagactccaagtttctg

SEQ ID NO: 13076 - DNA, 20 bp, Artificial Sequence
  Description of Artificial Sequence: Synthetic oligonucleotide
  Target: PCSK9; (+) strand; PAM type: NRG; PAM sequence: TGG
agactccaagtttctgaggt

SEQ ID NO: 13077 - DNA, 20 bp, Artificial Sequence
  Description of Artificial Sequence: Synthetic oligonucleotide
  Target: PCSK9; (+) strand; PAM type: NRG; PAM sequence: GAG
actccaagtttctgaggttg

SEQ ID NO: 13078 - DNA, 20 bp, Artificial Sequence
  Description of Artificial Sequence: Synthetic oligonucleotide
  Target: PCSK9; (+) strand; PAM type: NRG; PAM sequence: AAG
ccaagtttctgaggttggag

SEQ ID NO: 13079 - DNA, 20 bp, Artificial Sequence
  Description of Artificial Sequence: Synthetic oligonucleotide
  Target: PCSK9; (+) strand; PAM type: NRG; PAM sequence: AGG
caagtttctgaggttggaga

SEQ ID NO: 13080 - DNA, 20 bp, Artificial Sequence
  Description of Artificial Sequence: Synthetic oligonucleotide
  Target: PCSK9; (+) strand; PAM type: NRG; PAM sequence: TAG
gtttctgaggttggagaagg

SEQ ID NO: 13081 - DNA, 20 bp, Artificial Sequence
  Description of Artificial Sequence: Synthetic oligonucleotide
  Target: PCSK9; (+) strand; PAM type: NRG; PAM sequence: CAG
ctgaggttggagaaggtagc

SEQ ID NO: 13082 - DNA, 20 bp, Artificial Sequence
  Description of Artificial Sequence: Synthetic oligonucleotide
  Target: PCSK9; (+) strand; PAM type: NRG; PAM sequence: AGG
tgaggttggagaaggtagcc

SEQ ID NO: 13083 - DNA, 20 bp, Artificial Sequence
  Description of Artificial Sequence: Synthetic oligonucleotide
  Target: PCSK9; (+) strand; PAM type: NRG; PAM sequence: GGG
gaggttggagaaggtagcca

SEQ ID NO: 13084 - DNA, 20 bp, Artificial Sequence
  Description of Artificial Sequence: Synthetic oligonucleotide
  Target: PCSK9; (+) strand; PAM type: NRG; PAM sequence: GAG
ggttggagaaggtagccagg

SEQ ID NO: 13085 - DNA, 20 bp, Artificial Sequence
  Description of Artificial Sequence: Synthetic oligonucleotide
  Target: PCSK9; (+) strand; PAM type: NRG; PAM sequence: AAG
aaggtagccagggagcataa

SEQ ID NO: 13086 - DNA, 20 bp, Artificial Sequence
  Description of Artificial Sequence: Synthetic oligonucleotide
  Target: PCSK9; (+) strand; PAM type: NRG; PAM sequence: GAG
tagccagggagcataaaagt

SEQ ID NO: 13087 - DNA, 20 bp, Artificial Sequence
  Description of Artificial Sequence: Synthetic oligonucleotide
  Target: PCSK9; (+) strand; PAM type: NRG; PAM sequence: CAG
gtgagttctatctactcatt

SEQ ID NO: 13088 - DNA, 20 bp, Artificial Sequence
  Description of Artificial Sequence: Synthetic oligonucleotide
  Target: PCSK9; (+) strand; PAM type: NRG; PAM sequence: GAG
tatctactcattcagtctat

SEQ ID NO: 13089 - DNA, 20 bp, Artificial Sequence
  Description of Artificial Sequence: Synthetic oligonucleotide
  Target: PCSK9; (+) strand; PAM type: NRG; PAM sequence: AGG
atctactcattcagtctatg

SEQ ID NO: 13090 - DNA, 20 bp, Artificial Sequence
  Description of Artificial Sequence: Synthetic oligonucleotide
  Target: PCSK9; (+) strand; PAM type: NRG; PAM sequence: GGG
tctactcattcagtctatga

SEQ ID NO: 13091 - DNA, 20 bp, Artificial Sequence
  Description of Artificial Sequence: Synthetic oligonucleotide
  Target: PCSK9; (+) strand; PAM type: NRG; PAM sequence: GGG
ctactcattcagtctatgag

SEQ ID NO: 13092 - DNA, 20 bp, Artificial Sequence
  Description of Artificial Sequence: Synthetic oligonucleotide
  Target: PCSK9; (+) strand; PAM type: NRG; PAM sequence: AAG
ctcattcagtctatgagggg

SEQ ID NO: 13093 - DNA, 20 bp, Artificial Sequence
  Description of Artificial Sequence: Synthetic oligonucleotide
  Target: PCSK9; (+) strand; PAM type: NRG; PAM sequence: AGG
tcattcagtctatgagggga

SEQ ID NO: 13094 - DNA, 20 bp, Artificial Sequence
  Description of Artificial Sequence: Synthetic oligonucleotide
  Target: PCSK9; (+) strand; PAM type: NRG; PAM sequence: TGG
agtctatgaggggaaggcaa

SEQ ID NO: 13095 - DNA, 20 bp, Artificial Sequence
  Description of Artificial Sequence: Synthetic oligonucleotide
  Target: PCSK9; (+) strand; PAM type: NRG; PAM sequence: TAG
tatgaggggaaggcaatggc

SEQ ID NO: 13096 - DNA, 20 bp, Artificial Sequence
  Description of Artificial Sequence: Synthetic oligonucleotide
  Target: PCSK9; (+) strand; PAM type: NRG; PAM sequence: AAG
ggggaaggcaatggctagaa

SEQ ID NO: 13097 - DNA, 20 bp, Artificial Sequence
  Description of Artificial Sequence: Synthetic oligonucleotide
  Target: PCSK9; (+) strand; PAM type: NRG; PAM sequence: GAG
aatggctagaaaagcatttt

SEQ ID NO: 13098 - DNA, 20 bp, Artificial Sequence
  Description of Artificial Sequence: Synthetic oligonucleotide
  Target: PCSK9; (+) strand; PAM type: NRG; PAM sequence: AGG
atggctagaaaagcattttg

SEQ ID NO: 13099 - DNA, 20 bp, Artificial Sequence
  Description of Artificial Sequence: Synthetic oligonucleotide
  Target: PCSK9; (+) strand; PAM type: NRG; PAM sequence: GGG
tggctagaaaagcattttga

SEQ ID NO: 13100 - DNA, 20 bp, Artificial Sequence
  Description of Artificial Sequence: Synthetic oligonucleotide
  Target: PCSK9; (+) strand; PAM type: NRG; PAM sequence: CAG
tagaaaagcattttgaggga

SEQ ID NO: 13101 - DNA, 20 bp, Artificial Sequence
  Description of Artificial Sequence: Synthetic oligonucleotide
  Target: PCSK9; (+) strand; PAM type: NRG; PAM sequence: AAG
agcattttgagggacagtaa

SEQ ID NO: 13102 - DNA, 20 bp, Artificial Sequence
  Description of Artificial Sequence: Synthetic oligonucleotide
  Target: PCSK9; (+) strand; PAM type: NRG; PAM sequence: TGG
attttgagggacagtaaaag

SEQ ID NO: 13103 - DNA, 20 bp, Artificial Sequence
  Description of Artificial Sequence: Synthetic oligonucleotide
  Target: PCSK9; (+) strand; PAM type: NRG; PAM sequence: TAG
gacagtaaaagtggcatttt

SEQ ID NO: 13104 - DNA, 20 bp, Artificial Sequence
  Description of Artificial Sequence: Synthetic oligonucleotide
  Target: PCSK9; (+) strand; PAM type: NRG; PAM sequence: GAG
cagtaaaagtggcattttta

SEQ ID NO: 13105 - DNA, 20 bp, Artificial Sequence
  Description of Artificial Sequence: Synthetic oligonucleotide
  Target: PCSK9; (+) strand; PAM type: NRG; PAM sequence: AGG
agtaaaagtggcatttttag

SEQ ID NO: 13106 - DNA, 20 bp, Artificial Sequence
  Description of Artificial Sequence: Synthetic oligonucleotide
  Target: PCSK9; (+) strand; PAM type: NRG; PAM sequence: GGG
gtaaaagtggcatttttaga

SEQ ID NO: 13107 - DNA, 20 bp, Artificial Sequence
  Description of Artificial Sequence: Synthetic oligonucleotide
  Target: PCSK9; (+) strand; PAM type: NRG; PAM sequence: GAG
aaaagtggcatttttagagg

SEQ ID NO: 13108 - DNA, 20 bp, Artificial Sequence
  Description of Artificial Sequence: Synthetic oligonucleotide
  Target: PCSK9; (+) strand; PAM type: NRG; PAM sequence: AGG
aaagtggcatttttagaggg

SEQ ID NO: 13109 - DNA, 20 bp, Artificial Sequence
  Description of Artificial Sequence: Synthetic oligonucleotide
  Target: PCSK9; (+) strand; PAM type: NRG; PAM sequence: AAG
gtggcatttttagagggagg

SEQ ID NO: 13110 - DNA, 20 bp, Artificial Sequence
  Description of Artificial Sequence: Synthetic oligonucleotide
  Target: PCSK9; (+) strand; PAM type: NRG; PAM sequence: GAG
ttttagagggaggaagcctt

SEQ ID NO: 13111 - DNA, 20 bp, Artificial Sequence
  Description of Artificial Sequence: Synthetic oligonucleotide
  Target: PCSK9; (+) strand; PAM type: NRG; PAM sequence: AGG
tttagagggaggaagccttg

SEQ ID NO: 13112 - DNA, 20 bp, Artificial Sequence
  Description of Artificial Sequence: Synthetic oligonucleotide
  Target: PCSK9; (+) strand; PAM type: NRG; PAM sequence: TGG
ggaagccttgaggatgcttg

SEQ ID NO: 13113 - DNA, 20 bp, Artificial Sequence
  Description of Artificial Sequence: Synthetic oligonucleotide
  Target: PCSK9; (+) strand; PAM type: NRG; PAM sequence: GGG
gaagccttgaggatgcttgt

SEQ ID NO: 13114 - DNA, 20 bp, Artificial Sequence
  Description of Artificial Sequence: Synthetic oligonucleotide
  Target: PCSK9; (+) strand; PAM type: NRG; PAM sequence: GGG
aagccttgaggatgcttgtg

SEQ ID NO: 13115 - DNA, 20 bp, Artificial Sequence
  Description of Artificial Sequence: Synthetic oligonucleotide
  Target: PCSK9; (+) strand; PAM type: NRG; PAM sequence: AAG
ttgaggatgcttgtggggtg

SEQ ID NO: 13116 - DNA, 20 bp, Artificial Sequence
  Description of Artificial Sequence: Synthetic oligonucleotide
  Target: PCSK9; (+) strand; PAM type: NRG; PAM sequence: AGG
tgaggatgcttgtggggtga

SEQ ID NO: 13117 - DNA, 20 bp, Artificial Sequence
  Description of Artificial Sequence: Synthetic oligonucleotide
  Target: PCSK9; (+) strand; PAM type: NRG; PAM sequence: GGG
gaggatgcttgtggggtgaa

SEQ ID NO: 13118 - DNA, 20 bp, Artificial Sequence
  Description of Artificial Sequence: Synthetic oligonucleotide
  Target: PCSK9; (+) strand; PAM type: NRG; PAM sequence: AAG
atgcttgtggggtgaaggga

SEQ ID NO: 13119 - DNA, 20 bp, Artificial Sequence
  Description of Artificial Sequence: Synthetic oligonucleotide
  Target: PCSK9; (+) strand; PAM type: NRG; PAM sequence: CAG
ggtgaagggaaagaataact

SEQ ID NO: 13120 - DNA, 20 bp, Artificial Sequence
  Description of Artificial Sequence: Synthetic oligonucleotide
  Target: PCSK9; (+) strand; PAM type: NRG; PAM sequence: AGG
gtgaagggaaagaataactc

SEQ ID NO: 13121 - DNA, 20 bp, Artificial Sequence
  Description of Artificial Sequence: Synthetic oligonucleotide
  Target: PCSK9; (+) strand; PAM type: NRG; PAM sequence: AAG
aagggaaagaataactcagg

SEQ ID NO: 13122 - DNA, 20 bp, Artificial Sequence
  Description of Artificial Sequence: Synthetic oligonucleotide
  Target: PCSK9; (+) strand; PAM type: NRG; PAM sequence: GAG
gggaaagaataactcaggaa

SEQ ID NO: 13123 - DNA, 20 bp, Artificial Sequence
  Description of Artificial Sequence: Synthetic oligonucleotide
  Target: PCSK9; (+) strand; PAM type: NRG; PAM sequence: AGG
ggaaagaataactcaggaag

SEQ ID NO: 13124 - DNA, 20 bp, Artificial Sequence
  Description of Artificial Sequence: Synthetic oligonucleotide
  Target: PCSK9; (+) strand; PAM type: NRG; PAM sequence: TAG
ataactcaggaagaggcatt

SEQ ID NO: 13125 - DNA, 20 bp, Artificial Sequence
  Description of Artificial Sequence: Synthetic oligonucleotide
  Target: PCSK9; (+) strand; PAM type: NRG; PAM sequence: AGG
taactcaggaagaggcattt

SEQ ID NO: 13126 - DNA, 20 bp, Artificial Sequence
  Description of Artificial Sequence: Synthetic oligonucleotide
  Target: PCSK9; (+) strand; PAM type: NRG; PAM sequence: GGG
aactcaggaagaggcattta

SEQ ID NO: 13127 - DNA, 20 bp, Artificial Sequence
  Description of Artificial Sequence: Synthetic oligonucleotide
  Target: PCSK9; (+) strand; PAM type: NRG; PAM sequence: AAG
aggaagaggcatttagggat

SEQ ID NO: 13128 - DNA, 20 bp, Artificial Sequence
  Description of Artificial Sequence: Synthetic oligonucleotide
  Target: PCSK9; (+) strand; PAM type: NRG; PAM sequence: GAG
gaagaggcatttagggataa

SEQ ID NO: 13129 - DNA, 20 bp, Artificial Sequence
  Description of Artificial Sequence: Synthetic oligonucleotide
  Target: PCSK9; (+) strand; PAM type: NRG; PAM sequence: AGG
aagaggcatttagggataag

SEQ ID NO: 13130 - DNA, 20 bp, Artificial Sequence
  Description of Artificial Sequence: Synthetic oligonucleotide
  Target: PCSK9; (+) strand; PAM type: NRG; PAM sequence: GAG
gaggcatttagggataagag

SEQ ID NO: 13131 - DNA, 20 bp, Artificial Sequence
  Description of Artificial Sequence: Synthetic oligonucleotide
  Target: PCSK9; (+) strand; PAM type: NRG; PAM sequence: AGG
aggcatttagggataagagg

SEQ ID NO: 13132 - DNA, 20 bp, Artificial Sequence
  Description of Artificial Sequence: Synthetic oligonucleotide
  Target: PCSK9; (+) strand; PAM type: NRG; PAM sequence: GAG
gcatttagggataagaggag

SEQ ID NO: 13133 - DNA, 20 bp, Artificial Sequence
  Description of Artificial Sequence: Synthetic oligonucleotide
  Target: PCSK9; (+) strand; PAM type: NRG; PAM sequence: GAG
atttagggataagaggagga

SEQ ID NO: 13134 - DNA, 20 bp, Artificial Sequence
  Description of Artificial Sequence: Synthetic oligonucleotide
  Target: PCSK9; (+) strand; PAM type: NRG; PAM sequence: AGG
tttagggataagaggaggag

SEQ ID NO: 13135 - DNA, 20 bp, Artificial Sequence
  Description of Artificial Sequence: Synthetic oligonucleotide
  Target: PCSK9; (+) strand; PAM type: NRG; PAM sequence: GAG
tagggataagaggaggagag

SEQ ID NO: 13136 - DNA, 20 bp, Artificial Sequence
  Description of Artificial Sequence: Synthetic oligonucleotide
  Target: PCSK9; (+) strand; PAM type: NRG; PAM sequence: TAG
gataagaggaggagaggaga

SEQ ID NO: 13137 - DNA, 20 bp, Artificial Sequence
  Description of Artificial Sequence: Synthetic oligonucleotide
  Target: PCSK9; (+) strand; PAM type: NRG; PAM sequence: TGG
aagaggaggagaggagatag

SEQ ID NO: 13138 - DNA, 20 bp, Artificial Sequence
  Description of Artificial Sequence: Synthetic oligonucleotide
  Target: PCSK9; (+) strand; PAM type: NRG; PAM sequence: GAG
gaggaggagaggagatagtg

SEQ ID NO: 13139 - DNA, 20 bp, Artificial Sequence
  Description of Artificial Sequence: Synthetic oligonucleotide
  Target: PCSK9; (+) strand; PAM type: NRG; PAM sequence: AGG
aggaggagaggagatagtgg

SEQ ID NO: 13140 - DNA, 20 bp, Artificial Sequence
  Description of Artificial Sequence: Synthetic oligonucleotide
  Target: PCSK9; (+) strand; PAM type: NRG; PAM sequence: TAG
aggagaggagatagtggagg

SEQ ID NO: 13141 - DNA, 20 bp, Artificial Sequence
  Description of Artificial Sequence: Synthetic oligonucleotide
  Target: PCSK9; (+) strand; PAM type: NRG; PAM sequence: AGG
ggagaggagatagtggaggt

SEQ ID NO: 13142 - DNA, 20 bp, Artificial Sequence
  Description of Artificial Sequence: Synthetic oligonucleotide
  Target: PCSK9; (+) strand; PAM type: NRG; PAM sequence: CGG
gtggaggtaggtgatccctg

SEQ ID NO: 13143 - DNA, 20 bp, Artificial Sequence
  Description of Artificial Sequence: Synthetic oligonucleotide
  Target: PCSK9; (+) strand; PAM type: NRG; PAM sequence: GAG
ggaggtaggtgatccctgcg

SEQ ID NO: 13144 - DNA, 20 bp, Artificial Sequence
  Description of Artificial Sequence: Synthetic oligonucleotide
  Target: PCSK9; (+) strand; PAM type: NRG; PAM sequence: AGG
gaggtaggtgatccctgcgg

SEQ ID NO: 13145 - DNA, 20 bp, Artificial Sequence
  Description of Artificial Sequence: Synthetic oligonucleotide
  Target: PCSK9; (+) strand; PAM type: NRG; PAM sequence: CAG
taggtgatccctgcggaggc

SEQ ID NO: 13146 - DNA, 20 bp, Artificial Sequence
  Description of Artificial Sequence: Synthetic oligonucleotide
  Target: PCSK9; (+) strand; PAM type: NRG; PAM sequence: TGG
gatccctgcggaggccagat

SEQ ID NO: 13147 - DNA, 20 bp, Artificial Sequence
  Description of Artificial Sequence: Synthetic oligonucleotide
  Target: PCSK9; (+) strand; PAM type: NRG; PAM sequence: GGG
atccctgcggaggccagatt

SEQ ID NO: 13148 - DNA, 20 bp, Artificial Sequence
  Description of Artificial Sequence: Synthetic oligonucleotide
  Target: PCSK9; (+) strand; PAM type: NRG; PAM sequence: GGG
tccctgcggaggccagattg

SEQ ID NO: 13149 - DNA, 20 bp, Artificial Sequence
  Description of Artificial Sequence: Synthetic oligonucleotide
  Target: PCSK9; (+) strand; PAM type: NRG; PAM sequence: CAG
ctgcggaggccagattgggg

SEQ ID NO: 13150 - DNA, 20 bp, Artificial Sequence
  Description of Artificial Sequence: Synthetic oligonucleotide
  Target: PCSK9; (+) strand; PAM type: NRG; PAM sequence: AGG
tgcggaggccagattggggc

SEQ ID NO: 13151 - DNA, 20 bp, Artificial Sequence
  Description of Artificial Sequence: Synthetic oligonucleotide
  Target: PCSK9; (+) strand; PAM type: NRG; PAM sequence: GGG
gcggaggccagattggggca

SEQ ID NO: 13152 - DNA, 20 bp, Artificial Sequence
  Description of Artificial Sequence: Synthetic oligonucleotide
  Target: PCSK9; (+) strand; PAM type: NRG; PAM sequence: GGG
cggaggccagattggggcag

SEQ ID NO: 13153 - DNA, 20 bp, Artificial Sequence
  Description of Artificial Sequence: Synthetic oligonucleotide
  Target: PCSK9; (+) strand; PAM type: NRG; PAM sequence: GAG
gaggccagattggggcaggg

SEQ ID NO: 13154 - DNA, 20 bp, Artificial Sequence
  Description of Artificial Sequence: Synthetic oligonucleotide
  Target: PCSK9; (+) strand; PAM type: NRG; PAM sequence: CAG
agattggggcaggggagtgt

SEQ ID NO: 13155 - DNA, 20 bp, Artificial Sequence
  Description of Artificial Sequence: Synthetic oligonucleotide
  Target: PCSK9; (+) strand; PAM type: NRG; PAM sequence: GAG
ggggcaggggagtgtcagct

SEQ ID NO: 13156 - DNA, 20 bp, Artificial Sequence
  Description of Artificial Sequence: Synthetic oligonucleotide
  Target: PCSK9; (+) strand; PAM type: NRG; PAM sequence: AAG
ggggagtgtcagctgagtat

SEQ ID NO: 13157 - DNA, 20 bp, Artificial Sequence
  Description of Artificial Sequence: Synthetic oligonucleotide
  Target: PCSK9; (+) strand; PAM type: NRG; PAM sequence: GAG
ggagtgtcagctgagtataa

SEQ ID NO: 13158 - DNA, 20 bp, Artificial Sequence
  Description of Artificial Sequence: Synthetic oligonucleotide
  Target: PCSK9; (+) strand; PAM type: NRG; PAM sequence: AGG
gagtgtcagctgagtataag

SEQ ID NO: 13159 - DNA, 20 bp, Artificial Sequence
  Description of Artificial Sequence: Synthetic oligonucleotide
  Target: PCSK9; (+) strand; PAM type: NRG; PAM sequence: TGG
gtcagctgagtataagagga

SEQ ID NO: 13160 - DNA, 20 bp, Artificial Sequence
  Description of Artificial Sequence: Synthetic oligonucleotide
  Target: PCSK9; (+) strand; PAM type: NRG; PAM sequence: AAG
ggatggtcccctctgccctg

SEQ ID NO: 13161 - DNA, 20 bp, Artificial Sequence
  Description of Artificial Sequence: Synthetic oligonucleotide
  Target: PCSK9; (+) strand; PAM type: NRG; PAM sequence: AGG
gatggtcccctctgccctga

SEQ ID NO: 13162 - DNA, 20 bp, Artificial Sequence
  Description of Artificial Sequence: Synthetic oligonucleotide
  Target: PCSK9; (+) strand; PAM type: NRG; PAM sequence: GAG
tggtcccctctgccctgaag

SEQ ID NO: 13163 - DNA, 20 bp, Artificial Sequence
  Description of Artificial Sequence: Synthetic oligonucleotide
  Target: PCSK9; (+) strand; PAM type: NRG; PAM sequence: AGG
ggtcccctctgccctgaagg

SEQ ID NO: 13164 - DNA, 20 bp, Artificial Sequence
  Description of Artificial Sequence: Synthetic oligonucleotide
  Target: PCSK9; (+) strand; PAM type: NRG; PAM sequence: AAG
cccctctgccctgaaggagg

SEQ ID NO: 13165 - DNA, 20 bp, Artificial Sequence
  Description of Artificial Sequence: Synthetic oligonucleotide
  Target: PCSK9; (+) strand; PAM type: NRG; PAM sequence: AGG
ccctctgccctgaaggagga

SEQ ID NO: 13166 - DNA, 20 bp, Artificial Sequence
  Description of Artificial Sequence: Synthetic oligonucleotide
  Target: PCSK9; (+) strand; PAM type: NRG; PAM sequence: CAG
tctgccctgaaggaggaagg

SEQ ID NO: 13167 - DNA, 20 bp, Artificial Sequence
  Description of Artificial Sequence: Synthetic oligonucleotide
  Target: PCSK9; (+) strand; PAM type: NRG; PAM sequence: AGG
ctgccctgaaggaggaaggc

SEQ ID NO: 13168 - DNA, 20 bp, Artificial Sequence
  Description of Artificial Sequence: Synthetic oligonucleotide
  Target: PCSK9; (+) strand; PAM type: NRG; PAM sequence: GAG
gccctgaaggaggaaggcag

SEQ ID NO: 13169 - DNA, 20 bp, Artificial Sequence
  Description of Artificial Sequence: Synthetic oligonucleotide
  Target: PCSK9; (+) strand; PAM type: NRG; PAM sequence: AGG
ccctgaaggaggaaggcagg

SEQ ID NO: 13170 - DNA, 20 bp, Artificial Sequence
  Description of Artificial Sequence: Synthetic oligonucleotide
  Target: PCSK9; (+) strand; PAM type: NRG; PAM sequence: GGG
cctgaaggaggaaggcagga

SEQ ID NO: 13171 - DNA, 20 bp, Artificial Sequence
  Description of Artificial Sequence: Synthetic oligonucleotide
  Target: PCSK9; (+) strand; PAM type: NRG; PAM sequence: GGG
ctgaaggaggaaggcaggag

SEQ ID NO: 13172 - DNA, 20 bp, Artificial Sequence
  Description of Artificial Sequence: Synthetic oligonucleotide
  Target: PCSK9; (+) strand; PAM type: NRG; PAM sequence: AAG
ggaggaaggcaggaggggaa

SEQ ID NO: 13173 - DNA, 20 bp, Artificial Sequence
  Description of Artificial Sequence: Synthetic oligonucleotide
  Target: PCSK9; (+) strand; PAM type: NRG; PAM sequence: AGG
gaggaaggcaggaggggaaa

SEQ ID NO: 13174 - DNA, 20 bp, Artificial Sequence
  Description of Artificial Sequence: Synthetic oligonucleotide
  Target: PCSK9; (+) strand; PAM type: NRG; PAM sequence: TGG
aaggcaggaggggaaaagga

SEQ ID NO: 13175 - DNA, 20 bp, Artificial Sequence
  Description of Artificial Sequence: Synthetic oligonucleotide
  Target: PCSK9; (+) strand; PAM type: NRG; PAM sequence: GGG
aggcaggaggggaaaaggat

SEQ ID NO: 13176 - DNA, 20 bp, Artificial Sequence
  Description of Artificial Sequence: Synthetic oligonucleotide
  Target: PCSK9; (+) strand; PAM type: NRG; PAM sequence: CAG
gaaaaggatgggtgttgacc

SEQ ID NO: 13177 - DNA, 20 bp, Artificial Sequence
  Description of Artificial Sequence: Synthetic oligonucleotide
  Target: PCSK9; (+) strand; PAM type: NRG; PAM sequence: AAG
aggatgggtgttgacccaga

SEQ ID NO: 13178 - DNA, 20 bp, Artificial Sequence
  Description of Artificial Sequence: Synthetic oligonucleotide
  Target: PCSK9; (+) strand; PAM type: NRG; PAM sequence: TGG
gttgacccagaaagcacttg

SEQ ID NO: 13179 - DNA, 20 bp, Artificial Sequence
  Description of Artificial Sequence: Synthetic oligonucleotide
  Target: PCSK9; (+) strand; PAM type: NRG; PAM sequence: TGG
gacccagaaagcacttgtgg

SEQ ID NO: 13180 - DNA, 20 bp, Artificial Sequence
  Description of Artificial Sequence: Synthetic oligonucleotide
  Target: PCSK9; (+) strand; PAM type: NRG; PAM sequence: GAG
cccagaaagcacttgtggtg

SEQ ID NO: 13181 - DNA, 20 bp, Artificial Sequence
  Description of Artificial Sequence: Synthetic oligonucleotide
  Target: PCSK9; (+) strand; PAM type: NRG; PAM sequence: AGG
ccagaaagcacttgtggtgg

SEQ ID NO: 13182 - DNA, 20 bp, Artificial Sequence
  Description of Artificial Sequence: Synthetic oligonucleotide
  Target: PCSK9; (+) strand; PAM type: NRG; PAM sequence: GGG
cagaaagcacttgtggtgga

SEQ ID NO: 13183 - DNA, 20 bp, Artificial Sequence
  Description of Artificial Sequence: Synthetic oligonucleotide
  Target: PCSK9; (+) strand; PAM type: NRG; PAM sequence: GGG
agaaagcacttgtggtggag

SEQ ID NO: 13184 - DNA, 20 bp, Artificial Sequence
  Description of Artificial Sequence: Synthetic oligonucleotide
  Target: PCSK9; (+) strand; PAM type: NRG; PAM sequence: GAG
aaagcacttgtggtggaggg

SEQ ID NO: 13185 - DNA, 20 bp, Artificial Sequence
  Description of Artificial Sequence: Synthetic oligonucleotide
  Target: PCSK9; (+) strand; PAM type: NRG; PAM sequence: AGG
aagcacttgtggtggagggg

SEQ ID NO: 13186 - DNA, 20 bp, Artificial Sequence
  Description of Artificial Sequence: Synthetic oligonucleotide
  Target: PCSK9; (+) strand; PAM type: NRG; PAM sequence: CAG
ttgtggtggaggggaggccc

SEQ ID NO: 13187 - DNA, 20 bp, Artificial Sequence
  Description of Artificial Sequence: Synthetic oligonucleotide
  Target: PCSK9; (+) strand; PAM type: NRG; PAM sequence: AAG
tggtggaggggaggccccag

SEQ ID NO: 13188 - DNA, 20 bp, Artificial Sequence
  Description of Artificial Sequence: Synthetic oligonucleotide
  Target: PCSK9; (+) strand; PAM type: NRG; PAM sequence: GAG
gtggaggggaggccccagaa

SEQ ID NO: 13189 - DNA, 20 bp, Artificial Sequence
  Description of Artificial Sequence: Synthetic oligonucleotide
  Target: PCSK9; (+) strand; PAM type: NRG; PAM sequence: AGG
tggaggggaggccccagaag

SEQ ID NO: 13190 - DNA, 20 bp, Artificial Sequence
  Description of Artificial Sequence: Synthetic oligonucleotide
  Target: PCSK9; (+) strand; PAM type: NRG; PAM sequence: TGG
ttctgacttaccctgattgc

SEQ ID NO: 13191 - DNA, 20 bp, Artificial Sequence
  Description of Artificial Sequence: Synthetic oligonucleotide
  Target: PCSK9; (+) strand; PAM type: NRG; PAM sequence: CAG
ccctgattgctggtacctct

SEQ ID NO: 13192 - DNA, 20 bp, Artificial Sequence
  Description of Artificial Sequence: Synthetic oligonucleotide
  Target: PCSK9; (+) strand; PAM type: NRG; PAM sequence: AGG
cctgattgctggtacctctc

SEQ ID NO: 13193 - DNA, 20 bp, Artificial Sequence
  Description of Artificial Sequence: Synthetic oligonucleotide
  Target: PCSK9; (+) strand; PAM type: NRG; PAM sequence: GGG
ctgattgctggtacctctca

SEQ ID NO: 13194 - DNA, 20 bp, Artificial Sequence
  Description of Artificial Sequence: Synthetic oligonucleotide
  Target: PCSK9; (+) strand; PAM type: NRG; PAM sequence: GGG
tgattgctggtacctctcag

SEQ ID NO: 13195 - DNA, 20 bp, Artificial Sequence
  Description of Artificial Sequence: Synthetic oligonucleotide
  Target: PCSK9; (+) strand; PAM type: NRG; PAM sequence: GAG
attgctggtacctctcaggg

SEQ ID NO: 13196 - DNA, 20 bp, Artificial Sequence
  Description of Artificial Sequence: Synthetic oligonucleotide
  Target: PCSK9; (+) strand; PAM type: NRG; PAM sequence: TGG
ctggtacctctcaggggagc

SEQ ID NO: 13197 - DNA, 20 bp, Artificial Sequence
  Description of Artificial Sequence: Synthetic oligonucleotide
  Target: PCSK9; (+) strand; PAM type: NRG; PAM sequence: TGG
ggagctggctgcttatttgc

SEQ ID NO: 13198 - DNA, 20 bp, Artificial Sequence
  Description of Artificial Sequence: Synthetic oligonucleotide
  Target: PCSK9; (+) strand; PAM type: NRG; PAM sequence: CAG
ctggctgcttatttgctggc

SEQ ID NO: 13199 - DNA, 20 bp, Artificial Sequence
  Description of Artificial Sequence: Synthetic oligonucleotide
  Target: PCSK9; (+) strand; PAM type: NRG; PAM sequence: AGG
tggctgcttatttgctggcc

SEQ ID NO: 13200 - DNA, 20 bp, Artificial Sequence
  Description of Artificial Sequence: Synthetic oligonucleotide
  Target: PCSK9; (+) strand; PAM type: NRG; PAM sequence: GGG
ggctgcttatttgctggcca

SEQ ID NO: 13201 - DNA, 20 bp, Artificial Sequence
  Description of Artificial Sequence: Synthetic oligonucleotide
  Target: PCSK9; (+) strand; PAM type: NRG; PAM sequence: TGG
cttatttgctggccagggtg

SEQ ID NO: 13202 - DNA, 20 bp, Artificial Sequence
  Description of Artificial Sequence: Synthetic oligonucleotide
  Target: PCSK9; (+) strand; PAM type: NRG; PAM sequence: GGG
ttatttgctggccagggtgt

SEQ ID NO: 13203 - DNA, 20 bp, Artificial Sequence
  Description of Artificial Sequence: Synthetic oligonucleotide
  Target: PCSK9; (+) strand; PAM type: NRG; PAM sequence: GGG
tatttgctggccagggtgtg

SEQ ID NO: 13204 - DNA, 20 bp, Artificial Sequence
  Description of Artificial Sequence: Synthetic oligonucleotide
  Target: PCSK9; (+) strand; PAM type: NRG; PAM sequence: GGG
atttgctggccagggtgtgg

SEQ ID NO: 13205 - DNA, 20 bp, Artificial Sequence
  Description of Artificial Sequence: Synthetic oligonucleotide
  Target: PCSK9; (+) strand; PAM type: NRG; PAM sequence: GAG
gggtgtgggggaacccattt

SEQ ID NO: 13206 - DNA, 20 bp, Artificial Sequence
  Description of Artificial Sequence: Synthetic oligonucleotide
  Target: PCSK9; (+) strand; PAM type: NRG; PAM sequence: AAG
tgtgggggaacccatttgag

SEQ ID NO: 13207 - DNA, 20 bp, Artificial Sequence
  Description of Artificial Sequence: Synthetic oligonucleotide
  Target: PCSK9; (+) strand; PAM type: NRG; PAM sequence: GAG
tgggggaacccatttgagaa

SEQ ID NO: 13208 - DNA, 20 bp, Artificial Sequence
  Description of Artificial Sequence: Synthetic oligonucleotide
  Target: PCSK9; (+) strand; PAM type: NRG; PAM sequence: AGG
gggggaacccatttgagaag

SEQ ID NO: 13209 - DNA, 20 bp, Artificial Sequence
  Description of Artificial Sequence: Synthetic oligonucleotide
  Target: PCSK9; (+) strand; PAM type: NRG; PAM sequence: GGG
ggggaacccatttgagaaga

SEQ ID NO: 13210 - DNA, 20 bp, Artificial Sequence
  Description of Artificial Sequence: Synthetic oligonucleotide
  Target: PCSK9; (+) strand; PAM type: NRG; PAM sequence: GAG
ggaacccatttgagaagagg

SEQ ID NO: 13211 - DNA, 20 bp, Artificial Sequence
  Description of Artificial Sequence: Synthetic oligonucleotide
  Target: PCSK9; (+) strand; PAM type: NRG; PAM sequence: AAG
acccatttgagaagagggag

SEQ ID NO: 13212 - DNA, 20 bp, Artificial Sequence
  Description of Artificial Sequence: Synthetic oligonucleotide
  Target: PCSK9; (+) strand; PAM type: NRG; PAM sequence: AGG
cccatttgagaagagggaga

SEQ ID NO: 13213 - DNA, 20 bp, Artificial Sequence
  Description of Artificial Sequence: Synthetic oligonucleotide
  Target: PCSK9; (+) strand; PAM type: NRG; PAM sequence: TGG
agaaggtgacacaattcctt

SEQ ID NO: 13214 - DNA, 20 bp, Artificial Sequence
  Description of Artificial Sequence: Synthetic oligonucleotide
  Target: PCSK9; (+) strand; PAM type: NRG; PAM sequence: GGG
gaaggtgacacaattccttt

SEQ ID NO: 13215 - DNA, 20 bp, Artificial Sequence
  Description of Artificial Sequence: Synthetic oligonucleotide
  Target: PCSK9; (+) strand; PAM type: NRG; PAM sequence: TGG
caattcctttgggcaactta

SEQ ID NO: 13216 - DNA, 20 bp, Artificial Sequence
  Description of Artificial Sequence: Synthetic oligonucleotide
  Target: PCSK9; (+) strand; PAM type: NRG; PAM sequence: GGG
aattcctttgggcaacttat

SEQ ID NO: 13217 - DNA, 20 bp, Artificial Sequence
  Description of Artificial Sequence: Synthetic oligonucleotide
  Target: PCSK9; (+) strand; PAM type: NRG; PAM sequence: GAG
ttcctttgggcaacttatgg

SEQ ID NO: 13218 - DNA, 20 bp, Artificial Sequence
  Description of Artificial Sequence: Synthetic oligonucleotide
  Target: PCSK9; (+) strand; PAM type: NRG; PAM sequence: AGG
tcctttgggcaacttatggg

SEQ ID NO: 13219 - DNA, 20 bp, Artificial Sequence
  Description of Artificial Sequence: Synthetic oligonucleotide
  Target: PCSK9; (+) strand; PAM type: NRG; PAM sequence: GGG
cctttgggcaacttatggga

SEQ ID NO: 13220 - DNA, 20 bp, Artificial Sequence
  Description of Artificial Sequence: Synthetic oligonucleotide
  Target: PCSK9; (+) strand; PAM type: NRG; PAM sequence: GGG
ctttgggcaacttatgggag

SEQ ID NO: 13221 - DNA, 20 bp, Artificial Sequence
  Description of Artificial Sequence: Synthetic oligonucleotide
  Target: PCSK9; (+) strand; PAM type: NRG; PAM sequence: TGG
caacttatgggaggggtaat

SEQ ID NO: 13222 - DNA, 20 bp, Artificial Sequence
  Description of Artificial Sequence: Synthetic oligonucleotide
  Target: PCSK9; (+) strand; PAM type: NRG; PAM sequence: GAG
ttatgggaggggtaattggt

SEQ ID NO: 13223 - DNA, 20 bp, Artificial Sequence
  Description of Artificial Sequence: Synthetic oligonucleotide
  Target: PCSK9; (+) strand; PAM type: NRG; PAM sequence: AGG
tatgggaggggtaattggtg

SEQ ID NO: 13224 - DNA, 20 bp, Artificial Sequence
  Description of Artificial Sequence: Synthetic oligonucleotide
  Target: PCSK9; (+) strand; PAM type: NRG; PAM sequence: GGG
atgggaggggtaattggtga

SEQ ID NO: 13225 - DNA, 20 bp, Artificial Sequence
  Description of Artificial Sequence: Synthetic oligonucleotide
  Target: PCSK9; (+) strand; PAM type: NRG; PAM sequence: AAG
gggtaattggtgagggatga

SEQ ID NO: 13226 - DNA, 20 bp, Artificial Sequence
  Description of Artificial Sequence: Synthetic oligonucleotide
  Target: PCSK9; (+) strand; PAM type: NRG; PAM sequence: AAG
tgagggatgaaagccctgcc

SEQ ID NO: 13227 - DNA, 20 bp, Artificial Sequence
  Description of Artificial Sequence: Synthetic oligonucleotide
  Target: PCSK9; (+) strand; PAM type: NRG; PAM sequence: TGG
gggatgaaagccctgccaag

SEQ ID NO: 13228 - DNA, 20 bp, Artificial Sequence
  Description of Artificial Sequence: Synthetic oligonucleotide
  Target: PCSK9; (+) strand; PAM type: NRG; PAM sequence: CAG
atgaaagccctgccaagtgg

SEQ ID NO: 13229 - DNA, 20 bp, Artificial Sequence
  Description of Artificial Sequence: Synthetic oligonucleotide
  Target: PCSK9; (+) strand; PAM type: NRG; PAM sequence: AGG
tgaaagccctgccaagtggc

SEQ ID NO: 13230 - DNA, 20 bp, Artificial Sequence
  Description of Artificial Sequence: Synthetic oligonucleotide
  Target: PCSK9; (+) strand; PAM type: NRG; PAM sequence: GAG
aaagccctgccaagtggcag

SEQ ID NO: 13231 - DNA, 20 bp, Artificial Sequence
  Description of Artificial Sequence: Synthetic oligonucleotide
  Target: PCSK9; (+) strand; PAM type: NRG; PAM sequence: AGG
aagccctgccaagtggcagg

SEQ ID NO: 13232 - DNA, 20 bp, Artificial Sequence
  Description of Artificial Sequence: Synthetic oligonucleotide
  Target: PCSK9; (+) strand; PAM type: NRG; PAM sequence: CAG
ctgccaagtggcaggaggcc

SEQ ID NO: 13233 - DNA, 20 bp, Artificial Sequence
  Description of Artificial Sequence: Synthetic oligonucleotide
  Target: PCSK9; (+) strand; PAM type: NRG; PAM sequence: TGG
caagtggcaggaggcccagc

SEQ ID NO: 13234 - DNA, 20 bp, Artificial Sequence
  Description of Artificial Sequence: Synthetic oligonucleotide
  Target: PCSK9; (+) strand; PAM type: NRG; PAM sequence: GGG
aagtggcaggaggcccagct

SEQ ID NO: 13235 - DNA, 20 bp, Artificial Sequence
  Description of Artificial Sequence: Synthetic oligonucleotide
  Target: PCSK9; (+) strand; PAM type: NRG; PAM sequence: GGG
agtggcaggaggcccagctg

SEQ ID NO: 13236 - DNA, 20 bp, Artificial Sequence
  Description of Artificial Sequence: Synthetic oligonucleotide
  Target: PCSK9; (+) strand; PAM type: NRG; PAM sequence: AAG
cagctggggctgcccctcat

SEQ ID NO: 13237 - DNA, 20 bp, Artificial Sequence
  Description of Artificial Sequence: Synthetic oligonucleotide
  Target: PCSK9; (+) strand; PAM type: NRG; PAM sequence: GAG
gctggggctgcccctcataa

SEQ ID NO: 13238 - DNA, 20 bp, Artificial Sequence
  Description of Artificial Sequence: Synthetic oligonucleotide
  Target: PCSK9; (+) strand; PAM type: NRG; PAM sequence: CAG
ggctgcccctcataagagtg

SEQ ID NO: 13239 - DNA, 20 bp, Artificial Sequence
  Description of Artificial Sequence: Synthetic oligonucleotide
  Target: PCSK9; (+) strand; PAM type: NRG; PAM sequence: TGG
tgcccctcataagagtgcag

SEQ ID NO: 13240 - DNA, 20 bp, Artificial Sequence
  Description of Artificial Sequence: Synthetic oligonucleotide
  Target: PCSK9; (+) strand; PAM type: NRG; PAM sequence: GAG
cccctcataagagtgcagtg

SEQ ID NO: 13241 - DNA, 20 bp, Artificial Sequence
  Description of Artificial Sequence: Synthetic oligonucleotide
  Target: PCSK9; (+) strand; PAM type: NRG; PAM sequence: AGG
ccctcataagagtgcagtgg

SEQ ID NO: 13242 - DNA, 20 bp, Artificial Sequence
  Description of Artificial Sequence: Synthetic oligonucleotide
  Target: PCSK9; (+) strand; PAM type: NRG; PAM sequence: TGG
taagagtgcagtggaggata

SEQ ID NO: 13243 - DNA, 20 bp, Artificial Sequence
  Description of Artificial Sequence: Synthetic oligonucleotide
  Target: PCSK9; (+) strand; PAM type: NRG; PAM sequence: GGG
aagagtgcagtggaggatat

SEQ ID NO: 13244 - DNA, 20 bp, Artificial Sequence
  Description of Artificial Sequence: Synthetic oligonucleotide
  Target: PCSK9; (+) strand; PAM type: NRG; PAM sequence: GAG
tgcagtggaggatatgggat

SEQ ID NO: 13245 - DNA, 20 bp, Artificial Sequence
  Description of Artificial Sequence: Synthetic oligonucleotide
  Target: PCSK9; (+) strand; PAM type: NRG; PAM sequence: AAG
agtggaggatatgggatgag

SEQ ID NO: 13246 - DNA, 20 bp, Artificial Sequence
  Description of Artificial Sequence: Synthetic oligonucleotide
  Target: PCSK9; (+) strand; PAM type: NRG; PAM sequence: TGG
atgagaagtgactgcccctc

SEQ ID NO: 13247 - DNA, 20 bp, Artificial Sequence
  Description of Artificial Sequence: Synthetic oligonucleotide
  Target: PCSK9; (+) strand; PAM type: NRG; PAM sequence: CAG
ccctctggttccatctgtcg

SEQ ID NO: 13248 - DNA, 20 bp, Artificial Sequence
  Description of Artificial Sequence: Synthetic oligonucleotide
  Target: PCSK9; (+) strand; PAM type: NRG; PAM sequence: GAG
ctctggttccatctgtcgca

SEQ ID NO: 13249 - DNA, 20 bp, Artificial Sequence
  Description of Artificial Sequence: Synthetic oligonucleotide
  Target: PCSK9; (+) strand; PAM type: NRG; PAM sequence: CAG
gttccatctgtcgcagagcc

SEQ ID NO: 13250 - DNA, 20 bp, Artificial Sequence
  Description of Artificial Sequence: Synthetic oligonucleotide
  Target: PCSK9; (+) strand; PAM type: NRG; PAM sequence: AGG
ttccatctgtcgcagagccc

SEQ ID NO: 13251 - DNA, 20 bp, Artificial Sequence
  Description of Artificial Sequence: Synthetic oligonucleotide
  Target: PCSK9; (+) strand; PAM type: NRG; PAM sequence: GGG
tccatctgtcgcagagccca

SEQ ID NO: 13252 - DNA, 20 bp, Artificial Sequence
  Description of Artificial Sequence: Synthetic oligonucleotide
  Target: PCSK9; (+) strand; PAM type: NRG; PAM sequence: CAG
ccttcctcccccacctccct

SEQ ID NO: 13253 - DNA, 20 bp, Artificial Sequence
  Description of Artificial Sequence: Synthetic oligonucleotide
  Target: PCSK9; (+) strand; PAM type: NRG; PAM sequence: TGG
agaacacacccactgcatgc

SEQ ID NO: 13254 - DNA, 20 bp, Artificial Sequence
  Description of Artificial Sequence: Synthetic oligonucleotide
  Target: PCSK9; (+) strand; PAM type: NRG; PAM sequence: CAG
cacacccactgcatgctgga

SEQ ID NO: 13255 - DNA, 20 bp, Artificial Sequence
  Description of Artificial Sequence: Synthetic oligonucleotide
  Target: PCSK9; (+) strand; PAM type: NRG; PAM sequence: CAG
acccactgcatgctggacag

SEQ ID NO: 13256 - DNA, 20 bp, Artificial Sequence
  Description of Artificial Sequence: Synthetic oligonucleotide
  Target: PCSK9; (+) strand; PAM type: NRG; PAM sequence: TGG
ctggacagcagcccccttcc

SEQ ID NO: 13257 - DNA, 20 bp, Artificial Sequence
  Description of Artificial Sequence: Synthetic oligonucleotide
  Target: PCSK9; (+) strand; PAM type: NRG; PAM sequence: GGG
tggacagcagcccccttcct

SEQ ID NO: 13258 - DNA, 20 bp, Artificial Sequence
  Description of Artificial Sequence: Synthetic oligonucleotide
  Target: PCSK9; (+) strand; PAM type: NRG; PAM sequence: TGG
agcagcccccttcctgggcc

SEQ ID NO: 13259 - DNA, 20 bp, Artificial Sequence
  Description of Artificial Sequence: Synthetic oligonucleotide
  Target: PCSK9; (+) strand; PAM type: NRG; PAM sequence: GGG
gcagcccccttcctgggcct

SEQ ID NO: 13260 - DNA, 20 bp, Artificial Sequence
  Description of Artificial Sequence: Synthetic oligonucleotide
  Target: PCSK9; (+) strand; PAM type: NRG; PAM sequence: GGG
cagcccccttcctgggcctg

SEQ ID NO: 13261 - DNA, 20 bp, Artificial Sequence
  Description of Artificial Sequence: Synthetic oligonucleotide
  Target: PCSK9; (+) strand; PAM type: NRG; PAM sequence: CAG
catccatgtccctctgtgca

SEQ ID NO: 13262 - DNA, 20 bp, Artificial Sequence
  Description of Artificial Sequence: Synthetic oligonucleotide
  Target: PCSK9; (+) strand; PAM type: NRG; PAM sequence: AGG
atccatgtccctctgtgcac

SEQ ID NO: 13263 - DNA, 20 bp, Artificial Sequence
  Description of Artificial Sequence: Synthetic oligonucleotide
  Target: PCSK9; (+) strand; PAM type: NRG; PAM sequence: TGG
gcacaggcttcatcattctc

SEQ ID NO: 13264 - DNA, 20 bp, Artificial Sequence
  Description of Artificial Sequence: Synthetic oligonucleotide
  Target: PCSK9; (+) strand; PAM type: NRG; PAM sequence: GGG
cacaggcttcatcattctct

SEQ ID NO: 13265 - DNA, 20 bp, Artificial Sequence
  Description of Artificial Sequence: Synthetic oligonucleotide
  Target: PCSK9; (+) strand; PAM type: NRG; PAM sequence: CGG
ttcatcattctctgggtgca

SEQ ID NO: 13266 - DNA, 20 bp, Artificial Sequence
  Description of Artificial Sequence: Synthetic oligonucleotide
  Target: PCSK9; (+) strand; PAM type: NRG; PAM sequence: CGG
tgggtgcacggtaacgaccc

SEQ ID NO: 13267 - DNA, 20 bp, Artificial Sequence
  Description of Artificial Sequence: Synthetic oligonucleotide
  Target: PCSK9; (+) strand; PAM type: NRG; PAM sequence: TAG
gtgcacggtaacgaccccgg

SEQ ID NO: 13268 - DNA, 20 bp, Artificial Sequence
  Description of Artificial Sequence: Synthetic oligonucleotide
  Target: PCSK9; (+) strand; PAM type: NRG; PAM sequence: AGG
tgcacggtaacgaccccggt

SEQ ID NO: 13269 - DNA, 20 bp, Artificial Sequence
  Description of Artificial Sequence: Synthetic oligonucleotide
  Target: PCSK9; (+) strand; PAM type: NRG; PAM sequence: GAG
cggtaacgaccccggtaggt

SEQ ID NO: 13270 - DNA, 20 bp, Artificial Sequence
  Description of Artificial Sequence: Synthetic oligonucleotide
  Target: PCSK9; (+) strand; PAM type: NRG; PAM sequence: GAG
gtaacgaccccggtaggtga

SEQ ID NO: 13271 - DNA, 20 bp, Artificial Sequence
  Description of Artificial Sequence: Synthetic oligonucleotide
  Target: PCSK9; (+) strand; PAM type: NRG; PAM sequence: AGG
taacgaccccggtaggtgag

SEQ ID NO: 13272 - DNA, 20 bp, Artificial Sequence
  Description of Artificial Sequence: Synthetic oligonucleotide
  Target: PCSK9; (+) strand; PAM type: NRG; PAM sequence: AAG
accccggtaggtgagaggcc

SEQ ID NO: 13273 - DNA, 20 bp, Artificial Sequence
  Description of Artificial Sequence: Synthetic oligonucleotide
  Target: PCSK9; (+) strand; PAM type: NRG; PAM sequence: AGG
ccccggtaggtgagaggcca

SEQ ID NO: 13274 - DNA, 20 bp, Artificial Sequence
  Description of Artificial Sequence: Synthetic oligonucleotide
  Target: PCSK9; (+) strand; PAM type: NRG; PAM sequence: AAG
ggtgagaggccaaggtccca

SEQ ID NO: 13275 - DNA, 20 bp, Artificial Sequence
  Description of Artificial Sequence: Synthetic oligonucleotide
  Target: PCSK9; (+) strand; PAM type: NRG; PAM sequence: AGG
gtgagaggccaaggtcccaa

SEQ ID NO: 13276 - DNA, 20 bp, Artificial Sequence
  Description of Artificial Sequence: Synthetic oligonucleotide
  Target: PCSK9; (+) strand; PAM type: NRG; PAM sequence: GGG
tgagaggccaaggtcccaaa

SEQ ID NO: 13277 - DNA, 20 bp, Artificial Sequence
  Description of Artificial Sequence: Synthetic oligonucleotide
  Target: PCSK9; (+) strand; PAM type: NRG; PAM sequence: GGG
gagaggccaaggtcccaaag

SEQ ID NO: 13278 - DNA, 20 bp, Artificial Sequence
  Description of Artificial Sequence: Synthetic oligonucleotide
  Target: PCSK9; (+) strand; PAM type: NRG; PAM sequence: GAG
gaggccaaggtcccaaaggg

SEQ ID NO: 13279 - DNA, 20 bp, Artificial Sequence
  Description of Artificial Sequence: Synthetic oligonucleotide
  Target: PCSK9; (+) strand; PAM type: NRG; PAM sequence: CAG
gccaaggtcccaaaggggag

SEQ ID NO: 13280 - DNA, 20 bp, Artificial Sequence
  Description of Artificial Sequence: Synthetic oligonucleotide
  Target: PCSK9; (+) strand; PAM type: NRG; PAM sequence: CAG
aaggtcccaaaggggagcag

SEQ ID NO: 13281 - DNA, 20 bp, Artificial Sequence
  Description of Artificial Sequence: Synthetic oligonucleotide
  Target: PCSK9; (+) strand; PAM type: NRG; PAM sequence: AGG
aggtcccaaaggggagcagc

SEQ ID NO: 13282 - DNA, 20 bp, Artificial Sequence
  Description of Artificial Sequence: Synthetic oligonucleotide
  Target: PCSK9; (+) strand; PAM type: NRG; PAM sequence: GGG
ggtcccaaaggggagcagca

SEQ ID NO: 13283 - DNA, 20 bp, Artificial Sequence
  Description of Artificial Sequence: Synthetic oligonucleotide
  Target: PCSK9; (+) strand; PAM type: NRG; PAM sequence: AAG
ccaaaggggagcagcaggga

SEQ ID NO: 13284 - DNA, 20 bp, Artificial Sequence
  Description of Artificial Sequence: Synthetic oligonucleotide
  Target: PCSK9; (+) strand; PAM type: NRG; PAM sequence: TAG
aggggagcagcagggaaagt

SEQ ID NO: 13285 - DNA, 20 bp, Artificial Sequence
  Description of Artificial Sequence: Synthetic oligonucleotide
  Target: PCSK9; (+) strand; PAM type: NRG; PAM sequence: CAG
gctcccatctattcttgctc

SEQ ID NO: 13286 - DNA, 20 bp, Artificial Sequence
  Description of Artificial Sequence: Synthetic oligonucleotide
  Target: PCSK9; (+) strand; PAM type: NRG; PAM sequence: AGG
ctcccatctattcttgctcc

SEQ ID NO: 13287 - DNA, 20 bp, Artificial Sequence
  Description of Artificial Sequence: Synthetic oligonucleotide
  Target: PCSK9; (+) strand; PAM type: NRG; PAM sequence: GGG
tcccatctattcttgctcca

SEQ ID NO: 13288 - DNA, 20 bp, Artificial Sequence
  Description of Artificial Sequence: Synthetic oligonucleotide
  Target: PCSK9; (+) strand; PAM type: NRG; PAM sequence: GGG
cccatctattcttgctccag

SEQ ID NO: 13289 - DNA, 20 bp, Artificial Sequence
  Description of Artificial Sequence: Synthetic oligonucleotide
  Target: PCSK9; (+) strand; PAM type: NRG; PAM sequence: GAG
catctattcttgctccaggg

SEQ ID NO: 13290 - DNA, 20 bp, Artificial Sequence
  Description of Artificial Sequence: Synthetic oligonucleotide
  Target: PCSK9; (+) strand; PAM type: NRG; PAM sequence: AGG
atctattcttgctccagggg

SEQ ID NO: 13291 - DNA, 20 bp, Artificial Sequence
  Description of Artificial Sequence: Synthetic oligonucleotide
  Target: PCSK9; (+) strand; PAM type: NRG; PAM sequence: GAG
ctccaggggaggcctttgat

SEQ ID NO: 13292 - DNA, 20 bp, Artificial Sequence
  Description of Artificial Sequence: Synthetic oligonucleotide
  Target: PCSK9; (+) strand; PAM type: NRG; PAM sequence: AGG
tccaggggaggcctttgatg

SEQ ID NO: 13293 - DNA, 20 bp, Artificial Sequence
  Description of Artificial Sequence: Synthetic oligonucleotide
  Target: PCSK9; (+) strand; PAM type: NRG; PAM sequence: AAG
aggggaggcctttgatgagg

SEQ ID NO: 13294 - DNA, 20 bp, Artificial Sequence
  Description of Artificial Sequence: Synthetic oligonucleotide
  Target: PCSK9; (+) strand; PAM type: NRG; PAM sequence: AAG
tttgatgaggaagctgccaa

SEQ ID NO: 13295 - DNA, 20 bp, Artificial Sequence
  Description of Artificial Sequence: Synthetic oligonucleotide
  Target: PCSK9; (+) strand; PAM type: NRG; PAM sequence: CAG
tgcaaatacaattccaatta

SEQ ID NO: 13296 - DNA, 20 bp, Artificial Sequence
  Description of Artificial Sequence: Synthetic oligonucleotide
  Target: PCSK9; (+) strand; PAM type: NRG; PAM sequence: AGG
gcaaatacaattccaattac

SEQ ID NO: 13297 - DNA, 20 bp, Artificial Sequence
  Description of Artificial Sequence: Synthetic oligonucleotide
  Target: PCSK9; (+) strand; PAM type: NRG; PAM sequence: CAG
acaattccaattacaggcaa

SEQ ID NO: 13298 - DNA, 20 bp, Artificial Sequence
  Description of Artificial Sequence: Synthetic oligonucleotide
  Target: PCSK9; (+) strand; PAM type: NRG; PAM sequence: AGG
caattccaattacaggcaac

SEQ ID NO: 13299 - DNA, 20 bp, Artificial Sequence
  Description of Artificial Sequence: Synthetic oligonucleotide
  Target: PCSK9; (+) strand; PAM type: NRG; PAM sequence: AAG
ttccaattacaggcaacagg

SEQ ID NO: 13300 - DNA, 20 bp, Artificial Sequence
  Description of Artificial Sequence: Synthetic oligonucleotide
  Target: PCSK9; (+) strand; PAM type: NRG; PAM sequence: AGG
tccaattacaggcaacagga

SEQ ID NO: 13301 - DNA, 20 bp, Artificial Sequence
  Description of Artificial Sequence: Synthetic oligonucleotide
  Target: PCSK9; (+) strand; PAM type: NRG; PAM sequence: GAG
caattacaggcaacaggaag

SEQ ID NO: 13302 - DNA, 20 bp, Artificial Sequence
  Description of Artificial Sequence: Synthetic oligonucleotide
  Target: PCSK9; (+) strand; PAM type: NRG; PAM sequence: CAG
accacctctgccacctctgt

SEQ ID NO: 13303 - DNA, 20 bp, Artificial Sequence
  Description of Artificial Sequence: Synthetic oligonucleotide
  Target: PCSK9; (+) strand; PAM type: NRG; PAM sequence: GAG
cacctctgtcagcaaaccat

SEQ ID NO: 13304 - DNA, 20 bp, Artificial Sequence
  Description of Artificial Sequence: Synthetic oligonucleotide
  Target: PCSK9; (+) strand; PAM type: NRG; PAM sequence: TGG
gctcctactctgtgctgcga

SEQ ID NO: 13305 - DNA, 20 bp, Artificial Sequence
  Description of Artificial Sequence: Synthetic oligonucleotide
  Target: PCSK9; (+) strand; PAM type: NRG; PAM sequence: CGG
cctactctgtgctgcgatgg

SEQ ID NO: 13306 - DNA, 20 bp, Artificial Sequence
  Description of Artificial Sequence: Synthetic oligonucleotide
  Target: PCSK9; (+) strand; PAM type: NRG; PAM sequence: GGG
ctactctgtgctgcgatggc

SEQ ID NO: 13307 - DNA, 20 bp, Artificial Sequence
  Description of Artificial Sequence: Synthetic oligonucleotide
  Target: PCSK9; (+) strand; PAM type: NRG; PAM sequence: TGG
tgctgcgatggcgggctcga

SEQ ID NO: 13308 - DNA, 20 bp, Artificial Sequence
  Description of Artificial Sequence: Synthetic oligonucleotide
  Target: PCSK9; (+) strand; PAM type: NRG; PAM sequence: GGG
gctgcgatggcgggctcgat

SEQ ID NO: 13309 - DNA, 20 bp, Artificial Sequence
  Description of Artificial Sequence: Synthetic oligonucleotide
  Target: PCSK9; (+) strand; PAM type: NRG; PAM sequence: GGG
ctgcgatggcgggctcgatg

SEQ ID NO: 13310 - DNA, 20 bp, Artificial Sequence
  Description of Artificial Sequence: Synthetic oligonucleotide
  Target: PCSK9; (+) strand; PAM type: NRG; PAM sequence: TGG
ataactctgaccttacctca

SEQ ID NO: 13311 - DNA, 20 bp, Artificial Sequence
  Description of Artificial Sequence: Synthetic oligonucleotide
  Target: PCSK9; (+) strand; PAM type: NRG; PAM sequence: GAG
aactctgaccttacctcatg

SEQ ID NO: 13312 - DNA, 20 bp, Artificial Sequence
  Description of Artificial Sequence: Synthetic oligonucleotide
  Target: PCSK9; (+) strand; PAM type: NRG; PAM sequence: TGG
tggagtcactgtcaacccac

SEQ ID NO: 13313 - DNA, 20 bp, Artificial Sequence
  Description of Artificial Sequence: Synthetic oligonucleotide
  Target: PCSK9; (+) strand; PAM type: NRG; PAM sequence: TGG
gttgcactgtctttgtgcac

SEQ ID NO: 13314 - DNA, 20 bp, Artificial Sequence
  Description of Artificial Sequence: Synthetic oligonucleotide
  Target: PCSK9; (+) strand; PAM type: NRG; PAM sequence: TGG
gtctttgtgcactggctctc

SEQ ID NO: 13315 - DNA, 20 bp, Artificial Sequence
  Description of Artificial Sequence: Synthetic oligonucleotide
  Target: PCSK9; (+) strand; PAM type: NRG; PAM sequence: GAG
ctttgtgcactggctctctg

SEQ ID NO: 13316 - DNA, 20 bp, Artificial Sequence
  Description of Artificial Sequence: Synthetic oligonucleotide
  Target: PCSK9; (+) strand; PAM type: NRG; PAM sequence: GAG
gtgcactggctctctggagt

SEQ ID NO: 13317 - DNA, 20 bp, Artificial Sequence
  Description of Artificial Sequence: Synthetic oligonucleotide
  Target: PCSK9; (+) strand; PAM type: NRG; PAM sequence: AGG
tgcactggctctctggagtg

SEQ ID NO: 13318 - DNA, 20 bp, Artificial Sequence
  Description of Artificial Sequence: Synthetic oligonucleotide
  Target: PCSK9; (+) strand; PAM type: NRG; PAM sequence: AAG
gagtgaggtctttgcaaaca

SEQ ID NO: 13319 - DNA, 20 bp, Artificial Sequence
  Description of Artificial Sequence: Synthetic oligonucleotide
  Target: PCSK9; (+) strand; PAM type: NRG; PAM sequence: TGG
tgaggtctttgcaaacaaag

SEQ ID NO: 13320 - DNA, 20 bp, Artificial Sequence
  Description of Artificial Sequence: Synthetic oligonucleotide
  Target: PCSK9; (+) strand; PAM type: NRG; PAM sequence: AAG
gtctttgcaaacaaagtgga

SEQ ID NO: 13321 - DNA, 20 bp, Artificial Sequence
  Description of Artificial Sequence: Synthetic oligonucleotide
  Target: PCSK9; (+) strand; PAM type: NRG; PAM sequence: GAG
ctttgcaaacaaagtggaaa

SEQ ID NO: 13322 - DNA, 20 bp, Artificial Sequence
  Description of Artificial Sequence: Synthetic oligonucleotide
  Target: PCSK9; (+) strand; PAM type: NRG; PAM sequence: TGG
agtggaaagagcatcaactt

SEQ ID NO: 13323 - DNA, 20 bp, Artificial Sequence
  Description of Artificial Sequence: Synthetic oligonucleotide
  Target: PCSK9; (+) strand; PAM type: NRG; PAM sequence: CAG
agagcatcaactttggactc

SEQ ID NO: 13324 - DNA, 20 bp, Artificial Sequence
  Description of Artificial Sequence: Synthetic oligonucleotide
  Target: PCSK9; (+) strand; PAM type: NRG; PAM sequence: TAG
caactttggactccagcacc

SEQ ID NO: 13325 - DNA, 20 bp, Artificial Sequence
  Description of Artificial Sequence: Synthetic oligonucleotide
  Target: PCSK9; (+) strand; PAM type: NRG; PAM sequence: CAG
tggactccagcacctagatt

SEQ ID NO: 13326 - DNA, 20 bp, Artificial Sequence
  Description of Artificial Sequence: Synthetic oligonucleotide
  Target: PCSK9; (+) strand; PAM type: NRG; PAM sequence: GAG
gactccagcacctagattca

SEQ ID NO: 13327 - DNA, 20 bp, Artificial Sequence
  Description of Artificial Sequence: Synthetic oligonucleotide
  Target: PCSK9; (+) strand; PAM type: NRG; PAM sequence: CAG
tccagcacctagattcagag

SEQ ID NO: 13328 - DNA, 20 bp, Artificial Sequence
  Description of Artificial Sequence: Synthetic oligonucleotide
  Target: PCSK9; (+) strand; PAM type: NRG; PAM sequence: AGG
ccagcacctagattcagagc

SEQ ID NO: 13329 - DNA, 20 bp, Artificial Sequence
  Description of Artificial Sequence: Synthetic oligonucleotide
  Target: PCSK9; (+) strand; PAM type: NRG; PAM sequence: CGG
tcagagcaggccatttcact

SEQ ID NO: 13330 - DNA, 20 bp, Artificial Sequence
  Description of Artificial Sequence: Synthetic oligonucleotide
  Target: PCSK9; (+) strand; PAM type: NRG; PAM sequence: AAG
ggaatctgctgtgcatctgc

SEQ ID NO: 13331 - DNA, 20 bp, Artificial Sequence
  Description of Artificial Sequence: Synthetic oligonucleotide
  Target: PCSK9; (+) strand; PAM type: NRG; PAM sequence: AGG
gaatctgctgtgcatctgca

SEQ ID NO: 13332 - DNA, 20 bp, Artificial Sequence
  Description of Artificial Sequence: Synthetic oligonucleotide
  Target: PCSK9; (+) strand; PAM type: NRG; PAM sequence: GGG
aatctgctgtgcatctgcaa

SEQ ID NO: 13333 - DNA, 20 bp, Artificial Sequence
  Description of Artificial Sequence: Synthetic oligonucleotide
  Target: PCSK9; (+) strand; PAM type: NRG; PAM sequence: GAG
tctgctgtgcatctgcaagg

SEQ ID NO: 13334 - DNA, 20 bp, Artificial Sequence
  Description of Artificial Sequence: Synthetic oligonucleotide
  Target: PCSK9; (+) strand; PAM type: NRG; PAM sequence: AGG
ctgctgtgcatctgcaaggg

SEQ ID NO: 13335 - DNA, 20 bp, Artificial Sequence
  Description of Artificial Sequence: Synthetic oligonucleotide
  Target: PCSK9; (+) strand; PAM type: NRG; PAM sequence: CAG
aattcgcctttgtttcttcc

SEQ ID NO: 13336 - DNA, 20 bp, Artificial Sequence
  Description of Artificial Sequence: Synthetic oligonucleotide
  Target: PCSK9; (+) strand; PAM type: NRG; PAM sequence: CAG
ttgtttcttcccagtatcga

SEQ ID NO: 13337 - DNA, 20 bp, Artificial Sequence
  Description of Artificial Sequence: Synthetic oligonucleotide
  Target: PCSK9; (+) strand; PAM type: NRG; PAM sequence: CAG
cccagtatcgacagcccttc

SEQ ID NO: 13338 - DNA, 20 bp, Artificial Sequence
  Description of Artificial Sequence: Synthetic oligonucleotide
  Target: PCSK9; (+) strand; PAM type: NRG; PAM sequence: AAG
gtatcgacagcccttccaga

SEQ ID NO: 13339 - DNA, 20 bp, Artificial Sequence
  Description of Artificial Sequence: Synthetic oligonucleotide
  Target: PCSK9; (+) strand; PAM type: NRG; PAM sequence: GAG
atcgacagcccttccagaaa

SEQ ID NO: 13340 - DNA, 20 bp, Artificial Sequence
  Description of Artificial Sequence: Synthetic oligonucleotide
  Target: PCSK9; (+) strand; PAM type: NRG; PAM sequence: AAG
acagcccttccagaaagagc

SEQ ID NO: 13341 - DNA, 20 bp, Artificial Sequence
  Description of Artificial Sequence: Synthetic oligonucleotide
  Target: PCSK9; (+) strand; PAM type: NRG; PAM sequence: GAG
tcatgccacatgtacaatct

SEQ ID NO: 13342 - DNA, 20 bp, Artificial Sequence
  Description of Artificial Sequence: Synthetic oligonucleotide
  Target: PCSK9; (+) strand; PAM type: NRG; PAM sequence: AGG
catgccacatgtacaatctg

SEQ ID NO: 13343 - DNA, 20 bp, Artificial Sequence
  Description of Artificial Sequence: Synthetic oligonucleotide
  Target: PCSK9; (+) strand; PAM type: NRG; PAM sequence: CAG
ccacatgtacaatctgaggc

SEQ ID NO: 13344 - DNA, 20 bp, Artificial Sequence
  Description of Artificial Sequence: Synthetic oligonucleotide
  Target: PCSK9; (+) strand; PAM type: NRG; PAM sequence: AGG
cacatgtacaatctgaggcc

SEQ ID NO: 13345 - DNA, 20 bp, Artificial Sequence
  Description of Artificial Sequence: Synthetic oligonucleotide
  Target: PCSK9; (+) strand; PAM type: NRG; PAM sequence: GAG
catgtacaatctgaggccag

SEQ ID NO: 13346 - DNA, 20 bp, Artificial Sequence
  Description of Artificial Sequence: Synthetic oligonucleotide
  Target: PCSK9; (+) strand; PAM type: NRG; PAM sequence: TGG
ccccttttcatcctcctgcc

SEQ ID NO: 13347 - DNA, 20 bp, Artificial Sequence
  Description of Artificial Sequence: Synthetic oligonucleotide
  Target: PCSK9; (+) strand; PAM type: NRG; PAM sequence: TAG
tcctcctgcctggtacacaa

SEQ ID NO: 13348 - DNA, 20 bp, Artificial Sequence
  Description of Artificial Sequence: Synthetic oligonucleotide
  Target: PCSK9; (+) strand; PAM type: NRG; PAM sequence: AGG
cctcctgcctggtacacaat

SEQ ID NO: 13349 - DNA, 20 bp, Artificial Sequence
  Description of Artificial Sequence: Synthetic oligonucleotide
  Target: PCSK9; (+) strand; PAM type: NRG; PAM sequence: TGG
ggtacacaataggtgtttac

SEQ ID NO: 13350 - DNA, 20 bp, Artificial Sequence
  Description of Artificial Sequence: Synthetic oligonucleotide
  Target: PCSK9; (+) strand; PAM type: NRG; PAM sequence: CAG
gtgtttactggatgcttgtc

SEQ ID NO: 13351 - DNA, 20 bp, Artificial Sequence
  Description of Artificial Sequence: Synthetic oligonucleotide
  Target: PCSK9; (+) strand; PAM type: NRG; PAM sequence: TGG
tccagttgatttcttgaaca

SEQ ID NO: 13352 - DNA, 20 bp, Artificial Sequence
  Description of Artificial Sequence: Synthetic oligonucleotide
  Target: PCSK9; (+) strand; PAM type: NRG; PAM sequence: AAG
ttcttgaacatggtgtgtaa

SEQ ID NO: 13353 - DNA, 20 bp, Artificial Sequence
  Description of Artificial Sequence: Synthetic oligonucleotide
  Target: PCSK9; (+) strand; PAM type: NRG; PAM sequence: AGG
tcttgaacatggtgtgtaaa

SEQ ID NO: 13354 - DNA, 20 bp, Artificial Sequence
  Description of Artificial Sequence: Synthetic oligonucleotide
  Target: PCSK9; (+) strand; PAM type: NRG; PAM sequence: TGG
tctttgcaaattgaatcttc

SEQ ID NO: 13355 - DNA, 20 bp, Artificial Sequence
  Description of Artificial Sequence: Synthetic oligonucleotide
  Target: PCSK9; (+) strand; PAM type: NRG; PAM sequence: AAG
tgcaaattgaatcttctgga

SEQ ID NO: 13356 - DNA, 20 bp, Artificial Sequence
  Description of Artificial Sequence: Synthetic oligonucleotide
  Target: PCSK9; (+) strand; PAM type: NRG; PAM sequence: GAG
attgaatcttctggaaagct

SEQ ID NO: 13357 - DNA, 20 bp, Artificial Sequence
  Description of Artificial Sequence: Synthetic oligonucleotide
  Target: PCSK9; (+) strand; PAM type: NRG; PAM sequence: TAG
agctgagcttgtgcctacca

SEQ ID NO: 13358 - DNA, 20 bp, Artificial Sequence
  Description of Artificial Sequence: Synthetic oligonucleotide
  Target: PCSK9; (+) strand; PAM type: NRG; PAM sequence: TAG
acttaaaacctgaatctttg

SEQ ID NO: 13359 - DNA, 20 bp, Artificial Sequence
  Description of Artificial Sequence: Synthetic oligonucleotide
  Target: PCSK9; (+) strand; PAM type: NRG; PAM sequence: TAG
taaatcccttgaaatgcatg

SEQ ID NO: 13360 - DNA, 20 bp, Artificial Sequence
  Description of Artificial Sequence: Synthetic oligonucleotide
  Target: PCSK9; (+) strand; PAM type: NRG; PAM sequence: AGG
aaatcccttgaaatgcatgt

SEQ ID NO: 13361 - DNA, 20 bp, Artificial Sequence
  Description of Artificial Sequence: Synthetic oligonucleotide
  Target: PCSK9; (+) strand; PAM type: NRG; PAM sequence: TGG
cccttgaaatgcatgtaggc

SEQ ID NO: 13362 - DNA, 20 bp, Artificial Sequence
  Description of Artificial Sequence: Synthetic oligonucleotide
  Target: PCSK9; (+) strand; PAM type: NRG; PAM sequence: AAG
gcatgtaggctggacatcaa

SEQ ID NO: 13363 - DNA, 20 bp, Artificial Sequence
  Description of Artificial Sequence: Synthetic oligonucleotide
  Target: PCSK9; (+) strand; PAM type: NRG; PAM sequence: AAG
gtaggctggacatcaaaagc

SEQ ID NO: 13364 - DNA, 20 bp, Artificial Sequence
  Description of Artificial Sequence: Synthetic oligonucleotide
  Target: PCSK9; (+) strand; PAM type: NRG; PAM sequence: AAG
caaaagcaagcaatctcttc

SEQ ID NO: 13365 - DNA, 20 bp, Artificial Sequence
  Description of Artificial Sequence: Synthetic oligonucleotide
  Target: PCSK9; (+) strand; PAM type: NRG; PAM sequence: AGG
aaaagcaagcaatctcttca

SEQ ID NO: 13366 - DNA, 20 bp, Artificial Sequence
  Description of Artificial Sequence: Synthetic oligonucleotide
  Target: PCSK9; (+) strand; PAM type: NRG; PAM sequence: GAG
aagcaagcaatctcttcaag

SEQ ID NO: 13367 - DNA, 20 bp, Artificial Sequence
  Description of Artificial Sequence: Synthetic oligonucleotide
  Target: PCSK9; (+) strand; PAM type: NRG; PAM sequence: CAG
caagcaatctcttcaaggag

SEQ ID NO: 13368 - DNA, 20 bp, Artificial Sequence
  Description of Artificial Sequence: Synthetic oligonucleotide
  Target: PCSK9; (+) strand; PAM type: NRG; PAM sequence: TAG
caatctcttcaaggagcagc

SEQ ID NO: 13369 - DNA, 20 bp, Artificial Sequence
  Description of Artificial Sequence: Synthetic oligonucleotide
  Target: PCSK9; (+) strand; PAM type: NRG; PAM sequence: TGG
ctcttcaaggagcagctagt

SEQ ID NO: 13370 - DNA, 20 bp, Artificial Sequence
  Description of Artificial Sequence: Synthetic oligonucleotide
  Target: PCSK9; (+) strand; PAM type: NRG; PAM sequence: AAG
tcaaggagcagctagttggt

SEQ ID NO: 13371 - DNA, 20 bp, Artificial Sequence
  Description of Artificial Sequence: Synthetic oligonucleotide
  Target: PCSK9; (+) strand; PAM type: NRG; PAM sequence: AGG
caaggagcagctagttggta

SEQ ID NO: 13372 - DNA, 20 bp, Artificial Sequence
  Description of Artificial Sequence: Synthetic oligonucleotide
  Target: PCSK9; (+) strand; PAM type: NRG; PAM sequence: CAG
gagcagctagttggtaaggt

SEQ ID NO: 13373 - DNA, 20 bp, Artificial Sequence
  Description of Artificial Sequence: Synthetic oligonucleotide
  Target: PCSK9; (+) strand; PAM type: NRG; PAM sequence: CAG
tagttggtaaggtcagtgtg

SEQ ID NO: 13374 - DNA, 20 bp, Artificial Sequence
  Description of Artificial Sequence: Synthetic oligonucleotide
  Target: PCSK9; (+) strand; PAM type: NRG; PAM sequence: AGG
agttggtaaggtcagtgtgc

SEQ ID NO: 13375 - DNA, 20 bp, Artificial Sequence
  Description of Artificial Sequence: Synthetic oligonucleotide
  Target: PCSK9; (+) strand; PAM type: NRG; PAM sequence: GGG
gttggtaaggtcagtgtgca

SEQ ID NO: 13376 - DNA, 20 bp, Artificial Sequence
  Description of Artificial Sequence: Synthetic oligonucleotide
  Target: PCSK9; (+) strand; PAM type: NRG; PAM sequence: AAG
gtcagtgtgcagggtgcata

SEQ ID NO: 13377 - DNA, 20 bp, Artificial Sequence
  Description of Artificial Sequence: Synthetic oligonucleotide
  Target: PCSK9; (+) strand; PAM type: NRG; PAM sequence: AGG
tcagtgtgcagggtgcataa

SEQ ID NO: 13378 - DNA, 20 bp, Artificial Sequence
  Description of Artificial Sequence: Synthetic oligonucleotide
  Target: PCSK9; (+) strand; PAM type: NRG; PAM sequence: GGG
cagtgtgcagggtgcataaa

SEQ ID NO: 13379 - DNA, 20 bp, Artificial Sequence
  Description of Artificial Sequence: Synthetic oligonucleotide
  Target: PCSK9; (+) strand; PAM type: NRG; PAM sequence: CAG
tgtgcagggtgcataaaggg

SEQ ID NO: 13380 - DNA, 20 bp, Artificial Sequence
  Description of Artificial Sequence: Synthetic oligonucleotide
  Target: PCSK9; (+) strand; PAM type: NRG; PAM sequence: GAG
tgcagggtgcataaagggca

SEQ ID NO: 13381 - DNA, 20 bp, Artificial Sequence
  Description of Artificial Sequence: Synthetic oligonucleotide
  Target: PCSK9; (+) strand; PAM type: NRG; PAM sequence: AGG
gcagggtgcataaagggcag

SEQ ID NO: 13382 - DNA, 20 bp, Artificial Sequence
  Description of Artificial Sequence: Synthetic oligonucleotide
  Target: PCSK9; (+) strand; PAM type: NRG; PAM sequence: CGG
ggtgcataaagggcagaggc

SEQ ID NO: 13383 - DNA, 20 bp, Artificial Sequence
  Description of Artificial Sequence: Synthetic oligonucleotide
  Target: PCSK9; (+) strand; PAM type: NRG; PAM sequence: GAG
tgcataaagggcagaggccg

SEQ ID NO: 13384 - DNA, 20 bp, Artificial Sequence
  Description of Artificial Sequence: Synthetic oligonucleotide
  Target: PCSK9; (+) strand; PAM type: NRG; PAM sequence: AGG
gcataaagggcagaggccgg

SEQ ID NO: 13385 - DNA, 20 bp, Artificial Sequence
  Description of Artificial Sequence: Synthetic oligonucleotide
  Target: PCSK9; (+) strand; PAM type: NRG; PAM sequence: GGG
cataaagggcagaggccgga

SEQ ID NO: 13386 - DNA, 20 bp, Artificial Sequence
  Description of Artificial Sequence: Synthetic oligonucleotide
  Target: PCSK9; (+) strand; PAM type: NRG; PAM sequence: GGG
ataaagggcagaggccggag

SEQ ID NO: 13387 - DNA, 20 bp, Artificial Sequence
  Description of Artificial Sequence: Synthetic oligonucleotide
  Target: PCSK9; (+) strand; PAM type: NRG; PAM sequence: GGG
taaagggcagaggccggagg

SEQ ID NO: 13388 - DNA, 20 bp, Artificial Sequence
  Description of Artificial Sequence: Synthetic oligonucleotide
  Target: PCSK9; (+) strand; PAM type: NRG; PAM sequence: CAG
ggcagaggccggagggggtc

SEQ ID NO: 13389 - DNA, 20 bp, Artificial Sequence
  Description of Artificial Sequence: Synthetic oligonucleotide
  Target: PCSK9; (+) strand; PAM type: NRG; PAM sequence: AGG
gcagaggccggagggggtcc

SEQ ID NO: 13390 - DNA, 20 bp, Artificial Sequence
  Description of Artificial Sequence: Synthetic oligonucleotide
  Target: PCSK9; (+) strand; PAM type: NRG; PAM sequence: AAG
ggccggagggggtccaggct

SEQ ID NO: 13391 - DNA, 20 bp, Artificial Sequence
  Description of Artificial Sequence: Synthetic oligonucleotide
  Target: PCSK9; (+) strand; PAM type: NRG; PAM sequence: TAG
gagggggtccaggctaagtt

SEQ ID NO: 13392 - DNA, 20 bp, Artificial Sequence
  Description of Artificial Sequence: Synthetic oligonucleotide
  Target: PCSK9; (+) strand; PAM type: NRG; PAM sequence: AAG
ggggtccaggctaagtttag

SEQ ID NO: 13393 - DNA, 20 bp, Artificial Sequence
  Description of Artificial Sequence: Synthetic oligonucleotide
  Target: PCSK9; (+) strand; PAM type: NRG; PAM sequence: AGG
gggtccaggctaagtttaga

SEQ ID NO: 13394 - DNA, 20 bp, Artificial Sequence
  Description of Artificial Sequence: Synthetic oligonucleotide
  Target: PCSK9; (+) strand; PAM type: NRG; PAM sequence: CAG
ggctaagtttagaaggctgc

SEQ ID NO: 13395 - DNA, 20 bp, Artificial Sequence
  Description of Artificial Sequence: Synthetic oligonucleotide
  Target: PCSK9; (+) strand; PAM type: NRG; PAM sequence: AGG
gctaagtttagaaggctgcc

SEQ ID NO: 13396 - DNA, 20 bp, Artificial Sequence
  Description of Artificial Sequence: Synthetic oligonucleotide
  Target: PCSK9; (+) strand; PAM type: NRG; PAM sequence: AAG
gtttagaaggctgccaggtt

SEQ ID NO: 13397 - DNA, 20 bp, Artificial Sequence
  Description of Artificial Sequence: Synthetic oligonucleotide
  Target: PCSK9; (+) strand; PAM type: NRG; PAM sequence: AGG
tttagaaggctgccaggtta

SEQ ID NO: 13398 - DNA, 20 bp, Artificial Sequence
  Description of Artificial Sequence: Synthetic oligonucleotide
  Target: PCSK9; (+) strand; PAM type: NRG; PAM sequence: CAG
gaaggctgccaggttaaggc

SEQ ID NO: 13399 - DNA, 20 bp, Artificial Sequence
  Description of Artificial Sequence: Synthetic oligonucleotide
  Target: PCSK9; (+) strand; PAM type: NRG; PAM sequence: TGG
ggctgccaggttaaggccag

SEQ ID NO: 13400 - DNA, 20 bp, Artificial Sequence
  Description of Artificial Sequence: Synthetic oligonucleotide
  Target: PCSK9; (+) strand; PAM type: NRG; PAM sequence: AAG
gccaggttaaggccagtgga

SEQ ID NO: 13401 - DNA, 20 bp, Artificial Sequence
  Description of Artificial Sequence: Synthetic oligonucleotide
  Target: PCSK9; (+) strand; PAM type: NRG; PAM sequence: CGG
taaggccagtggaaagaatt

SEQ ID NO: 13402 - DNA, 20 bp, Artificial Sequence
  Description of Artificial Sequence: Synthetic oligonucleotide
  Target: PCSK9; (+) strand; PAM type: NRG; PAM sequence: TGG
ggccagtggaaagaattcgg

SEQ ID NO: 13403 - DNA, 20 bp, Artificial Sequence
  Description of Artificial Sequence: Synthetic oligonucleotide
  Target: PCSK9; (+) strand; PAM type: NRG; PAM sequence: GGG
gccagtggaaagaattcggt

SEQ ID NO: 13404 - DNA, 20 bp, Artificial Sequence
  Description of Artificial Sequence: Synthetic oligonucleotide
  Target: PCSK9; (+) strand; PAM type: NRG; PAM sequence: CAG
agtggaaagaattcggtggg

SEQ ID NO: 13405 - DNA, 20 bp, Artificial Sequence
  Description of Artificial Sequence: Synthetic oligonucleotide
  Target: PCSK9; (+) strand; PAM type: NRG; PAM sequence: GAG
gaaagaattcggtgggcagc

SEQ ID NO: 13406 - DNA, 20 bp, Artificial Sequence
  Description of Artificial Sequence: Synthetic oligonucleotide
  Target: PCSK9; (+) strand; PAM type: NRG; PAM sequence: AGG
aaagaattcggtgggcagcg

SEQ ID NO: 13407 - DNA, 20 bp, Artificial Sequence
  Description of Artificial Sequence: Synthetic oligonucleotide
  Target: PCSK9; (+) strand; PAM type: NRG; PAM sequence: GAG
agaattcggtgggcagcgag

SEQ ID NO: 13408 - DNA, 20 bp, Artificial Sequence
  Description of Artificial Sequence: Synthetic oligonucleotide
  Target: PCSK9; (+) strand; PAM type: NRG; PAM sequence: CAG
ggtgggcagcgaggagtcca

SEQ ID NO: 13409 - DNA, 20 bp, Artificial Sequence
  Description of Artificial Sequence: Synthetic oligonucleotide
  Target: PCSK9; (+) strand; PAM type: NRG; PAM sequence: TAG
gggcagcgaggagtccacag

SEQ ID NO: 13410 - DNA, 20 bp, Artificial Sequence
  Description of Artificial Sequence: Synthetic oligonucleotide
  Target: PCSK9; (+) strand; PAM type: NRG; PAM sequence: AGG
ggcagcgaggagtccacagt

SEQ ID NO: 13411 - DNA, 20 bp, Artificial Sequence
  Description of Artificial Sequence: Synthetic oligonucleotide
  Target: PCSK9; (+) strand; PAM type: NRG; PAM sequence: CAG
agtccacagtaggattgatt

SEQ ID NO: 13412 - DNA, 20 bp, Artificial Sequence
  Description of Artificial Sequence: Synthetic oligonucleotide
  Target: PCSK9; (+) strand; PAM type: NRG; PAM sequence: AAG
ccacagtaggattgattcag

SEQ ID NO: 13413 - DNA, 20 bp, Artificial Sequence
  Description of Artificial Sequence: Synthetic oligonucleotide
  Target: PCSK9; (+) strand; PAM type: NRG; PAM sequence: TGG
gattgattcagaagtctcac

SEQ ID NO: 13414 - DNA, 20 bp, Artificial Sequence
  Description of Artificial Sequence: Synthetic oligonucleotide
  Target: PCSK9; (+) strand; PAM type: NRG; PAM sequence: CAG
gattcagaagtctcactggt

SEQ ID NO: 13415 - DNA, 20 bp, Artificial Sequence
  Description of Artificial Sequence: Synthetic oligonucleotide
  Target: PCSK9; (+) strand; PAM type: NRG; PAM sequence: CAG
tcagaagtctcactggtcag

SEQ ID NO: 13416 - DNA, 20 bp, Artificial Sequence
  Description of Artificial Sequence: Synthetic oligonucleotide
  Target: PCSK9; (+) strand; PAM type: NRG; PAM sequence: AGG
cagaagtctcactggtcagc

SEQ ID NO: 13417 - DNA, 20 bp, Artificial Sequence
  Description of Artificial Sequence: Synthetic oligonucleotide
  Target: PCSK9; (+) strand; PAM type: NRG; PAM sequence: GAG
gaagtctcactggtcagcag

SEQ ID NO: 13418 - DNA, 20 bp, Artificial Sequence
  Description of Artificial Sequence: Synthetic oligonucleotide
  Target: PCSK9; (+) strand; PAM type: NRG; PAM sequence: AAG
ctcactggtcagcaggagac

SEQ ID NO: 13419 - DNA, 20 bp, Artificial Sequence
  Description of Artificial Sequence: Synthetic oligonucleotide
  Target: PCSK9; (+) strand; PAM type: NRG; PAM sequence: AGG
tcactggtcagcaggagaca

SEQ ID NO: 13420 - DNA, 20 bp, Artificial Sequence
  Description of Artificial Sequence: Synthetic oligonucleotide
  Target: PCSK9; (+) strand; PAM type: NRG; PAM sequence: TGG
ctggtcagcaggagacaagg

SEQ ID NO: 13421 - DNA, 20 bp, Artificial Sequence
  Description of Artificial Sequence: Synthetic oligonucleotide
  Target: PCSK9; (+) strand; PAM type: NRG; PAM sequence: CAG
agcaggagacaaggtggacc

SEQ ID NO: 13422 - DNA, 20 bp, Artificial Sequence
  Description of Artificial Sequence: Synthetic oligonucleotide
  Target: PCSK9; (+) strand; PAM type: NRG; PAM sequence: AGG
gcaggagacaaggtggaccc

SEQ ID NO: 13423 - DNA, 20 bp, Artificial Sequence
  Description of Artificial Sequence: Synthetic oligonucleotide
  Target: PCSK9; (+) strand; PAM type: NRG; PAM sequence: AAG
tggacccaggaaacactgaa

SEQ ID NO: 13424 - DNA, 20 bp, Artificial Sequence
  Description of Artificial Sequence: Synthetic oligonucleotide
  Target: PCSK9; (+) strand; PAM type: NRG; PAM sequence: AGG
ggacccaggaaacactgaaa

SEQ ID NO: 13425 - DNA, 20 bp, Artificial Sequence
  Description of Artificial Sequence: Synthetic oligonucleotide
  Target: PCSK9; (+) strand; PAM type: NRG; PAM sequence: TGG
cccaggaaacactgaaaagg

SEQ ID NO: 13426 - DNA, 20 bp, Artificial Sequence
  Description of Artificial Sequence: Synthetic oligonucleotide
  Target: PCSK9; (+) strand; PAM type: NRG; PAM sequence: GGG
ccaggaaacactgaaaaggt

SEQ ID NO: 13427 - DNA, 20 bp, Artificial Sequence
  Description of Artificial Sequence: Synthetic oligonucleotide
  Target: PCSK9; (+) strand; PAM type: NRG; PAM sequence: CGG
aaacactgaaaaggtgggcc

SEQ ID NO: 13428 - DNA, 20 bp, Artificial Sequence
  Description of Artificial Sequence: Synthetic oligonucleotide
  Target: PCSK9; (+) strand; PAM type: NRG; PAM sequence: CAG
cactgaaaaggtgggcccgg

SEQ ID NO: 13429 - DNA, 20 bp, Artificial Sequence
  Description of Artificial Sequence: Synthetic oligonucleotide
  Target: PCSK9; (+) strand; PAM type: NRG; PAM sequence: TGG
aaggtgggcccggcagaact

SEQ ID NO: 13430 - DNA, 20 bp, Artificial Sequence
  Description of Artificial Sequence: Synthetic oligonucleotide
  Target: PCSK9; (+) strand; PAM type: NRG; PAM sequence: GAG
ggtgggcccggcagaacttg

SEQ ID NO: 13431 - DNA, 20 bp, Artificial Sequence
  Description of Artificial Sequence: Synthetic oligonucleotide
  Target: PCSK9; (+) strand; PAM type: NRG; PAM sequence: TGG
gcccggcagaacttggagtc

SEQ ID NO: 13432 - DNA, 20 bp, Artificial Sequence
  Description of Artificial Sequence: Synthetic oligonucleotide
  Target: PCSK9; (+) strand; PAM type: NRG; PAM sequence: CAG
ttggagtctggcatcccacg

SEQ ID NO: 13433 - DNA, 20 bp, Artificial Sequence
  Description of Artificial Sequence: Synthetic oligonucleotide
  Target: PCSK9; (+) strand; PAM type: NRG; PAM sequence: AGG
tggagtctggcatcccacgc

SEQ ID NO: 13434 - DNA, 20 bp, Artificial Sequence
  Description of Artificial Sequence: Synthetic oligonucleotide
  Target: PCSK9; (+) strand; PAM type: NRG; PAM sequence: GGG
ggagtctggcatcccacgca

SEQ ID NO: 13435 - DNA, 20 bp, Artificial Sequence
  Description of Artificial Sequence: Synthetic oligonucleotide
  Target: PCSK9; (+) strand; PAM type: NRG; PAM sequence: GAG
tctggcatcccacgcagggt

SEQ ID NO: 13436 - DNA, 20 bp, Artificial Sequence
  Description of Artificial Sequence: Synthetic oligonucleotide
  Target: PCSK9; (+) strand; PAM type: NRG; PAM sequence: GAG
tggcatcccacgcagggtga

SEQ ID NO: 13437 - DNA, 20 bp, Artificial Sequence
  Description of Artificial Sequence: Synthetic oligonucleotide
  Target: PCSK9; (+) strand; PAM type: NRG; PAM sequence: AGG
ggcatcccacgcagggtgag

SEQ ID NO: 13438 - DNA, 20 bp, Artificial Sequence
  Description of Artificial Sequence: Synthetic oligonucleotide
  Target: PCSK9; (+) strand; PAM type: NRG; PAM sequence: CGG
atcccacgcagggtgagagg

SEQ ID NO: 13439 - DNA, 20 bp, Artificial Sequence
  Description of Artificial Sequence: Synthetic oligonucleotide
  Target: PCSK9; (+) strand; PAM type: NRG; PAM sequence: GGG
tcccacgcagggtgagaggc

SEQ ID NO: 13440 - DNA, 20 bp, Artificial Sequence
  Description of Artificial Sequence: Synthetic oligonucleotide
  Target: PCSK9; (+) strand; PAM type: NRG; PAM sequence: GAG
ccacgcagggtgagaggcgg

SEQ ID NO: 13441 - DNA, 20 bp, Artificial Sequence
  Description of Artificial Sequence: Synthetic oligonucleotide
  Target: PCSK9; (+) strand; PAM type: NRG; PAM sequence: GAG
acgcagggtgagaggcggga

SEQ ID NO: 13442 - DNA, 20 bp, Artificial Sequence
  Description of Artificial Sequence: Synthetic oligonucleotide
  Target: PCSK9; (+) strand; PAM type: NRG; PAM sequence: AGG
cgcagggtgagaggcgggag

SEQ ID NO: 13443 - DNA, 20 bp, Artificial Sequence
  Description of Artificial Sequence: Synthetic oligonucleotide
  Target: PCSK9; (+) strand; PAM type: NRG; PAM sequence: GAG
cagggtgagaggcgggagag

SEQ ID NO: 13444 - DNA, 20 bp, Artificial Sequence
  Description of Artificial Sequence: Synthetic oligonucleotide
  Target: PCSK9; (+) strand; PAM type: NRG; PAM sequence: AGG
agggtgagaggcgggagagg

SEQ ID NO: 13445 - DNA, 20 bp, Artificial Sequence
  Description of Artificial Sequence: Synthetic oligonucleotide
  Target: PCSK9; (+) strand; PAM type: NRG; PAM sequence: GAG
ggtgagaggcgggagaggag

SEQ ID NO: 13446 - DNA, 20 bp, Artificial Sequence
  Description of Artificial Sequence: Synthetic oligonucleotide
  Target: PCSK9; (+) strand; PAM type: NRG; PAM sequence: TAG
ggcgggagaggaggagcccc

SEQ ID NO: 13447 - DNA, 20 bp, Artificial Sequence
  Description of Artificial Sequence: Synthetic oligonucleotide
  Target: PCSK9; (+) strand; PAM type: NRG; PAM sequence: AGG
gcgggagaggaggagcccct

SEQ ID NO: 13448 - DNA, 20 bp, Artificial Sequence
  Description of Artificial Sequence: Synthetic oligonucleotide
  Target: PCSK9; (+) strand; PAM type: NRG; PAM sequence: GGG
cgggagaggaggagccccta

SEQ ID NO: 13449 - DNA, 20 bp, Artificial Sequence
  Description of Artificial Sequence: Synthetic oligonucleotide
  Target: PCSK9; (+) strand; PAM type: NRG; PAM sequence: CGG
aggaggagcccctagggcgc

SEQ ID NO: 13450 - DNA, 20 bp, Artificial Sequence
  Description of Artificial Sequence: Synthetic oligonucleotide
  Target: PCSK9; (+) strand; PAM type: NRG; PAM sequence: CAG
tagggcgccggcctgccttc

SEQ ID NO: 13451 - DNA, 20 bp, Artificial Sequence
  Description of Artificial Sequence: Synthetic oligonucleotide
  Target: PCSK9; (+) strand; PAM type: NRG; PAM sequence: CAG
cgccggcctgccttccagcc

SEQ ID NO: 13452 - DNA, 20 bp, Artificial Sequence
  Description of Artificial Sequence: Synthetic oligonucleotide
  Target: PCSK9; (+) strand; PAM type: NRG; PAM sequence: TAG
ggcctgccttccagcccagt

SEQ ID NO: 13453 - DNA, 20 bp, Artificial Sequence
  Description of Artificial Sequence: Synthetic oligonucleotide
  Target: PCSK9; (+) strand; PAM type: NRG; PAM sequence: AGG
gcctgccttccagcccagtt

SEQ ID NO: 13454 - DNA, 20 bp, Artificial Sequence
  Description of Artificial Sequence: Synthetic oligonucleotide
  Target: PCSK9; (+) strand; PAM type: NRG; PAM sequence: TGG
cttccagcccagttaggatt

SEQ ID NO: 13455 - DNA, 20 bp, Artificial Sequence
  Description of Artificial Sequence: Synthetic oligonucleotide
  Target: PCSK9; (+) strand; PAM type: NRG; PAM sequence: GGG
ttccagcccagttaggattt

SEQ ID NO: 13456 - DNA, 20 bp, Artificial Sequence
  Description of Artificial Sequence: Synthetic oligonucleotide
  Target: PCSK9; (+) strand; PAM type: NRG; PAM sequence: GAG
ccagcccagttaggatttgg

SEQ ID NO: 13457 - DNA, 20 bp, Artificial Sequence
  Description of Artificial Sequence: Synthetic oligonucleotide
  Target: PCSK9; (+) strand; PAM type: NRG; PAM sequence: TGG
gcgcgtaatctgacgctgtt

SEQ ID NO: 13458 - DNA, 20 bp, Artificial Sequence
  Description of Artificial Sequence: Synthetic oligonucleotide
  Target: PCSK9; (+) strand; PAM type: NRG; PAM sequence: GGG
cgcgtaatctgacgctgttt

SEQ ID NO: 13459 - DNA, 20 bp, Artificial Sequence
  Description of Artificial Sequence: Synthetic oligonucleotide
  Target: PCSK9; (+) strand; PAM type: NRG; PAM sequence: GGG
gcgtaatctgacgctgtttg

SEQ ID NO: 13460 - DNA, 20 bp, Artificial Sequence
  Description of Artificial Sequence: Synthetic oligonucleotide
  Target: PCSK9; (+) strand; PAM type: NRG; PAM sequence: GAG
gtaatctgacgctgtttggg

SEQ ID NO: 13461 - DNA, 20 bp, Artificial Sequence
  Description of Artificial Sequence: Synthetic oligonucleotide
  Target: PCSK9; (+) strand; PAM type: NRG; PAM sequence: AGG
taatctgacgctgtttgggg

SEQ ID NO: 13462 - DNA, 20 bp, Artificial Sequence
  Description of Artificial Sequence: Synthetic oligonucleotide
  Target: PCSK9; (+) strand; PAM type: NRG; PAM sequence: GGG
aatctgacgctgtttgggga

SEQ ID NO: 13463 - DNA, 20 bp, Artificial Sequence
  Description of Artificial Sequence: Synthetic oligonucleotide
  Target: PCSK9; (+) strand; PAM type: NRG; PAM sequence: GAG
tgacgctgtttggggagggc

SEQ ID NO: 13464 - DNA, 20 bp, Artificial Sequence
  Description of Artificial Sequence: Synthetic oligonucleotide
  Target: PCSK9; (+) strand; PAM type: NRG; PAM sequence: AGG
gacgctgtttggggagggcg

SEQ ID NO: 13465 - DNA, 20 bp, Artificial Sequence
  Description of Artificial Sequence: Synthetic oligonucleotide
  Target: PCSK9; (+) strand; PAM type: NRG; PAM sequence: CAG
gaggccgaaacctgatcctc

SEQ ID NO: 13466 - DNA, 20 bp, Artificial Sequence
  Description of Artificial Sequence: Synthetic oligonucleotide
  Target: PCSK9; (+) strand; PAM type: NRG; PAM sequence: CGG
cgaaacctgatcctccagtc

SEQ ID NO: 13467 - DNA, 20 bp, Artificial Sequence
  Description of Artificial Sequence: Synthetic oligonucleotide
  Target: PCSK9; (+) strand; PAM type: NRG; PAM sequence: GGG
gaaacctgatcctccagtcc

SEQ ID NO: 13468 - DNA, 20 bp, Artificial Sequence
  Description of Artificial Sequence: Synthetic oligonucleotide
  Target: PCSK9; (+) strand; PAM type: NRG; PAM sequence: GGG
aaacctgatcctccagtccg

SEQ ID NO: 13469 - DNA, 20 bp, Artificial Sequence
  Description of Artificial Sequence: Synthetic oligonucleotide
  Target: PCSK9; (+) strand; PAM type: NRG; PAM sequence: GGG
aacctgatcctccagtccgg

SEQ ID NO: 13470 - DNA, 20 bp, Artificial Sequence
  Description of Artificial Sequence: Synthetic oligonucleotide
  Target: PCSK9; (+) strand; PAM type: NRG; PAM sequence: CAG
gggttccgttaatgtttaat

SEQ ID NO: 13471 - DNA, 20 bp, Artificial Sequence
  Description of Artificial Sequence: Synthetic oligonucleotide
  Target: PCSK9; (+) strand; PAM type: NRG; PAM sequence: TAG
tccgttaatgtttaatcaga

SEQ ID NO: 13472 - DNA, 20 bp, Artificial Sequence
  Description of Artificial Sequence: Synthetic oligonucleotide
  Target: PCSK9; (+) strand; PAM type: NRG; PAM sequence: AGG
ccgttaatgtttaatcagat

SEQ ID NO: 13473 - DNA, 20 bp, Artificial Sequence
  Description of Artificial Sequence: Synthetic oligonucleotide
  Target: PCSK9; (+) strand; PAM type: NRG; PAM sequence: TGG
aatcagataggatcgtccga

SEQ ID NO: 13474 - DNA, 20 bp, Artificial Sequence
  Description of Artificial Sequence: Synthetic oligonucleotide
  Target: PCSK9; (+) strand; PAM type: NRG; PAM sequence: GGG
atcagataggatcgtccgat

SEQ ID NO: 13475 - DNA, 20 bp, Artificial Sequence
  Description of Artificial Sequence: Synthetic oligonucleotide
  Target: PCSK9; (+) strand; PAM type: NRG; PAM sequence: GGG
tcagataggatcgtccgatg

SEQ ID NO: 13476 - DNA, 20 bp, Artificial Sequence
  Description of Artificial Sequence: Synthetic oligonucleotide
  Target: PCSK9; (+) strand; PAM type: NRG; PAM sequence: TGG
aggatcgtccgatggggctc

SEQ ID NO: 13477 - DNA, 20 bp, Artificial Sequence
  Description of Artificial Sequence: Synthetic oligonucleotide
  Target: PCSK9; (+) strand; PAM type: NRG; PAM sequence: TGG
atcgtccgatggggctctgg

SEQ ID NO: 13478 - DNA, 20 bp, Artificial Sequence
  Description of Artificial Sequence: Synthetic oligonucleotide
  Target: PCSK9; (+) strand; PAM type: NRG; PAM sequence: CAG
gtggcgtgatctgcgcgccc

SEQ ID NO: 13479 - DNA, 20 bp, Artificial Sequence
  Description of Artificial Sequence: Synthetic oligonucleotide
  Target: PCSK9; (+) strand; PAM type: NRG; PAM sequence: AGG
tggcgtgatctgcgcgcccc

SEQ ID NO: 13480 - DNA, 20 bp, Artificial Sequence
  Description of Artificial Sequence: Synthetic oligonucleotide
  Target: PCSK9; (+) strand; PAM type: NRG; PAM sequence: AAG
atctgcgcgccccaggcgtc

SEQ ID NO: 13481 - DNA, 20 bp, Artificial Sequence
  Description of Artificial Sequence: Synthetic oligonucleotide
  Target: PCSK9; (+) strand; PAM type: NRG; PAM sequence: TAG
ggcgtcaagcacccacaccc

SEQ ID NO: 13482 - DNA, 20 bp, Artificial Sequence
  Description of Artificial Sequence: Synthetic oligonucleotide
  Target: PCSK9; (+) strand; PAM type: NRG; PAM sequence: AAG
gtcaagcacccacaccctag

SEQ ID NO: 13483 - DNA, 20 bp, Artificial Sequence
  Description of Artificial Sequence: Synthetic oligonucleotide
  Target: PCSK9; (+) strand; PAM type: NRG; PAM sequence: AGG
tcaagcacccacaccctaga

SEQ ID NO: 13484 - DNA, 20 bp, Artificial Sequence
  Description of Artificial Sequence: Synthetic oligonucleotide
  Target: PCSK9; (+) strand; PAM type: NRG; PAM sequence: CAG
cacaccctagaaggtttccg

SEQ ID NO: 13485 - DNA, 20 bp, Artificial Sequence
  Description of Artificial Sequence: Synthetic oligonucleotide
  Target: PCSK9; (+) strand; PAM type: NRG; PAM sequence: GAG
aaggtttccgcagcgacgtc

SEQ ID NO: 13486 - DNA, 20 bp, Artificial Sequence
  Description of Artificial Sequence: Synthetic oligonucleotide
  Target: PCSK9; (+) strand; PAM type: NRG; PAM sequence: AGG
aggtttccgcagcgacgtcg

SEQ ID NO: 13487 - DNA, 20 bp, Artificial Sequence
  Description of Artificial Sequence: Synthetic oligonucleotide
  Target: PCSK9; (+) strand; PAM type: NRG; PAM sequence: TGG
cagcgacgtcgaggcgctca

SEQ ID NO: 13488 - DNA, 20 bp, Artificial Sequence
  Description of Artificial Sequence: Synthetic oligonucleotide
  Target: PCSK9; (+) strand; PAM type: NRG; PAM sequence: CAG
cgtcgaggcgctcatggttg

SEQ ID NO: 13489 - DNA, 20 bp, Artificial Sequence
  Description of Artificial Sequence: Synthetic oligonucleotide
  Target: PCSK9; (+) strand; PAM type: NRG; PAM sequence: AGG
gtcgaggcgctcatggttgc

SEQ ID NO: 13490 - DNA, 20 bp, Artificial Sequence
  Description of Artificial Sequence: Synthetic oligonucleotide
  Target: PCSK9; (+) strand; PAM type: NRG; PAM sequence: CGG
gaggcgctcatggttgcagg

SEQ ID NO: 13491 - DNA, 20 bp, Artificial Sequence
  Description of Artificial Sequence: Synthetic oligonucleotide
  Target: PCSK9; (+) strand; PAM type: NRG; PAM sequence: GGG
aggcgctcatggttgcaggc

SEQ ID NO: 13492 - DNA, 20 bp, Artificial Sequence
  Description of Artificial Sequence: Synthetic oligonucleotide
  Target: PCSK9; (+) strand; PAM type: NRG; PAM sequence: CAG
tgcaggcgggcgccgccgtt

SEQ ID NO: 13493 - DNA, 20 bp, Artificial Sequence
  Description of Artificial Sequence: Synthetic oligonucleotide
  Target: PCSK9; (+) strand; PAM type: NRG; PAM sequence: CAG
gcgggcgccgccgttcagtt

SEQ ID NO: 13494 - DNA, 20 bp, Artificial Sequence
  Description of Artificial Sequence: Synthetic oligonucleotide
  Target: PCSK9; (+) strand; PAM type: NRG; PAM sequence: AGG
cgggcgccgccgttcagttc

SEQ ID NO: 13495 - DNA, 20 bp, Artificial Sequence
  Description of Artificial Sequence: Synthetic oligonucleotide
  Target: PCSK9; (+) strand; PAM type: NRG; PAM sequence: GGG
gggcgccgccgttcagttca

SEQ ID NO: 13496 - DNA, 20 bp, Artificial Sequence
  Description of Artificial Sequence: Synthetic oligonucleotide
  Target: PCSK9; (+) strand; PAM type: NRG; PAM sequence: GAG
cgccgttcagttcagggtct

SEQ ID NO: 13497 - DNA, 20 bp, Artificial Sequence
  Description of Artificial Sequence: Synthetic oligonucleotide
  Target: PCSK9; (+) strand; PAM type: NRG; PAM sequence: TGG
ttcagttcagggtctgagcc

SEQ ID NO: 13498 - DNA, 20 bp, Artificial Sequence
  Description of Artificial Sequence: Synthetic oligonucleotide
  Target: PCSK9; (+) strand; PAM type: NRG; PAM sequence: GAG
cagttcagggtctgagcctg

SEQ ID NO: 13499 - DNA, 20 bp, Artificial Sequence
  Description of Artificial Sequence: Synthetic oligonucleotide
  Target: PCSK9; (+) strand; PAM type: NRG; PAM sequence: AGG
agttcagggtctgagcctgg

SEQ ID NO: 13500 - DNA, 20 bp, Artificial Sequence
  Description of Artificial Sequence: Synthetic oligonucleotide
  Target: PCSK9; (+) strand; PAM type: NRG; PAM sequence: GAG
ttcagggtctgagcctggag

SEQ ID NO: 13501 - DNA, 20 bp, Artificial Sequence
  Description of Artificial Sequence: Synthetic oligonucleotide
  Target: PCSK9; (+) strand; PAM type: NRG; PAM sequence: GAG
gggtctgagcctggaggagt

SEQ ID NO: 13502 - DNA, 20 bp, Artificial Sequence
  Description of Artificial Sequence: Synthetic oligonucleotide
  Target: PCSK9; (+) strand; PAM type: NRG; PAM sequence: CAG
ctgagcctggaggagtgagc

SEQ ID NO: 13503 - DNA, 20 bp, Artificial Sequence
  Description of Artificial Sequence: Synthetic oligonucleotide
  Target: PCSK9; (+) strand; PAM type: NRG; PAM sequence: AGG
tgagcctggaggagtgagcc

SEQ ID NO: 13504 - DNA, 20 bp, Artificial Sequence
  Description of Artificial Sequence: Synthetic oligonucleotide
  Target: PCSK9; (+) strand; PAM type: NRG; PAM sequence: CAG
gcctggaggagtgagccagg

SEQ ID NO: 13505 - DNA, 20 bp, Artificial Sequence
  Description of Artificial Sequence: Synthetic oligonucleotide
  Target: PCSK9; (+) strand; PAM type: NRG; PAM sequence: GAG
ggaggagtgagccaggcagt

SEQ ID NO: 13506 - DNA, 20 bp, Artificial Sequence
  Description of Artificial Sequence: Synthetic oligonucleotide
  Target: PCSK9; (+) strand; PAM type: NRG; PAM sequence: TGG
agtgagccaggcagtgagac

SEQ ID NO: 13507 - DNA, 20 bp, Artificial Sequence
  Description of Artificial Sequence: Synthetic oligonucleotide
  Target: PCSK9; (+) strand; PAM type: NRG; PAM sequence: CGG
gccaggcagtgagactggct

SEQ ID NO: 13508 - DNA, 20 bp, Artificial Sequence
  Description of Artificial Sequence: Synthetic oligonucleotide
  Target: PCSK9; (+) strand; PAM type: NRG; PAM sequence: GGG
ccaggcagtgagactggctc

SEQ ID NO: 13509 - DNA, 20 bp, Artificial Sequence
  Description of Artificial Sequence: Synthetic oligonucleotide
  Target: PCSK9; (+) strand; PAM type: NRG; PAM sequence: CGG
ggcagtgagactggctcggg

SEQ ID NO: 13510 - DNA, 20 bp, Artificial Sequence
  Description of Artificial Sequence: Synthetic oligonucleotide
  Target: PCSK9; (+) strand; PAM type: NRG; PAM sequence: GGG
gcagtgagactggctcgggc

SEQ ID NO: 13511 - DNA, 20 bp, Artificial Sequence
  Description of Artificial Sequence: Synthetic oligonucleotide
  Target: PCSK9; (+) strand; PAM type: NRG; PAM sequence: CGG
tgagactggctcgggcgggc

SEQ ID NO: 13512 - DNA, 20 bp, Artificial Sequence
  Description of Artificial Sequence: Synthetic oligonucleotide
  Target: PCSK9; (+) strand; PAM type: NRG; PAM sequence: GGG
gagactggctcgggcgggcc

SEQ ID NO: 13513 - DNA, 20 bp, Artificial Sequence
  Description of Artificial Sequence: Synthetic oligonucleotide
  Target: PCSK9; (+) strand; PAM type: NRG; PAM sequence: CAG
cgggccgggacgcgtcgttg

SEQ ID NO: 13514 - DNA, 20 bp, Artificial Sequence
  Description of Artificial Sequence: Synthetic oligonucleotide
  Target: PCSK9; (+) strand; PAM type: NRG; PAM sequence: CAG
gccgggacgcgtcgttgcag

SEQ ID NO: 13515 - DNA, 20 bp, Artificial Sequence
  Description of Artificial Sequence: Synthetic oligonucleotide
  Target: PCSK9; (+) strand; PAM type: NRG; PAM sequence: CGG
gggacgcgtcgttgcagcag

SEQ ID NO: 13516 - DNA, 20 bp, Artificial Sequence
  Description of Artificial Sequence: Synthetic oligonucleotide
  Target: PCSK9; (+) strand; PAM type: NRG; PAM sequence: CAG
gtcgttgcagcagcggctcc

SEQ ID NO: 13517 - DNA, 20 bp, Artificial Sequence
  Description of Artificial Sequence: Synthetic oligonucleotide
  Target: PCSK9; (+) strand; PAM type: NRG; PAM sequence: CAG
cagcagcggctcccagctcc

SEQ ID NO: 13518 - DNA, 20 bp, Artificial Sequence
  Description of Artificial Sequence: Synthetic oligonucleotide
  Target: PCSK9; (+) strand; PAM type: NRG; PAM sequence: CAG
agcggctcccagctcccagc

SEQ ID NO: 13519 - DNA, 20 bp, Artificial Sequence
  Description of Artificial Sequence: Synthetic oligonucleotide
  Target: PCSK9; (+) strand; PAM type: NRG; PAM sequence: AGG
gcggctcccagctcccagcc

SEQ ID NO: 13520 - DNA, 20 bp, Artificial Sequence
  Description of Artificial Sequence: Synthetic oligonucleotide
  Target: PCSK9; (+) strand; PAM type: NRG; PAM sequence: CAG
cgcgccctgctcctgaactt

SEQ ID NO: 13521 - DNA, 20 bp, Artificial Sequence
  Description of Artificial Sequence: Synthetic oligonucleotide
  Target: PCSK9; (+) strand; PAM type: NRG; PAM sequence: CAG
cctgaacttcagctcctgca

SEQ ID NO: 13522 - DNA, 20 bp, Artificial Sequence
  Description of Artificial Sequence: Synthetic oligonucleotide
  Target: PCSK9; (+) strand; PAM type: NRG; PAM sequence: AAG
tgcacagtcctccccaccgc

SEQ ID NO: 13523 - DNA, 20 bp, Artificial Sequence
  Description of Artificial Sequence: Synthetic oligonucleotide
  Target: PCSK9; (+) strand; PAM type: NRG; PAM sequence: AGG
gcacagtcctccccaccgca

SEQ ID NO: 13524 - DNA, 20 bp, Artificial Sequence
  Description of Artificial Sequence: Synthetic oligonucleotide
  Target: PCSK9; (+) strand; PAM type: NRG; PAM sequence: AAG
tcctccccaccgcaaggctc

SEQ ID NO: 13525 - DNA, 20 bp, Artificial Sequence
  Description of Artificial Sequence: Synthetic oligonucleotide
  Target: PCSK9; (+) strand; PAM type: NRG; PAM sequence: AGG
cctccccaccgcaaggctca

SEQ ID NO: 13526 - DNA, 20 bp, Artificial Sequence
  Description of Artificial Sequence: Synthetic oligonucleotide
  Target: PCSK9; (+) strand; PAM type: NRG; PAM sequence: CGG
cgcaaggctcaaggcgccgc

SEQ ID NO: 13527 - DNA, 20 bp, Artificial Sequence
  Description of Artificial Sequence: Synthetic oligonucleotide
  Target: PCSK9; (+) strand; PAM type: NRG; PAM sequence: TGG
ggctcaaggcgccgccggcg

SEQ ID NO: 13528 - DNA, 20 bp, Artificial Sequence
  Description of Artificial Sequence: Synthetic oligonucleotide
  Target: PCSK9; (+) strand; PAM type: NRG; PAM sequence: CGG
ccgccggcgtggaccgcgca

SEQ ID NO: 13529 - DNA, 20 bp, Artificial Sequence
  Description of Artificial Sequence: Synthetic oligonucleotide
  Target: PCSK9; (+) strand; PAM type: NRG; PAM sequence: TAG
cgtggaccgcgcacggcctc

SEQ ID NO: 13530 - DNA, 20 bp, Artificial Sequence
  Description of Artificial Sequence: Synthetic oligonucleotide
  Target: PCSK9; (+) strand; PAM type: NRG; PAM sequence: AGG
gtggaccgcgcacggcctct

SEQ ID NO: 13531 - DNA, 20 bp, Artificial Sequence
  Description of Artificial Sequence: Synthetic oligonucleotide
  Target: PCSK9; (+) strand; PAM type: NRG; PAM sequence: CAG
cggcctctaggtctcctcgc

SEQ ID NO: 13532 - DNA, 20 bp, Artificial Sequence
  Description of Artificial Sequence: Synthetic oligonucleotide
  Target: PCSK9; (+) strand; PAM type: NRG; PAM sequence: AGG
ggcctctaggtctcctcgcc

SEQ ID NO: 13533 - DNA, 20 bp, Artificial Sequence
  Description of Artificial Sequence: Synthetic oligonucleotide
  Target: PCSK9; (+) strand; PAM type: NRG; PAM sequence: CAG
tctaggtctcctcgccagga

SEQ ID NO: 13534 - DNA, 20 bp, Artificial Sequence
  Description of Artificial Sequence: Synthetic oligonucleotide
  Target: PCSK9; (+) strand; PAM type: NRG; PAM sequence: TGG
caggacagcaacctctcccc

SEQ ID NO: 13535 - DNA, 20 bp, Artificial Sequence
  Description of Artificial Sequence: Synthetic oligonucleotide
  Target: PCSK9; (+) strand; PAM type: NRG; PAM sequence: TGG
aacctctcccctggccctca

SEQ ID NO: 13536 - DNA, 20 bp, Artificial Sequence
  Description of Artificial Sequence: Synthetic oligonucleotide
  Target: PCSK9; (+) strand; PAM type: NRG; PAM sequence: GGG
acctctcccctggccctcat

SEQ ID NO: 13537 - DNA, 20 bp, Artificial Sequence
  Description of Artificial Sequence: Synthetic oligonucleotide
  Target: PCSK9; (+) strand; PAM type: NRG; PAM sequence: CAG
ctggccctcatgggcaccgt

SEQ ID NO: 13538 - DNA, 20 bp, Artificial Sequence
  Description of Artificial Sequence: Synthetic oligonucleotide
  Target: PCSK9; (+) strand; PAM type: NRG; PAM sequence: CAG
ctcatgggcaccgtcagctc

SEQ ID NO: 13539 - DNA, 20 bp, Artificial Sequence
  Description of Artificial Sequence: Synthetic oligonucleotide
  Target: PCSK9; (+) strand; PAM type: NRG; PAM sequence: AGG
tcatgggcaccgtcagctcc

SEQ ID NO: 13540 - DNA, 20 bp, Artificial Sequence
  Description of Artificial Sequence: Synthetic oligonucleotide
  Target: PCSK9; (+) strand; PAM type: NRG; PAM sequence: CGG
tgggcaccgtcagctccagg

SEQ ID NO: 13541 - DNA, 20 bp, Artificial Sequence
  Description of Artificial Sequence: Synthetic oligonucleotide
  Target: PCSK9; (+) strand; PAM type: NRG; PAM sequence: TGG
ccgtcagctccaggcggtcc

SEQ ID NO: 13542 - DNA, 20 bp, Artificial Sequence
  Description of Artificial Sequence: Synthetic oligonucleotide
  Target: PCSK9; (+) strand; PAM type: NRG; PAM sequence: TGG
tcagctccaggcggtcctgg

SEQ ID NO: 13543 - DNA, 20 bp, Artificial Sequence
  Description of Artificial Sequence: Synthetic oligonucleotide
  Target: PCSK9; (+) strand; PAM type: NRG; PAM sequence: TGG
gctgctgctgctgctgctcc

SEQ ID NO: 13544 - DNA, 20 bp, Artificial Sequence
  Description of Artificial Sequence: Synthetic oligonucleotide
  Target: PCSK9; (+) strand; PAM type: NRG; PAM sequence: GGG
ctgctgctgctgctgctcct

SEQ ID NO: 13545 - DNA, 20 bp, Artificial Sequence
  Description of Artificial Sequence: Synthetic oligonucleotide
  Target: PCSK9; (+) strand; PAM type: NRG; PAM sequence: CGG
gctgctgctcctgggtcccg

SEQ ID NO: 13546 - DNA, 20 bp, Artificial Sequence
  Description of Artificial Sequence: Synthetic oligonucleotide
  Target: PCSK9; (+) strand; PAM type: NRG; PAM sequence: GGG
ctgctgctcctgggtcccgc

SEQ ID NO: 13547 - DNA, 20 bp, Artificial Sequence
  Description of Artificial Sequence: Synthetic oligonucleotide
  Target: PCSK9; (+) strand; PAM type: NRG; PAM sequence: CAG
gtcccgcgggcgcccgtgcg

SEQ ID NO: 13548 - DNA, 20 bp, Artificial Sequence
  Description of Artificial Sequence: Synthetic oligonucleotide
  Target: PCSK9; (+) strand; PAM type: NRG; PAM sequence: AGG
tcccgcgggcgcccgtgcgc

SEQ ID NO: 13549 - DNA, 20 bp, Artificial Sequence
  Description of Artificial Sequence: Synthetic oligonucleotide
  Target: PCSK9; (+) strand; PAM type: NRG; PAM sequence: GAG
ccgcgggcgcccgtgcgcag

SEQ ID NO: 13550 - DNA, 20 bp, Artificial Sequence
  Description of Artificial Sequence: Synthetic oligonucleotide
  Target: PCSK9; (+) strand; PAM type: NRG; PAM sequence: AGG
cgcgggcgcccgtgcgcagg

SEQ ID NO: 13551 - DNA, 20 bp, Artificial Sequence
  Description of Artificial Sequence: Synthetic oligonucleotide
  Target: PCSK9; (+) strand; PAM type: NRG; PAM sequence: GAG
gcgcccgtgcgcaggaggac

SEQ ID NO: 13552 - DNA, 20 bp, Artificial Sequence
  Description of Artificial Sequence: Synthetic oligonucleotide
  Target: PCSK9; (+) strand; PAM type: NRG; PAM sequence: AGG
cgcccgtgcgcaggaggacg

SEQ ID NO: 13553 - DNA, 20 bp, Artificial Sequence
  Description of Artificial Sequence: Synthetic oligonucleotide
  Target: PCSK9; (+) strand; PAM type: NRG; PAM sequence: CGG
cgtgcgcaggaggacgagga

SEQ ID NO: 13554 - DNA, 20 bp, Artificial Sequence
  Description of Artificial Sequence: Synthetic oligonucleotide
  Target: PCSK9; (+) strand; PAM type: NRG; PAM sequence: GAG
aggacgaggacggcgactac

SEQ ID NO: 13555 - DNA, 20 bp, Artificial Sequence
  Description of Artificial Sequence: Synthetic oligonucleotide
  Target: PCSK9; (+) strand; PAM type: NRG; PAM sequence: AGG
ggacgaggacggcgactacg

SEQ ID NO: 13556 - DNA, 20 bp, Artificial Sequence
  Description of Artificial Sequence: Synthetic oligonucleotide
  Target: PCSK9; (+) strand; PAM type: NRG; PAM sequence: GAG
acgaggacggcgactacgag

SEQ ID NO: 13557 - DNA, 20 bp, Artificial Sequence
  Description of Artificial Sequence: Synthetic oligonucleotide
  Target: PCSK9; (+) strand; PAM type: NRG; PAM sequence: TGG
ggacggcgactacgaggagc

SEQ ID NO: 13558 - DNA, 20 bp, Artificial Sequence
  Description of Artificial Sequence: Synthetic oligonucleotide
  Target: PCSK9; (+) strand; PAM type: NRG; PAM sequence: TAG
cgactacgaggagctggtgc

SEQ ID NO: 13559 - DNA, 20 bp, Artificial Sequence
  Description of Artificial Sequence: Synthetic oligonucleotide
  Target: PCSK9; (+) strand; PAM type: NRG; PAM sequence: GAG
tggtgctagccttgcgttcc

SEQ ID NO: 13560 - DNA, 20 bp, Artificial Sequence
  Description of Artificial Sequence: Synthetic oligonucleotide
  Target: PCSK9; (+) strand; PAM type: NRG; PAM sequence: AGG
ggtgctagccttgcgttccg

SEQ ID NO: 13561 - DNA, 20 bp, Artificial Sequence
  Description of Artificial Sequence: Synthetic oligonucleotide
  Target: PCSK9; (+) strand; PAM type: NRG; PAM sequence: GAG
tgctagccttgcgttccgag

SEQ ID NO: 13562 - DNA, 20 bp, Artificial Sequence
  Description of Artificial Sequence: Synthetic oligonucleotide
  Target: PCSK9; (+) strand; PAM type: NRG; PAM sequence: AGG
gctagccttgcgttccgagg

SEQ ID NO: 13563 - DNA, 20 bp, Artificial Sequence
  Description of Artificial Sequence: Synthetic oligonucleotide
  Target: PCSK9; (+) strand; PAM type: NRG; PAM sequence: CGG
gccttgcgttccgaggagga

SEQ ID NO: 13564 - DNA, 20 bp, Artificial Sequence
  Description of Artificial Sequence: Synthetic oligonucleotide
  Target: PCSK9; (+) strand; PAM type: NRG; PAM sequence: TGG
gcgttccgaggaggacggcc

SEQ ID NO: 13565 - DNA, 20 bp, Artificial Sequence
  Description of Artificial Sequence: Synthetic oligonucleotide
  Target: PCSK9; (+) strand; PAM type: NRG; PAM sequence: AAG
cgaggaggacggcctggccg

SEQ ID NO: 13566 - DNA, 20 bp, Artificial Sequence
  Description of Artificial Sequence: Synthetic oligonucleotide
  Target: PCSK9; (+) strand; PAM type: NRG; PAM sequence: GAG
acggcctggccgaagcaccc

SEQ ID NO: 13567 - DNA, 20 bp, Artificial Sequence
  Description of Artificial Sequence: Synthetic oligonucleotide
  Target: PCSK9; (+) strand; PAM type: NRG; PAM sequence: CGG
ctggccgaagcacccgagca

SEQ ID NO: 13568 - DNA, 20 bp, Artificial Sequence
  Description of Artificial Sequence: Synthetic oligonucleotide
  Target: PCSK9; (+) strand; PAM type: NRG; PAM sequence: CAG
agcacccgagcacggaacca

SEQ ID NO: 13569 - DNA, 20 bp, Artificial Sequence
  Description of Artificial Sequence: Synthetic oligonucleotide
  Target: PCSK9; (+) strand; PAM type: NRG; PAM sequence: AAG
ccaccttccaccgctgcgcc

SEQ ID NO: 13570 - DNA, 20 bp, Artificial Sequence
  Description of Artificial Sequence: Synthetic oligonucleotide
  Target: PCSK9; (+) strand; PAM type: NRG; PAM sequence: AGG
caccttccaccgctgcgcca

SEQ ID NO: 13571 - DNA, 20 bp, Artificial Sequence
  Description of Artificial Sequence: Synthetic oligonucleotide
  Target: PCSK9; (+) strand; PAM type: NRG; PAM sequence: CGG
tccaccgctgcgccaaggtg

SEQ ID NO: 13572 - DNA, 20 bp, Artificial Sequence
  Description of Artificial Sequence: Synthetic oligonucleotide
  Target: PCSK9; (+) strand; PAM type: NRG; PAM sequence: GGG
ccaccgctgcgccaaggtgc

SEQ ID NO: 13573 - DNA, 20 bp, Artificial Sequence
  Description of Artificial Sequence: Synthetic oligonucleotide
  Target: PCSK9; (+) strand; PAM type: NRG; PAM sequence: TAG
gctgcgccaaggtgcgggtg

SEQ ID NO: 13574 - DNA, 20 bp, Artificial Sequence
  Description of Artificial Sequence: Synthetic oligonucleotide
  Target: PCSK9; (+) strand; PAM type: NRG; PAM sequence: AGG
ctgcgccaaggtgcgggtgt

SEQ ID NO: 13575 - DNA, 20 bp, Artificial Sequence
  Description of Artificial Sequence: Synthetic oligonucleotide
  Target: PCSK9; (+) strand; PAM type: NRG; PAM sequence: GGG
tgcgccaaggtgcgggtgta

SEQ ID NO: 13576 - DNA, 20 bp, Artificial Sequence
  Description of Artificial Sequence: Synthetic oligonucleotide
  Target: PCSK9; (+) strand; PAM type: NRG; PAM sequence: TGG
ccaaggtgcgggtgtaggga

SEQ ID NO: 13577 - DNA, 20 bp, Artificial Sequence
  Description of Artificial Sequence: Synthetic oligonucleotide
  Target: PCSK9; (+) strand; PAM type: NRG; PAM sequence: GGG
caaggtgcgggtgtagggat

SEQ ID NO: 13578 - DNA, 20 bp, Artificial Sequence
  Description of Artificial Sequence: Synthetic oligonucleotide
  Target: PCSK9; (+) strand; PAM type: NRG; PAM sequence: GAG
aggtgcgggtgtagggatgg

SEQ ID NO: 13579 - DNA, 20 bp, Artificial Sequence
  Description of Artificial Sequence: Synthetic oligonucleotide
  Target: PCSK9; (+) strand; PAM type: NRG; PAM sequence: AGG
ggtgcgggtgtagggatggg

SEQ ID NO: 13580 - DNA, 20 bp, Artificial Sequence
  Description of Artificial Sequence: Synthetic oligonucleotide
  Target: PCSK9; (+) strand; PAM type: NRG; PAM sequence: CGG
cgggtgtagggatgggaggc

SEQ ID NO: 13581 - DNA, 20 bp, Artificial Sequence
  Description of Artificial Sequence: Synthetic oligonucleotide
  Target: PCSK9; (+) strand; PAM type: NRG; PAM sequence: GGG
gggtgtagggatgggaggcc

SEQ ID NO: 13582 - DNA, 20 bp, Artificial Sequence
  Description of Artificial Sequence: Synthetic oligonucleotide
  Target: PCSK9; (+) strand; PAM type: NRG; PAM sequence: GGG
ggtgtagggatgggaggccg

SEQ ID NO: 13583 - DNA, 20 bp, Artificial Sequence
  Description of Artificial Sequence: Synthetic oligonucleotide
  Target: PCSK9; (+) strand; PAM type: NRG; PAM sequence: CAG
gggaggccggggcgaacccg

SEQ ID NO: 13584 - DNA, 20 bp, Artificial Sequence
  Description of Artificial Sequence: Synthetic oligonucleotide
  Target: PCSK9; (+) strand; PAM type: NRG; PAM sequence: CGG
ggccggggcgaacccgcagc

SEQ ID NO: 13585 - DNA, 20 bp, Artificial Sequence
  Description of Artificial Sequence: Synthetic oligonucleotide
  Target: PCSK9; (+) strand; PAM type: NRG; PAM sequence: GGG
gccggggcgaacccgcagcc

SEQ ID NO: 13586 - DNA, 20 bp, Artificial Sequence
  Description of Artificial Sequence: Synthetic oligonucleotide
  Target: PCSK9; (+) strand; PAM type: NRG; PAM sequence: CGG
gggcgaacccgcagccggga

SEQ ID NO: 13587 - DNA, 20 bp, Artificial Sequence
  Description of Artificial Sequence: Synthetic oligonucleotide
  Target: PCSK9; (+) strand; PAM type: NRG; PAM sequence: CGG
aacccgcagccgggacggtg

SEQ ID NO: 13588 - DNA, 20 bp, Artificial Sequence
  Description of Artificial Sequence: Synthetic oligonucleotide
  Target: PCSK9; (+) strand; PAM type: NRG; PAM sequence: CGG
ggtgcggtgctgtttcctct

SEQ ID NO: 13589 - DNA, 20 bp, Artificial Sequence
  Description of Artificial Sequence: Synthetic oligonucleotide
  Target: PCSK9; (+) strand; PAM type: NRG; PAM sequence: GGG
gtgcggtgctgtttcctctc

SEQ ID NO: 13590 - DNA, 20 bp, Artificial Sequence
  Description of Artificial Sequence: Synthetic oligonucleotide
  Target: PCSK9; (+) strand; PAM type: NRG; PAM sequence: CAG
tgctgtttcctctcgggcct

SEQ ID NO: 13591 - DNA, 20 bp, Artificial Sequence
  Description of Artificial Sequence: Synthetic oligonucleotide
  Target: PCSK9; (+) strand; PAM type: NRG; PAM sequence: AAG
gcctcagtttccccccatgt

SEQ ID NO: 13592 - DNA, 20 bp, Artificial Sequence
  Description of Artificial Sequence: Synthetic oligonucleotide
  Target: PCSK9; (+) strand; PAM type: NRG; PAM sequence: GAG
ctcagtttccccccatgtaa

SEQ ID NO: 13593 - DNA, 20 bp, Artificial Sequence
  Description of Artificial Sequence: Synthetic oligonucleotide
  Target: PCSK9; (+) strand; PAM type: NRG; PAM sequence: GAG
cagtttccccccatgtaaga

SEQ ID NO: 13594 - DNA, 20 bp, Artificial Sequence
  Description of Artificial Sequence: Synthetic oligonucleotide
  Target: PCSK9; (+) strand; PAM type: NRG; PAM sequence: AGG
agtttccccccatgtaagag

SEQ ID NO: 13595 - DNA, 20 bp, Artificial Sequence
  Description of Artificial Sequence: Synthetic oligonucleotide
  Target: PCSK9; (+) strand; PAM type: NRG; PAM sequence: AAG
ttccccccatgtaagagagg

SEQ ID NO: 13596 - DNA, 20 bp, Artificial Sequence
  Description of Artificial Sequence: Synthetic oligonucleotide
  Target: PCSK9; (+) strand; PAM type: NRG; PAM sequence: TGG
cccccatgtaagagaggaag

SEQ ID NO: 13597 - DNA, 20 bp, Artificial Sequence
  Description of Artificial Sequence: Synthetic oligonucleotide
  Target: PCSK9; (+) strand; PAM type: NRG; PAM sequence: GAG
cccatgtaagagaggaagtg

SEQ ID NO: 13598 - DNA, 20 bp, Artificial Sequence
  Description of Artificial Sequence: Synthetic oligonucleotide
  Target: PCSK9; (+) strand; PAM type: NRG; PAM sequence: CAG
gtaagagaggaagtggagtg

SEQ ID NO: 13599 - DNA, 20 bp, Artificial Sequence
  Description of Artificial Sequence: Synthetic oligonucleotide
  Target: PCSK9; (+) strand; PAM type: NRG; PAM sequence: AGG
taagagaggaagtggagtgc

SEQ ID NO: 13600 - DNA, 20 bp, Artificial Sequence
  Description of Artificial Sequence: Synthetic oligonucleotide
  Target: PCSK9; (+) strand; PAM type: NRG; PAM sequence: GAG
gaagtggagtgcaggtcgcc

SEQ ID NO: 13601 - DNA, 20 bp, Artificial Sequence
  Description of Artificial Sequence: Synthetic oligonucleotide
  Target: PCSK9; (+) strand; PAM type: NRG; PAM sequence: AGG
aagtggagtgcaggtcgccg

SEQ ID NO: 13602 - DNA, 20 bp, Artificial Sequence
  Description of Artificial Sequence: Synthetic oligonucleotide
  Target: PCSK9; (+) strand; PAM type: NRG; PAM sequence: GGG
agtggagtgcaggtcgccga

SEQ ID NO: 13603 - DNA, 20 bp, Artificial Sequence
  Description of Artificial Sequence: Synthetic oligonucleotide
  Target: PCSK9; (+) strand; PAM type: NRG; PAM sequence: TGG
gtcgccgagggctcttcgct

SEQ ID NO: 13604 - DNA, 20 bp, Artificial Sequence
  Description of Artificial Sequence: Synthetic oligonucleotide
  Target: PCSK9; (+) strand; PAM type: NRG; PAM sequence: TGG
ctcttcgcttggcacgatct

SEQ ID NO: 13605 - DNA, 20 bp, Artificial Sequence
  Description of Artificial Sequence: Synthetic oligonucleotide
  Target: PCSK9; (+) strand; PAM type: NRG; PAM sequence: GGG
tcttcgcttggcacgatctt

SEQ ID NO: 13606 - DNA, 20 bp, Artificial Sequence
  Description of Artificial Sequence: Synthetic oligonucleotide
  Target: PCSK9; (+) strand; PAM type: NRG; PAM sequence: GGG
cttcgcttggcacgatcttg

SEQ ID NO: 13607 - DNA, 20 bp, Artificial Sequence
  Description of Artificial Sequence: Synthetic oligonucleotide
  Target: PCSK9; (+) strand; PAM type: NRG; PAM sequence: CAG
tggcacgatcttggggactg

SEQ ID NO: 13608 - DNA, 20 bp, Artificial Sequence
  Description of Artificial Sequence: Synthetic oligonucleotide
  Target: PCSK9; (+) strand; PAM type: NRG; PAM sequence: AGG
ggcacgatcttggggactgc

SEQ ID NO: 13609 - DNA, 20 bp, Artificial Sequence
  Description of Artificial Sequence: Synthetic oligonucleotide
  Target: PCSK9; (+) strand; PAM type: NRG; PAM sequence: AAG
cgatcttggggactgcaggc

SEQ ID NO: 13610 - DNA, 20 bp, Artificial Sequence
  Description of Artificial Sequence: Synthetic oligonucleotide
  Target: PCSK9; (+) strand; PAM type: NRG; PAM sequence: AGG
gatcttggggactgcaggca

SEQ ID NO: 13611 - DNA, 20 bp, Artificial Sequence
  Description of Artificial Sequence: Synthetic oligonucleotide
  Target: PCSK9; (+) strand; PAM type: NRG; PAM sequence: CGG
cttggggactgcaggcaagg

SEQ ID NO: 13612 - DNA, 20 bp, Artificial Sequence
  Description of Artificial Sequence: Synthetic oligonucleotide
  Target: PCSK9; (+) strand; PAM type: NRG; PAM sequence: CGG
ggggactgcaggcaaggcgg

SEQ ID NO: 13613 - DNA, 20 bp, Artificial Sequence
  Description of Artificial Sequence: Synthetic oligonucleotide
  Target: PCSK9; (+) strand; PAM type: NRG; PAM sequence: GGG
gggactgcaggcaaggcggc

SEQ ID NO: 13614 - DNA, 20 bp, Artificial Sequence
  Description of Artificial Sequence: Synthetic oligonucleotide
  Target: PCSK9; (+) strand; PAM type: NRG; PAM sequence: GGG
ggactgcaggcaaggcggcg

SEQ ID NO: 13615 - DNA, 20 bp, Artificial Sequence
  Description of Artificial Sequence: Synthetic oligonucleotide
  Target: PCSK9; (+) strand; PAM type: NRG; PAM sequence: GGG
gactgcaggcaaggcggcgg

SEQ ID NO: 13616 - DNA, 20 bp, Artificial Sequence
  Description of Artificial Sequence: Synthetic oligonucleotide
  Target: PCSK9; (+) strand; PAM type: NRG; PAM sequence: GAG
ctgcaggcaaggcggcgggg

SEQ ID NO: 13617 - DNA, 20 bp, Artificial Sequence
  Description of Artificial Sequence: Synthetic oligonucleotide
  Target: PCSK9; (+) strand; PAM type: NRG; PAM sequence: AGG
tgcaggcaaggcggcggggg

SEQ ID NO: 13618 - DNA, 20 bp, Artificial Sequence
  Description of Artificial Sequence: Synthetic oligonucleotide
  Target: PCSK9; (+) strand; PAM type: NRG; PAM sequence: CGG
ggcaaggcggcgggggagga

SEQ ID NO: 13619 - DNA, 20 bp, Artificial Sequence
  Description of Artificial Sequence: Synthetic oligonucleotide
  Target: PCSK9; (+) strand; PAM type: NRG; PAM sequence: GGG
gcaaggcggcgggggaggac

SEQ ID NO: 13620 - DNA, 20 bp, Artificial Sequence
  Description of Artificial Sequence: Synthetic oligonucleotide
  Target: PCSK9; (+) strand; PAM type: NRG; PAM sequence: TAG
aggcggcgggggaggacggg

SEQ ID NO: 13621 - DNA, 20 bp, Artificial Sequence
  Description of Artificial Sequence: Synthetic oligonucleotide
  Target: PCSK9; (+) strand; PAM type: NRG; PAM sequence: TGG
cggcgggggaggacgggtag

SEQ ID NO: 13622 - DNA, 20 bp, Artificial Sequence
  Description of Artificial Sequence: Synthetic oligonucleotide
  Target: PCSK9; (+) strand; PAM type: NRG; PAM sequence: GGG
ggcgggggaggacgggtagt

SEQ ID NO: 13623 - DNA, 20 bp, Artificial Sequence
  Description of Artificial Sequence: Synthetic oligonucleotide
  Target: PCSK9; (+) strand; PAM type: NRG; PAM sequence: GGG
gcgggggaggacgggtagtg

SEQ ID NO: 13624 - DNA, 20 bp, Artificial Sequence
  Description of Artificial Sequence: Synthetic oligonucleotide
  Target: PCSK9; (+) strand; PAM type: NRG; PAM sequence: GAG
gggggaggacgggtagtggg

SEQ ID NO: 13625 - DNA, 20 bp, Artificial Sequence
  Description of Artificial Sequence: Synthetic oligonucleotide
  Target: PCSK9; (+) strand; PAM type: NRG; PAM sequence: CGG
aggacgggtagtggggagca

SEQ ID NO: 13626 - DNA, 20 bp, Artificial Sequence
  Description of Artificial Sequence: Synthetic oligonucleotide
  Target: PCSK9; (+) strand; PAM type: NRG; PAM sequence: TGG
acgggtagtggggagcacgg

SEQ ID NO: 13627 - DNA, 20 bp, Artificial Sequence
  Description of Artificial Sequence: Synthetic oligonucleotide
  Target: PCSK9; (+) strand; PAM type: NRG; PAM sequence: GAG
gggtagtggggagcacggtg

SEQ ID NO: 13628 - DNA, 20 bp, Artificial Sequence
  Description of Artificial Sequence: Synthetic oligonucleotide
  Target: PCSK9; (+) strand; PAM type: NRG; PAM sequence: GAG
gtagtggggagcacggtgga

SEQ ID NO: 13629 - DNA, 20 bp, Artificial Sequence
  Description of Artificial Sequence: Synthetic oligonucleotide
  Target: PCSK9; (+) strand; PAM type: NRG; PAM sequence: CGG
gtggggagcacggtggagag

SEQ ID NO: 13630 - DNA, 20 bp, Artificial Sequence
  Description of Artificial Sequence: Synthetic oligonucleotide
  Target: PCSK9; (+) strand; PAM type: NRG; PAM sequence: GGG
tggggagcacggtggagagc

SEQ ID NO: 13631 - DNA, 20 bp, Artificial Sequence
  Description of Artificial Sequence: Synthetic oligonucleotide
  Target: PCSK9; (+) strand; PAM type: NRG; PAM sequence: GGG
ggggagcacggtggagagcg

SEQ ID NO: 13632 - DNA, 20 bp, Artificial Sequence
  Description of Artificial Sequence: Synthetic oligonucleotide
  Target: PCSK9; (+) strand; PAM type: NRG; PAM sequence: CGG
agcacggtggagagcgggga

SEQ ID NO: 13633 - DNA, 20 bp, Artificial Sequence
  Description of Artificial Sequence: Synthetic oligonucleotide
  Target: PCSK9; (+) strand; PAM type: NRG; PAM sequence: CGG
cggtggagagcggggacggc

SEQ ID NO: 13634 - DNA, 20 bp, Artificial Sequence
  Description of Artificial Sequence: Synthetic oligonucleotide
  Target: PCSK9; (+) strand; PAM type: NRG; PAM sequence: TGG
agcggggacggccggctctt

SEQ ID NO: 13635 - DNA, 20 bp, Artificial Sequence
  Description of Artificial Sequence: Synthetic oligonucleotide
  Target: PCSK9; (+) strand; PAM type: NRG; PAM sequence: GGG
gcggggacggccggctcttt

SEQ ID NO: 13636 - DNA, 20 bp, Artificial Sequence
  Description of Artificial Sequence: Synthetic oligonucleotide
  Target: PCSK9; (+) strand; PAM type: NRG; PAM sequence: GGG
cggggacggccggctctttg

SEQ ID NO: 13637 - DNA, 20 bp, Artificial Sequence
  Description of Artificial Sequence: Synthetic oligonucleotide
  Target: PCSK9; (+) strand; PAM type: NRG; PAM sequence: TGG
ccggctctttggggacttgc

SEQ ID NO: 13638 - DNA, 20 bp, Artificial Sequence
  Description of Artificial Sequence: Synthetic oligonucleotide
  Target: PCSK9; (+) strand; PAM type: NRG; PAM sequence: GGG
cggctctttggggacttgct

SEQ ID NO: 13639 - DNA, 20 bp, Artificial Sequence
  Description of Artificial Sequence: Synthetic oligonucleotide
  Target: PCSK9; (+) strand; PAM type: NRG; PAM sequence: GGG
ggctctttggggacttgctg

SEQ ID NO: 13640 - DNA, 20 bp, Artificial Sequence
  Description of Artificial Sequence: Synthetic oligonucleotide
  Target: PCSK9; (+) strand; PAM type: NRG; PAM sequence: CGG
tggggacttgctggggcgtg

SEQ ID NO: 13641 - DNA, 20 bp, Artificial Sequence
  Description of Artificial Sequence: Synthetic oligonucleotide
  Target: PCSK9; (+) strand; PAM type: NRG; PAM sequence: CAG
gggcgtgcggctgcgctatt

SEQ ID NO: 13642 - DNA, 20 bp, Artificial Sequence
  Description of Artificial Sequence: Synthetic oligonucleotide
  Target: PCSK9; (+) strand; PAM type: NRG; PAM sequence: TGG
cgtgcggctgcgctattcag

SEQ ID NO: 13643 - DNA, 20 bp, Artificial Sequence
  Description of Artificial Sequence: Synthetic oligonucleotide
  Target: PCSK9; (+) strand; PAM type: NRG; PAM sequence: GGG
gtgcggctgcgctattcagt

SEQ ID NO: 13644 - DNA, 20 bp, Artificial Sequence
  Description of Artificial Sequence: Synthetic oligonucleotide
  Target: PCSK9; (+) strand; PAM type: NRG; PAM sequence: AAG
cggctgcgctattcagtggg

SEQ ID NO: 13645 - DNA, 20 bp, Artificial Sequence
  Description of Artificial Sequence: Synthetic oligonucleotide
  Target: PCSK9; (+) strand; PAM type: NRG; PAM sequence: AGG
ggctgcgctattcagtggga

SEQ ID NO: 13646 - DNA, 20 bp, Artificial Sequence
  Description of Artificial Sequence: Synthetic oligonucleotide
  Target: PCSK9; (+) strand; PAM type: NRG; PAM sequence: CGG
ctattcagtgggaaggttcg

SEQ ID NO: 13647 - DNA, 20 bp, Artificial Sequence
  Description of Artificial Sequence: Synthetic oligonucleotide
  Target: PCSK9; (+) strand; PAM type: NRG; PAM sequence: GGG
tattcagtgggaaggttcgc

SEQ ID NO: 13648 - DNA, 20 bp, Artificial Sequence
  Description of Artificial Sequence: Synthetic oligonucleotide
  Target: PCSK9; (+) strand; PAM type: NRG; PAM sequence: GGG
attcagtgggaaggttcgcg

SEQ ID NO: 13649 - DNA, 20 bp, Artificial Sequence
  Description of Artificial Sequence: Synthetic oligonucleotide
  Target: PCSK9; (+) strand; PAM type: NRG; PAM sequence: TGG
agtgggaaggttcgcggggt

SEQ ID NO: 13650 - DNA, 20 bp, Artificial Sequence
  Description of Artificial Sequence: Synthetic oligonucleotide
  Target: PCSK9; (+) strand; PAM type: NRG; PAM sequence: GGG
gtgggaaggttcgcggggtt

SEQ ID NO: 13651 - DNA, 20 bp, Artificial Sequence
  Description of Artificial Sequence: Synthetic oligonucleotide
  Target: PCSK9; (+) strand; PAM type: NRG; PAM sequence: GAG
gggaaggttcgcggggttgg

SEQ ID NO: 13652 - DNA, 20 bp, Artificial Sequence
  Description of Artificial Sequence: Synthetic oligonucleotide
  Target: PCSK9; (+) strand; PAM type: NRG; PAM sequence: CGG
gttcgcggggttgggagacc

SEQ ID NO: 13653 - DNA, 20 bp, Artificial Sequence
  Description of Artificial Sequence: Synthetic oligonucleotide
  Target: PCSK9; (+) strand; PAM type: NRG; PAM sequence: GAG
tcgcggggttgggagacccg

SEQ ID NO: 13654 - DNA, 20 bp, Artificial Sequence
  Description of Artificial Sequence: Synthetic oligonucleotide
  Target: PCSK9; (+) strand; PAM type: NRG; PAM sequence: AGG
cgcggggttgggagacccgg

SEQ ID NO: 13655 - DNA, 20 bp, Artificial Sequence
  Description of Artificial Sequence: Synthetic oligonucleotide
  Target: PCSK9; (+) strand; PAM type: NRG; PAM sequence: GAG
ggttgggagacccggaggcc

SEQ ID NO: 13656 - DNA, 20 bp, Artificial Sequence
  Description of Artificial Sequence: Synthetic oligonucleotide
  Target: PCSK9; (+) strand; PAM type: NRG; PAM sequence: AGG
gttgggagacccggaggccg

SEQ ID NO: 13657 - DNA, 20 bp, Artificial Sequence
  Description of Artificial Sequence: Synthetic oligonucleotide
  Target: PCSK9; (+) strand; PAM type: NRG; PAM sequence: AAG
gggagacccggaggccgagg

SEQ ID NO: 13658 - DNA, 20 bp, Artificial Sequence
  Description of Artificial Sequence: Synthetic oligonucleotide
  Target: PCSK9; (+) strand; PAM type: NRG; PAM sequence: AGG
ggagacccggaggccgagga

SEQ ID NO: 13659 - DNA, 20 bp, Artificial Sequence
  Description of Artificial Sequence: Synthetic oligonucleotide
  Target: PCSK9; (+) strand; PAM type: NRG; PAM sequence: GGG
gagacccggaggccgaggaa

SEQ ID NO: 13660 - DNA, 20 bp, Artificial Sequence
  Description of Artificial Sequence: Synthetic oligonucleotide
  Target: PCSK9; (+) strand; PAM type: NRG; PAM sequence: GAG
cccggaggccgaggaagggc

SEQ ID NO: 13661 - DNA, 20 bp, Artificial Sequence
  Description of Artificial Sequence: Synthetic oligonucleotide
  Target: PCSK9; (+) strand; PAM type: NRG; PAM sequence: CAG
ggaggccgaggaagggcgag

SEQ ID NO: 13662 - DNA, 20 bp, Artificial Sequence
  Description of Artificial Sequence: Synthetic oligonucleotide
  Target: PCSK9; (+) strand; PAM type: NRG; PAM sequence: GAG
aggccgaggaagggcgagca

SEQ ID NO: 13663 - DNA, 20 bp, Artificial Sequence
  Description of Artificial Sequence: Synthetic oligonucleotide
  Target: PCSK9; (+) strand; PAM type: NRG; PAM sequence: CAG
aagggcgagcagagcactgc

SEQ ID NO: 13664 - DNA, 20 bp, Artificial Sequence
  Description of Artificial Sequence: Synthetic oligonucleotide
  Target: PCSK9; (+) strand; PAM type: NRG; PAM sequence: AGG
agggcgagcagagcactgcc

SEQ ID NO: 13665 - DNA, 20 bp, Artificial Sequence
  Description of Artificial Sequence: Synthetic oligonucleotide
  Target: PCSK9; (+) strand; PAM type: NRG; PAM sequence: CAG
cactgccaggatatcctgcc

SEQ ID NO: 13666 - DNA, 20 bp, Artificial Sequence
  Description of Artificial Sequence: Synthetic oligonucleotide
  Target: PCSK9; (+) strand; PAM type: NRG; PAM sequence: CAG
gatatcctgcccagatttcc

SEQ ID NO: 13667 - DNA, 20 bp, Artificial Sequence
  Description of Artificial Sequence: Synthetic oligonucleotide
  Target: PCSK9; (+) strand; PAM type: NRG; PAM sequence: CGG
tcccagtttctgcctcgccg

SEQ ID NO: 13668 - DNA, 20 bp, Artificial Sequence
  Description of Artificial Sequence: Synthetic oligonucleotide
  Target: PCSK9; (+) strand; PAM type: NRG; PAM sequence: CAG
gtttctgcctcgccgcggca

SEQ ID NO: 13669 - DNA, 20 bp, Artificial Sequence
  Description of Artificial Sequence: Synthetic oligonucleotide
  Target: PCSK9; (+) strand; PAM type: NRG; PAM sequence: AGG
tttctgcctcgccgcggcac

SEQ ID NO: 13670 - DNA, 20 bp, Artificial Sequence
  Description of Artificial Sequence: Synthetic oligonucleotide
  Target: PCSK9; (+) strand; PAM type: NRG; PAM sequence: TGG
ctgcctcgccgcggcacagg

SEQ ID NO: 13671 - DNA, 20 bp, Artificial Sequence
  Description of Artificial Sequence: Synthetic oligonucleotide
  Target: PCSK9; (+) strand; PAM type: NRG; PAM sequence: GGG
tgcctcgccgcggcacaggt

SEQ ID NO: 13672 - DNA, 20 bp, Artificial Sequence
  Description of Artificial Sequence: Synthetic oligonucleotide
  Target: PCSK9; (+) strand; PAM type: NRG; PAM sequence: AAG
cgccgcggcacaggtgggtg

SEQ ID NO: 13673 - DNA, 20 bp, Artificial Sequence
  Description of Artificial Sequence: Synthetic oligonucleotide
  Target: PCSK9; (+) strand; PAM type: NRG; PAM sequence: AGG
gccgcggcacaggtgggtga

SEQ ID NO: 13674 - DNA, 20 bp, Artificial Sequence
  Description of Artificial Sequence: Synthetic oligonucleotide
  Target: PCSK9; (+) strand; PAM type: NRG; PAM sequence: GAG
cgcggcacaggtgggtgaag

SEQ ID NO: 13675 - DNA, 20 bp, Artificial Sequence
  Description of Artificial Sequence: Synthetic oligonucleotide
  Target: PCSK9; (+) strand; PAM type: NRG; PAM sequence: TGG
tgggtgaaggagtgaatgcc

SEQ ID NO: 13676 - DNA, 20 bp, Artificial Sequence
  Description of Artificial Sequence: Synthetic oligonucleotide
  Target: PCSK9; (+) strand; PAM type: NRG; PAM sequence: TGG
agtgaatgcctggaacgtac

SEQ ID NO: 13677 - DNA, 20 bp, Artificial Sequence
  Description of Artificial Sequence: Synthetic oligonucleotide
  Target: PCSK9; (+) strand; PAM type: NRG; PAM sequence: GGG
gtgaatgcctggaacgtact

SEQ ID NO: 13678 - DNA, 20 bp, Artificial Sequence
  Description of Artificial Sequence: Synthetic oligonucleotide
  Target: PCSK9; (+) strand; PAM type: NRG; PAM sequence: CAG
gaacgtactgggaactgcac

SEQ ID NO: 13679 - DNA, 20 bp, Artificial Sequence
  Description of Artificial Sequence: Synthetic oligonucleotide
  Target: PCSK9; (+) strand; PAM type: NRG; PAM sequence: AGG
aacgtactgggaactgcacc

SEQ ID NO: 13680 - DNA, 20 bp, Artificial Sequence
  Description of Artificial Sequence: Synthetic oligonucleotide
  Target: PCSK9; (+) strand; PAM type: NRG; PAM sequence: CAG
actgggaactgcaccaggca

SEQ ID NO: 13681 - DNA, 20 bp, Artificial Sequence
  Description of Artificial Sequence: Synthetic oligonucleotide
  Target: PCSK9; (+) strand; PAM type: NRG; PAM sequence: GAG
tgggaactgcaccaggcaca

SEQ ID NO: 13682 - DNA, 20 bp, Artificial Sequence
  Description of Artificial Sequence: Synthetic oligonucleotide
  Target: PCSK9; (+) strand; PAM type: NRG; PAM sequence: AAG
aactgcaccaggcacagaga

SEQ ID NO: 13683 - DNA, 20 bp, Artificial Sequence
  Description of Artificial Sequence: Synthetic oligonucleotide
  Target: PCSK9; (+) strand; PAM type: NRG; PAM sequence: CGG
tgcaccaggcacagagaaag

SEQ ID NO: 13684 - DNA, 20 bp, Artificial Sequence
  Description of Artificial Sequence: Synthetic oligonucleotide
  Target: PCSK9; (+) strand; PAM type: NRG; PAM sequence: GGG
gcaccaggcacagagaaagc

SEQ ID NO: 13685 - DNA, 20 bp, Artificial Sequence
  Description of Artificial Sequence: Synthetic oligonucleotide
  Target: PCSK9; (+) strand; PAM type: NRG; PAM sequence: TAG
agaaagcgggcttgccatta

SEQ ID NO: 13686 - DNA, 20 bp, Artificial Sequence
  Description of Artificial Sequence: Synthetic oligonucleotide
  Target: PCSK9; (+) strand; PAM type: NRG; PAM sequence: TGG
aagcgggcttgccattatag

SEQ ID NO: 13687 - DNA, 20 bp, Artificial Sequence
  Description of Artificial Sequence: Synthetic oligonucleotide
  Target: PCSK9; (+) strand; PAM type: NRG; PAM sequence: GGG
agcgggcttgccattatagt

SEQ ID NO: 13688 - DNA, 20 bp, Artificial Sequence
  Description of Artificial Sequence: Synthetic oligonucleotide
  Target: PCSK9; (+) strand; PAM type: NRG; PAM sequence: TGG
cattatagtgggttccgatt

SEQ ID NO: 13689 - DNA, 20 bp, Artificial Sequence
  Description of Artificial Sequence: Synthetic oligonucleotide
  Target: PCSK9; (+) strand; PAM type: NRG; PAM sequence: TGG
tagtgggttccgatttggtt

SEQ ID NO: 13690 - DNA, 20 bp, Artificial Sequence
  Description of Artificial Sequence: Synthetic oligonucleotide
  Target: PCSK9; (+) strand; PAM type: NRG; PAM sequence: TGG
ccgatttggtttggaaaaca

SEQ ID NO: 13691 - DNA, 20 bp, Artificial Sequence
  Description of Artificial Sequence: Synthetic oligonucleotide
  Target: PCSK9; (+) strand; PAM type: NRG; PAM sequence: GGG
cgatttggtttggaaaacat

SEQ ID NO: 13692 - DNA, 20 bp, Artificial Sequence
  Description of Artificial Sequence: Synthetic oligonucleotide
  Target: PCSK9; (+) strand; PAM type: NRG; PAM sequence: CAG
tttggtttggaaaacatggg

SEQ ID NO: 13693 - DNA, 20 bp, Artificial Sequence
  Description of Artificial Sequence: Synthetic oligonucleotide
  Target: PCSK9; (+) strand; PAM type: NRG; PAM sequence: CGG
ggtttggaaaacatgggcag

SEQ ID NO: 13694 - DNA, 20 bp, Artificial Sequence
  Description of Artificial Sequence: Synthetic oligonucleotide
  Target: PCSK9; (+) strand; PAM type: NRG; PAM sequence: GAG
tttggaaaacatgggcagcg

SEQ ID NO: 13695 - DNA, 20 bp, Artificial Sequence
  Description of Artificial Sequence: Synthetic oligonucleotide
  Target: PCSK9; (+) strand; PAM type: NRG; PAM sequence: AGG
ttggaaaacatgggcagcgg

SEQ ID NO: 13696 - DNA, 20 bp, Artificial Sequence
  Description of Artificial Sequence: Synthetic oligonucleotide
  Target: PCSK9; (+) strand; PAM type: NRG; PAM sequence: GGG
tggaaaacatgggcagcgga

SEQ ID NO: 13697 - DNA, 20 bp, Artificial Sequence
  Description of Artificial Sequence: Synthetic oligonucleotide
  Target: PCSK9; (+) strand; PAM type: NRG; PAM sequence: TGG
aaaacatgggcagcggaggg

SEQ ID NO: 13698 - DNA, 20 bp, Artificial Sequence
  Description of Artificial Sequence: Synthetic oligonucleotide
  Target: PCSK9; (+) strand; PAM type: NRG; PAM sequence: GAG
aacatgggcagcggagggtg

SEQ ID NO: 13699 - DNA, 20 bp, Artificial Sequence
  Description of Artificial Sequence: Synthetic oligonucleotide
  Target: PCSK9; (+) strand; PAM type: NRG; PAM sequence: AGG
acatgggcagcggagggtgg

SEQ ID NO: 13700 - DNA, 20 bp, Artificial Sequence
  Description of Artificial Sequence: Synthetic oligonucleotide
  Target: PCSK9; (+) strand; PAM type: NRG; PAM sequence: GGG
catgggcagcggagggtgga

SEQ ID NO: 13701 - DNA, 20 bp, Artificial Sequence
  Description of Artificial Sequence: Synthetic oligonucleotide
  Target: PCSK9; (+) strand; PAM type: NRG; PAM sequence: TGG
gcagcggagggtggagggcc

SEQ ID NO: 13702 - DNA, 20 bp, Artificial Sequence
  Description of Artificial Sequence: Synthetic oligonucleotide
  Target: PCSK9; (+) strand; PAM type: NRG; PAM sequence: GAG
agcggagggtggagggcctg

SEQ ID NO: 13703 - DNA, 20 bp, Artificial Sequence
  Description of Artificial Sequence: Synthetic oligonucleotide
  Target: PCSK9; (+) strand; PAM type: NRG; PAM sequence: GAG
cggagggtggagggcctgga

SEQ ID NO: 13704 - DNA, 20 bp, Artificial Sequence
  Description of Artificial Sequence: Synthetic oligonucleotide
  Target: PCSK9; (+) strand; PAM type: NRG; PAM sequence: AAG
agggtggagggcctggagag

SEQ ID NO: 13705 - DNA, 20 bp, Artificial Sequence
  Description of Artificial Sequence: Synthetic oligonucleotide
  Target: PCSK9; (+) strand; PAM type: NRG; PAM sequence: AGG
gggtggagggcctggagaga

SEQ ID NO: 13706 - DNA, 20 bp, Artificial Sequence
  Description of Artificial Sequence: Synthetic oligonucleotide
  Target: PCSK9; (+) strand; PAM type: NRG; PAM sequence: GAG
ctggagagaaggccctaccc

SEQ ID NO: 13707 - DNA, 20 bp, Artificial Sequence
  Description of Artificial Sequence: Synthetic oligonucleotide
  Target: PCSK9; (+) strand; PAM type: NRG; PAM sequence: CAG
agagaaggccctacccgaga

SEQ ID NO: 13708 - DNA, 20 bp, Artificial Sequence
  Description of Artificial Sequence: Synthetic oligonucleotide
  Target: PCSK9; (+) strand; PAM type: NRG; PAM sequence: AGG
gagaaggccctacccgagac

SEQ ID NO: 13709 - DNA, 20 bp, Artificial Sequence
  Description of Artificial Sequence: Synthetic oligonucleotide
  Target: PCSK9; (+) strand; PAM type: NRG; PAM sequence: GGG
agaaggccctacccgagaca

SEQ ID NO: 13710 - DNA, 20 bp, Artificial Sequence
  Description of Artificial Sequence: Synthetic oligonucleotide
  Target: PCSK9; (+) strand; PAM type: NRG; PAM sequence: GGG
gaaggccctacccgagacag

SEQ ID NO: 13711 - DNA, 20 bp, Artificial Sequence
  Description of Artificial Sequence: Synthetic oligonucleotide
  Target: PCSK9; (+) strand; PAM type: NRG; PAM sequence: CGG
ggccctacccgagacagggg

SEQ ID NO: 13712 - DNA, 20 bp, Artificial Sequence
  Description of Artificial Sequence: Synthetic oligonucleotide
  Target: PCSK9; (+) strand; PAM type: NRG; PAM sequence: GGG
gccctacccgagacaggggc

SEQ ID NO: 13713 - DNA, 20 bp, Artificial Sequence
  Description of Artificial Sequence: Synthetic oligonucleotide
  Target: PCSK9; (+) strand; PAM type: NRG; PAM sequence: GGG
ccctacccgagacaggggcg

SEQ ID NO: 13714 - DNA, 20 bp, Artificial Sequence
  Description of Artificial Sequence: Synthetic oligonucleotide
  Target: PCSK9; (+) strand; PAM type: NRG; PAM sequence: TGG
tacccgagacaggggcgggg

SEQ ID NO: 13715 - DNA, 20 bp, Artificial Sequence
  Description of Artificial Sequence: Synthetic oligonucleotide
  Target: PCSK9; (+) strand; PAM type: NRG; PAM sequence: GGG
acccgagacaggggcggggt

SEQ ID NO: 13716 - DNA, 20 bp, Artificial Sequence
  Description of Artificial Sequence: Synthetic oligonucleotide
  Target: PCSK9; (+) strand; PAM type: NRG; PAM sequence: AAG
cgagacaggggcggggtggg

SEQ ID NO: 13717 - DNA, 20 bp, Artificial Sequence
  Description of Artificial Sequence: Synthetic oligonucleotide
  Target: PCSK9; (+) strand; PAM type: NRG; PAM sequence: AGG
gagacaggggcggggtggga

SEQ ID NO: 13718 - DNA, 20 bp, Artificial Sequence
  Description of Artificial Sequence: Synthetic oligonucleotide
  Target: PCSK9; (+) strand; PAM type: NRG; PAM sequence: CGG
caggggcggggtgggaagga

SEQ ID NO: 13719 - DNA, 20 bp, Artificial Sequence
  Description of Artificial Sequence: Synthetic oligonucleotide
  Target: PCSK9; (+) strand; PAM type: NRG; PAM sequence: CAG
gggcggggtgggaaggacgg

SEQ ID NO: 13720 - DNA, 20 bp, Artificial Sequence
  Description of Artificial Sequence: Synthetic oligonucleotide
  Target: PCSK9; (+) strand; PAM type: NRG; PAM sequence: TGG
gtgggaaggacggcagatgc

SEQ ID NO: 13721 - DNA, 20 bp, Artificial Sequence
  Description of Artificial Sequence: Synthetic oligonucleotide
  Target: PCSK9; (+) strand; PAM type: NRG; PAM sequence: GGG
tgggaaggacggcagatgct

SEQ ID NO: 13722 - DNA, 20 bp, Artificial Sequence
  Description of Artificial Sequence: Synthetic oligonucleotide
  Target: PCSK9; (+) strand; PAM type: NRG; PAM sequence: GAG
ggaaggacggcagatgctgg

SEQ ID NO: 13723 - DNA, 20 bp, Artificial Sequence
  Description of Artificial Sequence: Synthetic oligonucleotide
  Target: PCSK9; (+) strand; PAM type: NRG; PAM sequence: GAG
acggcagatgctgggagcac

SEQ ID NO: 13724 - DNA, 20 bp, Artificial Sequence
  Description of Artificial Sequence: Synthetic oligonucleotide
  Target: PCSK9; (+) strand; PAM type: NRG; PAM sequence: AGG
cggcagatgctgggagcacg

SEQ ID NO: 13725 - DNA, 20 bp, Artificial Sequence
  Description of Artificial Sequence: Synthetic oligonucleotide
  Target: PCSK9; (+) strand; PAM type: NRG; PAM sequence: CAG
gaggcaatttctttatgaca

SEQ ID NO: 13726 - DNA, 20 bp, Artificial Sequence
  Description of Artificial Sequence: Synthetic oligonucleotide
  Target: PCSK9; (+) strand; PAM type: NRG; PAM sequence: TAG
atgacacagaactcatgctc

SEQ ID NO: 13727 - DNA, 20 bp, Artificial Sequence
  Description of Artificial Sequence: Synthetic oligonucleotide
  Target: PCSK9; (+) strand; PAM type: NRG; PAM sequence: CAG
ctctagtattccatctgttt

SEQ ID NO: 13728 - DNA, 20 bp, Artificial Sequence
  Description of Artificial Sequence: Synthetic oligonucleotide
  Target: PCSK9; (+) strand; PAM type: NRG; PAM sequence: AAG
tattccatctgtttcagccg

SEQ ID NO: 13729 - DNA, 20 bp, Artificial Sequence
  Description of Artificial Sequence: Synthetic oligonucleotide
  Target: PCSK9; (+) strand; PAM type: NRG; PAM sequence: AAG
catctgtttcagccgaagaa

SEQ ID NO: 13730 - DNA, 20 bp, Artificial Sequence
  Description of Artificial Sequence: Synthetic oligonucleotide
  Target: PCSK9; (+) strand; PAM type: NRG; PAM sequence: CAG
tttcagccgaagaaaagaac

SEQ ID NO: 13731 - DNA, 20 bp, Artificial Sequence
  Description of Artificial Sequence: Synthetic oligonucleotide
  Target: PCSK9; (+) strand; PAM type: NRG; PAM sequence: AAG
ccgaagaaaagaaccagctg

SEQ ID NO: 13732 - DNA, 20 bp, Artificial Sequence
  Description of Artificial Sequence: Synthetic oligonucleotide
  Target: PCSK9; (+) strand; PAM type: NRG; PAM sequence: AGG
cgaagaaaagaaccagctga

SEQ ID NO: 13733 - DNA, 20 bp, Artificial Sequence
  Description of Artificial Sequence: Synthetic oligonucleotide
  Target: PCSK9; (+) strand; PAM type: NRG; PAM sequence: GGG
gaagaaaagaaccagctgaa

SEQ ID NO: 13734 - DNA, 20 bp, Artificial Sequence
  Description of Artificial Sequence: Synthetic oligonucleotide
  Target: PCSK9; (+) strand; PAM type: NRG; PAM sequence: GGG
aagaaaagaaccagctgaag

SEQ ID NO: 13735 - DNA, 20 bp, Artificial Sequence
  Description of Artificial Sequence: Synthetic oligonucleotide
  Target: PCSK9; (+) strand; PAM type: NRG; PAM sequence: CAG
aaaagaaccagctgaagggg

SEQ ID NO: 13736 - DNA, 20 bp, Artificial Sequence
  Description of Artificial Sequence: Synthetic oligonucleotide
  Target: PCSK9; (+) strand; PAM type: NRG; PAM sequence: AGG
aaagaaccagctgaaggggc

SEQ ID NO: 13737 - DNA, 20 bp, Artificial Sequence
  Description of Artificial Sequence: Synthetic oligonucleotide
  Target: PCSK9; (+) strand; PAM type: NRG; PAM sequence: GGG
aagaaccagctgaaggggca

SEQ ID NO: 13738 - DNA, 20 bp, Artificial Sequence
  Description of Artificial Sequence: Synthetic oligonucleotide
  Target: PCSK9; (+) strand; PAM type: NRG; PAM sequence: GGG
agaaccagctgaaggggcag

SEQ ID NO: 13739 - DNA, 20 bp, Artificial Sequence
  Description of Artificial Sequence: Synthetic oligonucleotide
  Target: PCSK9; (+) strand; PAM type: NRG; PAM sequence: GAG
aaccagctgaaggggcaggg

SEQ ID NO: 13740 - DNA, 20 bp, Artificial Sequence
  Description of Artificial Sequence: Synthetic oligonucleotide
  Target: PCSK9; (+) strand; PAM type: NRG; PAM sequence: AAG
cagctgaaggggcaggggag

SEQ ID NO: 13741 - DNA, 20 bp, Artificial Sequence
  Description of Artificial Sequence: Synthetic oligonucleotide
  Target: PCSK9; (+) strand; PAM type: NRG; PAM sequence: AGG
agctgaaggggcaggggaga

SEQ ID NO: 13742 - DNA, 20 bp, Artificial Sequence
  Description of Artificial Sequence: Synthetic oligonucleotide
  Target: PCSK9; (+) strand; PAM type: NRG; PAM sequence: GGG
gctgaaggggcaggggagaa

SEQ ID NO: 13743 - DNA, 20 bp, Artificial Sequence
  Description of Artificial Sequence: Synthetic oligonucleotide
  Target: PCSK9; (+) strand; PAM type: NRG; PAM sequence: GGG
ctgaaggggcaggggagaag

SEQ ID NO: 13744 - DNA, 20 bp, Artificial Sequence
  Description of Artificial Sequence: Synthetic oligonucleotide
  Target: PCSK9; (+) strand; PAM type: NRG; PAM sequence: CGG
aaggggcaggggagaagggg

SEQ ID NO: 13745 - DNA, 20 bp, Artificial Sequence
  Description of Artificial Sequence: Synthetic oligonucleotide
  Target: PCSK9; (+) strand; PAM type: NRG; PAM sequence: GAG
ggggcaggggagaaggggcg

SEQ ID NO: 13746 - DNA, 20 bp, Artificial Sequence
  Description of Artificial Sequence: Synthetic oligonucleotide
  Target: PCSK9; (+) strand; PAM type: NRG; PAM sequence: AGG
gggcaggggagaaggggcgg

SEQ ID NO: 13747 - DNA, 20 bp, Artificial Sequence
  Description of Artificial Sequence: Synthetic oligonucleotide
  Target: PCSK9; (+) strand; PAM type: NRG; PAM sequence: GAG
gaaggggcggaggtattctc

SEQ ID NO: 13748 - DNA, 20 bp, Artificial Sequence
  Description of Artificial Sequence: Synthetic oligonucleotide
  Target: PCSK9; (+) strand; PAM type: NRG; PAM sequence: AGG
aaggggcggaggtattctcg

SEQ ID NO: 13749 - DNA, 20 bp, Artificial Sequence
  Description of Artificial Sequence: Synthetic oligonucleotide
  Target: PCSK9; (+) strand; PAM type: NRG; PAM sequence: TGG
gaggtattctcgaggcccat

SEQ ID NO: 13750 - DNA, 20 bp, Artificial Sequence
  Description of Artificial Sequence: Synthetic oligonucleotide
  Target: PCSK9; (+) strand; PAM type: NRG; PAM sequence: TAG
cgaggcccattggcgtcctt

SEQ ID NO: 13751 - DNA, 20 bp, Artificial Sequence
  Description of Artificial Sequence: Synthetic oligonucleotide
  Target: PCSK9; (+) strand; PAM type: NRG; PAM sequence: AGG
gaggcccattggcgtccttt

SEQ ID NO: 13752 - DNA, 20 bp, Artificial Sequence
  Description of Artificial Sequence: Synthetic oligonucleotide
  Target: PCSK9; (+) strand; PAM type: NRG; PAM sequence: CAG
cattggcgtcctttaggact

SEQ ID NO: 13753 - DNA, 20 bp, Artificial Sequence
  Description of Artificial Sequence: Synthetic oligonucleotide
  Target: PCSK9; (+) strand; PAM type: NRG; PAM sequence: AGG
attggcgtcctttaggactc

SEQ ID NO: 13754 - DNA, 20 bp, Artificial Sequence
  Description of Artificial Sequence: Synthetic oligonucleotide
  Target: PCSK9; (+) strand; PAM type: NRG; PAM sequence: CAG
ggcgtcctttaggactcagg

SEQ ID NO: 13755 - DNA, 20 bp, Artificial Sequence
  Description of Artificial Sequence: Synthetic oligonucleotide
  Target: PCSK9; (+) strand; PAM type: NRG; PAM sequence: AGG
gcgtcctttaggactcaggc

SEQ ID NO: 13756 - DNA, 20 bp, Artificial Sequence
  Description of Artificial Sequence: Synthetic oligonucleotide
  Target: PCSK9; (+) strand; PAM type: NRG; PAM sequence: GGG
cgtcctttaggactcaggca

SEQ ID NO: 13757 - DNA, 20 bp, Artificial Sequence
  Description of Artificial Sequence: Synthetic oligonucleotide
  Target: PCSK9; (+) strand; PAM type: NRG; PAM sequence: AAG
cctttaggactcaggcaggg

SEQ ID NO: 13758 - DNA, 20 bp, Artificial Sequence
  Description of Artificial Sequence: Synthetic oligonucleotide
  Target: PCSK9; (+) strand; PAM type: NRG; PAM sequence: AGG
ctttaggactcaggcaggga

SEQ ID NO: 13759 - DNA, 20 bp, Artificial Sequence
  Description of Artificial Sequence: Synthetic oligonucleotide
  Target: PCSK9; (+) strand; PAM type: NRG; PAM sequence: GGG
tttaggactcaggcagggaa

SEQ ID NO: 13760 - DNA, 20 bp, Artificial Sequence
  Description of Artificial Sequence: Synthetic oligonucleotide
  Target: PCSK9; (+) strand; PAM type: NRG; PAM sequence: TGG
ctcaggcagggaagggccct

SEQ ID NO: 13761 - DNA, 20 bp, Artificial Sequence
  Description of Artificial Sequence: Synthetic oligonucleotide
  Target: PCSK9; (+) strand; PAM type: NRG; PAM sequence: TGG
gggaagggcccttggtgctc

SEQ ID NO: 13762 - DNA, 20 bp, Artificial Sequence
  Description of Artificial Sequence: Synthetic oligonucleotide
  Target: PCSK9; (+) strand; PAM type: NRG; PAM sequence: GAG
gaagggcccttggtgctctg

SEQ ID NO: 13763 - DNA, 20 bp, Artificial Sequence
  Description of Artificial Sequence: Synthetic oligonucleotide
  Target: PCSK9; (+) strand; PAM type: NRG; PAM sequence: CGG
ggcccttggtgctctggagc

SEQ ID NO: 13764 - DNA, 20 bp, Artificial Sequence
  Description of Artificial Sequence: Synthetic oligonucleotide
  Target: PCSK9; (+) strand; PAM type: NRG; PAM sequence: GAG
cccttggtgctctggagccg

SEQ ID NO: 13765 - DNA, 20 bp, Artificial Sequence
  Description of Artificial Sequence: Synthetic oligonucleotide
  Target: PCSK9; (+) strand; PAM type: NRG; PAM sequence: AGG
ccttggtgctctggagccgg

SEQ ID NO: 13766 - DNA, 20 bp, Artificial Sequence
  Description of Artificial Sequence: Synthetic oligonucleotide
  Target: PCSK9; (+) strand; PAM type: NRG; PAM sequence: TGG
tggtgctctggagccggagg

SEQ ID NO: 13767 - DNA, 20 bp, Artificial Sequence
  Description of Artificial Sequence: Synthetic oligonucleotide
  Target: PCSK9; (+) strand; PAM type: NRG; PAM sequence: TGG
ggagccggaggtggtgcgcc

SEQ ID NO: 13768 - DNA, 20 bp, Artificial Sequence
  Description of Artificial Sequence: Synthetic oligonucleotide
  Target: PCSK9; (+) strand; PAM type: NRG; PAM sequence: TGG
ggaggtggtgcgcctggtac

SEQ ID NO: 13769 - DNA, 20 bp, Artificial Sequence
  Description of Artificial Sequence: Synthetic oligonucleotide
  Target: PCSK9; (+) strand; PAM type: NRG; PAM sequence: GGG
gaggtggtgcgcctggtact

SEQ ID NO: 13770 - DNA, 20 bp, Artificial Sequence
  Description of Artificial Sequence: Synthetic oligonucleotide
  Target: PCSK9; (+) strand; PAM type: NRG; PAM sequence: CGG
tgcgcctggtactgggaccc

SEQ ID NO: 13771 - DNA, 20 bp, Artificial Sequence
  Description of Artificial Sequence: Synthetic oligonucleotide
  Target: PCSK9; (+) strand; PAM type: NRG; PAM sequence: GAG
cgcctggtactgggaccccg

SEQ ID NO: 13772 - DNA, 20 bp, Artificial Sequence
  Description of Artificial Sequence: Synthetic oligonucleotide
  Target: PCSK9; (+) strand; PAM type: NRG; PAM sequence: GAG
ggtactgggaccccggagct

SEQ ID NO: 13773 - DNA, 20 bp, Artificial Sequence
  Description of Artificial Sequence: Synthetic oligonucleotide
  Target: PCSK9; (+) strand; PAM type: NRG; PAM sequence: CGG
tgggaccccggagctgagcc

SEQ ID NO: 13774 - DNA, 20 bp, Artificial Sequence
  Description of Artificial Sequence: Synthetic oligonucleotide
  Target: PCSK9; (+) strand; PAM type: NRG; PAM sequence: CAG
cggagctgagcccggcgcct

SEQ ID NO: 13775 - DNA, 20 bp, Artificial Sequence
  Description of Artificial Sequence: Synthetic oligonucleotide
  Target: PCSK9; (+) strand; PAM type: NRG; PAM sequence: TGG
gcccggcgcctcagcccacc

SEQ ID NO: 13776 - DNA, 20 bp, Artificial Sequence
  Description of Artificial Sequence: Synthetic oligonucleotide
  Target: PCSK9; (+) strand; PAM type: NRG; PAM sequence: CGG
ggctgtctgccgaccgtgtg

SEQ ID NO: 13777 - DNA, 20 bp, Artificial Sequence
  Description of Artificial Sequence: Synthetic oligonucleotide
  Target: PCSK9; (+) strand; PAM type: NRG; PAM sequence: GGG
gctgtctgccgaccgtgtgc

SEQ ID NO: 13778 - DNA, 20 bp, Artificial Sequence
  Description of Artificial Sequence: Synthetic oligonucleotide
  Target: PCSK9; (+) strand; PAM type: NRG; PAM sequence: GGG
ctgtctgccgaccgtgtgcg

SEQ ID NO: 13779 - DNA, 20 bp, Artificial Sequence
  Description of Artificial Sequence: Synthetic oligonucleotide
  Target: PCSK9; (+) strand; PAM type: NRG; PAM sequence: GAG
ctgccgaccgtgtgcggggc

SEQ ID NO: 13780 - DNA, 20 bp, Artificial Sequence
  Description of Artificial Sequence: Synthetic oligonucleotide
  Target: PCSK9; (+) strand; PAM type: NRG; PAM sequence: CAG
agtttgctcaacaactctgc

SEQ ID NO: 13781 - DNA, 20 bp, Artificial Sequence
  Description of Artificial Sequence: Synthetic oligonucleotide
  Target: PCSK9; (+) strand; PAM type: NRG; PAM sequence: TGG
tcaacaactctgccagcttc

SEQ ID NO: 13782 - DNA, 20 bp, Artificial Sequence
  Description of Artificial Sequence: Synthetic oligonucleotide
  Target: PCSK9; (+) strand; PAM type: NRG; PAM sequence: CAG
ctctgccagcttctggccct

SEQ ID NO: 13783 - DNA, 20 bp, Artificial Sequence
  Description of Artificial Sequence: Synthetic oligonucleotide
  Target: PCSK9; (+) strand; PAM type: NRG; PAM sequence: AGG
tctgccagcttctggccctc

SEQ ID NO: 13784 - DNA, 20 bp, Artificial Sequence
  Description of Artificial Sequence: Synthetic oligonucleotide
  Target: PCSK9; (+) strand; PAM type: NRG; PAM sequence: TGG
agcttctggccctcaggctg

SEQ ID NO: 13785 - DNA, 20 bp, Artificial Sequence
  Description of Artificial Sequence: Synthetic oligonucleotide
  Target: PCSK9; (+) strand; PAM type: NRG; PAM sequence: GGG
gcttctggccctcaggctgt

SEQ ID NO: 13786 - DNA, 20 bp, Artificial Sequence
  Description of Artificial Sequence: Synthetic oligonucleotide
  Target: PCSK9; (+) strand; PAM type: NRG; PAM sequence: AAG
tctggccctcaggctgtggg

SEQ ID NO: 13787 - DNA, 20 bp, Artificial Sequence
  Description of Artificial Sequence: Synthetic oligonucleotide
  Target: PCSK9; (+) strand; PAM type: NRG; PAM sequence: CGG
ggctgtgggaagcttcttcc

SEQ ID NO: 13788 - DNA, 20 bp, Artificial Sequence
  Description of Artificial Sequence: Synthetic oligonucleotide
  Target: PCSK9; (+) strand; PAM type: NRG; PAM sequence: GGG
gctgtgggaagcttcttccc

SEQ ID NO: 13789 - DNA, 20 bp, Artificial Sequence
  Description of Artificial Sequence: Synthetic oligonucleotide
  Target: PCSK9; (+) strand; PAM type: NRG; PAM sequence: GGG
ctgtgggaagcttcttcccg

SEQ ID NO: 13790 - DNA, 20 bp, Artificial Sequence
  Description of Artificial Sequence: Synthetic oligonucleotide
  Target: PCSK9; (+) strand; PAM type: NRG; PAM sequence: GAG
gggaagcttcttcccggggc

SEQ ID NO: 13791 - DNA, 20 bp, Artificial Sequence
  Description of Artificial Sequence: Synthetic oligonucleotide
  Target: PCSK9; (+) strand; PAM type: NRG; PAM sequence: TAG
tcttcccggggcgagaccac

SEQ ID NO: 13792 - DNA, 20 bp, Artificial Sequence
  Description of Artificial Sequence: Synthetic oligonucleotide
  Target: PCSK9; (+) strand; PAM type: NRG; PAM sequence: AAG
cgagaccactagctttttct

SEQ ID NO: 13793 - DNA, 20 bp, Artificial Sequence
  Description of Artificial Sequence: Synthetic oligonucleotide
  Target: PCSK9; (+) strand; PAM type: NRG; PAM sequence: CAG
tagctttttctaagtattac

SEQ ID NO: 13794 - DNA, 20 bp, Artificial Sequence
  Description of Artificial Sequence: Synthetic oligonucleotide
  Target: PCSK9; (+) strand; PAM type: NRG; PAM sequence: CAG
ttttctaagtattaccagcc

SEQ ID NO: 13795 - DNA, 20 bp, Artificial Sequence
  Description of Artificial Sequence: Synthetic oligonucleotide
  Target: PCSK9; (+) strand; PAM type: NRG; PAM sequence: AGG
tttctaagtattaccagccc

SEQ ID NO: 13796 - DNA, 20 bp, Artificial Sequence
  Description of Artificial Sequence: Synthetic oligonucleotide
  Target: PCSK9; (+) strand; PAM type: NRG; PAM sequence: TGG
agtattaccagcccaggact

SEQ ID NO: 13797 - DNA, 20 bp, Artificial Sequence
  Description of Artificial Sequence: Synthetic oligonucleotide
  Target: PCSK9; (+) strand; PAM type: NRG; PAM sequence: GAG
taccagcccaggacttggct

SEQ ID NO: 13798 - DNA, 20 bp, Artificial Sequence
  Description of Artificial Sequence: Synthetic oligonucleotide
  Target: PCSK9; (+) strand; PAM type: NRG; PAM sequence: AGG
accagcccaggacttggctg

SEQ ID NO: 13799 - DNA, 20 bp, Artificial Sequence
  Description of Artificial Sequence: Synthetic oligonucleotide
  Target: PCSK9; (+) strand; PAM type: NRG; PAM sequence: CAG
ggctgaggttctgtgtcccc

SEQ ID NO: 13800 - DNA, 20 bp, Artificial Sequence
  Description of Artificial Sequence: Synthetic oligonucleotide
  Target: PCSK9; (+) strand; PAM type: NRG; PAM sequence: TGG
aggttctgtgtcccccagct

SEQ ID NO: 13801 - DNA, 20 bp, Artificial Sequence
  Description of Artificial Sequence: Synthetic oligonucleotide
  Target: PCSK9; (+) strand; PAM type: NRG; PAM sequence: GAG
gttctgtgtcccccagcttg

SEQ ID NO: 13802 - DNA, 20 bp, Artificial Sequence
  Description of Artificial Sequence: Synthetic oligonucleotide
  Target: PCSK9; (+) strand; PAM type: NRG; PAM sequence: CAG
tgtgtcccccagcttggagt

SEQ ID NO: 13803 - DNA, 20 bp, Artificial Sequence
  Description of Artificial Sequence: Synthetic oligonucleotide
  Target: PCSK9; (+) strand; PAM type: NRG; PAM sequence: TGG
ccccagcttggagtcagatg

SEQ ID NO: 13804 - DNA, 20 bp, Artificial Sequence
  Description of Artificial Sequence: Synthetic oligonucleotide
  Target: PCSK9; (+) strand; PAM type: NRG; PAM sequence: GGG
cccagcttggagtcagatgt

SEQ ID NO: 13805 - DNA, 20 bp, Artificial Sequence
  Description of Artificial Sequence: Synthetic oligonucleotide
  Target: PCSK9; (+) strand; PAM type: NRG; PAM sequence: GGG
ccagcttggagtcagatgtg

SEQ ID NO: 13806 - DNA, 20 bp, Artificial Sequence
  Description of Artificial Sequence: Synthetic oligonucleotide
  Target: PCSK9; (+) strand; PAM type: NRG; PAM sequence: TGG
tcagatgtggggttgaatct

SEQ ID NO: 13807 - DNA, 20 bp, Artificial Sequence
  Description of Artificial Sequence: Synthetic oligonucleotide
  Target: PCSK9; (+) strand; PAM type: NRG; PAM sequence: TAG
gaatcttggcttcctctcac

SEQ ID NO: 13808 - DNA, 20 bp, Artificial Sequence
  Description of Artificial Sequence: Synthetic oligonucleotide
  Target: PCSK9; (+) strand; PAM type: NRG; PAM sequence: TGG
tggcttcctctcactagctg

SEQ ID NO: 13809 - DNA, 20 bp, Artificial Sequence
  Description of Artificial Sequence: Synthetic oligonucleotide
  Target: PCSK9; (+) strand; PAM type: NRG; PAM sequence: AAG
cactagctgtggtgcttgac

SEQ ID NO: 13810 - DNA, 20 bp, Artificial Sequence
  Description of Artificial Sequence: Synthetic oligonucleotide
  Target: PCSK9; (+) strand; PAM type: NRG; PAM sequence: GAG
ttgacaagtcacttatcctt

SEQ ID NO: 13811 - DNA, 20 bp, Artificial Sequence
  Description of Artificial Sequence: Synthetic oligonucleotide
  Target: PCSK9; (+) strand; PAM type: NRG; PAM sequence: AAG
ctccattgcctaatctttaa

SEQ ID NO: 13812 - DNA, 20 bp, Artificial Sequence
  Description of Artificial Sequence: Synthetic oligonucleotide
  Target: PCSK9; (+) strand; PAM type: NRG; PAM sequence: AGG
tccattgcctaatctttaaa

SEQ ID NO: 13813 - DNA, 20 bp, Artificial Sequence
  Description of Artificial Sequence: Synthetic oligonucleotide
  Target: PCSK9; (+) strand; PAM type: NRG; PAM sequence: GGG
ccattgcctaatctttaaaa

SEQ ID NO: 13814 - DNA, 20 bp, Artificial Sequence
  Description of Artificial Sequence: Synthetic oligonucleotide
  Target: PCSK9; (+) strand; PAM type: NRG; PAM sequence: GAG
attgcctaatctttaaaagg

SEQ ID NO: 13815 - DNA, 20 bp, Artificial Sequence
  Description of Artificial Sequence: Synthetic oligonucleotide
  Target: PCSK9; (+) strand; PAM type: NRG; PAM sequence: AGG
ttgcctaatctttaaaaggg

SEQ ID NO: 13816 - DNA, 20 bp, Artificial Sequence
  Description of Artificial Sequence: Synthetic oligonucleotide
  Target: PCSK9; (+) strand; PAM type: NRG; PAM sequence: CGG
ggaggtgacaatcgtcccta

SEQ ID NO: 13817 - DNA, 20 bp, Artificial Sequence
  Description of Artificial Sequence: Synthetic oligonucleotide
  Target: PCSK9; (+) strand; PAM type: NRG; PAM sequence: CAG
tgacaatcgtccctacggct

SEQ ID NO: 13818 - DNA, 20 bp, Artificial Sequence
  Description of Artificial Sequence: Synthetic oligonucleotide
  Target: PCSK9; (+) strand; PAM type: NRG; PAM sequence: TGG
caatcgtccctacggctcag

SEQ ID NO: 13819 - DNA, 20 bp, Artificial Sequence
  Description of Artificial Sequence: Synthetic oligonucleotide
  Target: PCSK9; (+) strand; PAM type: NRG; PAM sequence: CAG
tcgtccctacggctcagtgg

SEQ ID NO: 13820 - DNA, 20 bp, Artificial Sequence
  Description of Artificial Sequence: Synthetic oligonucleotide
  Target: PCSK9; (+) strand; PAM type: NRG; PAM sequence: CAG
tccctacggctcagtggcag

SEQ ID NO: 13821 - DNA, 20 bp, Artificial Sequence
  Description of Artificial Sequence: Synthetic oligonucleotide
  Target: PCSK9; (+) strand; PAM type: NRG; PAM sequence: TGG
tacggctcagtggcagcaga

SEQ ID NO: 13822 - DNA, 20 bp, Artificial Sequence
  Description of Artificial Sequence: Synthetic oligonucleotide
  Target: PCSK9; (+) strand; PAM type: NRG; PAM sequence: GGG
acggctcagtggcagcagat

SEQ ID NO: 13823 - DNA, 20 bp, Artificial Sequence
  Description of Artificial Sequence: Synthetic oligonucleotide
  Target: PCSK9; (+) strand; PAM type: NRG; PAM sequence: GGG
cggctcagtggcagcagatg

SEQ ID NO: 13824 - DNA, 20 bp, Artificial Sequence
  Description of Artificial Sequence: Synthetic oligonucleotide
  Target: PCSK9; (+) strand; PAM type: NRG; PAM sequence: GAG
gctcagtggcagcagatggg

SEQ ID NO: 13825 - DNA, 20 bp, Artificial Sequence
  Description of Artificial Sequence: Synthetic oligonucleotide
  Target: PCSK9; (+) strand; PAM type: NRG; PAM sequence: AAG
tggcagcagatggggagatg

SEQ ID NO: 13826 - DNA, 20 bp, Artificial Sequence
  Description of Artificial Sequence: Synthetic oligonucleotide
  Target: PCSK9; (+) strand; PAM type: NRG; PAM sequence: AGG
ggcagcagatggggagatga

SEQ ID NO: 13827 - DNA, 20 bp, Artificial Sequence
  Description of Artificial Sequence: Synthetic oligonucleotide
  Target: PCSK9; (+) strand; PAM type: NRG; PAM sequence: GGG
gcagcagatggggagatgaa

SEQ ID NO: 13828 - DNA, 20 bp, Artificial Sequence
  Description of Artificial Sequence: Synthetic oligonucleotide
  Target: PCSK9; (+) strand; PAM type: NRG; PAM sequence: AAG
cagatggggagatgaaggga

SEQ ID NO: 13829 - DNA, 20 bp, Artificial Sequence
  Description of Artificial Sequence: Synthetic oligonucleotide
  Target: PCSK9; (+) strand; PAM type: NRG; PAM sequence: GAG
gggaaagttctgttgaccat

SEQ ID NO: 13830 - DNA, 20 bp, Artificial Sequence
  Description of Artificial Sequence: Synthetic oligonucleotide
  Target: PCSK9; (+) strand; PAM type: NRG; PAM sequence: AAG
catgagtgaacttacaatgc

SEQ ID NO: 13831 - DNA, 20 bp, Artificial Sequence
  Description of Artificial Sequence: Synthetic oligonucleotide
  Target: PCSK9; (+) strand; PAM type: NRG; PAM sequence: CGG
tgaacttacaatgcaagccc

SEQ ID NO: 13832 - DNA, 20 bp, Artificial Sequence
  Description of Artificial Sequence: Synthetic oligonucleotide
  Target: PCSK9; (+) strand; PAM type: NRG; PAM sequence: GGG
gaacttacaatgcaagcccc

SEQ ID NO: 13833 - DNA, 20 bp, Artificial Sequence
  Description of Artificial Sequence: Synthetic oligonucleotide
  Target: PCSK9; (+) strand; PAM type: NRG; PAM sequence: GGG
aacttacaatgcaagccccg

SEQ ID NO: 13834 - DNA, 20 bp, Artificial Sequence
  Description of Artificial Sequence: Synthetic oligonucleotide
  Target: PCSK9; (+) strand; PAM type: NRG; PAM sequence: GGG
acttacaatgcaagccccgg

SEQ ID NO: 13835 - DNA, 20 bp, Artificial Sequence
  Description of Artificial Sequence: Synthetic oligonucleotide
  Target: PCSK9; (+) strand; PAM type: NRG; PAM sequence: GGG
cttacaatgcaagccccggg

SEQ ID NO: 13836 - DNA, 20 bp, Artificial Sequence
  Description of Artificial Sequence: Synthetic oligonucleotide
  Target: PCSK9; (+) strand; PAM type: NRG; PAM sequence: CAG
agccccggggggatcacttg

SEQ ID NO: 13837 - DNA, 20 bp, Artificial Sequence
  Description of Artificial Sequence: Synthetic oligonucleotide
  Target: PCSK9; (+) strand; PAM type: NRG; PAM sequence: CAG
tgcagttttgtccctgtctg

SEQ ID NO: 13838 - DNA, 20 bp, Artificial Sequence
  Description of Artificial Sequence: Synthetic oligonucleotide
  Target: PCSK9; (+) strand; PAM type: NRG; PAM sequence: TGG
ctgtctgcagtgtgacctgt

SEQ ID NO: 13839 - DNA, 20 bp, Artificial Sequence
  Description of Artificial Sequence: Synthetic oligonucleotide
  Target: PCSK9; (+) strand; PAM type: NRG; PAM sequence: CAG
attgtctttgctccaaacca

SEQ ID NO: 13840 - DNA, 20 bp, Artificial Sequence
  Description of Artificial Sequence: Synthetic oligonucleotide
  Target: PCSK9; (+) strand; PAM type: NRG; PAM sequence: TGG
ttgctccaaaccacagctcc

SEQ ID NO: 13841 - DNA, 20 bp, Artificial Sequence
  Description of Artificial Sequence: Synthetic oligonucleotide
  Target: PCSK9; (+) strand; PAM type: NRG; PAM sequence: GGG
tgctccaaaccacagctcct

SEQ ID NO: 13842 - DNA, 20 bp, Artificial Sequence
  Description of Artificial Sequence: Synthetic oligonucleotide
  Target: PCSK9; (+) strand; PAM type: NRG; PAM sequence: GGG
gctccaaaccacagctcctg

SEQ ID NO: 13843 - DNA, 20 bp, Artificial Sequence
  Description of Artificial Sequence: Synthetic oligonucleotide
  Target: PCSK9; (+) strand; PAM type: NRG; PAM sequence: CAG
ccaaaccacagctcctgggg

SEQ ID NO: 13844 - DNA, 20 bp, Artificial Sequence
  Description of Artificial Sequence: Synthetic oligonucleotide
  Target: PCSK9; (+) strand; PAM type: NRG; PAM sequence: GAG
aaaccacagctcctggggca

SEQ ID NO: 13845 - DNA, 20 bp, Artificial Sequence
  Description of Artificial Sequence: Synthetic oligonucleotide
  Target: PCSK9; (+) strand; PAM type: NRG; PAM sequence: AGG
aaccacagctcctggggcag

SEQ ID NO: 13846 - DNA, 20 bp, Artificial Sequence
  Description of Artificial Sequence: Synthetic oligonucleotide
  Target: PCSK9; (+) strand; PAM type: NRG; PAM sequence: GGG
accacagctcctggggcaga

SEQ ID NO: 13847 - DNA, 20 bp, Artificial Sequence
  Description of Artificial Sequence: Synthetic oligonucleotide
  Target: PCSK9; (+) strand; PAM type: NRG; PAM sequence: GGG
ccacagctcctggggcagag

SEQ ID NO: 13848 - DNA, 20 bp, Artificial Sequence
  Description of Artificial Sequence: Synthetic oligonucleotide
  Target: PCSK9; (+) strand; PAM type: NRG; PAM sequence: CAG
ggggaaaattctgccactca

SEQ ID NO: 13849 - DNA, 20 bp, Artificial Sequence
  Description of Artificial Sequence: Synthetic oligonucleotide
  Target: PCSK9; (+) strand; PAM type: NRG; PAM sequence: GAG
gcctgcccacgcttctgtct

SEQ ID NO: 13850 - DNA, 20 bp, Artificial Sequence
  Description of Artificial Sequence: Synthetic oligonucleotide
  Target: PCSK9; (+) strand; PAM type: NRG; PAM sequence: TGG
acgcttctgtctgagtgtgc

SEQ ID NO: 13851 - DNA, 20 bp, Artificial Sequence
  Description of Artificial Sequence: Synthetic oligonucleotide
  Target: PCSK9; (+) strand; PAM type: NRG; PAM sequence: GGG
cgcttctgtctgagtgtgct

SEQ ID NO: 13852 - DNA, 20 bp, Artificial Sequence
  Description of Artificial Sequence: Synthetic oligonucleotide
  Target: PCSK9; (+) strand; PAM type: NRG; PAM sequence: TGG
ttctgtctgagtgtgctggg

SEQ ID NO: 13853 - DNA, 20 bp, Artificial Sequence
  Description of Artificial Sequence: Synthetic oligonucleotide
  Target: PCSK9; (+) strand; PAM type: NRG; PAM sequence: CAG
tgtctgagtgtgctgggtgg

SEQ ID NO: 13854 - DNA, 20 bp, Artificial Sequence
  Description of Artificial Sequence: Synthetic oligonucleotide
  Target: PCSK9; (+) strand; PAM type: NRG; PAM sequence: AGG
gtctgagtgtgctgggtggc

SEQ ID NO: 13855 - DNA, 20 bp, Artificial Sequence
  Description of Artificial Sequence: Synthetic oligonucleotide
  Target: PCSK9; (+) strand; PAM type: NRG; PAM sequence: TGG
gagtgtgctgggtggcagga

SEQ ID NO: 13856 - DNA, 20 bp, Artificial Sequence
  Description of Artificial Sequence: Synthetic oligonucleotide
  Target: PCSK9; (+) strand; PAM type: NRG; PAM sequence: AAG
gtgctgggtggcaggatggc

SEQ ID NO: 13857 - DNA, 20 bp, Artificial Sequence
  Description of Artificial Sequence: Synthetic oligonucleotide
  Target: PCSK9; (+) strand; PAM type: NRG; PAM sequence: CAG
caggatggcaagtccttact

SEQ ID NO: 13858 - DNA, 20 bp, Artificial Sequence
  Description of Artificial Sequence: Synthetic oligonucleotide
  Target: PCSK9; (+) strand; PAM type: NRG; PAM sequence: CAG
tggcaagtccttactcagct

SEQ ID NO: 13859 - DNA, 20 bp, Artificial Sequence
  Description of Artificial Sequence: Synthetic oligonucleotide
  Target: PCSK9; (+) strand; PAM type: NRG; PAM sequence: TAG
agtccttactcagctcagta

SEQ ID NO: 13860 - DNA, 20 bp, Artificial Sequence
  Description of Artificial Sequence: Synthetic oligonucleotide
  Target: PCSK9; (+) strand; PAM type: NRG; PAM sequence: GAG
agccctcttccttgttccct

SEQ ID NO: 13861 - DNA, 20 bp, Artificial Sequence
  Description of Artificial Sequence: Synthetic oligonucleotide
  Target: PCSK9; (+) strand; PAM type: NRG; PAM sequence: GAG
cctgagcctttgactttctc

SEQ ID NO: 13862 - DNA, 20 bp, Artificial Sequence
  Description of Artificial Sequence: Synthetic oligonucleotide
  Target: PCSK9; (+) strand; PAM type: NRG; PAM sequence: AGG
ctgagcctttgactttctcg

SEQ ID NO: 13863 - DNA, 20 bp, Artificial Sequence
  Description of Artificial Sequence: Synthetic oligonucleotide
  Target: PCSK9; (+) strand; PAM type: NRG; PAM sequence: GGG
tgagcctttgactttctcga

SEQ ID NO: 13864 - DNA, 20 bp, Artificial Sequence
  Description of Artificial Sequence: Synthetic oligonucleotide
  Target: PCSK9; (+) strand; PAM type: NRG; PAM sequence: TGG
gactttctcgagggatgttg

SEQ ID NO: 13865 - DNA, 20 bp, Artificial Sequence
  Description of Artificial Sequence: Synthetic oligonucleotide
  Target: PCSK9; (+) strand; PAM type: NRG; PAM sequence: GGG
actttctcgagggatgttgt

SEQ ID NO: 13866 - DNA, 20 bp, Artificial Sequence
  Description of Artificial Sequence: Synthetic oligonucleotide
  Target: PCSK9; (+) strand; PAM type: NRG; PAM sequence: GGG
ctttctcgagggatgttgtg

SEQ ID NO: 13867 - DNA, 20 bp, Artificial Sequence
  Description of Artificial Sequence: Synthetic oligonucleotide
  Target: PCSK9; (+) strand; PAM type: NRG; PAM sequence: TGG
cgagggatgttgtggggttg

SEQ ID NO: 13868 - DNA, 20 bp, Artificial Sequence
  Description of Artificial Sequence: Synthetic oligonucleotide
  Target: PCSK9; (+) strand; PAM type: NRG; PAM sequence: CAG
ggatgttgtggggttgtggc

SEQ ID NO: 13869 - DNA, 20 bp, Artificial Sequence
  Description of Artificial Sequence: Synthetic oligonucleotide
  Target: PCSK9; (+) strand; PAM type: NRG; PAM sequence: AGG
gatgttgtggggttgtggcc

SEQ ID NO: 13870 - DNA, 20 bp, Artificial Sequence
  Description of Artificial Sequence: Synthetic oligonucleotide
  Target: PCSK9; (+) strand; PAM type: NRG; PAM sequence: AAG
tgtggggttgtggccaggat

SEQ ID NO: 13871 - DNA, 20 bp, Artificial Sequence
  Description of Artificial Sequence: Synthetic oligonucleotide
  Target: PCSK9; (+) strand; PAM type: NRG; PAM sequence: AAG
gggttgtggccaggataaga

SEQ ID NO: 13872 - DNA, 20 bp, Artificial Sequence
  Description of Artificial Sequence: Synthetic oligonucleotide
  Target: PCSK9; (+) strand; PAM type: NRG; PAM sequence: AGG
ggttgtggccaggataagaa

SEQ ID NO: 13873 - DNA, 20 bp, Artificial Sequence
  Description of Artificial Sequence: Synthetic oligonucleotide
  Target: PCSK9; (+) strand; PAM type: NRG; PAM sequence: GGG
gttgtggccaggataagaaa

SEQ ID NO: 13874 - DNA, 20 bp, Artificial Sequence
  Description of Artificial Sequence: Synthetic oligonucleotide
  Target: PCSK9; (+) strand; PAM type: NRG; PAM sequence: AAG
aggataagaaagggcatttc

SEQ ID NO: 13875 - DNA, 20 bp, Artificial Sequence
  Description of Artificial Sequence: Synthetic oligonucleotide
  Target: PCSK9; (+) strand; PAM type: NRG; PAM sequence: TGG
ctgctccaaaacaactgttc

SEQ ID NO: 13876 - DNA, 20 bp, Artificial Sequence
  Description of Artificial Sequence: Synthetic oligonucleotide
  Target: PCSK9; (+) strand; PAM type: NRG; PAM sequence: TAG
caaaacaactgttctggaaa

SEQ ID NO: 13877 - DNA, 20 bp, Artificial Sequence
  Description of Artificial Sequence: Synthetic oligonucleotide
  Target: PCSK9; (+) strand; PAM type: NRG; PAM sequence: GAG
acaactgttctggaaatagt

SEQ ID NO: 13878 - DNA, 20 bp, Artificial Sequence
  Description of Artificial Sequence: Synthetic oligonucleotide
  Target: PCSK9; (+) strand; PAM type: NRG; PAM sequence: GAG
aatagtgagtaccccatcct

SEQ ID NO: 13879 - DNA, 20 bp, Artificial Sequence
  Description of Artificial Sequence: Synthetic oligonucleotide
  Target: PCSK9; (+) strand; PAM type: NRG; PAM sequence: GAG
tagtgagtaccccatcctga

SEQ ID NO: 13880 - DNA, 20 bp, Artificial Sequence
  Description of Artificial Sequence: Synthetic oligonucleotide
  Target: PCSK9; (+) strand; PAM type: NRG; PAM sequence: AGG
agtgagtaccccatcctgag

SEQ ID NO: 13881 - DNA, 20 bp, Artificial Sequence
  Description of Artificial Sequence: Synthetic oligonucleotide
  Target: PCSK9; (+) strand; PAM type: NRG; PAM sequence: GAG
agtaccccatcctgagaggt

SEQ ID NO: 13882 - DNA, 20 bp, Artificial Sequence
  Description of Artificial Sequence: Synthetic oligonucleotide
  Target: PCSK9; (+) strand; PAM type: NRG; PAM sequence: AAG
ccccatcctgagaggtgagt

SEQ ID NO: 13883 - DNA, 20 bp, Artificial Sequence
  Description of Artificial Sequence: Synthetic oligonucleotide
  Target: PCSK9; (+) strand; PAM type: NRG; PAM sequence: CAG
catcctgagaggtgagtaag

SEQ ID NO: 13884 - DNA, 20 bp, Artificial Sequence
  Description of Artificial Sequence: Synthetic oligonucleotide
  Target: PCSK9; (+) strand; PAM type: NRG; PAM sequence: GAG
tcctgagaggtgagtaagca

SEQ ID NO: 13885 - DNA, 20 bp, Artificial Sequence
  Description of Artificial Sequence: Synthetic oligonucleotide
  Target: PCSK9; (+) strand; PAM type: NRG; PAM sequence: AGG
cctgagaggtgagtaagcag

SEQ ID NO: 13886 - DNA, 20 bp, Artificial Sequence
  Description of Artificial Sequence: Synthetic oligonucleotide
  Target: PCSK9; (+) strand; PAM type: NRG; PAM sequence: AAG
gctgtatgaccacctgaacc

SEQ ID NO: 13887 - DNA, 20 bp, Artificial Sequence
  Description of Artificial Sequence: Synthetic oligonucleotide
  Target: PCSK9; (+) strand; PAM type: NRG; PAM sequence: GAG
accacctgaaccaagccctt

SEQ ID NO: 13888 - DNA, 20 bp, Artificial Sequence
  Description of Artificial Sequence: Synthetic oligonucleotide
  Target: PCSK9; (+) strand; PAM type: NRG; PAM sequence: AGG
ccacctgaaccaagcccttg

SEQ ID NO: 13889 - DNA, 20 bp, Artificial Sequence
  Description of Artificial Sequence: Synthetic oligonucleotide
  Target: PCSK9; (+) strand; PAM type: NRG; PAM sequence: TGG
ccttgaggatgtttcttctc

SEQ ID NO: 13890 - DNA, 20 bp, Artificial Sequence
  Description of Artificial Sequence: Synthetic oligonucleotide
  Target: PCSK9; (+) strand; PAM type: NRG; PAM sequence: TGG
tgaggatgtttcttctctgg

SEQ ID NO: 13891 - DNA, 20 bp, Artificial Sequence
  Description of Artificial Sequence: Synthetic oligonucleotide
  Target: PCSK9; (+) strand; PAM type: NRG; PAM sequence: AAG
ggatgtttcttctctggtgg

SEQ ID NO: 13892 - DNA, 20 bp, Artificial Sequence
  Description of Artificial Sequence: Synthetic oligonucleotide
  Target: PCSK9; (+) strand; PAM type: NRG; PAM sequence: TGG
tttcttctctggtggaagtt

SEQ ID NO: 13893 - DNA, 20 bp, Artificial Sequence
  Description of Artificial Sequence: Synthetic oligonucleotide
  Target: PCSK9; (+) strand; PAM type: NRG; PAM sequence: CAG
tctctggtggaagtttggaa

SEQ ID NO: 13894 - DNA, 20 bp, Artificial Sequence
  Description of Artificial Sequence: Synthetic oligonucleotide
  Target: PCSK9; (+) strand; PAM type: NRG; PAM sequence: AGG
ctctggtggaagtttggaac

SEQ ID NO: 13895 - DNA, 20 bp, Artificial Sequence
  Description of Artificial Sequence: Synthetic oligonucleotide
  Target: PCSK9; (+) strand; PAM type: NRG; PAM sequence: GAG
ctggtggaagtttggaacag

SEQ ID NO: 13896 - DNA, 20 bp, Artificial Sequence
  Description of Artificial Sequence: Synthetic oligonucleotide
  Target: PCSK9; (+) strand; PAM type: NRG; PAM sequence: AAG
tttggaacaggagcctcctc

SEQ ID NO: 13897 - DNA, 20 bp, Artificial Sequence
  Description of Artificial Sequence: Synthetic oligonucleotide
  Target: PCSK9; (+) strand; PAM type: NRG; PAM sequence: TGG
tcatttattcattcattcaa

SEQ ID NO: 13898 - DNA, 20 bp, Artificial Sequence
  Description of Artificial Sequence: Synthetic oligonucleotide
  Target: PCSK9; (+) strand; PAM type: NRG; PAM sequence: TGG
ttcattcaatggttattttg

SEQ ID NO: 13899 - DNA, 20 bp, Artificial Sequence
  Description of Artificial Sequence: Synthetic oligonucleotide
  Target: PCSK9; (+) strand; PAM type: NRG; PAM sequence: GGG
tcattcaatggttattttgt

SEQ ID NO: 13900 - DNA, 20 bp, Artificial Sequence
  Description of Artificial Sequence: Synthetic oligonucleotide
  Target: PCSK9; (+) strand; PAM type: NRG; PAM sequence: TAG
tattttgtgggaatcgaatt

SEQ ID NO: 13901 - DNA, 20 bp, Artificial Sequence
  Description of Artificial Sequence: Synthetic oligonucleotide
  Target: PCSK9; (+) strand; PAM type: NRG; PAM sequence: TGG
tttagaatgaaaatattttt

SEQ ID NO: 13902 - DNA, 20 bp, Artificial Sequence
  Description of Artificial Sequence: Synthetic oligonucleotide
  Target: PCSK9; (+) strand; PAM type: NRG; PAM sequence: AAG
gaatgaaaatattttttggc

SEQ ID NO: 13903 - DNA, 20 bp, Artificial Sequence
  Description of Artificial Sequence: Synthetic oligonucleotide
  Target: PCSK9; (+) strand; PAM type: NRG; PAM sequence: CAG
tgaaaatattttttggcaag

SEQ ID NO: 13904 - DNA, 20 bp, Artificial Sequence
  Description of Artificial Sequence: Synthetic oligonucleotide
  Target: PCSK9; (+) strand; PAM type: NRG; PAM sequence: TAG
ggcaagcagaaaataatttt

SEQ ID NO: 13905 - DNA, 20 bp, Artificial Sequence
  Description of Artificial Sequence: Synthetic oligonucleotide
  Target: PCSK9; (+) strand; PAM type: NRG; PAM sequence: TAG
ttagaccaatccttttcttt

SEQ ID NO: 13906 - DNA, 20 bp, Artificial Sequence
  Description of Artificial Sequence: Synthetic oligonucleotide
  Target: PCSK9; (+) strand; PAM type: NRG; PAM sequence: GAG
aatccttttcttttagtcat

SEQ ID NO: 13907 - DNA, 20 bp, Artificial Sequence
  Description of Artificial Sequence: Synthetic oligonucleotide
  Target: PCSK9; (+) strand; PAM type: NRG; PAM sequence: GAG
tcttttagtcatgagaaact

SEQ ID NO: 13908 - DNA, 20 bp, Artificial Sequence
  Description of Artificial Sequence: Synthetic oligonucleotide
  Target: PCSK9; (+) strand; PAM type: NRG; PAM sequence: AGG
cttttagtcatgagaaactg

SEQ ID NO: 13909 - DNA, 20 bp, Artificial Sequence
  Description of Artificial Sequence: Synthetic oligonucleotide
  Target: PCSK9; (+) strand; PAM type: NRG; PAM sequence: CAG
agtcatgagaaactgaggcc

SEQ ID NO: 13910 - DNA, 20 bp, Artificial Sequence
  Description of Artificial Sequence: Synthetic oligonucleotide
  Target: PCSK9; (+) strand; PAM type: NRG; PAM sequence: GAG
tcatgagaaactgaggccca

SEQ ID NO: 13911 - DNA, 20 bp, Artificial Sequence
  Description of Artificial Sequence: Synthetic oligonucleotide
  Target: PCSK9; (+) strand; PAM type: NRG; PAM sequence: GAG
atgagaaactgaggcccaga

SEQ ID NO: 13912 - DNA, 20 bp, Artificial Sequence
  Description of Artificial Sequence: Synthetic oligonucleotide
  Target: PCSK9; (+) strand; PAM type: NRG; PAM sequence: GAG
gagaaactgaggcccagaga

SEQ ID NO: 13913 - DNA, 20 bp, Artificial Sequence
  Description of Artificial Sequence: Synthetic oligonucleotide
  Target: PCSK9; (+) strand; PAM type: NRG; PAM sequence: AGG
agaaactgaggcccagagag

SEQ ID NO: 13914 - DNA, 20 bp, Artificial Sequence
  Description of Artificial Sequence: Synthetic oligonucleotide
  Target: PCSK9; (+) strand; PAM type: NRG; PAM sequence: GAG
aaactgaggcccagagagag

SEQ ID NO: 13915 - DNA, 20 bp, Artificial Sequence
  Description of Artificial Sequence: Synthetic oligonucleotide
  Target: PCSK9; (+) strand; PAM type: NRG; PAM sequence: AGG
aactgaggcccagagagagg

SEQ ID NO: 13916 - DNA, 20 bp, Artificial Sequence
  Description of Artificial Sequence: Synthetic oligonucleotide
  Target: PCSK9; (+) strand; PAM type: NRG; PAM sequence: CAG
ccagagagaggaggtcaccc

SEQ ID NO: 13917 - DNA, 20 bp, Artificial Sequence
  Description of Artificial Sequence: Synthetic oligonucleotide
  Target: PCSK9; (+) strand; PAM type: NRG; PAM sequence: AGG
cagagagaggaggtcacccc

SEQ ID NO: 13918 - DNA, 20 bp, Artificial Sequence
  Description of Artificial Sequence: Synthetic oligonucleotide
  Target: PCSK9; (+) strand; PAM type: NRG; PAM sequence: TAG
ggaggtcaccccaggtgcat

SEQ ID NO: 13919 - DNA, 20 bp, Artificial Sequence
  Description of Artificial Sequence: Synthetic oligonucleotide
  Target: PCSK9; (+) strand; PAM type: NRG; PAM sequence: TGG
caccccaggtgcattagaac

SEQ ID NO: 13920 - DNA, 20 bp, Artificial Sequence
  Description of Artificial Sequence: Synthetic oligonucleotide
  Target: PCSK9; (+) strand; PAM type: NRG; PAM sequence: GGG
accccaggtgcattagaact

SEQ ID NO: 13921 - DNA, 20 bp, Artificial Sequence
  Description of Artificial Sequence: Synthetic oligonucleotide
  Target: PCSK9; (+) strand; PAM type: NRG; PAM sequence: CAG
gtgcattagaactgggtttc

SEQ ID NO: 13922 - DNA, 20 bp, Artificial Sequence
  Description of Artificial Sequence: Synthetic oligonucleotide
  Target: PCSK9; (+) strand; PAM type: NRG; PAM sequence: CAG
agaactgacactccactgca

SEQ ID NO: 13923 - DNA, 20 bp, Artificial Sequence
  Description of Artificial Sequence: Synthetic oligonucleotide
  Target: PCSK9; (+) strand; PAM type: NRG; PAM sequence: GAG
aactgacactccactgcaca

SEQ ID NO: 13924 - DNA, 20 bp, Artificial Sequence
  Description of Artificial Sequence: Synthetic oligonucleotide
  Target: PCSK9; (+) strand; PAM type: NRG; PAM sequence: TAG
caattcattcaatttttatt

SEQ ID NO: 13925 - DNA, 20 bp, Artificial Sequence
  Description of Artificial Sequence: Synthetic oligonucleotide
  Target: PCSK9; (+) strand; PAM type: NRG; PAM sequence: CGG
ttcattcaatttttatttag

SEQ ID NO: 13926 - DNA, 20 bp, Artificial Sequence
  Description of Artificial Sequence: Synthetic oligonucleotide
  Target: PCSK9; (+) strand; PAM type: NRG; PAM sequence: AAG
attcaatttttatttagcgg

SEQ ID NO: 13927 - DNA, 20 bp, Artificial Sequence
  Description of Artificial Sequence: Synthetic oligonucleotide
  Target: PCSK9; (+) strand; PAM type: NRG; PAM sequence: AGG
ttcaatttttatttagcgga

SEQ ID NO: 13928 - DNA, 20 bp, Artificial Sequence
  Description of Artificial Sequence: Synthetic oligonucleotide
  Target: PCSK9; (+) strand; PAM type: NRG; PAM sequence: CAG
tatttagcggaaggcatttt

SEQ ID NO: 13929 - DNA, 20 bp, Artificial Sequence
  Description of Artificial Sequence: Synthetic oligonucleotide
  Target: PCSK9; (+) strand; PAM type: NRG; PAM sequence: TGG
tagcggaaggcattttcaga

SEQ ID NO: 13930 - DNA, 20 bp, Artificial Sequence
  Description of Artificial Sequence: Synthetic oligonucleotide
  Target: PCSK9; (+) strand; PAM type: NRG; PAM sequence: GGG
agcggaaggcattttcagat

SEQ ID NO: 13931 - DNA, 20 bp, Artificial Sequence
  Description of Artificial Sequence: Synthetic oligonucleotide
  Target: PCSK9; (+) strand; PAM type: NRG; PAM sequence: AAG
cattttcagatgggtctttg

SEQ ID NO: 13932 - DNA, 20 bp, Artificial Sequence
  Description of Artificial Sequence: Synthetic oligonucleotide
  Target: PCSK9; (+) strand; PAM type: NRG; PAM sequence: TAG
cagatgggtctttgaagcat

SEQ ID NO: 13933 - DNA, 20 bp, Artificial Sequence
  Description of Artificial Sequence: Synthetic oligonucleotide
  Target: PCSK9; (+) strand; PAM type: NRG; PAM sequence: TAG
atgggtctttgaagcattag

SEQ ID NO: 13934 - DNA, 20 bp, Artificial Sequence
  Description of Artificial Sequence: Synthetic oligonucleotide
  Target: PCSK9; (+) strand; PAM type: NRG; PAM sequence: AGG
tgggtctttgaagcattagt

SEQ ID NO: 13935 - DNA, 20 bp, Artificial Sequence
  Description of Artificial Sequence: Synthetic oligonucleotide
  Target: PCSK9; (+) strand; PAM type: NRG; PAM sequence: GAG
ggtctttgaagcattagtag

SEQ ID NO: 13936 - DNA, 20 bp, Artificial Sequence
  Description of Artificial Sequence: Synthetic oligonucleotide
  Target: PCSK9; (+) strand; PAM type: NRG; PAM sequence: CAG
ttgaagcattagtaggagtt

SEQ ID NO: 13937 - DNA, 20 bp, Artificial Sequence
  Description of Artificial Sequence: Synthetic oligonucleotide
  Target: PCSK9; (+) strand; PAM type: NRG; PAM sequence: TGG
tagtaggagttcagcgatga

SEQ ID NO: 13938 - DNA, 20 bp, Artificial Sequence
  Description of Artificial Sequence: Synthetic oligonucleotide
  Target: PCSK9; (+) strand; PAM type: NRG; PAM sequence: GAG
ttcagcgatgatggtgtcat

SEQ ID NO: 13939 - DNA, 20 bp, Artificial Sequence
  Description of Artificial Sequence: Synthetic oligonucleotide
  Target: PCSK9; (+) strand; PAM type: NRG; PAM sequence: TAG
gtgtcatgagaattttattc

SEQ ID NO: 13940 - DNA, 20 bp, Artificial Sequence
  Description of Artificial Sequence: Synthetic oligonucleotide
  Target: PCSK9; (+) strand; PAM type: NRG; PAM sequence: AGG
tgtcatgagaattttattct

SEQ ID NO: 13941 - DNA, 20 bp, Artificial Sequence
  Description of Artificial Sequence: Synthetic oligonucleotide
  Target: PCSK9; (+) strand; PAM type: NRG; PAM sequence: TAG
tgagaattttattctaggat

SEQ ID NO: 13942 - DNA, 20 bp, Artificial Sequence
  Description of Artificial Sequence: Synthetic oligonucleotide
  Target: PCSK9; (+) strand; PAM type: NRG; PAM sequence: AGG
gagaattttattctaggatt

SEQ ID NO: 13943 - DNA, 20 bp, Artificial Sequence
  Description of Artificial Sequence: Synthetic oligonucleotide
  Target: PCSK9; (+) strand; PAM type: NRG; PAM sequence: GAG
gaattttattctaggattag

SEQ ID NO: 13944 - DNA, 20 bp, Artificial Sequence
  Description of Artificial Sequence: Synthetic oligonucleotide
  Target: PCSK9; (+) strand; PAM type: NRG; PAM sequence: AGG
aattttattctaggattagg

SEQ ID NO: 13945 - DNA, 20 bp, Artificial Sequence
  Description of Artificial Sequence: Synthetic oligonucleotide
  Target: PCSK9; (+) strand; PAM type: NRG; PAM sequence: AAG
attaggaggtaccatgaaca

SEQ ID NO: 13946 - DNA, 20 bp, Artificial Sequence
  Description of Artificial Sequence: Synthetic oligonucleotide
  Target: PCSK9; (+) strand; PAM type: NRG; PAM sequence: CAG
aggtaccatgaacaaagata

SEQ ID NO: 13947 - DNA, 20 bp, Artificial Sequence
  Description of Artificial Sequence: Synthetic oligonucleotide
  Target: PCSK9; (+) strand; PAM type: NRG; PAM sequence: GAG
gtaccatgaacaaagataca

SEQ ID NO: 13948 - DNA, 20 bp, Artificial Sequence
  Description of Artificial Sequence: Synthetic oligonucleotide
  Target: PCSK9; (+) strand; PAM type: NRG; PAM sequence: TGG
catgaacaaagatacagagc

SEQ ID NO: 13949 - DNA, 20 bp, Artificial Sequence
  Description of Artificial Sequence: Synthetic oligonucleotide
  Target: PCSK9; (+) strand; PAM type: NRG; PAM sequence: GGG
atgaacaaagatacagagct

SEQ ID NO: 13950 - DNA, 20 bp, Artificial Sequence
  Description of Artificial Sequence: Synthetic oligonucleotide
  Target: PCSK9; (+) strand; PAM type: NRG; PAM sequence: CAG
agatacagagctgggaaaac

SEQ ID NO: 13951 - DNA, 20 bp, Artificial Sequence
  Description of Artificial Sequence: Synthetic oligonucleotide
  Target: PCSK9; (+) strand; PAM type: NRG; PAM sequence: GAG
atacagagctgggaaaacca

SEQ ID NO: 13952 - DNA, 20 bp, Artificial Sequence
  Description of Artificial Sequence: Synthetic oligonucleotide
  Target: PCSK9; (+) strand; PAM type: NRG; PAM sequence: AGG
tacagagctgggaaaaccag

SEQ ID NO: 13953 - DNA, 20 bp, Artificial Sequence
  Description of Artificial Sequence: Synthetic oligonucleotide
  Target: PCSK9; (+) strand; PAM type: NRG; PAM sequence: TGG
agagctgggaaaaccagagg

SEQ ID NO: 13954 - DNA, 20 bp, Artificial Sequence
  Description of Artificial Sequence: Synthetic oligonucleotide
  Target: PCSK9; (+) strand; PAM type: NRG; PAM sequence: AAG
gctgggaaaaccagaggtgg

SEQ ID NO: 13955 - DNA, 20 bp, Artificial Sequence
  Description of Artificial Sequence: Synthetic oligonucleotide
  Target: PCSK9; (+) strand; PAM type: NRG; PAM sequence: AAG
gaaaaccagaggtggaagat

SEQ ID NO: 13956 - DNA, 20 bp, Artificial Sequence
  Description of Artificial Sequence: Synthetic oligonucleotide
  Target: PCSK9; (+) strand; PAM type: NRG; PAM sequence: AGG
aaaaccagaggtggaagata

SEQ ID NO: 13957 - DNA, 20 bp, Artificial Sequence
  Description of Artificial Sequence: Synthetic oligonucleotide
  Target: PCSK9; (+) strand; PAM type: NRG; PAM sequence: GAG
aaccagaggtggaagataag

SEQ ID NO: 13958 - DNA, 20 bp, Artificial Sequence
  Description of Artificial Sequence: Synthetic oligonucleotide
  Target: PCSK9; (+) strand; PAM type: NRG; PAM sequence: CAG
agataaggagcacatgtcca

SEQ ID NO: 13959 - DNA, 20 bp, Artificial Sequence
  Description of Artificial Sequence: Synthetic oligonucleotide
  Target: PCSK9; (+) strand; PAM type: NRG; PAM sequence: GAG
gttctttttctttttttttt

SEQ ID NO: 13960 - DNA, 20 bp, Artificial Sequence
  Description of Artificial Sequence: Synthetic oligonucleotide
  Target: PCSK9; (+) strand; PAM type: NRG; PAM sequence: TGG
tttttcttttttttttgaga

SEQ ID NO: 13961 - DNA, 20 bp, Artificial Sequence
  Description of Artificial Sequence: Synthetic oligonucleotide
  Target: PCSK9; (+) strand; PAM type: NRG; PAM sequence: GAG
tttcttttttttttgagatg

SEQ ID NO: 13962 - DNA, 20 bp, Artificial Sequence
  Description of Artificial Sequence: Synthetic oligonucleotide
  Target: PCSK9; (+) strand; PAM type: NRG; PAM sequence: CAG
ggagtttcgctcttgttgcc

SEQ ID NO: 13963 - DNA, 20 bp, Artificial Sequence
  Description of Artificial Sequence: Synthetic oligonucleotide
  Target: PCSK9; (+) strand; PAM type: NRG; PAM sequence: AGG
gagtttcgctcttgttgccc

SEQ ID NO: 13964 - DNA, 20 bp, Artificial Sequence
  Description of Artificial Sequence: Synthetic oligonucleotide
  Target: PCSK9; (+) strand; PAM type: NRG; PAM sequence: TGG
ttcgctcttgttgcccaggc

SEQ ID NO: 13965 - DNA, 20 bp, Artificial Sequence
  Description of Artificial Sequence: Synthetic oligonucleotide
  Target: PCSK9; (+) strand; PAM type: NRG; PAM sequence: GAG
cgctcttgttgcccaggctg

SEQ ID NO: 13966 - DNA, 20 bp, Artificial Sequence
  Description of Artificial Sequence: Synthetic oligonucleotide
  Target: PCSK9; (+) strand; PAM type: NRG; PAM sequence: TGG
ttgcccaggctggagtgcaa

SEQ ID NO: 13967 - DNA, 20 bp, Artificial Sequence
  Description of Artificial Sequence: Synthetic oligonucleotide
  Target: PCSK9; (+) strand; PAM type: NRG; PAM sequence: CAG
caggctggagtgcaatggtg

SEQ ID NO: 13968 - DNA, 20 bp, Artificial Sequence
  Description of Artificial Sequence: Synthetic oligonucleotide
  Target: PCSK9; (+) strand; PAM type: NRG; PAM sequence: CAG
ggagtgcaatggtgcagtct

SEQ ID NO: 13969 - DNA, 20 bp, Artificial Sequence
  Description of Artificial Sequence: Synthetic oligonucleotide
  Target: PCSK9; (+) strand; PAM type: NRG; PAM sequence: CGG
tcactgcaacatctgtctcc

SEQ ID NO: 13970 - DNA, 20 bp, Artificial Sequence
  Description of Artificial Sequence: Synthetic oligonucleotide
  Target: PCSK9; (+) strand; PAM type: NRG; PAM sequence: GGG
cactgcaacatctgtctccc

SEQ ID NO: 13971 - DNA, 20 bp, Artificial Sequence
  Description of Artificial Sequence: Synthetic oligonucleotide
  Target: PCSK9; (+) strand; PAM type: NRG; PAM sequence: AAG
aacatctgtctcccgggttc

SEQ ID NO: 13972 - DNA, 20 bp, Artificial Sequence
  Description of Artificial Sequence: Synthetic oligonucleotide
  Target: PCSK9; (+) strand; PAM type: NRG; PAM sequence: TGG
atctgtctcccgggttcaag

SEQ ID NO: 13973 - DNA, 20 bp, Artificial Sequence
  Description of Artificial Sequence: Synthetic oligonucleotide
  Target: PCSK9; (+) strand; PAM type: NRG; PAM sequence: CAG
ttcaagtggttctcctgcct

SEQ ID NO: 13974 - DNA, 20 bp, Artificial Sequence
  Description of Artificial Sequence: Synthetic oligonucleotide
  Target: PCSK9; (+) strand; PAM type: NRG; PAM sequence: AAG
ttctcctgcctcagcctccc

SEQ ID NO: 13975 - DNA, 20 bp, Artificial Sequence
  Description of Artificial Sequence: Synthetic oligonucleotide
  Target: PCSK9; (+) strand; PAM type: NRG; PAM sequence: AAG
tcctgcctcagcctcccaag

SEQ ID NO: 13976 - DNA, 20 bp, Artificial Sequence
  Description of Artificial Sequence: Synthetic oligonucleotide
  Target: PCSK9; (+) strand; PAM type: NRG; PAM sequence: TGG
gcctcagcctcccaagaagc

SEQ ID NO: 13977 - DNA, 20 bp, Artificial Sequence
  Description of Artificial Sequence: Synthetic oligonucleotide
  Target: PCSK9; (+) strand; PAM type: NRG; PAM sequence: GGG
cctcagcctcccaagaagct

SEQ ID NO: 13978 - DNA, 20 bp, Artificial Sequence
  Description of Artificial Sequence: Synthetic oligonucleotide
  Target: PCSK9; (+) strand; PAM type: NRG; PAM sequence: CAG
ctcccaagaagctgggatta

SEQ ID NO: 13979 - DNA, 20 bp, Artificial Sequence
  Description of Artificial Sequence: Synthetic oligonucleotide
  Target: PCSK9; (+) strand; PAM type: NRG; PAM sequence: AGG
tcccaagaagctgggattac

SEQ ID NO: 13980 - DNA, 20 bp, Artificial Sequence
  Description of Artificial Sequence: Synthetic oligonucleotide
  Target: PCSK9; (+) strand; PAM type: NRG; PAM sequence: CGG
caggtacctgccaccacgcc

SEQ ID NO: 13981 - DNA, 20 bp, Artificial Sequence
  Description of Artificial Sequence: Synthetic oligonucleotide
  Target: PCSK9; (+) strand; PAM type: NRG; PAM sequence: TAG
ccggctaatttttgtatttt

SEQ ID NO: 13982 - DNA, 20 bp, Artificial Sequence
  Description of Artificial Sequence: Synthetic oligonucleotide
  Target: PCSK9; (+) strand; PAM type: NRG; PAM sequence: TAG
gctaatttttgtatttttag

SEQ ID NO: 13983 - DNA, 20 bp, Artificial Sequence
  Description of Artificial Sequence: Synthetic oligonucleotide
  Target: PCSK9; (+) strand; PAM type: NRG; PAM sequence: GAG
taatttttgtatttttagta

SEQ ID NO: 13984 - DNA, 20 bp, Artificial Sequence
  Description of Artificial Sequence: Synthetic oligonucleotide
  Target: PCSK9; (+) strand; PAM type: NRG; PAM sequence: AAG
tttttgtatttttagtagag

SEQ ID NO: 13985 - DNA, 20 bp, Artificial Sequence
  Description of Artificial Sequence: Synthetic oligonucleotide
  Target: PCSK9; (+) strand; PAM type: NRG; PAM sequence: AGG
ttttgtatttttagtagaga

SEQ ID NO: 13986 - DNA, 20 bp, Artificial Sequence
  Description of Artificial Sequence: Synthetic oligonucleotide
  Target: PCSK9; (+) strand; PAM type: NRG; PAM sequence: GGG
tttgtatttttagtagagaa

SEQ ID NO: 13987 - DNA, 20 bp, Artificial Sequence
  Description of Artificial Sequence: Synthetic oligonucleotide
  Target: PCSK9; (+) strand; PAM type: NRG; PAM sequence: GGG
ttgtatttttagtagagaag

SEQ ID NO: 13988 - DNA, 20 bp, Artificial Sequence
  Description of Artificial Sequence: Synthetic oligonucleotide
  Target: PCSK9; (+) strand; PAM type: NRG; PAM sequence: TGG
gagaaggggtttcaccacgt

SEQ ID NO: 13989 - DNA, 20 bp, Artificial Sequence
  Description of Artificial Sequence: Synthetic oligonucleotide
  Target: PCSK9; (+) strand; PAM type: NRG; PAM sequence: CAG
aggggtttcaccacgttggc

SEQ ID NO: 13990 - DNA, 20 bp, Artificial Sequence
  Description of Artificial Sequence: Synthetic oligonucleotide
  Target: PCSK9; (+) strand; PAM type: NRG; PAM sequence: AGG
ggggtttcaccacgttggcc

SEQ ID NO: 13991 - DNA, 20 bp, Artificial Sequence
  Description of Artificial Sequence: Synthetic oligonucleotide
  Target: PCSK9; (+) strand; PAM type: NRG; PAM sequence: TAG
tttcaccacgttggccaggc

SEQ ID NO: 13992 - DNA, 20 bp, Artificial Sequence
  Description of Artificial Sequence: Synthetic oligonucleotide
  Target: PCSK9; (+) strand; PAM type: NRG; PAM sequence: CAG
tcgcaaactcctgacctcct

SEQ ID NO: 13993 - DNA, 20 bp, Artificial Sequence
  Description of Artificial Sequence: Synthetic oligonucleotide
  Target: PCSK9; (+) strand; PAM type: NRG; PAM sequence: TGG
caaactcctgacctcctcag

SEQ ID NO: 13994 - DNA, 20 bp, Artificial Sequence
  Description of Artificial Sequence: Synthetic oligonucleotide
  Target: PCSK9; (+) strand; PAM type: NRG; PAM sequence: GAG
ctgacctcctcagtggatcc

SEQ ID NO: 13995 - DNA, 20 bp, Artificial Sequence
  Description of Artificial Sequence: Synthetic oligonucleotide
  Target: PCSK9; (+) strand; PAM type: NRG; PAM sequence: AGG
tgacctcctcagtggatccg

SEQ ID NO: 13996 - DNA, 20 bp, Artificial Sequence
  Description of Artificial Sequence: Synthetic oligonucleotide
  Target: PCSK9; (+) strand; PAM type: NRG; PAM sequence: GAG
acctcctcagtggatccgag

SEQ ID NO: 13997 - DNA, 20 bp, Artificial Sequence
  Description of Artificial Sequence: Synthetic oligonucleotide
  Target: PCSK9; (+) strand; PAM type: NRG; PAM sequence: AGG
cctcctcagtggatccgagg

SEQ ID NO: 13998 - DNA, 20 bp, Artificial Sequence
  Description of Artificial Sequence: Synthetic oligonucleotide
  Target: PCSK9; (+) strand; PAM type: NRG; PAM sequence: CAG
aggaggtgatcctcccgcct

SEQ ID NO: 13999 - DNA, 20 bp, Artificial Sequence
  Description of Artificial Sequence: Synthetic oligonucleotide
  Target: PCSK9; (+) strand; PAM type: NRG; PAM sequence: AAG
cctcccgcctcagcctccca

SEQ ID NO: 14000 - DNA, 20 bp, Artificial Sequence
  Description of Artificial Sequence: Synthetic oligonucleotide
  Target: PCSK9; (+) strand; PAM type: NRG; PAM sequence: CAG
ctcccaaagtgctcgaatta

SEQ ID NO: 14001 - DNA, 20 bp, Artificial Sequence
  Description of Artificial Sequence: Synthetic oligonucleotide
  Target: PCSK9; (+) strand; PAM type: NRG; PAM sequence: AGG
tcccaaagtgctcgaattac

SEQ ID NO: 14002 - DNA, 20 bp, Artificial Sequence
  Description of Artificial Sequence: Synthetic oligonucleotide
  Target: PCSK9; (+) strand; PAM type: NRG; PAM sequence: GAG
agtgctcgaattacaggtgt

SEQ ID NO: 14003 - DNA, 20 bp, Artificial Sequence
  Description of Artificial Sequence: Synthetic oligonucleotide
  Target: PCSK9; (+) strand; PAM type: NRG; PAM sequence: TGG
caggtgtgagccaccacgcc

SEQ ID NO: 14004 - DNA, 20 bp, Artificial Sequence
  Description of Artificial Sequence: Synthetic oligonucleotide
  Target: PCSK9; (+) strand; PAM type: NRG; PAM sequence: CAG
gccaccacgcctggcctcca

SEQ ID NO: 14005 - DNA, 20 bp, Artificial Sequence
  Description of Artificial Sequence: Synthetic oligonucleotide
  Target: PCSK9; (+) strand; PAM type: NRG; PAM sequence: AAG
taaaatgttacgaaaaccaa

SEQ ID NO: 14006 - DNA, 20 bp, Artificial Sequence
  Description of Artificial Sequence: Synthetic oligonucleotide
  Target: PCSK9; (+) strand; PAM type: NRG; PAM sequence: TGG
tttttttgtgatttatttga

SEQ ID NO: 14007 - DNA, 20 bp, Artificial Sequence
  Description of Artificial Sequence: Synthetic oligonucleotide
  Target: PCSK9; (+) strand; PAM type: NRG; PAM sequence: TAG
ttttgtgatttatttgatgg

SEQ ID NO: 14008 - DNA, 20 bp, Artificial Sequence
  Description of Artificial Sequence: Synthetic oligonucleotide
  Target: PCSK9; (+) strand; PAM type: NRG; PAM sequence: GAG
cacctgacgtgaactgacat

SEQ ID NO: 14009 - DNA, 20 bp, Artificial Sequence
  Description of Artificial Sequence: Synthetic oligonucleotide
  Target: PCSK9; (+) strand; PAM type: NRG; PAM sequence: TAG
acatgagattatttttaatt

SEQ ID NO: 14010 - DNA, 20 bp, Artificial Sequence
  Description of Artificial Sequence: Synthetic oligonucleotide
  Target: PCSK9; (+) strand; PAM type: NRG; PAM sequence: TAG
tattcatatattttgctgca

SEQ ID NO: 14011 - DNA, 20 bp, Artificial Sequence
  Description of Artificial Sequence: Synthetic oligonucleotide
  Target: PCSK9; (+) strand; PAM type: NRG; PAM sequence: CAG
atattttgctgcatagatta

SEQ ID NO: 14012 - DNA, 20 bp, Artificial Sequence
  Description of Artificial Sequence: Synthetic oligonucleotide
  Target: PCSK9; (+) strand; PAM type: NRG; PAM sequence: CAG
gctgcatagattacagtatg

SEQ ID NO: 14013 - DNA, 20 bp, Artificial Sequence
  Description of Artificial Sequence: Synthetic oligonucleotide
  Target: PCSK9; (+) strand; PAM type: NRG; PAM sequence: CAG
tagattacagtatgcagctc

SEQ ID NO: 14014 - DNA, 20 bp, Artificial Sequence
  Description of Artificial Sequence: Synthetic oligonucleotide
  Target: PCSK9; (+) strand; PAM type: NRG; PAM sequence: AAG
atgcagctccagattcttcc

SEQ ID NO: 14015 - DNA, 20 bp, Artificial Sequence
  Description of Artificial Sequence: Synthetic oligonucleotide
  Target: PCSK9; (+) strand; PAM type: NRG; PAM sequence: CAG
cagctccagattcttccaag

SEQ ID NO: 14016 - DNA, 20 bp, Artificial Sequence
  Description of Artificial Sequence: Synthetic oligonucleotide
  Target: PCSK9; (+) strand; PAM type: NRG; PAM sequence: AAG
tgcctttctaaaatccaaac

SEQ ID NO: 14017 - DNA, 20 bp, Artificial Sequence
  Description of Artificial Sequence: Synthetic oligonucleotide
  Target: PCSK9; (+) strand; PAM type: NRG; PAM sequence: GAG
ctaaaatccaaacaagttct

SEQ ID NO: 14018 - DNA, 20 bp, Artificial Sequence
  Description of Artificial Sequence: Synthetic oligonucleotide
  Target: PCSK9; (+) strand; PAM type: NRG; PAM sequence: AGG
taaaatccaaacaagttctg

SEQ ID NO: 14019 - DNA, 20 bp, Artificial Sequence
  Description of Artificial Sequence: Synthetic oligonucleotide
  Target: PCSK9; (+) strand; PAM type: NRG; PAM sequence: TGG
tctgaggttcaaaaccgttt

SEQ ID NO: 14020 - DNA, 20 bp, Artificial Sequence
  Description of Artificial Sequence: Synthetic oligonucleotide
  Target: PCSK9; (+) strand; PAM type: NRG; PAM sequence: AAG
ttcaaaaccgttttggccct

SEQ ID NO: 14021 - DNA, 20 bp, Artificial Sequence
  Description of Artificial Sequence: Synthetic oligonucleotide
  Target: PCSK9; (+) strand; PAM type: NRG; PAM sequence: AGG
tcaaaaccgttttggcccta

SEQ ID NO: 14022 - DNA, 20 bp, Artificial Sequence
  Description of Artificial Sequence: Synthetic oligonucleotide
  Target: PCSK9; (+) strand; PAM type: NRG; PAM sequence: TGG
ccgttttggccctaaggctt

SEQ ID NO: 14023 - DNA, 20 bp, Artificial Sequence
  Description of Artificial Sequence: Synthetic oligonucleotide
  Target: PCSK9; (+) strand; PAM type: NRG; PAM sequence: GGG
cgttttggccctaaggcttt

SEQ ID NO: 14024 - DNA, 20 bp, Artificial Sequence
  Description of Artificial Sequence: Synthetic oligonucleotide
  Target: PCSK9; (+) strand; PAM type: NRG; PAM sequence: AAG
tggccctaaggctttgggta

SEQ ID NO: 14025 - DNA, 20 bp, Artificial Sequence
  Description of Artificial Sequence: Synthetic oligonucleotide
  Target: PCSK9; (+) strand; PAM type: NRG; PAM sequence: AGG
ggccctaaggctttgggtaa

SEQ ID NO: 14026 - DNA, 20 bp, Artificial Sequence
  Description of Artificial Sequence: Synthetic oligonucleotide
  Target: PCSK9; (+) strand; PAM type: NRG; PAM sequence: GGG
gccctaaggctttgggtaaa

SEQ ID NO: 14027 - DNA, 20 bp, Artificial Sequence
  Description of Artificial Sequence: Synthetic oligonucleotide
  Target: PCSK9; (+) strand; PAM type: NRG; PAM sequence: GGG
ccctaaggctttgggtaaag

SEQ ID NO: 14028 - DNA, 20 bp, Artificial Sequence
  Description of Artificial Sequence: Synthetic oligonucleotide
  Target: PCSK9; (+) strand; PAM type: NRG; PAM sequence: GGG
cctaaggctttgggtaaagg

SEQ ID NO: 14029 - DNA, 20 bp, Artificial Sequence
  Description of Artificial Sequence: Synthetic oligonucleotide
  Target: PCSK9; (+) strand; PAM type: NRG; PAM sequence: TGG
aaggctttgggtaaaggggg

SEQ ID NO: 14030 - DNA, 20 bp, Artificial Sequence
  Description of Artificial Sequence: Synthetic oligonucleotide
  Target: PCSK9; (+) strand; PAM type: NRG; PAM sequence: TGG
ggactctgttctactctgac

SEQ ID NO: 14031 - DNA, 20 bp, Artificial Sequence
  Description of Artificial Sequence: Synthetic oligonucleotide
  Target: PCSK9; (+) strand; PAM type: NRG; PAM sequence: GAG
actctgttctactctgactg

SEQ ID NO: 14032 - DNA, 20 bp, Artificial Sequence
  Description of Artificial Sequence: Synthetic oligonucleotide
  Target: PCSK9; (+) strand; PAM type: NRG; PAM sequence: AAG
ttctactctgactggagtcc

SEQ ID NO: 14033 - DNA, 20 bp, Artificial Sequence
  Description of Artificial Sequence: Synthetic oligonucleotide
  Target: PCSK9; (+) strand; PAM type: NRG; PAM sequence: CAG
gagtccaagatgcatatata

SEQ ID NO: 14034 - DNA, 20 bp, Artificial Sequence
  Description of Artificial Sequence: Synthetic oligonucleotide
  Target: PCSK9; (+) strand; PAM type: NRG; PAM sequence: GAG
gtccaagatgcatatataca

SEQ ID NO: 14035 - DNA, 20 bp, Artificial Sequence
  Description of Artificial Sequence: Synthetic oligonucleotide
  Target: PCSK9; (+) strand; PAM type: NRG; PAM sequence: TGG
gatgcatatatacagagata

SEQ ID NO: 14036 - DNA, 20 bp, Artificial Sequence
  Description of Artificial Sequence: Synthetic oligonucleotide
  Target: PCSK9; (+) strand; PAM type: NRG; PAM sequence: GGG
atgcatatatacagagatat

SEQ ID NO: 14037 - DNA, 20 bp, Artificial Sequence
  Description of Artificial Sequence: Synthetic oligonucleotide
  Target: PCSK9; (+) strand; PAM type: NRG; PAM sequence: TGG
atatacagagatatgggtga

SEQ ID NO: 14038 - DNA, 20 bp, Artificial Sequence
  Description of Artificial Sequence: Synthetic oligonucleotide
  Target: PCSK9; (+) strand; PAM type: NRG; PAM sequence: GGG
tatacagagatatgggtgat

SEQ ID NO: 14039 - DNA, 20 bp, Artificial Sequence
  Description of Artificial Sequence: Synthetic oligonucleotide
  Target: PCSK9; (+) strand; PAM type: NRG; PAM sequence: GGG
atacagagatatgggtgatg

SEQ ID NO: 14040 - DNA, 20 bp, Artificial Sequence
  Description of Artificial Sequence: Synthetic oligonucleotide
  Target: PCSK9; (+) strand; PAM type: NRG; PAM sequence: AAG
gatatgggtgatggggctgc

SEQ ID NO: 14041 - DNA, 20 bp, Artificial Sequence
  Description of Artificial Sequence: Synthetic oligonucleotide
  Target: PCSK9; (+) strand; PAM type: NRG; PAM sequence: AGG
atatgggtgatggggctgca

SEQ ID NO: 14042 - DNA, 20 bp, Artificial Sequence
  Description of Artificial Sequence: Synthetic oligonucleotide
  Target: PCSK9; (+) strand; PAM type: NRG; PAM sequence: TAG
tgggtgatggggctgcaagg

SEQ ID NO: 14043 - DNA, 20 bp, Artificial Sequence
  Description of Artificial Sequence: Synthetic oligonucleotide
  Target: PCSK9; (+) strand; PAM type: NRG; PAM sequence: AGG
gggtgatggggctgcaaggt

SEQ ID NO: 14044 - DNA, 20 bp, Artificial Sequence
  Description of Artificial Sequence: Synthetic oligonucleotide
  Target: PCSK9; (+) strand; PAM type: NRG; PAM sequence: GAG
atggggctgcaaggtaggtt

SEQ ID NO: 14045 - DNA, 20 bp, Artificial Sequence
  Description of Artificial Sequence: Synthetic oligonucleotide
  Target: PCSK9; (+) strand; PAM type: NRG; PAM sequence: AGG
tggggctgcaaggtaggttg

SEQ ID NO: 14046 - DNA, 20 bp, Artificial Sequence
  Description of Artificial Sequence: Synthetic oligonucleotide
  Target: PCSK9; (+) strand; PAM type: NRG; PAM sequence: TAG
ggctgcaaggtaggttgagg

SEQ ID NO: 14047 - DNA, 20 bp, Artificial Sequence
  Description of Artificial Sequence: Synthetic oligonucleotide
  Target: PCSK9; (+) strand; PAM type: NRG; PAM sequence: AGG
gctgcaaggtaggttgaggt

SEQ ID NO: 14048 - DNA, 20 bp, Artificial Sequence
  Description of Artificial Sequence: Synthetic oligonucleotide
  Target: PCSK9; (+) strand; PAM type: NRG; PAM sequence: GGG
ctgcaaggtaggttgaggta

SEQ ID NO: 14049 - DNA, 20 bp, Artificial Sequence
  Description of Artificial Sequence: Synthetic oligonucleotide
  Target: PCSK9; (+) strand; PAM type: NRG; PAM sequence: GGG
tgcaaggtaggttgaggtag

SEQ ID NO: 14050 - DNA, 20 bp, Artificial Sequence
  Description of Artificial Sequence: Synthetic oligonucleotide
  Target: PCSK9; (+) strand; PAM type: NRG; PAM sequence: AAG
ggtaggttgaggtaggggcc

SEQ ID NO: 14051 - DNA, 20 bp, Artificial Sequence
  Description of Artificial Sequence: Synthetic oligonucleotide
  Target: PCSK9; (+) strand; PAM type: NRG; PAM sequence: AGG
gtaggttgaggtaggggcca

SEQ ID NO: 14052 - DNA, 20 bp, Artificial Sequence
  Description of Artificial Sequence: Synthetic oligonucleotide
  Target: PCSK9; (+) strand; PAM type: NRG; PAM sequence: GAG
aggttgaggtaggggccaag

SEQ ID NO: 14053 - DNA, 20 bp, Artificial Sequence
  Description of Artificial Sequence: Synthetic oligonucleotide
  Target: PCSK9; (+) strand; PAM type: NRG; PAM sequence: AGG
ggttgaggtaggggccaagg

SEQ ID NO: 14054 - DNA, 20 bp, Artificial Sequence
  Description of Artificial Sequence: Synthetic oligonucleotide
  Target: PCSK9; (+) strand; PAM type: NRG; PAM sequence: GAG
ttgaggtaggggccaaggag

SEQ ID NO: 14055 - DNA, 20 bp, Artificial Sequence
  Description of Artificial Sequence: Synthetic oligonucleotide
  Target: PCSK9; (+) strand; PAM type: NRG; PAM sequence: TGG
gtaggggccaaggaggagca

SEQ ID NO: 14056 - DNA, 20 bp, Artificial Sequence
  Description of Artificial Sequence: Synthetic oligonucleotide
  Target: PCSK9; (+) strand; PAM type: NRG; PAM sequence: GAG
aggggccaaggaggagcatg

SEQ ID NO: 14057 - DNA, 20 bp, Artificial Sequence
  Description of Artificial Sequence: Synthetic oligonucleotide
  Target: PCSK9; (+) strand; PAM type: NRG; PAM sequence: TGG
ccaaggaggagcatggagtt

SEQ ID NO: 14058 - DNA, 20 bp, Artificial Sequence
  Description of Artificial Sequence: Synthetic oligonucleotide
  Target: PCSK9; (+) strand; PAM type: NRG; PAM sequence: GAG
ggagtttggacttgattcat

SEQ ID NO: 14059 - DNA, 20 bp, Artificial Sequence
  Description of Artificial Sequence: Synthetic oligonucleotide
  Target: PCSK9; (+) strand; PAM type: NRG; PAM sequence: AGG
gagtttggacttgattcatg

SEQ ID NO: 14060 - DNA, 20 bp, Artificial Sequence
  Description of Artificial Sequence: Synthetic oligonucleotide
  Target: PCSK9; (+) strand; PAM type: NRG; PAM sequence: TGG
ggacttgattcatgaggctg

SEQ ID NO: 14061 - DNA, 20 bp, Artificial Sequence
  Description of Artificial Sequence: Synthetic oligonucleotide
  Target: PCSK9; (+) strand; PAM type: NRG; PAM sequence: GGG
gacttgattcatgaggctgt

SEQ ID NO: 14062 - DNA, 20 bp, Artificial Sequence
  Description of Artificial Sequence: Synthetic oligonucleotide
  Target: PCSK9; (+) strand; PAM type: NRG; PAM sequence: GGG
acttgattcatgaggctgtg

SEQ ID NO: 14063 - DNA, 20 bp, Artificial Sequence
  Description of Artificial Sequence: Synthetic oligonucleotide
  Target: PCSK9; (+) strand; PAM type: NRG; PAM sequence: GAG
ttgattcatgaggctgtggg

SEQ ID NO: 14064 - DNA, 20 bp, Artificial Sequence
  Description of Artificial Sequence: Synthetic oligonucleotide
  Target: PCSK9; (+) strand; PAM type: NRG; PAM sequence: CAG
ttcatgaggctgtggggagc

SEQ ID NO: 14065 - DNA, 20 bp, Artificial Sequence
  Description of Artificial Sequence: Synthetic oligonucleotide
  Target: PCSK9; (+) strand; PAM type: NRG; PAM sequence: AAG
gaggctgtggggagccagtg

SEQ ID NO: 14066 - DNA, 20 bp, Artificial Sequence
  Description of Artificial Sequence: Synthetic oligonucleotide
  Target: PCSK9; (+) strand; PAM type: NRG; PAM sequence: AGG
aggctgtggggagccagtga

SEQ ID NO: 14067 - DNA, 20 bp, Artificial Sequence
  Description of Artificial Sequence: Synthetic oligonucleotide
  Target: PCSK9; (+) strand; PAM type: NRG; PAM sequence: AAG
gggagccagtgaaggttctt

SEQ ID NO: 14068 - DNA, 20 bp, Artificial Sequence
  Description of Artificial Sequence: Synthetic oligonucleotide
  Target: PCSK9; (+) strand; PAM type: NRG; PAM sequence: CAG
agccagtgaaggttcttaag

SEQ ID NO: 14069 - DNA, 20 bp, Artificial Sequence
  Description of Artificial Sequence: Synthetic oligonucleotide
  Target: PCSK9; (+) strand; PAM type: NRG; PAM sequence: AGG
gccagtgaaggttcttaagc

SEQ ID NO: 14070 - DNA, 20 bp, Artificial Sequence
  Description of Artificial Sequence: Synthetic oligonucleotide
  Target: PCSK9; (+) strand; PAM type: NRG; PAM sequence: GAG
ttaagcaggtatgtctgcct

SEQ ID NO: 14071 - DNA, 20 bp, Artificial Sequence
  Description of Artificial Sequence: Synthetic oligonucleotide
  Target: PCSK9; (+) strand; PAM type: NRG; PAM sequence: GAG
aagcaggtatgtctgcctga

SEQ ID NO: 14072 - DNA, 20 bp, Artificial Sequence
  Description of Artificial Sequence: Synthetic oligonucleotide
  Target: PCSK9; (+) strand; PAM type: NRG; PAM sequence: CAG
caggtatgtctgcctgagag

SEQ ID NO: 14073 - DNA, 20 bp, Artificial Sequence
  Description of Artificial Sequence: Synthetic oligonucleotide
  Target: PCSK9; (+) strand; PAM type: NRG; PAM sequence: TGG
tatgtctgcctgagagcagt

SEQ ID NO: 14074 - DNA, 20 bp, Artificial Sequence
  Description of Artificial Sequence: Synthetic oligonucleotide
  Target: PCSK9; (+) strand; PAM type: NRG; PAM sequence: GAG
tgtctgcctgagagcagttg

SEQ ID NO: 14075 - DNA, 20 bp, Artificial Sequence
  Description of Artificial Sequence: Synthetic oligonucleotide
  Target: PCSK9; (+) strand; PAM type: NRG; PAM sequence: CAG
ctgcctgagagcagttggag

SEQ ID NO: 14076 - DNA, 20 bp, Artificial Sequence
  Description of Artificial Sequence: Synthetic oligonucleotide
  Target: PCSK9; (+) strand; PAM type: NRG; PAM sequence: AAG
tgagagcagttggagcagac

SEQ ID NO: 14077 - DNA, 20 bp, Artificial Sequence
  Description of Artificial Sequence: Synthetic oligonucleotide
  Target: PCSK9; (+) strand; PAM type: NRG; PAM sequence: GAG
agagcagttggagcagacaa

SEQ ID NO: 14078 - DNA, 20 bp, Artificial Sequence
  Description of Artificial Sequence: Synthetic oligonucleotide
  Target: PCSK9; (+) strand; PAM type: NRG; PAM sequence: TAG
aaaaaccaaacaaatcacca

SEQ ID NO: 14079 - DNA, 20 bp, Artificial Sequence
  Description of Artificial Sequence: Synthetic oligonucleotide
  Target: PCSK9; (+) strand; PAM type: NRG; PAM sequence: TAG
accaaacaaatcaccataga

SEQ ID NO: 14080 - DNA, 20 bp, Artificial Sequence
  Description of Artificial Sequence: Synthetic oligonucleotide
  Target: PCSK9; (+) strand; PAM type: NRG; PAM sequence: TGG
aaacaaatcaccatagatag

SEQ ID NO: 14081 - DNA, 20 bp, Artificial Sequence
  Description of Artificial Sequence: Synthetic oligonucleotide
  Target: PCSK9; (+) strand; PAM type: NRG; PAM sequence: TGG
tgtcccctccaaatctcatg

SEQ ID NO: 14082 - DNA, 20 bp, Artificial Sequence
  Description of Artificial Sequence: Synthetic oligonucleotide
  Target: PCSK9; (+) strand; PAM type: NRG; PAM sequence: TGG
ccaaatctcatgtggaaatt

SEQ ID NO: 14083 - DNA, 20 bp, Artificial Sequence
  Description of Artificial Sequence: Synthetic oligonucleotide
  Target: PCSK9; (+) strand; PAM type: NRG; PAM sequence: CAG
tcatgtggaaatttggtcct

SEQ ID NO: 14084 - DNA, 20 bp, Artificial Sequence
  Description of Artificial Sequence: Synthetic oligonucleotide
  Target: PCSK9; (+) strand; PAM type: NRG; PAM sequence: TGG
ggaaatttggtcctcagtgt

SEQ ID NO: 14085 - DNA, 20 bp, Artificial Sequence
  Description of Artificial Sequence: Synthetic oligonucleotide
  Target: PCSK9; (+) strand; PAM type: NRG; PAM sequence: AAG
aatttggtcctcagtgttgg

SEQ ID NO: 14086 - DNA, 20 bp, Artificial Sequence
  Description of Artificial Sequence: Synthetic oligonucleotide
  Target: PCSK9; (+) strand; PAM type: NRG; PAM sequence: TGG
ttggtcctcagtgttggaag

SEQ ID NO: 14087 - DNA, 20 bp, Artificial Sequence
  Description of Artificial Sequence: Synthetic oligonucleotide
  Target: PCSK9; (+) strand; PAM type: NRG; PAM sequence: GGG
tggtcctcagtgttggaagt

SEQ ID NO: 14088 - DNA, 20 bp, Artificial Sequence
  Description of Artificial Sequence: Synthetic oligonucleotide
  Target: PCSK9; (+) strand; PAM type: NRG; PAM sequence: GGG
ggtcctcagtgttggaagtg

SEQ ID NO: 14089 - DNA, 20 bp, Artificial Sequence
  Description of Artificial Sequence: Synthetic oligonucleotide
  Target: PCSK9; (+) strand; PAM type: NRG; PAM sequence: TGG
gtgttggaagtggggcctaa

SEQ ID NO: 14090 - DNA, 20 bp, Artificial Sequence
  Description of Artificial Sequence: Synthetic oligonucleotide
  Target: PCSK9; (+) strand; PAM type: NRG; PAM sequence: GGG
tgttggaagtggggcctaat

SEQ ID NO: 14091 - DNA, 20 bp, Artificial Sequence
  Description of Artificial Sequence: Synthetic oligonucleotide
  Target: PCSK9; (+) strand; PAM type: NRG; PAM sequence: GAG
ttggaagtggggcctaatgg

SEQ ID NO: 14092 - DNA, 20 bp, Artificial Sequence
  Description of Artificial Sequence: Synthetic oligonucleotide
  Target: PCSK9; (+) strand; PAM type: NRG; PAM sequence: AGG
tggaagtggggcctaatggg

SEQ ID NO: 14093 - DNA, 20 bp, Artificial Sequence
  Description of Artificial Sequence: Synthetic oligonucleotide
  Target: PCSK9; (+) strand; PAM type: NRG; PAM sequence: TGG
ggggcctaatgggaggtgtt

SEQ ID NO: 14094 - DNA, 20 bp, Artificial Sequence
  Description of Artificial Sequence: Synthetic oligonucleotide
  Target: PCSK9; (+) strand; PAM type: NRG; PAM sequence: GGG
gggcctaatgggaggtgttt

SEQ ID NO: 14095 - DNA, 20 bp, Artificial Sequence
  Description of Artificial Sequence: Synthetic oligonucleotide
  Target: PCSK9; (+) strand; PAM type: NRG; PAM sequence: TGG
aatgggaggtgtttgggtca

SEQ ID NO: 14096 - DNA, 20 bp, Artificial Sequence
  Description of Artificial Sequence: Synthetic oligonucleotide
  Target: PCSK9; (+) strand; PAM type: NRG; PAM sequence: GGG
atgggaggtgtttgggtcat

SEQ ID NO: 14097 - DNA, 20 bp, Artificial Sequence
  Description of Artificial Sequence: Synthetic oligonucleotide
  Target: PCSK9; (+) strand; PAM type: NRG; PAM sequence: GGG
tgggaggtgtttgggtcatg

SEQ ID NO: 14098 - DNA, 20 bp, Artificial Sequence
  Description of Artificial Sequence: Synthetic oligonucleotide
  Target: PCSK9; (+) strand; PAM type: NRG; PAM sequence: GGG
gggaggtgtttgggtcatgg

SEQ ID NO: 14099 - DNA, 20 bp, Artificial Sequence
  Description of Artificial Sequence: Synthetic oligonucleotide
  Target: PCSK9; (+) strand; PAM type: NRG; PAM sequence: GAG
gaggtgtttgggtcatgggg

SEQ ID NO: 14100 - DNA, 20 bp, Artificial Sequence
  Description of Artificial Sequence: Synthetic oligonucleotide
  Target: PCSK9; (+) strand; PAM type: NRG; PAM sequence: AGG
aggtgtttgggtcatggggg

SEQ ID NO: 14101 - DNA, 20 bp, Artificial Sequence
  Description of Artificial Sequence: Synthetic oligonucleotide
  Target: PCSK9; (+) strand; PAM type: NRG; PAM sequence: AAG
tgggggaggaacccctgtga

SEQ ID NO: 14102 - DNA, 20 bp, Artificial Sequence
  Description of Artificial Sequence: Synthetic oligonucleotide
  Target: PCSK9; (+) strand; PAM type: NRG; PAM sequence: AGG
gggggaggaacccctgtgaa

SEQ ID NO: 14103 - DNA, 20 bp, Artificial Sequence
  Description of Artificial Sequence: Synthetic oligonucleotide
  Target: PCSK9; (+) strand; PAM type: NRG; PAM sequence: TGG
aggaacccctgtgaaaggct

SEQ ID NO: 14104 - DNA, 20 bp, Artificial Sequence
  Description of Artificial Sequence: Synthetic oligonucleotide
  Target: PCSK9; (+) strand; PAM type: NRG; PAM sequence: GAG
ggtgccgtccttgtgataat

SEQ ID NO: 14105 - DNA, 20 bp, Artificial Sequence
  Description of Artificial Sequence: Synthetic oligonucleotide
  Target: PCSK9; (+) strand; PAM type: NRG; PAM sequence: AAG
ccgtccttgtgataatgagt

SEQ ID NO: 14106 - DNA, 20 bp, Artificial Sequence
  Description of Artificial Sequence: Synthetic oligonucleotide
  Target: PCSK9; (+) strand; PAM type: NRG; PAM sequence: AAG
tcccgctatgatttcccttg

SEQ ID NO: 14107 - DNA, 20 bp, Artificial Sequence
  Description of Artificial Sequence: Synthetic oligonucleotide
  Target: PCSK9; (+) strand; PAM type: NRG; PAM sequence: AGG
cccgctatgatttcccttga

SEQ ID NO: 14108 - DNA, 20 bp, Artificial Sequence
  Description of Artificial Sequence: Synthetic oligonucleotide
  Target: PCSK9; (+) strand; PAM type: NRG; PAM sequence: AAG
cttgaaggctgattattaaa

SEQ ID NO: 14109 - DNA, 20 bp, Artificial Sequence
  Description of Artificial Sequence: Synthetic oligonucleotide
  Target: PCSK9; (+) strand; PAM type: NRG; PAM sequence: GAG
tgaaggctgattattaaaaa

SEQ ID NO: 14110 - DNA, 20 bp, Artificial Sequence
  Description of Artificial Sequence: Synthetic oligonucleotide
  Target: PCSK9; (+) strand; PAM type: NRG; PAM sequence: TGG
gctgattattaaaaagagct

SEQ ID NO: 14111 - DNA, 20 bp, Artificial Sequence
  Description of Artificial Sequence: Synthetic oligonucleotide
  Target: PCSK9; (+) strand; PAM type: NRG; PAM sequence: TAG
gtgattgatctctgcacatg

SEQ ID NO: 14112 - DNA, 20 bp, Artificial Sequence
  Description of Artificial Sequence: Synthetic oligonucleotide
  Target: PCSK9; (+) strand; PAM type: NRG; PAM sequence: AGG
tgattgatctctgcacatgt

SEQ ID NO: 14113 - DNA, 20 bp, Artificial Sequence
  Description of Artificial Sequence: Synthetic oligonucleotide
  Target: PCSK9; (+) strand; PAM type: NRG; PAM sequence: CAG
tccccttcaccttctgccat

SEQ ID NO: 14114 - DNA, 20 bp, Artificial Sequence
  Description of Artificial Sequence: Synthetic oligonucleotide
  Target: PCSK9; (+) strand; PAM type: NRG; PAM sequence: AAG
tcaccttctgccatcagtga

SEQ ID NO: 14115 - DNA, 20 bp, Artificial Sequence
  Description of Artificial Sequence: Synthetic oligonucleotide
  Target: PCSK9; (+) strand; PAM type: NRG; PAM sequence: CAG
ccttctgccatcagtgaaag

SEQ ID NO: 14116 - DNA, 20 bp, Artificial Sequence
  Description of Artificial Sequence: Synthetic oligonucleotide
  Target: PCSK9; (+) strand; PAM type: NRG; PAM sequence: AAG
gccatcagtgaaagcagctt

SEQ ID NO: 14117 - DNA, 20 bp, Artificial Sequence
  Description of Artificial Sequence: Synthetic oligonucleotide
  Target: PCSK9; (+) strand; PAM type: NRG; PAM sequence: AGG
ccatcagtgaaagcagctta

SEQ ID NO: 14118 - DNA, 20 bp, Artificial Sequence
  Description of Artificial Sequence: Synthetic oligonucleotide
  Target: PCSK9; (+) strand; PAM type: NRG; PAM sequence: CAG
aagcagcttaaggccctcac

SEQ ID NO: 14119 - DNA, 20 bp, Artificial Sequence
  Description of Artificial Sequence: Synthetic oligonucleotide
  Target: PCSK9; (+) strand; PAM type: NRG; PAM sequence: AAG
cagcttaaggccctcaccag

SEQ ID NO: 14120 - DNA, 20 bp, Artificial Sequence
  Description of Artificial Sequence: Synthetic oligonucleotide
  Target: PCSK9; (+) strand; PAM type: NRG; PAM sequence: CAG
cttaaggccctcaccagaag

SEQ ID NO: 14121 - DNA, 20 bp, Artificial Sequence
  Description of Artificial Sequence: Synthetic oligonucleotide
  Target: PCSK9; (+) strand; PAM type: NRG; PAM sequence: TGG
ccctcaccagaagcagatgc

SEQ ID NO: 14122 - DNA, 20 bp, Artificial Sequence
  Description of Artificial Sequence: Synthetic oligonucleotide
  Target: PCSK9; (+) strand; PAM type: NRG; PAM sequence: TGG
gatgctggtgccatgcttcc

SEQ ID NO: 14123 - DNA, 20 bp, Artificial Sequence
  Description of Artificial Sequence: Synthetic oligonucleotide
  Target: PCSK9; (+) strand; PAM type: NRG; PAM sequence: GAG
tgctggtgccatgcttcctg

SEQ ID NO: 14124 - DNA, 20 bp, Artificial Sequence
  Description of Artificial Sequence: Synthetic oligonucleotide
  Target: PCSK9; (+) strand; PAM type: NRG; PAM sequence: GAG
ctggtgccatgcttcctgga

SEQ ID NO: 14125 - DNA, 20 bp, Artificial Sequence
  Description of Artificial Sequence: Synthetic oligonucleotide
  Target: PCSK9; (+) strand; PAM type: NRG; PAM sequence: CAG
catgcttcctggagagcttg

SEQ ID NO: 14126 - DNA, 20 bp, Artificial Sequence
  Description of Artificial Sequence: Synthetic oligonucleotide
  Target: PCSK9; (+) strand; PAM type: NRG; PAM sequence: GAG
tggagagcttgcagaatcat

SEQ ID NO: 14127 - DNA, 20 bp, Artificial Sequence
  Description of Artificial Sequence: Synthetic oligonucleotide
  Target: PCSK9; (+) strand; PAM type: NRG; PAM sequence: CAG
ccttgtaaattactcacctt

SEQ ID NO: 14128 - DNA, 20 bp, Artificial Sequence
  Description of Artificial Sequence: Synthetic oligonucleotide
  Target: PCSK9; (+) strand; PAM type: NRG; PAM sequence: AGG
cttgtaaattactcaccttc

SEQ ID NO: 14129 - DNA, 20 bp, Artificial Sequence
  Description of Artificial Sequence: Synthetic oligonucleotide
  Target: PCSK9; (+) strand; PAM type: NRG; PAM sequence: TAG
ccttcaggtattcctttata

SEQ ID NO: 14130 - DNA, 20 bp, Artificial Sequence
  Description of Artificial Sequence: Synthetic oligonucleotide
  Target: PCSK9; (+) strand; PAM type: NRG; PAM sequence: AAG
tcctttatatagcaacacaa

SEQ ID NO: 14131 - DNA, 20 bp, Artificial Sequence
  Description of Artificial Sequence: Synthetic oligonucleotide
  Target: PCSK9; (+) strand; PAM type: NRG; PAM sequence: AGG
cctttatatagcaacacaaa

SEQ ID NO: 14132 - DNA, 20 bp, Artificial Sequence
  Description of Artificial Sequence: Synthetic oligonucleotide
  Target: PCSK9; (+) strand; PAM type: NRG; PAM sequence: AAG
tatagcaacacaaaaggact

SEQ ID NO: 14133 - DNA, 20 bp, Artificial Sequence
  Description of Artificial Sequence: Synthetic oligonucleotide
  Target: PCSK9; (+) strand; PAM type: NRG; PAM sequence: CAG
gcaacacaaaaggactaaga

SEQ ID NO: 14134 - DNA, 20 bp, Artificial Sequence
  Description of Artificial Sequence: Synthetic oligonucleotide
  Target: PCSK9; (+) strand; PAM type: NRG; PAM sequence: TGG
acacaaaaggactaagacag

SEQ ID NO: 14135 - DNA, 20 bp, Artificial Sequence
  Description of Artificial Sequence: Synthetic oligonucleotide
  Target: PCSK9; (+) strand; PAM type: NRG; PAM sequence: AAG
cttgacttttctctctcttt

SEQ ID NO: 14136 - DNA, 20 bp, Artificial Sequence
  Description of Artificial Sequence: Synthetic oligonucleotide
  Target: PCSK9; (+) strand; PAM type: NRG; PAM sequence: AAG
gacttttctctctctttaag

SEQ ID NO: 14137 - DNA, 20 bp, Artificial Sequence
  Description of Artificial Sequence: Synthetic oligonucleotide
  Target: PCSK9; (+) strand; PAM type: NRG; PAM sequence: TAG
aagtgttgcctttgctcact

SEQ ID NO: 14138 - DNA, 20 bp, Artificial Sequence
  Description of Artificial Sequence: Synthetic oligonucleotide
  Target: PCSK9; (+) strand; PAM type: NRG; PAM sequence: TAG
atcccttctgcctgcatttg

SEQ ID NO: 14139 - DNA, 20 bp, Artificial Sequence
  Description of Artificial Sequence: Synthetic oligonucleotide
  Target: PCSK9; (+) strand; PAM type: NRG; PAM sequence: GAG
cccttctgcctgcatttgta

SEQ ID NO: 14140 - DNA, 20 bp, Artificial Sequence
  Description of Artificial Sequence: Synthetic oligonucleotide
  Target: PCSK9; (+) strand; PAM type: NRG; PAM sequence: TGG
gcctgcatttgtagagcatc

SEQ ID NO: 14141 - DNA, 20 bp, Artificial Sequence
  Description of Artificial Sequence: Synthetic oligonucleotide
  Target: PCSK9; (+) strand; PAM type: NRG; PAM sequence: TGG
gcatttgtagagcatctgga

SEQ ID NO: 14142 - DNA, 20 bp, Artificial Sequence
  Description of Artificial Sequence: Synthetic oligonucleotide
  Target: PCSK9; (+) strand; PAM type: NRG; PAM sequence: GGG
catttgtagagcatctggat

SEQ ID NO: 14143 - DNA, 20 bp, Artificial Sequence
  Description of Artificial Sequence: Synthetic oligonucleotide
  Target: PCSK9; (+) strand; PAM type: NRG; PAM sequence: GAG
tttgtagagcatctggatgg

SEQ ID NO: 14144 - DNA, 20 bp, Artificial Sequence
  Description of Artificial Sequence: Synthetic oligonucleotide
  Target: PCSK9; (+) strand; PAM type: NRG; PAM sequence: CAG
accgtcactcttgactttcc

SEQ ID NO: 14145 - DNA, 20 bp, Artificial Sequence
  Description of Artificial Sequence: Synthetic oligonucleotide
  Target: PCSK9; (+) strand; PAM type: NRG; PAM sequence: CAG
gtcactcttgactttcccag

SEQ ID NO: 14146 - DNA, 20 bp, Artificial Sequence
  Description of Artificial Sequence: Synthetic oligonucleotide
  Target: PCSK9; (+) strand; PAM type: NRG; PAM sequence: AGG
tcactcttgactttcccagc

SEQ ID NO: 14147 - DNA, 20 bp, Artificial Sequence
  Description of Artificial Sequence: Synthetic oligonucleotide
  Target: PCSK9; (+) strand; PAM type: NRG; PAM sequence: TAG
ttcccagcaggcctatgtca

SEQ ID NO: 14148 - DNA, 20 bp, Artificial Sequence
  Description of Artificial Sequence: Synthetic oligonucleotide
  Target: PCSK9; (+) strand; PAM type: NRG; PAM sequence: AGG
tcccagcaggcctatgtcat

SEQ ID NO: 14149 - DNA, 20 bp, Artificial Sequence
  Description of Artificial Sequence: Synthetic oligonucleotide
  Target: PCSK9; (+) strand; PAM type: NRG; PAM sequence: TGG
ggcctatgtcataggtactg

SEQ ID NO: 14150 - DNA, 20 bp, Artificial Sequence
  Description of Artificial Sequence: Synthetic oligonucleotide
  Target: PCSK9; (+) strand; PAM type: NRG; PAM sequence: CAG
gtactgtggtctctacaata

SEQ ID NO: 14151 - DNA, 20 bp, Artificial Sequence
  Description of Artificial Sequence: Synthetic oligonucleotide
  Target: PCSK9; (+) strand; PAM type: NRG; PAM sequence: CAG
ctgtggtctctacaatacag

SEQ ID NO: 14152 - DNA, 20 bp, Artificial Sequence
  Description of Artificial Sequence: Synthetic oligonucleotide
  Target: PCSK9; (+) strand; PAM type: NRG; PAM sequence: GAG
gtggtctctacaatacagca

SEQ ID NO: 14153 - DNA, 20 bp, Artificial Sequence
  Description of Artificial Sequence: Synthetic oligonucleotide
  Target: PCSK9; (+) strand; PAM type: NRG; PAM sequence: AGG
tggtctctacaatacagcag

SEQ ID NO: 14154 - DNA, 20 bp, Artificial Sequence
  Description of Artificial Sequence: Synthetic oligonucleotide
  Target: PCSK9; (+) strand; PAM type: NRG; PAM sequence: GAG
acaatacagcagaggtatct

SEQ ID NO: 14155 - DNA, 20 bp, Artificial Sequence
  Description of Artificial Sequence: Synthetic oligonucleotide
  Target: PCSK9; (+) strand; PAM type: NRG; PAM sequence: AGG
caatacagcagaggtatctg

SEQ ID NO: 14156 - DNA, 20 bp, Artificial Sequence
  Description of Artificial Sequence: Synthetic oligonucleotide
  Target: PCSK9; (+) strand; PAM type: NRG; PAM sequence: GAG
gcagaggtatctgaggctcc

SEQ ID NO: 14157 - DNA, 20 bp, Artificial Sequence
  Description of Artificial Sequence: Synthetic oligonucleotide
  Target: PCSK9; (+) strand; PAM type: NRG; PAM sequence: GAG
agaggtatctgaggctccga

SEQ ID NO: 14158 - DNA, 20 bp, Artificial Sequence
  Description of Artificial Sequence: Synthetic oligonucleotide
  Target: PCSK9; (+) strand; PAM type: NRG; PAM sequence: AGG
gaggtatctgaggctccgag

SEQ ID NO: 14159 - DNA, 20 bp, Artificial Sequence
  Description of Artificial Sequence: Synthetic oligonucleotide
  Target: PCSK9; (+) strand; PAM type: NRG; PAM sequence: GAG
atctgaggctccgagaggtt

SEQ ID NO: 14160 - DNA, 20 bp, Artificial Sequence
  Description of Artificial Sequence: Synthetic oligonucleotide
  Target: PCSK9; (+) strand; PAM type: NRG; PAM sequence: TGG
gaggttgagtgacttgctca

SEQ ID NO: 14161 - DNA, 20 bp, Artificial Sequence
  Description of Artificial Sequence: Synthetic oligonucleotide
  Target: PCSK9; (+) strand; PAM type: NRG; PAM sequence: CAG
cttgctcatggctgcacaac

SEQ ID NO: 14162 - DNA, 20 bp, Artificial Sequence
  Description of Artificial Sequence: Synthetic oligonucleotide
  Target: PCSK9; (+) strand; PAM type: NRG; PAM sequence: TGG
gctgcacaaccagtaaatat

SEQ ID NO: 14163 - DNA, 20 bp, Artificial Sequence
  Description of Artificial Sequence: Synthetic oligonucleotide
  Target: PCSK9; (+) strand; PAM type: NRG; PAM sequence: GAG
tgcacaaccagtaaatattg

SEQ ID NO: 14164 - DNA, 20 bp, Artificial Sequence
  Description of Artificial Sequence: Synthetic oligonucleotide
  Target: PCSK9; (+) strand; PAM type: NRG; PAM sequence: TGG
caaccagtaaatattggagc

SEQ ID NO: 14165 - DNA, 20 bp, Artificial Sequence
  Description of Artificial Sequence: Synthetic oligonucleotide
  Target: PCSK9; (+) strand; PAM type: NRG; PAM sequence: CAG
taaatattggagctggaatt

SEQ ID NO: 14166 - DNA, 20 bp, Artificial Sequence
  Description of Artificial Sequence: Synthetic oligonucleotide
  Target: PCSK9; (+) strand; PAM type: NRG; PAM sequence: AGG
aaatattggagctggaattc

SEQ ID NO: 14167 - DNA, 20 bp, Artificial Sequence
  Description of Artificial Sequence: Synthetic oligonucleotide
  Target: PCSK9; (+) strand; PAM type: NRG; PAM sequence: CGG
ggagctggaattcaggtcca

SEQ ID NO: 14168 - DNA, 20 bp, Artificial Sequence
  Description of Artificial Sequence: Synthetic oligonucleotide
  Target: PCSK9; (+) strand; PAM type: NRG; PAM sequence: TGG
aattcaggtccacggtttcc

SEQ ID NO: 14169 - DNA, 20 bp, Artificial Sequence
  Description of Artificial Sequence: Synthetic oligonucleotide
  Target: PCSK9; (+) strand; PAM type: NRG; PAM sequence: AAG
tccacggtttcctggctcca

SEQ ID NO: 14170 - DNA, 20 bp, Artificial Sequence
  Description of Artificial Sequence: Synthetic oligonucleotide
  Target: PCSK9; (+) strand; PAM type: NRG; PAM sequence: TGG
ttccctcaatttattctgac

SEQ ID NO: 14171 - DNA, 20 bp, Artificial Sequence
  Description of Artificial Sequence: Synthetic oligonucleotide
  Target: PCSK9; (+) strand; PAM type: NRG; PAM sequence: GGG
tccctcaatttattctgact

SEQ ID NO: 14172 - DNA, 20 bp, Artificial Sequence
  Description of Artificial Sequence: Synthetic oligonucleotide
  Target: PCSK9; (+) strand; PAM type: NRG; PAM sequence: GGG
ccctcaatttattctgactg

SEQ ID NO: 14173 - DNA, 20 bp, Artificial Sequence
  Description of Artificial Sequence: Synthetic oligonucleotide
  Target: PCSK9; (+) strand; PAM type: NRG; PAM sequence: TGG
aatttattctgactggggca

SEQ ID NO: 14174 - DNA, 20 bp, Artificial Sequence
  Description of Artificial Sequence: Synthetic oligonucleotide
  Target: PCSK9; (+) strand; PAM type: NRG; PAM sequence: GGG
atttattctgactggggcat

SEQ ID NO: 14175 - DNA, 20 bp, Artificial Sequence
  Description of Artificial Sequence: Synthetic oligonucleotide
  Target: PCSK9; (+) strand; PAM type: NRG; PAM sequence: GGG
tttattctgactggggcatg

SEQ ID NO: 14176 - DNA, 20 bp, Artificial Sequence
  Description of Artificial Sequence: Synthetic oligonucleotide
  Target: PCSK9; (+) strand; PAM type: NRG; PAM sequence: GGG
ttattctgactggggcatgg

SEQ ID NO: 14177 - DNA, 20 bp, Artificial Sequence
  Description of Artificial Sequence: Synthetic oligonucleotide
  Target: PCSK9; (+) strand; PAM type: NRG; PAM sequence: GAG
attctgactggggcatgggg

SEQ ID NO: 14178 - DNA, 20 bp, Artificial Sequence
  Description of Artificial Sequence: Synthetic oligonucleotide
  Target: PCSK9; (+) strand; PAM type: NRG; PAM sequence: AGG
ttctgactggggcatggggg

SEQ ID NO: 14179 - DNA, 20 bp, Artificial Sequence
  Description of Artificial Sequence: Synthetic oligonucleotide
  Target: PCSK9; (+) strand; PAM type: NRG; PAM sequence: GGG
tctgactggggcatggggga

SEQ ID NO: 14180 - DNA, 20 bp, Artificial Sequence
  Description of Artificial Sequence: Synthetic oligonucleotide
  Target: PCSK9; (+) strand; PAM type: NRG; PAM sequence: GGG
ctgactggggcatgggggag

SEQ ID NO: 14181 - DNA, 20 bp, Artificial Sequence
  Description of Artificial Sequence: Synthetic oligonucleotide
  Target: PCSK9; (+) strand; PAM type: NRG; PAM sequence: GGG
tgactggggcatgggggagg

SEQ ID NO: 14182 - DNA, 20 bp, Artificial Sequence
  Description of Artificial Sequence: Synthetic oligonucleotide
  Target: PCSK9; (+) strand; PAM type: NRG; PAM sequence: TGG
ctggggcatgggggaggggg

SEQ ID NO: 14183 - DNA, 20 bp, Artificial Sequence
  Description of Artificial Sequence: Synthetic oligonucleotide
  Target: PCSK9; (+) strand; PAM type: NRG; PAM sequence: TGG
atgggggagggggtggcctt

SEQ ID NO: 14184 - DNA, 20 bp, Artificial Sequence
  Description of Artificial Sequence: Synthetic oligonucleotide
  Target: PCSK9; (+) strand; PAM type: NRG; PAM sequence: GGG
tgggggagggggtggccttt

SEQ ID NO: 14185 - DNA, 20 bp, Artificial Sequence
  Description of Artificial Sequence: Synthetic oligonucleotide
  Target: PCSK9; (+) strand; PAM type: NRG; PAM sequence: CAG
gggagggggtggcctttggg

SEQ ID NO: 14186 - DNA, 20 bp, Artificial Sequence
  Description of Artificial Sequence: Synthetic oligonucleotide
  Target: PCSK9; (+) strand; PAM type: NRG; PAM sequence: AGG
ggagggggtggcctttgggc

SEQ ID NO: 14187 - DNA, 20 bp, Artificial Sequence
  Description of Artificial Sequence: Synthetic oligonucleotide
  Target: PCSK9; (+) strand; PAM type: NRG; PAM sequence: GGG
gagggggtggcctttgggca

SEQ ID NO: 14188 - DNA, 20 bp, Artificial Sequence
  Description of Artificial Sequence: Synthetic oligonucleotide
  Target: PCSK9; (+) strand; PAM type: NRG; PAM sequence: CAG
tggcctttgggcagggccac

SEQ ID NO: 14189 - DNA, 20 bp, Artificial Sequence
  Description of Artificial Sequence: Synthetic oligonucleotide
  Target: PCSK9; (+) strand; PAM type: NRG; PAM sequence: AGG
ggcctttgggcagggccacc

SEQ ID NO: 14190 - DNA, 20 bp, Artificial Sequence
  Description of Artificial Sequence: Synthetic oligonucleotide
  Target: PCSK9; (+) strand; PAM type: NRG; PAM sequence: GAG
cctttgggcagggccaccag

SEQ ID NO: 14191 - DNA, 20 bp, Artificial Sequence
  Description of Artificial Sequence: Synthetic oligonucleotide
  Target: PCSK9; (+) strand; PAM type: NRG; PAM sequence: CAG
gcagggccaccaggagcgac

SEQ ID NO: 14192 - DNA, 20 bp, Artificial Sequence
  Description of Artificial Sequence: Synthetic oligonucleotide
  Target: PCSK9; (+) strand; PAM type: NRG; PAM sequence: AGG
cagggccaccaggagcgacc

SEQ ID NO: 14193 - DNA, 20 bp, Artificial Sequence
  Description of Artificial Sequence: Synthetic oligonucleotide
  Target: PCSK9; (+) strand; PAM type: NRG; PAM sequence: TAG
accaggagcgaccaggcccg

SEQ ID NO: 14194 - DNA, 20 bp, Artificial Sequence
  Description of Artificial Sequence: Synthetic oligonucleotide
  Target: PCSK9; (+) strand; PAM type: NRG; PAM sequence: GAG
caggagcgaccaggcccgta

SEQ ID NO: 14195 - DNA, 20 bp, Artificial Sequence
  Description of Artificial Sequence: Synthetic oligonucleotide
  Target: PCSK9; (+) strand; PAM type: NRG; PAM sequence: GAG
ggagcgaccaggcccgtaga

SEQ ID NO: 14196 - DNA, 20 bp, Artificial Sequence
  Description of Artificial Sequence: Synthetic oligonucleotide
  Target: PCSK9; (+) strand; PAM type: NRG; PAM sequence: TGG
cgaccaggcccgtagagagc

SEQ ID NO: 14197 - DNA, 20 bp, Artificial Sequence
  Description of Artificial Sequence: Synthetic oligonucleotide
  Target: PCSK9; (+) strand; PAM type: NRG; PAM sequence: GGG
gaccaggcccgtagagagct

SEQ ID NO: 14198 - DNA, 20 bp, Artificial Sequence
  Description of Artificial Sequence: Synthetic oligonucleotide
  Target: PCSK9; (+) strand; PAM type: NRG; PAM sequence: CAG
ggcccgtagagagctgggtg

SEQ ID NO: 14199 - DNA, 20 bp, Artificial Sequence
  Description of Artificial Sequence: Synthetic oligonucleotide
  Target: PCSK9; (+) strand; PAM type: NRG; PAM sequence: AGG
gcccgtagagagctgggtgc

SEQ ID NO: 14200 - DNA, 20 bp, Artificial Sequence
  Description of Artificial Sequence: Synthetic oligonucleotide
  Target: PCSK9; (+) strand; PAM type: NRG; PAM sequence: CAG
tagagagctgggtgcaggta

SEQ ID NO: 14201 - DNA, 20 bp, Artificial Sequence
  Description of Artificial Sequence: Synthetic oligonucleotide
  Target: PCSK9; (+) strand; PAM type: NRG; PAM sequence: GAG
gagagctgggtgcaggtaca

SEQ ID NO: 14202 - DNA, 20 bp, Artificial Sequence
  Description of Artificial Sequence: Synthetic oligonucleotide
  Target: PCSK9; (+) strand; PAM type: NRG; PAM sequence: AGG
agagctgggtgcaggtacag

SEQ ID NO: 14203 - DNA, 20 bp, Artificial Sequence
  Description of Artificial Sequence: Synthetic oligonucleotide
  Target: PCSK9; (+) strand; PAM type: NRG; PAM sequence: GAG
acagaggaaaacctgttgtc

SEQ ID NO: 14204 - DNA, 20 bp, Artificial Sequence
  Description of Artificial Sequence: Synthetic oligonucleotide
  Target: PCSK9; (+) strand; PAM type: NRG; PAM sequence: TGG
ggaaaacctgttgtcgagtg

SEQ ID NO: 14205 - DNA, 20 bp, Artificial Sequence
  Description of Artificial Sequence: Synthetic oligonucleotide
  Target: PCSK9; (+) strand; PAM type: NRG; PAM sequence: TAG
ctgttgtcgagtgtggcccg

SEQ ID NO: 14206 - DNA, 20 bp, Artificial Sequence
  Description of Artificial Sequence: Synthetic oligonucleotide
  Target: PCSK9; (+) strand; PAM type: NRG; PAM sequence: TGG
agttcccatttttgcctgaa

SEQ ID NO: 14207 - DNA, 20 bp, Artificial Sequence
  Description of Artificial Sequence: Synthetic oligonucleotide
  Target: PCSK9; (+) strand; PAM type: NRG; PAM sequence: AAG
tgcctgaatggcacatttga

SEQ ID NO: 14208 - DNA, 20 bp, Artificial Sequence
  Description of Artificial Sequence: Synthetic oligonucleotide
  Target: PCSK9; (+) strand; PAM type: NRG; PAM sequence: TAG
tataaccatgtgaataataa

SEQ ID NO: 14209 - DNA, 20 bp, Artificial Sequence
  Description of Artificial Sequence: Synthetic oligonucleotide
  Target: PCSK9; (+) strand; PAM type: NRG; PAM sequence: TGG
accatgtgaataataatagt

SEQ ID NO: 14210 - DNA, 20 bp, Artificial Sequence
  Description of Artificial Sequence: Synthetic oligonucleotide
  Target: PCSK9; (+) strand; PAM type: NRG; PAM sequence: GAG
taataatagttggcctatat

SEQ ID NO: 14211 - DNA, 20 bp, Artificial Sequence
  Description of Artificial Sequence: Synthetic oligonucleotide
  Target: PCSK9; (+) strand; PAM type: NRG; PAM sequence: TGG
gagttctttaatttgctttt

SEQ ID NO: 14212 - DNA, 20 bp, Artificial Sequence
  Description of Artificial Sequence: Synthetic oligonucleotide
  Target: PCSK9; (+) strand; PAM type: NRG; PAM sequence: TGG
tttgctttttggtccgcatt

SEQ ID NO: 14213 - DNA, 20 bp, Artificial Sequence
  Description of Artificial Sequence: Synthetic oligonucleotide
  Target: PCSK9; (+) strand; PAM type: NRG; PAM sequence: AAG
tctcttttgttgtaatttgt

SEQ ID NO: 14214 - DNA, 20 bp, Artificial Sequence
  Description of Artificial Sequence: Synthetic oligonucleotide
  Target: PCSK9; (+) strand; PAM type: NRG; PAM sequence: TAG
cttttgttgtaatttgtaag

SEQ ID NO: 14215 - DNA, 20 bp, Artificial Sequence
  Description of Artificial Sequence: Synthetic oligonucleotide
  Target: PCSK9; (+) strand; PAM type: NRG; PAM sequence: AGG
ttttgttgtaatttgtaagt

SEQ ID NO: 14216 - DNA, 20 bp, Artificial Sequence
  Description of Artificial Sequence: Synthetic oligonucleotide
  Target: PCSK9; (+) strand; PAM type: NRG; PAM sequence: GGG
tttgttgtaatttgtaagta

SEQ ID NO: 14217 - DNA, 20 bp, Artificial Sequence
  Description of Artificial Sequence: Synthetic oligonucleotide
  Target: PCSK9; (+) strand; PAM type: NRG; PAM sequence: GGG
ttgttgtaatttgtaagtag

SEQ ID NO: 14218 - DNA, 20 bp, Artificial Sequence
  Description of Artificial Sequence: Synthetic oligonucleotide
  Target: PCSK9; (+) strand; PAM type: NRG; PAM sequence: GAG
tgtaatttgtaagtaggggt

SEQ ID NO: 14219 - DNA, 20 bp, Artificial Sequence
  Description of Artificial Sequence: Synthetic oligonucleotide
  Target: PCSK9; (+) strand; PAM type: NRG; PAM sequence: AAG
ttgtaagtaggggtgagata

SEQ ID NO: 14220 - DNA, 20 bp, Artificial Sequence
  Description of Artificial Sequence: Synthetic oligonucleotide
  Target: PCSK9; (+) strand; PAM type: NRG; PAM sequence: TAG
ggggtgagataaagtacacc

SEQ ID NO: 14221 - DNA, 20 bp, Artificial Sequence
  Description of Artificial Sequence: Synthetic oligonucleotide
  Target: PCSK9; (+) strand; PAM type: NRG; PAM sequence: AGG
gggtgagataaagtacacct

SEQ ID NO: 14222 - DNA, 20 bp, Artificial Sequence
  Description of Artificial Sequence: Synthetic oligonucleotide
  Target: PCSK9; (+) strand; PAM type: NRG; PAM sequence: GGG
ggtgagataaagtacaccta

SEQ ID NO: 14223 - DNA, 20 bp, Artificial Sequence
  Description of Artificial Sequence: Synthetic oligonucleotide
  Target: PCSK9; (+) strand; PAM type: NRG; PAM sequence: TGG
aaagtacacctagggtttgc

SEQ ID NO: 14224 - DNA, 20 bp, Artificial Sequence
  Description of Artificial Sequence: Synthetic oligonucleotide
  Target: PCSK9; (+) strand; PAM type: NRG; PAM sequence: GGG
aagtacacctagggtttgct

SEQ ID NO: 14225 - DNA, 20 bp, Artificial Sequence
  Description of Artificial Sequence: Synthetic oligonucleotide
  Target: PCSK9; (+) strand; PAM type: NRG; PAM sequence: TGG
tcatcatgttcctccttgca

SEQ ID NO: 14226 - DNA, 20 bp, Artificial Sequence
  Description of Artificial Sequence: Synthetic oligonucleotide
  Target: PCSK9; (+) strand; PAM type: NRG; PAM sequence: GGG
catcatgttcctccttgcat

SEQ ID NO: 14227 - DNA, 20 bp, Artificial Sequence
  Description of Artificial Sequence: Synthetic oligonucleotide
  Target: PCSK9; (+) strand; PAM type: NRG; PAM sequence: GGG
atcatgttcctccttgcatg

SEQ ID NO: 14228 - DNA, 20 bp, Artificial Sequence
  Description of Artificial Sequence: Synthetic oligonucleotide
  Target: PCSK9; (+) strand; PAM type: NRG; PAM sequence: CAG
tgttcctccttgcatggggc

SEQ ID NO: 14229 - DNA, 20 bp, Artificial Sequence
  Description of Artificial Sequence: Synthetic oligonucleotide
  Target: PCSK9; (+) strand; PAM type: NRG; PAM sequence: AGG
gttcctccttgcatggggcc

SEQ ID NO: 14230 - DNA, 20 bp, Artificial Sequence
  Description of Artificial Sequence: Synthetic oligonucleotide
  Target: PCSK9; (+) strand; PAM type: NRG; PAM sequence: TGG
ttgcatggggccaggatccg

SEQ ID NO: 14231 - DNA, 20 bp, Artificial Sequence
  Description of Artificial Sequence: Synthetic oligonucleotide
  Target: PCSK9; (+) strand; PAM type: NRG; PAM sequence: GAG
gcatggggccaggatccgtg

SEQ ID NO: 14232 - DNA, 20 bp, Artificial Sequence
  Description of Artificial Sequence: Synthetic oligonucleotide
  Target: PCSK9; (+) strand; PAM type: NRG; PAM sequence: AGG
catggggccaggatccgtgg

SEQ ID NO: 14233 - DNA, 20 bp, Artificial Sequence
  Description of Artificial Sequence: Synthetic oligonucleotide
  Target: PCSK9; (+) strand; PAM type: NRG; PAM sequence: TGG
caggatccgtggaggttgcc

SEQ ID NO: 14234 - DNA, 20 bp, Artificial Sequence
  Description of Artificial Sequence: Synthetic oligonucleotide
  Target: PCSK9; (+) strand; PAM type: NRG; PAM sequence: TGG
gaggttgcctggcacctacg

SEQ ID NO: 14235 - DNA, 20 bp, Artificial Sequence
  Description of Artificial Sequence: Synthetic oligonucleotide
  Target: PCSK9; (+) strand; PAM type: NRG; PAM sequence: TGG
gttgcctggcacctacgtgg

SEQ ID NO: 14236 - DNA, 20 bp, Artificial Sequence
  Description of Artificial Sequence: Synthetic oligonucleotide
  Target: PCSK9; (+) strand; PAM type: NRG; PAM sequence: AAG
gcacctacgtggtggtgctg

SEQ ID NO: 14237 - DNA, 20 bp, Artificial Sequence
  Description of Artificial Sequence: Synthetic oligonucleotide
  Target: PCSK9; (+) strand; PAM type: NRG; PAM sequence: AGG
cacctacgtggtggtgctga

SEQ ID NO: 14238 - DNA, 20 bp, Artificial Sequence
  Description of Artificial Sequence: Synthetic oligonucleotide
  Target: PCSK9; (+) strand; PAM type: NRG; PAM sequence: GAG
cctacgtggtggtgctgaag

SEQ ID NO: 14239 - DNA, 20 bp, Artificial Sequence
  Description of Artificial Sequence: Synthetic oligonucleotide
  Target: PCSK9; (+) strand; PAM type: NRG; PAM sequence: AGG
ctacgtggtggtgctgaagg

SEQ ID NO: 14240 - DNA, 20 bp, Artificial Sequence
  Description of Artificial Sequence: Synthetic oligonucleotide
  Target: PCSK9; (+) strand; PAM type: NRG; PAM sequence: GAG
acgtggtggtgctgaaggag

SEQ ID NO: 14241 - DNA, 20 bp, Artificial Sequence
  Description of Artificial Sequence: Synthetic oligonucleotide
  Target: PCSK9; (+) strand; PAM type: NRG; PAM sequence: CAG
aggaggagacccacctctcg

SEQ ID NO: 14242 - DNA, 20 bp, Artificial Sequence
  Description of Artificial Sequence: Synthetic oligonucleotide
  Target: PCSK9; (+) strand; PAM type: NRG; PAM sequence: CAG
ggagacccacctctcgcagt

SEQ ID NO: 14243 - DNA, 20 bp, Artificial Sequence
  Description of Artificial Sequence: Synthetic oligonucleotide
  Target: PCSK9; (+) strand; PAM type: NRG; PAM sequence: GAG
agacccacctctcgcagtca

SEQ ID NO: 14244 - DNA, 20 bp, Artificial Sequence
  Description of Artificial Sequence: Synthetic oligonucleotide
  Target: PCSK9; (+) strand; PAM type: NRG; PAM sequence: CAG
agcgcactgcccgccgcctg

SEQ ID NO: 14245 - DNA, 20 bp, Artificial Sequence
  Description of Artificial Sequence: Synthetic oligonucleotide
  Target: PCSK9; (+) strand; PAM type: NRG; PAM sequence: AGG
gcgcactgcccgccgcctgc

SEQ ID NO: 14246 - DNA, 20 bp, Artificial Sequence
  Description of Artificial Sequence: Synthetic oligonucleotide
  Target: PCSK9; (+) strand; PAM type: NRG; PAM sequence: CAG
ctgcccgccgcctgcaggcc

SEQ ID NO: 14247 - DNA, 20 bp, Artificial Sequence
  Description of Artificial Sequence: Synthetic oligonucleotide
  Target: PCSK9; (+) strand; PAM type: NRG; PAM sequence: AGG
tgcccgccgcctgcaggccc

SEQ ID NO: 14248 - DNA, 20 bp, Artificial Sequence
  Description of Artificial Sequence: Synthetic oligonucleotide
  Target: PCSK9; (+) strand; PAM type: NRG; PAM sequence: CGG
tgcaggcccaggctgcccgc

SEQ ID NO: 14249 - DNA, 20 bp, Artificial Sequence
  Description of Artificial Sequence: Synthetic oligonucleotide
  Target: PCSK9; (+) strand; PAM type: NRG; PAM sequence: GGG
gcaggcccaggctgcccgcc

SEQ ID NO: 14250 - DNA, 20 bp, Artificial Sequence
  Description of Artificial Sequence: Synthetic oligonucleotide
  Target: PCSK9; (+) strand; PAM type: NRG; PAM sequence: GGG
caggcccaggctgcccgccg

SEQ ID NO: 14251 - DNA, 20 bp, Artificial Sequence
  Description of Artificial Sequence: Synthetic oligonucleotide
  Target: PCSK9; (+) strand; PAM type: NRG; PAM sequence: AAG
cccgccggggatacctcacc

SEQ ID NO: 14252 - DNA, 20 bp, Artificial Sequence
  Description of Artificial Sequence: Synthetic oligonucleotide
  Target: PCSK9; (+) strand; PAM type: NRG; PAM sequence: TGG
aagatcctgcatgtcttcca

SEQ ID NO: 14253 - DNA, 20 bp, Artificial Sequence
  Description of Artificial Sequence: Synthetic oligonucleotide
  Target: PCSK9; (+) strand; PAM type: NRG; PAM sequence: TGG
gtcttccatggccttcttcc

SEQ ID NO: 14254 - DNA, 20 bp, Artificial Sequence
  Description of Artificial Sequence: Synthetic oligonucleotide
  Target: PCSK9; (+) strand; PAM type: NRG; PAM sequence: TGG
tggccttcttcctggcttcc

SEQ ID NO: 14255 - DNA, 20 bp, Artificial Sequence
  Description of Artificial Sequence: Synthetic oligonucleotide
  Target: PCSK9; (+) strand; PAM type: NRG; PAM sequence: AAG
ttcttcctggcttcctggtg

SEQ ID NO: 14256 - DNA, 20 bp, Artificial Sequence
  Description of Artificial Sequence: Synthetic oligonucleotide
  Target: PCSK9; (+) strand; PAM type: NRG; PAM sequence: GAG
cctggcttcctggtgaagat

SEQ ID NO: 14257 - DNA, 20 bp, Artificial Sequence
  Description of Artificial Sequence: Synthetic oligonucleotide
  Target: PCSK9; (+) strand; PAM type: NRG; PAM sequence: TGG
ggcttcctggtgaagatgag

SEQ ID NO: 14258 - DNA, 20 bp, Artificial Sequence
  Description of Artificial Sequence: Synthetic oligonucleotide
  Target: PCSK9; (+) strand; PAM type: NRG; PAM sequence: TGG
gaagatgagtggcgacctgc

SEQ ID NO: 14259 - DNA, 20 bp, Artificial Sequence
  Description of Artificial Sequence: Synthetic oligonucleotide
  Target: PCSK9; (+) strand; PAM type: NRG; PAM sequence: GAG
agatgagtggcgacctgctg

SEQ ID NO: 14260 - DNA, 20 bp, Artificial Sequence
  Description of Artificial Sequence: Synthetic oligonucleotide
  Target: PCSK9; (+) strand; PAM type: NRG; PAM sequence: TGG
gagtggcgacctgctggagc

SEQ ID NO: 14261 - DNA, 20 bp, Artificial Sequence
  Description of Artificial Sequence: Synthetic oligonucleotide
  Target: PCSK9; (+) strand; PAM type: NRG; PAM sequence: GAG
ggcgacctgctggagctggt

SEQ ID NO: 14262 - DNA, 20 bp, Artificial Sequence
  Description of Artificial Sequence: Synthetic oligonucleotide
  Target: PCSK9; (+) strand; PAM type: NRG; PAM sequence: TGG
agctggtgagccaccctttt

SEQ ID NO: 14263 - DNA, 20 bp, Artificial Sequence
  Description of Artificial Sequence: Synthetic oligonucleotide
  Target: PCSK9; (+) strand; PAM type: NRG; PAM sequence: GGG
gctggtgagccacccttttt

SEQ ID NO: 14264 - DNA, 20 bp, Artificial Sequence
  Description of Artificial Sequence: Synthetic oligonucleotide
  Target: PCSK9; (+) strand; PAM type: NRG; PAM sequence: TGG
tgagccaccctttttgggaa

SEQ ID NO: 14265 - DNA, 20 bp, Artificial Sequence
  Description of Artificial Sequence: Synthetic oligonucleotide
  Target: PCSK9; (+) strand; PAM type: NRG; PAM sequence: TAG
ttgggaatggcacttcctga

SEQ ID NO: 14266 - DNA, 20 bp, Artificial Sequence
  Description of Artificial Sequence: Synthetic oligonucleotide
  Target: PCSK9; (+) strand; PAM type: NRG; PAM sequence: AGG
tgggaatggcacttcctgat

SEQ ID NO: 14267 - DNA, 20 bp, Artificial Sequence
  Description of Artificial Sequence: Synthetic oligonucleotide
  Target: PCSK9; (+) strand; PAM type: NRG; PAM sequence: GGG
gggaatggcacttcctgata

SEQ ID NO: 14268 - DNA, 20 bp, Artificial Sequence
  Description of Artificial Sequence: Synthetic oligonucleotide
  Target: PCSK9; (+) strand; PAM type: NRG; PAM sequence: TGG
atggcacttcctgatagggc

SEQ ID NO: 14269 - DNA, 20 bp, Artificial Sequence
  Description of Artificial Sequence: Synthetic oligonucleotide
  Target: PCSK9; (+) strand; PAM type: NRG; PAM sequence: GGG
tggcacttcctgatagggct

SEQ ID NO: 14270 - DNA, 20 bp, Artificial Sequence
  Description of Artificial Sequence: Synthetic oligonucleotide
  Target: PCSK9; (+) strand; PAM type: NRG; PAM sequence: TGG
ctgggccactgcatatacac

SEQ ID NO: 14271 - DNA, 20 bp, Artificial Sequence
  Description of Artificial Sequence: Synthetic oligonucleotide
  Target: PCSK9; (+) strand; PAM type: NRG; PAM sequence: GGG
tgggccactgcatatacact

SEQ ID NO: 14272 - DNA, 20 bp, Artificial Sequence
  Description of Artificial Sequence: Synthetic oligonucleotide
  Target: PCSK9; (+) strand; PAM type: NRG; PAM sequence: GGG
gggccactgcatatacactg

SEQ ID NO: 14273 - DNA, 20 bp, Artificial Sequence
  Description of Artificial Sequence: Synthetic oligonucleotide
  Target: PCSK9; (+) strand; PAM type: NRG; PAM sequence: TAG
tatacactggggactgtgct

SEQ ID NO: 14274 - DNA, 20 bp, Artificial Sequence
  Description of Artificial Sequence: Synthetic oligonucleotide
  Target: PCSK9; (+) strand; PAM type: NRG; PAM sequence: TAG
acactggggactgtgcttag

SEQ ID NO: 14275 - DNA, 20 bp, Artificial Sequence
  Description of Artificial Sequence: Synthetic oligonucleotide
  Target: PCSK9; (+) strand; PAM type: NRG; PAM sequence: AGG
cactggggactgtgcttagt

SEQ ID NO: 14276 - DNA, 20 bp, Artificial Sequence
  Description of Artificial Sequence: Synthetic oligonucleotide
  Target: PCSK9; (+) strand; PAM type: NRG; PAM sequence: CAG
gtaggcccattgctgaaaat

SEQ ID NO: 14277 - DNA, 20 bp, Artificial Sequence
  Description of Artificial Sequence: Synthetic oligonucleotide
  Target: PCSK9; (+) strand; PAM type: NRG; PAM sequence: AAG
ggcccattgctgaaaatcag

SEQ ID NO: 14278 - DNA, 20 bp, Artificial Sequence
  Description of Artificial Sequence: Synthetic oligonucleotide
  Target: PCSK9; (+) strand; PAM type: NRG; PAM sequence: AGG
gcccattgctgaaaatcaga

SEQ ID NO: 14279 - DNA, 20 bp, Artificial Sequence
  Description of Artificial Sequence: Synthetic oligonucleotide
  Target: PCSK9; (+) strand; PAM type: NRG; PAM sequence: GGG
cccattgctgaaaatcagaa

SEQ ID NO: 14280 - DNA, 20 bp, Artificial Sequence
  Description of Artificial Sequence: Synthetic oligonucleotide
  Target: PCSK9; (+) strand; PAM type: NRG; PAM sequence: GGG
ccattgctgaaaatcagaag

SEQ ID NO: 14281 - DNA, 20 bp, Artificial Sequence
  Description of Artificial Sequence: Synthetic oligonucleotide
  Target: PCSK9; (+) strand; PAM type: NRG; PAM sequence: CAG
tgctgaaaatcagaagggga

SEQ ID NO: 14282 - DNA, 20 bp, Artificial Sequence
  Description of Artificial Sequence: Synthetic oligonucleotide
  Target: PCSK9; (+) strand; PAM type: NRG; PAM sequence: AAG
gaaaatcagaaggggacagc

SEQ ID NO: 14283 - DNA, 20 bp, Artificial Sequence
  Description of Artificial Sequence: Synthetic oligonucleotide
  Target: PCSK9; (+) strand; PAM type: NRG; PAM sequence: GAG
ggggacagcaagtatgtatt

SEQ ID NO: 14284 - DNA, 20 bp, Artificial Sequence
  Description of Artificial Sequence: Synthetic oligonucleotide
  Target: PCSK9; (+) strand; PAM type: NRG; PAM sequence: CGG
agtatgtattgagcacttat

SEQ ID NO: 14285 - DNA, 20 bp, Artificial Sequence
  Description of Artificial Sequence: Synthetic oligonucleotide
  Target: PCSK9; (+) strand; PAM type: NRG; PAM sequence: GGG
gtatgtattgagcacttatc

SEQ ID NO: 14286 - DNA, 20 bp, Artificial Sequence
  Description of Artificial Sequence: Synthetic oligonucleotide
  Target: PCSK9; (+) strand; PAM type: NRG; PAM sequence: AAG
ttgagcacttatcgggtacc

SEQ ID NO: 14287 - DNA, 20 bp, Artificial Sequence
  Description of Artificial Sequence: Synthetic oligonucleotide
  Target: PCSK9; (+) strand; PAM type: NRG; PAM sequence: CAG
cacttatcgggtaccaagca

SEQ ID NO: 14288 - DNA, 20 bp, Artificial Sequence
  Description of Artificial Sequence: Synthetic oligonucleotide
  Target: PCSK9; (+) strand; PAM type: NRG; PAM sequence: TGG
gtaccaagcacagtaactac

SEQ ID NO: 14289 - DNA, 20 bp, Artificial Sequence
  Description of Artificial Sequence: Synthetic oligonucleotide
  Target: PCSK9; (+) strand; PAM type: NRG; PAM sequence: TAG
gtaactactggctttctgta

SEQ ID NO: 14290 - DNA, 20 bp, Artificial Sequence
  Description of Artificial Sequence: Synthetic oligonucleotide
  Target: PCSK9; (+) strand; PAM type: NRG; PAM sequence: AAG
ttctgtatagaattcccttt

SEQ ID NO: 14291 - DNA, 20 bp, Artificial Sequence
  Description of Artificial Sequence: Synthetic oligonucleotide
  Target: PCSK9; (+) strand; PAM type: NRG; PAM sequence: TGG
tatagaattccctttaagcc

SEQ ID NO: 14292 - DNA, 20 bp, Artificial Sequence
  Description of Artificial Sequence: Synthetic oligonucleotide
  Target: PCSK9; (+) strand; PAM type: NRG; PAM sequence: CAG
ctttaagcctggccatgccc

SEQ ID NO: 14293 - DNA, 20 bp, Artificial Sequence
  Description of Artificial Sequence: Synthetic oligonucleotide
  Target: PCSK9; (+) strand; PAM type: NRG; PAM sequence: TGG
taagcctggccatgccccag

SEQ ID NO: 14294 - DNA, 20 bp, Artificial Sequence
  Description of Artificial Sequence: Synthetic oligonucleotide
  Target: PCSK9; (+) strand; PAM type: NRG; PAM sequence: AAG
gtacgtctatcttcatttga

SEQ ID NO: 14295 - DNA, 20 bp, Artificial Sequence
  Description of Artificial Sequence: Synthetic oligonucleotide
  Target: PCSK9; (+) strand; PAM type: NRG; PAM sequence: GAG
tctatcttcatttgaaagac

SEQ ID NO: 14296 - DNA, 20 bp, Artificial Sequence
  Description of Artificial Sequence: Synthetic oligonucleotide
  Target: PCSK9; (+) strand; PAM type: NRG; PAM sequence: AGG
ctatcttcatttgaaagacg

SEQ ID NO: 14297 - DNA, 20 bp, Artificial Sequence
  Description of Artificial Sequence: Synthetic oligonucleotide
  Target: PCSK9; (+) strand; PAM type: NRG; PAM sequence: GAG
atcttcatttgaaagacgag

SEQ ID NO: 14298 - DNA, 20 bp, Artificial Sequence
  Description of Artificial Sequence: Synthetic oligonucleotide
  Target: PCSK9; (+) strand; PAM type: NRG; PAM sequence: AAG
tttgaaagacgaggagactg

SEQ ID NO: 14299 - DNA, 20 bp, Artificial Sequence
  Description of Artificial Sequence: Synthetic oligonucleotide
  Target: PCSK9; (+) strand; PAM type: NRG; PAM sequence: CAG
aagacgaggagactgaagtt

SEQ ID NO: 14300 - DNA, 20 bp, Artificial Sequence
  Description of Artificial Sequence: Synthetic oligonucleotide
  Target: PCSK9; (+) strand; PAM type: NRG; PAM sequence: GAG
gacgaggagactgaagttca

SEQ ID NO: 14301 - DNA, 20 bp, Artificial Sequence
  Description of Artificial Sequence: Synthetic oligonucleotide
  Target: PCSK9; (+) strand; PAM type: NRG; PAM sequence: AGG
acgaggagactgaagttcag

SEQ ID NO: 14302 - DNA, 20 bp, Artificial Sequence
  Description of Artificial Sequence: Synthetic oligonucleotide
  Target: PCSK9; (+) strand; PAM type: NRG; PAM sequence: GGG
cgaggagactgaagttcaga

SEQ ID NO: 14303 - DNA, 20 bp, Artificial Sequence
  Description of Artificial Sequence: Synthetic oligonucleotide
  Target: PCSK9; (+) strand; PAM type: NRG; PAM sequence: GGG
gaggagactgaagttcagag

SEQ ID NO: 14304 - DNA, 20 bp, Artificial Sequence
  Description of Artificial Sequence: Synthetic oligonucleotide
  Target: PCSK9; (+) strand; PAM type: NRG; PAM sequence: CAG
gaagttcagaggggaccaca

SEQ ID NO: 14305 - DNA, 20 bp, Artificial Sequence
  Description of Artificial Sequence: Synthetic oligonucleotide
  Target: PCSK9; (+) strand; PAM type: NRG; PAM sequence: CAG
ttcagaggggaccacacaga

SEQ ID NO: 14306 - DNA, 20 bp, Artificial Sequence
  Description of Artificial Sequence: Synthetic oligonucleotide
  Target: PCSK9; (+) strand; PAM type: NRG; PAM sequence: TAG
gaggggaccacacagacagc

SEQ ID NO: 14307 - DNA, 20 bp, Artificial Sequence
  Description of Artificial Sequence: Synthetic oligonucleotide
  Target: PCSK9; (+) strand; PAM type: NRG; PAM sequence: AGG
aggggaccacacagacagct

SEQ ID NO: 14308 - DNA, 20 bp, Artificial Sequence
  Description of Artificial Sequence: Synthetic oligonucleotide
  Target: PCSK9; (+) strand; PAM type: NRG; PAM sequence: GGG
ggggaccacacagacagcta

SEQ ID NO: 14309 - DNA, 20 bp, Artificial Sequence
  Description of Artificial Sequence: Synthetic oligonucleotide
  Target: PCSK9; (+) strand; PAM type: NRG; PAM sequence: GGG
gggaccacacagacagctag

SEQ ID NO: 14310 - DNA, 20 bp, Artificial Sequence
  Description of Artificial Sequence: Synthetic oligonucleotide
  Target: PCSK9; (+) strand; PAM type: NRG; PAM sequence: TAG
accacacagacagctagggg

SEQ ID NO: 14311 - DNA, 20 bp, Artificial Sequence
  Description of Artificial Sequence: Synthetic oligonucleotide
  Target: PCSK9; (+) strand; PAM type: NRG; PAM sequence: GAG
cacacagacagctaggggta

SEQ ID NO: 14312 - DNA, 20 bp, Artificial Sequence
  Description of Artificial Sequence: Synthetic oligonucleotide
  Target: PCSK9; (+) strand; PAM type: NRG; PAM sequence: TGG
agacagctaggggtagagcc

SEQ ID NO: 14313 - DNA, 20 bp, Artificial Sequence
  Description of Artificial Sequence: Synthetic oligonucleotide
  Target: PCSK9; (+) strand; PAM type: NRG; PAM sequence: TGG
agagcctggatcaaacccat

SEQ ID NO: 14314 - DNA, 20 bp, Artificial Sequence
  Description of Artificial Sequence: Synthetic oligonucleotide
  Target: PCSK9; (+) strand; PAM type: NRG; PAM sequence: CAG
aaacccattggtctgcctgc

SEQ ID NO: 14315 - DNA, 20 bp, Artificial Sequence
  Description of Artificial Sequence: Synthetic oligonucleotide
  Target: PCSK9; (+) strand; PAM type: NRG; PAM sequence: CGG
gccaatgcatctgctgccta

SEQ ID NO: 14316 - DNA, 20 bp, Artificial Sequence
  Description of Artificial Sequence: Synthetic oligonucleotide
  Target: PCSK9; (+) strand; PAM type: NRG; PAM sequence: TAG
ctgctgcctacggaaacctg

SEQ ID NO: 14317 - DNA, 20 bp, Artificial Sequence
  Description of Artificial Sequence: Synthetic oligonucleotide
  Target: PCSK9; (+) strand; PAM type: NRG; PAM sequence: AGG
tgctgcctacggaaacctgt

SEQ ID NO: 14318 - DNA, 20 bp, Artificial Sequence
  Description of Artificial Sequence: Synthetic oligonucleotide
  Target: PCSK9; (+) strand; PAM type: NRG; PAM sequence: GGG
gctgcctacggaaacctgta

SEQ ID NO: 14319 - DNA, 20 bp, Artificial Sequence
  Description of Artificial Sequence: Synthetic oligonucleotide
  Target: PCSK9; (+) strand; PAM type: NRG; PAM sequence: AAG
ctacggaaacctgtagggac

SEQ ID NO: 14320 - DNA, 20 bp, Artificial Sequence
  Description of Artificial Sequence: Synthetic oligonucleotide
  Target: PCSK9; (+) strand; PAM type: NRG; PAM sequence: AGG
tacggaaacctgtagggaca

SEQ ID NO: 14321 - DNA, 20 bp, Artificial Sequence
  Description of Artificial Sequence: Synthetic oligonucleotide
  Target: PCSK9; (+) strand; PAM type: NRG; PAM sequence: TGG
aacctgtagggacaaggccc

SEQ ID NO: 14322 - DNA, 20 bp, Artificial Sequence
  Description of Artificial Sequence: Synthetic oligonucleotide
  Target: PCSK9; (+) strand; PAM type: NRG; PAM sequence: GGG
acctgtagggacaaggccct

SEQ ID NO: 14323 - DNA, 20 bp, Artificial Sequence
  Description of Artificial Sequence: Synthetic oligonucleotide
  Target: PCSK9; (+) strand; PAM type: NRG; PAM sequence: CAG
ggacaaggccctgggatgtt

SEQ ID NO: 14324 - DNA, 20 bp, Artificial Sequence
  Description of Artificial Sequence: Synthetic oligonucleotide
  Target: PCSK9; (+) strand; PAM type: NRG; PAM sequence: TGG
caaggccctgggatgttcag

SEQ ID NO: 14325 - DNA, 20 bp, Artificial Sequence
  Description of Artificial Sequence: Synthetic oligonucleotide
  Target: PCSK9; (+) strand; PAM type: NRG; PAM sequence: GAG
aggccctgggatgttcagtg

SEQ ID NO: 14326 - DNA, 20 bp, Artificial Sequence
  Description of Artificial Sequence: Synthetic oligonucleotide
  Target: PCSK9; (+) strand; PAM type: NRG; PAM sequence: GAG
tgggatgttcagtggagcct

SEQ ID NO: 14327 - DNA, 20 bp, Artificial Sequence
  Description of Artificial Sequence: Synthetic oligonucleotide
  Target: PCSK9; (+) strand; PAM type: NRG; PAM sequence: AAG
gcctgagtcattttataaaa

SEQ ID NO: 14328 - DNA, 20 bp, Artificial Sequence
  Description of Artificial Sequence: Synthetic oligonucleotide
  Target: PCSK9; (+) strand; PAM type: NRG; PAM sequence: TAG
tttataaaaaagcatgactc

SEQ ID NO: 14329 - DNA, 20 bp, Artificial Sequence
  Description of Artificial Sequence: Synthetic oligonucleotide
  Target: PCSK9; (+) strand; PAM type: NRG; PAM sequence: AGG
ttataaaaaagcatgactct

SEQ ID NO: 14330 - DNA, 20 bp, Artificial Sequence
  Description of Artificial Sequence: Synthetic oligonucleotide
  Target: PCSK9; (+) strand; PAM type: NRG; PAM sequence: GGG
tataaaaaagcatgactcta

SEQ ID NO: 14331 - DNA, 20 bp, Artificial Sequence
  Description of Artificial Sequence: Synthetic oligonucleotide
  Target: PCSK9; (+) strand; PAM type: NRG; PAM sequence: AAG
tagggtccaaaattcctttg

SEQ ID NO: 14332 - DNA, 20 bp, Artificial Sequence
  Description of Artificial Sequence: Synthetic oligonucleotide
  Target: PCSK9; (+) strand; PAM type: NRG; PAM sequence: CAG
cctttgaagctgttgctatc

SEQ ID NO: 14333 - DNA, 20 bp, Artificial Sequence
  Description of Artificial Sequence: Synthetic oligonucleotide
  Target: PCSK9; (+) strand; PAM type: NRG; PAM sequence: GAG
tttgaagctgttgctatcca

SEQ ID NO: 14334 - DNA, 20 bp, Artificial Sequence
  Description of Artificial Sequence: Synthetic oligonucleotide
  Target: PCSK9; (+) strand; PAM type: NRG; PAM sequence: AAG
agctgttgctatccagagtg

SEQ ID NO: 14335 - DNA, 20 bp, Artificial Sequence
  Description of Artificial Sequence: Synthetic oligonucleotide
  Target: PCSK9; (+) strand; PAM type: NRG; PAM sequence: TAG
ccagagtgaagtcccttctt

SEQ ID NO: 14336 - DNA, 20 bp, Artificial Sequence
  Description of Artificial Sequence: Synthetic oligonucleotide
  Target: PCSK9; (+) strand; PAM type: NRG; PAM sequence: AGG
cagagtgaagtcccttcttt

SEQ ID NO: 14337 - DNA, 20 bp, Artificial Sequence
  Description of Artificial Sequence: Synthetic oligonucleotide
  Target: PCSK9; (+) strand; PAM type: NRG; PAM sequence: CAG
gtgaagtcccttctttagga

SEQ ID NO: 14338 - DNA, 20 bp, Artificial Sequence
  Description of Artificial Sequence: Synthetic oligonucleotide
  Target: PCSK9; (+) strand; PAM type: NRG; PAM sequence: AGG
tgaagtcccttctttaggac

SEQ ID NO: 14339 - DNA, 20 bp, Artificial Sequence
  Description of Artificial Sequence: Synthetic oligonucleotide
  Target: PCSK9; (+) strand; PAM type: NRG; PAM sequence: GGG
gaagtcccttctttaggaca

SEQ ID NO: 14340 - DNA, 20 bp, Artificial Sequence
  Description of Artificial Sequence: Synthetic oligonucleotide
  Target: PCSK9; (+) strand; PAM type: NRG; PAM sequence: TGG
gtcccttctttaggacaggg

SEQ ID NO: 14341 - DNA, 20 bp, Artificial Sequence
  Description of Artificial Sequence: Synthetic oligonucleotide
  Target: PCSK9; (+) strand; PAM type: NRG; PAM sequence: TGG
agggtggccctcctccctcc

SEQ ID NO: 14342 - DNA, 20 bp, Artificial Sequence
  Description of Artificial Sequence: Synthetic oligonucleotide
  Target: PCSK9; (+) strand; PAM type: NRG; PAM sequence: CGG
cctcctggatgtcacatctt

SEQ ID NO: 14343 - DNA, 20 bp, Artificial Sequence
  Description of Artificial Sequence: Synthetic oligonucleotide
  Target: PCSK9; (+) strand; PAM type: NRG; PAM sequence: TGG
cctggatgtcacatcttcgg

SEQ ID NO: 14344 - DNA, 20 bp, Artificial Sequence
  Description of Artificial Sequence: Synthetic oligonucleotide
  Target: PCSK9; (+) strand; PAM type: NRG; PAM sequence: GAG
tggatgtcacatcttcggtg

SEQ ID NO: 14345 - DNA, 20 bp, Artificial Sequence
  Description of Artificial Sequence: Synthetic oligonucleotide
  Target: PCSK9; (+) strand; PAM type: NRG; PAM sequence: AGG
ggatgtcacatcttcggtgg

SEQ ID NO: 14346 - DNA, 20 bp, Artificial Sequence
  Description of Artificial Sequence: Synthetic oligonucleotide
  Target: PCSK9; (+) strand; PAM type: NRG; PAM sequence: GGG
gatgtcacatcttcggtgga

SEQ ID NO: 14347 - DNA, 20 bp, Artificial Sequence
  Description of Artificial Sequence: Synthetic oligonucleotide
  Target: PCSK9; (+) strand; PAM type: NRG; PAM sequence: GGG
atgtcacatcttcggtggag

SEQ ID NO: 14348 - DNA, 20 bp, Artificial Sequence
  Description of Artificial Sequence: Synthetic oligonucleotide
  Target: PCSK9; (+) strand; PAM type: NRG; PAM sequence: CAG
tcacatcttcggtggagggg

SEQ ID NO: 14349 - DNA, 20 bp, Artificial Sequence
  Description of Artificial Sequence: Synthetic oligonucleotide
  Target: PCSK9; (+) strand; PAM type: NRG; PAM sequence: AAG
atcttcggtggaggggcaga

SEQ ID NO: 14350 - DNA, 20 bp, Artificial Sequence
  Description of Artificial Sequence: Synthetic oligonucleotide
  Target: PCSK9; (+) strand; PAM type: NRG; PAM sequence: AGG
tcttcggtggaggggcagaa

SEQ ID NO: 14351 - DNA, 20 bp, Artificial Sequence
  Description of Artificial Sequence: Synthetic oligonucleotide
  Target: PCSK9; (+) strand; PAM type: NRG; PAM sequence: GGG
cttcggtggaggggcagaaa

SEQ ID NO: 14352 - DNA, 20 bp, Artificial Sequence
  Description of Artificial Sequence: Synthetic oligonucleotide
  Target: PCSK9; (+) strand; PAM type: NRG; PAM sequence: GGG
ttcggtggaggggcagaaag

SEQ ID NO: 14353 - DNA, 20 bp, Artificial Sequence
  Description of Artificial Sequence: Synthetic oligonucleotide
  Target: PCSK9; (+) strand; PAM type: NRG; PAM sequence: TGG
tggaggggcagaaaggggac

SEQ ID NO: 14354 - DNA, 20 bp, Artificial Sequence
  Description of Artificial Sequence: Synthetic oligonucleotide
  Target: PCSK9; (+) strand; PAM type: NRG; PAM sequence: GGG
ggaggggcagaaaggggact

SEQ ID NO: 14355 - DNA, 20 bp, Artificial Sequence
  Description of Artificial Sequence: Synthetic oligonucleotide
  Target: PCSK9; (+) strand; PAM type: NRG; PAM sequence: TGG
actgggtattctcctcaccc

SEQ ID NO: 14356 - DNA, 20 bp, Artificial Sequence
  Description of Artificial Sequence: Synthetic oligonucleotide
  Target: PCSK9; (+) strand; PAM type: NRG; PAM sequence: TAG
tattctcctcaccctggccc

SEQ ID NO: 14357 - DNA, 20 bp, Artificial Sequence
  Description of Artificial Sequence: Synthetic oligonucleotide
  Target: PCSK9; (+) strand; PAM type: NRG; PAM sequence: TAG
tgtgcttctgcaccaccttc

SEQ ID NO: 14358 - DNA, 20 bp, Artificial Sequence
  Description of Artificial Sequence: Synthetic oligonucleotide
  Target: PCSK9; (+) strand; PAM type: NRG; PAM sequence: TGG
ttctagcccacctcgtttcc

SEQ ID NO: 14359 - DNA, 20 bp, Artificial Sequence
  Description of Artificial Sequence: Synthetic oligonucleotide
  Target: PCSK9; (+) strand; PAM type: NRG; PAM sequence: GAG
ttcctggcctctaacttgat

SEQ ID NO: 14360 - DNA, 20 bp, Artificial Sequence
  Description of Artificial Sequence: Synthetic oligonucleotide
  Target: PCSK9; (+) strand; PAM type: NRG; PAM sequence: GAG
cctggcctctaacttgatga

SEQ ID NO: 14361 - DNA, 20 bp, Artificial Sequence
  Description of Artificial Sequence: Synthetic oligonucleotide
  Target: PCSK9; (+) strand; PAM type: NRG; PAM sequence: TGG
tttcacactgattctccaca

SEQ ID NO: 14362 - DNA, 20 bp, Artificial Sequence
  Description of Artificial Sequence: Synthetic oligonucleotide
  Target: PCSK9; (+) strand; PAM type: NRG; PAM sequence: CAG
cacactgattctccacatgg

SEQ ID NO: 14363 - DNA, 20 bp, Artificial Sequence
  Description of Artificial Sequence: Synthetic oligonucleotide
  Target: PCSK9; (+) strand; PAM type: NRG; PAM sequence: AGG
acactgattctccacatggc

SEQ ID NO: 14364 - DNA, 20 bp, Artificial Sequence
  Description of Artificial Sequence: Synthetic oligonucleotide
  Target: PCSK9; (+) strand; PAM type: NRG; PAM sequence: CGG
ctgattctccacatggcagg

SEQ ID NO: 14365 - DNA, 20 bp, Artificial Sequence
  Description of Artificial Sequence: Synthetic oligonucleotide
  Target: PCSK9; (+) strand; PAM type: NRG; PAM sequence: TAG
acatggcaggcggtgcttct

SEQ ID NO: 14366 - DNA, 20 bp, Artificial Sequence
  Description of Artificial Sequence: Synthetic oligonucleotide
  Target: PCSK9; (+) strand; PAM type: NRG; PAM sequence: CAG
cggtgcttcttagcctcctg

SEQ ID NO: 14367 - DNA, 20 bp, Artificial Sequence
  Description of Artificial Sequence: Synthetic oligonucleotide
  Target: PCSK9; (+) strand; PAM type: NRG; PAM sequence: CAG
gcttcttagcctcctgcaga

SEQ ID NO: 14368 - DNA, 20 bp, Artificial Sequence
  Description of Artificial Sequence: Synthetic oligonucleotide
  Target: PCSK9; (+) strand; PAM type: NRG; PAM sequence: GAG
cttagcctcctgcagacagt

SEQ ID NO: 14369 - DNA, 20 bp, Artificial Sequence
  Description of Artificial Sequence: Synthetic oligonucleotide
  Target: PCSK9; (+) strand; PAM type: NRG; PAM sequence: AGG
ttagcctcctgcagacagtg

SEQ ID NO: 14370 - DNA, 20 bp, Artificial Sequence
  Description of Artificial Sequence: Synthetic oligonucleotide
  Target: PCSK9; (+) strand; PAM type: NRG; PAM sequence: CGG
ctgcagacagtgaggcccca

SEQ ID NO: 14371 - DNA, 20 bp, Artificial Sequence
  Description of Artificial Sequence: Synthetic oligonucleotide
  Target: PCSK9; (+) strand; PAM type: NRG; PAM sequence: AAG
gaggccccacggtcttgtcc

SEQ ID NO: 14372 - DNA, 20 bp, Artificial Sequence
  Description of Artificial Sequence: Synthetic oligonucleotide
  Target: PCSK9; (+) strand; PAM type: NRG; PAM sequence: AGG
aggccccacggtcttgtcca

SEQ ID NO: 14373 - DNA, 20 bp, Artificial Sequence
  Description of Artificial Sequence: Synthetic oligonucleotide
  Target: PCSK9; (+) strand; PAM type: NRG; PAM sequence: CAG
cggtcttgtccaaggtcaca

SEQ ID NO: 14374 - DNA, 20 bp, Artificial Sequence
  Description of Artificial Sequence: Synthetic oligonucleotide
  Target: PCSK9; (+) strand; PAM type: NRG; PAM sequence: TGG
caaggtcacacagcgtgtaa

SEQ ID NO: 14375 - DNA, 20 bp, Artificial Sequence
  Description of Artificial Sequence: Synthetic oligonucleotide
  Target: PCSK9; (+) strand; PAM type: NRG; PAM sequence: GGG
aaggtcacacagcgtgtaat

SEQ ID NO: 14376 - DNA, 20 bp, Artificial Sequence
  Description of Artificial Sequence: Synthetic oligonucleotide
  Target: PCSK9; (+) strand; PAM type: NRG; PAM sequence: CAG
gtcacacagcgtgtaatggg

SEQ ID NO: 14377 - DNA, 20 bp, Artificial Sequence
  Description of Artificial Sequence: Synthetic oligonucleotide
  Target: PCSK9; (+) strand; PAM type: NRG; PAM sequence: AGG
tcacacagcgtgtaatgggc

SEQ ID NO: 14378 - DNA, 20 bp, Artificial Sequence
  Description of Artificial Sequence: Synthetic oligonucleotide
  Target: PCSK9; (+) strand; PAM type: NRG; PAM sequence: GGG
cacacagcgtgtaatgggca

SEQ ID NO: 14379 - DNA, 20 bp, Artificial Sequence
  Description of Artificial Sequence: Synthetic oligonucleotide
  Target: PCSK9; (+) strand; PAM type: NRG; PAM sequence: CAG
cagcgtgtaatgggcagggt

SEQ ID NO: 14380 - DNA, 20 bp, Artificial Sequence
  Description of Artificial Sequence: Synthetic oligonucleotide
  Target: PCSK9; (+) strand; PAM type: NRG; PAM sequence: GAG
gcgtgtaatgggcagggtca

SEQ ID NO: 14381 - DNA, 20 bp, Artificial Sequence
  Description of Artificial Sequence: Synthetic oligonucleotide
  Target: PCSK9; (+) strand; PAM type: NRG; PAM sequence: TGG
taatgggcagggtcagagtc

SEQ ID NO: 14382 - DNA, 20 bp, Artificial Sequence
  Description of Artificial Sequence: Synthetic oligonucleotide
  Target: PCSK9; (+) strand; PAM type: NRG; PAM sequence: GAG
atgggcagggtcagagtctg

SEQ ID NO: 14383 - DNA, 20 bp, Artificial Sequence
  Description of Artificial Sequence: Synthetic oligonucleotide
  Target: PCSK9; (+) strand; PAM type: NRG; PAM sequence: TGG
cagggtcagagtctggagtc

SEQ ID NO: 14384 - DNA, 20 bp, Artificial Sequence
  Description of Artificial Sequence: Synthetic oligonucleotide
  Target: PCSK9; (+) strand; PAM type: NRG; PAM sequence: TGG
cagagtctggagtctggacc

SEQ ID NO: 14385 - DNA, 20 bp, Artificial Sequence
  Description of Artificial Sequence: Synthetic oligonucleotide
  Target: PCSK9; (+) strand; PAM type: NRG; PAM sequence: GGG
agagtctggagtctggacct

SEQ ID NO: 14386 - DNA, 20 bp, Artificial Sequence
  Description of Artificial Sequence: Synthetic oligonucleotide
  Target: PCSK9; (+) strand; PAM type: NRG; PAM sequence: TAG
gagtctggacctgggtctcc

SEQ ID NO: 14387 - DNA, 20 bp, Artificial Sequence
  Description of Artificial Sequence: Synthetic oligonucleotide
  Target: PCSK9; (+) strand; PAM type: NRG; PAM sequence: TGG
tgcactgcactgctgcccca

SEQ ID NO: 14388 - DNA, 20 bp, Artificial Sequence
  Description of Artificial Sequence: Synthetic oligonucleotide
  Target: PCSK9; (+) strand; PAM type: NRG; PAM sequence: GGG
gcactgcactgctgccccat

SEQ ID NO: 14389 - DNA, 20 bp, Artificial Sequence
  Description of Artificial Sequence: Synthetic oligonucleotide
  Target: PCSK9; (+) strand; PAM type: NRG; PAM sequence: CAG
ctgctgccccatgggttaat

SEQ ID NO: 14390 - DNA, 20 bp, Artificial Sequence
  Description of Artificial Sequence: Synthetic oligonucleotide
  Target: PCSK9; (+) strand; PAM type: NRG; PAM sequence: CAG
gccccatgggttaatcagct

SEQ ID NO: 14391 - DNA, 20 bp, Artificial Sequence
  Description of Artificial Sequence: Synthetic oligonucleotide
  Target: PCSK9; (+) strand; PAM type: NRG; PAM sequence: TGG
ttaatcagctcagcataccg

SEQ ID NO: 14392 - DNA, 20 bp, Artificial Sequence
  Description of Artificial Sequence: Synthetic oligonucleotide
  Target: PCSK9; (+) strand; PAM type: NRG; PAM sequence: CAG
ctcagcataccgtggctgaa

SEQ ID NO: 14393 - DNA, 20 bp, Artificial Sequence
  Description of Artificial Sequence: Synthetic oligonucleotide
  Target: PCSK9; (+) strand; PAM type: NRG; PAM sequence: AAG
ctgaacagctacctcatacc

SEQ ID NO: 14394 - DNA, 20 bp, Artificial Sequence
  Description of Artificial Sequence: Synthetic oligonucleotide
  Target: PCSK9; (+) strand; PAM type: NRG; PAM sequence: AGG
tgaacagctacctcatacca

SEQ ID NO: 14395 - DNA, 20 bp, Artificial Sequence
  Description of Artificial Sequence: Synthetic oligonucleotide
  Target: PCSK9; (+) strand; PAM type: NRG; PAM sequence: TGG
ctacctcataccaaggcctg

SEQ ID NO: 14396 - DNA, 20 bp, Artificial Sequence
  Description of Artificial Sequence: Synthetic oligonucleotide
  Target: PCSK9; (+) strand; PAM type: NRG; PAM sequence: CAG
caaggcctgtggcgccatga

SEQ ID NO: 14397 - DNA, 20 bp, Artificial Sequence
  Description of Artificial Sequence: Synthetic oligonucleotide
  Target: PCSK9; (+) strand; PAM type: NRG; PAM sequence: AGG
aaggcctgtggcgccatgac

SEQ ID NO: 14398 - DNA, 20 bp, Artificial Sequence
  Description of Artificial Sequence: Synthetic oligonucleotide
  Target: PCSK9; (+) strand; PAM type: NRG; PAM sequence: GGG
aggcctgtggcgccatgaca

SEQ ID NO: 14399 - DNA, 20 bp, Artificial Sequence
  Description of Artificial Sequence: Synthetic oligonucleotide
  Target: PCSK9; (+) strand; PAM type: NRG; PAM sequence: CAG
ggcgccatgacagggattga

SEQ ID NO: 14400 - DNA, 20 bp, Artificial Sequence
  Description of Artificial Sequence: Synthetic oligonucleotide
  Target: PCSK9; (+) strand; PAM type: NRG; PAM sequence: AGG
gcgccatgacagggattgac

SEQ ID NO: 14401 - DNA, 20 bp, Artificial Sequence
  Description of Artificial Sequence: Synthetic oligonucleotide
  Target: PCSK9; (+) strand; PAM type: NRG; PAM sequence: GGG
cgccatgacagggattgaca

SEQ ID NO: 14402 - DNA, 20 bp, Artificial Sequence
  Description of Artificial Sequence: Synthetic oligonucleotide
  Target: PCSK9; (+) strand; PAM type: NRG; PAM sequence: TGG
gattgacagggtccctgcct

SEQ ID NO: 14403 - DNA, 20 bp, Artificial Sequence
  Description of Artificial Sequence: Synthetic oligonucleotide
  Target: PCSK9; (+) strand; PAM type: NRG; PAM sequence: TAG
gtccctgccttggaaacccg

SEQ ID NO: 14404 - DNA, 20 bp, Artificial Sequence
  Description of Artificial Sequence: Synthetic oligonucleotide
  Target: PCSK9; (+) strand; PAM type: NRG; PAM sequence: AAG
gccttggaaacccgtagtct

SEQ ID NO: 14405 - DNA, 20 bp, Artificial Sequence
  Description of Artificial Sequence: Synthetic oligonucleotide
  Target: PCSK9; (+) strand; PAM type: NRG; PAM sequence: TAG
ttggaaacccgtagtctaag

SEQ ID NO: 14406 - DNA, 20 bp, Artificial Sequence
  Description of Artificial Sequence: Synthetic oligonucleotide
  Target: PCSK9; (+) strand; PAM type: NRG; PAM sequence: GAG
ggaaacccgtagtctaagta

SEQ ID NO: 14407 - DNA, 20 bp, Artificial Sequence
  Description of Artificial Sequence: Synthetic oligonucleotide
  Target: PCSK9; (+) strand; PAM type: NRG; PAM sequence: AGG
gaaacccgtagtctaagtag

SEQ ID NO: 14408 - DNA, 20 bp, Artificial Sequence
  Description of Artificial Sequence: Synthetic oligonucleotide
  Target: PCSK9; (+) strand; PAM type: NRG; PAM sequence: GAG
aacccgtagtctaagtagag

SEQ ID NO: 14409 - DNA, 20 bp, Artificial Sequence
  Description of Artificial Sequence: Synthetic oligonucleotide
  Target: PCSK9; (+) strand; PAM type: NRG; PAM sequence: AAG
tctaagtagaggagactgac

SEQ ID NO: 14410 - DNA, 20 bp, Artificial Sequence
  Description of Artificial Sequence: Synthetic oligonucleotide
  Target: PCSK9; (+) strand; PAM type: NRG; PAM sequence: CAG
gacaagtcaatgccttccat

SEQ ID NO: 14411 - DNA, 20 bp, Artificial Sequence
  Description of Artificial Sequence: Synthetic oligonucleotide
  Target: PCSK9; (+) strand; PAM type: NRG; PAM sequence: AAG
ctgctcaacacacgtttacc

SEQ ID NO: 14412 - DNA, 20 bp, Artificial Sequence
  Description of Artificial Sequence: Synthetic oligonucleotide
  Target: PCSK9; (+) strand; PAM type: NRG; PAM sequence: CAG
caagtgcctactgtgtgctg

SEQ ID NO: 14413 - DNA, 20 bp, Artificial Sequence
  Description of Artificial Sequence: Synthetic oligonucleotide
  Target: PCSK9; (+) strand; PAM type: NRG; PAM sequence: GAG
agtgcctactgtgtgctgca

SEQ ID NO: 14414 - DNA, 20 bp, Artificial Sequence
  Description of Artificial Sequence: Synthetic oligonucleotide
  Target: PCSK9; (+) strand; PAM type: NRG; PAM sequence: AGG
gtgcctactgtgtgctgcag

SEQ ID NO: 14415 - DNA, 20 bp, Artificial Sequence
  Description of Artificial Sequence: Synthetic oligonucleotide
  Target: PCSK9; (+) strand; PAM type: NRG; PAM sequence: AAG
tactgtgtgctgcagaggcg

SEQ ID NO: 14416 - DNA, 20 bp, Artificial Sequence
  Description of Artificial Sequence: Synthetic oligonucleotide
  Target: PCSK9; (+) strand; PAM type: NRG; PAM sequence: CAG
ctgcagaggcgaagatgaca

SEQ ID NO: 14417 - DNA, 20 bp, Artificial Sequence
  Description of Artificial Sequence: Synthetic oligonucleotide
  Target: PCSK9; (+) strand; PAM type: NRG; PAM sequence: CAG
gaggcgaagatgacacagct

SEQ ID NO: 14418 - DNA, 20 bp, Artificial Sequence
  Description of Artificial Sequence: Synthetic oligonucleotide
  Target: PCSK9; (+) strand; PAM type: NRG; PAM sequence: AGG
aggcgaagatgacacagctc

SEQ ID NO: 14419 - DNA, 20 bp, Artificial Sequence
  Description of Artificial Sequence: Synthetic oligonucleotide
  Target: PCSK9; (+) strand; PAM type: NRG; PAM sequence: GAG
acagctcaggcctttccctt

SEQ ID NO: 14420 - DNA, 20 bp, Artificial Sequence
  Description of Artificial Sequence: Synthetic oligonucleotide
  Target: PCSK9; (+) strand; PAM type: NRG; PAM sequence: CAG
aggcctttcccttgagctta

SEQ ID NO: 14421 - DNA, 20 bp, Artificial Sequence
  Description of Artificial Sequence: Synthetic oligonucleotide
  Target: PCSK9; (+) strand; PAM type: NRG; PAM sequence: CAG
tttcccttgagcttacagtt

SEQ ID NO: 14422 - DNA, 20 bp, Artificial Sequence
  Description of Artificial Sequence: Synthetic oligonucleotide
  Target: PCSK9; (+) strand; PAM type: NRG; PAM sequence: AGG
ttcccttgagcttacagttc

SEQ ID NO: 14423 - DNA, 20 bp, Artificial Sequence
  Description of Artificial Sequence: Synthetic oligonucleotide
  Target: PCSK9; (+) strand; PAM type: NRG; PAM sequence: GAG
cccttgagcttacagttcag

SEQ ID NO: 14424 - DNA, 20 bp, Artificial Sequence
  Description of Artificial Sequence: Synthetic oligonucleotide
  Target: PCSK9; (+) strand; PAM type: NRG; PAM sequence: AGG
ccttgagcttacagttcagg

SEQ ID NO: 14425 - DNA, 20 bp, Artificial Sequence
  Description of Artificial Sequence: Synthetic oligonucleotide
  Target: PCSK9; (+) strand; PAM type: NRG; PAM sequence: GAG
ttgagcttacagttcaggag

SEQ ID NO: 14426 - DNA, 20 bp, Artificial Sequence
  Description of Artificial Sequence: Synthetic oligonucleotide
  Target: PCSK9; (+) strand; PAM type: NRG; PAM sequence: GAG
gagcttacagttcaggagga

SEQ ID NO: 14427 - DNA, 20 bp, Artificial Sequence
  Description of Artificial Sequence: Synthetic oligonucleotide
  Target: PCSK9; (+) strand; PAM type: NRG; PAM sequence: CAG
gttcaggaggagagactgac

SEQ ID NO: 14428 - DNA, 20 bp, Artificial Sequence
  Description of Artificial Sequence: Synthetic oligonucleotide
  Target: PCSK9; (+) strand; PAM type: NRG; PAM sequence: CAG
agagactgaccagtgactgc

SEQ ID NO: 14429 - DNA, 20 bp, Artificial Sequence
  Description of Artificial Sequence: Synthetic oligonucleotide
  Target: PCSK9; (+) strand; PAM type: NRG; PAM sequence: CAG
ctgaccagtgactgccagta

SEQ ID NO: 14430 - DNA, 20 bp, Artificial Sequence
  Description of Artificial Sequence: Synthetic oligonucleotide
  Target: PCSK9; (+) strand; PAM type: NRG; PAM sequence: TGG
actgccagtacagttgacta

SEQ ID NO: 14431 - DNA, 20 bp, Artificial Sequence
  Description of Artificial Sequence: Synthetic oligonucleotide
  Target: PCSK9; (+) strand; PAM type: NRG; PAM sequence: GGG
ctgccagtacagttgactat

SEQ ID NO: 14432 - DNA, 20 bp, Artificial Sequence
  Description of Artificial Sequence: Synthetic oligonucleotide
  Target: PCSK9; (+) strand; PAM type: NRG; PAM sequence: CAG
tgactatgggacaatgtgct

SEQ ID NO: 14433 - DNA, 20 bp, Artificial Sequence
  Description of Artificial Sequence: Synthetic oligonucleotide
  Target: PCSK9; (+) strand; PAM type: NRG; PAM sequence: TGG
tgggacaatgtgctcagcct

SEQ ID NO: 14434 - DNA, 20 bp, Artificial Sequence
  Description of Artificial Sequence: Synthetic oligonucleotide
  Target: PCSK9; (+) strand; PAM type: NRG; PAM sequence: GGG
gggacaatgtgctcagcctt

SEQ ID NO: 14435 - DNA, 20 bp, Artificial Sequence
  Description of Artificial Sequence: Synthetic oligonucleotide
  Target: PCSK9; (+) strand; PAM type: NRG; PAM sequence: GGG
ggacaatgtgctcagccttg

SEQ ID NO: 14436 - DNA, 20 bp, Artificial Sequence
  Description of Artificial Sequence: Synthetic oligonucleotide
  Target: PCSK9; (+) strand; PAM type: NRG; PAM sequence: GAG
acaatgtgctcagccttggg

SEQ ID NO: 14437 - DNA, 20 bp, Artificial Sequence
  Description of Artificial Sequence: Synthetic oligonucleotide
  Target: PCSK9; (+) strand; PAM type: NRG; PAM sequence: GAG
aatgtgctcagccttgggga

SEQ ID NO: 14438 - DNA, 20 bp, Artificial Sequence
  Description of Artificial Sequence: Synthetic oligonucleotide
  Target: PCSK9; (+) strand; PAM type: NRG; PAM sequence: AAG
ctcagccttggggagagacg

SEQ ID NO: 14439 - DNA, 20 bp, Artificial Sequence
  Description of Artificial Sequence: Synthetic oligonucleotide
  Target: PCSK9; (+) strand; PAM type: NRG; PAM sequence: AAG
agccttggggagagacgaag

SEQ ID NO: 14440 - DNA, 20 bp, Artificial Sequence
  Description of Artificial Sequence: Synthetic oligonucleotide
  Target: PCSK9; (+) strand; PAM type: NRG; PAM sequence: AGG
gccttggggagagacgaaga

SEQ ID NO: 14441 - DNA, 20 bp, Artificial Sequence
  Description of Artificial Sequence: Synthetic oligonucleotide
  Target: PCSK9; (+) strand; PAM type: NRG; PAM sequence: TAG
agacgaagaaggtacccgta

SEQ ID NO: 14442 - DNA, 20 bp, Artificial Sequence
  Description of Artificial Sequence: Synthetic oligonucleotide
  Target: PCSK9; (+) strand; PAM type: NRG; PAM sequence: CAG
agaaggtacccgtatagcac

SEQ ID NO: 14443 - DNA, 20 bp, Artificial Sequence
  Description of Artificial Sequence: Synthetic oligonucleotide
  Target: PCSK9; (+) strand; PAM type: NRG; PAM sequence: CAG
acccgtatagcaccagatga

SEQ ID NO: 14444 - DNA, 20 bp, Artificial Sequence
  Description of Artificial Sequence: Synthetic oligonucleotide
  Target: PCSK9; (+) strand; PAM type: NRG; PAM sequence: AGG
cccgtatagcaccagatgac

SEQ ID NO: 14445 - DNA, 20 bp, Artificial Sequence
  Description of Artificial Sequence: Synthetic oligonucleotide
  Target: PCSK9; (+) strand; PAM type: NRG; PAM sequence: GAG
tagcaccagatgacaggcac

SEQ ID NO: 14446 - DNA, 20 bp, Artificial Sequence
  Description of Artificial Sequence: Synthetic oligonucleotide
  Target: PCSK9; (+) strand; PAM type: NRG; PAM sequence: CAG
gatgacaggcacgagcccca

SEQ ID NO: 14447 - DNA, 20 bp, Artificial Sequence
  Description of Artificial Sequence: Synthetic oligonucleotide
  Target: PCSK9; (+) strand; PAM type: NRG; PAM sequence: AGG
atgacaggcacgagccccac

SEQ ID NO: 14448 - DNA, 20 bp, Artificial Sequence
  Description of Artificial Sequence: Synthetic oligonucleotide
  Target: PCSK9; (+) strand; PAM type: NRG; PAM sequence: CAG
caggcacgagccccacaggc

SEQ ID NO: 14449 - DNA, 20 bp, Artificial Sequence
  Description of Artificial Sequence: Synthetic oligonucleotide
  Target: PCSK9; (+) strand; PAM type: NRG; PAM sequence: AGG
aggcacgagccccacaggcc

SEQ ID NO: 14450 - DNA, 20 bp, Artificial Sequence
  Description of Artificial Sequence: Synthetic oligonucleotide
  Target: PCSK9; (+) strand; PAM type: NRG; PAM sequence: GGG
ggcacgagccccacaggcca

SEQ ID NO: 14451 - DNA, 20 bp, Artificial Sequence
  Description of Artificial Sequence: Synthetic oligonucleotide
  Target: PCSK9; (+) strand; PAM type: NRG; PAM sequence: CAG
acgagccccacaggccaggg

SEQ ID NO: 14452 - DNA, 20 bp, Artificial Sequence
  Description of Artificial Sequence: Synthetic oligonucleotide
  Target: PCSK9; (+) strand; PAM type: NRG; PAM sequence: CAG
cacaggccagggcagctgct

SEQ ID NO: 14453 - DNA, 20 bp, Artificial Sequence
  Description of Artificial Sequence: Synthetic oligonucleotide
  Target: PCSK9; (+) strand; PAM type: NRG; PAM sequence: GAG
caggccagggcagctgctca

SEQ ID NO: 14454 - DNA, 20 bp, Artificial Sequence
  Description of Artificial Sequence: Synthetic oligonucleotide
  Target: PCSK9; (+) strand; PAM type: NRG; PAM sequence: AGG
aggccagggcagctgctcag

SEQ ID NO: 14455 - DNA, 20 bp, Artificial Sequence
  Description of Artificial Sequence: Synthetic oligonucleotide
  Target: PCSK9; (+) strand; PAM type: NRG; PAM sequence: GAG
gccagggcagctgctcagag

SEQ ID NO: 14456 - DNA, 20 bp, Artificial Sequence
  Description of Artificial Sequence: Synthetic oligonucleotide
  Target: PCSK9; (+) strand; PAM type: NRG; PAM sequence: GAG
cagggcagctgctcagagga

SEQ ID NO: 14457 - DNA, 20 bp, Artificial Sequence
  Description of Artificial Sequence: Synthetic oligonucleotide
  Target: PCSK9; (+) strand; PAM type: NRG; PAM sequence: TAG
ggcagctgctcagaggagag

SEQ ID NO: 14458 - DNA, 20 bp, Artificial Sequence
  Description of Artificial Sequence: Synthetic oligonucleotide
  Target: PCSK9; (+) strand; PAM type: NRG; PAM sequence: AGG
gcagctgctcagaggagagt

SEQ ID NO: 14459 - DNA, 20 bp, Artificial Sequence
  Description of Artificial Sequence: Synthetic oligonucleotide
  Target: PCSK9; (+) strand; PAM type: NRG; PAM sequence: AAG
tgctcagaggagagtaggcc

SEQ ID NO: 14460 - DNA, 20 bp, Artificial Sequence
  Description of Artificial Sequence: Synthetic oligonucleotide
  Target: PCSK9; (+) strand; PAM type: NRG; PAM sequence: CAG
tcagaggagagtaggccaag

SEQ ID NO: 14461 - DNA, 20 bp, Artificial Sequence
  Description of Artificial Sequence: Synthetic oligonucleotide
  Target: PCSK9; (+) strand; PAM type: NRG; PAM sequence: AAG
gaggagagtaggccaagcag

SEQ ID NO: 14462 - DNA, 20 bp, Artificial Sequence
  Description of Artificial Sequence: Synthetic oligonucleotide
  Target: PCSK9; (+) strand; PAM type: NRG; PAM sequence: AGG
aggagagtaggccaagcaga

SEQ ID NO: 14463 - DNA, 20 bp, Artificial Sequence
  Description of Artificial Sequence: Synthetic oligonucleotide
  Target: PCSK9; (+) strand; PAM type: NRG; PAM sequence: CAG
taggccaagcagaaggcaaa

SEQ ID NO: 14464 - DNA, 20 bp, Artificial Sequence
  Description of Artificial Sequence: Synthetic oligonucleotide
  Target: PCSK9; (+) strand; PAM type: NRG; PAM sequence: AAG
gccaagcagaaggcaaacag

SEQ ID NO: 14465 - DNA, 20 bp, Artificial Sequence
  Description of Artificial Sequence: Synthetic oligonucleotide
  Target: PCSK9; (+) strand; PAM type: NRG; PAM sequence: AGG
ccaagcagaaggcaaacaga

SEQ ID NO: 14466 - DNA, 20 bp, Artificial Sequence
  Description of Artificial Sequence: Synthetic oligonucleotide
  Target: PCSK9; (+) strand; PAM type: NRG; PAM sequence: CAG
agaaggcaaacagaaggctg

SEQ ID NO: 14467 - DNA, 20 bp, Artificial Sequence
  Description of Artificial Sequence: Synthetic oligonucleotide
  Target: PCSK9; (+) strand; PAM type: NRG; PAM sequence: AGG
gaaggcaaacagaaggctgc

SEQ ID NO: 14468 - DNA, 20 bp, Artificial Sequence
  Description of Artificial Sequence: Synthetic oligonucleotide
  Target: PCSK9; (+) strand; PAM type: NRG; PAM sequence: GAG
ggctgcaggcatttgccatc

SEQ ID NO: 14469 - DNA, 20 bp, Artificial Sequence
  Description of Artificial Sequence: Synthetic oligonucleotide
  Target: PCSK9; (+) strand; PAM type: NRG; PAM sequence: GAG
ctgcaggcatttgccatcga

SEQ ID NO: 14470 - DNA, 20 bp, Artificial Sequence
  Description of Artificial Sequence: Synthetic oligonucleotide
  Target: PCSK9; (+) strand; PAM type: NRG; PAM sequence: TGG
aggcatttgccatcgagagc

SEQ ID NO: 14471 - DNA, 20 bp, Artificial Sequence
  Description of Artificial Sequence: Synthetic oligonucleotide
  Target: PCSK9; (+) strand; PAM type: NRG; PAM sequence: TGG
tcgagagctggacttcaaac

SEQ ID NO: 14472 - DNA, 20 bp, Artificial Sequence
  Description of Artificial Sequence: Synthetic oligonucleotide
  Target: PCSK9; (+) strand; PAM type: NRG; PAM sequence: GGG
cgagagctggacttcaaact

SEQ ID NO: 14473 - DNA, 20 bp, Artificial Sequence
  Description of Artificial Sequence: Synthetic oligonucleotide
  Target: PCSK9; (+) strand; PAM type: NRG; PAM sequence: CAG
cttcaaactgggcatcatac

SEQ ID NO: 14474 - DNA, 20 bp, Artificial Sequence
  Description of Artificial Sequence: Synthetic oligonucleotide
  Target: PCSK9; (+) strand; PAM type: NRG; PAM sequence: TGG
aactgggcatcataccagcc

SEQ ID NO: 14475 - DNA, 20 bp, Artificial Sequence
  Description of Artificial Sequence: Synthetic oligonucleotide
  Target: PCSK9; (+) strand; PAM type: NRG; PAM sequence: GGG
actgggcatcataccagcct

SEQ ID NO: 14476 - DNA, 20 bp, Artificial Sequence
  Description of Artificial Sequence: Synthetic oligonucleotide
  Target: PCSK9; (+) strand; PAM type: NRG; PAM sequence: GAG
catcataccagcctgggttc

SEQ ID NO: 14477 - DNA, 20 bp, Artificial Sequence
  Description of Artificial Sequence: Synthetic oligonucleotide
  Target: PCSK9; (+) strand; PAM type: NRG; PAM sequence: CAG
gcctgggttcgagtcctgcc

SEQ ID NO: 14478 - DNA, 20 bp, Artificial Sequence
  Description of Artificial Sequence: Synthetic oligonucleotide
  Target: PCSK9; (+) strand; PAM type: NRG; PAM sequence: TGG
agtcctgcccagccccttat

SEQ ID NO: 14479 - DNA, 20 bp, Artificial Sequence
  Description of Artificial Sequence: Synthetic oligonucleotide
  Target: PCSK9; (+) strand; PAM type: NRG; PAM sequence: GAG
cttattggctgtctaaccct

SEQ ID NO: 14480 - DNA, 20 bp, Artificial Sequence
  Description of Artificial Sequence: Synthetic oligonucleotide
  Target: PCSK9; (+) strand; PAM type: NRG; PAM sequence: GAG
gcaaatcccttcacctctct

SEQ ID NO: 14481 - DNA, 20 bp, Artificial Sequence
  Description of Artificial Sequence: Synthetic oligonucleotide
  Target: PCSK9; (+) strand; PAM type: NRG; PAM sequence: CAG
tcattcctctatctgtaaac

SEQ ID NO: 14482 - DNA, 20 bp, Artificial Sequence
  Description of Artificial Sequence: Synthetic oligonucleotide
  Target: PCSK9; (+) strand; PAM type: NRG; PAM sequence: TGG
tgtaaaccagttataataat

SEQ ID NO: 14483 - DNA, 20 bp, Artificial Sequence
  Description of Artificial Sequence: Synthetic oligonucleotide
  Target: PCSK9; (+) strand; PAM type: NRG; PAM sequence: AAG
aataattggaacattcattt

SEQ ID NO: 14484 - DNA, 20 bp, Artificial Sequence
  Description of Artificial Sequence: Synthetic oligonucleotide
  Target: PCSK9; (+) strand; PAM type: NRG; PAM sequence: AGG
ataattggaacattcattta

SEQ ID NO: 14485 - DNA, 20 bp, Artificial Sequence
  Description of Artificial Sequence: Synthetic oligonucleotide
  Target: PCSK9; (+) strand; PAM type: NRG; PAM sequence: GAG
cattcatttaaggactaaat

SEQ ID NO: 14486 - DNA, 20 bp, Artificial Sequence
  Description of Artificial Sequence: Synthetic oligonucleotide
  Target: PCSK9; (+) strand; PAM type: NRG; PAM sequence: AGG
attcatttaaggactaaatg

SEQ ID NO: 14487 - DNA, 20 bp, Artificial Sequence
  Description of Artificial Sequence: Synthetic oligonucleotide
  Target: PCSK9; (+) strand; PAM type: NRG; PAM sequence: AAG
aaggactaaatgaggtcgtg

SEQ ID NO: 14488 - DNA, 20 bp, Artificial Sequence
  Description of Artificial Sequence: Synthetic oligonucleotide
  Target: PCSK9; (+) strand; PAM type: NRG; PAM sequence: CAG
aaatgaggtcgtgaagcatt

SEQ ID NO: 14489 - DNA, 20 bp, Artificial Sequence
  Description of Artificial Sequence: Synthetic oligonucleotide
  Target: PCSK9; (+) strand; PAM type: NRG; PAM sequence: CAG
tgaggtcgtgaagcattcag

SEQ ID NO: 14490 - DNA, 20 bp, Artificial Sequence
  Description of Artificial Sequence: Synthetic oligonucleotide
  Target: PCSK9; (+) strand; PAM type: NRG; PAM sequence: TAG
gtgaagcattcagcagatgc

SEQ ID NO: 14491 - DNA, 20 bp, Artificial Sequence
  Description of Artificial Sequence: Synthetic oligonucleotide
  Target: PCSK9; (+) strand; PAM type: NRG; PAM sequence: AGG
tgaagcattcagcagatgct

SEQ ID NO: 14492 - DNA, 20 bp, Artificial Sequence
  Description of Artificial Sequence: Synthetic oligonucleotide
  Target: PCSK9; (+) strand; PAM type: NRG; PAM sequence: CGG
cattcagcagatgctaggta

SEQ ID NO: 14493 - DNA, 20 bp, Artificial Sequence
  Description of Artificial Sequence: Synthetic oligonucleotide
  Target: PCSK9; (+) strand; PAM type: NRG; PAM sequence: AAG
ctaggtacggaaactcgctg

SEQ ID NO: 14494 - DNA, 20 bp, Artificial Sequence
  Description of Artificial Sequence: Synthetic oligonucleotide
  Target: PCSK9; (+) strand; PAM type: NRG; PAM sequence: TGG
ggtacggaaactcgctgaag

SEQ ID NO: 14495 - DNA, 20 bp, Artificial Sequence
  Description of Artificial Sequence: Synthetic oligonucleotide
  Target: PCSK9; (+) strand; PAM type: NRG; PAM sequence: GGG
gtacggaaactcgctgaagt

SEQ ID NO: 14496 - DNA, 20 bp, Artificial Sequence
  Description of Artificial Sequence: Synthetic oligonucleotide
  Target: PCSK9; (+) strand; PAM type: NRG; PAM sequence: GGG
tacggaaactcgctgaagtg

SEQ ID NO: 14497 - DNA, 20 bp, Artificial Sequence
  Description of Artificial Sequence: Synthetic oligonucleotide
  Target: PCSK9; (+) strand; PAM type: NRG; PAM sequence: GGG
acggaaactcgctgaagtgg

SEQ ID NO: 14498 - DNA, 20 bp, Artificial Sequence
  Description of Artificial Sequence: Synthetic oligonucleotide
  Target: PCSK9; (+) strand; PAM type: NRG; PAM sequence: CAG
gaaactcgctgaagtggggg

SEQ ID NO: 14499 - DNA, 20 bp, Artificial Sequence
  Description of Artificial Sequence: Synthetic oligonucleotide
  Target: PCSK9; (+) strand; PAM type: NRG; PAM sequence: AGG
aaactcgctgaagtgggggc

SEQ ID NO: 14500 - DNA, 20 bp, Artificial Sequence
  Description of Artificial Sequence: Synthetic oligonucleotide
  Target: PCSK9; (+) strand; PAM type: NRG; PAM sequence: AAG
cgctgaagtgggggcaggtt

SEQ ID NO: 14501 - DNA, 20 bp, Artificial Sequence
  Description of Artificial Sequence: Synthetic oligonucleotide
  Target: PCSK9; (+) strand; PAM type: NRG; PAM sequence: AAG
tgaagtgggggcaggttaag

SEQ ID NO: 14502 - DNA, 20 bp, Artificial Sequence
  Description of Artificial Sequence: Synthetic oligonucleotide
  Target: PCSK9; (+) strand; PAM type: NRG; PAM sequence: TGG
ggggcaggttaagaagcctc

SEQ ID NO: 14503 - DNA, 20 bp, Artificial Sequence
  Description of Artificial Sequence: Synthetic oligonucleotide
  Target: PCSK9; (+) strand; PAM type: NRG; PAM sequence: GGG
gggcaggttaagaagcctct

SEQ ID NO: 14504 - DNA, 20 bp, Artificial Sequence
  Description of Artificial Sequence: Synthetic oligonucleotide
  Target: PCSK9; (+) strand; PAM type: NRG; PAM sequence: GGG
ggcaggttaagaagcctctg

SEQ ID NO: 14505 - DNA, 20 bp, Artificial Sequence
  Description of Artificial Sequence: Synthetic oligonucleotide
  Target: PCSK9; (+) strand; PAM type: NRG; PAM sequence: AAG
aagaagcctctggggatacg

SEQ ID NO: 14506 - DNA, 20 bp, Artificial Sequence
  Description of Artificial Sequence: Synthetic oligonucleotide
  Target: PCSK9; (+) strand; PAM type: NRG; PAM sequence: AGG
agaagcctctggggatacga

SEQ ID NO: 14507 - DNA, 20 bp, Artificial Sequence
  Description of Artificial Sequence: Synthetic oligonucleotide
  Target: PCSK9; (+) strand; PAM type: NRG; PAM sequence: CAG
tctggggatacgaaggcatc

SEQ ID NO: 14508 - DNA, 20 bp, Artificial Sequence
  Description of Artificial Sequence: Synthetic oligonucleotide
  Target: PCSK9; (+) strand; PAM type: NRG; PAM sequence: AGG
ctggggatacgaaggcatcc

SEQ ID NO: 14509 - DNA, 20 bp, Artificial Sequence
  Description of Artificial Sequence: Synthetic oligonucleotide
  Target: PCSK9; (+) strand; PAM type: NRG; PAM sequence: GGG
tggggatacgaaggcatcca

SEQ ID NO: 14510 - DNA, 20 bp, Artificial Sequence
  Description of Artificial Sequence: Synthetic oligonucleotide
  Target: PCSK9; (+) strand; PAM type: NRG; PAM sequence: TAG
atacgaaggcatccagggac

SEQ ID NO: 14511 - DNA, 20 bp, Artificial Sequence
  Description of Artificial Sequence: Synthetic oligonucleotide
  Target: PCSK9; (+) strand; PAM type: NRG; PAM sequence: TGG
aggcatccagggactagttg

SEQ ID NO: 14512 - DNA, 20 bp, Artificial Sequence
  Description of Artificial Sequence: Synthetic oligonucleotide
  Target: PCSK9; (+) strand; PAM type: NRG; PAM sequence: CAG
catccagggactagttgtgg

SEQ ID NO: 14513 - DNA, 20 bp, Artificial Sequence
  Description of Artificial Sequence: Synthetic oligonucleotide
  Target: PCSK9; (+) strand; PAM type: NRG; PAM sequence: AGG
atccagggactagttgtggc

SEQ ID NO: 14514 - DNA, 20 bp, Artificial Sequence
  Description of Artificial Sequence: Synthetic oligonucleotide
  Target: PCSK9; (+) strand; PAM type: NRG; PAM sequence: GAG
ccagggactagttgtggcag

SEQ ID NO: 14515 - DNA, 20 bp, Artificial Sequence
  Description of Artificial Sequence: Synthetic oligonucleotide
  Target: PCSK9; (+) strand; PAM type: NRG; PAM sequence: AGG
cagggactagttgtggcagg

SEQ ID NO: 14516 - DNA, 20 bp, Artificial Sequence
  Description of Artificial Sequence: Synthetic oligonucleotide
  Target: PCSK9; (+) strand; PAM type: NRG; PAM sequence: TAG
ggcaggaggctgttaccact

SEQ ID NO: 14517 - DNA, 20 bp, Artificial Sequence
  Description of Artificial Sequence: Synthetic oligonucleotide
  Target: PCSK9; (+) strand; PAM type: NRG; PAM sequence: AGG
gcaggaggctgttaccactt

SEQ ID NO: 14518 - DNA, 20 bp, Artificial Sequence
  Description of Artificial Sequence: Synthetic oligonucleotide
  Target: PCSK9; (+) strand; PAM type: NRG; PAM sequence: AAG
gctgttaccacttaggtctg

SEQ ID NO: 14519 - DNA, 20 bp, Artificial Sequence
  Description of Artificial Sequence: Synthetic oligonucleotide
  Target: PCSK9; (+) strand; PAM type: NRG; PAM sequence: AGG
ctgttaccacttaggtctga

SEQ ID NO: 14520 - DNA, 20 bp, Artificial Sequence
  Description of Artificial Sequence: Synthetic oligonucleotide
  Target: PCSK9; (+) strand; PAM type: NRG; PAM sequence: GGG
tgttaccacttaggtctgaa

SEQ ID NO: 14521 - DNA, 20 bp, Artificial Sequence
  Description of Artificial Sequence: Synthetic oligonucleotide
  Target: PCSK9; (+) strand; PAM type: NRG; PAM sequence: AAG
accacttaggtctgaagggt

SEQ ID NO: 14522 - DNA, 20 bp, Artificial Sequence
  Description of Artificial Sequence: Synthetic oligonucleotide
  Target: PCSK9; (+) strand; PAM type: NRG; PAM sequence: AGG
ccacttaggtctgaagggta

SEQ ID NO: 14523 - DNA, 20 bp, Artificial Sequence
  Description of Artificial Sequence: Synthetic oligonucleotide
  Target: PCSK9; (+) strand; PAM type: NRG; PAM sequence: GAG
acttaggtctgaagggtaag

SEQ ID NO: 14524 - DNA, 20 bp, Artificial Sequence
  Description of Artificial Sequence: Synthetic oligonucleotide
  Target: PCSK9; (+) strand; PAM type: NRG; PAM sequence: GAG
ttaggtctgaagggtaagga

SEQ ID NO: 14525 - DNA, 20 bp, Artificial Sequence
  Description of Artificial Sequence: Synthetic oligonucleotide
  Target: PCSK9; (+) strand; PAM type: NRG; PAM sequence: AGG
taggtctgaagggtaaggag

SEQ ID NO: 14526 - DNA, 20 bp, Artificial Sequence
  Description of Artificial Sequence: Synthetic oligonucleotide
  Target: PCSK9; (+) strand; PAM type: NRG; PAM sequence: GGG
aggtctgaagggtaaggaga

SEQ ID NO: 14527 - DNA, 20 bp, Artificial Sequence
  Description of Artificial Sequence: Synthetic oligonucleotide
  Target: PCSK9; (+) strand; PAM type: NRG; PAM sequence: TAG
tgaagggtaaggagagggaa

SEQ ID NO: 14528 - DNA, 20 bp, Artificial Sequence
  Description of Artificial Sequence: Synthetic oligonucleotide
  Target: PCSK9; (+) strand; PAM type: NRG; PAM sequence: CAG
ggaatagctttccctctgcc

SEQ ID NO: 14529 - DNA, 20 bp, Artificial Sequence
  Description of Artificial Sequence: Synthetic oligonucleotide
  Target: PCSK9; (+) strand; PAM type: NRG; PAM sequence: TGG
tagctttccctctgcccagt

SEQ ID NO: 14530 - DNA, 20 bp, Artificial Sequence
  Description of Artificial Sequence: Synthetic oligonucleotide
  Target: PCSK9; (+) strand; PAM type: NRG; PAM sequence: GAG
gctttccctctgcccagttg

SEQ ID NO: 14531 - DNA, 20 bp, Artificial Sequence
  Description of Artificial Sequence: Synthetic oligonucleotide
  Target: PCSK9; (+) strand; PAM type: NRG; PAM sequence: CGG
tccctctgcccagttggagc

SEQ ID NO: 14532 - DNA, 20 bp, Artificial Sequence
  Description of Artificial Sequence: Synthetic oligonucleotide
  Target: PCSK9; (+) strand; PAM type: NRG; PAM sequence: TGG
ctctgcccagttggagccgg

SEQ ID NO: 14533 - DNA, 20 bp, Artificial Sequence
  Description of Artificial Sequence: Synthetic oligonucleotide
  Target: PCSK9; (+) strand; PAM type: NRG; PAM sequence: TGG
cccagttggagccggtggca

SEQ ID NO: 14534 - DNA, 20 bp, Artificial Sequence
  Description of Artificial Sequence: Synthetic oligonucleotide
  Target: PCSK9; (+) strand; PAM type: NRG; PAM sequence: GAG
cagttggagccggtggcatg

SEQ ID NO: 14535 - DNA, 20 bp, Artificial Sequence
  Description of Artificial Sequence: Synthetic oligonucleotide
  Target: PCSK9; (+) strand; PAM type: NRG; PAM sequence: AGG
agttggagccggtggcatgg

SEQ ID NO: 14536 - DNA, 20 bp, Artificial Sequence
  Description of Artificial Sequence: Synthetic oligonucleotide
  Target: PCSK9; (+) strand; PAM type: NRG; PAM sequence: GAG
ttggagccggtggcatggag

SEQ ID NO: 14537 - DNA, 20 bp, Artificial Sequence
  Description of Artificial Sequence: Synthetic oligonucleotide
  Target: PCSK9; (+) strand; PAM type: NRG; PAM sequence: GAG
ggagccggtggcatggagga

SEQ ID NO: 14538 - DNA, 20 bp, Artificial Sequence
  Description of Artificial Sequence: Synthetic oligonucleotide
  Target: PCSK9; (+) strand; PAM type: NRG; PAM sequence: AGG
gagccggtggcatggaggag

SEQ ID NO: 14539 - DNA, 20 bp, Artificial Sequence
  Description of Artificial Sequence: Synthetic oligonucleotide
  Target: PCSK9; (+) strand; PAM type: NRG; PAM sequence: TGG
catggaggagaggctgcctg

SEQ ID NO: 14540 - DNA, 20 bp, Artificial Sequence
  Description of Artificial Sequence: Synthetic oligonucleotide
  Target: PCSK9; (+) strand; PAM type: NRG; PAM sequence: GGG
atggaggagaggctgcctgt

SEQ ID NO: 14541 - DNA, 20 bp, Artificial Sequence
  Description of Artificial Sequence: Synthetic oligonucleotide
  Target: PCSK9; (+) strand; PAM type: NRG; PAM sequence: GGG
tggaggagaggctgcctgtg

SEQ ID NO: 14542 - DNA, 20 bp, Artificial Sequence
  Description of Artificial Sequence: Synthetic oligonucleotide
  Target: PCSK9; (+) strand; PAM type: NRG; PAM sequence: GAG
ctgcctgtggggaatcaccc

SEQ ID NO: 14543 - DNA, 20 bp, Artificial Sequence
  Description of Artificial Sequence: Synthetic oligonucleotide
  Target: PCSK9; (+) strand; PAM type: NRG; PAM sequence: AGG
tgcctgtggggaatcacccg

SEQ ID NO: 14544 - DNA, 20 bp, Artificial Sequence
  Description of Artificial Sequence: Synthetic oligonucleotide
  Target: PCSK9; (+) strand; PAM type: NRG; PAM sequence: GGG
gcctgtggggaatcacccga

SEQ ID NO: 14545 - DNA, 20 bp, Artificial Sequence
  Description of Artificial Sequence: Synthetic oligonucleotide
  Target: PCSK9; (+) strand; PAM type: NRG; PAM sequence: CAG
gggttcaccgctgccatgcg

SEQ ID NO: 14546 - DNA, 20 bp, Artificial Sequence
  Description of Artificial Sequence: Synthetic oligonucleotide
  Target: PCSK9; (+) strand; PAM type: NRG; PAM sequence: AGG
ggttcaccgctgccatgcgc

SEQ ID NO: 14547 - DNA, 20 bp, Artificial Sequence
  Description of Artificial Sequence: Synthetic oligonucleotide
  Target: PCSK9; (+) strand; PAM type: NRG; PAM sequence: GGG
gttcaccgctgccatgcgca

SEQ ID NO: 14548 - DNA, 20 bp, Artificial Sequence
  Description of Artificial Sequence: Synthetic oligonucleotide
  Target: PCSK9; (+) strand; PAM type: NRG; PAM sequence: GAG
tcaccgctgccatgcgcagg

SEQ ID NO: 14549 - DNA, 20 bp, Artificial Sequence
  Description of Artificial Sequence: Synthetic oligonucleotide
  Target: PCSK9; (+) strand; PAM type: NRG; PAM sequence: CAG
cgctgccatgcgcagggagt

SEQ ID NO: 14550 - DNA, 20 bp, Artificial Sequence
  Description of Artificial Sequence: Synthetic oligonucleotide
  Target: PCSK9; (+) strand; PAM type: NRG; PAM sequence: AGG
gctgccatgcgcagggagtc

SEQ ID NO: 14551 - DNA, 20 bp, Artificial Sequence
  Description of Artificial Sequence: Synthetic oligonucleotide
  Target: PCSK9; (+) strand; PAM type: NRG; PAM sequence: GAG
tgccatgcgcagggagtcag

SEQ ID NO: 14552 - DNA, 20 bp, Artificial Sequence
  Description of Artificial Sequence: Synthetic oligonucleotide
  Target: PCSK9; (+) strand; PAM type: NRG; PAM sequence: AGG
gccatgcgcagggagtcagg

SEQ ID NO: 14553 - DNA, 20 bp, Artificial Sequence
  Description of Artificial Sequence: Synthetic oligonucleotide
  Target: PCSK9; (+) strand; PAM type: NRG; PAM sequence: TAG
atgcgcagggagtcaggagg

SEQ ID NO: 14554 - DNA, 20 bp, Artificial Sequence
  Description of Artificial Sequence: Synthetic oligonucleotide
  Target: PCSK9; (+) strand; PAM type: NRG; PAM sequence: AGG
tgcgcagggagtcaggaggt

SEQ ID NO: 14555 - DNA, 20 bp, Artificial Sequence
  Description of Artificial Sequence: Synthetic oligonucleotide
  Target: PCSK9; (+) strand; PAM type: NRG; PAM sequence: GGG
gcgcagggagtcaggaggta

SEQ ID NO: 14556 - DNA, 20 bp, Artificial Sequence
  Description of Artificial Sequence: Synthetic oligonucleotide
  Target: PCSK9; (+) strand; PAM type: NRG; PAM sequence: GAG
gcagggagtcaggaggtagg

SEQ ID NO: 14557 - DNA, 20 bp, Artificial Sequence
  Description of Artificial Sequence: Synthetic oligonucleotide
  Target: PCSK9; (+) strand; PAM type: NRG; PAM sequence: AGG
cagggagtcaggaggtaggg

SEQ ID NO: 14558 - DNA, 20 bp, Artificial Sequence
  Description of Artificial Sequence: Synthetic oligonucleotide
  Target: PCSK9; (+) strand; PAM type: NRG; PAM sequence: GGG
agggagtcaggaggtaggga

SEQ ID NO: 14559 - DNA, 20 bp, Artificial Sequence
  Description of Artificial Sequence: Synthetic oligonucleotide
  Target: PCSK9; (+) strand; PAM type: NRG; PAM sequence: GAG
ggagtcaggaggtagggagg

SEQ ID NO: 14560 - DNA, 20 bp, Artificial Sequence
  Description of Artificial Sequence: Synthetic oligonucleotide
  Target: PCSK9; (+) strand; PAM type: NRG; PAM sequence: TGG
gtcaggaggtagggagggag

SEQ ID NO: 14561 - DNA, 20 bp, Artificial Sequence
  Description of Artificial Sequence: Synthetic oligonucleotide
  Target: PCSK9; (+) strand; PAM type: NRG; PAM sequence: GGG
tcaggaggtagggagggagt

SEQ ID NO: 14562 - DNA, 20 bp, Artificial Sequence
  Description of Artificial Sequence: Synthetic oligonucleotide
  Target: PCSK9; (+) strand; PAM type: NRG; PAM sequence: GGG
caggaggtagggagggagtg

SEQ ID NO: 14563 - DNA, 20 bp, Artificial Sequence
  Description of Artificial Sequence: Synthetic oligonucleotide
  Target: PCSK9; (+) strand; PAM type: NRG; PAM sequence: CAG
gaggtagggagggagtgggg

SEQ ID NO: 14564 - DNA, 20 bp, Artificial Sequence
  Description of Artificial Sequence: Synthetic oligonucleotide
  Target: PCSK9; (+) strand; PAM type: NRG; PAM sequence: GAG
caccattttttttttttttt

SEQ ID NO: 14565 - DNA, 20 bp, Artificial Sequence
  Description of Artificial Sequence: Synthetic oligonucleotide
  Target: PCSK9; (+) strand; PAM type: NRG; PAM sequence: CAG
ttttttgagactctgttgcc

SEQ ID NO: 14566 - DNA, 20 bp, Artificial Sequence
  Description of Artificial Sequence: Synthetic oligonucleotide
  Target: PCSK9; (+) strand; PAM type: NRG; PAM sequence: TGG
tgagactctgttgcccagac

SEQ ID NO: 14567 - DNA, 20 bp, Artificial Sequence
  Description of Artificial Sequence: Synthetic oligonucleotide
  Target: PCSK9; (+) strand; PAM type: NRG; PAM sequence: GAG
agactctgttgcccagactg

SEQ ID NO: 14568 - DNA, 20 bp, Artificial Sequence
  Description of Artificial Sequence: Synthetic oligonucleotide
  Target: PCSK9; (+) strand; PAM type: NRG; PAM sequence: CAG
ctgttgcccagactggagtg

SEQ ID NO: 14569 - DNA, 20 bp, Artificial Sequence
  Description of Artificial Sequence: Synthetic oligonucleotide
  Target: PCSK9; (+) strand; PAM type: NRG; PAM sequence: TGG
ttgcccagactggagtgcag

SEQ ID NO: 14570 - DNA, 20 bp, Artificial Sequence
  Description of Artificial Sequence: Synthetic oligonucleotide
  Target: PCSK9; (+) strand; PAM type: NRG; PAM sequence: CGG
atatctgcacctctgcctcc

SEQ ID NO: 14571 - DNA, 20 bp, Artificial Sequence
  Description of Artificial Sequence: Synthetic oligonucleotide
  Target: PCSK9; (+) strand; PAM type: NRG; PAM sequence: GGG
tatctgcacctctgcctccc

SEQ ID NO: 14572 - DNA, 20 bp, Artificial Sequence
  Description of Artificial Sequence: Synthetic oligonucleotide
  Target: PCSK9; (+) strand; PAM type: NRG; PAM sequence: AAG
cacctctgcctcccgggttc

SEQ ID NO: 14573 - DNA, 20 bp, Artificial Sequence
  Description of Artificial Sequence: Synthetic oligonucleotide
  Target: PCSK9; (+) strand; PAM type: NRG; PAM sequence: CGG
tcactgcaacctctgcctcc

SEQ ID NO: 14574 - DNA, 20 bp, Artificial Sequence
  Description of Artificial Sequence: Synthetic oligonucleotide
  Target: PCSK9; (+) strand; PAM type: NRG; PAM sequence: GGG
cactgcaacctctgcctccc

SEQ ID NO: 14575 - DNA, 20 bp, Artificial Sequence
  Description of Artificial Sequence: Synthetic oligonucleotide
  Target: PCSK9; (+) strand; PAM type: NRG; PAM sequence: AAG
aacctctgcctcccgggttc

SEQ ID NO: 14576 - DNA, 20 bp, Artificial Sequence
  Description of Artificial Sequence: Synthetic oligonucleotide
  Target: PCSK9; (+) strand; PAM type: NRG; PAM sequence: CAG
ttcaagcgattctcctgcct

SEQ ID NO: 14577 - DNA, 20 bp, Artificial Sequence
  Description of Artificial Sequence: Synthetic oligonucleotide
  Target: PCSK9; (+) strand; PAM type: NRG; PAM sequence: GAG
ttctcctgcctcagcctccc

SEQ ID NO: 14578 - DNA, 20 bp, Artificial Sequence
  Description of Artificial Sequence: Synthetic oligonucleotide
  Target: PCSK9; (+) strand; PAM type: NRG; PAM sequence: TAG
tcctgcctcagcctcccgag

SEQ ID NO: 14579 - DNA, 20 bp, Artificial Sequence
  Description of Artificial Sequence: Synthetic oligonucleotide
  Target: PCSK9; (+) strand; PAM type: NRG; PAM sequence: TGG
gcctcagcctcccgagtagc

SEQ ID NO: 14580 - DNA, 20 bp, Artificial Sequence
  Description of Artificial Sequence: Synthetic oligonucleotide
  Target: PCSK9; (+) strand; PAM type: NRG; PAM sequence: GGG
cctcagcctcccgagtagct

SEQ ID NO: 14581 - DNA, 20 bp, Artificial Sequence
  Description of Artificial Sequence: Synthetic oligonucleotide
  Target: PCSK9; (+) strand; PAM type: NRG; PAM sequence: CAG
ctcccgagtagctgggacta

SEQ ID NO: 14582 - DNA, 20 bp, Artificial Sequence
  Description of Artificial Sequence: Synthetic oligonucleotide
  Target: PCSK9; (+) strand; PAM type: NRG; PAM sequence: AGG
tcccgagtagctgggactac

SEQ ID NO: 14583 - DNA, 20 bp, Artificial Sequence
  Description of Artificial Sequence: Synthetic oligonucleotide
  Target: PCSK9; (+) strand; PAM type: NRG; PAM sequence: TGG
caggtgtgtgccaccatgcc

SEQ ID NO: 14584 - DNA, 20 bp, Artificial Sequence
  Description of Artificial Sequence: Synthetic oligonucleotide
  Target: PCSK9; (+) strand; PAM type: NRG; PAM sequence: TAG
gctaatttttgtatttttaa

SEQ ID NO: 14585 - DNA, 20 bp, Artificial Sequence
  Description of Artificial Sequence: Synthetic oligonucleotide
  Target: PCSK9; (+) strand; PAM type: NRG; PAM sequence: GAG
taatttttgtatttttaata

SEQ ID NO: 14586 - DNA, 20 bp, Artificial Sequence
  Description of Artificial Sequence: Synthetic oligonucleotide
  Target: PCSK9; (+) strand; PAM type: NRG; PAM sequence: TGG
ttttgtatttttaatagaga

SEQ ID NO: 14587 - DNA, 20 bp, Artificial Sequence
  Description of Artificial Sequence: Synthetic oligonucleotide
  Target: PCSK9; (+) strand; PAM type: NRG; PAM sequence: GGG
tttgtatttttaatagagat

SEQ ID NO: 14588 - DNA, 20 bp, Artificial Sequence
  Description of Artificial Sequence: Synthetic oligonucleotide
  Target: PCSK9; (+) strand; PAM type: NRG; PAM sequence: GGG
ttgtatttttaatagagatg

SEQ ID NO: 14589 - DNA, 20 bp, Artificial Sequence
  Description of Artificial Sequence: Synthetic oligonucleotide
  Target: PCSK9; (+) strand; PAM type: NRG; PAM sequence: TGG
gagatggggtttcaccatgt

SEQ ID NO: 14590 - DNA, 20 bp, Artificial Sequence
  Description of Artificial Sequence: Synthetic oligonucleotide
  Target: PCSK9; (+) strand; PAM type: NRG; PAM sequence: CAG
tggggtttcaccatgttggc

SEQ ID NO: 14591 - DNA, 20 bp, Artificial Sequence
  Description of Artificial Sequence: Synthetic oligonucleotide
  Target: PCSK9; (+) strand; PAM type: NRG; PAM sequence: AGG
ggggtttcaccatgttggcc

SEQ ID NO: 14592 - DNA, 20 bp, Artificial Sequence
  Description of Artificial Sequence: Synthetic oligonucleotide
  Target: PCSK9; (+) strand; PAM type: NRG; PAM sequence: TGG
tttcaccatgttggccaggc

SEQ ID NO: 14593 - DNA, 20 bp, Artificial Sequence
  Description of Artificial Sequence: Synthetic oligonucleotide
  Target: PCSK9; (+) strand; PAM type: NRG; PAM sequence: CAG
tggtctcgaactctcgacct

SEQ ID NO: 14594 - DNA, 20 bp, Artificial Sequence
  Description of Artificial Sequence: Synthetic oligonucleotide
  Target: PCSK9; (+) strand; PAM type: NRG; PAM sequence: AGG
ggtctcgaactctcgacctc

SEQ ID NO: 14595 - DNA, 20 bp, Artificial Sequence
  Description of Artificial Sequence: Synthetic oligonucleotide
  Target: PCSK9; (+) strand; PAM type: NRG; PAM sequence: CGG
cctcaggtgatcccccacct

SEQ ID NO: 14596 - DNA, 20 bp, Artificial Sequence
  Description of Artificial Sequence: Synthetic oligonucleotide
  Target: PCSK9; (+) strand; PAM type: NRG; PAM sequence: AAG
tcccccacctcggcctccca

SEQ ID NO: 14597 - DNA, 20 bp, Artificial Sequence
  Description of Artificial Sequence: Synthetic oligonucleotide
  Target: PCSK9; (+) strand; PAM type: NRG; PAM sequence: TGG
acctcggcctcccaaagtgc

SEQ ID NO: 14598 - DNA, 20 bp, Artificial Sequence
  Description of Artificial Sequence: Synthetic oligonucleotide
  Target: PCSK9; (+) strand; PAM type: NRG; PAM sequence: GGG
cctcggcctcccaaagtgct

SEQ ID NO: 14599 - DNA, 20 bp, Artificial Sequence
  Description of Artificial Sequence: Synthetic oligonucleotide
  Target: PCSK9; (+) strand; PAM type: NRG; PAM sequence: CAG
ctcccaaagtgctgggatta

SEQ ID NO: 14600 - DNA, 20 bp, Artificial Sequence
  Description of Artificial Sequence: Synthetic oligonucleotide
  Target: PCSK9; (+) strand; PAM type: NRG; PAM sequence: AGG
tcccaaagtgctgggattac

SEQ ID NO: 14601 - DNA, 20 bp, Artificial Sequence
  Description of Artificial Sequence: Synthetic oligonucleotide
  Target: PCSK9; (+) strand; PAM type: NRG; PAM sequence: GAG
agtgctgggattacaggcgt

SEQ ID NO: 14602 - DNA, 20 bp, Artificial Sequence
  Description of Artificial Sequence: Synthetic oligonucleotide
  Target: PCSK9; (+) strand; PAM type: NRG; PAM sequence: CAG
caggcgtgagtcaccgctcc

SEQ ID NO: 14603 - DNA, 20 bp, Artificial Sequence
  Description of Artificial Sequence: Synthetic oligonucleotide
  Target: PCSK9; (+) strand; PAM type: NRG; PAM sequence: TAG
cttgtccttctaactcctgc

SEQ ID NO: 14604 - DNA, 20 bp, Artificial Sequence
  Description of Artificial Sequence: Synthetic oligonucleotide
  Target: PCSK9; (+) strand; PAM type: NRG; PAM sequence: TGG
ctcctgctagtgcctcccat

SEQ ID NO: 14605 - DNA, 20 bp, Artificial Sequence
  Description of Artificial Sequence: Synthetic oligonucleotide
  Target: PCSK9; (+) strand; PAM type: NRG; PAM sequence: GAG
gctagtgcctcccattggct

SEQ ID NO: 14606 - DNA, 20 bp, Artificial Sequence
  Description of Artificial Sequence: Synthetic oligonucleotide
  Target: PCSK9; (+) strand; PAM type: NRG; PAM sequence: TGG
tcccattggctgagcccaac

SEQ ID NO: 14607 - DNA, 20 bp, Artificial Sequence
  Description of Artificial Sequence: Synthetic oligonucleotide
  Target: PCSK9; (+) strand; PAM type: NRG; PAM sequence: AAG
cattggctgagcccaactgg

SEQ ID NO: 14608 - DNA, 20 bp, Artificial Sequence
  Description of Artificial Sequence: Synthetic oligonucleotide
  Target: PCSK9; (+) strand; PAM type: NRG; PAM sequence: AAG
agcccaactggaagctttgc

SEQ ID NO: 14609 - DNA, 20 bp, Artificial Sequence
  Description of Artificial Sequence: Synthetic oligonucleotide
  Target: PCSK9; (+) strand; PAM type: NRG; PAM sequence: AGG
gcccaactggaagctttgca

SEQ ID NO: 14610 - DNA, 20 bp, Artificial Sequence
  Description of Artificial Sequence: Synthetic oligonucleotide
  Target: PCSK9; (+) strand; PAM type: NRG; PAM sequence: GGG
cccaactggaagctttgcaa

SEQ ID NO: 14611 - DNA, 20 bp, Artificial Sequence
  Description of Artificial Sequence: Synthetic oligonucleotide
  Target: PCSK9; (+) strand; PAM type: NRG; PAM sequence: GAG
caactggaagctttgcaagg

SEQ ID NO: 14612 - DNA, 20 bp, Artificial Sequence
  Description of Artificial Sequence: Synthetic oligonucleotide
  Target: PCSK9; (+) strand; PAM type: NRG; PAM sequence: TGG
tggaagctttgcaagggagc

SEQ ID NO: 14613 - DNA, 20 bp, Artificial Sequence
  Description of Artificial Sequence: Synthetic oligonucleotide
  Target: PCSK9; (+) strand; PAM type: NRG; PAM sequence: CAG
ttgcaagggagctggtgctg

SEQ ID NO: 14614 - DNA, 20 bp, Artificial Sequence
  Description of Artificial Sequence: Synthetic oligonucleotide
  Target: PCSK9; (+) strand; PAM type: NRG; PAM sequence: GAG
ctggtgctgcagtttgcact

SEQ ID NO: 14615 - DNA, 20 bp, Artificial Sequence
  Description of Artificial Sequence: Synthetic oligonucleotide
  Target: PCSK9; (+) strand; PAM type: NRG; PAM sequence: CAG
gtgctgcagtttgcactgag

SEQ ID NO: 14616 - DNA, 20 bp, Artificial Sequence
  Description of Artificial Sequence: Synthetic oligonucleotide
  Target: PCSK9; (+) strand; PAM type: NRG; PAM sequence: AGG
tgctgcagtttgcactgagc

SEQ ID NO: 14617 - DNA, 20 bp, Artificial Sequence
  Description of Artificial Sequence: Synthetic oligonucleotide
  Target: PCSK9; (+) strand; PAM type: NRG; PAM sequence: TGG
gcagtttgcactgagcaggc

SEQ ID NO: 14618 - DNA, 20 bp, Artificial Sequence
  Description of Artificial Sequence: Synthetic oligonucleotide
  Target: PCSK9; (+) strand; PAM type: NRG; PAM sequence: GAG
agtttgcactgagcaggctg

SEQ ID NO: 14619 - DNA, 20 bp, Artificial Sequence
  Description of Artificial Sequence: Synthetic oligonucleotide
  Target: PCSK9; (+) strand; PAM type: NRG; PAM sequence: AAG
ttgcactgagcaggctggag

SEQ ID NO: 14620 - DNA, 20 bp, Artificial Sequence
  Description of Artificial Sequence: Synthetic oligonucleotide
  Target: PCSK9; (+) strand; PAM type: NRG; PAM sequence: AGG
tgcactgagcaggctggaga

SEQ ID NO: 14621 - DNA, 20 bp, Artificial Sequence
  Description of Artificial Sequence: Synthetic oligonucleotide
  Target: PCSK9; (+) strand; PAM type: NRG; PAM sequence: TGG
ctgagcaggctggagaaggc

SEQ ID NO: 14622 - DNA, 20 bp, Artificial Sequence
  Description of Artificial Sequence: Synthetic oligonucleotide
  Target: PCSK9; (+) strand; PAM type: NRG; PAM sequence: GAG
gagcaggctggagaaggctg

SEQ ID NO: 14623 - DNA, 20 bp, Artificial Sequence
  Description of Artificial Sequence: Synthetic oligonucleotide
  Target: PCSK9; (+) strand; PAM type: NRG; PAM sequence: TAG
ggctggagaaggctggagaa

SEQ ID NO: 14624 - DNA, 20 bp, Artificial Sequence
  Description of Artificial Sequence: Synthetic oligonucleotide
  Target: PCSK9; (+) strand; PAM type: NRG; PAM sequence: TAG
gagaaggctggagaatagac

SEQ ID NO: 14625 - DNA, 20 bp, Artificial Sequence
  Description of Artificial Sequence: Synthetic oligonucleotide
  Target: PCSK9; (+) strand; PAM type: NRG; PAM sequence: AGG
agaaggctggagaatagact

SEQ ID NO: 14626 - DNA, 20 bp, Artificial Sequence
  Description of Artificial Sequence: Synthetic oligonucleotide
  Target: PCSK9; (+) strand; PAM type: NRG; PAM sequence: GGG
gaaggctggagaatagacta

SEQ ID NO: 14627 - DNA, 20 bp, Artificial Sequence
  Description of Artificial Sequence: Synthetic oligonucleotide
  Target: PCSK9; (+) strand; PAM type: NRG; PAM sequence: GGG
aaggctggagaatagactag

SEQ ID NO: 14628 - DNA, 20 bp, Artificial Sequence
  Description of Artificial Sequence: Synthetic oligonucleotide
  Target: PCSK9; (+) strand; PAM type: NRG; PAM sequence: CAG
taggggacaaaccgaattgc

SEQ ID NO: 14629 - DNA, 20 bp, Artificial Sequence
  Description of Artificial Sequence: Synthetic oligonucleotide
  Target: PCSK9; (+) strand; PAM type: NRG; PAM sequence: TAG
agtgctgttatgtcatgatt

SEQ ID NO: 14630 - DNA, 20 bp, Artificial Sequence
  Description of Artificial Sequence: Synthetic oligonucleotide
  Target: PCSK9; (+) strand; PAM type: NRG; PAM sequence: AGG
gtgctgttatgtcatgattt

SEQ ID NO: 14631 - DNA, 20 bp, Artificial Sequence
  Description of Artificial Sequence: Synthetic oligonucleotide
  Target: PCSK9; (+) strand; PAM type: NRG; PAM sequence: TGG
gttatgtcatgatttaggca

SEQ ID NO: 14632 - DNA, 20 bp, Artificial Sequence
  Description of Artificial Sequence: Synthetic oligonucleotide
  Target: PCSK9; (+) strand; PAM type: NRG; PAM sequence: GAG
tatgtcatgatttaggcatg

SEQ ID NO: 14633 - DNA, 20 bp, Artificial Sequence
  Description of Artificial Sequence: Synthetic oligonucleotide
  Target: PCSK9; (+) strand; PAM type: NRG; PAM sequence: CAG
catgatttaggcatggagtc

SEQ ID NO: 14634 - DNA, 20 bp, Artificial Sequence
  Description of Artificial Sequence: Synthetic oligonucleotide
  Target: PCSK9; (+) strand; PAM type: NRG; PAM sequence: AGG
atgatttaggcatggagtcc

SEQ ID NO: 14635 - DNA, 20 bp, Artificial Sequence
  Description of Artificial Sequence: Synthetic oligonucleotide
  Target: PCSK9; (+) strand; PAM type: NRG; PAM sequence: GGG
tgatttaggcatggagtcca

SEQ ID NO: 14636 - DNA, 20 bp, Artificial Sequence
  Description of Artificial Sequence: Synthetic oligonucleotide
  Target: PCSK9; (+) strand; PAM type: NRG; PAM sequence: GAG
aggcatggagtccagggcct

SEQ ID NO: 14637 - DNA, 20 bp, Artificial Sequence
  Description of Artificial Sequence: Synthetic oligonucleotide
  Target: PCSK9; (+) strand; PAM type: NRG; PAM sequence: CAG
cactccatgtccatcctgcc

SEQ ID NO: 14638 - DNA, 20 bp, Artificial Sequence
  Description of Artificial Sequence: Synthetic oligonucleotide
  Target: PCSK9; (+) strand; PAM type: NRG; PAM sequence: GAG
ctccatgtccatcctgccca

SEQ ID NO: 14639 - DNA, 20 bp, Artificial Sequence
  Description of Artificial Sequence: Synthetic oligonucleotide
  Target: PCSK9; (+) strand; PAM type: NRG; PAM sequence: TGG
gtccatcctgcccagagcct

SEQ ID NO: 14640 - DNA, 20 bp, Artificial Sequence
  Description of Artificial Sequence: Synthetic oligonucleotide
  Target: PCSK9; (+) strand; PAM type: NRG; PAM sequence: CAG
tcctgcccagagccttggca

SEQ ID NO: 14641 - DNA, 20 bp, Artificial Sequence
  Description of Artificial Sequence: Synthetic oligonucleotide
  Target: PCSK9; (+) strand; PAM type: NRG; PAM sequence: TGG
cccagagccttggcacagcc

SEQ ID NO: 14642 - DNA, 20 bp, Artificial Sequence
  Description of Artificial Sequence: Synthetic oligonucleotide
  Target: PCSK9; (+) strand; PAM type: NRG; PAM sequence: CAG
ccttggcacagcctggctcc

SEQ ID NO: 14643 - DNA, 20 bp, Artificial Sequence
  Description of Artificial Sequence: Synthetic oligonucleotide
  Target: PCSK9; (+) strand; PAM type: NRG; PAM sequence: AAG
gcacagcctggctcccagac

SEQ ID NO: 14644 - DNA, 20 bp, Artificial Sequence
  Description of Artificial Sequence: Synthetic oligonucleotide
  Target: PCSK9; (+) strand; PAM type: NRG; PAM sequence: AAG
tggctcccagacaagatgtc

SEQ ID NO: 14645 - DNA, 20 bp, Artificial Sequence
  Description of Artificial Sequence: Synthetic oligonucleotide
  Target: PCSK9; (+) strand; PAM type: NRG; PAM sequence: CAG
cccagacaagatgtcaagtt

SEQ ID NO: 14646 - DNA, 20 bp, Artificial Sequence
  Description of Artificial Sequence: Synthetic oligonucleotide
  Target: PCSK9; (+) strand; PAM type: NRG; PAM sequence: AAG
aagttcagaatccttcctaa

SEQ ID NO: 14647 - DNA, 20 bp, Artificial Sequence
  Description of Artificial Sequence: Synthetic oligonucleotide
  Target: PCSK9; (+) strand; PAM type: NRG; PAM sequence: AGG
agttcagaatccttcctaaa

SEQ ID NO: 14648 - DNA, 20 bp, Artificial Sequence
  Description of Artificial Sequence: Synthetic oligonucleotide
  Target: PCSK9; (+) strand; PAM type: NRG; PAM sequence: CAG
ctaaaaggaatcctctatgc

SEQ ID NO: 14649 - DNA, 20 bp, Artificial Sequence
  Description of Artificial Sequence: Synthetic oligonucleotide
  Target: PCSK9; (+) strand; PAM type: NRG; PAM sequence: CAG
ctctatgccagaccgtgttg

SEQ ID NO: 14650 - DNA, 20 bp, Artificial Sequence
  Description of Artificial Sequence: Synthetic oligonucleotide
  Target: PCSK9; (+) strand; PAM type: NRG; PAM sequence: AGG
tctatgccagaccgtgttgc

SEQ ID NO: 14651 - DNA, 20 bp, Artificial Sequence
  Description of Artificial Sequence: Synthetic oligonucleotide
  Target: PCSK9; (+) strand; PAM type: NRG; PAM sequence: GGG
ctatgccagaccgtgttgca

SEQ ID NO: 14652 - DNA, 20 bp, Artificial Sequence
  Description of Artificial Sequence: Synthetic oligonucleotide
  Target: PCSK9; (+) strand; PAM type: NRG; PAM sequence: TGG
cagaccgtgttgcagggata

SEQ ID NO: 14653 - DNA, 20 bp, Artificial Sequence
  Description of Artificial Sequence: Synthetic oligonucleotide
  Target: PCSK9; (+) strand; PAM type: NRG; PAM sequence: GGG
agaccgtgttgcagggatat

SEQ ID NO: 14654 - DNA, 20 bp, Artificial Sequence
  Description of Artificial Sequence: Synthetic oligonucleotide
  Target: PCSK9; (+) strand; PAM type: NRG; PAM sequence: GAG
accgtgttgcagggatatgg

SEQ ID NO: 14655 - DNA, 20 bp, Artificial Sequence
  Description of Artificial Sequence: Synthetic oligonucleotide
  Target: PCSK9; (+) strand; PAM type: NRG; PAM sequence: TGG
ttgcagggatatgggagtgc

SEQ ID NO: 14656 - DNA, 20 bp, Artificial Sequence
  Description of Artificial Sequence: Synthetic oligonucleotide
  Target: PCSK9; (+) strand; PAM type: NRG; PAM sequence: GGG
tgcagggatatgggagtgct

SEQ ID NO: 14657 - DNA, 20 bp, Artificial Sequence
  Description of Artificial Sequence: Synthetic oligonucleotide
  Target: PCSK9; (+) strand; PAM type: NRG; PAM sequence: CAG
atatgggagtgctgggctcc

SEQ ID NO: 14658 - DNA, 20 bp, Artificial Sequence
  Description of Artificial Sequence: Synthetic oligonucleotide
  Target: PCSK9; (+) strand; PAM type: NRG; PAM sequence: AAG
gctgggctcccagcctgatc

SEQ ID NO: 14659 - DNA, 20 bp, Artificial Sequence
  Description of Artificial Sequence: Synthetic oligonucleotide
  Target: PCSK9; (+) strand; PAM type: NRG; PAM sequence: AGG
ctgggctcccagcctgatca

SEQ ID NO: 14660 - DNA, 20 bp, Artificial Sequence
  Description of Artificial Sequence: Synthetic oligonucleotide
  Target: PCSK9; (+) strand; PAM type: NRG; PAM sequence: GAG
gggctcccagcctgatcaag

SEQ ID NO: 14661 - DNA, 20 bp, Artificial Sequence
  Description of Artificial Sequence: Synthetic oligonucleotide
  Target: PCSK9; (+) strand; PAM type: NRG; PAM sequence: GAG
tcccagcctgatcaaggagc

SEQ ID NO: 14662 - DNA, 20 bp, Artificial Sequence
  Description of Artificial Sequence: Synthetic oligonucleotide
  Target: PCSK9; (+) strand; PAM type: NRG; PAM sequence: CAG
gatcaaggagcgagaaaact

SEQ ID NO: 14663 - DNA, 20 bp, Artificial Sequence
  Description of Artificial Sequence: Synthetic oligonucleotide
  Target: PCSK9; (+) strand; PAM type: NRG; PAM sequence: AGG
atcaaggagcgagaaaactc

SEQ ID NO: 14664 - DNA, 20 bp, Artificial Sequence
  Description of Artificial Sequence: Synthetic oligonucleotide
  Target: PCSK9; (+) strand; PAM type: NRG; PAM sequence: TAG
agcgagaaaactcaggctcc

SEQ ID NO: 14665 - DNA, 20 bp, Artificial Sequence
  Description of Artificial Sequence: Synthetic oligonucleotide
  Target: PCSK9; (+) strand; PAM type: NRG; PAM sequence: CGG
caggctcctagtctgtcctc

SEQ ID NO: 14666 - DNA, 20 bp, Artificial Sequence
  Description of Artificial Sequence: Synthetic oligonucleotide
  Target: PCSK9; (+) strand; PAM type: NRG; PAM sequence: GGG
aggctcctagtctgtcctcc

SEQ ID NO: 14667 - DNA, 20 bp, Artificial Sequence
  Description of Artificial Sequence: Synthetic oligonucleotide
  Target: PCSK9; (+) strand; PAM type: NRG; PAM sequence: GGG
ggctcctagtctgtcctccg

SEQ ID NO: 14668 - DNA, 20 bp, Artificial Sequence
  Description of Artificial Sequence: Synthetic oligonucleotide
  Target: PCSK9; (+) strand; PAM type: NRG; PAM sequence: TAG
tagtctgtcctccggggcac

SEQ ID NO: 14669 - DNA, 20 bp, Artificial Sequence
  Description of Artificial Sequence: Synthetic oligonucleotide
  Target: PCSK9; (+) strand; PAM type: NRG; PAM sequence: CAG
tctgtcctccggggcactag

SEQ ID NO: 14670 - DNA, 20 bp, Artificial Sequence
  Description of Artificial Sequence: Synthetic oligonucleotide
  Target: PCSK9; (+) strand; PAM type: NRG; PAM sequence: AGG
ctgtcctccggggcactagc

SEQ ID NO: 14671 - DNA, 20 bp, Artificial Sequence
  Description of Artificial Sequence: Synthetic oligonucleotide
  Target: PCSK9; (+) strand; PAM type: NRG; PAM sequence: GGG
tgtcctccggggcactagca

SEQ ID NO: 14672 - DNA, 20 bp, Artificial Sequence
  Description of Artificial Sequence: Synthetic oligonucleotide
  Target: PCSK9; (+) strand; PAM type: NRG; PAM sequence: AAG
tccggggcactagcagggac

SEQ ID NO: 14673 - DNA, 20 bp, Artificial Sequence
  Description of Artificial Sequence: Synthetic oligonucleotide
  Target: PCSK9; (+) strand; PAM type: NRG; PAM sequence: AGG
ccggggcactagcagggaca

SEQ ID NO: 14674 - DNA, 20 bp, Artificial Sequence
  Description of Artificial Sequence: Synthetic oligonucleotide
  Target: PCSK9; (+) strand; PAM type: NRG; PAM sequence: TGG
gggcactagcagggacaagg

SEQ ID NO: 14675 - DNA, 20 bp, Artificial Sequence
  Description of Artificial Sequence: Synthetic oligonucleotide
  Target: PCSK9; (+) strand; PAM type: NRG; PAM sequence: GGG
ggcactagcagggacaaggt

SEQ ID NO: 14676 - DNA, 20 bp, Artificial Sequence
  Description of Artificial Sequence: Synthetic oligonucleotide
  Target: PCSK9; (+) strand; PAM type: NRG; PAM sequence: GAG
cactagcagggacaaggtgg

SEQ ID NO: 14677 - DNA, 20 bp, Artificial Sequence
  Description of Artificial Sequence: Synthetic oligonucleotide
  Target: PCSK9; (+) strand; PAM type: NRG; PAM sequence: AGG
actagcagggacaaggtggg

SEQ ID NO: 14678 - DNA, 20 bp, Artificial Sequence
  Description of Artificial Sequence: Synthetic oligonucleotide
  Target: PCSK9; (+) strand; PAM type: NRG; PAM sequence: TGG
gggacaaggtgggaggctgc

SEQ ID NO: 14679 - DNA, 20 bp, Artificial Sequence
  Description of Artificial Sequence: Synthetic oligonucleotide
  Target: PCSK9; (+) strand; PAM type: NRG; PAM sequence: GGG
ggacaaggtgggaggctgct

SEQ ID NO: 14680 - DNA, 20 bp, Artificial Sequence
  Description of Artificial Sequence: Synthetic oligonucleotide
  Target: PCSK9; (+) strand; PAM type: NRG; PAM sequence: TGG
aaggtgggaggctgctgggc

SEQ ID NO: 14681 - DNA, 20 bp, Artificial Sequence
  Description of Artificial Sequence: Synthetic oligonucleotide
  Target: PCSK9; (+) strand; PAM type: NRG; PAM sequence: GGG
aggtgggaggctgctgggct

SEQ ID NO: 14682 - DNA, 20 bp, Artificial Sequence
  Description of Artificial Sequence: Synthetic oligonucleotide
  Target: PCSK9; (+) strand; PAM type: NRG; PAM sequence: TGG
gaggctgctgggctgggatg

SEQ ID NO: 14683 - DNA, 20 bp, Artificial Sequence
  Description of Artificial Sequence: Synthetic oligonucleotide
  Target: PCSK9; (+) strand; PAM type: NRG; PAM sequence: GGG
aggctgctgggctgggatgt

SEQ ID NO: 14684 - DNA, 20 bp, Artificial Sequence
  Description of Artificial Sequence: Synthetic oligonucleotide
  Target: PCSK9; (+) strand; PAM type: NRG; PAM sequence: GGG
ggctgctgggctgggatgtg

SEQ ID NO: 14685 - DNA, 20 bp, Artificial Sequence
  Description of Artificial Sequence: Synthetic oligonucleotide
  Target: PCSK9; (+) strand; PAM type: NRG; PAM sequence: CAG
gctgggctgggatgtgggga

SEQ ID NO: 14686 - DNA, 20 bp, Artificial Sequence
  Description of Artificial Sequence: Synthetic oligonucleotide
  Target: PCSK9; (+) strand; PAM type: NRG; PAM sequence: AGG
ctgggctgggatgtggggac

SEQ ID NO: 14687 - DNA, 20 bp, Artificial Sequence
  Description of Artificial Sequence: Synthetic oligonucleotide
  Target: PCSK9; (+) strand; PAM type: NRG; PAM sequence: CAG
gatgtggggacaggtttgat

SEQ ID NO: 14688 - DNA, 20 bp, Artificial Sequence
  Description of Artificial Sequence: Synthetic oligonucleotide
  Target: PCSK9; (+) strand; PAM type: NRG; PAM sequence: AGG
atgtggggacaggtttgatc

SEQ ID NO: 14689 - DNA, 20 bp, Artificial Sequence
  Description of Artificial Sequence: Synthetic oligonucleotide
  Target: PCSK9; (+) strand; PAM type: NRG; PAM sequence: AAG
ggggacaggtttgatcaggt

SEQ ID NO: 14690 - DNA, 20 bp, Artificial Sequence
  Description of Artificial Sequence: Synthetic oligonucleotide
  Target: PCSK9; (+) strand; PAM type: NRG; PAM sequence: AGG
gggacaggtttgatcaggta

SEQ ID NO: 14691 - DNA, 20 bp, Artificial Sequence
  Description of Artificial Sequence: Synthetic oligonucleotide
  Target: PCSK9; (+) strand; PAM type: NRG; PAM sequence: CAG
caggtttgatcaggtaaggc

SEQ ID NO: 14692 - DNA, 20 bp, Artificial Sequence
  Description of Artificial Sequence: Synthetic oligonucleotide
  Target: PCSK9; (+) strand; PAM type: NRG; PAM sequence: AGG
aggtttgatcaggtaaggcc

SEQ ID NO: 14693 - DNA, 20 bp, Artificial Sequence
  Description of Artificial Sequence: Synthetic oligonucleotide
  Target: PCSK9; (+) strand; PAM type: NRG; PAM sequence: TGG
gatcaggtaaggccaggctg

SEQ ID NO: 14694 - DNA, 20 bp, Artificial Sequence
  Description of Artificial Sequence: Synthetic oligonucleotide
  Target: PCSK9; (+) strand; PAM type: NRG; PAM sequence: TGG
tgtgtttgctgctgtccaaa

SEQ ID NO: 14695 - DNA, 20 bp, Artificial Sequence
  Description of Artificial Sequence: Synthetic oligonucleotide
  Target: PCSK9; (+) strand; PAM type: NRG; PAM sequence: AAG
tgctgctgtccaaatggctt

SEQ ID NO: 14696 - DNA, 20 bp, Artificial Sequence
  Description of Artificial Sequence: Synthetic oligonucleotide
  Target: PCSK9; (+) strand; PAM type: NRG; PAM sequence: CAG
tgctgtccaaatggcttaag

SEQ ID NO: 14697 - DNA, 20 bp, Artificial Sequence
  Description of Artificial Sequence: Synthetic oligonucleotide
  Target: PCSK9; (+) strand; PAM type: NRG; PAM sequence: GAG
ctgtccaaatggcttaagca

SEQ ID NO: 14698 - DNA, 20 bp, Artificial Sequence
  Description of Artificial Sequence: Synthetic oligonucleotide
  Target: PCSK9; (+) strand; PAM type: NRG; PAM sequence: CGG
atggcttaagcagagtcccc

SEQ ID NO: 14699 - DNA, 20 bp, Artificial Sequence
  Description of Artificial Sequence: Synthetic oligonucleotide
  Target: PCSK9; (+) strand; PAM type: NRG; PAM sequence: TGG
gcagagtcccccggcctctc

SEQ ID NO: 14700 - DNA, 20 bp, Artificial Sequence
  Description of Artificial Sequence: Synthetic oligonucleotide
  Target: PCSK9; (+) strand; PAM type: NRG; PAM sequence: CAG
cccggcctctctggcttctg

SEQ ID NO: 14701 - DNA, 20 bp, Artificial Sequence
  Description of Artificial Sequence: Synthetic oligonucleotide
  Target: PCSK9; (+) strand; PAM type: NRG; PAM sequence: AGG
ccggcctctctggcttctgc

SEQ ID NO: 14702 - DNA, 20 bp, Artificial Sequence
  Description of Artificial Sequence: Synthetic oligonucleotide
  Target: PCSK9; (+) strand; PAM type: NRG; PAM sequence: AAG
tctggcttctgcaggccttg

SEQ ID NO: 14703 - DNA, 20 bp, Artificial Sequence
  Description of Artificial Sequence: Synthetic oligonucleotide
  Target: PCSK9; (+) strand; PAM type: NRG; PAM sequence: GAG
tgccccatgtcgactacatc

SEQ ID NO: 14704 - DNA, 20 bp, Artificial Sequence
  Description of Artificial Sequence: Synthetic oligonucleotide
  Target: PCSK9; (+) strand; PAM type: NRG; PAM sequence: AGG
gccccatgtcgactacatcg

SEQ ID NO: 14705 - DNA, 20 bp, Artificial Sequence
  Description of Artificial Sequence: Synthetic oligonucleotide
  Target: PCSK9; (+) strand; PAM type: NRG; PAM sequence: GAG
cccatgtcgactacatcgag

SEQ ID NO: 14706 - DNA, 20 bp, Artificial Sequence
  Description of Artificial Sequence: Synthetic oligonucleotide
  Target: PCSK9; (+) strand; PAM type: NRG; PAM sequence: AGG
ccatgtcgactacatcgagg

SEQ ID NO: 14707 - DNA, 20 bp, Artificial Sequence
  Description of Artificial Sequence: Synthetic oligonucleotide
  Target: PCSK9; (+) strand; PAM type: NRG; PAM sequence: CAG
aggactcctctgtctttgcc

SEQ ID NO: 14708 - DNA, 20 bp, Artificial Sequence
  Description of Artificial Sequence: Synthetic oligonucleotide
  Target: PCSK9; (+) strand; PAM type: NRG; PAM sequence: GAG
gactcctctgtctttgccca

SEQ ID NO: 14709 - DNA, 20 bp, Artificial Sequence
  Description of Artificial Sequence: Synthetic oligonucleotide
  Target: PCSK9; (+) strand; PAM type: NRG; PAM sequence: TGG
tctttgcccagagcatcccg

SEQ ID NO: 14710 - DNA, 20 bp, Artificial Sequence
  Description of Artificial Sequence: Synthetic oligonucleotide
  Target: PCSK9; (+) strand; PAM type: NRG; PAM sequence: TGG
ccagagcatcccgtggaacc

SEQ ID NO: 14711 - DNA, 20 bp, Artificial Sequence
  Description of Artificial Sequence: Synthetic oligonucleotide
  Target: PCSK9; (+) strand; PAM type: NRG; PAM sequence: GAG
agagcatcccgtggaacctg

SEQ ID NO: 14712 - DNA, 20 bp, Artificial Sequence
  Description of Artificial Sequence: Synthetic oligonucleotide
  Target: PCSK9; (+) strand; PAM type: NRG; PAM sequence: CGG
gcatcccgtggaacctggag

SEQ ID NO: 14713 - DNA, 20 bp, Artificial Sequence
  Description of Artificial Sequence: Synthetic oligonucleotide
  Target: PCSK9; (+) strand; PAM type: NRG; PAM sequence: CGG
tggagcggattacccctcca

SEQ ID NO: 14714 - DNA, 20 bp, Artificial Sequence
  Description of Artificial Sequence: Synthetic oligonucleotide
  Target: PCSK9; (+) strand; PAM type: NRG; PAM sequence: CGG
ggattacccctccacggtac

SEQ ID NO: 14715 - DNA, 20 bp, Artificial Sequence
  Description of Artificial Sequence: Synthetic oligonucleotide
  Target: PCSK9; (+) strand; PAM type: NRG; PAM sequence: GGG
gattacccctccacggtacc

SEQ ID NO: 14716 - DNA, 20 bp, Artificial Sequence
  Description of Artificial Sequence: Synthetic oligonucleotide
  Target: PCSK9; (+) strand; PAM type: NRG; PAM sequence: CGG
tacccctccacggtaccggg

SEQ ID NO: 14717 - DNA, 20 bp, Artificial Sequence
  Description of Artificial Sequence: Synthetic oligonucleotide
  Target: PCSK9; (+) strand; PAM type: NRG; PAM sequence: CAG
ggtaccgggcggatgaatac

SEQ ID NO: 14718 - DNA, 20 bp, Artificial Sequence
  Description of Artificial Sequence: Synthetic oligonucleotide
  Target: PCSK9; (+) strand; PAM type: NRG; PAM sequence: CGG
gcggatgaataccagccccc

SEQ ID NO: 14719 - DNA, 20 bp, Artificial Sequence
  Description of Artificial Sequence: Synthetic oligonucleotide
  Target: PCSK9; (+) strand; PAM type: NRG; PAM sequence: AAG
atgaataccagccccccggt

SEQ ID NO: 14720 - DNA, 20 bp, Artificial Sequence
  Description of Artificial Sequence: Synthetic oligonucleotide
  Target: PCSK9; (+) strand; PAM type: NRG; PAM sequence: GAG
tgccctgccccaccccatct

SEQ ID NO: 14721 - DNA, 20 bp, Artificial Sequence
  Description of Artificial Sequence: Synthetic oligonucleotide
  Target: PCSK9; (+) strand; PAM type: NRG; PAM sequence: TGG
tgaatccatttgctctgccc

SEQ ID NO: 14722 - DNA, 20 bp, Artificial Sequence
  Description of Artificial Sequence: Synthetic oligonucleotide
  Target: PCSK9; (+) strand; PAM type: NRG; PAM sequence: TGG
ccatttgctctgccctggcc

SEQ ID NO: 14723 - DNA, 20 bp, Artificial Sequence
  Description of Artificial Sequence: Synthetic oligonucleotide
  Target: PCSK9; (+) strand; PAM type: NRG; PAM sequence: TGG
ccctggcctggcctccctgc

SEQ ID NO: 14724 - DNA, 20 bp, Artificial Sequence
  Description of Artificial Sequence: Synthetic oligonucleotide
  Target: PCSK9; (+) strand; PAM type: NRG; PAM sequence: TGG
tggcctggcctccctgctgg

SEQ ID NO: 14725 - DNA, 20 bp, Artificial Sequence
  Description of Artificial Sequence: Synthetic oligonucleotide
  Target: PCSK9; (+) strand; PAM type: NRG; PAM sequence: CGG
tgctggtggtttccacttct

SEQ ID NO: 14726 - DNA, 20 bp, Artificial Sequence
  Description of Artificial Sequence: Synthetic oligonucleotide
  Target: PCSK9; (+) strand; PAM type: NRG; PAM sequence: GGG
gctggtggtttccacttctc

SEQ ID NO: 14727 - DNA, 20 bp, Artificial Sequence
  Description of Artificial Sequence: Synthetic oligonucleotide
  Target: PCSK9; (+) strand; PAM type: NRG; PAM sequence: GGG
ctggtggtttccacttctcg

SEQ ID NO: 14728 - DNA, 20 bp, Artificial Sequence
  Description of Artificial Sequence: Synthetic oligonucleotide
  Target: PCSK9; (+) strand; PAM type: NRG; PAM sequence: GGG
tggtggtttccacttctcgg

SEQ ID NO: 14729 - DNA, 20 bp, Artificial Sequence
  Description of Artificial Sequence: Synthetic oligonucleotide
  Target: PCSK9; (+) strand; PAM type: NRG; PAM sequence: GGG
ggtggtttccacttctcggg

SEQ ID NO: 14730 - DNA, 20 bp, Artificial Sequence
  Description of Artificial Sequence: Synthetic oligonucleotide
  Target: PCSK9; (+) strand; PAM type: NRG; PAM sequence: TGG
ttccacttctcggggggctt

SEQ ID NO: 14731 - DNA, 20 bp, Artificial Sequence
  Description of Artificial Sequence: Synthetic oligonucleotide
  Target: PCSK9; (+) strand; PAM type: NRG; PAM sequence: GGG
tccacttctcggggggcttt

SEQ ID NO: 14732 - DNA, 20 bp, Artificial Sequence
  Description of Artificial Sequence: Synthetic oligonucleotide
  Target: PCSK9; (+) strand; PAM type: NRG; PAM sequence: CAG
tctcggggggctttgggact

SEQ ID NO: 14733 - DNA, 20 bp, Artificial Sequence
  Description of Artificial Sequence: Synthetic oligonucleotide
  Target: PCSK9; (+) strand; PAM type: NRG; PAM sequence: CAG
tgtcccatccccatcccctg

SEQ ID NO: 14734 - DNA, 20 bp, Artificial Sequence
  Description of Artificial Sequence: Synthetic oligonucleotide
  Target: PCSK9; (+) strand; PAM type: NRG; PAM sequence: AAG
ctgttgccccacaaatgcaa

SEQ ID NO: 14735 - DNA, 20 bp, Artificial Sequence
  Description of Artificial Sequence: Synthetic oligonucleotide
  Target: PCSK9; (+) strand; PAM type: NRG; PAM sequence: TGG
gttttccttttctcaccatt

SEQ ID NO: 14736 - DNA, 20 bp, Artificial Sequence
  Description of Artificial Sequence: Synthetic oligonucleotide
  Target: PCSK9; (+) strand; PAM type: NRG; PAM sequence: TGG
ccttttctcaccatttggaa

SEQ ID NO: 14737 - DNA, 20 bp, Artificial Sequence
  Description of Artificial Sequence: Synthetic oligonucleotide
  Target: PCSK9; (+) strand; PAM type: NRG; PAM sequence: CAG
tctcaccatttggaatggcc

SEQ ID NO: 14738 - DNA, 20 bp, Artificial Sequence
  Description of Artificial Sequence: Synthetic oligonucleotide
  Target: PCSK9; (+) strand; PAM type: NRG; PAM sequence: CAG
caccatttggaatggcccag

SEQ ID NO: 14739 - DNA, 20 bp, Artificial Sequence
  Description of Artificial Sequence: Synthetic oligonucleotide
  Target: PCSK9; (+) strand; PAM type: NRG; PAM sequence: AGG
accatttggaatggcccagc

SEQ ID NO: 14740 - DNA, 20 bp, Artificial Sequence
  Description of Artificial Sequence: Synthetic oligonucleotide
  Target: PCSK9; (+) strand; PAM type: NRG; PAM sequence: TGG
ccagcaggctgcacttacct

SEQ ID NO: 14741 - DNA, 20 bp, Artificial Sequence
  Description of Artificial Sequence: Synthetic oligonucleotide
  Target: PCSK9; (+) strand; PAM type: NRG; PAM sequence: AAG
gcaggctgcacttaccttgg

SEQ ID NO: 14742 - DNA, 20 bp, Artificial Sequence
  Description of Artificial Sequence: Synthetic oligonucleotide
  Target: PCSK9; (+) strand; PAM type: NRG; PAM sequence: AGG
caggctgcacttaccttgga

SEQ ID NO: 14743 - DNA, 20 bp, Artificial Sequence
  Description of Artificial Sequence: Synthetic oligonucleotide
  Target: PCSK9; (+) strand; PAM type: NRG; PAM sequence: GAG
ggctgcacttaccttggaag

SEQ ID NO: 14744 - DNA, 20 bp, Artificial Sequence
  Description of Artificial Sequence: Synthetic oligonucleotide
  Target: PCSK9; (+) strand; PAM type: NRG; PAM sequence: AGG
gctgcacttaccttggaagg

SEQ ID NO: 14745 - DNA, 20 bp, Artificial Sequence
  Description of Artificial Sequence: Synthetic oligonucleotide
  Target: PCSK9; (+) strand; PAM type: NRG; PAM sequence: GGG
ctgcacttaccttggaagga

SEQ ID NO: 14746 - DNA, 20 bp, Artificial Sequence
  Description of Artificial Sequence: Synthetic oligonucleotide
  Target: PCSK9; (+) strand; PAM type: NRG; PAM sequence: TGG
tggaaggagggttcatctga

SEQ ID NO: 14747 - DNA, 20 bp, Artificial Sequence
  Description of Artificial Sequence: Synthetic oligonucleotide
  Target: PCSK9; (+) strand; PAM type: NRG; PAM sequence: TAG
catctgatggtgactctacc

SEQ ID NO: 14748 - DNA, 20 bp, Artificial Sequence
  Description of Artificial Sequence: Synthetic oligonucleotide
  Target: PCSK9; (+) strand; PAM type: NRG; PAM sequence: AGG
atctgatggtgactctacct

SEQ ID NO: 14749 - DNA, 20 bp, Artificial Sequence
  Description of Artificial Sequence: Synthetic oligonucleotide
  Target: PCSK9; (+) strand; PAM type: NRG; PAM sequence: GGG
tctgatggtgactctaccta

SEQ ID NO: 14750 - DNA, 20 bp, Artificial Sequence
  Description of Artificial Sequence: Synthetic oligonucleotide
  Target: PCSK9; (+) strand; PAM type: NRG; PAM sequence: CAG
gtgactctacctagggcccc

SEQ ID NO: 14751 - DNA, 20 bp, Artificial Sequence
  Description of Artificial Sequence: Synthetic oligonucleotide
  Target: PCSK9; (+) strand; PAM type: NRG; PAM sequence: AGG
tgactctacctagggccccc

SEQ ID NO: 14752 - DNA, 20 bp, Artificial Sequence
  Description of Artificial Sequence: Synthetic oligonucleotide
  Target: PCSK9; (+) strand; PAM type: NRG; PAM sequence: CAG
ccccaggcctctataactcc

SEQ ID NO: 14753 - DNA, 20 bp, Artificial Sequence
  Description of Artificial Sequence: Synthetic oligonucleotide
  Target: PCSK9; (+) strand; PAM type: NRG; PAM sequence: CAG
ctataactcccagtgccctg

SEQ ID NO: 14754 - DNA, 20 bp, Artificial Sequence
  Description of Artificial Sequence: Synthetic oligonucleotide
  Target: PCSK9; (+) strand; PAM type: NRG; PAM sequence: TGG
actcccagtgccctgcagac

SEQ ID NO: 14755 - DNA, 20 bp, Artificial Sequence
  Description of Artificial Sequence: Synthetic oligonucleotide
  Target: PCSK9; (+) strand; PAM type: NRG; PAM sequence: CAG
cagtgccctgcagactggac

SEQ ID NO: 14756 - DNA, 20 bp, Artificial Sequence
  Description of Artificial Sequence: Synthetic oligonucleotide
  Target: PCSK9; (+) strand; PAM type: NRG; PAM sequence: TGG
gactggaccagatcctttaa

SEQ ID NO: 14757 - DNA, 20 bp, Artificial Sequence
  Description of Artificial Sequence: Synthetic oligonucleotide
  Target: PCSK9; (+) strand; PAM type: NRG; PAM sequence: GGG
actggaccagatcctttaat

SEQ ID NO: 14758 - DNA, 20 bp, Artificial Sequence
  Description of Artificial Sequence: Synthetic oligonucleotide
  Target: PCSK9; (+) strand; PAM type: NRG; PAM sequence: TAG
gaccagatcctttaatggga

SEQ ID NO: 14759 - DNA, 20 bp, Artificial Sequence
  Description of Artificial Sequence: Synthetic oligonucleotide
  Target: PCSK9; (+) strand; PAM type: NRG; PAM sequence: TGG
gggatagacacaaccctgtc

SEQ ID NO: 14760 - DNA, 20 bp, Artificial Sequence
  Description of Artificial Sequence: Synthetic oligonucleotide
  Target: PCSK9; (+) strand; PAM type: NRG; PAM sequence: GGG
ggatagacacaaccctgtct

SEQ ID NO: 14761 - DNA, 20 bp, Artificial Sequence
  Description of Artificial Sequence: Synthetic oligonucleotide
  Target: PCSK9; (+) strand; PAM type: NRG; PAM sequence: CAG
tttgctgctccacctgcctc

SEQ ID NO: 14762 - DNA, 20 bp, Artificial Sequence
  Description of Artificial Sequence: Synthetic oligonucleotide
  Target: PCSK9; (+) strand; PAM type: NRG; PAM sequence: TGG
cacctgcctccagctccgtt

SEQ ID NO: 14763 - DNA, 20 bp, Artificial Sequence
  Description of Artificial Sequence: Synthetic oligonucleotide
  Target: PCSK9; (+) strand; PAM type: NRG; PAM sequence: TGG
tccagctccgtttggcttcc

SEQ ID NO: 14764 - DNA, 20 bp, Artificial Sequence
  Description of Artificial Sequence: Synthetic oligonucleotide
  Target: PCSK9; (+) strand; PAM type: NRG; PAM sequence: GGG
ccagctccgtttggcttcct

SEQ ID NO: 14765 - DNA, 20 bp, Artificial Sequence
  Description of Artificial Sequence: Synthetic oligonucleotide
  Target: PCSK9; (+) strand; PAM type: NRG; PAM sequence: GGG
cagctccgtttggcttcctg

SEQ ID NO: 14766 - DNA, 20 bp, Artificial Sequence
  Description of Artificial Sequence: Synthetic oligonucleotide
  Target: PCSK9; (+) strand; PAM type: NRG; PAM sequence: TGG
gcttcctggggctccctgcc

SEQ ID NO: 14767 - DNA, 20 bp, Artificial Sequence
  Description of Artificial Sequence: Synthetic oligonucleotide
  Target: PCSK9; (+) strand; PAM type: NRG; PAM sequence: GGG
cttcctggggctccctgcct

SEQ ID NO: 14768 - DNA, 20 bp, Artificial Sequence
  Description of Artificial Sequence: Synthetic oligonucleotide
  Target: PCSK9; (+) strand; PAM type: NRG; PAM sequence: TAG
gccactttgtgtcttccctc

SEQ ID NO: 14769 - DNA, 20 bp, Artificial Sequence
  Description of Artificial Sequence: Synthetic oligonucleotide
  Target: PCSK9; (+) strand; PAM type: NRG; PAM sequence: AGG
ccactttgtgtcttccctct

SEQ ID NO: 14770 - DNA, 20 bp, Artificial Sequence
  Description of Artificial Sequence: Synthetic oligonucleotide
  Target: PCSK9; (+) strand; PAM type: NRG; PAM sequence: TGG
tttccactgttccctctgcc

SEQ ID NO: 14771 - DNA, 20 bp, Artificial Sequence
  Description of Artificial Sequence: Synthetic oligonucleotide
  Target: PCSK9; (+) strand; PAM type: NRG; PAM sequence: TGG
actgttccctctgcctggtg

SEQ ID NO: 14772 - DNA, 20 bp, Artificial Sequence
  Description of Artificial Sequence: Synthetic oligonucleotide
  Target: PCSK9; (+) strand; PAM type: NRG; PAM sequence: TGG
tccctctgcctggtgtggcc

SEQ ID NO: 14773 - DNA, 20 bp, Artificial Sequence
  Description of Artificial Sequence: Synthetic oligonucleotide
  Target: PCSK9; (+) strand; PAM type: NRG; PAM sequence: TGG
tgcctggtgtggcctggcta

SEQ ID NO: 14774 - DNA, 20 bp, Artificial Sequence
  Description of Artificial Sequence: Synthetic oligonucleotide
  Target: PCSK9; (+) strand; PAM type: NRG; PAM sequence: AAG
ctggtgtggcctggctatgg

SEQ ID NO: 14775 - DNA, 20 bp, Artificial Sequence
  Description of Artificial Sequence: Synthetic oligonucleotide
  Target: PCSK9; (+) strand; PAM type: NRG; PAM sequence: AGG
tggtgtggcctggctatgga

SEQ ID NO: 14776 - DNA, 20 bp, Artificial Sequence
  Description of Artificial Sequence: Synthetic oligonucleotide
  Target: PCSK9; (+) strand; PAM type: NRG; PAM sequence: GGG
ggtgtggcctggctatggaa

SEQ ID NO: 14777 - DNA, 20 bp, Artificial Sequence
  Description of Artificial Sequence: Synthetic oligonucleotide
  Target: PCSK9; (+) strand; PAM type: NRG; PAM sequence: GAG
tgtggcctggctatggaagg

SEQ ID NO: 14778 - DNA, 20 bp, Artificial Sequence
  Description of Artificial Sequence: Synthetic oligonucleotide
  Target: PCSK9; (+) strand; PAM type: NRG; PAM sequence: AGG
gtggcctggctatggaaggg

SEQ ID NO: 14779 - DNA, 20 bp, Artificial Sequence
  Description of Artificial Sequence: Synthetic oligonucleotide
  Target: PCSK9; (+) strand; PAM type: NRG; PAM sequence: GGG
tggcctggctatggaaggga

SEQ ID NO: 14780 - DNA, 20 bp, Artificial Sequence
  Description of Artificial Sequence: Synthetic oligonucleotide
  Target: PCSK9; (+) strand; PAM type: NRG; PAM sequence: GAG
gcctggctatggaagggagg

SEQ ID NO: 14781 - DNA, 20 bp, Artificial Sequence
  Description of Artificial Sequence: Synthetic oligonucleotide
  Target: PCSK9; (+) strand; PAM type: NRG; PAM sequence: AGG
cctggctatggaagggaggg

SEQ ID NO: 14782 - DNA, 20 bp, Artificial Sequence
  Description of Artificial Sequence: Synthetic oligonucleotide
  Target: PCSK9; (+) strand; PAM type: NRG; PAM sequence: GAG
tggctatggaagggagggag

SEQ ID NO: 14783 - DNA, 20 bp, Artificial Sequence
  Description of Artificial Sequence: Synthetic oligonucleotide
  Target: PCSK9; (+) strand; PAM type: NRG; PAM sequence: AGG
ggctatggaagggagggagg

SEQ ID NO: 14784 - DNA, 20 bp, Artificial Sequence
  Description of Artificial Sequence: Synthetic oligonucleotide
  Target: PCSK9; (+) strand; PAM type: NRG; PAM sequence: GAG
ctatggaagggagggaggag

SEQ ID NO: 14785 - DNA, 20 bp, Artificial Sequence
  Description of Artificial Sequence: Synthetic oligonucleotide
  Target: PCSK9; (+) strand; PAM type: NRG; PAM sequence: CGG
tggaagggagggaggaggag

SEQ ID NO: 14786 - DNA, 20 bp, Artificial Sequence
  Description of Artificial Sequence: Synthetic oligonucleotide
  Target: PCSK9; (+) strand; PAM type: NRG; PAM sequence: TGG
ggagggaggaggagcggcca

SEQ ID NO: 14787 - DNA, 20 bp, Artificial Sequence
  Description of Artificial Sequence: Synthetic oligonucleotide
  Target: PCSK9; (+) strand; PAM type: NRG; PAM sequence: CGG
ggaggagcggccatggaaaa

SEQ ID NO: 14788 - DNA, 20 bp, Artificial Sequence
  Description of Artificial Sequence: Synthetic oligonucleotide
  Target: PCSK9; (+) strand; PAM type: NRG; PAM sequence: TAG
atggaaaacggtctgcattc

SEQ ID NO: 14789 - DNA, 20 bp, Artificial Sequence
  Description of Artificial Sequence: Synthetic oligonucleotide
  Target: PCSK9; (+) strand; PAM type: NRG; PAM sequence: CAG
gaaaacggtctgcattctag

SEQ ID NO: 14790 - DNA, 20 bp, Artificial Sequence
  Description of Artificial Sequence: Synthetic oligonucleotide
  Target: PCSK9; (+) strand; PAM type: NRG; PAM sequence: AGG
aaaacggtctgcattctagc

SEQ ID NO: 14791 - DNA, 20 bp, Artificial Sequence
  Description of Artificial Sequence: Synthetic oligonucleotide
  Target: PCSK9; (+) strand; PAM type: NRG; PAM sequence: GGG
aaacggtctgcattctagca

SEQ ID NO: 14792 - DNA, 20 bp, Artificial Sequence
  Description of Artificial Sequence: Synthetic oligonucleotide
  Target: PCSK9; (+) strand; PAM type: NRG; PAM sequence: CAG
tgcattctagcagggacttg

SEQ ID NO: 14793 - DNA, 20 bp, Artificial Sequence
  Description of Artificial Sequence: Synthetic oligonucleotide
  Target: PCSK9; (+) strand; PAM type: NRG; PAM sequence: AGG
gcattctagcagggacttgc

SEQ ID NO: 14794 - DNA, 20 bp, Artificial Sequence
  Description of Artificial Sequence: Synthetic oligonucleotide
  Target: PCSK9; (+) strand; PAM type: NRG; PAM sequence: TGG
ttctagcagggacttgcagg

SEQ ID NO: 14795 - DNA, 20 bp, Artificial Sequence
  Description of Artificial Sequence: Synthetic oligonucleotide
  Target: PCSK9; (+) strand; PAM type: NRG; PAM sequence: CAG
gggacttgcaggtggcaatt

SEQ ID NO: 14796 - DNA, 20 bp, Artificial Sequence
  Description of Artificial Sequence: Synthetic oligonucleotide
  Target: PCSK9; (+) strand; PAM type: NRG; PAM sequence: CGG
cttgcaggtggcaattcagt

SEQ ID NO: 14797 - DNA, 20 bp, Artificial Sequence
  Description of Artificial Sequence: Synthetic oligonucleotide
  Target: PCSK9; (+) strand; PAM type: NRG; PAM sequence: GGG
ttgcaggtggcaattcagtc

SEQ ID NO: 14798 - DNA, 20 bp, Artificial Sequence
  Description of Artificial Sequence: Synthetic oligonucleotide
  Target: PCSK9; (+) strand; PAM type: NRG; PAM sequence: GGG
tgcaggtggcaattcagtcg

SEQ ID NO: 14799 - DNA, 20 bp, Artificial Sequence
  Description of Artificial Sequence: Synthetic oligonucleotide
  Target: PCSK9; (+) strand; PAM type: NRG; PAM sequence: AAG
aggtggcaattcagtcgggg

SEQ ID NO: 14800 - DNA, 20 bp, Artificial Sequence
  Description of Artificial Sequence: Synthetic oligonucleotide
  Target: PCSK9; (+) strand; PAM type: NRG; PAM sequence: TAG
aattcagtcggggaagactc

SEQ ID NO: 14801 - DNA, 20 bp, Artificial Sequence
  Description of Artificial Sequence: Synthetic oligonucleotide
  Target: PCSK9; (+) strand; PAM type: NRG; PAM sequence: TGG
gggaagactctagatgcacc

SEQ ID NO: 14802 - DNA, 20 bp, Artificial Sequence
  Description of Artificial Sequence: Synthetic oligonucleotide
  Target: PCSK9; (+) strand; PAM type: NRG; PAM sequence: GAG
actctagatgcacctggcct

SEQ ID NO: 14803 - DNA, 20 bp, Artificial Sequence
  Description of Artificial Sequence: Synthetic oligonucleotide
  Target: PCSK9; (+) strand; PAM type: NRG; PAM sequence: AGG
ctctagatgcacctggcctg

SEQ ID NO: 14804 - DNA, 20 bp, Artificial Sequence
  Description of Artificial Sequence: Synthetic oligonucleotide
  Target: PCSK9; (+) strand; PAM type: NRG; PAM sequence: GAG
ctagatgcacctggcctgag

SEQ ID NO: 14805 - DNA, 20 bp, Artificial Sequence
  Description of Artificial Sequence: Synthetic oligonucleotide
  Target: PCSK9; (+) strand; PAM type: NRG; PAM sequence: GAG
agatgcacctggcctgagga

SEQ ID NO: 14806 - DNA, 20 bp, Artificial Sequence
  Description of Artificial Sequence: Synthetic oligonucleotide
  Target: PCSK9; (+) strand; PAM type: NRG; PAM sequence: AAG
cctggcctgaggagagaatg

SEQ ID NO: 14807 - DNA, 20 bp, Artificial Sequence
  Description of Artificial Sequence: Synthetic oligonucleotide
  Target: PCSK9; (+) strand; PAM type: NRG; PAM sequence: AGG
ctggcctgaggagagaatga

SEQ ID NO: 14808 - DNA, 20 bp, Artificial Sequence
  Description of Artificial Sequence: Synthetic oligonucleotide
  Target: PCSK9; (+) strand; PAM type: NRG; PAM sequence: GGG
tggcctgaggagagaatgaa

SEQ ID NO: 14809 - DNA, 20 bp, Artificial Sequence
  Description of Artificial Sequence: Synthetic oligonucleotide
  Target: PCSK9; (+) strand; PAM type: NRG; PAM sequence: TAG
gaggagagaatgaagggttc

SEQ ID NO: 14810 - DNA, 20 bp, Artificial Sequence
  Description of Artificial Sequence: Synthetic oligonucleotide
  Target: PCSK9; (+) strand; PAM type: NRG; PAM sequence: TGG
agagaatgaagggttctagt

SEQ ID NO: 14811 - DNA, 20 bp, Artificial Sequence
  Description of Artificial Sequence: Synthetic oligonucleotide
  Target: PCSK9; (+) strand; PAM type: NRG; PAM sequence: AAG
ggttctagttggactgtgtt

SEQ ID NO: 14812 - DNA, 20 bp, Artificial Sequence
  Description of Artificial Sequence: Synthetic oligonucleotide
  Target: PCSK9; (+) strand; PAM type: NRG; PAM sequence: GAG
agttggactgtgttaagttt

SEQ ID NO: 14813 - DNA, 20 bp, Artificial Sequence
  Description of Artificial Sequence: Synthetic oligonucleotide
  Target: PCSK9; (+) strand; PAM type: NRG; PAM sequence: AGG
gttggactgtgttaagtttg

SEQ ID NO: 14814 - DNA, 20 bp, Artificial Sequence
  Description of Artificial Sequence: Synthetic oligonucleotide
  Target: PCSK9; (+) strand; PAM type: NRG; PAM sequence: TGG
tgttaagtttgaggtgccca

SEQ ID NO: 14815 - DNA, 20 bp, Artificial Sequence
  Description of Artificial Sequence: Synthetic oligonucleotide
  Target: PCSK9; (+) strand; PAM type: NRG; PAM sequence: GAG
gtttgaggtgcccatggtgt

SEQ ID NO: 14816 - DNA, 20 bp, Artificial Sequence
  Description of Artificial Sequence: Synthetic oligonucleotide
  Target: PCSK9; (+) strand; PAM type: NRG; PAM sequence: AGG
tttgaggtgcccatggtgtg

SEQ ID NO: 14817 - DNA, 20 bp, Artificial Sequence
  Description of Artificial Sequence: Synthetic oligonucleotide
  Target: PCSK9; (+) strand; PAM type: NRG; PAM sequence: TGG
ggtgcccatggtgtgaggtc

SEQ ID NO: 14818 - DNA, 20 bp, Artificial Sequence
  Description of Artificial Sequence: Synthetic oligonucleotide
  Target: PCSK9; (+) strand; PAM type: NRG; PAM sequence: GAG
tgcccatggtgtgaggtctg

SEQ ID NO: 14819 - DNA, 20 bp, Artificial Sequence
  Description of Artificial Sequence: Synthetic oligonucleotide
  Target: PCSK9; (+) strand; PAM type: NRG; PAM sequence: CAG
atggtgtgaggtctggagct

SEQ ID NO: 14820 - DNA, 20 bp, Artificial Sequence
  Description of Artificial Sequence: Synthetic oligonucleotide
  Target: PCSK9; (+) strand; PAM type: NRG; PAM sequence: CAG
gtgaggtctggagctcagcg

SEQ ID NO: 14821 - DNA, 20 bp, Artificial Sequence
  Description of Artificial Sequence: Synthetic oligonucleotide
  Target: PCSK9; (+) strand; PAM type: NRG; PAM sequence: GAG
gaggtctggagctcagcgca

SEQ ID NO: 14822 - DNA, 20 bp, Artificial Sequence
  Description of Artificial Sequence: Synthetic oligonucleotide
  Target: PCSK9; (+) strand; PAM type: NRG; PAM sequence: TGG
agcgcagagatgatgcaatg

SEQ ID NO: 14823 - DNA, 20 bp, Artificial Sequence
  Description of Artificial Sequence: Synthetic oligonucleotide
  Target: PCSK9; (+) strand; PAM type: NRG; PAM sequence: TGG
gcagagatgatgcaatgtgg

SEQ ID NO: 14824 - DNA, 20 bp, Artificial Sequence
  Description of Artificial Sequence: Synthetic oligonucleotide
  Target: PCSK9; (+) strand; PAM type: NRG; PAM sequence: GGG
cagagatgatgcaatgtggt

SEQ ID NO: 14825 - DNA, 20 bp, Artificial Sequence
  Description of Artificial Sequence: Synthetic oligonucleotide
  Target: PCSK9; (+) strand; PAM type: NRG; PAM sequence: TGG
tgtggtgggtccatgcaaca

SEQ ID NO: 14826 - DNA, 20 bp, Artificial Sequence
  Description of Artificial Sequence: Synthetic oligonucleotide
  Target: PCSK9; (+) strand; PAM type: NRG; PAM sequence: CAG
gggtccatgcaacatggtgc

SEQ ID NO: 14827 - DNA, 20 bp, Artificial Sequence
  Description of Artificial Sequence: Synthetic oligonucleotide
  Target: PCSK9; (+) strand; PAM type: NRG; PAM sequence: AGG
ggtccatgcaacatggtgcc

SEQ ID NO: 14828 - DNA, 20 bp, Artificial Sequence
  Description of Artificial Sequence: Synthetic oligonucleotide
  Target: PCSK9; (+) strand; PAM type: NRG; PAM sequence: CAG
tgcaacatggtgccaggacg

SEQ ID NO: 14829 - DNA, 20 bp, Artificial Sequence
  Description of Artificial Sequence: Synthetic oligonucleotide
  Target: PCSK9; (+) strand; PAM type: NRG; PAM sequence: GAG
caacatggtgccaggacgca

SEQ ID NO: 14830 - DNA, 20 bp, Artificial Sequence
  Description of Artificial Sequence: Synthetic oligonucleotide
  Target: PCSK9; (+) strand; PAM type: NRG; PAM sequence: TGG
tggtgccaggacgcagagct

SEQ ID NO: 14831 - DNA, 20 bp, Artificial Sequence
  Description of Artificial Sequence: Synthetic oligonucleotide
  Target: PCSK9; (+) strand; PAM type: NRG; PAM sequence: GGG
ggtgccaggacgcagagctt

SEQ ID NO: 14832 - DNA, 20 bp, Artificial Sequence
  Description of Artificial Sequence: Synthetic oligonucleotide
  Target: PCSK9; (+) strand; PAM type: NRG; PAM sequence: GGG
gtgccaggacgcagagcttg

SEQ ID NO: 14833 - DNA, 20 bp, Artificial Sequence
  Description of Artificial Sequence: Synthetic oligonucleotide
  Target: PCSK9; (+) strand; PAM type: NRG; PAM sequence: CAG
cgcagagcttggggtgaact

SEQ ID NO: 14834 - DNA, 20 bp, Artificial Sequence
  Description of Artificial Sequence: Synthetic oligonucleotide
  Target: PCSK9; (+) strand; PAM type: NRG; PAM sequence: CGG
actcagctttcaccccttac

SEQ ID NO: 14835 - DNA, 20 bp, Artificial Sequence
  Description of Artificial Sequence: Synthetic oligonucleotide
  Target: PCSK9; (+) strand; PAM type: NRG; PAM sequence: TGG
tcaccccttaccggttctcg

SEQ ID NO: 14836 - DNA, 20 bp, Artificial Sequence
  Description of Artificial Sequence: Synthetic oligonucleotide
  Target: PCSK9; (+) strand; PAM type: NRG; PAM sequence: GGG
caccccttaccggttctcgt

SEQ ID NO: 14837 - DNA, 20 bp, Artificial Sequence
  Description of Artificial Sequence: Synthetic oligonucleotide
  Target: PCSK9; (+) strand; PAM type: NRG; PAM sequence: TGG
taccggttctcgtgggatct

SEQ ID NO: 14838 - DNA, 20 bp, Artificial Sequence
  Description of Artificial Sequence: Synthetic oligonucleotide
  Target: PCSK9; (+) strand; PAM type: NRG; PAM sequence: GGG
accggttctcgtgggatctt

SEQ ID NO: 14839 - DNA, 20 bp, Artificial Sequence
  Description of Artificial Sequence: Synthetic oligonucleotide
  Target: PCSK9; (+) strand; PAM type: NRG; PAM sequence: AAG
ggttctcgtgggatcttggg

SEQ ID NO: 14840 - DNA, 20 bp, Artificial Sequence
  Description of Artificial Sequence: Synthetic oligonucleotide
  Target: PCSK9; (+) strand; PAM type: NRG; PAM sequence: GAG
gggaagccactttcttctat

SEQ ID NO: 14841 - DNA, 20 bp, Artificial Sequence
  Description of Artificial Sequence: Synthetic oligonucleotide
  Target: PCSK9; (+) strand; PAM type: NRG; PAM sequence: TGG
tgtcgttcttgtctgtaaaa

SEQ ID NO: 14842 - DNA, 20 bp, Artificial Sequence
  Description of Artificial Sequence: Synthetic oligonucleotide
  Target: PCSK9; (+) strand; PAM type: NRG; PAM sequence: GGG
gtcgttcttgtctgtaaaat

SEQ ID NO: 14843 - DNA, 20 bp, Artificial Sequence
  Description of Artificial Sequence: Synthetic oligonucleotide
  Target: PCSK9; (+) strand; PAM type: NRG; PAM sequence: CAG
ccctgtccctgtccttctca

SEQ ID NO: 14844 - DNA, 20 bp, Artificial Sequence
  Description of Artificial Sequence: Synthetic oligonucleotide
  Target: PCSK9; (+) strand; PAM type: NRG; PAM sequence: AGG
cctgtccctgtccttctcac

SEQ ID NO: 14845 - DNA, 20 bp, Artificial Sequence
  Description of Artificial Sequence: Synthetic oligonucleotide
  Target: PCSK9; (+) strand; PAM type: NRG; PAM sequence: GAG
tccttctcacaggttgctgt

SEQ ID NO: 14846 - DNA, 20 bp, Artificial Sequence
  Description of Artificial Sequence: Synthetic oligonucleotide
  Target: PCSK9; (+) strand; PAM type: NRG; PAM sequence: GAG
ggttgctgtgagactccaat

SEQ ID NO: 14847 - DNA, 20 bp, Artificial Sequence
  Description of Artificial Sequence: Synthetic oligonucleotide
  Target: PCSK9; (+) strand; PAM type: NRG; PAM sequence: AAG
tgtgagactccaatgagttg

SEQ ID NO: 14848 - DNA, 20 bp, Artificial Sequence
  Description of Artificial Sequence: Synthetic oligonucleotide
  Target: PCSK9; (+) strand; PAM type: NRG; PAM sequence: AGG
gtgagactccaatgagttga

SEQ ID NO: 14849 - DNA, 20 bp, Artificial Sequence
  Description of Artificial Sequence: Synthetic oligonucleotide
  Target: PCSK9; (+) strand; PAM type: NRG; PAM sequence: CAG
ccaatgagttgaaggatgtg

SEQ ID NO: 14850 - DNA, 20 bp, Artificial Sequence
  Description of Artificial Sequence: Synthetic oligonucleotide
  Target: PCSK9; (+) strand; PAM type: NRG; PAM sequence: TGG
gaaggatgtgcagatgcttt

SEQ ID NO: 14851 - DNA, 20 bp, Artificial Sequence
  Description of Artificial Sequence: Synthetic oligonucleotide
  Target: PCSK9; (+) strand; PAM type: NRG; PAM sequence: AAG
ggatgtgcagatgcttttgg

SEQ ID NO: 14852 - DNA, 20 bp, Artificial Sequence
  Description of Artificial Sequence: Synthetic oligonucleotide
  Target: PCSK9; (+) strand; PAM type: NRG; PAM sequence: AAG
cagatgcttttggaagtgaa

SEQ ID NO: 14853 - DNA, 20 bp, Artificial Sequence
  Description of Artificial Sequence: Synthetic oligonucleotide
  Target: PCSK9; (+) strand; PAM type: NRG; PAM sequence: TGG
tgcttttggaagtgaaaagt

SEQ ID NO: 14854 - DNA, 20 bp, Artificial Sequence
  Description of Artificial Sequence: Synthetic oligonucleotide
  Target: PCSK9; (+) strand; PAM type: NRG; PAM sequence: GGG
gcttttggaagtgaaaagtt

SEQ ID NO: 14855 - DNA, 20 bp, Artificial Sequence
  Description of Artificial Sequence: Synthetic oligonucleotide
  Target: PCSK9; (+) strand; PAM type: NRG; PAM sequence: GGG
cttttggaagtgaaaagttg

SEQ ID NO: 14856 - DNA, 20 bp, Artificial Sequence
  Description of Artificial Sequence: Synthetic oligonucleotide
  Target: PCSK9; (+) strand; PAM type: NRG; PAM sequence: GGG
ttttggaagtgaaaagttgg

SEQ ID NO: 14857 - DNA, 20 bp, Artificial Sequence
  Description of Artificial Sequence: Synthetic oligonucleotide
  Target: PCSK9; (+) strand; PAM type: NRG; PAM sequence: GGG
tttggaagtgaaaagttggg

SEQ ID NO: 14858 - DNA, 20 bp, Artificial Sequence
  Description of Artificial Sequence: Synthetic oligonucleotide
  Target: PCSK9; (+) strand; PAM type: NRG; PAM sequence: GAG
gtgtgaccttgcatatgtct

SEQ ID NO: 14859 - DNA, 20 bp, Artificial Sequence
  Description of Artificial Sequence: Synthetic oligonucleotide
  Target: PCSK9; (+) strand; PAM type: NRG; PAM sequence: CAG
ctgagttgctgccattgcaa

SEQ ID NO: 14860 - DNA, 20 bp, Artificial Sequence
  Description of Artificial Sequence: Synthetic oligonucleotide
  Target: PCSK9; (+) strand; PAM type: NRG; PAM sequence: CAG
ttgctgccattgcaacagat

SEQ ID NO: 14861 - DNA, 20 bp, Artificial Sequence
  Description of Artificial Sequence: Synthetic oligonucleotide
  Target: PCSK9; (+) strand; PAM type: NRG; PAM sequence: GAG
gctgccattgcaacagatca

SEQ ID NO: 14862 - DNA, 20 bp, Artificial Sequence
  Description of Artificial Sequence: Synthetic oligonucleotide
  Target: PCSK9; (+) strand; PAM type: NRG; PAM sequence: TGG
ccattgcaacagatcagagc

SEQ ID NO: 14863 - DNA, 20 bp, Artificial Sequence
  Description of Artificial Sequence: Synthetic oligonucleotide
  Target: PCSK9; (+) strand; PAM type: NRG; PAM sequence: TGG
ttgcaacagatcagagctgg

SEQ ID NO: 14864 - DNA, 20 bp, Artificial Sequence
  Description of Artificial Sequence: Synthetic oligonucleotide
  Target: PCSK9; (+) strand; PAM type: NRG; PAM sequence: GGG
tgcaacagatcagagctggt

SEQ ID NO: 14865 - DNA, 20 bp, Artificial Sequence
  Description of Artificial Sequence: Synthetic oligonucleotide
  Target: PCSK9; (+) strand; PAM type: NRG; PAM sequence: TGG
acagatcagagctggtgggc

SEQ ID NO: 14866 - DNA, 20 bp, Artificial Sequence
  Description of Artificial Sequence: Synthetic oligonucleotide
  Target: PCSK9; (+) strand; PAM type: NRG; PAM sequence: GGG
cagatcagagctggtgggct

SEQ ID NO: 14867 - DNA, 20 bp, Artificial Sequence
  Description of Artificial Sequence: Synthetic oligonucleotide
  Target: PCSK9; (+) strand; PAM type: NRG; PAM sequence: TGG
cagagctggtgggctgggtg

SEQ ID NO: 14868 - DNA, 20 bp, Artificial Sequence
  Description of Artificial Sequence: Synthetic oligonucleotide
  Target: PCSK9; (+) strand; PAM type: NRG; PAM sequence: GAG
gagctggtgggctgggtgtg

SEQ ID NO: 14869 - DNA, 20 bp, Artificial Sequence
  Description of Artificial Sequence: Synthetic oligonucleotide
  Target: PCSK9; (+) strand; PAM type: NRG; PAM sequence: AAG
tggtgggctgggtgtggaga

SEQ ID NO: 14870 - DNA, 20 bp, Artificial Sequence
  Description of Artificial Sequence: Synthetic oligonucleotide
  Target: PCSK9; (+) strand; PAM type: NRG; PAM sequence: AGG
ggtgggctgggtgtggagaa

SEQ ID NO: 14871 - DNA, 20 bp, Artificial Sequence
  Description of Artificial Sequence: Synthetic oligonucleotide
  Target: PCSK9; (+) strand; PAM type: NRG; PAM sequence: GGG
gtgggctgggtgtggagaaa

SEQ ID NO: 14872 - DNA, 20 bp, Artificial Sequence
  Description of Artificial Sequence: Synthetic oligonucleotide
  Target: PCSK9; (+) strand; PAM type: NRG; PAM sequence: TGG
gtgtggagaaagggtttgtg

SEQ ID NO: 14873 - DNA, 20 bp, Artificial Sequence
  Description of Artificial Sequence: Synthetic oligonucleotide
  Target: PCSK9; (+) strand; PAM type: NRG; PAM sequence: GGG
tgtggagaaagggtttgtgt

SEQ ID NO: 14874 - DNA, 20 bp, Artificial Sequence
  Description of Artificial Sequence: Synthetic oligonucleotide
  Target: PCSK9; (+) strand; PAM type: NRG; PAM sequence: GGG
gtggagaaagggtttgtgtg

SEQ ID NO: 14875 - DNA, 20 bp, Artificial Sequence
  Description of Artificial Sequence: Synthetic oligonucleotide
  Target: PCSK9; (+) strand; PAM type: NRG; PAM sequence: GGG
tggagaaagggtttgtgtgg

SEQ ID NO: 14876 - DNA, 20 bp, Artificial Sequence
  Description of Artificial Sequence: Synthetic oligonucleotide
  Target: PCSK9; (+) strand; PAM type: NRG; PAM sequence: TGG
tttgtgtgggggacatcctc

SEQ ID NO: 14877 - DNA, 20 bp, Artificial Sequence
  Description of Artificial Sequence: Synthetic oligonucleotide
  Target: PCSK9; (+) strand; PAM type: NRG; PAM sequence: AAG
tgtgggggacatcctctggc

SEQ ID NO: 14878 - DNA, 20 bp, Artificial Sequence
  Description of Artificial Sequence: Synthetic oligonucleotide
  Target: PCSK9; (+) strand; PAM type: NRG; PAM sequence: AGG
gtgggggacatcctctggca

SEQ ID NO: 14879 - DNA, 20 bp, Artificial Sequence
  Description of Artificial Sequence: Synthetic oligonucleotide
  Target: PCSK9; (+) strand; PAM type: NRG; PAM sequence: GGG
tgggggacatcctctggcaa

SEQ ID NO: 14880 - DNA, 20 bp, Artificial Sequence
  Description of Artificial Sequence: Synthetic oligonucleotide
  Target: PCSK9; (+) strand; PAM type: NRG; PAM sequence: TGG
gggacatcctctggcaaggg

SEQ ID NO: 14881 - DNA, 20 bp, Artificial Sequence
  Description of Artificial Sequence: Synthetic oligonucleotide
  Target: PCSK9; (+) strand; PAM type: NRG; PAM sequence: CAG
acatcctctggcaagggtgg

SEQ ID NO: 14882 - DNA, 20 bp, Artificial Sequence
  Description of Artificial Sequence: Synthetic oligonucleotide
  Target: PCSK9; (+) strand; PAM type: NRG; PAM sequence: CAG
tcctctggcaagggtggcag

SEQ ID NO: 14883 - DNA, 20 bp, Artificial Sequence
  Description of Artificial Sequence: Synthetic oligonucleotide
  Target: PCSK9; (+) strand; PAM type: NRG; PAM sequence: CAG
tctggcaagggtggcagcag

SEQ ID NO: 14884 - DNA, 20 bp, Artificial Sequence
  Description of Artificial Sequence: Synthetic oligonucleotide
  Target: PCSK9; (+) strand; PAM type: NRG; PAM sequence: AAG
ggcaagggtggcagcagcag

SEQ ID NO: 14885 - DNA, 20 bp, Artificial Sequence
  Description of Artificial Sequence: Synthetic oligonucleotide
  Target: PCSK9; (+) strand; PAM type: NRG; PAM sequence: GAG
agggtggcagcagcagaagt

SEQ ID NO: 14886 - DNA, 20 bp, Artificial Sequence
  Description of Artificial Sequence: Synthetic oligonucleotide
  Target: PCSK9; (+) strand; PAM type: NRG; PAM sequence: AGG
gggtggcagcagcagaagtg

SEQ ID NO: 14887 - DNA, 20 bp, Artificial Sequence
  Description of Artificial Sequence: Synthetic oligonucleotide
  Target: PCSK9; (+) strand; PAM type: NRG; PAM sequence: GGG
ggtggcagcagcagaagtga

SEQ ID NO: 14888 - DNA, 20 bp, Artificial Sequence
  Description of Artificial Sequence: Synthetic oligonucleotide
  Target: PCSK9; (+) strand; PAM type: NRG; PAM sequence: GGG
gtggcagcagcagaagtgag

SEQ ID NO: 14889 - DNA, 20 bp, Artificial Sequence
  Description of Artificial Sequence: Synthetic oligonucleotide
  Target: PCSK9; (+) strand; PAM type: NRG; PAM sequence: TGG
agcagcagaagtgaggggcc

SEQ ID NO: 14890 - DNA, 20 bp, Artificial Sequence
  Description of Artificial Sequence: Synthetic oligonucleotide
  Target: PCSK9; (+) strand; PAM type: NRG; PAM sequence: CGG
gcagaagtgaggggcctggt

SEQ ID NO: 14891 - DNA, 20 bp, Artificial Sequence
  Description of Artificial Sequence: Synthetic oligonucleotide
  Target: PCSK9; (+) strand; PAM type: NRG; PAM sequence: CGG
gtcggtcatgtgtgctgacc

SEQ ID NO: 14892 - DNA, 20 bp, Artificial Sequence
  Description of Artificial Sequence: Synthetic oligonucleotide
  Target: PCSK9; (+) strand; PAM type: NRG; PAM sequence: TGG
tcatgtgtgctgacccggcc

SEQ ID NO: 14893 - DNA, 20 bp, Artificial Sequence
  Description of Artificial Sequence: Synthetic oligonucleotide
  Target: PCSK9; (+) strand; PAM type: NRG; PAM sequence: GGG
catgtgtgctgacccggcct

SEQ ID NO: 14894 - DNA, 20 bp, Artificial Sequence
  Description of Artificial Sequence: Synthetic oligonucleotide
  Target: PCSK9; (+) strand; PAM type: NRG; PAM sequence: CAG
gtgtgctgacccggcctggg

SEQ ID NO: 14895 - DNA, 20 bp, Artificial Sequence
  Description of Artificial Sequence: Synthetic oligonucleotide
  Target: PCSK9; (+) strand; PAM type: NRG; PAM sequence: TGG
gacccggcctgggcagcctg

SEQ ID NO: 14896 - DNA, 20 bp, Artificial Sequence
  Description of Artificial Sequence: Synthetic oligonucleotide
  Target: PCSK9; (+) strand; PAM type: NRG; PAM sequence: CAG
cggcctgggcagcctgtggc

SEQ ID NO: 14897 - DNA, 20 bp, Artificial Sequence
  Description of Artificial Sequence: Synthetic oligonucleotide
  Target: PCSK9; (+) strand; PAM type: NRG; PAM sequence: AGG
ggcctgggcagcctgtggcc

SEQ ID NO: 14898 - DNA, 20 bp, Artificial Sequence
  Description of Artificial Sequence: Synthetic oligonucleotide
  Target: PCSK9; (+) strand; PAM type: NRG; PAM sequence: GGG
gcctgggcagcctgtggcca

SEQ ID NO: 14899 - DNA, 20 bp, Artificial Sequence
  Description of Artificial Sequence: Synthetic oligonucleotide
  Target: PCSK9; (+) strand; PAM type: NRG; PAM sequence: GAG
ctgggcagcctgtggccagg

SEQ ID NO: 14900 - DNA, 20 bp, Artificial Sequence
  Description of Artificial Sequence: Synthetic oligonucleotide
  Target: PCSK9; (+) strand; PAM type: NRG; PAM sequence: GAG
gggcagcctgtggccaggga

SEQ ID NO: 14901 - DNA, 20 bp, Artificial Sequence
  Description of Artificial Sequence: Synthetic oligonucleotide
  Target: PCSK9; (+) strand; PAM type: NRG; PAM sequence: AGG
ggcagcctgtggccagggag

SEQ ID NO: 14902 - DNA, 20 bp, Artificial Sequence
  Description of Artificial Sequence: Synthetic oligonucleotide
  Target: PCSK9; (+) strand; PAM type: NRG; PAM sequence: CAG
gcctgtggccagggagagga

SEQ ID NO: 14903 - DNA, 20 bp, Artificial Sequence
  Description of Artificial Sequence: Synthetic oligonucleotide
  Target: PCSK9; (+) strand; PAM type: NRG; PAM sequence: TAG
gggagaggacagctcctctg

SEQ ID NO: 14904 - DNA, 20 bp, Artificial Sequence
  Description of Artificial Sequence: Synthetic oligonucleotide
  Target: PCSK9; (+) strand; PAM type: NRG; PAM sequence: AGG
ggagaggacagctcctctgt

SEQ ID NO: 14905 - DNA, 20 bp, Artificial Sequence
  Description of Artificial Sequence: Synthetic oligonucleotide
  Target: PCSK9; (+) strand; PAM type: NRG; PAM sequence: AAG
gaggacagctcctctgtagg

SEQ ID NO: 14906 - DNA, 20 bp, Artificial Sequence
  Description of Artificial Sequence: Synthetic oligonucleotide
  Target: PCSK9; (+) strand; PAM type: NRG; PAM sequence: GAG
ggacagctcctctgtaggaa

SEQ ID NO: 14907 - DNA, 20 bp, Artificial Sequence
  Description of Artificial Sequence: Synthetic oligonucleotide
  Target: PCSK9; (+) strand; PAM type: NRG; PAM sequence: CAG
agagcctgttcctttccaac

SEQ ID NO: 14908 - DNA, 20 bp, Artificial Sequence
  Description of Artificial Sequence: Synthetic oligonucleotide
  Target: PCSK9; (+) strand; PAM type: NRG; PAM sequence: AGG
gagcctgttcctttccaacc

SEQ ID NO: 14909 - DNA, 20 bp, Artificial Sequence
  Description of Artificial Sequence: Synthetic oligonucleotide
  Target: PCSK9; (+) strand; PAM type: NRG; PAM sequence: GAG
ctgttcctttccaaccaggt

SEQ ID NO: 14910 - DNA, 20 bp, Artificial Sequence
  Description of Artificial Sequence: Synthetic oligonucleotide
  Target: PCSK9; (+) strand; PAM type: NRG; PAM sequence: CAG
ccaaccaggtgagacctctt

SEQ ID NO: 14911 - DNA, 20 bp, Artificial Sequence
  Description of Artificial Sequence: Synthetic oligonucleotide
  Target: PCSK9; (+) strand; PAM type: NRG; PAM sequence: TGG
accaggtgagacctcttcag

SEQ ID NO: 14912 - DNA, 20 bp, Artificial Sequence
  Description of Artificial Sequence: Synthetic oligonucleotide
  Target: PCSK9; (+) strand; PAM type: NRG; PAM sequence: GAG
caggtgagacctcttcagtg

SEQ ID NO: 14913 - DNA, 20 bp, Artificial Sequence
  Description of Artificial Sequence: Synthetic oligonucleotide
  Target: PCSK9; (+) strand; PAM type: NRG; PAM sequence: TGG
agacctcttcagtggagccc

SEQ ID NO: 14914 - DNA, 20 bp, Artificial Sequence
  Description of Artificial Sequence: Synthetic oligonucleotide
  Target: PCSK9; (+) strand; PAM type: NRG; PAM sequence: GAG
acctcttcagtggagccctg

SEQ ID NO: 14915 - DNA, 20 bp, Artificial Sequence
  Description of Artificial Sequence: Synthetic oligonucleotide
  Target: PCSK9; (+) strand; PAM type: NRG; PAM sequence: CAG
gagccccctgtactccacat

SEQ ID NO: 14916 - DNA, 20 bp, Artificial Sequence
  Description of Artificial Sequence: Synthetic oligonucleotide
  Target: PCSK9; (+) strand; PAM type: NRG; PAM sequence: CAG
tgtactccacatcagtgcct

SEQ ID NO: 14917 - DNA, 20 bp, Artificial Sequence
  Description of Artificial Sequence: Synthetic oligonucleotide
  Target: PCSK9; (+) strand; PAM type: NRG; PAM sequence: AGG
gtactccacatcagtgcctc

SEQ ID NO: 14918 - DNA, 20 bp, Artificial Sequence
  Description of Artificial Sequence: Synthetic oligonucleotide
  Target: PCSK9; (+) strand; PAM type: NRG; PAM sequence: GGG
tactccacatcagtgcctca

SEQ ID NO: 14919 - DNA, 20 bp, Artificial Sequence
  Description of Artificial Sequence: Synthetic oligonucleotide
  Target: PCSK9; (+) strand; PAM type: NRG; PAM sequence: CGG
tcagtgcctcagggacctcc

SEQ ID NO: 14920 - DNA, 20 bp, Artificial Sequence
  Description of Artificial Sequence: Synthetic oligonucleotide
  Target: PCSK9; (+) strand; PAM type: NRG; PAM sequence: GAG
agtgcctcagggacctcccg

SEQ ID NO: 14921 - DNA, 20 bp, Artificial Sequence
  Description of Artificial Sequence: Synthetic oligonucleotide
  Target: PCSK9; (+) strand; PAM type: NRG; PAM sequence: CAG
gcctcagggacctcccggag

SEQ ID NO: 14922 - DNA, 20 bp, Artificial Sequence
  Description of Artificial Sequence: Synthetic oligonucleotide
  Target: PCSK9; (+) strand; PAM type: NRG; PAM sequence: AGG
cctcagggacctcccggagc

SEQ ID NO: 14923 - DNA, 20 bp, Artificial Sequence
  Description of Artificial Sequence: Synthetic oligonucleotide
  Target: PCSK9; (+) strand; PAM type: NRG; PAM sequence: CAG
ctcccggagcaggctaatat

SEQ ID NO: 14924 - DNA, 20 bp, Artificial Sequence
  Description of Artificial Sequence: Synthetic oligonucleotide
  Target: PCSK9; (+) strand; PAM type: NRG; PAM sequence: GAG
cccggagcaggctaatatca

SEQ ID NO: 14925 - DNA, 20 bp, Artificial Sequence
  Description of Artificial Sequence: Synthetic oligonucleotide
  Target: PCSK9; (+) strand; PAM type: NRG; PAM sequence: AAG
gcaggctaatatcagagacc

SEQ ID NO: 14926 - DNA, 20 bp, Artificial Sequence
  Description of Artificial Sequence: Synthetic oligonucleotide
  Target: PCSK9; (+) strand; PAM type: NRG; PAM sequence: GAG
aggctaatatcagagaccaa

SEQ ID NO: 14927 - DNA, 20 bp, Artificial Sequence
  Description of Artificial Sequence: Synthetic oligonucleotide
  Target: PCSK9; (+) strand; PAM type: NRG; PAM sequence: AGG
ggctaatatcagagaccaag

SEQ ID NO: 14928 - DNA, 20 bp, Artificial Sequence
  Description of Artificial Sequence: Synthetic oligonucleotide
  Target: PCSK9; (+) strand; PAM type: NRG; PAM sequence: GGG
gctaatatcagagaccaaga

SEQ ID NO: 14929 - DNA, 20 bp, Artificial Sequence
  Description of Artificial Sequence: Synthetic oligonucleotide
  Target: PCSK9; (+) strand; PAM type: NRG; PAM sequence: TGG
tcagagaccaagagggacac

SEQ ID NO: 14930 - DNA, 20 bp, Artificial Sequence
  Description of Artificial Sequence: Synthetic oligonucleotide
  Target: PCSK9; (+) strand; PAM type: NRG; PAM sequence: CAG
gagaccaagagggacactgg

SEQ ID NO: 14931 - DNA, 20 bp, Artificial Sequence
  Description of Artificial Sequence: Synthetic oligonucleotide
  Target: PCSK9; (+) strand; PAM type: NRG; PAM sequence: GAG
gaccaagagggacactggca

SEQ ID NO: 14932 - DNA, 20 bp, Artificial Sequence
  Description of Artificial Sequence: Synthetic oligonucleotide
  Target: PCSK9; (+) strand; PAM type: NRG; PAM sequence: AGG
accaagagggacactggcag

SEQ ID NO: 14933 - DNA, 20 bp, Artificial Sequence
  Description of Artificial Sequence: Synthetic oligonucleotide
  Target: PCSK9; (+) strand; PAM type: NRG; PAM sequence: CAG
gggacactggcagaggatca

SEQ ID NO: 14934 - DNA, 20 bp, Artificial Sequence
  Description of Artificial Sequence: Synthetic oligonucleotide
  Target: PCSK9; (+) strand; PAM type: NRG; PAM sequence: GAG
gacactggcagaggatcaca

SEQ ID NO: 14935 - DNA, 20 bp, Artificial Sequence
  Description of Artificial Sequence: Synthetic oligonucleotide
  Target: PCSK9; (+) strand; PAM type: NRG; PAM sequence: CAG
gcagaggatcacagagaccc

SEQ ID NO: 14936 - DNA, 20 bp, Artificial Sequence
  Description of Artificial Sequence: Synthetic oligonucleotide
  Target: PCSK9; (+) strand; PAM type: NRG; PAM sequence: CAG
ggatcacagagaccccagtc

SEQ ID NO: 14937 - DNA, 20 bp, Artificial Sequence
  Description of Artificial Sequence: Synthetic oligonucleotide
  Target: PCSK9; (+) strand; PAM type: NRG; PAM sequence: AGG
gatcacagagaccccagtcc

SEQ ID NO: 14938 - DNA, 20 bp, Artificial Sequence
  Description of Artificial Sequence: Synthetic oligonucleotide
  Target: PCSK9; (+) strand; PAM type: NRG; PAM sequence: CAG
cacagagaccccagtccagg

SEQ ID NO: 14939 - DNA, 20 bp, Artificial Sequence
  Description of Artificial Sequence: Synthetic oligonucleotide
  Target: PCSK9; (+) strand; PAM type: NRG; PAM sequence: AGG
acagagaccccagtccaggc

SEQ ID NO: 14940 - DNA, 20 bp, Artificial Sequence
  Description of Artificial Sequence: Synthetic oligonucleotide
  Target: PCSK9; (+) strand; PAM type: NRG; PAM sequence: GGG
cagagaccccagtccaggca

SEQ ID NO: 14941 - DNA, 20 bp, Artificial Sequence
  Description of Artificial Sequence: Synthetic oligonucleotide
  Target: PCSK9; (+) strand; PAM type: NRG; PAM sequence: GAG
ccccagtccaggcagggact

SEQ ID NO: 14942 - DNA, 20 bp, Artificial Sequence
  Description of Artificial Sequence: Synthetic oligonucleotide
  Target: PCSK9; (+) strand; PAM type: NRG; PAM sequence: AAG
cagtccaggcagggactgag

SEQ ID NO: 14943 - DNA, 20 bp, Artificial Sequence
  Description of Artificial Sequence: Synthetic oligonucleotide
  Target: PCSK9; (+) strand; PAM type: NRG; PAM sequence: AAG
ctgagaagatcttgccccct

SEQ ID NO: 14944 - DNA, 20 bp, Artificial Sequence
  Description of Artificial Sequence: Synthetic oligonucleotide
  Target: PCSK9; (+) strand; PAM type: NRG; PAM sequence: TAG
gaagatcttgccccctaagt

SEQ ID NO: 14945 - DNA, 20 bp, Artificial Sequence
  Description of Artificial Sequence: Synthetic oligonucleotide
  Target: PCSK9; (+) strand; PAM type: NRG; PAM sequence: TAG
tgccccctaagttagtttcc

SEQ ID NO: 14946 - DNA, 20 bp, Artificial Sequence
  Description of Artificial Sequence: Synthetic oligonucleotide
  Target: PCSK9; (+) strand; PAM type: NRG; PAM sequence: CGG
gtgacaaattaccaccccct

SEQ ID NO: 14947 - DNA, 20 bp, Artificial Sequence
  Description of Artificial Sequence: Synthetic oligonucleotide
  Target: PCSK9; (+) strand; PAM type: NRG; PAM sequence: TGG
caaattaccaccccctcggt

SEQ ID NO: 14948 - DNA, 20 bp, Artificial Sequence
  Description of Artificial Sequence: Synthetic oligonucleotide
  Target: PCSK9; (+) strand; PAM type: NRG; PAM sequence: AAG
accaccccctcggttggaac

SEQ ID NO: 14949 - DNA, 20 bp, Artificial Sequence
  Description of Artificial Sequence: Synthetic oligonucleotide
  Target: PCSK9; (+) strand; PAM type: NRG; PAM sequence: CAG
tggaacaagttgattctctg

SEQ ID NO: 14950 - DNA, 20 bp, Artificial Sequence
  Description of Artificial Sequence: Synthetic oligonucleotide
  Target: PCSK9; (+) strand; PAM type: NRG; PAM sequence: TGG
aagttgattctctgcagtcc

SEQ ID NO: 14951 - DNA, 20 bp, Artificial Sequence
  Description of Artificial Sequence: Synthetic oligonucleotide
  Target: PCSK9; (+) strand; PAM type: NRG; PAM sequence: GAG
gttgattctctgcagtcctg

SEQ ID NO: 14952 - DNA, 20 bp, Artificial Sequence
  Description of Artificial Sequence: Synthetic oligonucleotide
  Target: PCSK9; (+) strand; PAM type: NRG; PAM sequence: AGG
ttgattctctgcagtcctgg

SEQ ID NO: 14953 - DNA, 20 bp, Artificial Sequence
  Description of Artificial Sequence: Synthetic oligonucleotide
  Target: PCSK9; (+) strand; PAM type: NRG; PAM sequence: CAG
ttctctgcagtcctggaggc

SEQ ID NO: 14954 - DNA, 20 bp, Artificial Sequence
  Description of Artificial Sequence: Synthetic oligonucleotide
  Target: PCSK9; (+) strand; PAM type: NRG; PAM sequence: AAG
tctgcagtcctggaggccag

SEQ ID NO: 14955 - DNA, 20 bp, Artificial Sequence
  Description of Artificial Sequence: Synthetic oligonucleotide
  Target: PCSK9; (+) strand; PAM type: NRG; PAM sequence: CAG
tggaggccagaagcctgaat

SEQ ID NO: 14956 - DNA, 20 bp, Artificial Sequence
  Description of Artificial Sequence: Synthetic oligonucleotide
  Target: PCSK9; (+) strand; PAM type: NRG; PAM sequence: CGG
ccagaagcctgaatcagtgt

SEQ ID NO: 14957 - DNA, 20 bp, Artificial Sequence
  Description of Artificial Sequence: Synthetic oligonucleotide
  Target: PCSK9; (+) strand; PAM type: NRG; PAM sequence: CAG
gaagcctgaatcagtgtcgg

SEQ ID NO: 14958 - DNA, 20 bp, Artificial Sequence
  Description of Artificial Sequence: Synthetic oligonucleotide
  Target: PCSK9; (+) strand; PAM type: NRG; PAM sequence: AGG
aagcctgaatcagtgtcggc

SEQ ID NO: 14959 - DNA, 20 bp, Artificial Sequence
  Description of Artificial Sequence: Synthetic oligonucleotide
  Target: PCSK9; (+) strand; PAM type: NRG; PAM sequence: CGG
tcggcaggaccactttctcc

SEQ ID NO: 14960 - DNA, 20 bp, Artificial Sequence
  Description of Artificial Sequence: Synthetic oligonucleotide
  Target: PCSK9; (+) strand; PAM type: NRG; PAM sequence: GGG
cggcaggaccactttctccc

SEQ ID NO: 14961 - DNA, 20 bp, Artificial Sequence
  Description of Artificial Sequence: Synthetic oligonucleotide
  Target: PCSK9; (+) strand; PAM type: NRG; PAM sequence: GGG
ggcaggaccactttctcccg

SEQ ID NO: 14962 - DNA, 20 bp, Artificial Sequence
  Description of Artificial Sequence: Synthetic oligonucleotide
  Target: PCSK9; (+) strand; PAM type: NRG; PAM sequence: GGG
gcaggaccactttctcccgg

SEQ ID NO: 14963 - DNA, 20 bp, Artificial Sequence
  Description of Artificial Sequence: Synthetic oligonucleotide
  Target: PCSK9; (+) strand; PAM type: NRG; PAM sequence: GGG
caggaccactttctcccggg

SEQ ID NO: 14964 - DNA, 20 bp, Artificial Sequence
  Description of Artificial Sequence: Synthetic oligonucleotide
  Target: PCSK9; (+) strand; PAM type: NRG; PAM sequence: CAG
cactttctcccggggggctc

SEQ ID NO: 14965 - DNA, 20 bp, Artificial Sequence
  Description of Artificial Sequence: Synthetic oligonucleotide
  Target: PCSK9; (+) strand; PAM type: NRG; PAM sequence: AGG
actttctcccggggggctcc

SEQ ID NO: 14966 - DNA, 20 bp, Artificial Sequence
  Description of Artificial Sequence: Synthetic oligonucleotide
  Target: PCSK9; (+) strand; PAM type: NRG; PAM sequence: GGG
ctttctcccggggggctcca

SEQ ID NO: 14967 - DNA, 20 bp, Artificial Sequence
  Description of Artificial Sequence: Synthetic oligonucleotide
  Target: PCSK9; (+) strand; PAM type: NRG; PAM sequence: GAG
ttctcccggggggctccagg

SEQ ID NO: 14968 - DNA, 20 bp, Artificial Sequence
  Description of Artificial Sequence: Synthetic oligonucleotide
  Target: PCSK9; (+) strand; PAM type: NRG; PAM sequence: AAG
tcccggggggctccagggag

SEQ ID NO: 14969 - DNA, 20 bp, Artificial Sequence
  Description of Artificial Sequence: Synthetic oligonucleotide
  Target: PCSK9; (+) strand; PAM type: NRG; PAM sequence: CAG
ttgcctcttccgtgtcccaa

SEQ ID NO: 14970 - DNA, 20 bp, Artificial Sequence
  Description of Artificial Sequence: Synthetic oligonucleotide
  Target: PCSK9; (+) strand; PAM type: NRG; PAM sequence: CGG
cctcttccgtgtcccaacag

SEQ ID NO: 14971 - DNA, 20 bp, Artificial Sequence
  Description of Artificial Sequence: Synthetic oligonucleotide
  Target: PCSK9; (+) strand; PAM type: NRG; PAM sequence: CAG
cttccgtgtcccaacagcgg

SEQ ID NO: 14972 - DNA, 20 bp, Artificial Sequence
  Description of Artificial Sequence: Synthetic oligonucleotide
  Target: PCSK9; (+) strand; PAM type: NRG; PAM sequence: CAG
cagcggcagcacaccaatcc

SEQ ID NO: 14973 - DNA, 20 bp, Artificial Sequence
  Description of Artificial Sequence: Synthetic oligonucleotide
  Target: PCSK9; (+) strand; PAM type: NRG; PAM sequence: CAG
tcccagcctctgtcttcaca

SEQ ID NO: 14974 - DNA, 20 bp, Artificial Sequence
  Description of Artificial Sequence: Synthetic oligonucleotide
  Target: PCSK9; (+) strand; PAM type: NRG; PAM sequence: AAG
tctcctcttcattgtctcat

SEQ ID NO: 14975 - DNA, 20 bp, Artificial Sequence
  Description of Artificial Sequence: Synthetic oligonucleotide
  Target: PCSK9; (+) strand; PAM type: NRG; PAM sequence: AGG
ctcctcttcattgtctcata

SEQ ID NO: 14976 - DNA, 20 bp, Artificial Sequence
  Description of Artificial Sequence: Synthetic oligonucleotide
  Target: PCSK9; (+) strand; PAM type: NRG; PAM sequence: TGG
ctcataaggacacttgtcat

SEQ ID NO: 14977 - DNA, 20 bp, Artificial Sequence
  Description of Artificial Sequence: Synthetic oligonucleotide
  Target: PCSK9; (+) strand; PAM type: NRG; PAM sequence: TAG
aggacacttgtcattggatt

SEQ ID NO: 14978 - DNA, 20 bp, Artificial Sequence
  Description of Artificial Sequence: Synthetic oligonucleotide
  Target: PCSK9; (+) strand; PAM type: NRG; PAM sequence: AGG
ggacacttgtcattggattt

SEQ ID NO: 14979 - DNA, 20 bp, Artificial Sequence
  Description of Artificial Sequence: Synthetic oligonucleotide
  Target: PCSK9; (+) strand; PAM type: NRG; PAM sequence: GGG
gacacttgtcattggattta

SEQ ID NO: 14980 - DNA, 20 bp, Artificial Sequence
  Description of Artificial Sequence: Synthetic oligonucleotide
  Target: PCSK9; (+) strand; PAM type: NRG; PAM sequence: TGG
tcattggatttagggcccac

SEQ ID NO: 14981 - DNA, 20 bp, Artificial Sequence
  Description of Artificial Sequence: Synthetic oligonucleotide
  Target: PCSK9; (+) strand; PAM type: NRG; PAM sequence: CAG
ttagggcccactggatcctc

SEQ ID NO: 14982 - DNA, 20 bp, Artificial Sequence
  Description of Artificial Sequence: Synthetic oligonucleotide
  Target: PCSK9; (+) strand; PAM type: NRG; PAM sequence: AGG
tagggcccactggatcctcc

SEQ ID NO: 14983 - DNA, 20 bp, Artificial Sequence
  Description of Artificial Sequence: Synthetic oligonucleotide
  Target: PCSK9; (+) strand; PAM type: NRG; PAM sequence: TGG
tcctccaggatgatctcatg

SEQ ID NO: 14984 - DNA, 20 bp, Artificial Sequence
  Description of Artificial Sequence: Synthetic oligonucleotide
  Target: PCSK9; (+) strand; PAM type: NRG; PAM sequence: GGG
cctccaggatgatctcatgt

SEQ ID NO: 14985 - DNA, 20 bp, Artificial Sequence
  Description of Artificial Sequence: Synthetic oligonucleotide
  Target: PCSK9; (+) strand; PAM type: NRG; PAM sequence: GGG
ctccaggatgatctcatgtg

SEQ ID NO: 14986 - DNA, 20 bp, Artificial Sequence
  Description of Artificial Sequence: Synthetic oligonucleotide
  Target: PCSK9; (+) strand; PAM type: NRG; PAM sequence: AAG
ggaaccttaaccacatctgc

SEQ ID NO: 14987 - DNA, 20 bp, Artificial Sequence
  Description of Artificial Sequence: Synthetic oligonucleotide
  Target: PCSK9; (+) strand; PAM type: NRG; PAM sequence: AGG
gaaccttaaccacatctgca

SEQ ID NO: 14988 - DNA, 20 bp, Artificial Sequence
  Description of Artificial Sequence: Synthetic oligonucleotide
  Target: PCSK9; (+) strand; PAM type: NRG; PAM sequence: AAG
caaggaccctttttccaaat

SEQ ID NO: 14989 - DNA, 20 bp, Artificial Sequence
  Description of Artificial Sequence: Synthetic oligonucleotide
  Target: PCSK9; (+) strand; PAM type: NRG; PAM sequence: AGG
aaggaccctttttccaaata

SEQ ID NO: 14990 - DNA, 20 bp, Artificial Sequence
  Description of Artificial Sequence: Synthetic oligonucleotide
  Target: PCSK9; (+) strand; PAM type: NRG; PAM sequence: CAG
cctttttccaaataaggtca

SEQ ID NO: 14991 - DNA, 20 bp, Artificial Sequence
  Description of Artificial Sequence: Synthetic oligonucleotide
  Target: PCSK9; (+) strand; PAM type: NRG; PAM sequence: CAG
tccaaataaggtcacagcca

SEQ ID NO: 14992 - DNA, 20 bp, Artificial Sequence
  Description of Artificial Sequence: Synthetic oligonucleotide
  Target: PCSK9; (+) strand; PAM type: NRG; PAM sequence: AGG
ccaaataaggtcacagccac

SEQ ID NO: 14993 - DNA, 20 bp, Artificial Sequence
  Description of Artificial Sequence: Synthetic oligonucleotide
  Target: PCSK9; (+) strand; PAM type: NRG; PAM sequence: TGG
aaggtcacagccacaggttg

SEQ ID NO: 14994 - DNA, 20 bp, Artificial Sequence
  Description of Artificial Sequence: Synthetic oligonucleotide
  Target: PCSK9; (+) strand; PAM type: NRG; PAM sequence: GGG
aggtcacagccacaggttgt

SEQ ID NO: 14995 - DNA, 20 bp, Artificial Sequence
  Description of Artificial Sequence: Synthetic oligonucleotide
  Target: PCSK9; (+) strand; PAM type: NRG; PAM sequence: GGG
ggtcacagccacaggttgtg

SEQ ID NO: 14996 - DNA, 20 bp, Artificial Sequence
  Description of Artificial Sequence: Synthetic oligonucleotide
  Target: PCSK9; (+) strand; PAM type: NRG; PAM sequence: GGG
gtcacagccacaggttgtgg

SEQ ID NO: 14997 - DNA, 20 bp, Artificial Sequence
  Description of Artificial Sequence: Synthetic oligonucleotide
  Target: PCSK9; (+) strand; PAM type: NRG; PAM sequence: TAG
cagccacaggttgtgggggt

SEQ ID NO: 14998 - DNA, 20 bp, Artificial Sequence
  Description of Artificial Sequence: Synthetic oligonucleotide
  Target: PCSK9; (+) strand; PAM type: NRG; PAM sequence: AGG
agccacaggttgtgggggtt

SEQ ID NO: 14999 - DNA, 20 bp, Artificial Sequence
  Description of Artificial Sequence: Synthetic oligonucleotide
  Target: PCSK9; (+) strand; PAM type: NRG; PAM sequence: GAG
ggttgtgggggttaggatgt

SEQ ID NO: 15000 - DNA, 20 bp, Artificial Sequence
  Description of Artificial Sequence: Synthetic oligonucleotide
  Target: PCSK9; (+) strand; PAM type: NRG; PAM sequence: TGG
aggatgtgagtgtatctctt

SEQ ID NO: 15001 - DNA, 20 bp, Artificial Sequence
  Description of Artificial Sequence: Synthetic oligonucleotide
  Target: PCSK9; (+) strand; PAM type: NRG; PAM sequence: CAG
atgtgagtgtatctctttgg

SEQ ID NO: 15002 - DNA, 20 bp, Artificial Sequence
  Description of Artificial Sequence: Synthetic oligonucleotide
  Target: PCSK9; (+) strand; PAM type: NRG; PAM sequence: TGG
cactgttccctcctctccct

SEQ ID NO: 15003 - DNA, 20 bp, Artificial Sequence
  Description of Artificial Sequence: Synthetic oligonucleotide
  Target: PCSK9; (+) strand; PAM type: NRG; PAM sequence: GGG
actgttccctcctctccctt

SEQ ID NO: 15004 - DNA, 20 bp, Artificial Sequence
  Description of Artificial Sequence: Synthetic oligonucleotide
  Target: PCSK9; (+) strand; PAM type: NRG; PAM sequence: CAG
ttccctcctctcccttgggc

SEQ ID NO: 15005 - DNA, 20 bp, Artificial Sequence
  Description of Artificial Sequence: Synthetic oligonucleotide
  Target: PCSK9; (+) strand; PAM type: NRG; PAM sequence: AAG
cctcctctcccttgggccag

SEQ ID NO: 15006 - DNA, 20 bp, Artificial Sequence
  Description of Artificial Sequence: Synthetic oligonucleotide
  Target: PCSK9; (+) strand; PAM type: NRG; PAM sequence: CAG
cctctcccttgggccagaag

SEQ ID NO: 15007 - DNA, 20 bp, Artificial Sequence
  Description of Artificial Sequence: Synthetic oligonucleotide
  Target: PCSK9; (+) strand; PAM type: NRG; PAM sequence: TGG
ccttgggccagaagcagacg

SEQ ID NO: 15008 - DNA, 20 bp, Artificial Sequence
  Description of Artificial Sequence: Synthetic oligonucleotide
  Target: PCSK9; (+) strand; PAM type: NRG; PAM sequence: GGG
cttgggccagaagcagacgt

SEQ ID NO: 15009 - DNA, 20 bp, Artificial Sequence
  Description of Artificial Sequence: Synthetic oligonucleotide
  Target: PCSK9; (+) strand; PAM type: NRG; PAM sequence: GGG
ttgggccagaagcagacgtg

SEQ ID NO: 15010 - DNA, 20 bp, Artificial Sequence
  Description of Artificial Sequence: Synthetic oligonucleotide
  Target: PCSK9; (+) strand; PAM type: NRG; PAM sequence: TAG
gtggggccctttcttcccca

SEQ ID NO: 15011 - DNA, 20 bp, Artificial Sequence
  Description of Artificial Sequence: Synthetic oligonucleotide
  Target: PCSK9; (+) strand; PAM type: NRG; PAM sequence: AGG
tggggccctttcttccccat

SEQ ID NO: 15012 - DNA, 20 bp, Artificial Sequence
  Description of Artificial Sequence: Synthetic oligonucleotide
  Target: PCSK9; (+) strand; PAM type: NRG; PAM sequence: TGG
tcttccccataggatgccca

SEQ ID NO: 15013 - DNA, 20 bp, Artificial Sequence
  Description of Artificial Sequence: Synthetic oligonucleotide
  Target: PCSK9; (+) strand; PAM type: NRG; PAM sequence: GAG
ccccccttcccgcttccccc

SEQ ID NO: 15014 - DNA, 20 bp, Artificial Sequence
  Description of Artificial Sequence: Synthetic oligonucleotide
  Target: PCSK9; (+) strand; PAM type: NRG; PAM sequence: TGG
ccgcttcccccgagtgtctg

SEQ ID NO: 15015 - DNA, 20 bp, Artificial Sequence
  Description of Artificial Sequence: Synthetic oligonucleotide
  Target: PCSK9; (+) strand; PAM type: NRG; PAM sequence: GGG
cgcttcccccgagtgtctgt

SEQ ID NO: 15016 - DNA, 20 bp, Artificial Sequence
  Description of Artificial Sequence: Synthetic oligonucleotide
  Target: PCSK9; (+) strand; PAM type: NRG; PAM sequence: GAG
cttcccccgagtgtctgtgg

SEQ ID NO: 15017 - DNA, 20 bp, Artificial Sequence
  Description of Artificial Sequence: Synthetic oligonucleotide
  Target: PCSK9; (+) strand; PAM type: NRG; PAM sequence: AGG
ttcccccgagtgtctgtggg

SEQ ID NO: 15018 - DNA, 20 bp, Artificial Sequence
  Description of Artificial Sequence: Synthetic oligonucleotide
  Target: PCSK9; (+) strand; PAM type: NRG; PAM sequence: TGG
ccccgagtgtctgtgggagg

SEQ ID NO: 15019 - DNA, 20 bp, Artificial Sequence
  Description of Artificial Sequence: Synthetic oligonucleotide
  Target: PCSK9; (+) strand; PAM type: NRG; PAM sequence: CAG
cgagtgtctgtgggaggtgg

SEQ ID NO: 15020 - DNA, 20 bp, Artificial Sequence
  Description of Artificial Sequence: Synthetic oligonucleotide
  Target: PCSK9; (+) strand; PAM type: NRG; PAM sequence: AGG
gagtgtctgtgggaggtggc

SEQ ID NO: 15021 - DNA, 20 bp, Artificial Sequence
  Description of Artificial Sequence: Synthetic oligonucleotide
  Target: PCSK9; (+) strand; PAM type: NRG; PAM sequence: TGG
tctgtgggaggtggcaggaa

SEQ ID NO: 15022 - DNA, 20 bp, Artificial Sequence
  Description of Artificial Sequence: Synthetic oligonucleotide
  Target: PCSK9; (+) strand; PAM type: NRG; PAM sequence: CAG
gtgggaggtggcaggaatgg

SEQ ID NO: 15023 - DNA, 20 bp, Artificial Sequence
  Description of Artificial Sequence: Synthetic oligonucleotide
  Target: PCSK9; (+) strand; PAM type: NRG; PAM sequence: AGG
tgggaggtggcaggaatggc

SEQ ID NO: 15024 - DNA, 20 bp, Artificial Sequence
  Description of Artificial Sequence: Synthetic oligonucleotide
  Target: PCSK9; (+) strand; PAM type: NRG; PAM sequence: CAG
gaggtggcaggaatggcagg

SEQ ID NO: 15025 - DNA, 20 bp, Artificial Sequence
  Description of Artificial Sequence: Synthetic oligonucleotide
  Target: PCSK9; (+) strand; PAM type: NRG; PAM sequence: AGG
aggtggcaggaatggcaggc

SEQ ID NO: 15026 - DNA, 20 bp, Artificial Sequence
  Description of Artificial Sequence: Synthetic oligonucleotide
  Target: PCSK9; (+) strand; PAM type: NRG; PAM sequence: GGG
ggtggcaggaatggcaggca

SEQ ID NO: 15027 - DNA, 20 bp, Artificial Sequence
  Description of Artificial Sequence: Synthetic oligonucleotide
  Target: PCSK9; (+) strand; PAM type: NRG; PAM sequence: GGG
gtggcaggaatggcaggcag

SEQ ID NO: 15028 - DNA, 20 bp, Artificial Sequence
  Description of Artificial Sequence: Synthetic oligonucleotide
  Target: PCSK9; (+) strand; PAM type: NRG; PAM sequence: TGG
aggaatggcaggcaggggtg

SEQ ID NO: 15029 - DNA, 20 bp, Artificial Sequence
  Description of Artificial Sequence: Synthetic oligonucleotide
  Target: PCSK9; (+) strand; PAM type: NRG; PAM sequence: TGG
caggggtgtggaaccccttc

SEQ ID NO: 15030 - DNA, 20 bp, Artificial Sequence
  Description of Artificial Sequence: Synthetic oligonucleotide
  Target: PCSK9; (+) strand; PAM type: NRG; PAM sequence: GAG
ggggtgtggaaccccttctg

SEQ ID NO: 15031 - DNA, 20 bp, Artificial Sequence
  Description of Artificial Sequence: Synthetic oligonucleotide
  Target: PCSK9; (+) strand; PAM type: NRG; PAM sequence: AAG
accccttctggagtcatatc

SEQ ID NO: 15032 - DNA, 20 bp, Artificial Sequence
  Description of Artificial Sequence: Synthetic oligonucleotide
  Target: PCSK9; (+) strand; PAM type: NRG; PAM sequence: AGG
ccccttctggagtcatatca

SEQ ID NO: 15033 - DNA, 20 bp, Artificial Sequence
  Description of Artificial Sequence: Synthetic oligonucleotide
  Target: PCSK9; (+) strand; PAM type: NRG; PAM sequence: GGG
cccttctggagtcatatcaa

SEQ ID NO: 15034 - DNA, 20 bp, Artificial Sequence
  Description of Artificial Sequence: Synthetic oligonucleotide
  Target: PCSK9; (+) strand; PAM type: NRG; PAM sequence: TGG
ctggagtcatatcaagggct

SEQ ID NO: 15035 - DNA, 20 bp, Artificial Sequence
  Description of Artificial Sequence: Synthetic oligonucleotide
  Target: PCSK9; (+) strand; PAM type: NRG; PAM sequence: TGG
agtcatatcaagggcttggc

SEQ ID NO: 15036 - DNA, 20 bp, Artificial Sequence
  Description of Artificial Sequence: Synthetic oligonucleotide
  Target: PCSK9; (+) strand; PAM type: NRG; PAM sequence: GAG
tcatatcaagggcttggctg

SEQ ID NO: 15037 - DNA, 20 bp, Artificial Sequence
  Description of Artificial Sequence: Synthetic oligonucleotide
  Target: PCSK9; (+) strand; PAM type: NRG; PAM sequence: AGG
catatcaagggcttggctgg

SEQ ID NO: 15038 - DNA, 20 bp, Artificial Sequence
  Description of Artificial Sequence: Synthetic oligonucleotide
  Target: PCSK9; (+) strand; PAM type: NRG; PAM sequence: AAG
atcaagggcttggctggagg

SEQ ID NO: 15039 - DNA, 20 bp, Artificial Sequence
  Description of Artificial Sequence: Synthetic oligonucleotide
  Target: PCSK9; (+) strand; PAM type: NRG; PAM sequence: TGG
ttggctggaggaagtcctcc

SEQ ID NO: 15040 - DNA, 20 bp, Artificial Sequence
  Description of Artificial Sequence: Synthetic oligonucleotide
  Target: PCSK9; (+) strand; PAM type: NRG; PAM sequence: GAG
ggctggaggaagtcctcctg

SEQ ID NO: 15041 - DNA, 20 bp, Artificial Sequence
  Description of Artificial Sequence: Synthetic oligonucleotide
  Target: PCSK9; (+) strand; PAM type: NRG; PAM sequence: TGG
ggaagtcctcctggagctgt

SEQ ID NO: 15042 - DNA, 20 bp, Artificial Sequence
  Description of Artificial Sequence: Synthetic oligonucleotide
  Target: PCSK9; (+) strand; PAM type: NRG; PAM sequence: GGG
gaagtcctcctggagctgtt

SEQ ID NO: 15043 - DNA, 20 bp, Artificial Sequence
  Description of Artificial Sequence: Synthetic oligonucleotide
  Target: PCSK9; (+) strand; PAM type: NRG; PAM sequence: TGG
tcctcctggagctgttgggc

SEQ ID NO: 15044 - DNA, 20 bp, Artificial Sequence
  Description of Artificial Sequence: Synthetic oligonucleotide
  Target: PCSK9; (+) strand; PAM type: NRG; PAM sequence: TGG
ctggagctgttgggctggca

SEQ ID NO: 15045 - DNA, 20 bp, Artificial Sequence
  Description of Artificial Sequence: Synthetic oligonucleotide
  Target: PCSK9; (+) strand; PAM type: NRG; PAM sequence: GGG
tggagctgttgggctggcat

SEQ ID NO: 15046 - DNA, 20 bp, Artificial Sequence
  Description of Artificial Sequence: Synthetic oligonucleotide
  Target: PCSK9; (+) strand; PAM type: NRG; PAM sequence: GGG
ggagctgttgggctggcatg

SEQ ID NO: 15047 - DNA, 20 bp, Artificial Sequence
  Description of Artificial Sequence: Synthetic oligonucleotide
  Target: PCSK9; (+) strand; PAM type: NRG; PAM sequence: CAG
gctgttgggctggcatgggg

SEQ ID NO: 15048 - DNA, 20 bp, Artificial Sequence
  Description of Artificial Sequence: Synthetic oligonucleotide
  Target: PCSK9; (+) strand; PAM type: NRG; PAM sequence: AGG
ctgttgggctggcatggggc

SEQ ID NO: 15049 - DNA, 20 bp, Artificial Sequence
  Description of Artificial Sequence: Synthetic oligonucleotide
  Target: PCSK9; (+) strand; PAM type: NRG; PAM sequence: TGG
tgggctggcatggggcaggc

SEQ ID NO: 15050 - DNA, 20 bp, Artificial Sequence
  Description of Artificial Sequence: Synthetic oligonucleotide
  Target: PCSK9; (+) strand; PAM type: NRG; PAM sequence: TGG
ctggcatggggcaggctggc

SEQ ID NO: 15051 - DNA, 20 bp, Artificial Sequence
  Description of Artificial Sequence: Synthetic oligonucleotide
  Target: PCSK9; (+) strand; PAM type: NRG; PAM sequence: GGG
tggcatggggcaggctggct

SEQ ID NO: 15052 - DNA, 20 bp, Artificial Sequence
  Description of Artificial Sequence: Synthetic oligonucleotide
  Target: PCSK9; (+) strand; PAM type: NRG; PAM sequence: CAG
tggggcaggctggctgggcc

SEQ ID NO: 15053 - DNA, 20 bp, Artificial Sequence
  Description of Artificial Sequence: Synthetic oligonucleotide
  Target: PCSK9; (+) strand; PAM type: NRG; PAM sequence: CAG
ggcaggctggctgggcccag

SEQ ID NO: 15054 - DNA, 20 bp, Artificial Sequence
  Description of Artificial Sequence: Synthetic oligonucleotide
  Target: PCSK9; (+) strand; PAM type: NRG; PAM sequence: CAG
aggctggctgggcccagcag

SEQ ID NO: 15055 - DNA, 20 bp, Artificial Sequence
  Description of Artificial Sequence: Synthetic oligonucleotide
  Target: PCSK9; (+) strand; PAM type: NRG; PAM sequence: TGG
agcagcagcttcttcattca

SEQ ID NO: 15056 - DNA, 20 bp, Artificial Sequence
  Description of Artificial Sequence: Synthetic oligonucleotide
  Target: PCSK9; (+) strand; PAM type: NRG; PAM sequence: GGG
gcagcagcttcttcattcat

SEQ ID NO: 15057 - DNA, 20 bp, Artificial Sequence
  Description of Artificial Sequence: Synthetic oligonucleotide
  Target: PCSK9; (+) strand; PAM type: NRG; PAM sequence: GGG
cagcagcttcttcattcatg

SEQ ID NO: 15058 - DNA, 20 bp, Artificial Sequence
  Description of Artificial Sequence: Synthetic oligonucleotide
  Target: PCSK9; (+) strand; PAM type: NRG; PAM sequence: GAG
gcagcttcttcattcatggg

SEQ ID NO: 15059 - DNA, 20 bp, Artificial Sequence
  Description of Artificial Sequence: Synthetic oligonucleotide
  Target: PCSK9; (+) strand; PAM type: NRG; PAM sequence: AGG
cagcttcttcattcatgggg

SEQ ID NO: 15060 - DNA, 20 bp, Artificial Sequence
  Description of Artificial Sequence: Synthetic oligonucleotide
  Target: PCSK9; (+) strand; PAM type: NRG; PAM sequence: AAG
ttcattcatggggaggccac

SEQ ID NO: 15061 - DNA, 20 bp, Artificial Sequence
  Description of Artificial Sequence: Synthetic oligonucleotide
  Target: PCSK9; (+) strand; PAM type: NRG; PAM sequence: TGG
tcatggggaggccacaagca

SEQ ID NO: 15062 - DNA, 20 bp, Artificial Sequence
  Description of Artificial Sequence: Synthetic oligonucleotide
  Target: PCSK9; (+) strand; PAM type: NRG; PAM sequence: GGG
catggggaggccacaagcat

SEQ ID NO: 15063 - DNA, 20 bp, Artificial Sequence
  Description of Artificial Sequence: Synthetic oligonucleotide
  Target: PCSK9; (+) strand; PAM type: NRG; PAM sequence: TAG
gaggccacaagcatgggccc

SEQ ID NO: 15064 - DNA, 20 bp, Artificial Sequence
  Description of Artificial Sequence: Synthetic oligonucleotide
  Target: PCSK9; (+) strand; PAM type: NRG; PAM sequence: GAG
ggccacaagcatgggcccta

SEQ ID NO: 15065 - DNA, 20 bp, Artificial Sequence
  Description of Artificial Sequence: Synthetic oligonucleotide
  Target: PCSK9; (+) strand; PAM type: NRG; PAM sequence: TGG
acaagcatgggccctagagc

SEQ ID NO: 15066 - DNA, 20 bp, Artificial Sequence
  Description of Artificial Sequence: Synthetic oligonucleotide
  Target: PCSK9; (+) strand; PAM type: NRG; PAM sequence: CAG
ctggctgccgccctcaaacc

SEQ ID NO: 15067 - DNA, 20 bp, Artificial Sequence
  Description of Artificial Sequence: Synthetic oligonucleotide
  Target: PCSK9; (+) strand; PAM type: NRG; PAM sequence: CAG
cactcaccctctctgatctt

SEQ ID NO: 15068 - DNA, 20 bp, Artificial Sequence
  Description of Artificial Sequence: Synthetic oligonucleotide
  Target: PCSK9; (+) strand; PAM type: NRG; PAM sequence: AGG
actcaccctctctgatcttc

SEQ ID NO: 15069 - DNA, 20 bp, Artificial Sequence
  Description of Artificial Sequence: Synthetic oligonucleotide
  Target: PCSK9; (+) strand; PAM type: NRG; PAM sequence: AAG
atcttcaggttcctctgcaa

SEQ ID NO: 15070 - DNA, 20 bp, Artificial Sequence
  Description of Artificial Sequence: Synthetic oligonucleotide
  Target: PCSK9; (+) strand; PAM type: NRG; PAM sequence: AGG
tcttcaggttcctctgcaaa

SEQ ID NO: 15071 - DNA, 20 bp, Artificial Sequence
  Description of Artificial Sequence: Synthetic oligonucleotide
  Target: PCSK9; (+) strand; PAM type: NRG; PAM sequence: GGG
cttcaggttcctctgcaaaa

SEQ ID NO: 15072 - DNA, 20 bp, Artificial Sequence
  Description of Artificial Sequence: Synthetic oligonucleotide
  Target: PCSK9; (+) strand; PAM type: NRG; PAM sequence: GAG
tcaggttcctctgcaaaagg

SEQ ID NO: 15073 - DNA, 20 bp, Artificial Sequence
  Description of Artificial Sequence: Synthetic oligonucleotide
  Target: PCSK9; (+) strand; PAM type: NRG; PAM sequence: AGG
caggttcctctgcaaaaggg

SEQ ID NO: 15074 - DNA, 20 bp, Artificial Sequence
  Description of Artificial Sequence: Synthetic oligonucleotide
  Target: PCSK9; (+) strand; PAM type: NRG; PAM sequence: TGG
ggtaatgataaccctcactc

SEQ ID NO: 15075 - DNA, 20 bp, Artificial Sequence
  Description of Artificial Sequence: Synthetic oligonucleotide
  Target: PCSK9; (+) strand; PAM type: NRG; PAM sequence: GGG
gtaatgataaccctcactct

SEQ ID NO: 15076 - DNA, 20 bp, Artificial Sequence
  Description of Artificial Sequence: Synthetic oligonucleotide
  Target: PCSK9; (+) strand; PAM type: NRG; PAM sequence: GGG
taatgataaccctcactctg

SEQ ID NO: 15077 - DNA, 20 bp, Artificial Sequence
  Description of Artificial Sequence: Synthetic oligonucleotide
  Target: PCSK9; (+) strand; PAM type: NRG; PAM sequence: GGG
aatgataaccctcactctgg

SEQ ID NO: 15078 - DNA, 20 bp, Artificial Sequence
  Description of Artificial Sequence: Synthetic oligonucleotide
  Target: PCSK9; (+) strand; PAM type: NRG; PAM sequence: GGG
atgataaccctcactctggg

SEQ ID NO: 15079 - DNA, 20 bp, Artificial Sequence
  Description of Artificial Sequence: Synthetic oligonucleotide
  Target: PCSK9; (+) strand; PAM type: NRG; PAM sequence: TGG
cctcactctggggggctgtt

SEQ ID NO: 15080 - DNA, 20 bp, Artificial Sequence
  Description of Artificial Sequence: Synthetic oligonucleotide
  Target: PCSK9; (+) strand; PAM type: NRG; PAM sequence: GAG
tcactctggggggctgtttg

SEQ ID NO: 15081 - DNA, 20 bp, Artificial Sequence
  Description of Artificial Sequence: Synthetic oligonucleotide
  Target: PCSK9; (+) strand; PAM type: NRG; PAM sequence: AGG
cactctggggggctgtttgg

SEQ ID NO: 15082 - DNA, 20 bp, Artificial Sequence
  Description of Artificial Sequence: Synthetic oligonucleotide
  Target: PCSK9; (+) strand; PAM type: NRG; PAM sequence: GGG
actctggggggctgtttgga

SEQ ID NO: 15083 - DNA, 20 bp, Artificial Sequence
  Description of Artificial Sequence: Synthetic oligonucleotide
  Target: PCSK9; (+) strand; PAM type: NRG; PAM sequence: CAG
ggctgtttggagggttaaat

SEQ ID NO: 15084 - DNA, 20 bp, Artificial Sequence
  Description of Artificial Sequence: Synthetic oligonucleotide
  Target: PCSK9; (+) strand; PAM type: NRG; PAM sequence: TAG
ggttaaatcagttattgctg

SEQ ID NO: 15085 - DNA, 20 bp, Artificial Sequence
  Description of Artificial Sequence: Synthetic oligonucleotide
  Target: PCSK9; (+) strand; PAM type: NRG; PAM sequence: CAG
tgtagcatgcatttctctgt

SEQ ID NO: 15086 - DNA, 20 bp, Artificial Sequence
  Description of Artificial Sequence: Synthetic oligonucleotide
  Target: PCSK9; (+) strand; PAM type: NRG; PAM sequence: AGG
gtagcatgcatttctctgtc

SEQ ID NO: 15087 - DNA, 20 bp, Artificial Sequence
  Description of Artificial Sequence: Synthetic oligonucleotide
  Target: PCSK9; (+) strand; PAM type: NRG; PAM sequence: GAG
gcatttctctgtcaggtatt

SEQ ID NO: 15088 - DNA, 20 bp, Artificial Sequence
  Description of Artificial Sequence: Synthetic oligonucleotide
  Target: PCSK9; (+) strand; PAM type: NRG; PAM sequence: GAG
ttctctgtcaggtattgagt

SEQ ID NO: 15089 - DNA, 20 bp, Artificial Sequence
  Description of Artificial Sequence: Synthetic oligonucleotide
  Target: PCSK9; (+) strand; PAM type: NRG; PAM sequence: AGG
tctctgtcaggtattgagtg

SEQ ID NO: 15090 - DNA, 20 bp, Artificial Sequence
  Description of Artificial Sequence: Synthetic oligonucleotide
  Target: PCSK9; (+) strand; PAM type: NRG; PAM sequence: TAG
tgagtgaggtgctgtgattt

SEQ ID NO: 15091 - DNA, 20 bp, Artificial Sequence
  Description of Artificial Sequence: Synthetic oligonucleotide
  Target: PCSK9; (+) strand; PAM type: NRG; PAM sequence: GAG
ccattcaataataacgtttt

SEQ ID NO: 15092 - DNA, 20 bp, Artificial Sequence
  Description of Artificial Sequence: Synthetic oligonucleotide
  Target: PCSK9; (+) strand; PAM type: NRG; PAM sequence: CAG
tttgagcacccactgtgcgc

SEQ ID NO: 15093 - DNA, 20 bp, Artificial Sequence
  Description of Artificial Sequence: Synthetic oligonucleotide
  Target: PCSK9; (+) strand; PAM type: NRG; PAM sequence: AGG
ttgagcacccactgtgcgcc

SEQ ID NO: 15094 - DNA, 20 bp, Artificial Sequence
  Description of Artificial Sequence: Synthetic oligonucleotide
  Target: PCSK9; (+) strand; PAM type: NRG; PAM sequence: TAG
ctgtgcgccaggcaccatat

SEQ ID NO: 15095 - DNA, 20 bp, Artificial Sequence
  Description of Artificial Sequence: Synthetic oligonucleotide
  Target: PCSK9; (+) strand; PAM type: NRG; PAM sequence: AGG
tgtgcgccaggcaccatatt

SEQ ID NO: 15096 - DNA, 20 bp, Artificial Sequence
  Description of Artificial Sequence: Synthetic oligonucleotide
  Target: PCSK9; (+) strand; PAM type: NRG; PAM sequence: TGG
ccaggcaccatattaggtgc

SEQ ID NO: 15097 - DNA, 20 bp, Artificial Sequence
  Description of Artificial Sequence: Synthetic oligonucleotide
  Target: PCSK9; (+) strand; PAM type: NRG; PAM sequence: GGG
caggcaccatattaggtgct

SEQ ID NO: 15098 - DNA, 20 bp, Artificial Sequence
  Description of Artificial Sequence: Synthetic oligonucleotide
  Target: PCSK9; (+) strand; PAM type: NRG; PAM sequence: GGG
aggcaccatattaggtgctg

SEQ ID NO: 15099 - DNA, 20 bp, Artificial Sequence
  Description of Artificial Sequence: Synthetic oligonucleotide
  Target: PCSK9; (+) strand; PAM type: NRG; PAM sequence: TGG
aaatgtgaatgaaatgaatg

SEQ ID NO: 15100 - DNA, 20 bp, Artificial Sequence
  Description of Artificial Sequence: Synthetic oligonucleotide
  Target: PCSK9; (+) strand; PAM type: NRG; PAM sequence: CAG
aatgtggtctcttcccccaa

SEQ ID NO: 15101 - DNA, 20 bp, Artificial Sequence
  Description of Artificial Sequence: Synthetic oligonucleotide
  Target: PCSK9; (+) strand; PAM type: NRG; PAM sequence: CAG
tcttcccccaacagtgtatc

SEQ ID NO: 15102 - DNA, 20 bp, Artificial Sequence
  Description of Artificial Sequence: Synthetic oligonucleotide
  Target: PCSK9; (+) strand; PAM type: NRG; PAM sequence: AAG
tcccccaacagtgtatccag

SEQ ID NO: 15103 - DNA, 20 bp, Artificial Sequence
  Description of Artificial Sequence: Synthetic oligonucleotide
  Target: PCSK9; (+) strand; PAM type: NRG; PAM sequence: CAG
taaacaaatgctacttgaca

SEQ ID NO: 15104 - DNA, 20 bp, Artificial Sequence
  Description of Artificial Sequence: Synthetic oligonucleotide
  Target: PCSK9; (+) strand; PAM type: NRG; PAM sequence: TAG
aaatgctacttgacacagat

SEQ ID NO: 15105 - DNA, 20 bp, Artificial Sequence
  Description of Artificial Sequence: Synthetic oligonucleotide
  Target: PCSK9; (+) strand; PAM type: NRG; PAM sequence: TGG
tacttgacacagattagttc

SEQ ID NO: 15106 - DNA, 20 bp, Artificial Sequence
  Description of Artificial Sequence: Synthetic oligonucleotide
  Target: PCSK9; (+) strand; PAM type: NRG; PAM sequence: TAG
tgacacagattagttctgga

SEQ ID NO: 15107 - DNA, 20 bp, Artificial Sequence
  Description of Artificial Sequence: Synthetic oligonucleotide
  Target: PCSK9; (+) strand; PAM type: NRG; PAM sequence: AGG
gacacagattagttctggat

SEQ ID NO: 15108 - DNA, 20 bp, Artificial Sequence
  Description of Artificial Sequence: Synthetic oligonucleotide
  Target: PCSK9; (+) strand; PAM type: NRG; PAM sequence: GAG
agattagttctggataggct

SEQ ID NO: 15109 - DNA, 20 bp, Artificial Sequence
  Description of Artificial Sequence: Synthetic oligonucleotide
  Target: PCSK9; (+) strand; PAM type: NRG; PAM sequence: GAG
attagttctggataggctga

SEQ ID NO: 15110 - DNA, 20 bp, Artificial Sequence
  Description of Artificial Sequence: Synthetic oligonucleotide
  Target: PCSK9; (+) strand; PAM type: NRG; PAM sequence: AAG
tggataggctgagagctctg

SEQ ID NO: 15111 - DNA, 20 bp, Artificial Sequence
  Description of Artificial Sequence: Synthetic oligonucleotide
  Target: PCSK9; (+) strand; PAM type: NRG; PAM sequence: AGG
ggataggctgagagctctga

SEQ ID NO: 15112 - DNA, 20 bp, Artificial Sequence
  Description of Artificial Sequence: Synthetic oligonucleotide
  Target: PCSK9; (+) strand; PAM type: NRG; PAM sequence: GAG
ataggctgagagctctgaag

SEQ ID NO: 15113 - DNA, 20 bp, Artificial Sequence
  Description of Artificial Sequence: Synthetic oligonucleotide
  Target: PCSK9; (+) strand; PAM type: NRG; PAM sequence: CAG
ctgagagctctgaaggagtg

SEQ ID NO: 15114 - DNA, 20 bp, Artificial Sequence
  Description of Artificial Sequence: Synthetic oligonucleotide
  Target: PCSK9; (+) strand; PAM type: NRG; PAM sequence: AGG
tgagagctctgaaggagtgc

SEQ ID NO: 15115 - DNA, 20 bp, Artificial Sequence
  Description of Artificial Sequence: Synthetic oligonucleotide
  Target: PCSK9; (+) strand; PAM type: NRG; PAM sequence: CAG
gagctctgaaggagtgcagg

SEQ ID NO: 15116 - DNA, 20 bp, Artificial Sequence
  Description of Artificial Sequence: Synthetic oligonucleotide
  Target: PCSK9; (+) strand; PAM type: NRG; PAM sequence: GAG
gaaggagtgcaggcagctgc

SEQ ID NO: 15117 - DNA, 20 bp, Artificial Sequence
  Description of Artificial Sequence: Synthetic oligonucleotide
  Target: PCSK9; (+) strand; PAM type: NRG; PAM sequence: CAG
cagctgcgagcctgtgtatc

SEQ ID NO: 15118 - DNA, 20 bp, Artificial Sequence
  Description of Artificial Sequence: Synthetic oligonucleotide
  Target: PCSK9; (+) strand; PAM type: NRG; PAM sequence: CAG
ctgcgagcctgtgtatccag

SEQ ID NO: 15119 - DNA, 20 bp, Artificial Sequence
  Description of Artificial Sequence: Synthetic oligonucleotide
  Target: PCSK9; (+) strand; PAM type: NRG; PAM sequence: AAG
cgagcctgtgtatccagcag

SEQ ID NO: 15120 - DNA, 20 bp, Artificial Sequence
  Description of Artificial Sequence: Synthetic oligonucleotide
  Target: PCSK9; (+) strand; PAM type: NRG; PAM sequence: AGG
gagcctgtgtatccagcaga

SEQ ID NO: 15121 - DNA, 20 bp, Artificial Sequence
  Description of Artificial Sequence: Synthetic oligonucleotide
  Target: PCSK9; (+) strand; PAM type: NRG; PAM sequence: CAG
tgtgtatccagcagaaggat

SEQ ID NO: 15122 - DNA, 20 bp, Artificial Sequence
  Description of Artificial Sequence: Synthetic oligonucleotide
  Target: PCSK9; (+) strand; PAM type: NRG; PAM sequence: AGG
gtgtatccagcagaaggatc

SEQ ID NO: 15123 - DNA, 20 bp, Artificial Sequence
  Description of Artificial Sequence: Synthetic oligonucleotide
  Target: PCSK9; (+) strand; PAM type: NRG; PAM sequence: AAG
atccagcagaaggatcagga

SEQ ID NO: 15124 - DNA, 20 bp, Artificial Sequence
  Description of Artificial Sequence: Synthetic oligonucleotide
  Target: PCSK9; (+) strand; PAM type: NRG; PAM sequence: AGG
tccagcagaaggatcaggaa

SEQ ID NO: 15125 - DNA, 20 bp, Artificial Sequence
  Description of Artificial Sequence: Synthetic oligonucleotide
  Target: PCSK9; (+) strand; PAM type: NRG; PAM sequence: TGG
aaggatcaggaaaggattcc

SEQ ID NO: 15126 - DNA, 20 bp, Artificial Sequence
  Description of Artificial Sequence: Synthetic oligonucleotide
  Target: PCSK9; (+) strand; PAM type: NRG; PAM sequence: GAG
ggatcaggaaaggattcctg

SEQ ID NO: 15127 - DNA, 20 bp, Artificial Sequence
  Description of Artificial Sequence: Synthetic oligonucleotide
  Target: PCSK9; (+) strand; PAM type: NRG; PAM sequence: AGG
gatcaggaaaggattcctgg

SEQ ID NO: 15128 - DNA, 20 bp, Artificial Sequence
  Description of Artificial Sequence: Synthetic oligonucleotide
  Target: PCSK9; (+) strand; PAM type: NRG; PAM sequence: AAG
caggaaaggattcctggagg

SEQ ID NO: 15129 - DNA, 20 bp, Artificial Sequence
  Description of Artificial Sequence: Synthetic oligonucleotide
  Target: PCSK9; (+) strand; PAM type: NRG; PAM sequence: TAG
tcctggaggaagcgctgttc

SEQ ID NO: 15130 - DNA, 20 bp, Artificial Sequence
  Description of Artificial Sequence: Synthetic oligonucleotide
  Target: PCSK9; (+) strand; PAM type: NRG; PAM sequence: AAG
gaggaagcgctgttctagcc

SEQ ID NO: 15131 - DNA, 20 bp, Artificial Sequence
  Description of Artificial Sequence: Synthetic oligonucleotide
  Target: PCSK9; (+) strand; PAM type: NRG; PAM sequence: CGG
gctgttctagccaagaccta

SEQ ID NO: 15132 - DNA, 20 bp, Artificial Sequence
  Description of Artificial Sequence: Synthetic oligonucleotide
  Target: PCSK9; (+) strand; PAM type: NRG; PAM sequence: GGG
ctgttctagccaagacctac

SEQ ID NO: 15133 - DNA, 20 bp, Artificial Sequence
  Description of Artificial Sequence: Synthetic oligonucleotide
  Target: PCSK9; (+) strand; PAM type: NRG; PAM sequence: GGG
tgttctagccaagacctacg

SEQ ID NO: 15134 - DNA, 20 bp, Artificial Sequence
  Description of Artificial Sequence: Synthetic oligonucleotide
  Target: PCSK9; (+) strand; PAM type: NRG; PAM sequence: GGG
gttctagccaagacctacgg

SEQ ID NO: 15135 - DNA, 20 bp, Artificial Sequence
  Description of Artificial Sequence: Synthetic oligonucleotide
  Target: PCSK9; (+) strand; PAM type: NRG; PAM sequence: CAG
cctacgggggcattattaac

SEQ ID NO: 15136 - DNA, 20 bp, Artificial Sequence
  Description of Artificial Sequence: Synthetic oligonucleotide
  Target: PCSK9; (+) strand; PAM type: NRG; PAM sequence: AGG
ctacgggggcattattaacc

SEQ ID NO: 15137 - DNA, 20 bp, Artificial Sequence
  Description of Artificial Sequence: Synthetic oligonucleotide
  Target: PCSK9; (+) strand; PAM type: NRG; PAM sequence: AAG
ggggcattattaaccaggca

SEQ ID NO: 15138 - DNA, 20 bp, Artificial Sequence
  Description of Artificial Sequence: Synthetic oligonucleotide
  Target: PCSK9; (+) strand; PAM type: NRG; PAM sequence: AGG
gggcattattaaccaggcaa

SEQ ID NO: 15139 - DNA, 20 bp, Artificial Sequence
  Description of Artificial Sequence: Synthetic oligonucleotide
  Target: PCSK9; (+) strand; PAM type: NRG; PAM sequence: GGG
ggcattattaaccaggcaaa

SEQ ID NO: 15140 - DNA, 20 bp, Artificial Sequence
  Description of Artificial Sequence: Synthetic oligonucleotide
  Target: PCSK9; (+) strand; PAM type: NRG; PAM sequence: GGG
gcattattaaccaggcaaag

SEQ ID NO: 15141 - DNA, 20 bp, Artificial Sequence
  Description of Artificial Sequence: Synthetic oligonucleotide
  Target: PCSK9; (+) strand; PAM type: NRG; PAM sequence: CGG
tattaaccaggcaaagggga

SEQ ID NO: 15142 - DNA, 20 bp, Artificial Sequence
  Description of Artificial Sequence: Synthetic oligonucleotide
  Target: PCSK9; (+) strand; PAM type: NRG; PAM sequence: AAG
aggcaaaggggacggtgtcc

SEQ ID NO: 15143 - DNA, 20 bp, Artificial Sequence
  Description of Artificial Sequence: Synthetic oligonucleotide
  Target: PCSK9; (+) strand; PAM type: NRG; PAM sequence: CAG
caaaggggacggtgtccaag

SEQ ID NO: 15144 - DNA, 20 bp, Artificial Sequence
  Description of Artificial Sequence: Synthetic oligonucleotide
  Target: PCSK9; (+) strand; PAM type: NRG; PAM sequence: TGG
aggggacggtgtccaagcag

SEQ ID NO: 15145 - DNA, 20 bp, Artificial Sequence
  Description of Artificial Sequence: Synthetic oligonucleotide
  Target: PCSK9; (+) strand; PAM type: NRG; PAM sequence: TGG
tccaagcagtggaatgaacg

SEQ ID NO: 15146 - DNA, 20 bp, Artificial Sequence
  Description of Artificial Sequence: Synthetic oligonucleotide
  Target: PCSK9; (+) strand; PAM type: NRG; PAM sequence: AAG
agtggaatgaacgtggattg

SEQ ID NO: 15147 - DNA, 20 bp, Artificial Sequence
  Description of Artificial Sequence: Synthetic oligonucleotide
  Target: PCSK9; (+) strand; PAM type: NRG; PAM sequence: GAG
tgaacgtggattgaagctgt

SEQ ID NO: 15148 - DNA, 20 bp, Artificial Sequence
  Description of Artificial Sequence: Synthetic oligonucleotide
  Target: PCSK9; (+) strand; PAM type: NRG; PAM sequence: AGG
gaacgtggattgaagctgtg

SEQ ID NO: 15149 - DNA, 20 bp, Artificial Sequence
  Description of Artificial Sequence: Synthetic oligonucleotide
  Target: PCSK9; (+) strand; PAM type: NRG; PAM sequence: CAG
cgtggattgaagctgtgagg

SEQ ID NO: 15150 - DNA, 20 bp, Artificial Sequence
  Description of Artificial Sequence: Synthetic oligonucleotide
  Target: PCSK9; (+) strand; PAM type: NRG; PAM sequence: AGG
gtggattgaagctgtgaggc

SEQ ID NO: 15151 - DNA, 20 bp, Artificial Sequence
  Description of Artificial Sequence: Synthetic oligonucleotide
  Target: PCSK9; (+) strand; PAM type: NRG; PAM sequence: GAG
ggattgaagctgtgaggcag

SEQ ID NO: 15152 - DNA, 20 bp, Artificial Sequence
  Description of Artificial Sequence: Synthetic oligonucleotide
  Target: PCSK9; (+) strand; PAM type: NRG; PAM sequence: AGG
gattgaagctgtgaggcagg

SEQ ID NO: 15153 - DNA, 20 bp, Artificial Sequence
  Description of Artificial Sequence: Synthetic oligonucleotide
  Target: PCSK9; (+) strand; PAM type: NRG; PAM sequence: GGG
attgaagctgtgaggcagga

SEQ ID NO: 15154 - DNA, 20 bp, Artificial Sequence
  Description of Artificial Sequence: Synthetic oligonucleotide
  Target: PCSK9; (+) strand; PAM type: NRG; PAM sequence: GAG
tgaagctgtgaggcaggagg

SEQ ID NO: 15155 - DNA, 20 bp, Artificial Sequence
  Description of Artificial Sequence: Synthetic oligonucleotide
  Target: PCSK9; (+) strand; PAM type: NRG; PAM sequence: TGG
ctgtgaggcaggagggagtg

SEQ ID NO: 15156 - DNA, 20 bp, Artificial Sequence
  Description of Artificial Sequence: Synthetic oligonucleotide
  Target: PCSK9; (+) strand; PAM type: NRG; PAM sequence: CAG
aggagggagtgtggcctgtg

SEQ ID NO: 15157 - DNA, 20 bp, Artificial Sequence
  Description of Artificial Sequence: Synthetic oligonucleotide
  Target: PCSK9; (+) strand; PAM type: NRG; PAM sequence: AAG
agggagtgtggcctgtgcag

SEQ ID NO: 15158 - DNA, 20 bp, Artificial Sequence
  Description of Artificial Sequence: Synthetic oligonucleotide
  Target: PCSK9; (+) strand; PAM type: NRG; PAM sequence: AGG
gggagtgtggcctgtgcaga

SEQ ID NO: 15159 - DNA, 20 bp, Artificial Sequence
  Description of Artificial Sequence: Synthetic oligonucleotide
  Target: PCSK9; (+) strand; PAM type: NRG; PAM sequence: GGG
ggagtgtggcctgtgcagaa

SEQ ID NO: 15160 - DNA, 20 bp, Artificial Sequence
  Description of Artificial Sequence: Synthetic oligonucleotide
  Target: PCSK9; (+) strand; PAM type: NRG; PAM sequence: GAG
tggcctgtgcagaagggacc

SEQ ID NO: 15161 - DNA, 20 bp, Artificial Sequence
  Description of Artificial Sequence: Synthetic oligonucleotide
  Target: PCSK9; (+) strand; PAM type: NRG; PAM sequence: AGG
ggcctgtgcagaagggaccg

SEQ ID NO: 15162 - DNA, 20 bp, Artificial Sequence
  Description of Artificial Sequence: Synthetic oligonucleotide
  Target: PCSK9; (+) strand; PAM type: NRG; PAM sequence: TGG
tgtgcagaagggaccgaggc

SEQ ID NO: 15163 - DNA, 20 bp, Artificial Sequence
  Description of Artificial Sequence: Synthetic oligonucleotide
  Target: PCSK9; (+) strand; PAM type: NRG; PAM sequence: GAG
cagaagggaccgaggctggt

SEQ ID NO: 15164 - DNA, 20 bp, Artificial Sequence
  Description of Artificial Sequence: Synthetic oligonucleotide
  Target: PCSK9; (+) strand; PAM type: NRG; PAM sequence: CAG
gggaccgaggctggtgagac

SEQ ID NO: 15165 - DNA, 20 bp, Artificial Sequence
  Description of Artificial Sequence: Synthetic oligonucleotide
  Target: PCSK9; (+) strand; PAM type: NRG; PAM sequence: AGG
ggaccgaggctggtgagacc

SEQ ID NO: 15166 - DNA, 20 bp, Artificial Sequence
  Description of Artificial Sequence: Synthetic oligonucleotide
  Target: PCSK9; (+) strand; PAM type: NRG; PAM sequence: GAG
accgaggctggtgagaccag

SEQ ID NO: 15167 - DNA, 20 bp, Artificial Sequence
  Description of Artificial Sequence: Synthetic oligonucleotide
  Target: PCSK9; (+) strand; PAM type: NRG; PAM sequence: AGG
ccgaggctggtgagaccagg

SEQ ID NO: 15168 - DNA, 20 bp, Artificial Sequence
  Description of Artificial Sequence: Synthetic oligonucleotide
  Target: PCSK9; (+) strand; PAM type: NRG; PAM sequence: GGG
cgaggctggtgagaccagga

SEQ ID NO: 15169 - DNA, 20 bp, Artificial Sequence
  Description of Artificial Sequence: Synthetic oligonucleotide
  Target: PCSK9; (+) strand; PAM type: NRG; PAM sequence: TGG
ctggtgagaccaggagggcc

SEQ ID NO: 15170 - DNA, 20 bp, Artificial Sequence
  Description of Artificial Sequence: Synthetic oligonucleotide
  Target: PCSK9; (+) strand; PAM type: NRG; PAM sequence: GGG
tggtgagaccaggagggcct

SEQ ID NO: 15171 - DNA, 20 bp, Artificial Sequence
  Description of Artificial Sequence: Synthetic oligonucleotide
  Target: PCSK9; (+) strand; PAM type: NRG; PAM sequence: TGG
tgagaccaggagggcctggg

SEQ ID NO: 15172 - DNA, 20 bp, Artificial Sequence
  Description of Artificial Sequence: Synthetic oligonucleotide
  Target: PCSK9; (+) strand; PAM type: NRG; PAM sequence: CAG
aggagggcctgggtggcctc

SEQ ID NO: 15173 - DNA, 20 bp, Artificial Sequence
  Description of Artificial Sequence: Synthetic oligonucleotide
  Target: PCSK9; (+) strand; PAM type: NRG; PAM sequence: AGG
ggagggcctgggtggcctcc

SEQ ID NO: 15174 - DNA, 20 bp, Artificial Sequence
  Description of Artificial Sequence: Synthetic oligonucleotide
  Target: PCSK9; (+) strand; PAM type: NRG; PAM sequence: CAG
ggcctgggtggcctccaggt

SEQ ID NO: 15175 - DNA, 20 bp, Artificial Sequence
  Description of Artificial Sequence: Synthetic oligonucleotide
  Target: PCSK9; (+) strand; PAM type: NRG; PAM sequence: AAG
ggcctccaggtcagatgtga

SEQ ID NO: 15176 - DNA, 20 bp, Artificial Sequence
  Description of Artificial Sequence: Synthetic oligonucleotide
  Target: PCSK9; (+) strand; PAM type: NRG; PAM sequence: AGG
gcctccaggtcagatgtgaa

SEQ ID NO: 15177 - DNA, 20 bp, Artificial Sequence
  Description of Artificial Sequence: Synthetic oligonucleotide
  Target: PCSK9; (+) strand; PAM type: NRG; PAM sequence: AAG
tccaggtcagatgtgaaagg

SEQ ID NO: 15178 - DNA, 20 bp, Artificial Sequence
  Description of Artificial Sequence: Synthetic oligonucleotide
  Target: PCSK9; (+) strand; PAM type: NRG; PAM sequence: TGG
cagatgtgaaaggaagaact

SEQ ID NO: 15179 - DNA, 20 bp, Artificial Sequence
  Description of Artificial Sequence: Synthetic oligonucleotide
  Target: PCSK9; (+) strand; PAM type: NRG; PAM sequence: CAG
tgaaaggaagaacttggcca

SEQ ID NO: 15180 - DNA, 20 bp, Artificial Sequence
  Description of Artificial Sequence: Synthetic oligonucleotide
  Target: PCSK9; (+) strand; PAM type: NRG; PAM sequence: GAG
gaagaacttggccacagtct

SEQ ID NO: 15181 - DNA, 20 bp, Artificial Sequence
  Description of Artificial Sequence: Synthetic oligonucleotide
  Target: PCSK9; (+) strand; PAM type: NRG; PAM sequence: CAG
tggccacagtctgagcttct

SEQ ID NO: 15182 - DNA, 20 bp, Artificial Sequence
  Description of Artificial Sequence: Synthetic oligonucleotide
  Target: PCSK9; (+) strand; PAM type: NRG; PAM sequence: AGG
ggccacagtctgagcttctc

SEQ ID NO: 15183 - DNA, 20 bp, Artificial Sequence
  Description of Artificial Sequence: Synthetic oligonucleotide
  Target: PCSK9; (+) strand; PAM type: NRG; PAM sequence: TGG
gtctgagcttctcaggcgta

SEQ ID NO: 15184 - DNA, 20 bp, Artificial Sequence
  Description of Artificial Sequence: Synthetic oligonucleotide
  Target: PCSK9; (+) strand; PAM type: NRG; PAM sequence: CAG
tgagcttctcaggcgtatgg

SEQ ID NO: 15185 - DNA, 20 bp, Artificial Sequence
  Description of Artificial Sequence: Synthetic oligonucleotide
  Target: PCSK9; (+) strand; PAM type: NRG; PAM sequence: AGG
gagcttctcaggcgtatggc

SEQ ID NO: 15186 - DNA, 20 bp, Artificial Sequence
  Description of Artificial Sequence: Synthetic oligonucleotide
  Target: PCSK9; (+) strand; PAM type: NRG; PAM sequence: GGG
agcttctcaggcgtatggca

SEQ ID NO: 15187 - DNA, 20 bp, Artificial Sequence
  Description of Artificial Sequence: Synthetic oligonucleotide
  Target: PCSK9; (+) strand; PAM type: NRG; PAM sequence: TGG
aggcgtatggcagggctgcc

SEQ ID NO: 15188 - DNA, 20 bp, Artificial Sequence
  Description of Artificial Sequence: Synthetic oligonucleotide
  Target: PCSK9; (+) strand; PAM type: NRG; PAM sequence: GAG
gtatggcagggctgcctggt

SEQ ID NO: 15189 - DNA, 20 bp, Artificial Sequence
  Description of Artificial Sequence: Synthetic oligonucleotide
  Target: PCSK9; (+) strand; PAM type: NRG; PAM sequence: GAG
atggcagggctgcctggtga

SEQ ID NO: 15190 - DNA, 20 bp, Artificial Sequence
  Description of Artificial Sequence: Synthetic oligonucleotide
  Target: PCSK9; (+) strand; PAM type: NRG; PAM sequence: AGG
tggcagggctgcctggtgag

SEQ ID NO: 15191 - DNA, 20 bp, Artificial Sequence
  Description of Artificial Sequence: Synthetic oligonucleotide
  Target: PCSK9; (+) strand; PAM type: NRG; PAM sequence: GGG
ggcagggctgcctggtgaga

SEQ ID NO: 15192 - DNA, 20 bp, Artificial Sequence
  Description of Artificial Sequence: Synthetic oligonucleotide
  Target: PCSK9; (+) strand; PAM type: NRG; PAM sequence: GAG
gctgcctggtgagagggaat

SEQ ID NO: 15193 - DNA, 20 bp, Artificial Sequence
  Description of Artificial Sequence: Synthetic oligonucleotide
  Target: PCSK9; (+) strand; PAM type: NRG; PAM sequence: TGG
agggaatgagctccctgctc

SEQ ID NO: 15194 - DNA, 20 bp, Artificial Sequence
  Description of Artificial Sequence: Synthetic oligonucleotide
  Target: PCSK9; (+) strand; PAM type: NRG; PAM sequence: GAG
ggaatgagctccctgctctg

SEQ ID NO: 15195 - DNA, 20 bp, Artificial Sequence
  Description of Artificial Sequence: Synthetic oligonucleotide
  Target: PCSK9; (+) strand; PAM type: NRG; PAM sequence: AGG
gaatgagctccctgctctgg

SEQ ID NO: 15196 - DNA, 20 bp, Artificial Sequence
  Description of Artificial Sequence: Synthetic oligonucleotide
  Target: PCSK9; (+) strand; PAM type: NRG; PAM sequence: AAG
tccctgctctggaggtatgc

SEQ ID NO: 15197 - DNA, 20 bp, Artificial Sequence
  Description of Artificial Sequence: Synthetic oligonucleotide
  Target: PCSK9; (+) strand; PAM type: NRG; PAM sequence: CAG
ctgctctggaggtatgcaag

SEQ ID NO: 15198 - DNA, 20 bp, Artificial Sequence
  Description of Artificial Sequence: Synthetic oligonucleotide
  Target: PCSK9; (+) strand; PAM type: NRG; PAM sequence: AGG
tgctctggaggtatgcaagc

SEQ ID NO: 15199 - DNA, 20 bp, Artificial Sequence
  Description of Artificial Sequence: Synthetic oligonucleotide
  Target: PCSK9; (+) strand; PAM type: NRG; PAM sequence: TGG
tggaggtatgcaagcaggac

SEQ ID NO: 15200 - DNA, 20 bp, Artificial Sequence
  Description of Artificial Sequence: Synthetic oligonucleotide
  Target: PCSK9; (+) strand; PAM type: NRG; PAM sequence: GGG
ggaggtatgcaagcaggact

SEQ ID NO: 15201 - DNA, 20 bp, Artificial Sequence
  Description of Artificial Sequence: Synthetic oligonucleotide
  Target: PCSK9; (+) strand; PAM type: NRG; PAM sequence: CAG
aggactgggctctcacctgc

SEQ ID NO: 15202 - DNA, 20 bp, Artificial Sequence
  Description of Artificial Sequence: Synthetic oligonucleotide
  Target: PCSK9; (+) strand; PAM type: NRG; PAM sequence: GAG
gactgggctctcacctgcca

SEQ ID NO: 15203 - DNA, 20 bp, Artificial Sequence
  Description of Artificial Sequence: Synthetic oligonucleotide
  Target: PCSK9; (+) strand; PAM type: NRG; PAM sequence: AGG
actgggctctcacctgccag

SEQ ID NO: 15204 - DNA, 20 bp, Artificial Sequence
  Description of Artificial Sequence: Synthetic oligonucleotide
  Target: PCSK9; (+) strand; PAM type: NRG; PAM sequence: CAG
ctctcacctgccagaggcca

SEQ ID NO: 15205 - DNA, 20 bp, Artificial Sequence
  Description of Artificial Sequence: Synthetic oligonucleotide
  Target: PCSK9; (+) strand; PAM type: NRG; PAM sequence: GAG
ctcacctgccagaggccaca

SEQ ID NO: 15206 - DNA, 20 bp, Artificial Sequence
  Description of Artificial Sequence: Synthetic oligonucleotide
  Target: PCSK9; (+) strand; PAM type: NRG; PAM sequence: CAG
ccagaggccacagagctttc

SEQ ID NO: 15207 - DNA, 20 bp, Artificial Sequence
  Description of Artificial Sequence: Synthetic oligonucleotide
  Target: PCSK9; (+) strand; PAM type: NRG; PAM sequence: GAG
agaggccacagagctttcca

SEQ ID NO: 15208 - DNA, 20 bp, Artificial Sequence
  Description of Artificial Sequence: Synthetic oligonucleotide
  Target: PCSK9; (+) strand; PAM type: NRG; PAM sequence: AGG
gaggccacagagctttccag

SEQ ID NO: 15209 - DNA, 20 bp, Artificial Sequence
  Description of Artificial Sequence: Synthetic oligonucleotide
  Target: PCSK9; (+) strand; PAM type: NRG; PAM sequence: TGG
ccacagagctttccagaggc

SEQ ID NO: 15210 - DNA, 20 bp, Artificial Sequence
  Description of Artificial Sequence: Synthetic oligonucleotide
  Target: PCSK9; (+) strand; PAM type: NRG; PAM sequence: AAG
cagagctttccagaggctgg

SEQ ID NO: 15211 - DNA, 20 bp, Artificial Sequence
  Description of Artificial Sequence: Synthetic oligonucleotide
  Target: PCSK9; (+) strand; PAM type: NRG; PAM sequence: GAG
gagctttccagaggctggaa

SEQ ID NO: 15212 - DNA, 20 bp, Artificial Sequence
  Description of Artificial Sequence: Synthetic oligonucleotide
  Target: PCSK9; (+) strand; PAM type: NRG; PAM sequence: AGG
agctttccagaggctggaag

SEQ ID NO: 15213 - DNA, 20 bp, Artificial Sequence
  Description of Artificial Sequence: Synthetic oligonucleotide
  Target: PCSK9; (+) strand; PAM type: NRG; PAM sequence: AAG
aggctggaagaggccactcc

SEQ ID NO: 15214 - DNA, 20 bp, Artificial Sequence
  Description of Artificial Sequence: Synthetic oligonucleotide
  Target: PCSK9; (+) strand; PAM type: NRG; PAM sequence: AGG
ggctggaagaggccactcca

SEQ ID NO: 15215 - DNA, 20 bp, Artificial Sequence
  Description of Artificial Sequence: Synthetic oligonucleotide
  Target: PCSK9; (+) strand; PAM type: NRG; PAM sequence: GAG
tccaaggcctctttgcccct

SEQ ID NO: 15216 - DNA, 20 bp, Artificial Sequence
  Description of Artificial Sequence: Synthetic oligonucleotide
  Target: PCSK9; (+) strand; PAM type: NRG; PAM sequence: GAG
caaggcctctttgcccctga

SEQ ID NO: 15217 - DNA, 20 bp, Artificial Sequence
  Description of Artificial Sequence: Synthetic oligonucleotide
  Target: PCSK9; (+) strand; PAM type: NRG; PAM sequence: TGG
ggcctctttgcccctgagag

SEQ ID NO: 15218 - DNA, 20 bp, Artificial Sequence
  Description of Artificial Sequence: Synthetic oligonucleotide
  Target: PCSK9; (+) strand; PAM type: NRG; PAM sequence: TGG
ctctttgcccctgagagtgg

SEQ ID NO: 15219 - DNA, 20 bp, Artificial Sequence
  Description of Artificial Sequence: Synthetic oligonucleotide
  Target: PCSK9; (+) strand; PAM type: NRG; PAM sequence: GAG
tgagagtggtggctcttctt

SEQ ID NO: 15220 - DNA, 20 bp, Artificial Sequence
  Description of Artificial Sequence: Synthetic oligonucleotide
  Target: PCSK9; (+) strand; PAM type: NRG; PAM sequence: AGG
gagagtggtggctcttcttg

SEQ ID NO: 15221 - DNA, 20 bp, Artificial Sequence
  Description of Artificial Sequence: Synthetic oligonucleotide
  Target: PCSK9; (+) strand; PAM type: NRG; PAM sequence: CAG
gccaccttgccacgctgtca

SEQ ID NO: 15222 - DNA, 20 bp, Artificial Sequence
  Description of Artificial Sequence: Synthetic oligonucleotide
  Target: PCSK9; (+) strand; PAM type: NRG; PAM sequence: AGG
ccaccttgccacgctgtcac

SEQ ID NO: 15223 - DNA, 20 bp, Artificial Sequence
  Description of Artificial Sequence: Synthetic oligonucleotide
  Target: PCSK9; (+) strand; PAM type: NRG; PAM sequence: GGG
caccttgccacgctgtcaca

SEQ ID NO: 15224 - DNA, 20 bp, Artificial Sequence
  Description of Artificial Sequence: Synthetic oligonucleotide
  Target: PCSK9; (+) strand; PAM type: NRG; PAM sequence: TAG
gccacgctgtcacagggaac

SEQ ID NO: 15225 - DNA, 20 bp, Artificial Sequence
  Description of Artificial Sequence: Synthetic oligonucleotide
  Target: PCSK9; (+) strand; PAM type: NRG; PAM sequence: CAG
acgctgtcacagggaactag

SEQ ID NO: 15226 - DNA, 20 bp, Artificial Sequence
  Description of Artificial Sequence: Synthetic oligonucleotide
  Target: PCSK9; (+) strand; PAM type: NRG; PAM sequence: CGG
ctagcagcccctgcctcacc

SEQ ID NO: 15227 - DNA, 20 bp, Artificial Sequence
  Description of Artificial Sequence: Synthetic oligonucleotide
  Target: PCSK9; (+) strand; PAM type: NRG; PAM sequence: GGG
tagcagcccctgcctcaccc

SEQ ID NO: 15228 - DNA, 20 bp, Artificial Sequence
  Description of Artificial Sequence: Synthetic oligonucleotide
  Target: PCSK9; (+) strand; PAM type: NRG; PAM sequence: GGG
agcagcccctgcctcacccg

SEQ ID NO: 15229 - DNA, 20 bp, Artificial Sequence
  Description of Artificial Sequence: Synthetic oligonucleotide
  Target: PCSK9; (+) strand; PAM type: NRG; PAM sequence: GGG
gcagcccctgcctcacccgg

SEQ ID NO: 15230 - DNA, 20 bp, Artificial Sequence
  Description of Artificial Sequence: Synthetic oligonucleotide
  Target: PCSK9; (+) strand; PAM type: NRG; PAM sequence: TGG
ccctgcctcacccgggggtt

SEQ ID NO: 15231 - DNA, 20 bp, Artificial Sequence
  Description of Artificial Sequence: Synthetic oligonucleotide
  Target: PCSK9; (+) strand; PAM type: NRG; PAM sequence: AAG
tgcctcacccgggggtttgg

SEQ ID NO: 15232 - DNA, 20 bp, Artificial Sequence
  Description of Artificial Sequence: Synthetic oligonucleotide
  Target: PCSK9; (+) strand; PAM type: NRG; PAM sequence: TAG
tcacccgggggtttggaaga

SEQ ID NO: 15233 - DNA, 20 bp, Artificial Sequence
  Description of Artificial Sequence: Synthetic oligonucleotide
  Target: PCSK9; (+) strand; PAM type: NRG; PAM sequence: GAG
acccgggggtttggaagata

SEQ ID NO: 15234 - DNA, 20 bp, Artificial Sequence
  Description of Artificial Sequence: Synthetic oligonucleotide
  Target: PCSK9; (+) strand; PAM type: NRG; PAM sequence: AGG
cccgggggtttggaagatag

SEQ ID NO: 15235 - DNA, 20 bp, Artificial Sequence
  Description of Artificial Sequence: Synthetic oligonucleotide
  Target: PCSK9; (+) strand; PAM type: NRG; PAM sequence: GGG
ccgggggtttggaagataga

SEQ ID NO: 15236 - DNA, 20 bp, Artificial Sequence
  Description of Artificial Sequence: Synthetic oligonucleotide
  Target: PCSK9; (+) strand; PAM type: NRG; PAM sequence: GAG
gggggtttggaagatagagg

SEQ ID NO: 15237 - DNA, 20 bp, Artificial Sequence
  Description of Artificial Sequence: Synthetic oligonucleotide
  Target: PCSK9; (+) strand; PAM type: NRG; PAM sequence: AGG
ggggtttggaagatagaggg

SEQ ID NO: 15238 - DNA, 20 bp, Artificial Sequence
  Description of Artificial Sequence: Synthetic oligonucleotide
  Target: PCSK9; (+) strand; PAM type: NRG; PAM sequence: TAG
ttggaagatagagggaggcc

SEQ ID NO: 15239 - DNA, 20 bp, Artificial Sequence
  Description of Artificial Sequence: Synthetic oligonucleotide
  Target: PCSK9; (+) strand; PAM type: NRG; PAM sequence: AGG
tggaagatagagggaggcct

SEQ ID NO: 15240 - DNA, 20 bp, Artificial Sequence
  Description of Artificial Sequence: Synthetic oligonucleotide
  Target: PCSK9; (+) strand; PAM type: NRG; PAM sequence: AAG
aagatagagggaggcctagg

SEQ ID NO: 15241 - DNA, 20 bp, Artificial Sequence
  Description of Artificial Sequence: Synthetic oligonucleotide
  Target: PCSK9; (+) strand; PAM type: NRG; PAM sequence: AGG
agatagagggaggcctagga

SEQ ID NO: 15242 - DNA, 20 bp, Artificial Sequence
  Description of Artificial Sequence: Synthetic oligonucleotide
  Target: PCSK9; (+) strand; PAM type: NRG; PAM sequence: GGG
gatagagggaggcctaggaa

SEQ ID NO: 15243 - DNA, 20 bp, Artificial Sequence
  Description of Artificial Sequence: Synthetic oligonucleotide
  Target: PCSK9; (+) strand; PAM type: NRG; PAM sequence: GAG
aagggccctgtgtctcatcc

SEQ ID NO: 15244 - DNA, 20 bp, Artificial Sequence
  Description of Artificial Sequence: Synthetic oligonucleotide
  Target: PCSK9; (+) strand; PAM type: NRG; PAM sequence: TGG
gccctgtgtctcatccgagc

SEQ ID NO: 15245 - DNA, 20 bp, Artificial Sequence
  Description of Artificial Sequence: Synthetic oligonucleotide
  Target: PCSK9; (+) strand; PAM type: NRG; PAM sequence: GGG
ccctgtgtctcatccgagct

SEQ ID NO: 15246 - DNA, 20 bp, Artificial Sequence
  Description of Artificial Sequence: Synthetic oligonucleotide
  Target: PCSK9; (+) strand; PAM type: NRG; PAM sequence: CAG
atccgagctgggcccctttc

SEQ ID NO: 15247 - DNA, 20 bp, Artificial Sequence
  Description of Artificial Sequence: Synthetic oligonucleotide
  Target: PCSK9; (+) strand; PAM type: NRG; PAM sequence: TGG
gcccctttccagcctctcac

SEQ ID NO: 15248 - DNA, 20 bp, Artificial Sequence
  Description of Artificial Sequence: Synthetic oligonucleotide
  Target: PCSK9; (+) strand; PAM type: NRG; PAM sequence: AAG
cctttccagcctctcactgg

SEQ ID NO: 15249 - DNA, 20 bp, Artificial Sequence
  Description of Artificial Sequence: Synthetic oligonucleotide
  Target: PCSK9; (+) strand; PAM type: NRG; PAM sequence: AGG
ctttccagcctctcactgga

SEQ ID NO: 15250 - DNA, 20 bp, Artificial Sequence
  Description of Artificial Sequence: Synthetic oligonucleotide
  Target: PCSK9; (+) strand; PAM type: NRG; PAM sequence: AAG
tccagcctctcactggaagg

SEQ ID NO: 15251 - DNA, 20 bp, Artificial Sequence
  Description of Artificial Sequence: Synthetic oligonucleotide
  Target: PCSK9; (+) strand; PAM type: NRG; PAM sequence: AAG
ctctcactggaaggaagccc

SEQ ID NO: 15252 - DNA, 20 bp, Artificial Sequence
  Description of Artificial Sequence: Synthetic oligonucleotide
  Target: PCSK9; (+) strand; PAM type: NRG; PAM sequence: AGG
tctcactggaaggaagccca

SEQ ID NO: 15253 - DNA, 20 bp, Artificial Sequence
  Description of Artificial Sequence: Synthetic oligonucleotide
  Target: PCSK9; (+) strand; PAM type: NRG; PAM sequence: TGG
gaagcccaaggatgttcctg

SEQ ID NO: 15254 - DNA, 20 bp, Artificial Sequence
  Description of Artificial Sequence: Synthetic oligonucleotide
  Target: PCSK9; (+) strand; PAM type: NRG; PAM sequence: GGG
aagcccaaggatgttcctgt

SEQ ID NO: 15255 - DNA, 20 bp, Artificial Sequence
  Description of Artificial Sequence: Synthetic oligonucleotide
  Target: PCSK9; (+) strand; PAM type: NRG; PAM sequence: GGG
agcccaaggatgttcctgtg

SEQ ID NO: 15256 - DNA, 20 bp, Artificial Sequence
  Description of Artificial Sequence: Synthetic oligonucleotide
  Target: PCSK9; (+) strand; PAM type: NRG; PAM sequence: GGG
gcccaaggatgttcctgtgg

SEQ ID NO: 15257 - DNA, 20 bp, Artificial Sequence
  Description of Artificial Sequence: Synthetic oligonucleotide
  Target: PCSK9; (+) strand; PAM type: NRG; PAM sequence: CAG
gttcctgtgggggcttttac

SEQ ID NO: 15258 - DNA, 20 bp, Artificial Sequence
  Description of Artificial Sequence: Synthetic oligonucleotide
  Target: PCSK9; (+) strand; PAM type: NRG; PAM sequence: AGG
ttcctgtgggggcttttacc

SEQ ID NO: 15259 - DNA, 20 bp, Artificial Sequence
  Description of Artificial Sequence: Synthetic oligonucleotide
  Target: PCSK9; (+) strand; PAM type: NRG; PAM sequence: TGG
caggcccacctgccctctgc

SEQ ID NO: 15260 - DNA, 20 bp, Artificial Sequence
  Description of Artificial Sequence: Synthetic oligonucleotide
  Target: PCSK9; (+) strand; PAM type: NRG; PAM sequence: CAG
ccctctgctggccatgcttg

SEQ ID NO: 15261 - DNA, 20 bp, Artificial Sequence
  Description of Artificial Sequence: Synthetic oligonucleotide
  Target: PCSK9; (+) strand; PAM type: NRG; PAM sequence: CAG
gcagcctcctgaccctgtcc

SEQ ID NO: 15262 - DNA, 20 bp, Artificial Sequence
  Description of Artificial Sequence: Synthetic oligonucleotide
  Target: PCSK9; (+) strand; PAM type: NRG; PAM sequence: CAG
gcctcctgaccctgtcccag

SEQ ID NO: 15263 - DNA, 20 bp, Artificial Sequence
  Description of Artificial Sequence: Synthetic oligonucleotide
  Target: PCSK9; (+) strand; PAM type: NRG; PAM sequence: AGG
cctcctgaccctgtcccagc

SEQ ID NO: 15264 - DNA, 20 bp, Artificial Sequence
  Description of Artificial Sequence: Synthetic oligonucleotide
  Target: PCSK9; (+) strand; PAM type: NRG; PAM sequence: CAG
ctgaccctgtcccagcagga

SEQ ID NO: 15265 - DNA, 20 bp, Artificial Sequence
  Description of Artificial Sequence: Synthetic oligonucleotide
  Target: PCSK9; (+) strand; PAM type: NRG; PAM sequence: TGG
accctgtcccagcaggacag

SEQ ID NO: 15266 - DNA, 20 bp, Artificial Sequence
  Description of Artificial Sequence: Synthetic oligonucleotide
  Target: PCSK9; (+) strand; PAM type: NRG; PAM sequence: GGG
ccctgtcccagcaggacagt

SEQ ID NO: 15267 - DNA, 20 bp, Artificial Sequence
  Description of Artificial Sequence: Synthetic oligonucleotide
  Target: PCSK9; (+) strand; PAM type: NRG; PAM sequence: TGG
gtcccagcaggacagtgggc

SEQ ID NO: 15268 - DNA, 20 bp, Artificial Sequence
  Description of Artificial Sequence: Synthetic oligonucleotide
  Target: PCSK9; (+) strand; PAM type: NRG; PAM sequence: GAG
gcaggacagtgggctggtgt

SEQ ID NO: 15269 - DNA, 20 bp, Artificial Sequence
  Description of Artificial Sequence: Synthetic oligonucleotide
  Target: PCSK9; (+) strand; PAM type: NRG; PAM sequence: CGG
ggacagtgggctggtgtgag

SEQ ID NO: 15270 - DNA, 20 bp, Artificial Sequence
  Description of Artificial Sequence: Synthetic oligonucleotide
  Target: PCSK9; (+) strand; PAM type: NRG; PAM sequence: GGG
gacagtgggctggtgtgagc

SEQ ID NO: 15271 - DNA, 20 bp, Artificial Sequence
  Description of Artificial Sequence: Synthetic oligonucleotide
  Target: PCSK9; (+) strand; PAM type: NRG; PAM sequence: CAG
agtgggctggtgtgagcggg

SEQ ID NO: 15272 - DNA, 20 bp, Artificial Sequence
  Description of Artificial Sequence: Synthetic oligonucleotide
  Target: PCSK9; (+) strand; PAM type: NRG; PAM sequence: AGG
gtgggctggtgtgagcgggc

SEQ ID NO: 15273 - DNA, 20 bp, Artificial Sequence
  Description of Artificial Sequence: Synthetic oligonucleotide
  Target: PCSK9; (+) strand; PAM type: NRG; PAM sequence: TAG
gggcaggaaccgcctgcact

SEQ ID NO: 15274 - DNA, 20 bp, Artificial Sequence
  Description of Artificial Sequence: Synthetic oligonucleotide
  Target: PCSK9; (+) strand; PAM type: NRG; PAM sequence: AAG
caggaaccgcctgcacttag

SEQ ID NO: 15275 - DNA, 20 bp, Artificial Sequence
  Description of Artificial Sequence: Synthetic oligonucleotide
  Target: PCSK9; (+) strand; PAM type: NRG; PAM sequence: AGG
aggaaccgcctgcacttaga

SEQ ID NO: 15276 - DNA, 20 bp, Artificial Sequence
  Description of Artificial Sequence: Synthetic oligonucleotide
  Target: PCSK9; (+) strand; PAM type: NRG; PAM sequence: TGG
ccgcctgcacttagaaggtg

SEQ ID NO: 15277 - DNA, 20 bp, Artificial Sequence
  Description of Artificial Sequence: Synthetic oligonucleotide
  Target: PCSK9; (+) strand; PAM type: NRG; PAM sequence: GGG
cgcctgcacttagaaggtgt

SEQ ID NO: 15278 - DNA, 20 bp, Artificial Sequence
  Description of Artificial Sequence: Synthetic oligonucleotide
  Target: PCSK9; (+) strand; PAM type: NRG; PAM sequence: GGG
gcctgcacttagaaggtgtg

SEQ ID NO: 15279 - DNA, 20 bp, Artificial Sequence
  Description of Artificial Sequence: Synthetic oligonucleotide
  Target: PCSK9; (+) strand; PAM type: NRG; PAM sequence: GAG
aggtgtggggctgcctcccc

SEQ ID NO: 15280 - DNA, 20 bp, Artificial Sequence
  Description of Artificial Sequence: Synthetic oligonucleotide
  Target: PCSK9; (+) strand; PAM type: NRG; PAM sequence: TGG
cccgagcttccatctgccgc

SEQ ID NO: 15281 - DNA, 20 bp, Artificial Sequence
  Description of Artificial Sequence: Synthetic oligonucleotide
  Target: PCSK9; (+) strand; PAM type: NRG; PAM sequence: GGG
ccgagcttccatctgccgct

SEQ ID NO: 15282 - DNA, 20 bp, Artificial Sequence
  Description of Artificial Sequence: Synthetic oligonucleotide
  Target: PCSK9; (+) strand; PAM type: NRG; PAM sequence: GGG
cgagcttccatctgccgctg

SEQ ID NO: 15283 - DNA, 20 bp, Artificial Sequence
  Description of Artificial Sequence: Synthetic oligonucleotide
  Target: PCSK9; (+) strand; PAM type: NRG; PAM sequence: CAG
ctgccgctggggccacaccc

SEQ ID NO: 15284 - DNA, 20 bp, Artificial Sequence
  Description of Artificial Sequence: Synthetic oligonucleotide
  Target: PCSK9; (+) strand; PAM type: NRG; PAM sequence: AGG
tgccgctggggccacacccc

SEQ ID NO: 15285 - DNA, 20 bp, Artificial Sequence
  Description of Artificial Sequence: Synthetic oligonucleotide
  Target: PCSK9; (+) strand; PAM type: NRG; PAM sequence: CAG
ctggggccacaccccaggcc

SEQ ID NO: 15286 - DNA, 20 bp, Artificial Sequence
  Description of Artificial Sequence: Synthetic oligonucleotide
  Target: PCSK9; (+) strand; PAM type: NRG; PAM sequence: AGG
tggggccacaccccaggccc

SEQ ID NO: 15287 - DNA, 20 bp, Artificial Sequence
  Description of Artificial Sequence: Synthetic oligonucleotide
  Target: PCSK9; (+) strand; PAM type: NRG; PAM sequence: GGG
ggggccacaccccaggccca

SEQ ID NO: 15288 - DNA, 20 bp, Artificial Sequence
  Description of Artificial Sequence: Synthetic oligonucleotide
  Target: PCSK9; (+) strand; PAM type: NRG; PAM sequence: TGG
ccacaccccaggcccaggga

SEQ ID NO: 15289 - DNA, 20 bp, Artificial Sequence
  Description of Artificial Sequence: Synthetic oligonucleotide
  Target: PCSK9; (+) strand; PAM type: NRG; PAM sequence: GGG
cacaccccaggcccagggat

SEQ ID NO: 15290 - DNA, 20 bp, Artificial Sequence
  Description of Artificial Sequence: Synthetic oligonucleotide
  Target: PCSK9; (+) strand; PAM type: NRG; PAM sequence: CAG
ggcccagggatgggacccca

SEQ ID NO: 15291 - DNA, 20 bp, Artificial Sequence
  Description of Artificial Sequence: Synthetic oligonucleotide
  Target: PCSK9; (+) strand; PAM type: NRG; PAM sequence: TGG
ccagggatgggaccccacag

SEQ ID NO: 15292 - DNA, 20 bp, Artificial Sequence
  Description of Artificial Sequence: Synthetic oligonucleotide
  Target: PCSK9; (+) strand; PAM type: NRG; PAM sequence: CAG
acagtggtcacatcatcttg

SEQ ID NO: 15293 - DNA, 20 bp, Artificial Sequence
  Description of Artificial Sequence: Synthetic oligonucleotide
  Target: PCSK9; (+) strand; PAM type: NRG; PAM sequence: CAG
gtggtcacatcatcttgcag

SEQ ID NO: 15294 - DNA, 20 bp, Artificial Sequence
  Description of Artificial Sequence: Synthetic oligonucleotide
  Target: PCSK9; (+) strand; PAM type: NRG; PAM sequence: CAG
catcatcttgcagcagaacc

SEQ ID NO: 15295 - DNA, 20 bp, Artificial Sequence
  Description of Artificial Sequence: Synthetic oligonucleotide
  Target: PCSK9; (+) strand; PAM type: NRG; PAM sequence: AGG
atcatcttgcagcagaaccc

SEQ ID NO: 15296 - DNA, 20 bp, Artificial Sequence
  Description of Artificial Sequence: Synthetic oligonucleotide
  Target: PCSK9; (+) strand; PAM type: NRG; PAM sequence: CAG
cttgcagcagaacccaggta

SEQ ID NO: 15297 - DNA, 20 bp, Artificial Sequence
  Description of Artificial Sequence: Synthetic oligonucleotide
  Target: PCSK9; (+) strand; PAM type: NRG; PAM sequence: TGG
cagaacccaggtacagctcc

SEQ ID NO: 15298 - DNA, 20 bp, Artificial Sequence
  Description of Artificial Sequence: Synthetic oligonucleotide
  Target: PCSK9; (+) strand; PAM type: NRG; PAM sequence: GAG
gaacccaggtacagctcctg

SEQ ID NO: 15299 - DNA, 20 bp, Artificial Sequence
  Description of Artificial Sequence: Synthetic oligonucleotide
  Target: PCSK9; (+) strand; PAM type: NRG; PAM sequence: CAG
cccaggtacagctcctggag

SEQ ID NO: 15300 - DNA, 20 bp, Artificial Sequence
  Description of Artificial Sequence: Synthetic oligonucleotide
  Target: PCSK9; (+) strand; PAM type: NRG; PAM sequence: TGG
ggtacagctcctggagcaga

SEQ ID NO: 15301 - DNA, 20 bp, Artificial Sequence
  Description of Artificial Sequence: Synthetic oligonucleotide
  Target: PCSK9; (+) strand; PAM type: NRG; PAM sequence: TGG
acagctcctggagcagatgg

SEQ ID NO: 15302 - DNA, 20 bp, Artificial Sequence
  Description of Artificial Sequence: Synthetic oligonucleotide
  Target: PCSK9; (+) strand; PAM type: NRG; PAM sequence: AAG
ctggagcagatggtggtccc

SEQ ID NO: 15303 - DNA, 20 bp, Artificial Sequence
  Description of Artificial Sequence: Synthetic oligonucleotide
  Target: PCSK9; (+) strand; PAM type: NRG; PAM sequence: CGG
gcagatggtggtcccaagca

SEQ ID NO: 15304 - DNA, 20 bp, Artificial Sequence
  Description of Artificial Sequence: Synthetic oligonucleotide
  Target: PCSK9; (+) strand; PAM type: NRG; PAM sequence: GGG
cagatggtggtcccaagcac

SEQ ID NO: 15305 - DNA, 20 bp, Artificial Sequence
  Description of Artificial Sequence: Synthetic oligonucleotide
  Target: PCSK9; (+) strand; PAM type: NRG; PAM sequence: TGG
atggtggtcccaagcacggg

SEQ ID NO: 15306 - DNA, 20 bp, Artificial Sequence
  Description of Artificial Sequence: Synthetic oligonucleotide
  Target: PCSK9; (+) strand; PAM type: NRG; PAM sequence: GGG
tggtggtcccaagcacgggt

SEQ ID NO: 15307 - DNA, 20 bp, Artificial Sequence
  Description of Artificial Sequence: Synthetic oligonucleotide
  Target: PCSK9; (+) strand; PAM type: NRG; PAM sequence: CAG
gtcccaagcacgggtgggac

SEQ ID NO: 15308 - DNA, 20 bp, Artificial Sequence
  Description of Artificial Sequence: Synthetic oligonucleotide
  Target: PCSK9; (+) strand; PAM type: NRG; PAM sequence: AAG
caagcacgggtgggaccaga

SEQ ID NO: 15309 - DNA, 20 bp, Artificial Sequence
  Description of Artificial Sequence: Synthetic oligonucleotide
  Target: PCSK9; (+) strand; PAM type: NRG; PAM sequence: AGG
aagcacgggtgggaccagaa

SEQ ID NO: 15310 - DNA, 20 bp, Artificial Sequence
  Description of Artificial Sequence: Synthetic oligonucleotide
  Target: PCSK9; (+) strand; PAM type: NRG; PAM sequence: TGG
gaccagaaaggactctcacc

SEQ ID NO: 15311 - DNA, 20 bp, Artificial Sequence
  Description of Artificial Sequence: Synthetic oligonucleotide
  Target: PCSK9; (+) strand; PAM type: NRG; PAM sequence: GGG
accagaaaggactctcacct

SEQ ID NO: 15312 - DNA, 20 bp, Artificial Sequence
  Description of Artificial Sequence: Synthetic oligonucleotide
  Target: PCSK9; (+) strand; PAM type: NRG; PAM sequence: CAG
gactctcacctgggctaact

SEQ ID NO: 15313 - DNA, 20 bp, Artificial Sequence
  Description of Artificial Sequence: Synthetic oligonucleotide
  Target: PCSK9; (+) strand; PAM type: NRG; PAM sequence: CAG
cacctgggctaactcagctg

SEQ ID NO: 15314 - DNA, 20 bp, Artificial Sequence
  Description of Artificial Sequence: Synthetic oligonucleotide
  Target: PCSK9; (+) strand; PAM type: NRG; PAM sequence: CAG
ggctaactcagctgcagcct

SEQ ID NO: 15315 - DNA, 20 bp, Artificial Sequence
  Description of Artificial Sequence: Synthetic oligonucleotide
  Target: PCSK9; (+) strand; PAM type: NRG; PAM sequence: GAG
gttccctcctcacacacgac

SEQ ID NO: 15316 - DNA, 20 bp, Artificial Sequence
  Description of Artificial Sequence: Synthetic oligonucleotide
  Target: PCSK9; (+) strand; PAM type: NRG; PAM sequence: AGG
ttccctcctcacacacgacg

SEQ ID NO: 15317 - DNA, 20 bp, Artificial Sequence
  Description of Artificial Sequence: Synthetic oligonucleotide
  Target: PCSK9; (+) strand; PAM type: NRG; PAM sequence: TGG
ctcacacacgacgaggaaca

SEQ ID NO: 15318 - DNA, 20 bp, Artificial Sequence
  Description of Artificial Sequence: Synthetic oligonucleotide
  Target: PCSK9; (+) strand; PAM type: NRG; PAM sequence: TGG
acacgacgaggaacatggac

SEQ ID NO: 15319 - DNA, 20 bp, Artificial Sequence
  Description of Artificial Sequence: Synthetic oligonucleotide
  Target: PCSK9; (+) strand; PAM type: NRG; PAM sequence: AAG
cgacgaggaacatggactgg

SEQ ID NO: 15320 - DNA, 20 bp, Artificial Sequence
  Description of Artificial Sequence: Synthetic oligonucleotide
  Target: PCSK9; (+) strand; PAM type: NRG; PAM sequence: CAG
acatggactggaagcctgcc

SEQ ID NO: 15321 - DNA, 20 bp, Artificial Sequence
  Description of Artificial Sequence: Synthetic oligonucleotide
  Target: PCSK9; (+) strand; PAM type: NRG; PAM sequence: CAG
tggactggaagcctgcccag

SEQ ID NO: 15322 - DNA, 20 bp, Artificial Sequence
  Description of Artificial Sequence: Synthetic oligonucleotide
  Target: PCSK9; (+) strand; PAM type: NRG; PAM sequence: AGG
ggactggaagcctgcccagc

SEQ ID NO: 15323 - DNA, 20 bp, Artificial Sequence
  Description of Artificial Sequence: Synthetic oligonucleotide
  Target: PCSK9; (+) strand; PAM type: NRG; PAM sequence: TGG
tctgctcgatgtgcgttgtg

SEQ ID NO: 15324 - DNA, 20 bp, Artificial Sequence
  Description of Artificial Sequence: Synthetic oligonucleotide
  Target: PCSK9; (+) strand; PAM type: NRG; PAM sequence: CAG
tgcgttgtgtggcttacgtc

SEQ ID NO: 15325 - DNA, 20 bp, Artificial Sequence
  Description of Artificial Sequence: Synthetic oligonucleotide
  Target: PCSK9; (+) strand; PAM type: NRG; PAM sequence: AGG
gcgttgtgtggcttacgtcc

SEQ ID NO: 15326 - DNA, 20 bp, Artificial Sequence
  Description of Artificial Sequence: Synthetic oligonucleotide
  Target: PCSK9; (+) strand; PAM type: NRG; PAM sequence: GGG
cgttgtgtggcttacgtcca

SEQ ID NO: 15327 - DNA, 20 bp, Artificial Sequence
  Description of Artificial Sequence: Synthetic oligonucleotide
  Target: PCSK9; (+) strand; PAM type: NRG; PAM sequence: GAG
ttgtgtggcttacgtccagg

SEQ ID NO: 15328 - DNA, 20 bp, Artificial Sequence
  Description of Artificial Sequence: Synthetic oligonucleotide
  Target: PCSK9; (+) strand; PAM type: NRG; PAM sequence: AGG
tgtgtggcttacgtccaggg

SEQ ID NO: 15329 - DNA, 20 bp, Artificial Sequence
  Description of Artificial Sequence: Synthetic oligonucleotide
  Target: PCSK9; (+) strand; PAM type: NRG; PAM sequence: GGG
gtgtggcttacgtccaggga

SEQ ID NO: 15330 - DNA, 20 bp, Artificial Sequence
  Description of Artificial Sequence: Synthetic oligonucleotide
  Target: PCSK9; (+) strand; PAM type: NRG; PAM sequence: AAG
tggcttacgtccagggaggg

SEQ ID NO: 15331 - DNA, 20 bp, Artificial Sequence
  Description of Artificial Sequence: Synthetic oligonucleotide
  Target: PCSK9; (+) strand; PAM type: NRG; PAM sequence: CAG
cttacgtccagggagggaag

SEQ ID NO: 15332 - DNA, 20 bp, Artificial Sequence
  Description of Artificial Sequence: Synthetic oligonucleotide
  Target: PCSK9; (+) strand; PAM type: NRG; PAM sequence: TAG
gcagcctctgtgctgtcttc

SEQ ID NO: 15333 - DNA, 20 bp, Artificial Sequence
  Description of Artificial Sequence: Synthetic oligonucleotide
  Target: PCSK9; (+) strand; PAM type: NRG; PAM sequence: AAG
ctctgtgctgtcttctagat

SEQ ID NO: 15334 - DNA, 20 bp, Artificial Sequence
  Description of Artificial Sequence: Synthetic oligonucleotide
  Target: PCSK9; (+) strand; PAM type: NRG; PAM sequence: CGG
ctagataagcctgtattccc

SEQ ID NO: 15335 - DNA, 20 bp, Artificial Sequence
  Description of Artificial Sequence: Synthetic oligonucleotide
  Target: PCSK9; (+) strand; PAM type: NRG; PAM sequence: GGG
tagataagcctgtattcccc

SEQ ID NO: 15336 - DNA, 20 bp, Artificial Sequence
  Description of Artificial Sequence: Synthetic oligonucleotide
  Target: PCSK9; (+) strand; PAM type: NRG; PAM sequence: CAG
gggctgtctgccaatgtatc

SEQ ID NO: 15337 - DNA, 20 bp, Artificial Sequence
  Description of Artificial Sequence: Synthetic oligonucleotide
  Target: PCSK9; (+) strand; PAM type: NRG; PAM sequence: CAG
aatgtatccagttgtcccgt

SEQ ID NO: 15338 - DNA, 20 bp, Artificial Sequence
  Description of Artificial Sequence: Synthetic oligonucleotide
  Target: PCSK9; (+) strand; PAM type: NRG; PAM sequence: TGG
atccagttgtcccgtcagcc

SEQ ID NO: 15339 - DNA, 20 bp, Artificial Sequence
  Description of Artificial Sequence: Synthetic oligonucleotide
  Target: PCSK9; (+) strand; PAM type: NRG; PAM sequence: AAG
cagttgtcccgtcagcctgg

SEQ ID NO: 15340 - DNA, 20 bp, Artificial Sequence
  Description of Artificial Sequence: Synthetic oligonucleotide
  Target: PCSK9; (+) strand; PAM type: NRG; PAM sequence: GAG
cccgtcagcctggaagctct

SEQ ID NO: 15341 - DNA, 20 bp, Artificial Sequence
  Description of Artificial Sequence: Synthetic oligonucleotide
  Target: PCSK9; (+) strand; PAM type: NRG; PAM sequence: AGG
ccgtcagcctggaagctctg

SEQ ID NO: 15342 - DNA, 20 bp, Artificial Sequence
  Description of Artificial Sequence: Synthetic oligonucleotide
  Target: PCSK9; (+) strand; PAM type: NRG; PAM sequence: GGG
cgtcagcctggaagctctga

SEQ ID NO: 15343 - DNA, 20 bp, Artificial Sequence
  Description of Artificial Sequence: Synthetic oligonucleotide
  Target: PCSK9; (+) strand; PAM type: NRG; PAM sequence: TGG
gaagctctgagggaaaacct

SEQ ID NO: 15344 - DNA, 20 bp, Artificial Sequence
  Description of Artificial Sequence: Synthetic oligonucleotide
  Target: PCSK9; (+) strand; PAM type: NRG; PAM sequence: GGG
aagctctgagggaaaacctt

SEQ ID NO: 15345 - DNA, 20 bp, Artificial Sequence
  Description of Artificial Sequence: Synthetic oligonucleotide
  Target: PCSK9; (+) strand; PAM type: NRG; PAM sequence: GAG
aaaaccttgggctgcttcct

SEQ ID NO: 15346 - DNA, 20 bp, Artificial Sequence
  Description of Artificial Sequence: Synthetic oligonucleotide
  Target: PCSK9; (+) strand; PAM type: NRG; PAM sequence: CAG
ctgagcacctgtatcccctg

SEQ ID NO: 15347 - DNA, 20 bp, Artificial Sequence
  Description of Artificial Sequence: Synthetic oligonucleotide
  Target: PCSK9; (+) strand; PAM type: NRG; PAM sequence: CAG
gcacctgtatcccctgcagc

SEQ ID NO: 15348 - DNA, 20 bp, Artificial Sequence
  Description of Artificial Sequence: Synthetic oligonucleotide
  Target: PCSK9; (+) strand; PAM type: NRG; PAM sequence: CGG
tgtatcccctgcagccagcc

SEQ ID NO: 15349 - DNA, 20 bp, Artificial Sequence
  Description of Artificial Sequence: Synthetic oligonucleotide
  Target: PCSK9; (+) strand; PAM type: NRG; PAM sequence: GGG
gtatcccctgcagccagccc

SEQ ID NO: 15350 - DNA, 20 bp, Artificial Sequence
  Description of Artificial Sequence: Synthetic oligonucleotide
  Target: PCSK9; (+) strand; PAM type: NRG; PAM sequence: GGG
tatcccctgcagccagcccg

SEQ ID NO: 15351 - DNA, 20 bp, Artificial Sequence
  Description of Artificial Sequence: Synthetic oligonucleotide
  Target: PCSK9; (+) strand; PAM type: NRG; PAM sequence: TAG
agccagcccggggcctctgc

SEQ ID NO: 15352 - DNA, 20 bp, Artificial Sequence
  Description of Artificial Sequence: Synthetic oligonucleotide
  Target: PCSK9; (+) strand; PAM type: NRG; PAM sequence: AGG
gccagcccggggcctctgct

SEQ ID NO: 15353 - DNA, 20 bp, Artificial Sequence
  Description of Artificial Sequence: Synthetic oligonucleotide
  Target: PCSK9; (+) strand; PAM type: NRG; PAM sequence: GAG
cagcccggggcctctgctag

SEQ ID NO: 15354 - DNA, 20 bp, Artificial Sequence
  Description of Artificial Sequence: Synthetic oligonucleotide
  Target: PCSK9; (+) strand; PAM type: NRG; PAM sequence: CAG
cccggggcctctgctaggag

SEQ ID NO: 15355 - DNA, 20 bp, Artificial Sequence
  Description of Artificial Sequence: Synthetic oligonucleotide
  Target: PCSK9; (+) strand; PAM type: NRG; PAM sequence: GAG
gcctctgctaggagcagact

SEQ ID NO: 15356 - DNA, 20 bp, Artificial Sequence
  Description of Artificial Sequence: Synthetic oligonucleotide
  Target: PCSK9; (+) strand; PAM type: NRG; PAM sequence: TGG
tgctaggagcagactgagca

SEQ ID NO: 15357 - DNA, 20 bp, Artificial Sequence
  Description of Artificial Sequence: Synthetic oligonucleotide
  Target: PCSK9; (+) strand; PAM type: NRG; PAM sequence: TGG
agcagactgagcatggctta

SEQ ID NO: 15358 - DNA, 20 bp, Artificial Sequence
  Description of Artificial Sequence: Synthetic oligonucleotide
  Target: PCSK9; (+) strand; PAM type: NRG; PAM sequence: GGG
gcagactgagcatggcttat

SEQ ID NO: 15359 - DNA, 20 bp, Artificial Sequence
  Description of Artificial Sequence: Synthetic oligonucleotide
  Target: PCSK9; (+) strand; PAM type: NRG; PAM sequence: TGG
ctgagcatggcttatgggcc

SEQ ID NO: 15360 - DNA, 20 bp, Artificial Sequence
  Description of Artificial Sequence: Synthetic oligonucleotide
  Target: PCSK9; (+) strand; PAM type: NRG; PAM sequence: TGG
cttatgggcctggcaccatc

SEQ ID NO: 15361 - DNA, 20 bp, Artificial Sequence
  Description of Artificial Sequence: Synthetic oligonucleotide
  Target: PCSK9; (+) strand; PAM type: NRG; PAM sequence: TGG
ctggcctctgcccaccttgc

SEQ ID NO: 15362 - DNA, 20 bp, Artificial Sequence
  Description of Artificial Sequence: Synthetic oligonucleotide
  Target: PCSK9; (+) strand; PAM type: NRG; PAM sequence: TAG
tctgccccttcgacattcca

SEQ ID NO: 15363 - DNA, 20 bp, Artificial Sequence
  Description of Artificial Sequence: Synthetic oligonucleotide
  Target: PCSK9; (+) strand; PAM type: NRG; PAM sequence: CAG
cccttcgacattccatagcc

SEQ ID NO: 15364 - DNA, 20 bp, Artificial Sequence
  Description of Artificial Sequence: Synthetic oligonucleotide
  Target: PCSK9; (+) strand; PAM type: NRG; PAM sequence: TAG
ccatagcccagctcaatatc

SEQ ID NO: 15365 - DNA, 20 bp, Artificial Sequence
  Description of Artificial Sequence: Synthetic oligonucleotide
  Target: PCSK9; (+) strand; PAM type: NRG; PAM sequence: TGG
tagcccagctcaatatctag

SEQ ID NO: 15366 - DNA, 20 bp, Artificial Sequence
  Description of Artificial Sequence: Synthetic oligonucleotide
  Target: PCSK9; (+) strand; PAM type: NRG; PAM sequence: TAG
tcaatatctagtggttcctc

SEQ ID NO: 15367 - DNA, 20 bp, Artificial Sequence
  Description of Artificial Sequence: Synthetic oligonucleotide
  Target: PCSK9; (+) strand; PAM type: NRG; PAM sequence: AGG
caatatctagtggttcctct

SEQ ID NO: 15368 - DNA, 20 bp, Artificial Sequence
  Description of Artificial Sequence: Synthetic oligonucleotide
  Target: PCSK9; (+) strand; PAM type: NRG; PAM sequence: GGG
aatatctagtggttcctcta

SEQ ID NO: 15369 - DNA, 20 bp, Artificial Sequence
  Description of Artificial Sequence: Synthetic oligonucleotide
  Target: PCSK9; (+) strand; PAM type: NRG; PAM sequence: TGG
atctagtggttcctctaggg

SEQ ID NO: 15370 - DNA, 20 bp, Artificial Sequence
  Description of Artificial Sequence: Synthetic oligonucleotide
  Target: PCSK9; (+) strand; PAM type: NRG; PAM sequence: GAG
agtggttcctctagggtggc

SEQ ID NO: 15371 - DNA, 20 bp, Artificial Sequence
  Description of Artificial Sequence: Synthetic oligonucleotide
  Target: PCSK9; (+) strand; PAM type: NRG; PAM sequence: TGG
ctagggtggcgagcactgtt

SEQ ID NO: 15372 - DNA, 20 bp, Artificial Sequence
  Description of Artificial Sequence: Synthetic oligonucleotide
  Target: PCSK9; (+) strand; PAM type: NRG; PAM sequence: CAG
ggcgagcactgtttggtctc

SEQ ID NO: 15373 - DNA, 20 bp, Artificial Sequence
  Description of Artificial Sequence: Synthetic oligonucleotide
  Target: PCSK9; (+) strand; PAM type: NRG; PAM sequence: CAG
gtttggtctccagatgtctt

SEQ ID NO: 15374 - DNA, 20 bp, Artificial Sequence
  Description of Artificial Sequence: Synthetic oligonucleotide
  Target: PCSK9; (+) strand; PAM type: NRG; PAM sequence: AGG
tttggtctccagatgtcttc

SEQ ID NO: 15375 - DNA, 20 bp, Artificial Sequence
  Description of Artificial Sequence: Synthetic oligonucleotide
  Target: PCSK9; (+) strand; PAM type: NRG; PAM sequence: CGG
gtctccagatgtcttcaggt

SEQ ID NO: 15376 - DNA, 20 bp, Artificial Sequence
  Description of Artificial Sequence: Synthetic oligonucleotide
  Target: PCSK9; (+) strand; PAM type: NRG; PAM sequence: GAG
ctccagatgtcttcaggtcg

SEQ ID NO: 15377 - DNA, 20 bp, Artificial Sequence
  Description of Artificial Sequence: Synthetic oligonucleotide
  Target: PCSK9; (+) strand; PAM type: NRG; PAM sequence: CAG
tgtcttcaggtcggagctca

SEQ ID NO: 15378 - DNA, 20 bp, Artificial Sequence
  Description of Artificial Sequence: Synthetic oligonucleotide
  Target: PCSK9; (+) strand; PAM type: NRG; PAM sequence: CAG
gtcggagctcacagcgctct

SEQ ID NO: 15379 - DNA, 20 bp, Artificial Sequence
  Description of Artificial Sequence: Synthetic oligonucleotide
  Target: PCSK9; (+) strand; PAM type: NRG; PAM sequence: CAG
cgctctcagccaccccttcc

SEQ ID NO: 15380 - DNA, 20 bp, Artificial Sequence
  Description of Artificial Sequence: Synthetic oligonucleotide
  Target: PCSK9; (+) strand; PAM type: NRG; PAM sequence: TAG
tcagccaccccttcccagtg

SEQ ID NO: 15381 - DNA, 20 bp, Artificial Sequence
  Description of Artificial Sequence: Synthetic oligonucleotide
  Target: PCSK9; (+) strand; PAM type: NRG; PAM sequence: CGG
accccttcccagtgtagcac

SEQ ID NO: 15382 - DNA, 20 bp, Artificial Sequence
  Description of Artificial Sequence: Synthetic oligonucleotide
  Target: PCSK9; (+) strand; PAM type: NRG; PAM sequence: GGG
ccccttcccagtgtagcacc

SEQ ID NO: 15383 - DNA, 20 bp, Artificial Sequence
  Description of Artificial Sequence: Synthetic oligonucleotide
  Target: PCSK9; (+) strand; PAM type: NRG; PAM sequence: TGG
ccagtgtagcaccgggcaca

SEQ ID NO: 15384 - DNA, 20 bp, Artificial Sequence
  Description of Artificial Sequence: Synthetic oligonucleotide
  Target: PCSK9; (+) strand; PAM type: NRG; PAM sequence: TAG
gtgtagcaccgggcacatgg

SEQ ID NO: 15385 - DNA, 20 bp, Artificial Sequence
  Description of Artificial Sequence: Synthetic oligonucleotide
  Target: PCSK9; (+) strand; PAM type: NRG; PAM sequence: GAG
catggtagatgcctattgat

SEQ ID NO: 15386 - DNA, 20 bp, Artificial Sequence
  Description of Artificial Sequence: Synthetic oligonucleotide
  Target: PCSK9; (+) strand; PAM type: NRG; PAM sequence: AAG
agatgcctattgatgagtga

SEQ ID NO: 15387 - DNA, 20 bp, Artificial Sequence
  Description of Artificial Sequence: Synthetic oligonucleotide
  Target: PCSK9; (+) strand; PAM type: NRG; PAM sequence: CAG
gtgaaagctcctaacacact

SEQ ID NO: 15388 - DNA, 20 bp, Artificial Sequence
  Description of Artificial Sequence: Synthetic oligonucleotide
  Target: PCSK9; (+) strand; PAM type: NRG; PAM sequence: GAG
gaaagctcctaacacactca

SEQ ID NO: 15389 - DNA, 20 bp, Artificial Sequence
  Description of Artificial Sequence: Synthetic oligonucleotide
  Target: PCSK9; (+) strand; PAM type: NRG; PAM sequence: GAG
aagctcctaacacactcaga

SEQ ID NO: 15390 - DNA, 20 bp, Artificial Sequence
  Description of Artificial Sequence: Synthetic oligonucleotide
  Target: PCSK9; (+) strand; PAM type: NRG; PAM sequence: AAG
tcctaacacactcagagagc

SEQ ID NO: 15391 - DNA, 20 bp, Artificial Sequence
  Description of Artificial Sequence: Synthetic oligonucleotide
  Target: PCSK9; (+) strand; PAM type: NRG; PAM sequence: AGG
cctaacacactcagagagca

SEQ ID NO: 15392 - DNA, 20 bp, Artificial Sequence
  Description of Artificial Sequence: Synthetic oligonucleotide
  Target: PCSK9; (+) strand; PAM type: NRG; PAM sequence: CAG
aaggactccgcctcatccca

SEQ ID NO: 15393 - DNA, 20 bp, Artificial Sequence
  Description of Artificial Sequence: Synthetic oligonucleotide
  Target: PCSK9; (+) strand; PAM type: NRG; PAM sequence: TGG
ctccgcctcatcccacagcc

SEQ ID NO: 15394 - DNA, 20 bp, Artificial Sequence
  Description of Artificial Sequence: Synthetic oligonucleotide
  Target: PCSK9; (+) strand; PAM type: NRG; PAM sequence: GGG
tccgcctcatcccacagcct

SEQ ID NO: 15395 - DNA, 20 bp, Artificial Sequence
  Description of Artificial Sequence: Synthetic oligonucleotide
  Target: PCSK9; (+) strand; PAM type: NRG; PAM sequence: GAG
cgcctcatcccacagcctgg

SEQ ID NO: 15396 - DNA, 20 bp, Artificial Sequence
  Description of Artificial Sequence: Synthetic oligonucleotide
  Target: PCSK9; (+) strand; PAM type: NRG; PAM sequence: AGG
gcctcatcccacagcctggg

SEQ ID NO: 15397 - DNA, 20 bp, Artificial Sequence
  Description of Artificial Sequence: Synthetic oligonucleotide
  Target: PCSK9; (+) strand; PAM type: NRG; PAM sequence: GAG
ctcatcccacagcctgggag

SEQ ID NO: 15398 - DNA, 20 bp, Artificial Sequence
  Description of Artificial Sequence: Synthetic oligonucleotide
  Target: PCSK9; (+) strand; PAM type: NRG; PAM sequence: GAG
catcccacagcctgggagga

SEQ ID NO: 15399 - DNA, 20 bp, Artificial Sequence
  Description of Artificial Sequence: Synthetic oligonucleotide
  Target: PCSK9; (+) strand; PAM type: NRG; PAM sequence: AGG
atcccacagcctgggaggag

SEQ ID NO: 15400 - DNA, 20 bp, Artificial Sequence
  Description of Artificial Sequence: Synthetic oligonucleotide
  Target: PCSK9; (+) strand; PAM type: NRG; PAM sequence: CAG
ccacagcctgggaggagagg

SEQ ID NO: 15401 - DNA, 20 bp, Artificial Sequence
  Description of Artificial Sequence: Synthetic oligonucleotide
  Target: PCSK9; (+) strand; PAM type: NRG; PAM sequence: AAG
gggaggagaggcagactgcc

SEQ ID NO: 15402 - DNA, 20 bp, Artificial Sequence
  Description of Artificial Sequence: Synthetic oligonucleotide
  Target: PCSK9; (+) strand; PAM type: NRG; PAM sequence: AGG
ggaggagaggcagactgcca

SEQ ID NO: 15403 - DNA, 20 bp, Artificial Sequence
  Description of Artificial Sequence: Synthetic oligonucleotide
  Target: PCSK9; (+) strand; PAM type: NRG; PAM sequence: CAG
cagactgccaaggacctgct

SEQ ID NO: 15404 - DNA, 20 bp, Artificial Sequence
  Description of Artificial Sequence: Synthetic oligonucleotide
  Target: PCSK9; (+) strand; PAM type: NRG; PAM sequence: CAG
aggacctgctcagcatgcta

SEQ ID NO: 15405 - DNA, 20 bp, Artificial Sequence
  Description of Artificial Sequence: Synthetic oligonucleotide
  Target: PCSK9; (+) strand; PAM type: NRG; PAM sequence: AAG
acctgctcagcatgctacag

SEQ ID NO: 15406 - DNA, 20 bp, Artificial Sequence
  Description of Artificial Sequence: Synthetic oligonucleotide
  Target: PCSK9; (+) strand; PAM type: NRG; PAM sequence: AAG
gcatgctacagaagaaacca

SEQ ID NO: 15407 - DNA, 20 bp, Artificial Sequence
  Description of Artificial Sequence: Synthetic oligonucleotide
  Target: PCSK9; (+) strand; PAM type: NRG; PAM sequence: CGG
agaagaaaccaaagtgccca

SEQ ID NO: 15408 - DNA, 20 bp, Artificial Sequence
  Description of Artificial Sequence: Synthetic oligonucleotide
  Target: PCSK9; (+) strand; PAM type: NRG; PAM sequence: GGG
gaagaaaccaaagtgcccac

SEQ ID NO: 15409 - DNA, 20 bp, Artificial Sequence
  Description of Artificial Sequence: Synthetic oligonucleotide
  Target: PCSK9; (+) strand; PAM type: NRG; PAM sequence: CAG
aaagtgcccacgggactgat

SEQ ID NO: 15410 - DNA, 20 bp, Artificial Sequence
  Description of Artificial Sequence: Synthetic oligonucleotide
  Target: PCSK9; (+) strand; PAM type: NRG; PAM sequence: TGG
gtgcccacgggactgatcag

SEQ ID NO: 15411 - DNA, 20 bp, Artificial Sequence
  Description of Artificial Sequence: Synthetic oligonucleotide
  Target: PCSK9; (+) strand; PAM type: NRG; PAM sequence: GAG
gcccacgggactgatcagtg

SEQ ID NO: 15412 - DNA, 20 bp, Artificial Sequence
  Description of Artificial Sequence: Synthetic oligonucleotide
  Target: PCSK9; (+) strand; PAM type: NRG; PAM sequence: GAG
gatcagtggagcttcctgcc

SEQ ID NO: 15413 - DNA, 20 bp, Artificial Sequence
  Description of Artificial Sequence: Synthetic oligonucleotide
  Target: PCSK9; (+) strand; PAM type: NRG; PAM sequence: TGG
gtggagcttcctgccgagac

SEQ ID NO: 15414 - DNA, 20 bp, Artificial Sequence
  Description of Artificial Sequence: Synthetic oligonucleotide
  Target: PCSK9; (+) strand; PAM type: NRG; PAM sequence: GAG
ggagcttcctgccgagactg

SEQ ID NO: 15415 - DNA, 20 bp, Artificial Sequence
  Description of Artificial Sequence: Synthetic oligonucleotide
  Target: PCSK9; (+) strand; PAM type: NRG; PAM sequence: AGG
gagcttcctgccgagactgg

SEQ ID NO: 15416 - DNA, 20 bp, Artificial Sequence
  Description of Artificial Sequence: Synthetic oligonucleotide
  Target: PCSK9; (+) strand; PAM type: NRG; PAM sequence: TAG
cctgccgagactggaggcct

SEQ ID NO: 15417 - DNA, 20 bp, Artificial Sequence
  Description of Artificial Sequence: Synthetic oligonucleotide
  Target: PCSK9; (+) strand; PAM type: NRG; PAM sequence: AGG
ctgccgagactggaggcctt

SEQ ID NO: 15418 - DNA, 20 bp, Artificial Sequence
  Description of Artificial Sequence: Synthetic oligonucleotide
  Target: PCSK9; (+) strand; PAM type: NRG; PAM sequence: GGG
tgccgagactggaggcctta

SEQ ID NO: 15419 - DNA, 20 bp, Artificial Sequence
  Description of Artificial Sequence: Synthetic oligonucleotide
  Target: PCSK9; (+) strand; PAM type: NRG; PAM sequence: CAG
cgagactggaggccttaggg

SEQ ID NO: 15420 - DNA, 20 bp, Artificial Sequence
  Description of Artificial Sequence: Synthetic oligonucleotide
  Target: PCSK9; (+) strand; PAM type: NRG; PAM sequence: AGG
gagactggaggccttagggc

SEQ ID NO: 15421 - DNA, 20 bp, Artificial Sequence
  Description of Artificial Sequence: Synthetic oligonucleotide
  Target: PCSK9; (+) strand; PAM type: NRG; PAM sequence: GGG
agactggaggccttagggca

SEQ ID NO: 15422 - DNA, 20 bp, Artificial Sequence
  Description of Artificial Sequence: Synthetic oligonucleotide
  Target: PCSK9; (+) strand; PAM type: NRG; PAM sequence: TAG
ctggaggccttagggcaggg

SEQ ID NO: 15423 - DNA, 20 bp, Artificial Sequence
  Description of Artificial Sequence: Synthetic oligonucleotide
  Target: PCSK9; (+) strand; PAM type: NRG; PAM sequence: CAG
aggccttagggcagggtaga

SEQ ID NO: 15424 - DNA, 20 bp, Artificial Sequence
  Description of Artificial Sequence: Synthetic oligonucleotide
  Target: PCSK9; (+) strand; PAM type: NRG; PAM sequence: CAG
cagggtagacagtgtgtgtg

SEQ ID NO: 15425 - DNA, 20 bp, Artificial Sequence
  Description of Artificial Sequence: Synthetic oligonucleotide
  Target: PCSK9; (+) strand; PAM type: NRG; PAM sequence: AGG
agggtagacagtgtgtgtgc

SEQ ID NO: 15426 - DNA, 20 bp, Artificial Sequence
  Description of Artificial Sequence: Synthetic oligonucleotide
  Target: PCSK9; (+) strand; PAM type: NRG; PAM sequence: TGG
tagacagtgtgtgtgcaggc

SEQ ID NO: 15427 - DNA, 20 bp, Artificial Sequence
  Description of Artificial Sequence: Synthetic oligonucleotide
  Target: PCSK9; (+) strand; PAM type: NRG; PAM sequence: GGG
agacagtgtgtgtgcaggct

SEQ ID NO: 15428 - DNA, 20 bp, Artificial Sequence
  Description of Artificial Sequence: Synthetic oligonucleotide
  Target: PCSK9; (+) strand; PAM type: NRG; PAM sequence: GGG
gacagtgtgtgtgcaggctg

SEQ ID NO: 15429 - DNA, 20 bp, Artificial Sequence
  Description of Artificial Sequence: Synthetic oligonucleotide
  Target: PCSK9; (+) strand; PAM type: NRG; PAM sequence: CAG
gtgtgcaggctggggactca

SEQ ID NO: 15430 - DNA, 20 bp, Artificial Sequence
  Description of Artificial Sequence: Synthetic oligonucleotide
  Target: PCSK9; (+) strand; PAM type: NRG; PAM sequence: CGG
caggctggggactcacagtt

SEQ ID NO: 15431 - DNA, 20 bp, Artificial Sequence
  Description of Artificial Sequence: Synthetic oligonucleotide
  Target: PCSK9; (+) strand; PAM type: NRG; PAM sequence: CAG
ctcacagttcggactgtgcc

SEQ ID NO: 15432 - DNA, 20 bp, Artificial Sequence
  Description of Artificial Sequence: Synthetic oligonucleotide
  Target: PCSK9; (+) strand; PAM type: NRG; PAM sequence: TAG
cggactgtgcccagacctac

SEQ ID NO: 15433 - DNA, 20 bp, Artificial Sequence
  Description of Artificial Sequence: Synthetic oligonucleotide
  Target: PCSK9; (+) strand; PAM type: NRG; PAM sequence: TAG
tgtgcccagacctactagca

SEQ ID NO: 15434 - DNA, 20 bp, Artificial Sequence
  Description of Artificial Sequence: Synthetic oligonucleotide
  Target: PCSK9; (+) strand; PAM type: NRG; PAM sequence: TGG
gcccagacctactagcatag

SEQ ID NO: 15435 - DNA, 20 bp, Artificial Sequence
  Description of Artificial Sequence: Synthetic oligonucleotide
  Target: PCSK9; (+) strand; PAM type: NRG; PAM sequence: GGG
cccagacctactagcatagt

SEQ ID NO: 15436 - DNA, 20 bp, Artificial Sequence
  Description of Artificial Sequence: Synthetic oligonucleotide
  Target: PCSK9; (+) strand; PAM type: NRG; PAM sequence: TGG
agacctactagcatagtggg

SEQ ID NO: 15437 - DNA, 20 bp, Artificial Sequence
  Description of Artificial Sequence: Synthetic oligonucleotide
  Target: PCSK9; (+) strand; PAM type: NRG; PAM sequence: GGG
gacctactagcatagtgggt

SEQ ID NO: 15438 - DNA, 20 bp, Artificial Sequence
  Description of Artificial Sequence: Synthetic oligonucleotide
  Target: PCSK9; (+) strand; PAM type: NRG; PAM sequence: TGG
ctactagcatagtgggtggg

SEQ ID NO: 15439 - DNA, 20 bp, Artificial Sequence
  Description of Artificial Sequence: Synthetic oligonucleotide
  Target: PCSK9; (+) strand; PAM type: NRG; PAM sequence: GGG
tactagcatagtgggtgggt

SEQ ID NO: 15440 - DNA, 20 bp, Artificial Sequence
  Description of Artificial Sequence: Synthetic oligonucleotide
  Target: PCSK9; (+) strand; PAM type: NRG; PAM sequence: GAG
ctagcatagtgggtgggtgg

SEQ ID NO: 15441 - DNA, 20 bp, Artificial Sequence
  Description of Artificial Sequence: Synthetic oligonucleotide
  Target: PCSK9; (+) strand; PAM type: NRG; PAM sequence: AGG
tagcatagtgggtgggtggg

SEQ ID NO: 15442 - DNA, 20 bp, Artificial Sequence
  Description of Artificial Sequence: Synthetic oligonucleotide
  Target: PCSK9; (+) strand; PAM type: NRG; PAM sequence: CGG
agtgggtgggtgggaggatg

SEQ ID NO: 15443 - DNA, 20 bp, Artificial Sequence
  Description of Artificial Sequence: Synthetic oligonucleotide
  Target: PCSK9; (+) strand; PAM type: NRG; PAM sequence: GGG
gtgggtgggtgggaggatgc

SEQ ID NO: 15444 - DNA, 20 bp, Artificial Sequence
  Description of Artificial Sequence: Synthetic oligonucleotide
  Target: PCSK9; (+) strand; PAM type: NRG; PAM sequence: TGG
tgggtgggaggatgcgggac

SEQ ID NO: 15445 - DNA, 20 bp, Artificial Sequence
  Description of Artificial Sequence: Synthetic oligonucleotide
  Target: PCSK9; (+) strand; PAM type: NRG; PAM sequence: GGG
gggtgggaggatgcgggact

SEQ ID NO: 15446 - DNA, 20 bp, Artificial Sequence
  Description of Artificial Sequence: Synthetic oligonucleotide
  Target: PCSK9; (+) strand; PAM type: NRG; PAM sequence: GGG
ggtgggaggatgcgggactg

SEQ ID NO: 15447 - DNA, 20 bp, Artificial Sequence
  Description of Artificial Sequence: Synthetic oligonucleotide
  Target: PCSK9; (+) strand; PAM type: NRG; PAM sequence: GGG
gtgggaggatgcgggactgg

SEQ ID NO: 15448 - DNA, 20 bp, Artificial Sequence
  Description of Artificial Sequence: Synthetic oligonucleotide
  Target: PCSK9; (+) strand; PAM type: NRG; PAM sequence: TGG
gaccttgcctgaaattcatg

SEQ ID NO: 15449 - DNA, 20 bp, Artificial Sequence
  Description of Artificial Sequence: Synthetic oligonucleotide
  Target: PCSK9; (+) strand; PAM type: NRG; PAM sequence: GGG
accttgcctgaaattcatgt

SEQ ID NO: 15450 - DNA, 20 bp, Artificial Sequence
  Description of Artificial Sequence: Synthetic oligonucleotide
  Target: PCSK9; (+) strand; PAM type: NRG; PAM sequence: CAG
ctgaaattcatgtgggatct

SEQ ID NO: 15451 - DNA, 20 bp, Artificial Sequence
  Description of Artificial Sequence: Synthetic oligonucleotide
  Target: PCSK9; (+) strand; PAM type: NRG; PAM sequence: GAG
gaaattcatgtgggatctca

SEQ ID NO: 15452 - DNA, 20 bp, Artificial Sequence
  Description of Artificial Sequence: Synthetic oligonucleotide
  Target: PCSK9; (+) strand; PAM type: NRG; PAM sequence: CAG
attcatgtgggatctcagag

SEQ ID NO: 15453 - DNA, 20 bp, Artificial Sequence
  Description of Artificial Sequence: Synthetic oligonucleotide
  Target: PCSK9; (+) strand; PAM type: NRG; PAM sequence: TAG
gcagccactgaattgctctg

SEQ ID NO: 15454 - DNA, 20 bp, Artificial Sequence
  Description of Artificial Sequence: Synthetic oligonucleotide
  Target: PCSK9; (+) strand; PAM type: NRG; PAM sequence: AGG
cagccactgaattgctctgt

SEQ ID NO: 15455 - DNA, 20 bp, Artificial Sequence
  Description of Artificial Sequence: Synthetic oligonucleotide
  Target: PCSK9; (+) strand; PAM type: NRG; PAM sequence: GGG
agccactgaattgctctgta

SEQ ID NO: 15456 - DNA, 20 bp, Artificial Sequence
  Description of Artificial Sequence: Synthetic oligonucleotide
  Target: PCSK9; (+) strand; PAM type: NRG; PAM sequence: GGG
gccactgaattgctctgtag

SEQ ID NO: 15457 - DNA, 20 bp, Artificial Sequence
  Description of Artificial Sequence: Synthetic oligonucleotide
  Target: PCSK9; (+) strand; PAM type: NRG; PAM sequence: GGG
ccactgaattgctctgtagg

SEQ ID NO: 15458 - DNA, 20 bp, Artificial Sequence
  Description of Artificial Sequence: Synthetic oligonucleotide
  Target: PCSK9; (+) strand; PAM type: NRG; PAM sequence: TAG
ttgctctgtagggggctaaa

SEQ ID NO: 15459 - DNA, 20 bp, Artificial Sequence
  Description of Artificial Sequence: Synthetic oligonucleotide
  Target: PCSK9; (+) strand; PAM type: NRG; PAM sequence: TGG
ctctgtagggggctaaatag

SEQ ID NO: 15460 - DNA, 20 bp, Artificial Sequence
  Description of Artificial Sequence: Synthetic oligonucleotide
  Target: PCSK9; (+) strand; PAM type: NRG; PAM sequence: CAG
gggctaaatagtggccccca

SEQ ID NO: 15461 - DNA, 20 bp, Artificial Sequence
  Description of Artificial Sequence: Synthetic oligonucleotide
  Target: PCSK9; (+) strand; PAM type: NRG; PAM sequence: CAG
cccccacagatacacacacc

SEQ ID NO: 15462 - DNA, 20 bp, Artificial Sequence
  Description of Artificial Sequence: Synthetic oligonucleotide
  Target: PCSK9; (+) strand; PAM type: NRG; PAM sequence: CAG
cacagatacacacacccaga

SEQ ID NO: 15463 - DNA, 20 bp, Artificial Sequence
  Description of Artificial Sequence: Synthetic oligonucleotide
  Target: PCSK9; (+) strand; PAM type: NRG; PAM sequence: GAG
cagatacacacacccagaca

SEQ ID NO: 15464 - DNA, 20 bp, Artificial Sequence
  Description of Artificial Sequence: Synthetic oligonucleotide
  Target: PCSK9; (+) strand; PAM type: NRG; PAM sequence: GAG
cacacccagacagagcctgt

SEQ ID NO: 15465 - DNA, 20 bp, Artificial Sequence
  Description of Artificial Sequence: Synthetic oligonucleotide
  Target: PCSK9; (+) strand; PAM type: NRG; PAM sequence: CAG
cccagacagagcctgtgagc

SEQ ID NO: 15466 - DNA, 20 bp, Artificial Sequence
  Description of Artificial Sequence: Synthetic oligonucleotide
  Target: PCSK9; (+) strand; PAM type: NRG; PAM sequence: TGG
cctgtgagccagaccttatt

SEQ ID NO: 15467 - DNA, 20 bp, Artificial Sequence
  Description of Artificial Sequence: Synthetic oligonucleotide
  Target: PCSK9; (+) strand; PAM type: NRG; PAM sequence: GAG
tgtgagccagaccttatttg

SEQ ID NO: 15468 - DNA, 20 bp, Artificial Sequence
  Description of Artificial Sequence: Synthetic oligonucleotide
  Target: PCSK9; (+) strand; PAM type: NRG; PAM sequence: AAG
gccagaccttatttggagaa

SEQ ID NO: 15469 - DNA, 20 bp, Artificial Sequence
  Description of Artificial Sequence: Synthetic oligonucleotide
  Target: PCSK9; (+) strand; PAM type: NRG; PAM sequence: AGG
ccagaccttatttggagaaa

SEQ ID NO: 15470 - DNA, 20 bp, Artificial Sequence
  Description of Artificial Sequence: Synthetic oligonucleotide
  Target: PCSK9; (+) strand; PAM type: NRG; PAM sequence: TAG
atttggagaaaaggtctttg

SEQ ID NO: 15471 - DNA, 20 bp, Artificial Sequence
  Description of Artificial Sequence: Synthetic oligonucleotide
  Target: PCSK9; (+) strand; PAM type: NRG; PAM sequence: AAG
aggtctttgtagatgtaatt

SEQ ID NO: 15472 - DNA, 20 bp, Artificial Sequence
  Description of Artificial Sequence: Synthetic oligonucleotide
  Target: PCSK9; (+) strand; PAM type: NRG; PAM sequence: AAG
tagatgtaattaagcatctc

SEQ ID NO: 15473 - DNA, 20 bp, Artificial Sequence
  Description of Artificial Sequence: Synthetic oligonucleotide
  Target: PCSK9; (+) strand; PAM type: NRG; PAM sequence: TGG
tgtaattaagcatctcaaga

SEQ ID NO: 15474 - DNA, 20 bp, Artificial Sequence
  Description of Artificial Sequence: Synthetic oligonucleotide
  Target: PCSK9; (+) strand; PAM type: NRG; PAM sequence: TGG
catctcaagatggcatcatc

SEQ ID NO: 15475 - DNA, 20 bp, Artificial Sequence
  Description of Artificial Sequence: Synthetic oligonucleotide
  Target: PCSK9; (+) strand; PAM type: NRG; PAM sequence: CGG
atggcatcatctggattatg

SEQ ID NO: 15476 - DNA, 20 bp, Artificial Sequence
  Description of Artificial Sequence: Synthetic oligonucleotide
  Target: PCSK9; (+) strand; PAM type: NRG; PAM sequence: TGG
gcatcatctggattatgcgg

SEQ ID NO: 15477 - DNA, 20 bp, Artificial Sequence
  Description of Artificial Sequence: Synthetic oligonucleotide
  Target: PCSK9; (+) strand; PAM type: NRG; PAM sequence: GGG
catcatctggattatgcggt

SEQ ID NO: 15478 - DNA, 20 bp, Artificial Sequence
  Description of Artificial Sequence: Synthetic oligonucleotide
  Target: PCSK9; (+) strand; PAM type: NRG; PAM sequence: AAG
tggattatgcggtgggctgt

SEQ ID NO: 15479 - DNA, 20 bp, Artificial Sequence
  Description of Artificial Sequence: Synthetic oligonucleotide
  Target: PCSK9; (+) strand; PAM type: NRG; PAM sequence: GAG
gtcctgtgatgtgtctttat

SEQ ID NO: 15480 - DNA, 20 bp, Artificial Sequence
  Description of Artificial Sequence: Synthetic oligonucleotide
  Target: PCSK9; (+) strand; PAM type: NRG; PAM sequence: GAG
cctgtgatgtgtctttatga

SEQ ID NO: 15481 - DNA, 20 bp, Artificial Sequence
  Description of Artificial Sequence: Synthetic oligonucleotide
  Target: PCSK9; (+) strand; PAM type: NRG; PAM sequence: AAG
tgatgtgtctttatgagaga

SEQ ID NO: 15482 - DNA, 20 bp, Artificial Sequence
  Description of Artificial Sequence: Synthetic oligonucleotide
  Target: PCSK9; (+) strand; PAM type: NRG; PAM sequence: AGG
gatgtgtctttatgagagaa

SEQ ID NO: 15483 - DNA, 20 bp, Artificial Sequence
  Description of Artificial Sequence: Synthetic oligonucleotide
  Target: PCSK9; (+) strand; PAM type: NRG; PAM sequence: CAG
gtgtctttatgagagaaagg

SEQ ID NO: 15484 - DNA, 20 bp, Artificial Sequence
  Description of Artificial Sequence: Synthetic oligonucleotide
  Target: PCSK9; (+) strand; PAM type: NRG; PAM sequence: GAG
gtctttatgagagaaaggca

SEQ ID NO: 15485 - DNA, 20 bp, Artificial Sequence
  Description of Artificial Sequence: Synthetic oligonucleotide
  Target: PCSK9; (+) strand; PAM type: NRG; PAM sequence: AGG
tctttatgagagaaaggcag

SEQ ID NO: 15486 - DNA, 20 bp, Artificial Sequence
  Description of Artificial Sequence: Synthetic oligonucleotide
  Target: PCSK9; (+) strand; PAM type: NRG; PAM sequence: GGG
ctttatgagagaaaggcaga

SEQ ID NO: 15487 - DNA, 20 bp, Artificial Sequence
  Description of Artificial Sequence: Synthetic oligonucleotide
  Target: PCSK9; (+) strand; PAM type: NRG; PAM sequence: GAG
ttatgagagaaaggcagagg

SEQ ID NO: 15488 - DNA, 20 bp, Artificial Sequence
  Description of Artificial Sequence: Synthetic oligonucleotide
  Target: PCSK9; (+) strand; PAM type: NRG; PAM sequence: CAG
agagggagatttgacacaca

SEQ ID NO: 15489 - DNA, 20 bp, Artificial Sequence
  Description of Artificial Sequence: Synthetic oligonucleotide
  Target: PCSK9; (+) strand; PAM type: NRG; PAM sequence: AGG
gagggagatttgacacacac

SEQ ID NO: 15490 - DNA, 20 bp, Artificial Sequence
  Description of Artificial Sequence: Synthetic oligonucleotide
  Target: PCSK9; (+) strand; PAM type: NRG; PAM sequence: GAG
gggagatttgacacacacag

SEQ ID NO: 15491 - DNA, 20 bp, Artificial Sequence
  Description of Artificial Sequence: Synthetic oligonucleotide
  Target: PCSK9; (+) strand; PAM type: NRG; PAM sequence: AGG
ggagatttgacacacacagg

SEQ ID NO: 15492 - DNA, 20 bp, Artificial Sequence
  Description of Artificial Sequence: Synthetic oligonucleotide
  Target: PCSK9; (+) strand; PAM type: NRG; PAM sequence: GGG
gagatttgacacacacagga

SEQ ID NO: 15493 - DNA, 20 bp, Artificial Sequence
  Description of Artificial Sequence: Synthetic oligonucleotide
  Target: PCSK9; (+) strand; PAM type: NRG; PAM sequence: GGG
agatttgacacacacaggag

SEQ ID NO: 15494 - DNA, 20 bp, Artificial Sequence
  Description of Artificial Sequence: Synthetic oligonucleotide
  Target: PCSK9; (+) strand; PAM type: NRG; PAM sequence: TGG
cacacacaggaggggccacg

SEQ ID NO: 15495 - DNA, 20 bp, Artificial Sequence
  Description of Artificial Sequence: Synthetic oligonucleotide
  Target: PCSK9; (+) strand; PAM type: NRG; PAM sequence: GAG
cacacaggaggggccacgtg

SEQ ID NO: 15496 - DNA, 20 bp, Artificial Sequence
  Description of Artificial Sequence: Synthetic oligonucleotide
  Target: PCSK9; (+) strand; PAM type: NRG; PAM sequence: CAG
caggaggggccacgtggaga

SEQ ID NO: 15497 - DNA, 20 bp, Artificial Sequence
  Description of Artificial Sequence: Synthetic oligonucleotide
  Target: PCSK9; (+) strand; PAM type: NRG; PAM sequence: GAG
ggaggggccacgtggagaca

SEQ ID NO: 15498 - DNA, 20 bp, Artificial Sequence
  Description of Artificial Sequence: Synthetic oligonucleotide
  Target: PCSK9; (+) strand; PAM type: NRG; PAM sequence: AGG
gaggggccacgtggagacag

SEQ ID NO: 15499 - DNA, 20 bp, Artificial Sequence
  Description of Artificial Sequence: Synthetic oligonucleotide
  Target: PCSK9; (+) strand; PAM type: NRG; PAM sequence: TGG
gggccacgtggagacagagg

SEQ ID NO: 15500 - DNA, 20 bp, Artificial Sequence
  Description of Artificial Sequence: Synthetic oligonucleotide
  Target: PCSK9; (+) strand; PAM type: NRG; PAM sequence: GAG
gccacgtggagacagaggtg

SEQ ID NO: 15501 - DNA, 20 bp, Artificial Sequence
  Description of Artificial Sequence: Synthetic oligonucleotide
  Target: PCSK9; (+) strand; PAM type: NRG; PAM sequence: TGG
gtggagacagaggtggagat

SEQ ID NO: 15502 - DNA, 20 bp, Artificial Sequence
  Description of Artificial Sequence: Synthetic oligonucleotide
  Target: PCSK9; (+) strand; PAM type: NRG; PAM sequence: GAG
ggagacagaggtggagattg

SEQ ID NO: 15503 - DNA, 20 bp, Artificial Sequence
  Description of Artificial Sequence: Synthetic oligonucleotide
  Target: PCSK9; (+) strand; PAM type: NRG; PAM sequence: TGG
aggtggagattggagaaatg

SEQ ID NO: 15504 - DNA, 20 bp, Artificial Sequence
  Description of Artificial Sequence: Synthetic oligonucleotide
  Target: PCSK9; (+) strand; PAM type: NRG; PAM sequence: AAG
gattggagaaatgtggccac

SEQ ID NO: 15505 - DNA, 20 bp, Artificial Sequence
  Description of Artificial Sequence: Synthetic oligonucleotide
  Target: PCSK9; (+) strand; PAM type: NRG; PAM sequence: CAG
ggagaaatgtggccacaagc

SEQ ID NO: 15506 - DNA, 20 bp, Artificial Sequence
  Description of Artificial Sequence: Synthetic oligonucleotide
  Target: PCSK9; (+) strand; PAM type: NRG; PAM sequence: AGG
gagaaatgtggccacaagcc

SEQ ID NO: 15507 - DNA, 20 bp, Artificial Sequence
  Description of Artificial Sequence: Synthetic oligonucleotide
  Target: PCSK9; (+) strand; PAM type: NRG; PAM sequence: GGG
agaaatgtggccacaagcca

SEQ ID NO: 15508 - DNA, 20 bp, Artificial Sequence
  Description of Artificial Sequence: Synthetic oligonucleotide
  Target: PCSK9; (+) strand; PAM type: NRG; PAM sequence: CAG
ggccacaagccagggaacac

SEQ ID NO: 15509 - DNA, 20 bp, Artificial Sequence
  Description of Artificial Sequence: Synthetic oligonucleotide
  Target: PCSK9; (+) strand; PAM type: NRG; PAM sequence: CAG
cacaagccagggaacaccag

SEQ ID NO: 15510 - DNA, 20 bp, Artificial Sequence
  Description of Artificial Sequence: Synthetic oligonucleotide
  Target: PCSK9; (+) strand; PAM type: NRG; PAM sequence: CAG
cagggaacaccagcagccac

SEQ ID NO: 15511 - DNA, 20 bp, Artificial Sequence
  Description of Artificial Sequence: Synthetic oligonucleotide
  Target: PCSK9; (+) strand; PAM type: NRG; PAM sequence: AAG
ggaacaccagcagccaccag

SEQ ID NO: 15512 - DNA, 20 bp, Artificial Sequence
  Description of Artificial Sequence: Synthetic oligonucleotide
  Target: PCSK9; (+) strand; PAM type: NRG; PAM sequence: CGG
caccagcagccaccagaagc

SEQ ID NO: 15513 - DNA, 20 bp, Artificial Sequence
  Description of Artificial Sequence: Synthetic oligonucleotide
  Target: PCSK9; (+) strand; PAM type: NRG; PAM sequence: AAG
cagcagccaccagaagccgg

SEQ ID NO: 15514 - DNA, 20 bp, Artificial Sequence
  Description of Artificial Sequence: Synthetic oligonucleotide
  Target: PCSK9; (+) strand; PAM type: NRG; PAM sequence: GAG
caccagaagccggaagacgt

SEQ ID NO: 15515 - DNA, 20 bp, Artificial Sequence
  Description of Artificial Sequence: Synthetic oligonucleotide
  Target: PCSK9; (+) strand; PAM type: NRG; PAM sequence: AGG
accagaagccggaagacgtg

SEQ ID NO: 15516 - DNA, 20 bp, Artificial Sequence
  Description of Artificial Sequence: Synthetic oligonucleotide
  Target: PCSK9; (+) strand; PAM type: NRG; PAM sequence: CAG
agaagccggaagacgtgagg

SEQ ID NO: 15517 - DNA, 20 bp, Artificial Sequence
  Description of Artificial Sequence: Synthetic oligonucleotide
  Target: PCSK9; (+) strand; PAM type: NRG; PAM sequence: AGG
gaagccggaagacgtgaggc

SEQ ID NO: 15518 - DNA, 20 bp, Artificial Sequence
  Description of Artificial Sequence: Synthetic oligonucleotide
  Target: PCSK9; (+) strand; PAM type: NRG; PAM sequence: GGG
aagccggaagacgtgaggca

SEQ ID NO: 15519 - DNA, 20 bp, Artificial Sequence
  Description of Artificial Sequence: Synthetic oligonucleotide
  Target: PCSK9; (+) strand; PAM type: NRG; PAM sequence: CAG
acgtgaggcagggttcttcc

SEQ ID NO: 15520 - DNA, 20 bp, Artificial Sequence
  Description of Artificial Sequence: Synthetic oligonucleotide
  Target: PCSK9; (+) strand; PAM type: NRG; PAM sequence: GAG
gtgaggcagggttcttccca

SEQ ID NO: 15521 - DNA, 20 bp, Artificial Sequence
  Description of Artificial Sequence: Synthetic oligonucleotide
  Target: PCSK9; (+) strand; PAM type: NRG; PAM sequence: GAG
ttcccagagccttcgctgct

SEQ ID NO: 15522 - DNA, 20 bp, Artificial Sequence
  Description of Artificial Sequence: Synthetic oligonucleotide
  Target: PCSK9; (+) strand; PAM type: NRG; PAM sequence: TGG
agagccttcgctgctgagtc

SEQ ID NO: 15523 - DNA, 20 bp, Artificial Sequence
  Description of Artificial Sequence: Synthetic oligonucleotide
  Target: PCSK9; (+) strand; PAM type: NRG; PAM sequence: GGG
gagccttcgctgctgagtct

SEQ ID NO: 15524 - DNA, 20 bp, Artificial Sequence
  Description of Artificial Sequence: Synthetic oligonucleotide
  Target: PCSK9; (+) strand; PAM type: NRG; PAM sequence: AAG
agtctgggaatttgtgaccg

SEQ ID NO: 15525 - DNA, 20 bp, Artificial Sequence
  Description of Artificial Sequence: Synthetic oligonucleotide
  Target: PCSK9; (+) strand; PAM type: NRG; PAM sequence: AAG
gaatttgtgaccgaagccat

SEQ ID NO: 15526 - DNA, 20 bp, Artificial Sequence
  Description of Artificial Sequence: Synthetic oligonucleotide
  Target: PCSK9; (+) strand; PAM type: NRG; PAM sequence: AAG
tttgtgaccgaagccataag

SEQ ID NO: 15527 - DNA, 20 bp, Artificial Sequence
  Description of Artificial Sequence: Synthetic oligonucleotide
  Target: PCSK9; (+) strand; PAM type: NRG; PAM sequence: TGG
gtgaccgaagccataagaag

SEQ ID NO: 15528 - DNA, 20 bp, Artificial Sequence
  Description of Artificial Sequence: Synthetic oligonucleotide
  Target: PCSK9; (+) strand; PAM type: NRG; PAM sequence: GGG
tgaccgaagccataagaagt

SEQ ID NO: 15529 - DNA, 20 bp, Artificial Sequence
  Description of Artificial Sequence: Synthetic oligonucleotide
  Target: PCSK9; (+) strand; PAM type: NRG; PAM sequence: GAG
aagaagtgggtacacgccct

SEQ ID NO: 15530 - DNA, 20 bp, Artificial Sequence
  Description of Artificial Sequence: Synthetic oligonucleotide
  Target: PCSK9; (+) strand; PAM type: NRG; PAM sequence: GAG
cacacttgctcacctgtcct

SEQ ID NO: 15531 - DNA, 20 bp, Artificial Sequence
  Description of Artificial Sequence: Synthetic oligonucleotide
  Target: PCSK9; (+) strand; PAM type: NRG; PAM sequence: GAG
ttgctcacctgtcctgagat

SEQ ID NO: 15532 - DNA, 20 bp, Artificial Sequence
  Description of Artificial Sequence: Synthetic oligonucleotide
  Target: PCSK9; (+) strand; PAM type: NRG; PAM sequence: CAG
agatgagaatctctactctg

SEQ ID NO: 15533 - DNA, 20 bp, Artificial Sequence
  Description of Artificial Sequence: Synthetic oligonucleotide
  Target: PCSK9; (+) strand; PAM type: NRG; PAM sequence: TGG
tctctactctgcagcatatt

SEQ ID NO: 15534 - DNA, 20 bp, Artificial Sequence
  Description of Artificial Sequence: Synthetic oligonucleotide
  Target: PCSK9; (+) strand; PAM type: NRG; PAM sequence: GAG
tctactctgcagcatatttg

SEQ ID NO: 15535 - DNA, 20 bp, Artificial Sequence
  Description of Artificial Sequence: Synthetic oligonucleotide
  Target: PCSK9; (+) strand; PAM type: NRG; PAM sequence: AGG
ctactctgcagcatatttgg

SEQ ID NO: 15536 - DNA, 20 bp, Artificial Sequence
  Description of Artificial Sequence: Synthetic oligonucleotide
  Target: PCSK9; (+) strand; PAM type: NRG; PAM sequence: CGG
gcatatttggaggatcactg

SEQ ID NO: 15537 - DNA, 20 bp, Artificial Sequence
  Description of Artificial Sequence: Synthetic oligonucleotide
  Target: PCSK9; (+) strand; PAM type: NRG; PAM sequence: GGG
catatttggaggatcactgc

SEQ ID NO: 15538 - DNA, 20 bp, Artificial Sequence
  Description of Artificial Sequence: Synthetic oligonucleotide
  Target: PCSK9; (+) strand; PAM type: NRG; PAM sequence: GGG
atatttggaggatcactgcg

SEQ ID NO: 15539 - DNA, 20 bp, Artificial Sequence
  Description of Artificial Sequence: Synthetic oligonucleotide
  Target: PCSK9; (+) strand; PAM type: NRG; PAM sequence: GGG
tatttggaggatcactgcgg

SEQ ID NO: 15540 - DNA, 20 bp, Artificial Sequence
  Description of Artificial Sequence: Synthetic oligonucleotide
  Target: PCSK9; (+) strand; PAM type: NRG; PAM sequence: CAG
gaggatcactgcgggggcca

SEQ ID NO: 15541 - DNA, 20 bp, Artificial Sequence
  Description of Artificial Sequence: Synthetic oligonucleotide
  Target: PCSK9; (+) strand; PAM type: NRG; PAM sequence: GAG
ggatcactgcgggggccaca

SEQ ID NO: 15542 - DNA, 20 bp, Artificial Sequence
  Description of Artificial Sequence: Synthetic oligonucleotide
  Target: PCSK9; (+) strand; PAM type: NRG; PAM sequence: AGG
gatcactgcgggggccacag

SEQ ID NO: 15543 - DNA, 20 bp, Artificial Sequence
  Description of Artificial Sequence: Synthetic oligonucleotide
  Target: PCSK9; (+) strand; PAM type: NRG; PAM sequence: CAG
ggggccacagaggtgctgtt

SEQ ID NO: 15544 - DNA, 20 bp, Artificial Sequence
  Description of Artificial Sequence: Synthetic oligonucleotide
  Target: PCSK9; (+) strand; PAM type: NRG; PAM sequence: TGG
ccacagaggtgctgttcaga

SEQ ID NO: 15545 - DNA, 20 bp, Artificial Sequence
  Description of Artificial Sequence: Synthetic oligonucleotide
  Target: PCSK9; (+) strand; PAM type: NRG; PAM sequence: CAG
gtgctgttcagatggcactt

SEQ ID NO: 15546 - DNA, 20 bp, Artificial Sequence
  Description of Artificial Sequence: Synthetic oligonucleotide
  Target: PCSK9; (+) strand; PAM type: NRG; PAM sequence: AAG
ctgttcagatggcacttcag

SEQ ID NO: 15547 - DNA, 20 bp, Artificial Sequence
  Description of Artificial Sequence: Synthetic oligonucleotide
  Target: PCSK9; (+) strand; PAM type: NRG; PAM sequence: CAG
agatggcacttcagaagact

SEQ ID NO: 15548 - DNA, 20 bp, Artificial Sequence
  Description of Artificial Sequence: Synthetic oligonucleotide
  Target: PCSK9; (+) strand; PAM type: NRG; PAM sequence: AGG
gatggcacttcagaagactc

SEQ ID NO: 15549 - DNA, 20 bp, Artificial Sequence
  Description of Artificial Sequence: Synthetic oligonucleotide
  Target: PCSK9; (+) strand; PAM type: NRG; PAM sequence: GAG
tggcacttcagaagactcag

SEQ ID NO: 15550 - DNA, 20 bp, Artificial Sequence
  Description of Artificial Sequence: Synthetic oligonucleotide
  Target: PCSK9; (+) strand; PAM type: NRG; PAM sequence: TGG
tcagaagactcaggagaccc

SEQ ID NO: 15551 - DNA, 20 bp, Artificial Sequence
  Description of Artificial Sequence: Synthetic oligonucleotide
  Target: PCSK9; (+) strand; PAM type: NRG; PAM sequence: GGG
cagaagactcaggagaccct

SEQ ID NO: 15552 - DNA, 20 bp, Artificial Sequence
  Description of Artificial Sequence: Synthetic oligonucleotide
  Target: PCSK9; (+) strand; PAM type: NRG; PAM sequence: GGG
agaagactcaggagaccctg

SEQ ID NO: 15553 - DNA, 20 bp, Artificial Sequence
  Description of Artificial Sequence: Synthetic oligonucleotide
  Target: PCSK9; (+) strand; PAM type: NRG; PAM sequence: CAG
agactcaggagaccctgggg

SEQ ID NO: 15554 - DNA, 20 bp, Artificial Sequence
  Description of Artificial Sequence: Synthetic oligonucleotide
  Target: PCSK9; (+) strand; PAM type: NRG; PAM sequence: AGG
gactcaggagaccctggggc

SEQ ID NO: 15555 - DNA, 20 bp, Artificial Sequence
  Description of Artificial Sequence: Synthetic oligonucleotide
  Target: PCSK9; (+) strand; PAM type: NRG; PAM sequence: GAG
ctcaggagaccctggggcag

SEQ ID NO: 15556 - DNA, 20 bp, Artificial Sequence
  Description of Artificial Sequence: Synthetic oligonucleotide
  Target: PCSK9; (+) strand; PAM type: NRG; PAM sequence: CAG
aggagaccctggggcaggag

SEQ ID NO: 15557 - DNA, 20 bp, Artificial Sequence
  Description of Artificial Sequence: Synthetic oligonucleotide
  Target: PCSK9; (+) strand; PAM type: NRG; PAM sequence: CAG
ggcaggagcagtttgactga

SEQ ID NO: 15558 - DNA, 20 bp, Artificial Sequence
  Description of Artificial Sequence: Synthetic oligonucleotide
  Target: PCSK9; (+) strand; PAM type: NRG; PAM sequence: CAG
gagcagtttgactgacagcc

SEQ ID NO: 15559 - DNA, 20 bp, Artificial Sequence
  Description of Artificial Sequence: Synthetic oligonucleotide
  Target: PCSK9; (+) strand; PAM type: NRG; PAM sequence: GAG
gcagtttgactgacagccca

SEQ ID NO: 15560 - DNA, 20 bp, Artificial Sequence
  Description of Artificial Sequence: Synthetic oligonucleotide
  Target: PCSK9; (+) strand; PAM type: NRG; PAM sequence: AGG
cagtttgactgacagcccag

SEQ ID NO: 15561 - DNA, 20 bp, Artificial Sequence
  Description of Artificial Sequence: Synthetic oligonucleotide
  Target: PCSK9; (+) strand; PAM type: NRG; PAM sequence: GGG
agtttgactgacagcccaga

SEQ ID NO: 15562 - DNA, 20 bp, Artificial Sequence
  Description of Artificial Sequence: Synthetic oligonucleotide
  Target: PCSK9; (+) strand; PAM type: NRG; PAM sequence: GAG
gctgccctctgattccacct

SEQ ID NO: 15563 - DNA, 20 bp, Artificial Sequence
  Description of Artificial Sequence: Synthetic oligonucleotide
  Target: PCSK9; (+) strand; PAM type: NRG; PAM sequence: AGG
ctgccctctgattccacctg

SEQ ID NO: 15564 - DNA, 20 bp, Artificial Sequence
  Description of Artificial Sequence: Synthetic oligonucleotide
  Target: PCSK9; (+) strand; PAM type: NRG; PAM sequence: TGG
acctgaggccctgcttttcc

SEQ ID NO: 15565 - DNA, 20 bp, Artificial Sequence
  Description of Artificial Sequence: Synthetic oligonucleotide
  Target: PCSK9; (+) strand; PAM type: NRG; PAM sequence: CAG
ggccctgcttttcctggctg

SEQ ID NO: 15566 - DNA, 20 bp, Artificial Sequence
  Description of Artificial Sequence: Synthetic oligonucleotide
  Target: PCSK9; (+) strand; PAM type: NRG; PAM sequence: AGG
gccctgcttttcctggctgc

SEQ ID NO: 15567 - DNA, 20 bp, Artificial Sequence
  Description of Artificial Sequence: Synthetic oligonucleotide
  Target: PCSK9; (+) strand; PAM type: NRG; PAM sequence: GGG
ccctgcttttcctggctgca

SEQ ID NO: 15568 - DNA, 20 bp, Artificial Sequence
  Description of Artificial Sequence: Synthetic oligonucleotide
  Target: PCSK9; (+) strand; PAM type: NRG; PAM sequence: GGG
cctgcttttcctggctgcag

SEQ ID NO: 15569 - DNA, 20 bp, Artificial Sequence
  Description of Artificial Sequence: Synthetic oligonucleotide
  Target: PCSK9; (+) strand; PAM type: NRG; PAM sequence: CAG
tttcctggctgcaggggttc

SEQ ID NO: 15570 - DNA, 20 bp, Artificial Sequence
  Description of Artificial Sequence: Synthetic oligonucleotide
  Target: PCSK9; (+) strand; PAM type: NRG; PAM sequence: AGG
ttcctggctgcaggggttcc

SEQ ID NO: 15571 - DNA, 20 bp, Artificial Sequence
  Description of Artificial Sequence: Synthetic oligonucleotide
  Target: PCSK9; (+) strand; PAM type: NRG; PAM sequence: GGG
tcctggctgcaggggttcca

SEQ ID NO: 15572 - DNA, 20 bp, Artificial Sequence
  Description of Artificial Sequence: Synthetic oligonucleotide
  Target: PCSK9; (+) strand; PAM type: NRG; PAM sequence: CAG
ggctgcaggggttccagggc

SEQ ID NO: 15573 - DNA, 20 bp, Artificial Sequence
  Description of Artificial Sequence: Synthetic oligonucleotide
  Target: PCSK9; (+) strand; PAM type: NRG; PAM sequence: AGG
gctgcaggggttccagggcc

SEQ ID NO: 15574 - DNA, 20 bp, Artificial Sequence
  Description of Artificial Sequence: Synthetic oligonucleotide
  Target: PCSK9; (+) strand; PAM type: NRG; PAM sequence: TGG
cagggccaggccatttccgc

SEQ ID NO: 15575 - DNA, 20 bp, Artificial Sequence
  Description of Artificial Sequence: Synthetic oligonucleotide
  Target: PCSK9; (+) strand; PAM type: NRG; PAM sequence: CAG
ccaggccatttccgctggcg

SEQ ID NO: 15576 - DNA, 20 bp, Artificial Sequence
  Description of Artificial Sequence: Synthetic oligonucleotide
  Target: PCSK9; (+) strand; PAM type: NRG; PAM sequence: AGG
caggccatttccgctggcgc

SEQ ID NO: 15577 - DNA, 20 bp, Artificial Sequence
  Description of Artificial Sequence: Synthetic oligonucleotide
  Target: PCSK9; (+) strand; PAM type: NRG; PAM sequence: TAG
ccgctggcgcaggactctgc

SEQ ID NO: 15578 - DNA, 20 bp, Artificial Sequence
  Description of Artificial Sequence: Synthetic oligonucleotide
  Target: PCSK9; (+) strand; PAM type: NRG; PAM sequence: CAG
ctggcgcaggactctgctag

SEQ ID NO: 15579 - DNA, 20 bp, Artificial Sequence
  Description of Artificial Sequence: Synthetic oligonucleotide
  Target: PCSK9; (+) strand; PAM type: NRG; PAM sequence: AAG
tgctagcagcaacctgcctg

SEQ ID NO: 15580 - DNA, 20 bp, Artificial Sequence
  Description of Artificial Sequence: Synthetic oligonucleotide
  Target: PCSK9; (+) strand; PAM type: NRG; PAM sequence: TGG
acctgcctgaagtcttcctt

SEQ ID NO: 15581 - DNA, 20 bp, Artificial Sequence
  Description of Artificial Sequence: Synthetic oligonucleotide
  Target: PCSK9; (+) strand; PAM type: NRG; PAM sequence: TGG
cctgaagtcttcctttggcc

SEQ ID NO: 15582 - DNA, 20 bp, Artificial Sequence
  Description of Artificial Sequence: Synthetic oligonucleotide
  Target: PCSK9; (+) strand; PAM type: NRG; PAM sequence: GAG
agtcttcctttggcctggct

SEQ ID NO: 15583 - DNA, 20 bp, Artificial Sequence
  Description of Artificial Sequence: Synthetic oligonucleotide
  Target: PCSK9; (+) strand; PAM type: NRG; PAM sequence: GAG
tcttcctttggcctggctga

SEQ ID NO: 15584 - DNA, 20 bp, Artificial Sequence
  Description of Artificial Sequence: Synthetic oligonucleotide
  Target: PCSK9; (+) strand; PAM type: NRG; PAM sequence: GAG
tggcctggctgagagtttct

SEQ ID NO: 15585 - DNA, 20 bp, Artificial Sequence
  Description of Artificial Sequence: Synthetic oligonucleotide
  Target: PCSK9; (+) strand; PAM type: NRG; PAM sequence: TGG
agagtttctgagacctgcgc

SEQ ID NO: 15586 - DNA, 20 bp, Artificial Sequence
  Description of Artificial Sequence: Synthetic oligonucleotide
  Target: PCSK9; (+) strand; PAM type: NRG; PAM sequence: GAG
agtttctgagacctgcgctg

SEQ ID NO: 15587 - DNA, 20 bp, Artificial Sequence
  Description of Artificial Sequence: Synthetic oligonucleotide
  Target: PCSK9; (+) strand; PAM type: NRG; PAM sequence: CGG
ttctgagacctgcgctggag

SEQ ID NO: 15588 - DNA, 20 bp, Artificial Sequence
  Description of Artificial Sequence: Synthetic oligonucleotide
  Target: PCSK9; (+) strand; PAM type: NRG; PAM sequence: GAG
ctgagacctgcgctggagcg

SEQ ID NO: 15589 - DNA, 20 bp, Artificial Sequence
  Description of Artificial Sequence: Synthetic oligonucleotide
  Target: PCSK9; (+) strand; PAM type: NRG; PAM sequence: AGG
tgagacctgcgctggagcgg

SEQ ID NO: 15590 - DNA, 20 bp, Artificial Sequence
  Description of Artificial Sequence: Synthetic oligonucleotide
  Target: PCSK9; (+) strand; PAM type: NRG; PAM sequence: CAG
tcctctctcccttctccatc

SEQ ID NO: 15591 - DNA, 20 bp, Artificial Sequence
  Description of Artificial Sequence: Synthetic oligonucleotide
  Target: PCSK9; (+) strand; PAM type: NRG; PAM sequence: CAG
tctctcccttctccatccag

SEQ ID NO: 15592 - DNA, 20 bp, Artificial Sequence
  Description of Artificial Sequence: Synthetic oligonucleotide
  Target: PCSK9; (+) strand; PAM type: NRG; PAM sequence: AGG
ctctcccttctccatccagc

SEQ ID NO: 15593 - DNA, 20 bp, Artificial Sequence
  Description of Artificial Sequence: Synthetic oligonucleotide
  Target: PCSK9; (+) strand; PAM type: NRG; PAM sequence: TGG
cccttctccatccagcaggc

SEQ ID NO: 15594 - DNA, 20 bp, Artificial Sequence
  Description of Artificial Sequence: Synthetic oligonucleotide
  Target: PCSK9; (+) strand; PAM type: NRG; PAM sequence: TGG
tccagcaggctggacctgcc

SEQ ID NO: 15595 - DNA, 20 bp, Artificial Sequence
  Description of Artificial Sequence: Synthetic oligonucleotide
  Target: PCSK9; (+) strand; PAM type: NRG; PAM sequence: GAG
tggacctgcctggcatctgt

SEQ ID NO: 15596 - DNA, 20 bp, Artificial Sequence
  Description of Artificial Sequence: Synthetic oligonucleotide
  Target: PCSK9; (+) strand; PAM type: NRG; PAM sequence: TGG
accctaacctttgtcctgca

SEQ ID NO: 15597 - DNA, 20 bp, Artificial Sequence
  Description of Artificial Sequence: Synthetic oligonucleotide
  Target: PCSK9; (+) strand; PAM type: NRG; PAM sequence: GGG
ccctaacctttgtcctgcat

SEQ ID NO: 15598 - DNA, 20 bp, Artificial Sequence
  Description of Artificial Sequence: Synthetic oligonucleotide
  Target: PCSK9; (+) strand; PAM type: NRG; PAM sequence: CAG
tcctgcatgggcgactcccc

SEQ ID NO: 15599 - DNA, 20 bp, Artificial Sequence
  Description of Artificial Sequence: Synthetic oligonucleotide
  Target: PCSK9; (+) strand; PAM type: NRG; PAM sequence: GAG
gcatgggcgactcccccagt

SEQ ID NO: 15600 - DNA, 20 bp, Artificial Sequence
  Description of Artificial Sequence: Synthetic oligonucleotide
  Target: PCSK9; (+) strand; PAM type: NRG; PAM sequence: CAG
ctcccccagtgagtctcttg

SEQ ID NO: 15601 - DNA, 20 bp, Artificial Sequence
  Description of Artificial Sequence: Synthetic oligonucleotide
  Target: PCSK9; (+) strand; PAM type: NRG; PAM sequence: CAG
gtctcttgcagcttttaccc

SEQ ID NO: 15602 - DNA, 20 bp, Artificial Sequence
  Description of Artificial Sequence: Synthetic oligonucleotide
  Target: PCSK9; (+) strand; PAM type: NRG; PAM sequence: TGG
ttaccccagtgcctgcttct

SEQ ID NO: 15603 - DNA, 20 bp, Artificial Sequence
  Description of Artificial Sequence: Synthetic oligonucleotide
  Target: PCSK9; (+) strand; PAM type: NRG; PAM sequence: GAG
accccagtgcctgcttcttg

SEQ ID NO: 15604 - DNA, 20 bp, Artificial Sequence
  Description of Artificial Sequence: Synthetic oligonucleotide
  Target: PCSK9; (+) strand; PAM type: NRG; PAM sequence: CAG
ttggagaatccaaactgatc

SEQ ID NO: 15605 - DNA, 20 bp, Artificial Sequence
  Description of Artificial Sequence: Synthetic oligonucleotide
  Target: PCSK9; (+) strand; PAM type: NRG; PAM sequence: TAG
agaatccaaactgatccagt

SEQ ID NO: 15606 - DNA, 20 bp, Artificial Sequence
  Description of Artificial Sequence: Synthetic oligonucleotide
  Target: PCSK9; (+) strand; PAM type: NRG; PAM sequence: AGG
gaatccaaactgatccagtt

SEQ ID NO: 15607 - DNA, 20 bp, Artificial Sequence
  Description of Artificial Sequence: Synthetic oligonucleotide
  Target: PCSK9; (+) strand; PAM type: NRG; PAM sequence: GGG
aatccaaactgatccagtta

SEQ ID NO: 15608 - DNA, 20 bp, Artificial Sequence
  Description of Artificial Sequence: Synthetic oligonucleotide
  Target: PCSK9; (+) strand; PAM type: NRG; PAM sequence: AAG
tgatccagttagggatgata

SEQ ID NO: 15609 - DNA, 20 bp, Artificial Sequence
  Description of Artificial Sequence: Synthetic oligonucleotide
  Target: PCSK9; (+) strand; PAM type: NRG; PAM sequence: TAG
cagttagggatgataaagtg

SEQ ID NO: 15610 - DNA, 20 bp, Artificial Sequence
  Description of Artificial Sequence: Synthetic oligonucleotide
  Target: PCSK9; (+) strand; PAM type: NRG; PAM sequence: AGG
agttagggatgataaagtgt

SEQ ID NO: 15611 - DNA, 20 bp, Artificial Sequence
  Description of Artificial Sequence: Synthetic oligonucleotide
  Target: PCSK9; (+) strand; PAM type: NRG; PAM sequence: GGG
gttagggatgataaagtgta

SEQ ID NO: 15612 - DNA, 20 bp, Artificial Sequence
  Description of Artificial Sequence: Synthetic oligonucleotide
  Target: PCSK9; (+) strand; PAM type: NRG; PAM sequence: TAG
agggatgataaagtgtaggg

SEQ ID NO: 15613 - DNA, 20 bp, Artificial Sequence
  Description of Artificial Sequence: Synthetic oligonucleotide
  Target: PCSK9; (+) strand; PAM type: NRG; PAM sequence: AGG
gggatgataaagtgtagggt

SEQ ID NO: 15614 - DNA, 20 bp, Artificial Sequence
  Description of Artificial Sequence: Synthetic oligonucleotide
  Target: PCSK9; (+) strand; PAM type: NRG; PAM sequence: CGG
taaagtgtagggtaggcgct

SEQ ID NO: 15615 - DNA, 20 bp, Artificial Sequence
  Description of Artificial Sequence: Synthetic oligonucleotide
  Target: PCSK9; (+) strand; PAM type: NRG; PAM sequence: GAG
gctcggtgactgttttctct

SEQ ID NO: 15616 - DNA, 20 bp, Artificial Sequence
  Description of Artificial Sequence: Synthetic oligonucleotide
  Target: PCSK9; (+) strand; PAM type: NRG; PAM sequence: AGG
ctcggtgactgttttctctg

SEQ ID NO: 15617 - DNA, 20 bp, Artificial Sequence
  Description of Artificial Sequence: Synthetic oligonucleotide
  Target: PCSK9; (+) strand; PAM type: NRG; PAM sequence: GAG
tctgaggttgtgactcgtgt

SEQ ID NO: 15618 - DNA, 20 bp, Artificial Sequence
  Description of Artificial Sequence: Synthetic oligonucleotide
  Target: PCSK9; (+) strand; PAM type: NRG; PAM sequence: AGG
ctgaggttgtgactcgtgtg

SEQ ID NO: 15619 - DNA, 20 bp, Artificial Sequence
  Description of Artificial Sequence: Synthetic oligonucleotide
  Target: PCSK9; (+) strand; PAM type: NRG; PAM sequence: CAG
aggttgtgactcgtgtgagg

SEQ ID NO: 15620 - DNA, 20 bp, Artificial Sequence
  Description of Artificial Sequence: Synthetic oligonucleotide
  Target: PCSK9; (+) strand; PAM type: NRG; PAM sequence: AAG
ttgtgactcgtgtgaggcag

SEQ ID NO: 15621 - DNA, 20 bp, Artificial Sequence
  Description of Artificial Sequence: Synthetic oligonucleotide
  Target: PCSK9; (+) strand; PAM type: NRG; PAM sequence: CAG
tgactcgtgtgaggcagaag

SEQ ID NO: 15622 - DNA, 20 bp, Artificial Sequence
  Description of Artificial Sequence: Synthetic oligonucleotide
  Target: PCSK9; (+) strand; PAM type: NRG; PAM sequence: GAG
gaggcagaagcagtccccgt

SEQ ID NO: 15623 - DNA, 20 bp, Artificial Sequence
  Description of Artificial Sequence: Synthetic oligonucleotide
  Target: PCSK9; (+) strand; PAM type: NRG; PAM sequence: TGG
gcagtccccgtgagccctcc

SEQ ID NO: 15624 - DNA, 20 bp, Artificial Sequence
  Description of Artificial Sequence: Synthetic oligonucleotide
  Target: PCSK9; (+) strand; PAM type: NRG; PAM sequence: TGG
tgagccctcctggtatcttg

SEQ ID NO: 15625 - DNA, 20 bp, Artificial Sequence
  Description of Artificial Sequence: Synthetic oligonucleotide
  Target: PCSK9; (+) strand; PAM type: NRG; PAM sequence: GAG
agccctcctggtatcttgtg

SEQ ID NO: 15626 - DNA, 20 bp, Artificial Sequence
  Description of Artificial Sequence: Synthetic oligonucleotide
  Target: PCSK9; (+) strand; PAM type: NRG; PAM sequence: TGG
cctcctggtatcttgtggag

SEQ ID NO: 15627 - DNA, 20 bp, Artificial Sequence
  Description of Artificial Sequence: Synthetic oligonucleotide
  Target: PCSK9; (+) strand; PAM type: NRG; PAM sequence: GAG
tcctggtatcttgtggagtg

SEQ ID NO: 15628 - DNA, 20 bp, Artificial Sequence
  Description of Artificial Sequence: Synthetic oligonucleotide
  Target: PCSK9; (+) strand; PAM type: NRG; PAM sequence: TGG
cttgtggagtggagaacgct

SEQ ID NO: 15629 - DNA, 20 bp, Artificial Sequence
  Description of Artificial Sequence: Synthetic oligonucleotide
  Target: PCSK9; (+) strand; PAM type: NRG; PAM sequence: TGG
gagtggagaacgcttggacc

SEQ ID NO: 15630 - DNA, 20 bp, Artificial Sequence
  Description of Artificial Sequence: Synthetic oligonucleotide
  Target: PCSK9; (+) strand; PAM type: NRG; PAM sequence: GAG
gtggagaacgcttggacctg

SEQ ID NO: 15631 - DNA, 20 bp, Artificial Sequence
  Description of Artificial Sequence: Synthetic oligonucleotide
  Target: PCSK9; (+) strand; PAM type: NRG; PAM sequence: CAG
agaacgcttggacctggagc

SEQ ID NO: 15632 - DNA, 20 bp, Artificial Sequence
  Description of Artificial Sequence: Synthetic oligonucleotide
  Target: PCSK9; (+) strand; PAM type: NRG; PAM sequence: AGG
gaacgcttggacctggagcc

SEQ ID NO: 15633 - DNA, 20 bp, Artificial Sequence
  Description of Artificial Sequence: Synthetic oligonucleotide
  Target: PCSK9; (+) strand; PAM type: NRG; PAM sequence: GAG
acgcttggacctggagccag

SEQ ID NO: 15634 - DNA, 20 bp, Artificial Sequence
  Description of Artificial Sequence: Synthetic oligonucleotide
  Target: PCSK9; (+) strand; PAM type: NRG; PAM sequence: AGG
cgcttggacctggagccagg

SEQ ID NO: 15635 - DNA, 20 bp, Artificial Sequence
  Description of Artificial Sequence: Synthetic oligonucleotide
  Target: PCSK9; (+) strand; PAM type: NRG; PAM sequence: CAG
ggacctggagccaggaggcc

SEQ ID NO: 15636 - DNA, 20 bp, Artificial Sequence
  Description of Artificial Sequence: Synthetic oligonucleotide
  Target: PCSK9; (+) strand; PAM type: NRG; PAM sequence: GAG
cccagacatacatcctgtcc

SEQ ID NO: 15637 - DNA, 20 bp, Artificial Sequence
  Description of Artificial Sequence: Synthetic oligonucleotide
  Target: PCSK9; (+) strand; PAM type: NRG; PAM sequence: CAG
catacatcctgtccgagctg

SEQ ID NO: 15638 - DNA, 20 bp, Artificial Sequence
  Description of Artificial Sequence: Synthetic oligonucleotide
  Target: PCSK9; (+) strand; PAM type: NRG; PAM sequence: GAG
cagcttcctgtctctaaaat

SEQ ID NO: 15639 - DNA, 20 bp, Artificial Sequence
  Description of Artificial Sequence: Synthetic oligonucleotide
  Target: PCSK9; (+) strand; PAM type: NRG; PAM sequence: CGG
ttcctgtctctaaaatgagc

SEQ ID NO: 15640 - DNA, 20 bp, Artificial Sequence
  Description of Artificial Sequence: Synthetic oligonucleotide
  Target: PCSK9; (+) strand; PAM type: NRG; PAM sequence: CAG
tgtctctaaaatgagccggc

SEQ ID NO: 15641 - DNA, 20 bp, Artificial Sequence
  Description of Artificial Sequence: Synthetic oligonucleotide
  Target: PCSK9; (+) strand; PAM type: NRG; PAM sequence: CAG
ctaaaatgagccggccagcg

SEQ ID NO: 15642 - DNA, 20 bp, Artificial Sequence
  Description of Artificial Sequence: Synthetic oligonucleotide
  Target: PCSK9; (+) strand; PAM type: NRG; PAM sequence: AGG
taaaatgagccggccagcgc

SEQ ID NO: 15643 - DNA, 20 bp, Artificial Sequence
  Description of Artificial Sequence: Synthetic oligonucleotide
  Target: PCSK9; (+) strand; PAM type: NRG; PAM sequence: TGG
aatgagccggccagcgcagg

SEQ ID NO: 15644 - DNA, 20 bp, Artificial Sequence
  Description of Artificial Sequence: Synthetic oligonucleotide
  Target: PCSK9; (+) strand; PAM type: NRG; PAM sequence: CAG
agccggccagcgcaggtggc

SEQ ID NO: 15645 - DNA, 20 bp, Artificial Sequence
  Description of Artificial Sequence: Synthetic oligonucleotide
  Target: PCSK9; (+) strand; PAM type: NRG; PAM sequence: GAG
catcactgttattctccttt

SEQ ID NO: 15646 - DNA, 20 bp, Artificial Sequence
  Description of Artificial Sequence: Synthetic oligonucleotide
  Target: PCSK9; (+) strand; PAM type: NRG; PAM sequence: CAG
aaatcttgttgtctttcttg

SEQ ID NO: 15647 - DNA, 20 bp, Artificial Sequence
  Description of Artificial Sequence: Synthetic oligonucleotide
  Target: PCSK9; (+) strand; PAM type: NRG; PAM sequence: CGG
tgttgtctttcttgcagact

SEQ ID NO: 15648 - DNA, 20 bp, Artificial Sequence
  Description of Artificial Sequence: Synthetic oligonucleotide
  Target: PCSK9; (+) strand; PAM type: NRG; PAM sequence: GAG
gtctttcttgcagactcggt

SEQ ID NO: 15649 - DNA, 20 bp, Artificial Sequence
  Description of Artificial Sequence: Synthetic oligonucleotide
  Target: PCSK9; (+) strand; PAM type: NRG; PAM sequence: AAG
gcagactcggtgagctgtga

SEQ ID NO: 15650 - DNA, 20 bp, Artificial Sequence
  Description of Artificial Sequence: Synthetic oligonucleotide
  Target: PCSK9; (+) strand; PAM type: NRG; PAM sequence: AGG
cagactcggtgagctgtgaa

SEQ ID NO: 15651 - DNA, 20 bp, Artificial Sequence
  Description of Artificial Sequence: Synthetic oligonucleotide
  Target: PCSK9; (+) strand; PAM type: NRG; PAM sequence: TAG
tgagctgtgaaaggctataa

SEQ ID NO: 15652 - DNA, 20 bp, Artificial Sequence
  Description of Artificial Sequence: Synthetic oligonucleotide
  Target: PCSK9; (+) strand; PAM type: NRG; PAM sequence: AGG
gagctgtgaaaggctataat

SEQ ID NO: 15653 - DNA, 20 bp, Artificial Sequence
  Description of Artificial Sequence: Synthetic oligonucleotide
  Target: PCSK9; (+) strand; PAM type: NRG; PAM sequence: GGG
agctgtgaaaggctataata

SEQ ID NO: 15654 - DNA, 20 bp, Artificial Sequence
  Description of Artificial Sequence: Synthetic oligonucleotide
  Target: PCSK9; (+) strand; PAM type: NRG; PAM sequence: GGG
gctgtgaaaggctataatag

SEQ ID NO: 15655 - DNA, 20 bp, Artificial Sequence
  Description of Artificial Sequence: Synthetic oligonucleotide
  Target: PCSK9; (+) strand; PAM type: NRG; PAM sequence: TAG
ttgaacattcatattattgt

SEQ ID NO: 15656 - DNA, 20 bp, Artificial Sequence
  Description of Artificial Sequence: Synthetic oligonucleotide
  Target: PCSK9; (+) strand; PAM type: NRG; PAM sequence: AAG
tagatattgatattcatatg

SEQ ID NO: 15657 - DNA, 20 bp, Artificial Sequence
  Description of Artificial Sequence: Synthetic oligonucleotide
  Target: PCSK9; (+) strand; PAM type: NRG; PAM sequence: AGG
agatattgatattcatatga

SEQ ID NO: 15658 - DNA, 20 bp, Artificial Sequence
  Description of Artificial Sequence: Synthetic oligonucleotide
  Target: PCSK9; (+) strand; PAM type: NRG; PAM sequence: GAG
atattgatattcatatgaag

SEQ ID NO: 15659 - DNA, 20 bp, Artificial Sequence
  Description of Artificial Sequence: Synthetic oligonucleotide
  Target: PCSK9; (+) strand; PAM type: NRG; PAM sequence: CAG
ttgatattcatatgaaggag

SEQ ID NO: 15660 - DNA, 20 bp, Artificial Sequence
  Description of Artificial Sequence: Synthetic oligonucleotide
  Target: PCSK9; (+) strand; PAM type: NRG; PAM sequence: AGG
tgatattcatatgaaggagc

SEQ ID NO: 15661 - DNA, 20 bp, Artificial Sequence
  Description of Artificial Sequence: Synthetic oligonucleotide
  Target: PCSK9; (+) strand; PAM type: NRG; PAM sequence: TGG
tatgaaggagcaggatgact

SEQ ID NO: 15662 - DNA, 20 bp, Artificial Sequence
  Description of Artificial Sequence: Synthetic oligonucleotide
  Target: PCSK9; (+) strand; PAM type: NRG; PAM sequence: GGG
atgaaggagcaggatgactt

SEQ ID NO: 15663 - DNA, 20 bp, Artificial Sequence
  Description of Artificial Sequence: Synthetic oligonucleotide
  Target: PCSK9; (+) strand; PAM type: NRG; PAM sequence: TGG
aggatgacttgggtccttct

SEQ ID NO: 15664 - DNA, 20 bp, Artificial Sequence
  Description of Artificial Sequence: Synthetic oligonucleotide
  Target: PCSK9; (+) strand; PAM type: NRG; PAM sequence: CAG
atgacttgggtccttcttgg

SEQ ID NO: 15665 - DNA, 20 bp, Artificial Sequence
  Description of Artificial Sequence: Synthetic oligonucleotide
  Target: PCSK9; (+) strand; PAM type: NRG; PAM sequence: TAG
acttgggtccttcttggcag

SEQ ID NO: 15666 - DNA, 20 bp, Artificial Sequence
  Description of Artificial Sequence: Synthetic oligonucleotide
  Target: PCSK9; (+) strand; PAM type: NRG; PAM sequence: CAG
cttcttggcagtagcattgc

SEQ ID NO: 15667 - DNA, 20 bp, Artificial Sequence
  Description of Artificial Sequence: Synthetic oligonucleotide
  Target: PCSK9; (+) strand; PAM type: NRG; PAM sequence: TGG
gcagtagcattgccagctga

SEQ ID NO: 15668 - DNA, 20 bp, Artificial Sequence
  Description of Artificial Sequence: Synthetic oligonucleotide
  Target: PCSK9; (+) strand; PAM type: NRG; PAM sequence: TGG
gcattgccagctgatggcct

SEQ ID NO: 15669 - DNA, 20 bp, Artificial Sequence
  Description of Artificial Sequence: Synthetic oligonucleotide
  Target: PCSK9; (+) strand; PAM type: NRG; PAM sequence: CAG
tgccagctgatggccttgga

SEQ ID NO: 15670 - DNA, 20 bp, Artificial Sequence
  Description of Artificial Sequence: Synthetic oligonucleotide
  Target: PCSK9; (+) strand; PAM type: NRG; PAM sequence: TAG
ggacagttacctgccctctc

SEQ ID NO: 15671 - DNA, 20 bp, Artificial Sequence
  Description of Artificial Sequence: Synthetic oligonucleotide
  Target: PCSK9; (+) strand; PAM type: NRG; PAM sequence: AGG
gacagttacctgccctctct

SEQ ID NO: 15672 - DNA, 20 bp, Artificial Sequence
  Description of Artificial Sequence: Synthetic oligonucleotide
  Target: PCSK9; (+) strand; PAM type: NRG; PAM sequence: TAG
cttgtctatgaaatacatta

SEQ ID NO: 15673 - DNA, 20 bp, Artificial Sequence
  Description of Artificial Sequence: Synthetic oligonucleotide
  Target: PCSK9; (+) strand; PAM type: NRG; PAM sequence: TAG
ctatgaaatacattatagaa

SEQ ID NO: 15674 - DNA, 20 bp, Artificial Sequence
  Description of Artificial Sequence: Synthetic oligonucleotide
  Target: PCSK9; (+) strand; PAM type: NRG; PAM sequence: AGG
tatgaaatacattatagaat

SEQ ID NO: 15675 - DNA, 20 bp, Artificial Sequence
  Description of Artificial Sequence: Synthetic oligonucleotide
  Target: PCSK9; (+) strand; PAM type: NRG; PAM sequence: TAG
atacattatagaataggatg

SEQ ID NO: 15676 - DNA, 20 bp, Artificial Sequence
  Description of Artificial Sequence: Synthetic oligonucleotide
  Target: PCSK9; (+) strand; PAM type: NRG; PAM sequence: GAG
tagaataggatgtagtgtgt

SEQ ID NO: 15677 - DNA, 20 bp, Artificial Sequence
  Description of Artificial Sequence: Synthetic oligonucleotide
  Target: PCSK9; (+) strand; PAM type: NRG; PAM sequence: AGG
agaataggatgtagtgtgtg

SEQ ID NO: 15678 - DNA, 20 bp, Artificial Sequence
  Description of Artificial Sequence: Synthetic oligonucleotide
  Target: PCSK9; (+) strand; PAM type: NRG; PAM sequence: TGG
tgtagtgtgtgaggattttt

SEQ ID NO: 15679 - DNA, 20 bp, Artificial Sequence
  Description of Artificial Sequence: Synthetic oligonucleotide
  Target: PCSK9; (+) strand; PAM type: NRG; PAM sequence: GAG
tagtgtgtgaggattttttg

SEQ ID NO: 15680 - DNA, 20 bp, Artificial Sequence
  Description of Artificial Sequence: Synthetic oligonucleotide
  Target: PCSK9; (+) strand; PAM type: NRG; PAM sequence: AGG
agtgtgtgaggattttttgg

SEQ ID NO: 15681 - DNA, 20 bp, Artificial Sequence
  Description of Artificial Sequence: Synthetic oligonucleotide
  Target: PCSK9; (+) strand; PAM type: NRG; PAM sequence: GAG
ggattttttggaggttaaac

SEQ ID NO: 15682 - DNA, 20 bp, Artificial Sequence
  Description of Artificial Sequence: Synthetic oligonucleotide
  Target: PCSK9; (+) strand; PAM type: NRG; PAM sequence: AAG
ttaaacgagtgaatatattt

SEQ ID NO: 15683 - DNA, 20 bp, Artificial Sequence
  Description of Artificial Sequence: Synthetic oligonucleotide
  Target: PCSK9; (+) strand; PAM type: NRG; PAM sequence: AGG
taaacgagtgaatatattta

SEQ ID NO: 15684 - DNA, 20 bp, Artificial Sequence
  Description of Artificial Sequence: Synthetic oligonucleotide
  Target: PCSK9; (+) strand; PAM type: NRG; PAM sequence: CAG
tatatttaaggcgctttcac

SEQ ID NO: 15685 - DNA, 20 bp, Artificial Sequence
  Description of Artificial Sequence: Synthetic oligonucleotide
  Target: PCSK9; (+) strand; PAM type: NRG; PAM sequence: TGG
aaggcgctttcaccagtgcc

SEQ ID NO: 15686 - DNA, 20 bp, Artificial Sequence
  Description of Artificial Sequence: Synthetic oligonucleotide
  Target: PCSK9; (+) strand; PAM type: NRG; PAM sequence: GGG
aggcgctttcaccagtgcct

SEQ ID NO: 15687 - DNA, 20 bp, Artificial Sequence
  Description of Artificial Sequence: Synthetic oligonucleotide
  Target: PCSK9; (+) strand; PAM type: NRG; PAM sequence: TAG
agtgcctgggatgtgctctg

SEQ ID NO: 15688 - DNA, 20 bp, Artificial Sequence
  Description of Artificial Sequence: Synthetic oligonucleotide
  Target: PCSK9; (+) strand; PAM type: NRG; PAM sequence: AAG
agtttctgtgtgttaactat

SEQ ID NO: 15689 - DNA, 20 bp, Artificial Sequence
  Description of Artificial Sequence: Synthetic oligonucleotide
  Target: PCSK9; (+) strand; PAM type: NRG; PAM sequence: AGG
gtttctgtgtgttaactata

SEQ ID NO: 15690 - DNA, 20 bp, Artificial Sequence
  Description of Artificial Sequence: Synthetic oligonucleotide
  Target: PCSK9; (+) strand; PAM type: NRG; PAM sequence: TGG
ctctcccacaaatgtcgcct

SEQ ID NO: 15691 - DNA, 20 bp, Artificial Sequence
  Description of Artificial Sequence: Synthetic oligonucleotide
  Target: PCSK9; (+) strand; PAM type: NRG; PAM sequence: AAG
cccacaaatgtcgccttgga

SEQ ID NO: 15692 - DNA, 20 bp, Artificial Sequence
  Description of Artificial Sequence: Synthetic oligonucleotide
  Target: PCSK9; (+) strand; PAM type: NRG; PAM sequence: CGG
caaatgtcgccttggaaaga

SEQ ID NO: 15693 - DNA, 20 bp, Artificial Sequence
  Description of Artificial Sequence: Synthetic oligonucleotide
  Target: PCSK9; (+) strand; PAM type: NRG; PAM sequence: GAG
aatgtcgccttggaaagacg

SEQ ID NO: 15694 - DNA, 20 bp, Artificial Sequence
  Description of Artificial Sequence: Synthetic oligonucleotide
  Target: PCSK9; (+) strand; PAM type: NRG; PAM sequence: AGG
atgtcgccttggaaagacgg

SEQ ID NO: 15695 - DNA, 20 bp, Artificial Sequence
  Description of Artificial Sequence: Synthetic oligonucleotide
  Target: PCSK9; (+) strand; PAM type: NRG; PAM sequence: CAG
tcgccttggaaagacggagg

SEQ ID NO: 15696 - DNA, 20 bp, Artificial Sequence
  Description of Artificial Sequence: Synthetic oligonucleotide
  Target: PCSK9; (+) strand; PAM type: NRG; PAM sequence: TGG
ttggaaagacggaggcagcc

SEQ ID NO: 15697 - DNA, 20 bp, Artificial Sequence
  Description of Artificial Sequence: Synthetic oligonucleotide
  Target: PCSK9; (+) strand; PAM type: NRG; PAM sequence: TGG
gaaagacggaggcagcctgg

SEQ ID NO: 15698 - DNA, 20 bp, Artificial Sequence
  Description of Artificial Sequence: Synthetic oligonucleotide
  Target: PCSK9; (+) strand; PAM type: NRG; PAM sequence: GAG
aagacggaggcagcctggtg

SEQ ID NO: 15699 - DNA, 20 bp, Artificial Sequence
  Description of Artificial Sequence: Synthetic oligonucleotide
  Target: PCSK9; (+) strand; PAM type: NRG; PAM sequence: AGG
agacggaggcagcctggtgg

SEQ ID NO: 15700 - DNA, 20 bp, Artificial Sequence
  Description of Artificial Sequence: Synthetic oligonucleotide
  Target: PCSK9; (+) strand; PAM type: NRG; PAM sequence: TAG
cctggtggaggtgtatctcc

SEQ ID NO: 15701 - DNA, 20 bp, Artificial Sequence
  Description of Artificial Sequence: Synthetic oligonucleotide
  Target: PCSK9; (+) strand; PAM type: NRG; PAM sequence: CAG
gaggtgtatctcctagacac

SEQ ID NO: 15702 - DNA, 20 bp, Artificial Sequence
  Description of Artificial Sequence: Synthetic oligonucleotide
  Target: PCSK9; (+) strand; PAM type: NRG; PAM sequence: CAG
atctcctagacaccagcata

SEQ ID NO: 15703 - DNA, 20 bp, Artificial Sequence
  Description of Artificial Sequence: Synthetic oligonucleotide
  Target: PCSK9; (+) strand; PAM type: NRG; PAM sequence: GAG
ctcctagacaccagcataca

SEQ ID NO: 15704 - DNA, 20 bp, Artificial Sequence
  Description of Artificial Sequence: Synthetic oligonucleotide
  Target: PCSK9; (+) strand; PAM type: NRG; PAM sequence: CGG
ccagcatacagagtgaccac

SEQ ID NO: 15705 - DNA, 20 bp, Artificial Sequence
  Description of Artificial Sequence: Synthetic oligonucleotide
  Target: PCSK9; (+) strand; PAM type: NRG; PAM sequence: GGG
cagcatacagagtgaccacc

SEQ ID NO: 15706 - DNA, 20 bp, Artificial Sequence
  Description of Artificial Sequence: Synthetic oligonucleotide
  Target: PCSK9; (+) strand; PAM type: NRG; PAM sequence: GAG
agagtgaccaccgggaaatc

SEQ ID NO: 15707 - DNA, 20 bp, Artificial Sequence
  Description of Artificial Sequence: Synthetic oligonucleotide
  Target: PCSK9; (+) strand; PAM type: NRG; PAM sequence: AGG
gagtgaccaccgggaaatcg

SEQ ID NO: 15708 - DNA, 20 bp, Artificial Sequence
  Description of Artificial Sequence: Synthetic oligonucleotide
  Target: PCSK9; (+) strand; PAM type: NRG; PAM sequence: GGG
agtgaccaccgggaaatcga

SEQ ID NO: 15709 - DNA, 20 bp, Artificial Sequence
  Description of Artificial Sequence: Synthetic oligonucleotide
  Target: PCSK9; (+) strand; PAM type: NRG; PAM sequence: CAG
gaccaccgggaaatcgaggg

SEQ ID NO: 15710 - DNA, 20 bp, Artificial Sequence
  Description of Artificial Sequence: Synthetic oligonucleotide
  Target: PCSK9; (+) strand; PAM type: NRG; PAM sequence: AGG
accaccgggaaatcgagggc

SEQ ID NO: 15711 - DNA, 20 bp, Artificial Sequence
  Description of Artificial Sequence: Synthetic oligonucleotide
  Target: PCSK9; (+) strand; PAM type: NRG; PAM sequence: GGG
ccaccgggaaatcgagggca

SEQ ID NO: 15712 - DNA, 20 bp, Artificial Sequence
  Description of Artificial Sequence: Synthetic oligonucleotide
  Target: PCSK9; (+) strand; PAM type: NRG; PAM sequence: TGG
ggaaatcgagggcagggtca

SEQ ID NO: 15713 - DNA, 20 bp, Artificial Sequence
  Description of Artificial Sequence: Synthetic oligonucleotide
  Target: PCSK9; (+) strand; PAM type: NRG; PAM sequence: GAG
gggtcatggtcaccgacttc

SEQ ID NO: 15714 - DNA, 20 bp, Artificial Sequence
  Description of Artificial Sequence: Synthetic oligonucleotide
  Target: PCSK9; (+) strand; PAM type: NRG; PAM sequence: GAG
ccgacttcgagaatgtgccc

SEQ ID NO: 15715 - DNA, 20 bp, Artificial Sequence
  Description of Artificial Sequence: Synthetic oligonucleotide
  Target: PCSK9; (+) strand; PAM type: NRG; PAM sequence: AGG
cgacttcgagaatgtgcccg

SEQ ID NO: 15716 - DNA, 20 bp, Artificial Sequence
  Description of Artificial Sequence: Synthetic oligonucleotide
  Target: PCSK9; (+) strand; PAM type: NRG; PAM sequence: GAG
acttcgagaatgtgcccgag

SEQ ID NO: 15717 - DNA, 20 bp, Artificial Sequence
  Description of Artificial Sequence: Synthetic oligonucleotide
  Target: PCSK9; (+) strand; PAM type: NRG; PAM sequence: AGG
cttcgagaatgtgcccgagg

SEQ ID NO: 15718 - DNA, 20 bp, Artificial Sequence
  Description of Artificial Sequence: Synthetic oligonucleotide
  Target: PCSK9; (+) strand; PAM type: NRG; PAM sequence: CGG
gagaatgtgcccgaggagga

SEQ ID NO: 15719 - DNA, 20 bp, Artificial Sequence
  Description of Artificial Sequence: Synthetic oligonucleotide
  Target: PCSK9; (+) strand; PAM type: NRG; PAM sequence: GGG
agaatgtgcccgaggaggac

SEQ ID NO: 15720 - DNA, 20 bp, Artificial Sequence
  Description of Artificial Sequence: Synthetic oligonucleotide
  Target: PCSK9; (+) strand; PAM type: NRG; PAM sequence: CAG
gaggacgggacccgcttcca

SEQ ID NO: 15721 - DNA, 20 bp, Artificial Sequence
  Description of Artificial Sequence: Synthetic oligonucleotide
  Target: PCSK9; (+) strand; PAM type: NRG; PAM sequence: CAG
acgggacccgcttccacaga

SEQ ID NO: 15722 - DNA, 20 bp, Artificial Sequence
  Description of Artificial Sequence: Synthetic oligonucleotide
  Target: PCSK9; (+) strand; PAM type: NRG; PAM sequence: AGG
cgggacccgcttccacagac

SEQ ID NO: 15723 - DNA, 20 bp, Artificial Sequence
  Description of Artificial Sequence: Synthetic oligonucleotide
  Target: PCSK9; (+) strand; PAM type: NRG; PAM sequence: AAG
acccgcttccacagacaggt

SEQ ID NO: 15724 - DNA, 20 bp, Artificial Sequence
  Description of Artificial Sequence: Synthetic oligonucleotide
  Target: PCSK9; (+) strand; PAM type: NRG; PAM sequence: CGG
cttccacagacaggtaagca

SEQ ID NO: 15725 - DNA, 20 bp, Artificial Sequence
  Description of Artificial Sequence: Synthetic oligonucleotide
  Target: PCSK9; (+) strand; PAM type: NRG; PAM sequence: TGG
aggtaagcacggccgtctga

SEQ ID NO: 15726 - DNA, 20 bp, Artificial Sequence
  Description of Artificial Sequence: Synthetic oligonucleotide
  Target: PCSK9; (+) strand; PAM type: NRG; PAM sequence: GGG
ggtaagcacggccgtctgat

SEQ ID NO: 15727 - DNA, 20 bp, Artificial Sequence
  Description of Artificial Sequence: Synthetic oligonucleotide
  Target: PCSK9; (+) strand; PAM type: NRG; PAM sequence: GAG
taagcacggccgtctgatgg

SEQ ID NO: 15728 - DNA, 20 bp, Artificial Sequence
  Description of Artificial Sequence: Synthetic oligonucleotide
  Target: PCSK9; (+) strand; PAM type: NRG; PAM sequence: AGG
aagcacggccgtctgatggg

SEQ ID NO: 15729 - DNA, 20 bp, Artificial Sequence
  Description of Artificial Sequence: Synthetic oligonucleotide
  Target: PCSK9; (+) strand; PAM type: NRG; PAM sequence: GGG
agcacggccgtctgatggga

SEQ ID NO: 15730 - DNA, 20 bp, Artificial Sequence
  Description of Artificial Sequence: Synthetic oligonucleotide
  Target: PCSK9; (+) strand; PAM type: NRG; PAM sequence: TGG
ctctgcccatatccccatcc

SEQ ID NO: 15731 - DNA, 20 bp, Artificial Sequence
  Description of Artificial Sequence: Synthetic oligonucleotide
  Target: PCSK9; (+) strand; PAM type: NRG; PAM sequence: GAG
ctgcccatatccccatcctg

SEQ ID NO: 15732 - DNA, 20 bp, Artificial Sequence
  Description of Artificial Sequence: Synthetic oligonucleotide
  Target: PCSK9; (+) strand; PAM type: NRG; PAM sequence: AGG
tgcccatatccccatcctgg

SEQ ID NO: 15733 - DNA, 20 bp, Artificial Sequence
  Description of Artificial Sequence: Synthetic oligonucleotide
  Target: PCSK9; (+) strand; PAM type: NRG; PAM sequence: TGG
ccatatccccatcctggagg

SEQ ID NO: 15734 - DNA, 20 bp, Artificial Sequence
  Description of Artificial Sequence: Synthetic oligonucleotide
  Target: PCSK9; (+) strand; PAM type: NRG; PAM sequence: GGG
catatccccatcctggaggt

SEQ ID NO: 15735 - DNA, 20 bp, Artificial Sequence
  Description of Artificial Sequence: Synthetic oligonucleotide
  Target: PCSK9; (+) strand; PAM type: NRG; PAM sequence: TGG
atccccatcctggaggtggg

SEQ ID NO: 15736 - DNA, 20 bp, Artificial Sequence
  Description of Artificial Sequence: Synthetic oligonucleotide
  Target: PCSK9; (+) strand; PAM type: NRG; PAM sequence: GGG
tccccatcctggaggtgggt

SEQ ID NO: 15737 - DNA, 20 bp, Artificial Sequence
  Description of Artificial Sequence: Synthetic oligonucleotide
  Target: PCSK9; (+) strand; PAM type: NRG; PAM sequence: GGG
ccccatcctggaggtgggtg

SEQ ID NO: 15738 - DNA, 20 bp, Artificial Sequence
  Description of Artificial Sequence: Synthetic oligonucleotide
  Target: PCSK9; (+) strand; PAM type: NRG; PAM sequence: CAG
gtgggtggggactgccaccc

SEQ ID NO: 15739 - DNA, 20 bp, Artificial Sequence
  Description of Artificial Sequence: Synthetic oligonucleotide
  Target: PCSK9; (+) strand; PAM type: NRG; PAM sequence: GAG
gggtggggactgccacccca

SEQ ID NO: 15740 - DNA, 20 bp, Artificial Sequence
  Description of Artificial Sequence: Synthetic oligonucleotide
  Target: PCSK9; (+) strand; PAM type: NRG; PAM sequence: CAG
actgccaccccagagcgttg

SEQ ID NO: 15741 - DNA, 20 bp, Artificial Sequence
  Description of Artificial Sequence: Synthetic oligonucleotide
  Target: PCSK9; (+) strand; PAM type: NRG; PAM sequence: TGG
gagcgttgcagctgtactcc

SEQ ID NO: 15742 - DNA, 20 bp, Artificial Sequence
  Description of Artificial Sequence: Synthetic oligonucleotide
  Target: PCSK9; (+) strand; PAM type: NRG; PAM sequence: GGG
agcgttgcagctgtactcct

SEQ ID NO: 15743 - DNA, 20 bp, Artificial Sequence
  Description of Artificial Sequence: Synthetic oligonucleotide
  Target: PCSK9; (+) strand; PAM type: NRG; PAM sequence: CAG
ctcctgggttgcaccccccc

SEQ ID NO: 15744 - DNA, 20 bp, Artificial Sequence
  Description of Artificial Sequence: Synthetic oligonucleotide
  Target: PCSK9; (+) strand; PAM type: NRG; PAM sequence: CAG
cactgtcccctccctgccat

SEQ ID NO: 15745 - DNA, 20 bp, Artificial Sequence
  Description of Artificial Sequence: Synthetic oligonucleotide
  Target: PCSK9; (+) strand; PAM type: NRG; PAM sequence: TGG
cccctccctgccatcagttg

SEQ ID NO: 15746 - DNA, 20 bp, Artificial Sequence
  Description of Artificial Sequence: Synthetic oligonucleotide
  Target: PCSK9; (+) strand; PAM type: NRG; PAM sequence: GGG
ccctccctgccatcagttgt

SEQ ID NO: 15747 - DNA, 20 bp, Artificial Sequence
  Description of Artificial Sequence: Synthetic oligonucleotide
  Target: PCSK9; (+) strand; PAM type: NRG; PAM sequence: AAG
tccctgccatcagttgtggg

SEQ ID NO: 15748 - DNA, 20 bp, Artificial Sequence
  Description of Artificial Sequence: Synthetic oligonucleotide
  Target: PCSK9; (+) strand; PAM type: NRG; PAM sequence: AGG
ccctgccatcagttgtggga

SEQ ID NO: 15749 - DNA, 20 bp, Artificial Sequence
  Description of Artificial Sequence: Synthetic oligonucleotide
  Target: PCSK9; (+) strand; PAM type: NRG; PAM sequence: GGG
cctgccatcagttgtgggaa

SEQ ID NO: 15750 - DNA, 20 bp, Artificial Sequence
  Description of Artificial Sequence: Synthetic oligonucleotide
  Target: PCSK9; (+) strand; PAM type: NRG; PAM sequence: CAG
gggaagggcgttcatccatc

SEQ ID NO: 15751 - DNA, 20 bp, Artificial Sequence
  Description of Artificial Sequence: Synthetic oligonucleotide
  Target: PCSK9; (+) strand; PAM type: NRG; PAM sequence: TAG
agccacctgctgatttgtta

SEQ ID NO: 15752 - DNA, 20 bp, Artificial Sequence
  Description of Artificial Sequence: Synthetic oligonucleotide
  Target: PCSK9; (+) strand; PAM type: NRG; PAM sequence: AGG
gccacctgctgatttgttat

SEQ ID NO: 15753 - DNA, 20 bp, Artificial Sequence
  Description of Artificial Sequence: Synthetic oligonucleotide
  Target: PCSK9; (+) strand; PAM type: NRG; PAM sequence: GGG
ccacctgctgatttgttata

SEQ ID NO: 15754 - DNA, 20 bp, Artificial Sequence
  Description of Artificial Sequence: Synthetic oligonucleotide
  Target: PCSK9; (+) strand; PAM type: NRG; PAM sequence: TGG
cctgctgatttgttataggg

SEQ ID NO: 15755 - DNA, 20 bp, Artificial Sequence
  Description of Artificial Sequence: Synthetic oligonucleotide
  Target: PCSK9; (+) strand; PAM type: NRG; PAM sequence: GAG
tgctgatttgttatagggtg

SEQ ID NO: 15756 - DNA, 20 bp, Artificial Sequence
  Description of Artificial Sequence: Synthetic oligonucleotide
  Target: PCSK9; (+) strand; PAM type: NRG; PAM sequence: AGG
gctgatttgttatagggtgg

SEQ ID NO: 15757 - DNA, 20 bp, Artificial Sequence
  Description of Artificial Sequence: Synthetic oligonucleotide
  Target: PCSK9; (+) strand; PAM type: NRG; PAM sequence: GGG
ctgatttgttatagggtgga

SEQ ID NO: 15758 - DNA, 20 bp, Artificial Sequence
  Description of Artificial Sequence: Synthetic oligonucleotide
  Target: PCSK9; (+) strand; PAM type: NRG; PAM sequence: GGG
tgatttgttatagggtggag

SEQ ID NO: 15759 - DNA, 20 bp, Artificial Sequence
  Description of Artificial Sequence: Synthetic oligonucleotide
  Target: PCSK9; (+) strand; PAM type: NRG; PAM sequence: GGG
gatttgttatagggtggagg

SEQ ID NO: 15760 - DNA, 20 bp, Artificial Sequence
  Description of Artificial Sequence: Synthetic oligonucleotide
  Target: PCSK9; (+) strand; PAM type: NRG; PAM sequence: GGG
atttgttatagggtggaggg

SEQ ID NO: 15761 - DNA, 20 bp, Artificial Sequence
  Description of Artificial Sequence: Synthetic oligonucleotide
  Target: PCSK9; (+) strand; PAM type: NRG; PAM sequence: GGG
tttgttatagggtggagggg

SEQ ID NO: 15762 - DNA, 20 bp, Artificial Sequence
  Description of Artificial Sequence: Synthetic oligonucleotide
  Target: PCSK9; (+) strand; PAM type: NRG; PAM sequence: TGG
gagggggggtctttctcatg

SEQ ID NO: 15763 - DNA, 20 bp, Artificial Sequence
  Description of Artificial Sequence: Synthetic oligonucleotide
  Target: PCSK9; (+) strand; PAM type: NRG; PAM sequence: GAG
atgtggtccttgtgttcgtc

SEQ ID NO: 15764 - DNA, 20 bp, Artificial Sequence
  Description of Artificial Sequence: Synthetic oligonucleotide
  Target: PCSK9; (+) strand; PAM type: NRG; PAM sequence: CAG
tggtccttgtgttcgtcgag

SEQ ID NO: 15765 - DNA, 20 bp, Artificial Sequence
  Description of Artificial Sequence: Synthetic oligonucleotide
  Target: PCSK9; (+) strand; PAM type: NRG; PAM sequence: AGG
ggtccttgtgttcgtcgagc

SEQ ID NO: 15766 - DNA, 20 bp, Artificial Sequence
  Description of Artificial Sequence: Synthetic oligonucleotide
  Target: PCSK9; (+) strand; PAM type: NRG; PAM sequence: CAG
cttgtgttcgtcgagcaggc

SEQ ID NO: 15767 - DNA, 20 bp, Artificial Sequence
  Description of Artificial Sequence: Synthetic oligonucleotide
  Target: PCSK9; (+) strand; PAM type: NRG; PAM sequence: AAG
tgttcgtcgagcaggccagc

SEQ ID NO: 15768 - DNA, 20 bp, Artificial Sequence
  Description of Artificial Sequence: Synthetic oligonucleotide
  Target: PCSK9; (+) strand; PAM type: NRG; PAM sequence: CAG
gagcaggccagcaagtgtga

SEQ ID NO: 15769 - DNA, 20 bp, Artificial Sequence
  Description of Artificial Sequence: Synthetic oligonucleotide
  Target: PCSK9; (+) strand; PAM type: NRG; PAM sequence: TGG
gccagcaagtgtgacagtca

SEQ ID NO: 15770 - DNA, 20 bp, Artificial Sequence
  Description of Artificial Sequence: Synthetic oligonucleotide
  Target: PCSK9; (+) strand; PAM type: NRG; PAM sequence: TGG
tgacagtcatggcacccacc

SEQ ID NO: 15771 - DNA, 20 bp, Artificial Sequence
  Description of Artificial Sequence: Synthetic oligonucleotide
  Target: PCSK9; (+) strand; PAM type: NRG; PAM sequence: CAG
cagtcatggcacccacctgg

SEQ ID NO: 15772 - DNA, 20 bp, Artificial Sequence
  Description of Artificial Sequence: Synthetic oligonucleotide
  Target: PCSK9; (+) strand; PAM type: NRG; PAM sequence: AGG
agtcatggcacccacctggc

SEQ ID NO: 15773 - DNA, 20 bp, Artificial Sequence
  Description of Artificial Sequence: Synthetic oligonucleotide
  Target: PCSK9; (+) strand; PAM type: NRG; PAM sequence: GGG
gtcatggcacccacctggca

SEQ ID NO: 15774 - DNA, 20 bp, Artificial Sequence
  Description of Artificial Sequence: Synthetic oligonucleotide
  Target: PCSK9; (+) strand; PAM type: NRG; PAM sequence: GGG
tcatggcacccacctggcag

SEQ ID NO: 15775 - DNA, 20 bp, Artificial Sequence
  Description of Artificial Sequence: Synthetic oligonucleotide
  Target: PCSK9; (+) strand; PAM type: NRG; PAM sequence: TGG
tggcacccacctggcagggg

SEQ ID NO: 15776 - DNA, 20 bp, Artificial Sequence
  Description of Artificial Sequence: Synthetic oligonucleotide
  Target: PCSK9; (+) strand; PAM type: NRG; PAM sequence: CAG
acccacctggcaggggtggt

SEQ ID NO: 15777 - DNA, 20 bp, Artificial Sequence
  Description of Artificial Sequence: Synthetic oligonucleotide
  Target: PCSK9; (+) strand; PAM type: NRG; PAM sequence: CGG
cacctggcaggggtggtcag

SEQ ID NO: 15778 - DNA, 20 bp, Artificial Sequence
  Description of Artificial Sequence: Synthetic oligonucleotide
  Target: PCSK9; (+) strand; PAM type: NRG; PAM sequence: CGG
tggcaggggtggtcagcggc

SEQ ID NO: 15779 - DNA, 20 bp, Artificial Sequence
  Description of Artificial Sequence: Synthetic oligonucleotide
  Target: PCSK9; (+) strand; PAM type: NRG; PAM sequence: GGG
ggcaggggtggtcagcggcc

SEQ ID NO: 15780 - DNA, 20 bp, Artificial Sequence
  Description of Artificial Sequence: Synthetic oligonucleotide
  Target: PCSK9; (+) strand; PAM type: NRG; PAM sequence: CGG
gtggtcagcggccgggatgc

SEQ ID NO: 15781 - DNA, 20 bp, Artificial Sequence
  Description of Artificial Sequence: Synthetic oligonucleotide
  Target: PCSK9; (+) strand; PAM type: NRG; PAM sequence: TGG
cagcggccgggatgccggcg

SEQ ID NO: 15782 - DNA, 20 bp, Artificial Sequence
  Description of Artificial Sequence: Synthetic oligonucleotide
  Target: PCSK9; (+) strand; PAM type: NRG; PAM sequence: AAG
gccgggatgccggcgtggcc

SEQ ID NO: 15783 - DNA, 20 bp, Artificial Sequence
  Description of Artificial Sequence: Synthetic oligonucleotide
  Target: PCSK9; (+) strand; PAM type: NRG; PAM sequence: AGG
ccgggatgccggcgtggcca

SEQ ID NO: 15784 - DNA, 20 bp, Artificial Sequence
  Description of Artificial Sequence: Synthetic oligonucleotide
  Target: PCSK9; (+) strand; PAM type: NRG; PAM sequence: GGG
cgggatgccggcgtggccaa

SEQ ID NO: 15785 - DNA, 20 bp, Artificial Sequence
  Description of Artificial Sequence: Synthetic oligonucleotide
  Target: PCSK9; (+) strand; PAM type: NRG; PAM sequence: CAG
gccggcgtggccaagggtgc

SEQ ID NO: 15786 - DNA, 20 bp, Artificial Sequence
  Description of Artificial Sequence: Synthetic oligonucleotide
  Target: PCSK9; (+) strand; PAM type: NRG; PAM sequence: CAG
gccaagggtgccagcatgcg

SEQ ID NO: 15787 - DNA, 20 bp, Artificial Sequence
  Description of Artificial Sequence: Synthetic oligonucleotide
  Target: PCSK9; (+) strand; PAM type: NRG; PAM sequence: AAG
cctgcgcgtgctcaactgcc

SEQ ID NO: 15788 - DNA, 20 bp, Artificial Sequence
  Description of Artificial Sequence: Synthetic oligonucleotide
  Target: PCSK9; (+) strand; PAM type: NRG; PAM sequence: AGG
ctgcgcgtgctcaactgcca

SEQ ID NO: 15789 - DNA, 20 bp, Artificial Sequence
  Description of Artificial Sequence: Synthetic oligonucleotide
  Target: PCSK9; (+) strand; PAM type: NRG; PAM sequence: GGG
tgcgcgtgctcaactgccaa

SEQ ID NO: 15790 - DNA, 20 bp, Artificial Sequence
  Description of Artificial Sequence: Synthetic oligonucleotide
  Target: PCSK9; (+) strand; PAM type: NRG; PAM sequence: AAG
gcgtgctcaactgccaaggg

SEQ ID NO: 15791 - DNA, 20 bp, Artificial Sequence
  Description of Artificial Sequence: Synthetic oligonucleotide
  Target: PCSK9; (+) strand; PAM type: NRG; PAM sequence: AGG
cgtgctcaactgccaaggga

SEQ ID NO: 15792 - DNA, 20 bp, Artificial Sequence
  Description of Artificial Sequence: Synthetic oligonucleotide
  Target: PCSK9; (+) strand; PAM type: NRG; PAM sequence: GGG
gtgctcaactgccaagggaa

SEQ ID NO: 15793 - DNA, 20 bp, Artificial Sequence
  Description of Artificial Sequence: Synthetic oligonucleotide
  Target: PCSK9; (+) strand; PAM type: NRG; PAM sequence: CGG
caactgccaagggaagggca

SEQ ID NO: 15794 - DNA, 20 bp, Artificial Sequence
  Description of Artificial Sequence: Synthetic oligonucleotide
  Target: PCSK9; (+) strand; PAM type: NRG; PAM sequence: TAG
tgccaagggaagggcacggt

SEQ ID NO: 15795 - DNA, 20 bp, Artificial Sequence
  Description of Artificial Sequence: Synthetic oligonucleotide
  Target: PCSK9; (+) strand; PAM type: NRG; PAM sequence: CGG
caagggaagggcacggttag

SEQ ID NO: 15796 - DNA, 20 bp, Artificial Sequence
  Description of Artificial Sequence: Synthetic oligonucleotide
  Target: PCSK9; (+) strand; PAM type: NRG; PAM sequence: TAG
cacggttagcggcaccctca

SEQ ID NO: 15797 - DNA, 20 bp, Artificial Sequence
  Description of Artificial Sequence: Synthetic oligonucleotide
  Target: PCSK9; (+) strand; PAM type: NRG; PAM sequence: AGG
acggttagcggcaccctcat

SEQ ID NO: 15798 - DNA, 20 bp, Artificial Sequence
  Description of Artificial Sequence: Synthetic oligonucleotide
  Target: PCSK9; (+) strand; PAM type: NRG; PAM sequence: AAG
ttagcggcaccctcataggt

SEQ ID NO: 15799 - DNA, 20 bp, Artificial Sequence
  Description of Artificial Sequence: Synthetic oligonucleotide
  Target: PCSK9; (+) strand; PAM type: NRG; PAM sequence: TGG
gcaccctcataggtaagtga

SEQ ID NO: 15800 - DNA, 20 bp, Artificial Sequence
  Description of Artificial Sequence: Synthetic oligonucleotide
  Target: PCSK9; (+) strand; PAM type: NRG; PAM sequence: CAG
tcataggtaagtgatggccc

SEQ ID NO: 15801 - DNA, 20 bp, Artificial Sequence
  Description of Artificial Sequence: Synthetic oligonucleotide
  Target: PCSK9; (+) strand; PAM type: NRG; PAM sequence: TGG
taagtgatggccccagacgc

SEQ ID NO: 15802 - DNA, 20 bp, Artificial Sequence
  Description of Artificial Sequence: Synthetic oligonucleotide
  Target: PCSK9; (+) strand; PAM type: NRG; PAM sequence: TGG
gacgctggtctctctccatc

SEQ ID NO: 15803 - DNA, 20 bp, Artificial Sequence
  Description of Artificial Sequence: Synthetic oligonucleotide
  Target: PCSK9; (+) strand; PAM type: NRG; PAM sequence: TGG
ggtctctctccatctggacc

SEQ ID NO: 15804 - DNA, 20 bp, Artificial Sequence
  Description of Artificial Sequence: Synthetic oligonucleotide
  Target: PCSK9; (+) strand; PAM type: NRG; PAM sequence: TGG
ctctccatctggacctggcc

SEQ ID NO: 15805 - DNA, 20 bp, Artificial Sequence
  Description of Artificial Sequence: Synthetic oligonucleotide
  Target: PCSK9; (+) strand; PAM type: NRG; PAM sequence: GGG
tctccatctggacctggcct

SEQ ID NO: 15806 - DNA, 20 bp, Artificial Sequence
  Description of Artificial Sequence: Synthetic oligonucleotide
  Target: PCSK9; (+) strand; PAM type: NRG; PAM sequence: GAG
tccatctggacctggcctgg

SEQ ID NO: 15807 - DNA, 20 bp, Artificial Sequence
  Description of Artificial Sequence: Synthetic oligonucleotide
  Target: PCSK9; (+) strand; PAM type: NRG; PAM sequence: AGG
ccatctggacctggcctggg

SEQ ID NO: 15808 - DNA, 20 bp, Artificial Sequence
  Description of Artificial Sequence: Synthetic oligonucleotide
  Target: PCSK9; (+) strand; PAM type: NRG; PAM sequence: TGG
tctggacctggcctgggagg

SEQ ID NO: 15809 - DNA, 20 bp, Artificial Sequence
  Description of Artificial Sequence: Synthetic oligonucleotide
  Target: PCSK9; (+) strand; PAM type: NRG; PAM sequence: TGG
acctggcctgggaggtggct

SEQ ID NO: 15810 - DNA, 20 bp, Artificial Sequence
  Description of Artificial Sequence: Synthetic oligonucleotide
  Target: PCSK9; (+) strand; PAM type: NRG; PAM sequence: GGG
cctggcctgggaggtggctt

SEQ ID NO: 15811 - DNA, 20 bp, Artificial Sequence
  Description of Artificial Sequence: Synthetic oligonucleotide
  Target: PCSK9; (+) strand; PAM type: NRG; PAM sequence: TGG
gcctgggaggtggcttgggc

SEQ ID NO: 15812 - DNA, 20 bp, Artificial Sequence
  Description of Artificial Sequence: Synthetic oligonucleotide
  Target: PCSK9; (+) strand; PAM type: NRG; PAM sequence: GGG
cctgggaggtggcttgggct

SEQ ID NO: 15813 - DNA, 20 bp, Artificial Sequence
  Description of Artificial Sequence: Synthetic oligonucleotide
  Target: PCSK9; (+) strand; PAM type: NRG; PAM sequence: CAG
gaggtggcttgggctgggcc

SEQ ID NO: 15814 - DNA, 20 bp, Artificial Sequence
  Description of Artificial Sequence: Synthetic oligonucleotide
  Target: PCSK9; (+) strand; PAM type: NRG; PAM sequence: AGG
aggtggcttgggctgggccc

SEQ ID NO: 15815 - DNA, 20 bp, Artificial Sequence
  Description of Artificial Sequence: Synthetic oligonucleotide
  Target: PCSK9; (+) strand; PAM type: NRG; PAM sequence: GGG
ggtggcttgggctgggccca

SEQ ID NO: 15816 - DNA, 20 bp, Artificial Sequence
  Description of Artificial Sequence: Synthetic oligonucleotide
  Target: PCSK9; (+) strand; PAM type: NRG; PAM sequence: GAG
tggcttgggctgggcccagg

SEQ ID NO: 15817 - DNA, 20 bp, Artificial Sequence
  Description of Artificial Sequence: Synthetic oligonucleotide
  Target: PCSK9; (+) strand; PAM type: NRG; PAM sequence: GAG
gcttgggctgggcccaggga

SEQ ID NO: 15818 - DNA, 20 bp, Artificial Sequence
  Description of Artificial Sequence: Synthetic oligonucleotide
  Target: PCSK9; (+) strand; PAM type: NRG; PAM sequence: AAG
agagctaatgtctcctaacc

SEQ ID NO: 15819 - DNA, 20 bp, Artificial Sequence
  Description of Artificial Sequence: Synthetic oligonucleotide
  Target: PCSK9; (+) strand; PAM type: NRG; PAM sequence: TGG
tctcctaaccaagaatgctg

SEQ ID NO: 15820 - DNA, 20 bp, Artificial Sequence
  Description of Artificial Sequence: Synthetic oligonucleotide
  Target: PCSK9; (+) strand; PAM type: NRG; PAM sequence: CAG
cctaaccaagaatgctgtgg

SEQ ID NO: 15821 - DNA, 20 bp, Artificial Sequence
  Description of Artificial Sequence: Synthetic oligonucleotide
  Target: PCSK9; (+) strand; PAM type: NRG; PAM sequence: CAG
tgctgtggcagcctctgccg

SEQ ID NO: 15822 - DNA, 20 bp, Artificial Sequence
  Description of Artificial Sequence: Synthetic oligonucleotide
  Target: PCSK9; (+) strand; PAM type: NRG; PAM sequence: GAG
ctgtggcagcctctgccgca

SEQ ID NO: 15823 - DNA, 20 bp, Artificial Sequence
  Description of Artificial Sequence: Synthetic oligonucleotide
  Target: PCSK9; (+) strand; PAM type: NRG; PAM sequence: CAG
ggcagcctctgccgcagagc

SEQ ID NO: 15824 - DNA, 20 bp, Artificial Sequence
  Description of Artificial Sequence: Synthetic oligonucleotide
  Target: PCSK9; (+) strand; PAM type: NRG; PAM sequence: GAG
cagcctctgccgcagagcca

SEQ ID NO: 15825 - DNA, 20 bp, Artificial Sequence
  Description of Artificial Sequence: Synthetic oligonucleotide
  Target: PCSK9; (+) strand; PAM type: NRG; PAM sequence: CAG
ctgccgcagagccagagaac

SEQ ID NO: 15826 - DNA, 20 bp, Artificial Sequence
  Description of Artificial Sequence: Synthetic oligonucleotide
  Target: PCSK9; (+) strand; PAM type: NRG; PAM sequence: GAG
gccgcagagccagagaacca

SEQ ID NO: 15827 - DNA, 20 bp, Artificial Sequence
  Description of Artificial Sequence: Synthetic oligonucleotide
  Target: PCSK9; (+) strand; PAM type: NRG; PAM sequence: AAG
agccagagaaccagagtgcc

SEQ ID NO: 15828 - DNA, 20 bp, Artificial Sequence
  Description of Artificial Sequence: Synthetic oligonucleotide
  Target: PCSK9; (+) strand; PAM type: NRG; PAM sequence: AGG
gccagagaaccagagtgcca

SEQ ID NO: 15829 - DNA, 20 bp, Artificial Sequence
  Description of Artificial Sequence: Synthetic oligonucleotide
  Target: PCSK9; (+) strand; PAM type: NRG; PAM sequence: TGG
gagaaccagagtgccaaggc

SEQ ID NO: 15830 - DNA, 20 bp, Artificial Sequence
  Description of Artificial Sequence: Synthetic oligonucleotide
  Target: PCSK9; (+) strand; PAM type: NRG; PAM sequence: CAG
aaccagagtgccaaggctgg

SEQ ID NO: 15831 - DNA, 20 bp, Artificial Sequence
  Description of Artificial Sequence: Synthetic oligonucleotide
  Target: PCSK9; (+) strand; PAM type: NRG; PAM sequence: AGG
accagagtgccaaggctggc

SEQ ID NO: 15832 - DNA, 20 bp, Artificial Sequence
  Description of Artificial Sequence: Synthetic oligonucleotide
  Target: PCSK9; (+) strand; PAM type: NRG; PAM sequence: GGG
ccagagtgccaaggctggca

SEQ ID NO: 15833 - DNA, 20 bp, Artificial Sequence
  Description of Artificial Sequence: Synthetic oligonucleotide
  Target: PCSK9; (+) strand; PAM type: NRG; PAM sequence: CAG
gccaaggctggcagggttcc

SEQ ID NO: 15834 - DNA, 20 bp, Artificial Sequence
  Description of Artificial Sequence: Synthetic oligonucleotide
  Target: PCSK9; (+) strand; PAM type: NRG; PAM sequence: TGG
aaggctggcagggttcccag

SEQ ID NO: 15835 - DNA, 20 bp, Artificial Sequence
  Description of Artificial Sequence: Synthetic oligonucleotide
  Target: PCSK9; (+) strand; PAM type: NRG; PAM sequence: GAG
gcagggttcccagtggccac

SEQ ID NO: 15836 - DNA, 20 bp, Artificial Sequence
  Description of Artificial Sequence: Synthetic oligonucleotide
  Target: PCSK9; (+) strand; PAM type: NRG; PAM sequence: CAG
gttcccagtggccacgagtg

SEQ ID NO: 15837 - DNA, 20 bp, Artificial Sequence
  Description of Artificial Sequence: Synthetic oligonucleotide
  Target: PCSK9; (+) strand; PAM type: NRG; PAM sequence: AAG
agtggccacgagtgcagatg

SEQ ID NO: 15838 - DNA, 20 bp, Artificial Sequence
  Description of Artificial Sequence: Synthetic oligonucleotide
  Target: PCSK9; (+) strand; PAM type: NRG; PAM sequence: CAG
cgagtgcagatgaagaaacc

SEQ ID NO: 15839 - DNA, 20 bp, Artificial Sequence
  Description of Artificial Sequence: Synthetic oligonucleotide
  Target: PCSK9; (+) strand; PAM type: NRG; PAM sequence: AGG
gagtgcagatgaagaaaccc

SEQ ID NO: 15840 - DNA, 20 bp, Artificial Sequence
  Description of Artificial Sequence: Synthetic oligonucleotide
  Target: PCSK9; (+) strand; PAM type: NRG; PAM sequence: AAG
gatgaagaaacccaggcccc

SEQ ID NO: 15841 - DNA, 20 bp, Artificial Sequence
  Description of Artificial Sequence: Synthetic oligonucleotide
  Target: PCSK9; (+) strand; PAM type: NRG; PAM sequence: GAG
tgaagaaacccaggccccaa

SEQ ID NO: 15842 - DNA, 20 bp, Artificial Sequence
  Description of Artificial Sequence: Synthetic oligonucleotide
  Target: PCSK9; (+) strand; PAM type: NRG; PAM sequence: AGG
gaagaaacccaggccccaag

SEQ ID NO: 15843 - DNA, 20 bp, Artificial Sequence
  Description of Artificial Sequence: Synthetic oligonucleotide
  Target: PCSK9; (+) strand; PAM type: NRG; PAM sequence: GGG
aagaaacccaggccccaaga

SEQ ID NO: 15844 - DNA, 20 bp, Artificial Sequence
  Description of Artificial Sequence: Synthetic oligonucleotide
  Target: PCSK9; (+) strand; PAM type: NRG; PAM sequence: CAG
caggccccaagagggtcatg

SEQ ID NO: 15845 - DNA, 20 bp, Artificial Sequence
  Description of Artificial Sequence: Synthetic oligonucleotide
  Target: PCSK9; (+) strand; PAM type: NRG; PAM sequence: AGG
aggccccaagagggtcatgc

SEQ ID NO: 15846 - DNA, 20 bp, Artificial Sequence
  Description of Artificial Sequence: Synthetic oligonucleotide
  Target: PCSK9; (+) strand; PAM type: NRG; PAM sequence: TAG
ccccaagagggtcatgcagg

SEQ ID NO: 15847 - DNA, 20 bp, Artificial Sequence
  Description of Artificial Sequence: Synthetic oligonucleotide
  Target: PCSK9; (+) strand; PAM type: NRG; PAM sequence: CAG
agagggtcatgcaggtagcc

SEQ ID NO: 15848 - DNA, 20 bp, Artificial Sequence
  Description of Artificial Sequence: Synthetic oligonucleotide
  Target: PCSK9; (+) strand; PAM type: NRG; PAM sequence: AGG
gagggtcatgcaggtagccc

SEQ ID NO: 15849 - DNA, 20 bp, Artificial Sequence
  Description of Artificial Sequence: Synthetic oligonucleotide
  Target: PCSK9; (+) strand; PAM type: NRG; PAM sequence: GGG
agggtcatgcaggtagccca

SEQ ID NO: 15850 - DNA, 20 bp, Artificial Sequence
  Description of Artificial Sequence: Synthetic oligonucleotide
  Target: PCSK9; (+) strand; PAM type: NRG; PAM sequence: GAG
ggtcatgcaggtagcccagg

SEQ ID NO: 15851 - DNA, 20 bp, Artificial Sequence
  Description of Artificial Sequence: Synthetic oligonucleotide
  Target: PCSK9; (+) strand; PAM type: NRG; PAM sequence: CAG
tgcaggtagcccagggagtt

SEQ ID NO: 15852 - DNA, 20 bp, Artificial Sequence
  Description of Artificial Sequence: Synthetic oligonucleotide
  Target: PCSK9; (+) strand; PAM type: NRG; PAM sequence: TGG
agggagttcagccttgaccc

SEQ ID NO: 15853 - DNA, 20 bp, Artificial Sequence
  Description of Artificial Sequence: Synthetic oligonucleotide
  Target: PCSK9; (+) strand; PAM type: NRG; PAM sequence: GGG
gggagttcagccttgaccct

SEQ ID NO: 15854 - DNA, 20 bp, Artificial Sequence
  Description of Artificial Sequence: Synthetic oligonucleotide
  Target: PCSK9; (+) strand; PAM type: NRG; PAM sequence: CAG
ctgggtcaatgacctttcca

SEQ ID NO: 15855 - DNA, 20 bp, Artificial Sequence
  Description of Artificial Sequence: Synthetic oligonucleotide
  Target: PCSK9; (+) strand; PAM type: NRG; PAM sequence: CGG
actgctccccttttaaaatc

SEQ ID NO: 15856 - DNA, 20 bp, Artificial Sequence
  Description of Artificial Sequence: Synthetic oligonucleotide
  Target: PCSK9; (+) strand; PAM type: NRG; PAM sequence: TGG
ttgttatgttatcttcaatg

SEQ ID NO: 15857 - DNA, 20 bp, Artificial Sequence
  Description of Artificial Sequence: Synthetic oligonucleotide
  Target: PCSK9; (+) strand; PAM type: NRG; PAM sequence: GAG
gttatgttatcttcaatgtg

SEQ ID NO: 15858 - DNA, 20 bp, Artificial Sequence
  Description of Artificial Sequence: Synthetic oligonucleotide
  Target: PCSK9; (+) strand; PAM type: NRG; PAM sequence: AGG
ttatgttatcttcaatgtgg

SEQ ID NO: 15859 - DNA, 20 bp, Artificial Sequence
  Description of Artificial Sequence: Synthetic oligonucleotide
  Target: PCSK9; (+) strand; PAM type: NRG; PAM sequence: GGG
tatgttatcttcaatgtgga

SEQ ID NO: 15860 - DNA, 20 bp, Artificial Sequence
  Description of Artificial Sequence: Synthetic oligonucleotide
  Target: PCSK9; (+) strand; PAM type: NRG; PAM sequence: GAG
tcttcaatgtggagggactc

SEQ ID NO: 15861 - DNA, 20 bp, Artificial Sequence
  Description of Artificial Sequence: Synthetic oligonucleotide
  Target: PCSK9; (+) strand; PAM type: NRG; PAM sequence: AGG
cttcaatgtggagggactcg

SEQ ID NO: 15862 - DNA, 20 bp, Artificial Sequence
  Description of Artificial Sequence: Synthetic oligonucleotide
  Target: PCSK9; (+) strand; PAM type: NRG; PAM sequence: AAG
ggagggactcgaggtgatct

SEQ ID NO: 15863 - DNA, 20 bp, Artificial Sequence
  Description of Artificial Sequence: Synthetic oligonucleotide
  Target: PCSK9; (+) strand; PAM type: NRG; PAM sequence: GAG
tcttctgcttgcatacctct

SEQ ID NO: 15864 - DNA, 20 bp, Artificial Sequence
  Description of Artificial Sequence: Synthetic oligonucleotide
  Target: PCSK9; (+) strand; PAM type: NRG; PAM sequence: CAG
tgcttgcatacctctgagac

SEQ ID NO: 15865 - DNA, 20 bp, Artificial Sequence
  Description of Artificial Sequence: Synthetic oligonucleotide
  Target: PCSK9; (+) strand; PAM type: NRG; PAM sequence: AGG
gcttgcatacctctgagacc

SEQ ID NO: 15866 - DNA, 20 bp, Artificial Sequence
  Description of Artificial Sequence: Synthetic oligonucleotide
  Target: PCSK9; (+) strand; PAM type: NRG; PAM sequence: GGG
cttgcatacctctgagacca

SEQ ID NO: 15867 - DNA, 20 bp, Artificial Sequence
  Description of Artificial Sequence: Synthetic oligonucleotide
  Target: PCSK9; (+) strand; PAM type: NRG; PAM sequence: GGG
ttgcatacctctgagaccag

SEQ ID NO: 15868 - DNA, 20 bp, Artificial Sequence
  Description of Artificial Sequence: Synthetic oligonucleotide
  Target: PCSK9; (+) strand; PAM type: NRG; PAM sequence: TGG
gactcactcacttgcatgac

SEQ ID NO: 15869 - DNA, 20 bp, Artificial Sequence
  Description of Artificial Sequence: Synthetic oligonucleotide
  Target: PCSK9; (+) strand; PAM type: NRG; PAM sequence: GGG
actcactcacttgcatgact

SEQ ID NO: 15870 - DNA, 20 bp, Artificial Sequence
  Description of Artificial Sequence: Synthetic oligonucleotide
  Target: PCSK9; (+) strand; PAM type: NRG; PAM sequence: CAG
acttgcatgactgggccctg

SEQ ID NO: 15871 - DNA, 20 bp, Artificial Sequence
  Description of Artificial Sequence: Synthetic oligonucleotide
  Target: PCSK9; (+) strand; PAM type: NRG; PAM sequence: AGG
cttgcatgactgggccctgc

SEQ ID NO: 15872 - DNA, 20 bp, Artificial Sequence
  Description of Artificial Sequence: Synthetic oligonucleotide
  Target: PCSK9; (+) strand; PAM type: NRG; PAM sequence: TGG
ctgggccctgcaggtcacac

SEQ ID NO: 15873 - DNA, 20 bp, Artificial Sequence
  Description of Artificial Sequence: Synthetic oligonucleotide
  Target: PCSK9; (+) strand; PAM type: NRG; PAM sequence: CAG
gccctgcaggtcacactggc

SEQ ID NO: 15874 - DNA, 20 bp, Artificial Sequence
  Description of Artificial Sequence: Synthetic oligonucleotide
  Target: PCSK9; (+) strand; PAM type: NRG; PAM sequence: AGG
ccctgcaggtcacactggcc

SEQ ID NO: 15875 - DNA, 20 bp, Artificial Sequence
  Description of Artificial Sequence: Synthetic oligonucleotide
  Target: PCSK9; (+) strand; PAM type: NRG; PAM sequence: CAG
tgcaggtcacactggccagg

SEQ ID NO: 15876 - DNA, 20 bp, Artificial Sequence
  Description of Artificial Sequence: Synthetic oligonucleotide
  Target: PCSK9; (+) strand; PAM type: NRG; PAM sequence: TGG
tcacactggccaggcagatg

SEQ ID NO: 15877 - DNA, 20 bp, Artificial Sequence
  Description of Artificial Sequence: Synthetic oligonucleotide
  Target: PCSK9; (+) strand; PAM type: NRG; PAM sequence: TGG
cactggccaggcagatgtgg

SEQ ID NO: 15878 - DNA, 20 bp, Artificial Sequence
  Description of Artificial Sequence: Synthetic oligonucleotide
  Target: PCSK9; (+) strand; PAM type: NRG; PAM sequence: GAG
ctggccaggcagatgtggtg

SEQ ID NO: 15879 - DNA, 20 bp, Artificial Sequence
  Description of Artificial Sequence: Synthetic oligonucleotide
  Target: PCSK9; (+) strand; PAM type: NRG; PAM sequence: AGG
tggccaggcagatgtggtgg

SEQ ID NO: 15880 - DNA, 20 bp, Artificial Sequence
  Description of Artificial Sequence: Synthetic oligonucleotide
  Target: PCSK9; (+) strand; PAM type: NRG; PAM sequence: TGG
ggcagatgtggtggaggaac

SEQ ID NO: 15881 - DNA, 20 bp, Artificial Sequence
  Description of Artificial Sequence: Synthetic oligonucleotide
  Target: PCSK9; (+) strand; PAM type: NRG; PAM sequence: CAG
agatgtggtggaggaactgg

SEQ ID NO: 15882 - DNA, 20 bp, Artificial Sequence
  Description of Artificial Sequence: Synthetic oligonucleotide
  Target: PCSK9; (+) strand; PAM type: NRG; PAM sequence: GAG
atgtggtggaggaactggca

SEQ ID NO: 15883 - DNA, 20 bp, Artificial Sequence
  Description of Artificial Sequence: Synthetic oligonucleotide
  Target: PCSK9; (+) strand; PAM type: NRG; PAM sequence: AGG
tgtggtggaggaactggcag

SEQ ID NO: 15884 - DNA, 20 bp, Artificial Sequence
  Description of Artificial Sequence: Synthetic oligonucleotide
  Target: PCSK9; (+) strand; PAM type: NRG; PAM sequence: TAG
aactggcagaggactttttc

SEQ ID NO: 15885 - DNA, 20 bp, Artificial Sequence
  Description of Artificial Sequence: Synthetic oligonucleotide
  Target: PCSK9; (+) strand; PAM type: NRG; PAM sequence: TAG
ttctagactgtgactacatt

SEQ ID NO: 15886 - DNA, 20 bp, Artificial Sequence
  Description of Artificial Sequence: Synthetic oligonucleotide
  Target: PCSK9; (+) strand; PAM type: NRG; PAM sequence: CAG
gtgactacatttagtccacc

SEQ ID NO: 15887 - DNA, 20 bp, Artificial Sequence
  Description of Artificial Sequence: Synthetic oligonucleotide
  Target: PCSK9; (+) strand; PAM type: NRG; PAM sequence: CGG
actacatttagtccacccag

SEQ ID NO: 15888 - DNA, 20 bp, Artificial Sequence
  Description of Artificial Sequence: Synthetic oligonucleotide
  Target: PCSK9; (+) strand; PAM type: NRG; PAM sequence: AAG
cacccagcggcccccctatg

SEQ ID NO: 15889 - DNA, 20 bp, Artificial Sequence
  Description of Artificial Sequence: Synthetic oligonucleotide
  Target: PCSK9; (+) strand; PAM type: NRG; PAM sequence: CAG
agcggcccccctatgaagtc

SEQ ID NO: 15890 - DNA, 20 bp, Artificial Sequence
  Description of Artificial Sequence: Synthetic oligonucleotide
  Target: PCSK9; (+) strand; PAM type: NRG; PAM sequence: GAG
cccccctatgaagtccagtt

SEQ ID NO: 15891 - DNA, 20 bp, Artificial Sequence
  Description of Artificial Sequence: Synthetic oligonucleotide
  Target: PCSK9; (+) strand; PAM type: NRG; PAM sequence: TAG
tatgaagtccagttgagaac

SEQ ID NO: 15892 - DNA, 20 bp, Artificial Sequence
  Description of Artificial Sequence: Synthetic oligonucleotide
  Target: PCSK9; (+) strand; PAM type: NRG; PAM sequence: AGG
atgaagtccagttgagaact

SEQ ID NO: 15893 - DNA, 20 bp, Artificial Sequence
  Description of Artificial Sequence: Synthetic oligonucleotide
  Target: PCSK9; (+) strand; PAM type: NRG; PAM sequence: TGG
ccagttgagaactaggactc

SEQ ID NO: 15894 - DNA, 20 bp, Artificial Sequence
  Description of Artificial Sequence: Synthetic oligonucleotide
  Target: PCSK9; (+) strand; PAM type: NRG; PAM sequence: GGG
cagttgagaactaggactct

SEQ ID NO: 15895 - DNA, 20 bp, Artificial Sequence
  Description of Artificial Sequence: Synthetic oligonucleotide
  Target: PCSK9; (+) strand; PAM type: NRG; PAM sequence: GGG
agttgagaactaggactctg

SEQ ID NO: 15896 - DNA, 20 bp, Artificial Sequence
  Description of Artificial Sequence: Synthetic oligonucleotide
  Target: PCSK9; (+) strand; PAM type: NRG; PAM sequence: GGG
gttgagaactaggactctgg

SEQ ID NO: 15897 - DNA, 20 bp, Artificial Sequence
  Description of Artificial Sequence: Synthetic oligonucleotide
  Target: PCSK9; (+) strand; PAM type: NRG; PAM sequence: CGG
agaactaggactctgggggc

SEQ ID NO: 15898 - DNA, 20 bp, Artificial Sequence
  Description of Artificial Sequence: Synthetic oligonucleotide
  Target: PCSK9; (+) strand; PAM type: NRG; PAM sequence: TGG
actaggactctgggggccgg

SEQ ID NO: 15899 - DNA, 20 bp, Artificial Sequence
  Description of Artificial Sequence: Synthetic oligonucleotide
  Target: PCSK9; (+) strand; PAM type: NRG; PAM sequence: CAG
ggactctgggggccggtgga

SEQ ID NO: 15900 - DNA, 20 bp, Artificial Sequence
  Description of Artificial Sequence: Synthetic oligonucleotide
  Target: PCSK9; (+) strand; PAM type: NRG; PAM sequence: GAG
actctgggggccggtggaca

SEQ ID NO: 15901 - DNA, 20 bp, Artificial Sequence
  Description of Artificial Sequence: Synthetic oligonucleotide
  Target: PCSK9; (+) strand; PAM type: NRG; PAM sequence: AAG
ctgggggccggtggacagag

SEQ ID NO: 15902 - DNA, 20 bp, Artificial Sequence
  Description of Artificial Sequence: Synthetic oligonucleotide
  Target: PCSK9; (+) strand; PAM type: NRG; PAM sequence: GAG
gggggccggtggacagagaa

SEQ ID NO: 15903 - DNA, 20 bp, Artificial Sequence
  Description of Artificial Sequence: Synthetic oligonucleotide
  Target: PCSK9; (+) strand; PAM type: NRG; PAM sequence: AGG
ggggccggtggacagagaag

SEQ ID NO: 15904 - DNA, 20 bp, Artificial Sequence
  Description of Artificial Sequence: Synthetic oligonucleotide
  Target: PCSK9; (+) strand; PAM type: NRG; PAM sequence: GGG
gggccggtggacagagaaga

SEQ ID NO: 15905 - DNA, 20 bp, Artificial Sequence
  Description of Artificial Sequence: Synthetic oligonucleotide
  Target: PCSK9; (+) strand; PAM type: NRG; PAM sequence: GAG
gccggtggacagagaagagg

SEQ ID NO: 15906 - DNA, 20 bp, Artificial Sequence
  Description of Artificial Sequence: Synthetic oligonucleotide
  Target: PCSK9; (+) strand; PAM type: NRG; PAM sequence: AGG
ccggtggacagagaagaggg

SEQ ID NO: 15907 - DNA, 20 bp, Artificial Sequence
  Description of Artificial Sequence: Synthetic oligonucleotide
  Target: PCSK9; (+) strand; PAM type: NRG; PAM sequence: GGG
cggtggacagagaagaggga

SEQ ID NO: 15908 - DNA, 20 bp, Artificial Sequence
  Description of Artificial Sequence: Synthetic oligonucleotide
  Target: PCSK9; (+) strand; PAM type: NRG; PAM sequence: TGG
cccttactgacttccttctg

SEQ ID NO: 15909 - DNA, 20 bp, Artificial Sequence
  Description of Artificial Sequence: Synthetic oligonucleotide
  Target: PCSK9; (+) strand; PAM type: NRG; PAM sequence: CAG
tactgacttccttctgtggc

SEQ ID NO: 15910 - DNA, 20 bp, Artificial Sequence
  Description of Artificial Sequence: Synthetic oligonucleotide
  Target: PCSK9; (+) strand; PAM type: NRG; PAM sequence: GAG
tccttctgtggccagacatt

SEQ ID NO: 15911 - DNA, 20 bp, Artificial Sequence
  Description of Artificial Sequence: Synthetic oligonucleotide
  Target: PCSK9; (+) strand; PAM type: NRG; PAM sequence: AAG
tctgtggccagacattgagc

SEQ ID NO: 15912 - DNA, 20 bp, Artificial Sequence
  Description of Artificial Sequence: Synthetic oligonucleotide
  Target: PCSK9; (+) strand; PAM type: NRG; PAM sequence: AGG
ctgtggccagacattgagca

SEQ ID NO: 15913 - DNA, 20 bp, Artificial Sequence
  Description of Artificial Sequence: Synthetic oligonucleotide
  Target: PCSK9; (+) strand; PAM type: NRG; PAM sequence: CAG
cattgagcaaggcctctgta

SEQ ID NO: 15914 - DNA, 20 bp, Artificial Sequence
  Description of Artificial Sequence: Synthetic oligonucleotide
  Target: PCSK9; (+) strand; PAM type: NRG; PAM sequence: TGG
ggcctctgtacagcatgtcc

SEQ ID NO: 15915 - DNA, 20 bp, Artificial Sequence
  Description of Artificial Sequence: Synthetic oligonucleotide
  Target: PCSK9; (+) strand; PAM type: NRG; PAM sequence: GGG
gcctctgtacagcatgtcct

SEQ ID NO: 15916 - DNA, 20 bp, Artificial Sequence
  Description of Artificial Sequence: Synthetic oligonucleotide
  Target: PCSK9; (+) strand; PAM type: NRG; PAM sequence: GGG
cctctgtacagcatgtcctg

SEQ ID NO: 15917 - DNA, 20 bp, Artificial Sequence
  Description of Artificial Sequence: Synthetic oligonucleotide
  Target: PCSK9; (+) strand; PAM type: NRG; PAM sequence: TGG
tgtacagcatgtcctggggc

SEQ ID NO: 15918 - DNA, 20 bp, Artificial Sequence
  Description of Artificial Sequence: Synthetic oligonucleotide
  Target: PCSK9; (+) strand; PAM type: NRG; PAM sequence: TAG
tcctggggctggccttgccg

SEQ ID NO: 15919 - DNA, 20 bp, Artificial Sequence
  Description of Artificial Sequence: Synthetic oligonucleotide
  Target: PCSK9; (+) strand; PAM type: NRG; PAM sequence: TAG
gccttgccgtagctgctaaa

SEQ ID NO: 15920 - DNA, 20 bp, Artificial Sequence
  Description of Artificial Sequence: Synthetic oligonucleotide
  Target: PCSK9; (+) strand; PAM type: NRG; PAM sequence: CAG
tgctaaatagttgacgaaac

SEQ ID NO: 15921 - DNA, 20 bp, Artificial Sequence
  Description of Artificial Sequence: Synthetic oligonucleotide
  Target: PCSK9; (+) strand; PAM type: NRG; PAM sequence: CAG
aatagttgacgaaaccagtc

SEQ ID NO: 15922 - DNA, 20 bp, Artificial Sequence
  Description of Artificial Sequence: Synthetic oligonucleotide
  Target: PCSK9; (+) strand; PAM type: NRG; PAM sequence: GAG
tagttgacgaaaccagtcca

SEQ ID NO: 15923 - DNA, 20 bp, Artificial Sequence
  Description of Artificial Sequence: Synthetic oligonucleotide
  Target: PCSK9; (+) strand; PAM type: NRG; PAM sequence: GAG
gttgacgaaaccagtccaga

SEQ ID NO: 15924 - DNA, 20 bp, Artificial Sequence
  Description of Artificial Sequence: Synthetic oligonucleotide
  Target: PCSK9; (+) strand; PAM type: NRG; PAM sequence: AGG
ttgacgaaaccagtccagag

SEQ ID NO: 15925 - DNA, 20 bp, Artificial Sequence
  Description of Artificial Sequence: Synthetic oligonucleotide
  Target: PCSK9; (+) strand; PAM type: NRG; PAM sequence: GGG
tgacgaaaccagtccagaga

SEQ ID NO: 15926 - DNA, 20 bp, Artificial Sequence
  Description of Artificial Sequence: Synthetic oligonucleotide
  Target: PCSK9; (+) strand; PAM type: NRG; PAM sequence: GGG
gacgaaaccagtccagagag

SEQ ID NO: 15927 - DNA, 20 bp, Artificial Sequence
  Description of Artificial Sequence: Synthetic oligonucleotide
  Target: PCSK9; (+) strand; PAM type: NRG; PAM sequence: GAG
cgaaaccagtccagagaggg

SEQ ID NO: 15928 - DNA, 20 bp, Artificial Sequence
  Description of Artificial Sequence: Synthetic oligonucleotide
  Target: PCSK9; (+) strand; PAM type: NRG; PAM sequence: AGG
gaaaccagtccagagagggg

SEQ ID NO: 15929 - DNA, 20 bp, Artificial Sequence
  Description of Artificial Sequence: Synthetic oligonucleotide
  Target: PCSK9; (+) strand; PAM type: NRG; PAM sequence: CAG
cagagaggggaggtgactgc

SEQ ID NO: 15930 - DNA, 20 bp, Artificial Sequence
  Description of Artificial Sequence: Synthetic oligonucleotide
  Target: PCSK9; (+) strand; PAM type: NRG; PAM sequence: AGG
agagaggggaggtgactgcc

SEQ ID NO: 15931 - DNA, 20 bp, Artificial Sequence
  Description of Artificial Sequence: Synthetic oligonucleotide
  Target: PCSK9; (+) strand; PAM type: NRG; PAM sequence: GGG
gagaggggaggtgactgcca

SEQ ID NO: 15932 - DNA, 20 bp, Artificial Sequence
  Description of Artificial Sequence: Synthetic oligonucleotide
  Target: PCSK9; (+) strand; PAM type: NRG; PAM sequence: CAG
aggtgactgccagggtcgca

SEQ ID NO: 15933 - DNA, 20 bp, Artificial Sequence
  Description of Artificial Sequence: Synthetic oligonucleotide
  Target: PCSK9; (+) strand; PAM type: NRG; PAM sequence: AAG
ctgccagggtcgcacagctc

SEQ ID NO: 15934 - DNA, 20 bp, Artificial Sequence
  Description of Artificial Sequence: Synthetic oligonucleotide
  Target: PCSK9; (+) strand; PAM type: NRG; PAM sequence: TGG
cagggtcgcacagctcaagc

SEQ ID NO: 15935 - DNA, 20 bp, Artificial Sequence
  Description of Artificial Sequence: Synthetic oligonucleotide
  Target: PCSK9; (+) strand; PAM type: NRG; PAM sequence: GGG
agggtcgcacagctcaagct

SEQ ID NO: 15936 - DNA, 20 bp, Artificial Sequence
  Description of Artificial Sequence: Synthetic oligonucleotide
  Target: PCSK9; (+) strand; PAM type: NRG; PAM sequence: GGG
gggtcgcacagctcaagctg

SEQ ID NO: 15937 - DNA, 20 bp, Artificial Sequence
  Description of Artificial Sequence: Synthetic oligonucleotide
  Target: PCSK9; (+) strand; PAM type: NRG; PAM sequence: TGG
gctcaagctggggaactcgc

SEQ ID NO: 15938 - DNA, 20 bp, Artificial Sequence
  Description of Artificial Sequence: Synthetic oligonucleotide
  Target: PCSK9; (+) strand; PAM type: NRG; PAM sequence: GGG
ctcaagctggggaactcgct

SEQ ID NO: 15939 - DNA, 20 bp, Artificial Sequence
  Description of Artificial Sequence: Synthetic oligonucleotide
  Target: PCSK9; (+) strand; PAM type: NRG; PAM sequence: CAG
gaactcgctgggaaaactgt

SEQ ID NO: 15940 - DNA, 20 bp, Artificial Sequence
  Description of Artificial Sequence: Synthetic oligonucleotide
  Target: PCSK9; (+) strand; PAM type: NRG; PAM sequence: TGG
gctgggaaaactgtcagctc

SEQ ID NO: 15941 - DNA, 20 bp, Artificial Sequence
  Description of Artificial Sequence: Synthetic oligonucleotide
  Target: PCSK9; (+) strand; PAM type: NRG; PAM sequence: GGG
ctgggaaaactgtcagctct

SEQ ID NO: 15942 - DNA, 20 bp, Artificial Sequence
  Description of Artificial Sequence: Synthetic oligonucleotide
  Target: PCSK9; (+) strand; PAM type: NRG; PAM sequence: CAG
ggaaaactgtcagctctggg

SEQ ID NO: 15943 - DNA, 20 bp, Artificial Sequence
  Description of Artificial Sequence: Synthetic oligonucleotide
  Target: PCSK9; (+) strand; PAM type: NRG; PAM sequence: CAG
aaactgtcagctctgggcag

SEQ ID NO: 15944 - DNA, 20 bp, Artificial Sequence
  Description of Artificial Sequence: Synthetic oligonucleotide
  Target: PCSK9; (+) strand; PAM type: NRG; PAM sequence: AAG
agcagcttgacttccactgt

SEQ ID NO: 15945 - DNA, 20 bp, Artificial Sequence
  Description of Artificial Sequence: Synthetic oligonucleotide
  Target: PCSK9; (+) strand; PAM type: NRG; PAM sequence: CAG
ttgacttccactgtaagccc

SEQ ID NO: 15946 - DNA, 20 bp, Artificial Sequence
  Description of Artificial Sequence: Synthetic oligonucleotide
  Target: PCSK9; (+) strand; PAM type: NRG; PAM sequence: CAG
ccactgtaagccccagcccc

SEQ ID NO: 15947 - DNA, 20 bp, Artificial Sequence
  Description of Artificial Sequence: Synthetic oligonucleotide
  Target: PCSK9; (+) strand; PAM type: NRG; PAM sequence: AGG
cactgtaagccccagccccc

SEQ ID NO: 15948 - DNA, 20 bp, Artificial Sequence
  Description of Artificial Sequence: Synthetic oligonucleotide
  Target: PCSK9; (+) strand; PAM type: NRG; PAM sequence: GGG
actgtaagccccagccccca

SEQ ID NO: 15949 - DNA, 20 bp, Artificial Sequence
  Description of Artificial Sequence: Synthetic oligonucleotide
  Target: PCSK9; (+) strand; PAM type: NRG; PAM sequence: TGG
cagcccccagggtcaaacac

SEQ ID NO: 15950 - DNA, 20 bp, Artificial Sequence
  Description of Artificial Sequence: Synthetic oligonucleotide
  Target: PCSK9; (+) strand; PAM type: NRG; PAM sequence: TGG
ccagggtcaaacactggctc

SEQ ID NO: 15951 - DNA, 20 bp, Artificial Sequence
  Description of Artificial Sequence: Synthetic oligonucleotide
  Target: PCSK9; (+) strand; PAM type: NRG; PAM sequence: TGG
tcaaacactggctctggtgc

SEQ ID NO: 15952 - DNA, 20 bp, Artificial Sequence
  Description of Artificial Sequence: Synthetic oligonucleotide
  Target: PCSK9; (+) strand; PAM type: NRG; PAM sequence: CAG
aacactggctctggtgctgg

SEQ ID NO: 15953 - DNA, 20 bp, Artificial Sequence
  Description of Artificial Sequence: Synthetic oligonucleotide
  Target: PCSK9; (+) strand; PAM type: NRG; PAM sequence: GAG
cactggctctggtgctggca

SEQ ID NO: 15954 - DNA, 20 bp, Artificial Sequence
  Description of Artificial Sequence: Synthetic oligonucleotide
  Target: PCSK9; (+) strand; PAM type: NRG; PAM sequence: AGG
actggctctggtgctggcag

SEQ ID NO: 15955 - DNA, 20 bp, Artificial Sequence
  Description of Artificial Sequence: Synthetic oligonucleotide
  Target: PCSK9; (+) strand; PAM type: NRG; PAM sequence: CAG
ggctctggtgctggcagagg

SEQ ID NO: 15956 - DNA, 20 bp, Artificial Sequence
  Description of Artificial Sequence: Synthetic oligonucleotide
  Target: PCSK9; (+) strand; PAM type: NRG; PAM sequence: TAG
tgctggcagaggcagcccac

SEQ ID NO: 15957 - DNA, 20 bp, Artificial Sequence
  Description of Artificial Sequence: Synthetic oligonucleotide
  Target: PCSK9; (+) strand; PAM type: NRG; PAM sequence: AAG
cagcccactagcctgtttca

SEQ ID NO: 15958 - DNA, 20 bp, Artificial Sequence
  Description of Artificial Sequence: Synthetic oligonucleotide
  Target: PCSK9; (+) strand; PAM type: NRG; PAM sequence: AGG
agcccactagcctgtttcaa

SEQ ID NO: 15959 - DNA, 20 bp, Artificial Sequence
  Description of Artificial Sequence: Synthetic oligonucleotide
  Target: PCSK9; (+) strand; PAM type: NRG; PAM sequence: GAG
actagcctgtttcaaaggct

SEQ ID NO: 15960 - DNA, 20 bp, Artificial Sequence
  Description of Artificial Sequence: Synthetic oligonucleotide
  Target: PCSK9; (+) strand; PAM type: NRG; PAM sequence: AAG
agcctgtttcaaaggctgag

SEQ ID NO: 15961 - DNA, 20 bp, Artificial Sequence
  Description of Artificial Sequence: Synthetic oligonucleotide
  Target: PCSK9; (+) strand; PAM type: NRG; PAM sequence: AGG
gcctgtttcaaaggctgaga

SEQ ID NO: 15962 - DNA, 20 bp, Artificial Sequence
  Description of Artificial Sequence: Synthetic oligonucleotide
  Target: PCSK9; (+) strand; PAM type: NRG; PAM sequence: CAG
tttcaaaggctgagaaggcc

SEQ ID NO: 15963 - DNA, 20 bp, Artificial Sequence
  Description of Artificial Sequence: Synthetic oligonucleotide
  Target: PCSK9; (+) strand; PAM type: NRG; PAM sequence: AGG
ttcaaaggctgagaaggccc

SEQ ID NO: 15964 - DNA, 20 bp, Artificial Sequence
  Description of Artificial Sequence: Synthetic oligonucleotide
  Target: PCSK9; (+) strand; PAM type: NRG; PAM sequence: GAG
caaaggctgagaaggcccag

SEQ ID NO: 15965 - DNA, 20 bp, Artificial Sequence
  Description of Artificial Sequence: Synthetic oligonucleotide
  Target: PCSK9; (+) strand; PAM type: NRG; PAM sequence: CAG
gagtctgccctgtgctccac

SEQ ID NO: 15966 - DNA, 20 bp, Artificial Sequence
  Description of Artificial Sequence: Synthetic oligonucleotide
  Target: PCSK9; (+) strand; PAM type: NRG; PAM sequence: GAG
tgctccaccagttctgccct

SEQ ID NO: 15967 - DNA, 20 bp, Artificial Sequence
  Description of Artificial Sequence: Synthetic oligonucleotide
  Target: PCSK9; (+) strand; PAM type: NRG; PAM sequence: CAG
tctgccctgagactttccta

SEQ ID NO: 15968 - DNA, 20 bp, Artificial Sequence
  Description of Artificial Sequence: Synthetic oligonucleotide
  Target: PCSK9; (+) strand; PAM type: NRG; PAM sequence: GAG
tgccctgagactttcctaca

SEQ ID NO: 15969 - DNA, 20 bp, Artificial Sequence
  Description of Artificial Sequence: Synthetic oligonucleotide
  Target: PCSK9; (+) strand; PAM type: NRG; PAM sequence: CAG
tgagactttcctacagagta

SEQ ID NO: 15970 - DNA, 20 bp, Artificial Sequence
  Description of Artificial Sequence: Synthetic oligonucleotide
  Target: PCSK9; (+) strand; PAM type: NRG; PAM sequence: AGG
gagactttcctacagagtac

SEQ ID NO: 15971 - DNA, 20 bp, Artificial Sequence
  Description of Artificial Sequence: Synthetic oligonucleotide
  Target: PCSK9; (+) strand; PAM type: NRG; PAM sequence: CAG
agagtacaggttttgatgtt

SEQ ID NO: 15972 - DNA, 20 bp, Artificial Sequence
  Description of Artificial Sequence: Synthetic oligonucleotide
  Target: PCSK9; (+) strand; PAM type: NRG; PAM sequence: AAG
ggttttgatgttcagtttta

SEQ ID NO: 15973 - DNA, 20 bp, Artificial Sequence
  Description of Artificial Sequence: Synthetic oligonucleotide
  Target: PCSK9; (+) strand; PAM type: NRG; PAM sequence: AGG
gttttgatgttcagttttaa

SEQ ID NO: 15974 - DNA, 20 bp, Artificial Sequence
  Description of Artificial Sequence: Synthetic oligonucleotide
  Target: PCSK9; (+) strand; PAM type: NRG; PAM sequence: AAG
tgatgttcagttttaaaggc

SEQ ID NO: 15975 - DNA, 20 bp, Artificial Sequence
  Description of Artificial Sequence: Synthetic oligonucleotide
  Target: PCSK9; (+) strand; PAM type: NRG; PAM sequence: CAG
tcaataaccttctgccccat

SEQ ID NO: 15976 - DNA, 20 bp, Artificial Sequence
  Description of Artificial Sequence: Synthetic oligonucleotide
  Target: PCSK9; (+) strand; PAM type: NRG; PAM sequence: AGG
caataaccttctgccccatc

SEQ ID NO: 15977 - DNA, 20 bp, Artificial Sequence
  Description of Artificial Sequence: Synthetic oligonucleotide
  Target: PCSK9; (+) strand; PAM type: NRG; PAM sequence: CGG
acccctttattgactgacct

SEQ ID NO: 15978 - DNA, 20 bp, Artificial Sequence
  Description of Artificial Sequence: Synthetic oligonucleotide
  Target: PCSK9; (+) strand; PAM type: NRG; PAM sequence: CAG
tttattgactgacctcggct

SEQ ID NO: 15979 - DNA, 20 bp, Artificial Sequence
  Description of Artificial Sequence: Synthetic oligonucleotide
  Target: PCSK9; (+) strand; PAM type: NRG; PAM sequence: CAG
ttgactgacctcggctcagt

SEQ ID NO: 15980 - DNA, 20 bp, Artificial Sequence
  Description of Artificial Sequence: Synthetic oligonucleotide
  Target: PCSK9; (+) strand; PAM type: NRG; PAM sequence: AGG
tgactgacctcggctcagtc

SEQ ID NO: 15981 - DNA, 20 bp, Artificial Sequence
  Description of Artificial Sequence: Synthetic oligonucleotide
  Target: PCSK9; (+) strand; PAM type: NRG; PAM sequence: CAG
tgacctcggctcagtcaggt

SEQ ID NO: 15982 - DNA, 20 bp, Artificial Sequence
  Description of Artificial Sequence: Synthetic oligonucleotide
  Target: PCSK9; (+) strand; PAM type: NRG; PAM sequence: AAG
ctcagtcaggtcagttcctg

SEQ ID NO: 15983 - DNA, 20 bp, Artificial Sequence
  Description of Artificial Sequence: Synthetic oligonucleotide
  Target: PCSK9; (+) strand; PAM type: NRG; PAM sequence: AGG
tcagtcaggtcagttcctga

SEQ ID NO: 15984 - DNA, 20 bp, Artificial Sequence
  Description of Artificial Sequence: Synthetic oligonucleotide
  Target: PCSK9; (+) strand; PAM type: NRG; PAM sequence: CAG
tcaggtcagttcctgaaggt

SEQ ID NO: 15985 - DNA, 20 bp, Artificial Sequence
  Description of Artificial Sequence: Synthetic oligonucleotide
  Target: PCSK9; (+) strand; PAM type: NRG; PAM sequence: TGG
agttcctgaaggtcagtgtg

SEQ ID NO: 15986 - DNA, 20 bp, Artificial Sequence
  Description of Artificial Sequence: Synthetic oligonucleotide
  Target: PCSK9; (+) strand; PAM type: NRG; PAM sequence: GAG
ttcctgaaggtcagtgtgtg

SEQ ID NO: 15987 - DNA, 20 bp, Artificial Sequence
  Description of Artificial Sequence: Synthetic oligonucleotide
  Target: PCSK9; (+) strand; PAM type: NRG; PAM sequence: AGG
tcctgaaggtcagtgtgtgg

SEQ ID NO: 15988 - DNA, 20 bp, Artificial Sequence
  Description of Artificial Sequence: Synthetic oligonucleotide
  Target: PCSK9; (+) strand; PAM type: NRG; PAM sequence: GGG
cctgaaggtcagtgtgtgga

SEQ ID NO: 15989 - DNA, 20 bp, Artificial Sequence
  Description of Artificial Sequence: Synthetic oligonucleotide
  Target: PCSK9; (+) strand; PAM type: NRG; PAM sequence: GGG
ctgaaggtcagtgtgtggag

SEQ ID NO: 15990 - DNA, 20 bp, Artificial Sequence
  Description of Artificial Sequence: Synthetic oligonucleotide
  Target: PCSK9; (+) strand; PAM type: NRG; PAM sequence: GAG
gaaggtcagtgtgtggaggg

SEQ ID NO: 15991 - DNA, 20 bp, Artificial Sequence
  Description of Artificial Sequence: Synthetic oligonucleotide
  Target: PCSK9; (+) strand; PAM type: NRG; PAM sequence: AGG
aaggtcagtgtgtggagggg

SEQ ID NO: 15992 - DNA, 20 bp, Artificial Sequence
  Description of Artificial Sequence: Synthetic oligonucleotide
  Target: PCSK9; (+) strand; PAM type: NRG; PAM sequence: CAG
gaggggaggctgttctttcc

SEQ ID NO: 15993 - DNA, 20 bp, Artificial Sequence
  Description of Artificial Sequence: Synthetic oligonucleotide
  Target: PCSK9; (+) strand; PAM type: NRG; PAM sequence: AAG
ggaggctgttctttcccaga

SEQ ID NO: 15994 - DNA, 20 bp, Artificial Sequence
  Description of Artificial Sequence: Synthetic oligonucleotide
  Target: PCSK9; (+) strand; PAM type: NRG; PAM sequence: AGG
gaggctgttctttcccagaa

SEQ ID NO: 15995 - DNA, 20 bp, Artificial Sequence
  Description of Artificial Sequence: Synthetic oligonucleotide
  Target: PCSK9; (+) strand; PAM type: NRG; PAM sequence: CAG
tttcccagaaaggccttccc

SEQ ID NO: 15996 - DNA, 20 bp, Artificial Sequence
  Description of Artificial Sequence: Synthetic oligonucleotide
  Target: PCSK9; (+) strand; PAM type: NRG; PAM sequence: AGG
ttcccagaaaggccttcccc

SEQ ID NO: 15997 - DNA, 20 bp, Artificial Sequence
  Description of Artificial Sequence: Synthetic oligonucleotide
  Target: PCSK9; (+) strand; PAM type: NRG; PAM sequence: TGG
agaaaggccttccccaggcc

SEQ ID NO: 15998 - DNA, 20 bp, Artificial Sequence
  Description of Artificial Sequence: Synthetic oligonucleotide
  Target: PCSK9; (+) strand; PAM type: NRG; PAM sequence: TGG
cttccccaggcctggtgctc

SEQ ID NO: 15999 - DNA, 20 bp, Artificial Sequence
  Description of Artificial Sequence: Synthetic oligonucleotide
  Target: PCSK9; (+) strand; PAM type: NRG; PAM sequence: TGG
aggcctggtgctctggcctc

SEQ ID NO: 16000 - DNA, 20 bp, Artificial Sequence
  Description of Artificial Sequence: Synthetic oligonucleotide
  Target: PCSK9; (+) strand; PAM type: NRG; PAM sequence: GAG
gcctggtgctctggcctctg

SEQ ID NO: 16001 - DNA, 20 bp, Artificial Sequence
  Description of Artificial Sequence: Synthetic oligonucleotide
  Target: PCSK9; (+) strand; PAM type: NRG; PAM sequence: AGG
cctggtgctctggcctctgg

SEQ ID NO: 16002 - DNA, 20 bp, Artificial Sequence
  Description of Artificial Sequence: Synthetic oligonucleotide
  Target: PCSK9; (+) strand; PAM type: NRG; PAM sequence: TGG
ctggcctctggaggacttcc

SEQ ID NO: 16003 - DNA, 20 bp, Artificial Sequence
  Description of Artificial Sequence: Synthetic oligonucleotide
  Target: PCSK9; (+) strand; PAM type: NRG; PAM sequence: GAG
ggcctctggaggacttcctg

SEQ ID NO: 16004 - DNA, 20 bp, Artificial Sequence
  Description of Artificial Sequence: Synthetic oligonucleotide
  Target: PCSK9; (+) strand; PAM type: NRG; PAM sequence: AAG
ctctggaggacttcctggag

SEQ ID NO: 16005 - DNA, 20 bp, Artificial Sequence
  Description of Artificial Sequence: Synthetic oligonucleotide
  Target: PCSK9; (+) strand; PAM type: NRG; PAM sequence: TGG
tcctggagaagtcccttctt

SEQ ID NO: 16006 - DNA, 20 bp, Artificial Sequence
  Description of Artificial Sequence: Synthetic oligonucleotide
  Target: PCSK9; (+) strand; PAM type: NRG; PAM sequence: GGG
cctggagaagtcccttcttt

SEQ ID NO: 16007 - DNA, 20 bp, Artificial Sequence
  Description of Artificial Sequence: Synthetic oligonucleotide
  Target: PCSK9; (+) strand; PAM type: NRG; PAM sequence: GGG
ctggagaagtcccttctttg

SEQ ID NO: 16008 - DNA, 20 bp, Artificial Sequence
  Description of Artificial Sequence: Synthetic oligonucleotide
  Target: PCSK9; (+) strand; PAM type: NRG; PAM sequence: CAG
aagtcccttctttggggtcc

SEQ ID NO: 16009 - DNA, 20 bp, Artificial Sequence
  Description of Artificial Sequence: Synthetic oligonucleotide
  Target: PCSK9; (+) strand; PAM type: NRG; PAM sequence: CAG
cccttctttggggtcccagt

SEQ ID NO: 16010 - DNA, 20 bp, Artificial Sequence
  Description of Artificial Sequence: Synthetic oligonucleotide
  Target: PCSK9; (+) strand; PAM type: NRG; PAM sequence: TGG
ttggggtcccagtcagtgta

SEQ ID NO: 16011 - DNA, 20 bp, Artificial Sequence
  Description of Artificial Sequence: Synthetic oligonucleotide
  Target: PCSK9; (+) strand; PAM type: NRG; PAM sequence: GGG
tggggtcccagtcagtgtat

SEQ ID NO: 16012 - DNA, 20 bp, Artificial Sequence
  Description of Artificial Sequence: Synthetic oligonucleotide
  Target: PCSK9; (+) strand; PAM type: NRG; PAM sequence: AAG
ggtcccagtcagtgtatggg

SEQ ID NO: 16013 - DNA, 20 bp, Artificial Sequence
  Description of Artificial Sequence: Synthetic oligonucleotide
  Target: PCSK9; (+) strand; PAM type: NRG; PAM sequence: TGG
gaagcccttattgcatgacc

SEQ ID NO: 16014 - DNA, 20 bp, Artificial Sequence
  Description of Artificial Sequence: Synthetic oligonucleotide
  Target: PCSK9; (+) strand; PAM type: NRG; PAM sequence: CGG
ccttattgcatgacctggca

SEQ ID NO: 16015 - DNA, 20 bp, Artificial Sequence
  Description of Artificial Sequence: Synthetic oligonucleotide
  Target: PCSK9; (+) strand; PAM type: NRG; PAM sequence: GGG
cttattgcatgacctggcac

SEQ ID NO: 16016 - DNA, 20 bp, Artificial Sequence
  Description of Artificial Sequence: Synthetic oligonucleotide
  Target: PCSK9; (+) strand; PAM type: NRG; PAM sequence: GGG
ttattgcatgacctggcacg

SEQ ID NO: 16017 - DNA, 20 bp, Artificial Sequence
  Description of Artificial Sequence: Synthetic oligonucleotide
  Target: PCSK9; (+) strand; PAM type: NRG; PAM sequence: CAG
ttgcatgacctggcacgggg

SEQ ID NO: 16018 - DNA, 20 bp, Artificial Sequence
  Description of Artificial Sequence: Synthetic oligonucleotide
  Target: PCSK9; (+) strand; PAM type: NRG; PAM sequence: AGG
tgcatgacctggcacggggc

SEQ ID NO: 16019 - DNA, 20 bp, Artificial Sequence
  Description of Artificial Sequence: Synthetic oligonucleotide
  Target: PCSK9; (+) strand; PAM type: NRG; PAM sequence: GGG
gcatgacctggcacggggca

SEQ ID NO: 16020 - DNA, 20 bp, Artificial Sequence
  Description of Artificial Sequence: Synthetic oligonucleotide
  Target: PCSK9; (+) strand; PAM type: NRG; PAM sequence: GGG
catgacctggcacggggcag

SEQ ID NO: 16021 - DNA, 20 bp, Artificial Sequence
  Description of Artificial Sequence: Synthetic oligonucleotide
  Target: PCSK9; (+) strand; PAM type: NRG; PAM sequence: CAG
ggcacggggcaggggctcaa

SEQ ID NO: 16022 - DNA, 20 bp, Artificial Sequence
  Description of Artificial Sequence: Synthetic oligonucleotide
  Target: PCSK9; (+) strand; PAM type: NRG; PAM sequence: AAG
actgccatttcctcctctgt

SEQ ID NO: 16023 - DNA, 20 bp, Artificial Sequence
  Description of Artificial Sequence: Synthetic oligonucleotide
  Target: PCSK9; (+) strand; PAM type: NRG; PAM sequence: CAG
gccatttcctcctctgtaag

SEQ ID NO: 16024 - DNA, 20 bp, Artificial Sequence
  Description of Artificial Sequence: Synthetic oligonucleotide
  Target: PCSK9; (+) strand; PAM type: NRG; PAM sequence: AGG
ccatttcctcctctgtaagc

SEQ ID NO: 16025 - DNA, 20 bp, Artificial Sequence
  Description of Artificial Sequence: Synthetic oligonucleotide
  Target: PCSK9; (+) strand; PAM type: NRG; PAM sequence: CAG
taagcaggtgattgtgtgtc

SEQ ID NO: 16026 - DNA, 20 bp, Artificial Sequence
  Description of Artificial Sequence: Synthetic oligonucleotide
  Target: PCSK9; (+) strand; PAM type: NRG; PAM sequence: GAG
ggtgattgtgtgtccagtct

SEQ ID NO: 16027 - DNA, 20 bp, Artificial Sequence
  Description of Artificial Sequence: Synthetic oligonucleotide
  Target: PCSK9; (+) strand; PAM type: NRG; PAM sequence: CAG
ttgtgtgtccagtctgagca

SEQ ID NO: 16028 - DNA, 20 bp, Artificial Sequence
  Description of Artificial Sequence: Synthetic oligonucleotide
  Target: PCSK9; (+) strand; PAM type: NRG; PAM sequence: GAG
gtgtgtccagtctgagcaca

SEQ ID NO: 16029 - DNA, 20 bp, Artificial Sequence
  Description of Artificial Sequence: Synthetic oligonucleotide
  Target: PCSK9; (+) strand; PAM type: NRG; PAM sequence: AAG
tccagtctgagcacagagat

SEQ ID NO: 16030 - DNA, 20 bp, Artificial Sequence
  Description of Artificial Sequence: Synthetic oligonucleotide
  Target: PCSK9; (+) strand; PAM type: NRG; PAM sequence: CAG
tgagcacagagataagcaca

SEQ ID NO: 16031 - DNA, 20 bp, Artificial Sequence
  Description of Artificial Sequence: Synthetic oligonucleotide
  Target: PCSK9; (+) strand; PAM type: NRG; PAM sequence: CAG
gcacagagataagcacacag

SEQ ID NO: 16032 - DNA, 20 bp, Artificial Sequence
  Description of Artificial Sequence: Synthetic oligonucleotide
  Target: PCSK9; (+) strand; PAM type: NRG; PAM sequence: AGG
cacagagataagcacacagc

SEQ ID NO: 16033 - DNA, 20 bp, Artificial Sequence
  Description of Artificial Sequence: Synthetic oligonucleotide
  Target: PCSK9; (+) strand; PAM type: NRG; PAM sequence: TAG
cacagcaggtgcttaataac

SEQ ID NO: 16034 - DNA, 20 bp, Artificial Sequence
  Description of Artificial Sequence: Synthetic oligonucleotide
  Target: PCSK9; (+) strand; PAM type: NRG; PAM sequence: CAG
agcaggtgcttaataactag

SEQ ID NO: 16035 - DNA, 20 bp, Artificial Sequence
  Description of Artificial Sequence: Synthetic oligonucleotide
  Target: PCSK9; (+) strand; PAM type: NRG; PAM sequence: TAG
tgcttaataactagcagctg

SEQ ID NO: 16036 - DNA, 20 bp, Artificial Sequence
  Description of Artificial Sequence: Synthetic oligonucleotide
  Target: PCSK9; (+) strand; PAM type: NRG; PAM sequence: AGG
gcttaataactagcagctgt

SEQ ID NO: 16037 - DNA, 20 bp, Artificial Sequence
  Description of Artificial Sequence: Synthetic oligonucleotide
  Target: PCSK9; (+) strand; PAM type: NRG; PAM sequence: TGG
aataactagcagctgtaggc

SEQ ID NO: 16038 - DNA, 20 bp, Artificial Sequence
  Description of Artificial Sequence: Synthetic oligonucleotide
  Target: PCSK9; (+) strand; PAM type: NRG; PAM sequence: GGG
ataactagcagctgtaggct

SEQ ID NO: 16039 - DNA, 20 bp, Artificial Sequence
  Description of Artificial Sequence: Synthetic oligonucleotide
  Target: PCSK9; (+) strand; PAM type: NRG; PAM sequence: CGG
tagcagctgtaggctgggcg

SEQ ID NO: 16040 - DNA, 20 bp, Artificial Sequence
  Description of Artificial Sequence: Synthetic oligonucleotide
  Target: PCSK9; (+) strand; PAM type: NRG; PAM sequence: TGG
cagctgtaggctgggcgcgg

SEQ ID NO: 16041 - DNA, 20 bp, Artificial Sequence
  Description of Artificial Sequence: Synthetic oligonucleotide
  Target: PCSK9; (+) strand; PAM type: NRG; PAM sequence: CAG
gtggctcatgcctgtaatcc

SEQ ID NO: 16042 - DNA, 20 bp, Artificial Sequence
  Description of Artificial Sequence: Synthetic oligonucleotide
  Target: PCSK9; (+) strand; PAM type: NRG; PAM sequence: TGG
tgcctgtaatcccagcactt

SEQ ID NO: 16043 - DNA, 20 bp, Artificial Sequence
  Description of Artificial Sequence: Synthetic oligonucleotide
  Target: PCSK9; (+) strand; PAM type: NRG; PAM sequence: GGG
gcctgtaatcccagcacttt

SEQ ID NO: 16044 - DNA, 20 bp, Artificial Sequence
  Description of Artificial Sequence: Synthetic oligonucleotide
  Target: PCSK9; (+) strand; PAM type: NRG; PAM sequence: GAG
ctgtaatcccagcactttgg

SEQ ID NO: 16045 - DNA, 20 bp, Artificial Sequence
  Description of Artificial Sequence: Synthetic oligonucleotide
  Target: PCSK9; (+) strand; PAM type: NRG; PAM sequence: AGG
tgtaatcccagcactttggg

SEQ ID NO: 16046 - DNA, 20 bp, Artificial Sequence
  Description of Artificial Sequence: Synthetic oligonucleotide
  Target: PCSK9; (+) strand; PAM type: NRG; PAM sequence: GAG
tcccagcactttgggaggcc

SEQ ID NO: 16047 - DNA, 20 bp, Artificial Sequence
  Description of Artificial Sequence: Synthetic oligonucleotide
  Target: PCSK9; (+) strand; PAM type: NRG; PAM sequence: AGG
cccagcactttgggaggccg

SEQ ID NO: 16048 - DNA, 20 bp, Artificial Sequence
  Description of Artificial Sequence: Synthetic oligonucleotide
  Target: PCSK9; (+) strand; PAM type: NRG; PAM sequence: TGG
agcactttgggaggccgagg

SEQ ID NO: 16049 - DNA, 20 bp, Artificial Sequence
  Description of Artificial Sequence: Synthetic oligonucleotide
  Target: PCSK9; (+) strand; PAM type: NRG; PAM sequence: GGG
gcactttgggaggccgaggt

SEQ ID NO: 16050 - DNA, 20 bp, Artificial Sequence
  Description of Artificial Sequence: Synthetic oligonucleotide
  Target: PCSK9; (+) strand; PAM type: NRG; PAM sequence: CAG
ctttgggaggccgaggtggg

SEQ ID NO: 16051 - DNA, 20 bp, Artificial Sequence
  Description of Artificial Sequence: Synthetic oligonucleotide
  Target: PCSK9; (+) strand; PAM type: NRG; PAM sequence: GAG
ccgaggtgggcagatcacct

SEQ ID NO: 16052 - DNA, 20 bp, Artificial Sequence
  Description of Artificial Sequence: Synthetic oligonucleotide
  Target: PCSK9; (+) strand; PAM type: NRG; PAM sequence: AGG
cgaggtgggcagatcacctg

SEQ ID NO: 16053 - DNA, 20 bp, Artificial Sequence
  Description of Artificial Sequence: Synthetic oligonucleotide
  Target: PCSK9; (+) strand; PAM type: NRG; PAM sequence: CAG
gtgggcagatcacctgaggt

SEQ ID NO: 16054 - DNA, 20 bp, Artificial Sequence
  Description of Artificial Sequence: Synthetic oligonucleotide
  Target: PCSK9; (+) strand; PAM type: NRG; PAM sequence: AGG
tgggcagatcacctgaggtc

SEQ ID NO: 16055 - DNA, 20 bp, Artificial Sequence
  Description of Artificial Sequence: Synthetic oligonucleotide
  Target: PCSK9; (+) strand; PAM type: NRG; PAM sequence: GAG
ggcagatcacctgaggtcag

SEQ ID NO: 16056 - DNA, 20 bp, Artificial Sequence
  Description of Artificial Sequence: Synthetic oligonucleotide
  Target: PCSK9; (+) strand; PAM type: NRG; PAM sequence: GAG
tcacctgaggtcaggagttc

SEQ ID NO: 16057 - DNA, 20 bp, Artificial Sequence
  Description of Artificial Sequence: Synthetic oligonucleotide
  Target: PCSK9; (+) strand; PAM type: NRG; PAM sequence: CAG
tgaggtcaggagttcgagac

SEQ ID NO: 16058 - DNA, 20 bp, Artificial Sequence
  Description of Artificial Sequence: Synthetic oligonucleotide
  Target: PCSK9; (+) strand; PAM type: NRG; PAM sequence: TGG
cgagaccagcctgttcaaca

SEQ ID NO: 16059 - DNA, 20 bp, Artificial Sequence
  Description of Artificial Sequence: Synthetic oligonucleotide
  Target: PCSK9; (+) strand; PAM type: NRG; PAM sequence: TAG
tctactaaaaatacaaaaat

SEQ ID NO: 16060 - DNA, 20 bp, Artificial Sequence
  Description of Artificial Sequence: Synthetic oligonucleotide
  Target: PCSK9; (+) strand; PAM type: NRG; PAM sequence: CAG
ctaaaaatacaaaaattagc

SEQ ID NO: 16061 - DNA, 20 bp, Artificial Sequence
  Description of Artificial Sequence: Synthetic oligonucleotide
  Target: PCSK9; (+) strand; PAM type: NRG; PAM sequence: AGG
taaaaatacaaaaattagcc

SEQ ID NO: 16062 - DNA, 20 bp, Artificial Sequence
  Description of Artificial Sequence: Synthetic oligonucleotide
  Target: PCSK9; (+) strand; PAM type: NRG; PAM sequence: TGG
atacaaaaattagccaggca

SEQ ID NO: 16063 - DNA, 20 bp, Artificial Sequence
  Description of Artificial Sequence: Synthetic oligonucleotide
  Target: PCSK9; (+) strand; PAM type: NRG; PAM sequence: TGG
caaaaattagccaggcatgg

SEQ ID NO: 16064 - DNA, 20 bp, Artificial Sequence
  Description of Artificial Sequence: Synthetic oligonucleotide
  Target: PCSK9; (+) strand; PAM type: NRG; PAM sequence: TGG
aaattagccaggcatggtgg

SEQ ID NO: 16065 - DNA, 20 bp, Artificial Sequence
  Description of Artificial Sequence: Synthetic oligonucleotide
  Target: PCSK9; (+) strand; PAM type: NRG; PAM sequence: GGG
aattagccaggcatggtggt

SEQ ID NO: 16066 - DNA, 20 bp, Artificial Sequence
  Description of Artificial Sequence: Synthetic oligonucleotide
  Target: PCSK9; (+) strand; PAM type: NRG; PAM sequence: CAG
ggtggtgggtgtctgtatcc

SEQ ID NO: 16067 - DNA, 20 bp, Artificial Sequence
  Description of Artificial Sequence: Synthetic oligonucleotide
  Target: PCSK9; (+) strand; PAM type: NRG; PAM sequence: TGG
gtgtctgtatcccagctact

SEQ ID NO: 16068 - DNA, 20 bp, Artificial Sequence
  Description of Artificial Sequence: Synthetic oligonucleotide
  Target: PCSK9; (+) strand; PAM type: NRG; PAM sequence: GGG
tgtctgtatcccagctactt

SEQ ID NO: 16069 - DNA, 20 bp, Artificial Sequence
  Description of Artificial Sequence: Synthetic oligonucleotide
  Target: PCSK9; (+) strand; PAM type: NRG; PAM sequence: GAG
tctgtatcccagctacttgg

SEQ ID NO: 16070 - DNA, 20 bp, Artificial Sequence
  Description of Artificial Sequence: Synthetic oligonucleotide
  Target: PCSK9; (+) strand; PAM type: NRG; PAM sequence: AGG
ctgtatcccagctacttggg

SEQ ID NO: 16071 - DNA, 20 bp, Artificial Sequence
  Description of Artificial Sequence: Synthetic oligonucleotide
  Target: PCSK9; (+) strand; PAM type: NRG; PAM sequence: AAG
tcccagctacttgggaggct

SEQ ID NO: 16072 - DNA, 20 bp, Artificial Sequence
  Description of Artificial Sequence: Synthetic oligonucleotide
  Target: PCSK9; (+) strand; PAM type: NRG; PAM sequence: AGG
cccagctacttgggaggcta

SEQ ID NO: 16073 - DNA, 20 bp, Artificial Sequence
  Description of Artificial Sequence: Synthetic oligonucleotide
  Target: PCSK9; (+) strand; PAM type: NRG; PAM sequence: CAG
agctacttgggaggctaagg

SEQ ID NO: 16074 - DNA, 20 bp, Artificial Sequence
  Description of Artificial Sequence: Synthetic oligonucleotide
  Target: PCSK9; (+) strand; PAM type: NRG; PAM sequence: AGG
gctacttgggaggctaaggc

SEQ ID NO: 16075 - DNA, 20 bp, Artificial Sequence
  Description of Artificial Sequence: Synthetic oligonucleotide
  Target: PCSK9; (+) strand; PAM type: NRG; PAM sequence: GAG
tacttgggaggctaaggcag

SEQ ID NO: 16076 - DNA, 20 bp, Artificial Sequence
  Description of Artificial Sequence: Synthetic oligonucleotide
  Target: PCSK9; (+) strand; PAM type: NRG; PAM sequence: CAG
gcaggagaatcgcttgaacc

SEQ ID NO: 16077 - DNA, 20 bp, Artificial Sequence
  Description of Artificial Sequence: Synthetic oligonucleotide
  Target: PCSK9; (+) strand; PAM type: NRG; PAM sequence: AGG
caggagaatcgcttgaaccc

SEQ ID NO: 16078 - DNA, 20 bp, Artificial Sequence
  Description of Artificial Sequence: Synthetic oligonucleotide
  Target: PCSK9; (+) strand; PAM type: NRG; PAM sequence: GAG
ggagaatcgcttgaacccag

SEQ ID NO: 16079 - DNA, 20 bp, Artificial Sequence
  Description of Artificial Sequence: Synthetic oligonucleotide
  Target: PCSK9; (+) strand; PAM type: NRG; PAM sequence: AGG
gagaatcgcttgaacccagg

SEQ ID NO: 16080 - DNA, 20 bp, Artificial Sequence
  Description of Artificial Sequence: Synthetic oligonucleotide
  Target: PCSK9; (+) strand; PAM type: NRG; PAM sequence: TGG
aatcgcttgaacccaggagg

SEQ ID NO: 16081 - DNA, 20 bp, Artificial Sequence
  Description of Artificial Sequence: Synthetic oligonucleotide
  Target: PCSK9; (+) strand; PAM type: NRG; PAM sequence: GAG
tcgcttgaacccaggaggtg

SEQ ID NO: 16082 - DNA, 20 bp, Artificial Sequence
  Description of Artificial Sequence: Synthetic oligonucleotide
  Target: PCSK9; (+) strand; PAM type: NRG; PAM sequence: AGG
cgcttgaacccaggaggtgg

SEQ ID NO: 16083 - DNA, 20 bp, Artificial Sequence
  Description of Artificial Sequence: Synthetic oligonucleotide
  Target: PCSK9; (+) strand; PAM type: NRG; PAM sequence: CAG
aacccaggaggtggaggttg

SEQ ID NO: 16084 - DNA, 20 bp, Artificial Sequence
  Description of Artificial Sequence: Synthetic oligonucleotide
  Target: PCSK9; (+) strand; PAM type: NRG; PAM sequence: GAG
caggaggtggaggttgcagt

SEQ ID NO: 16085 - DNA, 20 bp, Artificial Sequence
  Description of Artificial Sequence: Synthetic oligonucleotide
  Target: PCSK9; (+) strand; PAM type: NRG; PAM sequence: GAG
ggtggaggttgcagtgagct

SEQ ID NO: 16086 - DNA, 20 bp, Artificial Sequence
  Description of Artificial Sequence: Synthetic oligonucleotide
  Target: PCSK9; (+) strand; PAM type: NRG; PAM sequence: CAG
gagatcgtgccactgcaatc

SEQ ID NO: 16087 - DNA, 20 bp, Artificial Sequence
  Description of Artificial Sequence: Synthetic oligonucleotide
  Target: PCSK9; (+) strand; PAM type: NRG; PAM sequence: GAG
gtgccactgcaatccagcct

SEQ ID NO: 16088 - DNA, 20 bp, Artificial Sequence
  Description of Artificial Sequence: Synthetic oligonucleotide
  Target: PCSK9; (+) strand; PAM type: NRG; PAM sequence: TAG
ctgcaatccagcctgagtga

SEQ ID NO: 16089 - DNA, 20 bp, Artificial Sequence
  Description of Artificial Sequence: Synthetic oligonucleotide
  Target: PCSK9; (+) strand; PAM type: NRG; PAM sequence: GAG
gcaatccagcctgagtgata

SEQ ID NO: 16090 - DNA, 20 bp, Artificial Sequence
  Description of Artificial Sequence: Synthetic oligonucleotide
  Target: PCSK9; (+) strand; PAM type: NRG; PAM sequence: GAG
tccagcctgagtgatagagc

SEQ ID NO: 16091 - DNA, 20 bp, Artificial Sequence
  Description of Artificial Sequence: Synthetic oligonucleotide
  Target: PCSK9; (+) strand; PAM type: NRG; PAM sequence: AAG
attccatctcaaaaataaat

SEQ ID NO: 16092 - DNA, 20 bp, Artificial Sequence
  Description of Artificial Sequence: Synthetic oligonucleotide
  Target: PCSK9; (+) strand; PAM type: NRG; PAM sequence: TAG
aaaataaataagtaaataac

SEQ ID NO: 16093 - DNA, 20 bp, Artificial Sequence
  Description of Artificial Sequence: Synthetic oligonucleotide
  Target: PCSK9; (+) strand; PAM type: NRG; PAM sequence: CAG
ataaataagtaaataactag

SEQ ID NO: 16094 - DNA, 20 bp, Artificial Sequence
  Description of Artificial Sequence: Synthetic oligonucleotide
  Target: PCSK9; (+) strand; PAM type: NRG; PAM sequence: TGG
ataactagcagctgtaaatg

SEQ ID NO: 16095 - DNA, 20 bp, Artificial Sequence
  Description of Artificial Sequence: Synthetic oligonucleotide
  Target: PCSK9; (+) strand; PAM type: NRG; PAM sequence: CAG
ttgttcttcacctccacact

SEQ ID NO: 16096 - DNA, 20 bp, Artificial Sequence
  Description of Artificial Sequence: Synthetic oligonucleotide
  Target: PCSK9; (+) strand; PAM type: NRG; PAM sequence: TGG
cactccactccctccctccg

SEQ ID NO: 16097 - DNA, 20 bp, Artificial Sequence
  Description of Artificial Sequence: Synthetic oligonucleotide
  Target: PCSK9; (+) strand; PAM type: NRG; PAM sequence: GAG
actccctccctccgtggtgt

SEQ ID NO: 16098 - DNA, 20 bp, Artificial Sequence
  Description of Artificial Sequence: Synthetic oligonucleotide
  Target: PCSK9; (+) strand; PAM type: NRG; PAM sequence: AGG
ctccctccctccgtggtgtg

SEQ ID NO: 16099 - DNA, 20 bp, Artificial Sequence
  Description of Artificial Sequence: Synthetic oligonucleotide
  Target: PCSK9; (+) strand; PAM type: NRG; PAM sequence: GGG
tccctccctccgtggtgtga

SEQ ID NO: 16100 - DNA, 20 bp, Artificial Sequence
  Description of Artificial Sequence: Synthetic oligonucleotide
  Target: PCSK9; (+) strand; PAM type: NRG; PAM sequence: GGG
ccctccctccgtggtgtgag

SEQ ID NO: 16101 - DNA, 20 bp, Artificial Sequence
  Description of Artificial Sequence: Synthetic oligonucleotide
  Target: PCSK9; (+) strand; PAM type: NRG; PAM sequence: TAG
cgtggtgtgaggggcctcac

SEQ ID NO: 16102 - DNA, 20 bp, Artificial Sequence
  Description of Artificial Sequence: Synthetic oligonucleotide
  Target: PCSK9; (+) strand; PAM type: NRG; PAM sequence: TAG
gggcctcactagctgtctcc

SEQ ID NO: 16103 - DNA, 20 bp, Artificial Sequence
  Description of Artificial Sequence: Synthetic oligonucleotide
  Target: PCSK9; (+) strand; PAM type: NRG; PAM sequence: AGG
ggcctcactagctgtctcct

SEQ ID NO: 16104 - DNA, 20 bp, Artificial Sequence
  Description of Artificial Sequence: Synthetic oligonucleotide
  Target: PCSK9; (+) strand; PAM type: NRG; PAM sequence: GAG
cctcactagctgtctcctag

SEQ ID NO: 16105 - DNA, 20 bp, Artificial Sequence
  Description of Artificial Sequence: Synthetic oligonucleotide
  Target: PCSK9; (+) strand; PAM type: NRG; PAM sequence: AGG
ctcactagctgtctcctagg

SEQ ID NO: 16106 - DNA, 20 bp, Artificial Sequence
  Description of Artificial Sequence: Synthetic oligonucleotide
  Target: PCSK9; (+) strand; PAM type: NRG; PAM sequence: GAG
cactagctgtctcctaggag

SEQ ID NO: 16107 - DNA, 20 bp, Artificial Sequence
  Description of Artificial Sequence: Synthetic oligonucleotide
  Target: PCSK9; (+) strand; PAM type: NRG; PAM sequence: TGG
gctgtctcctaggaggagca

SEQ ID NO: 16108 - DNA, 20 bp, Artificial Sequence
  Description of Artificial Sequence: Synthetic oligonucleotide
  Target: PCSK9; (+) strand; PAM type: NRG; PAM sequence: GAG
cctaggaggagcatggctgt

SEQ ID NO: 16109 - DNA, 20 bp, Artificial Sequence
  Description of Artificial Sequence: Synthetic oligonucleotide
  Target: PCSK9; (+) strand; PAM type: NRG; PAM sequence: CAG
ggagcatggctgtgagattc

SEQ ID NO: 16110 - DNA, 20 bp, Artificial Sequence
  Description of Artificial Sequence: Synthetic oligonucleotide
  Target: PCSK9; (+) strand; PAM type: NRG; PAM sequence: TGG
tgagattccagctccatcct

SEQ ID NO: 16111 - DNA, 20 bp, Artificial Sequence
  Description of Artificial Sequence: Synthetic oligonucleotide
  Target: PCSK9; (+) strand; PAM type: NRG; PAM sequence: CGG
tccagctccatccttggcca

SEQ ID NO: 16112 - DNA, 20 bp, Artificial Sequence
  Description of Artificial Sequence: Synthetic oligonucleotide
  Target: PCSK9; (+) strand; PAM type: NRG; PAM sequence: TGG
ccatccttggccacggctcc

SEQ ID NO: 16113 - DNA, 20 bp, Artificial Sequence
  Description of Artificial Sequence: Synthetic oligonucleotide
  Target: PCSK9; (+) strand; PAM type: NRG; PAM sequence: GAG
atccttggccacggctcctg

SEQ ID NO: 16114 - DNA, 20 bp, Artificial Sequence
  Description of Artificial Sequence: Synthetic oligonucleotide
  Target: PCSK9; (+) strand; PAM type: NRG; PAM sequence: TAG
cacggctcctggagacatct

SEQ ID NO: 16115 - DNA, 20 bp, Artificial Sequence
  Description of Artificial Sequence: Synthetic oligonucleotide
  Target: PCSK9; (+) strand; PAM type: NRG; PAM sequence: GAG
cggctcctggagacatctta

SEQ ID NO: 16116 - DNA, 20 bp, Artificial Sequence
  Description of Artificial Sequence: Synthetic oligonucleotide
  Target: PCSK9; (+) strand; PAM type: NRG; PAM sequence: AGG
ggctcctggagacatcttag

SEQ ID NO: 16117 - DNA, 20 bp, Artificial Sequence
  Description of Artificial Sequence: Synthetic oligonucleotide
  Target: PCSK9; (+) strand; PAM type: NRG; PAM sequence: CAG
cctggagacatcttagaggc

SEQ ID NO: 16118 - DNA, 20 bp, Artificial Sequence
  Description of Artificial Sequence: Synthetic oligonucleotide
  Target: PCSK9; (+) strand; PAM type: NRG; PAM sequence: AGG
ctggagacatcttagaggcc

SEQ ID NO: 16119 - DNA, 20 bp, Artificial Sequence
  Description of Artificial Sequence: Synthetic oligonucleotide
  Target: PCSK9; (+) strand; PAM type: NRG; PAM sequence: CAG
acatcttagaggccaggatc

SEQ ID NO: 16120 - DNA, 20 bp, Artificial Sequence
  Description of Artificial Sequence: Synthetic oligonucleotide
  Target: PCSK9; (+) strand; PAM type: NRG; PAM sequence: AAG
tcttagaggccaggatccag

SEQ ID NO: 16121 - DNA, 20 bp, Artificial Sequence
  Description of Artificial Sequence: Synthetic oligonucleotide
  Target: PCSK9; (+) strand; PAM type: NRG; PAM sequence: AGG
cttagaggccaggatccaga

SEQ ID NO: 16122 - DNA, 20 bp, Artificial Sequence
  Description of Artificial Sequence: Synthetic oligonucleotide
  Target: PCSK9; (+) strand; PAM type: NRG; PAM sequence: CAG
ggctcccacacctcatttga

SEQ ID NO: 16123 - DNA, 20 bp, Artificial Sequence
  Description of Artificial Sequence: Synthetic oligonucleotide
  Target: PCSK9; (+) strand; PAM type: NRG; PAM sequence: AGG
gctcccacacctcatttgac

SEQ ID NO: 16124 - DNA, 20 bp, Artificial Sequence
  Description of Artificial Sequence: Synthetic oligonucleotide
  Target: PCSK9; (+) strand; PAM type: NRG; PAM sequence: GGG
ctcccacacctcatttgaca

SEQ ID NO: 16125 - DNA, 20 bp, Artificial Sequence
  Description of Artificial Sequence: Synthetic oligonucleotide
  Target: PCSK9; (+) strand; PAM type: NRG; PAM sequence: GGG
tcccacacctcatttgacag

SEQ ID NO: 16126 - DNA, 20 bp, Artificial Sequence
  Description of Artificial Sequence: Synthetic oligonucleotide
  Target: PCSK9; (+) strand; PAM type: NRG; PAM sequence: GAG
ccacacctcatttgacaggg

SEQ ID NO: 16127 - DNA, 20 bp, Artificial Sequence
  Description of Artificial Sequence: Synthetic oligonucleotide
  Target: PCSK9; (+) strand; PAM type: NRG; PAM sequence: AAG
cacctcatttgacaggggag

SEQ ID NO: 16128 - DNA, 20 bp, Artificial Sequence
  Description of Artificial Sequence: Synthetic oligonucleotide
  Target: PCSK9; (+) strand; PAM type: NRG; PAM sequence: CAG
tttgacaggggagaagctgt

SEQ ID NO: 16129 - DNA, 20 bp, Artificial Sequence
  Description of Artificial Sequence: Synthetic oligonucleotide
  Target: PCSK9; (+) strand; PAM type: NRG; PAM sequence: CAG
aggggagaagctgtcagttc

SEQ ID NO: 16130 - DNA, 20 bp, Artificial Sequence
  Description of Artificial Sequence: Synthetic oligonucleotide
  Target: PCSK9; (+) strand; PAM type: NRG; PAM sequence: AGG
ggggagaagctgtcagttcc

SEQ ID NO: 16131 - DNA, 20 bp, Artificial Sequence
  Description of Artificial Sequence: Synthetic oligonucleotide
  Target: PCSK9; (+) strand; PAM type: NRG; PAM sequence: CAG
ttccaggtccccttgcacat

SEQ ID NO: 16132 - DNA, 20 bp, Artificial Sequence
  Description of Artificial Sequence: Synthetic oligonucleotide
  Target: PCSK9; (+) strand; PAM type: NRG; PAM sequence: AGG
tccaggtccccttgcacatc

SEQ ID NO: 16133 - DNA, 20 bp, Artificial Sequence
  Description of Artificial Sequence: Synthetic oligonucleotide
  Target: PCSK9; (+) strand; PAM type: NRG; PAM sequence: GGG
ccaggtccccttgcacatca

SEQ ID NO: 16134 - DNA, 20 bp, Artificial Sequence
  Description of Artificial Sequence: Synthetic oligonucleotide
  Target: PCSK9; (+) strand; PAM type: NRG; PAM sequence: CAG
gtccccttgcacatcagggc

SEQ ID NO: 16135 - DNA, 20 bp, Artificial Sequence
  Description of Artificial Sequence: Synthetic oligonucleotide
  Target: PCSK9; (+) strand; PAM type: NRG; PAM sequence: GAG
ccccttgcacatcagggcca

SEQ ID NO: 16136 - DNA, 20 bp, Artificial Sequence
  Description of Artificial Sequence: Synthetic oligonucleotide
  Target: PCSK9; (+) strand; PAM type: NRG; PAM sequence: TAG
catcagggccagagctgcgt

SEQ ID NO: 16137 - DNA, 20 bp, Artificial Sequence
  Description of Artificial Sequence: Synthetic oligonucleotide
  Target: PCSK9; (+) strand; PAM type: NRG; PAM sequence: AGG
atcagggccagagctgcgtt

SEQ ID NO: 16138 - DNA, 20 bp, Artificial Sequence
  Description of Artificial Sequence: Synthetic oligonucleotide
  Target: PCSK9; (+) strand; PAM type: NRG; PAM sequence: CAG
ccagagctgcgttaggcctc

SEQ ID NO: 16139 - DNA, 20 bp, Artificial Sequence
  Description of Artificial Sequence: Synthetic oligonucleotide
  Target: PCSK9; (+) strand; PAM type: NRG; PAM sequence: CAG
tgcgttaggcctccagtctc

SEQ ID NO: 16140 - DNA, 20 bp, Artificial Sequence
  Description of Artificial Sequence: Synthetic oligonucleotide
  Target: PCSK9; (+) strand; PAM type: NRG; PAM sequence: AGG
gcgttaggcctccagtctcc

SEQ ID NO: 16141 - DNA, 20 bp, Artificial Sequence
  Description of Artificial Sequence: Synthetic oligonucleotide
  Target: PCSK9; (+) strand; PAM type: NRG; PAM sequence: TGG
gcctccagtctccaggccac

SEQ ID NO: 16142 - DNA, 20 bp, Artificial Sequence
  Description of Artificial Sequence: Synthetic oligonucleotide
  Target: PCSK9; (+) strand; PAM type: NRG; PAM sequence: GGG
cctccagtctccaggccact

SEQ ID NO: 16143 - DNA, 20 bp, Artificial Sequence
  Description of Artificial Sequence: Synthetic oligonucleotide
  Target: PCSK9; (+) strand; PAM type: NRG; PAM sequence: CAG
cagtctccaggccactgggc

SEQ ID NO: 16144 - DNA, 20 bp, Artificial Sequence
  Description of Artificial Sequence: Synthetic oligonucleotide
  Target: PCSK9; (+) strand; PAM type: NRG; PAM sequence: GAG
gtctccaggccactgggcca

SEQ ID NO: 16145 - DNA, 20 bp, Artificial Sequence
  Description of Artificial Sequence: Synthetic oligonucleotide
  Target: PCSK9; (+) strand; PAM type: NRG; PAM sequence: CAG
ggccactgggccagagctca

SEQ ID NO: 16146 - DNA, 20 bp, Artificial Sequence
  Description of Artificial Sequence: Synthetic oligonucleotide
  Target: PCSK9; (+) strand; PAM type: NRG; PAM sequence: AGG
gccactgggccagagctcac

SEQ ID NO: 16147 - DNA, 20 bp, Artificial Sequence
  Description of Artificial Sequence: Synthetic oligonucleotide
  Target: PCSK9; (+) strand; PAM type: NRG; PAM sequence: TGG
ctgggccagagctcacaggc

SEQ ID NO: 16148 - DNA, 20 bp, Artificial Sequence
  Description of Artificial Sequence: Synthetic oligonucleotide
  Target: PCSK9; (+) strand; PAM type: NRG; PAM sequence: CAG
ggccagagctcacaggctgg

SEQ ID NO: 16149 - DNA, 20 bp, Artificial Sequence
  Description of Artificial Sequence: Synthetic oligonucleotide
  Target: PCSK9; (+) strand; PAM type: NRG; PAM sequence: GAG
ccagagctcacaggctggca

SEQ ID NO: 16150 - DNA, 20 bp, Artificial Sequence
  Description of Artificial Sequence: Synthetic oligonucleotide
  Target: PCSK9; (+) strand; PAM type: NRG; PAM sequence: AGG
cagagctcacaggctggcag

SEQ ID NO: 16151 - DNA, 20 bp, Artificial Sequence
  Description of Artificial Sequence: Synthetic oligonucleotide
  Target: PCSK9; (+) strand; PAM type: NRG; PAM sequence: GGG
agagctcacaggctggcaga

SEQ ID NO: 16152 - DNA, 20 bp, Artificial Sequence
  Description of Artificial Sequence: Synthetic oligonucleotide
  Target: PCSK9; (+) strand; PAM type: NRG; PAM sequence: TAG
ctcacaggctggcagagggt

SEQ ID NO: 16153 - DNA, 20 bp, Artificial Sequence
  Description of Artificial Sequence: Synthetic oligonucleotide
  Target: PCSK9; (+) strand; PAM type: NRG; PAM sequence: TGG
cagagggttagaactgttac

SEQ ID NO: 16154 - DNA, 20 bp, Artificial Sequence
  Description of Artificial Sequence: Synthetic oligonucleotide
  Target: PCSK9; (+) strand; PAM type: NRG; PAM sequence: TGG
agggttagaactgttactgg

SEQ ID NO: 16155 - DNA, 20 bp, Artificial Sequence
  Description of Artificial Sequence: Synthetic oligonucleotide
  Target: PCSK9; (+) strand; PAM type: NRG; PAM sequence: TGG
ttagaactgttactggtggc

SEQ ID NO: 16156 - DNA, 20 bp, Artificial Sequence
  Description of Artificial Sequence: Synthetic oligonucleotide
  Target: PCSK9; (+) strand; PAM type: NRG; PAM sequence: GGG
tagaactgttactggtggct

SEQ ID NO: 16157 - DNA, 20 bp, Artificial Sequence
  Description of Artificial Sequence: Synthetic oligonucleotide
  Target: PCSK9; (+) strand; PAM type: NRG; PAM sequence: CAG
ctgttactggtggctgggtg

SEQ ID NO: 16158 - DNA, 20 bp, Artificial Sequence
  Description of Artificial Sequence: Synthetic oligonucleotide
  Target: PCSK9; (+) strand; PAM type: NRG; PAM sequence: TGG
ttactggtggctgggtgcag

SEQ ID NO: 16159 - DNA, 20 bp, Artificial Sequence
  Description of Artificial Sequence: Synthetic oligonucleotide
  Target: PCSK9; (+) strand; PAM type: NRG; PAM sequence: TAG
gtggctcacgcctgtaatct

SEQ ID NO: 16160 - DNA, 20 bp, Artificial Sequence
  Description of Artificial Sequence: Synthetic oligonucleotide
  Target: PCSK9; (+) strand; PAM type: NRG; PAM sequence: TGG
cgcctgtaatcttagcactt

SEQ ID NO: 16161 - DNA, 20 bp, Artificial Sequence
  Description of Artificial Sequence: Synthetic oligonucleotide
  Target: PCSK9; (+) strand; PAM type: NRG; PAM sequence: GGG
gcctgtaatcttagcacttt

SEQ ID NO: 16162 - DNA, 20 bp, Artificial Sequence
  Description of Artificial Sequence: Synthetic oligonucleotide
  Target: PCSK9; (+) strand; PAM type: NRG; PAM sequence: GAG
ctgtaatcttagcactttgg

SEQ ID NO: 16163 - DNA, 20 bp, Artificial Sequence
  Description of Artificial Sequence: Synthetic oligonucleotide
  Target: PCSK9; (+) strand; PAM type: NRG; PAM sequence: AGG
tgtaatcttagcactttggg

SEQ ID NO: 16164 - DNA, 20 bp, Artificial Sequence
  Description of Artificial Sequence: Synthetic oligonucleotide
  Target: PCSK9; (+) strand; PAM type: NRG; PAM sequence: GGG
gtaatcttagcactttggga

SEQ ID NO: 16165 - DNA, 20 bp, Artificial Sequence
  Description of Artificial Sequence: Synthetic oligonucleotide
  Target: PCSK9; (+) strand; PAM type: NRG; PAM sequence: AAG
tcttagcactttgggagggc

SEQ ID NO: 16166 - DNA, 20 bp, Artificial Sequence
  Description of Artificial Sequence: Synthetic oligonucleotide
  Target: PCSK9; (+) strand; PAM type: NRG; PAM sequence: AGG
cttagcactttgggagggca

SEQ ID NO: 16167 - DNA, 20 bp, Artificial Sequence
  Description of Artificial Sequence: Synthetic oligonucleotide
  Target: PCSK9; (+) strand; PAM type: NRG; PAM sequence: CGG
agcactttgggagggcaagg

SEQ ID NO: 16168 - DNA, 20 bp, Artificial Sequence
  Description of Artificial Sequence: Synthetic oligonucleotide
  Target: PCSK9; (+) strand; PAM type: NRG; PAM sequence: GGG
gcactttgggagggcaaggc

SEQ ID NO: 16169 - DNA, 20 bp, Artificial Sequence
  Description of Artificial Sequence: Synthetic oligonucleotide
  Target: PCSK9; (+) strand; PAM type: NRG; PAM sequence: GAG
actttgggagggcaaggcgg

SEQ ID NO: 16170 - DNA, 20 bp, Artificial Sequence
  Description of Artificial Sequence: Synthetic oligonucleotide
  Target: PCSK9; (+) strand; PAM type: NRG; PAM sequence: AGG
ctttgggagggcaaggcggg

SEQ ID NO: 16171 - DNA, 20 bp, Artificial Sequence
  Description of Artificial Sequence: Synthetic oligonucleotide
  Target: PCSK9; (+) strand; PAM type: NRG; PAM sequence: GAG
gggcaaggcgggaggatcat

SEQ ID NO: 16172 - DNA, 20 bp, Artificial Sequence
  Description of Artificial Sequence: Synthetic oligonucleotide
  Target: PCSK9; (+) strand; PAM type: NRG; PAM sequence: AGG
ggcaaggcgggaggatcatg

SEQ ID NO: 16173 - DNA, 20 bp, Artificial Sequence
  Description of Artificial Sequence: Synthetic oligonucleotide
  Target: PCSK9; (+) strand; PAM type: NRG; PAM sequence: CAG
aggcgggaggatcatgaggt

SEQ ID NO: 16174 - DNA, 20 bp, Artificial Sequence
  Description of Artificial Sequence: Synthetic oligonucleotide
  Target: PCSK9; (+) strand; PAM type: NRG; PAM sequence: AGG
ggcgggaggatcatgaggtc

SEQ ID NO: 16175 - DNA, 20 bp, Artificial Sequence
  Description of Artificial Sequence: Synthetic oligonucleotide
  Target: PCSK9; (+) strand; PAM type: NRG; PAM sequence: GAG
gatcatgaggtcaggacatc

SEQ ID NO: 16176 - DNA, 20 bp, Artificial Sequence
  Description of Artificial Sequence: Synthetic oligonucleotide
  Target: PCSK9; (+) strand; PAM type: NRG; PAM sequence: CGG
cgagaccatccttgctaaca

SEQ ID NO: 16177 - DNA, 20 bp, Artificial Sequence
  Description of Artificial Sequence: Synthetic oligonucleotide
  Target: PCSK9; (+) strand; PAM type: NRG; PAM sequence: AAG
ccatccttgctaacacggtg

SEQ ID NO: 16178 - DNA, 20 bp, Artificial Sequence
  Description of Artificial Sequence: Synthetic oligonucleotide
  Target: PCSK9; (+) strand; PAM type: NRG; PAM sequence: TAG
ctactaaaactacaaaaaat

SEQ ID NO: 16179 - DNA, 20 bp, Artificial Sequence
  Description of Artificial Sequence: Synthetic oligonucleotide
  Target: PCSK9; (+) strand; PAM type: NRG; PAM sequence: CGG
taaaactacaaaaaattagc

SEQ ID NO: 16180 - DNA, 20 bp, Artificial Sequence
  Description of Artificial Sequence: Synthetic oligonucleotide
  Target: PCSK9; (+) strand; PAM type: NRG; PAM sequence: GGG
aaaactacaaaaaattagcc

SEQ ID NO: 16181 - DNA, 20 bp, Artificial Sequence
  Description of Artificial Sequence: Synthetic oligonucleotide
  Target: PCSK9; (+) strand; PAM type: NRG; PAM sequence: TGG
tacaaaaaattagccgggcg

SEQ ID NO: 16182 - DNA, 20 bp, Artificial Sequence
  Description of Artificial Sequence: Synthetic oligonucleotide
  Target: PCSK9; (+) strand; PAM type: NRG; PAM sequence: TGG
aaaaaattagccgggcgtgg

SEQ ID NO: 16183 - DNA, 20 bp, Artificial Sequence
  Description of Artificial Sequence: Synthetic oligonucleotide
  Target: PCSK9; (+) strand; PAM type: NRG; PAM sequence: CAG
aaattagccgggcgtggtgg

SEQ ID NO: 16184 - DNA, 20 bp, Artificial Sequence
  Description of Artificial Sequence: Synthetic oligonucleotide
  Target: PCSK9; (+) strand; PAM type: NRG; PAM sequence: AGG
aattagccgggcgtggtggc

SEQ ID NO: 16185 - DNA, 20 bp, Artificial Sequence
  Description of Artificial Sequence: Synthetic oligonucleotide
  Target: PCSK9; (+) strand; PAM type: NRG; PAM sequence: TAG
ggcgtggtggcaggcgcctg

SEQ ID NO: 16186 - DNA, 20 bp, Artificial Sequence
  Description of Artificial Sequence: Synthetic oligonucleotide
  Target: PCSK9; (+) strand; PAM type: NRG; PAM sequence: CAG
gtggcaggcgcctgtagtcc

SEQ ID NO: 16187 - DNA, 20 bp, Artificial Sequence
  Description of Artificial Sequence: Synthetic oligonucleotide
  Target: PCSK9; (+) strand; PAM type: NRG; PAM sequence: CAG
cgcctgtagtcccagctact

SEQ ID NO: 16188 - DNA, 20 bp, Artificial Sequence
  Description of Artificial Sequence: Synthetic oligonucleotide
  Target: PCSK9; (+) strand; PAM type: NRG; PAM sequence: AGG
gcctgtagtcccagctactc

SEQ ID NO: 16189 - DNA, 20 bp, Artificial Sequence
  Description of Artificial Sequence: Synthetic oligonucleotide
  Target: PCSK9; (+) strand; PAM type: NRG; PAM sequence: GAG
ctgtagtcccagctactcag

SEQ ID NO: 16190 - DNA, 20 bp, Artificial Sequence
  Description of Artificial Sequence: Synthetic oligonucleotide
  Target: PCSK9; (+) strand; PAM type: NRG; PAM sequence: AGG
tgtagtcccagctactcagg

SEQ ID NO: 16191 - DNA, 20 bp, Artificial Sequence
  Description of Artificial Sequence: Synthetic oligonucleotide
  Target: PCSK9; (+) strand; PAM type: NRG; PAM sequence: GAG
tcccagctactcaggaggct

SEQ ID NO: 16192 - DNA, 20 bp, Artificial Sequence
  Description of Artificial Sequence: Synthetic oligonucleotide
  Target: PCSK9; (+) strand; PAM type: NRG; PAM sequence: AGG
cccagctactcaggaggctg

SEQ ID NO: 16193 - DNA, 20 bp, Artificial Sequence
  Description of Artificial Sequence: Synthetic oligonucleotide
  Target: PCSK9; (+) strand; PAM type: NRG; PAM sequence: CAG
agctactcaggaggctgagg

SEQ ID NO: 16194 - DNA, 20 bp, Artificial Sequence
  Description of Artificial Sequence: Synthetic oligonucleotide
  Target: PCSK9; (+) strand; PAM type: NRG; PAM sequence: AGG
gctactcaggaggctgaggc

SEQ ID NO: 16195 - DNA, 20 bp, Artificial Sequence
  Description of Artificial Sequence: Synthetic oligonucleotide
  Target: PCSK9; (+) strand; PAM type: NRG; PAM sequence: GAG
tactcaggaggctgaggcag

SEQ ID NO: 16196 - DNA, 20 bp, Artificial Sequence
  Description of Artificial Sequence: Synthetic oligonucleotide
  Target: PCSK9; (+) strand; PAM type: NRG; PAM sequence: TGG
aggaggctgaggcaggagaa

SEQ ID NO: 16197 - DNA, 20 bp, Artificial Sequence
  Description of Artificial Sequence: Synthetic oligonucleotide
  Target: PCSK9; (+) strand; PAM type: NRG; PAM sequence: CGG
gcaggagaatggcgtgaacc

SEQ ID NO: 16198 - DNA, 20 bp, Artificial Sequence
  Description of Artificial Sequence: Synthetic oligonucleotide
  Target: PCSK9; (+) strand; PAM type: NRG; PAM sequence: GGG
caggagaatggcgtgaaccc

SEQ ID NO: 16199 - DNA, 20 bp, Artificial Sequence
  Description of Artificial Sequence: Synthetic oligonucleotide
  Target: PCSK9; (+) strand; PAM type: NRG; PAM sequence: GAG
ggagaatggcgtgaacccgg

SEQ ID NO: 16200 - DNA, 20 bp, Artificial Sequence
  Description of Artificial Sequence: Synthetic oligonucleotide
  Target: PCSK9; (+) strand; PAM type: NRG; PAM sequence: AGG
gagaatggcgtgaacccggg

SEQ ID NO: 16201 - DNA, 20 bp, Artificial Sequence
  Description of Artificial Sequence: Synthetic oligonucleotide
  Target: PCSK9; (+) strand; PAM type: NRG; PAM sequence: CGG
aatggcgtgaacccgggagg

SEQ ID NO: 16202 - DNA, 20 bp, Artificial Sequence
  Description of Artificial Sequence: Synthetic oligonucleotide
  Target: PCSK9; (+) strand; PAM type: NRG; PAM sequence: GAG
tggcgtgaacccgggaggcg

SEQ ID NO: 16203 - DNA, 20 bp, Artificial Sequence
  Description of Artificial Sequence: Synthetic oligonucleotide
  Target: PCSK9; (+) strand; PAM type: NRG; PAM sequence: CAG
aacccgggaggcggagcttg

SEQ ID NO: 16204 - DNA, 20 bp, Artificial Sequence
  Description of Artificial Sequence: Synthetic oligonucleotide
  Target: PCSK9; (+) strand; PAM type: NRG; PAM sequence: GAG
cgggaggcggagcttgcagt

SEQ ID NO: 16205 - DNA, 20 bp, Artificial Sequence
  Description of Artificial Sequence: Synthetic oligonucleotide
  Target: PCSK9; (+) strand; PAM type: NRG; PAM sequence: GAG
ggcggagcttgcagtgagcc

SEQ ID NO: 16206 - DNA, 20 bp, Artificial Sequence
  Description of Artificial Sequence: Synthetic oligonucleotide
  Target: PCSK9; (+) strand; PAM type: NRG; PAM sequence: CAG
gagattgcgccactgcactc

SEQ ID NO: 16207 - DNA, 20 bp, Artificial Sequence
  Description of Artificial Sequence: Synthetic oligonucleotide
  Target: PCSK9; (+) strand; PAM type: NRG; PAM sequence: TGG
tgcgccactgcactccagcc

SEQ ID NO: 16208 - DNA, 20 bp, Artificial Sequence
  Description of Artificial Sequence: Synthetic oligonucleotide
  Target: PCSK9; (+) strand; PAM type: NRG; PAM sequence: GGG
gcgccactgcactccagcct

SEQ ID NO: 16209 - DNA, 20 bp, Artificial Sequence
  Description of Artificial Sequence: Synthetic oligonucleotide
  Target: PCSK9; (+) strand; PAM type: NRG; PAM sequence: TAG
ctgcactccagcctgggcaa

SEQ ID NO: 16210 - DNA, 20 bp, Artificial Sequence
  Description of Artificial Sequence: Synthetic oligonucleotide
  Target: PCSK9; (+) strand; PAM type: NRG; PAM sequence: GAG
gcactccagcctgggcaata

SEQ ID NO: 16211 - DNA, 20 bp, Artificial Sequence
  Description of Artificial Sequence: Synthetic oligonucleotide
  Target: PCSK9; (+) strand; PAM type: NRG; PAM sequence: GAG
tccagcctgggcaatagagc

SEQ ID NO: 16212 - DNA, 20 bp, Artificial Sequence
  Description of Artificial Sequence: Synthetic oligonucleotide
  Target: PCSK9; (+) strand; PAM type: NRG; PAM sequence: TGG
caatagagcgagactccgtc

SEQ ID NO: 16213 - DNA, 20 bp, Artificial Sequence
  Description of Artificial Sequence: Synthetic oligonucleotide
  Target: PCSK9; (+) strand; PAM type: NRG; PAM sequence: AAG
agagcgagactccgtctgga

SEQ ID NO: 16214 - DNA, 20 bp, Artificial Sequence
  Description of Artificial Sequence: Synthetic oligonucleotide
  Target: PCSK9; (+) strand; PAM type: NRG; PAM sequence: AAG
ctggaaagaaaaaaaaaaaa

SEQ ID NO: 16215 - DNA, 20 bp, Artificial Sequence
  Description of Artificial Sequence: Synthetic oligonucleotide
  Target: PCSK9; (+) strand; PAM type: NRG; PAM sequence: GAG
ggaaagaaaaaaaaaaaaaa

SEQ ID NO: 16216 - DNA, 20 bp, Artificial Sequence
  Description of Artificial Sequence: Synthetic oligonucleotide
  Target: PCSK9; (+) strand; PAM type: NRG; PAM sequence: CAG
aaaagagctgttactgttga

SEQ ID NO: 16217 - DNA, 20 bp, Artificial Sequence
  Description of Artificial Sequence: Synthetic oligonucleotide
  Target: PCSK9; (+) strand; PAM type: NRG; PAM sequence: TAG
agagctgttactgttgacag

SEQ ID NO: 16218 - DNA, 20 bp, Artificial Sequence
  Description of Artificial Sequence: Synthetic oligonucleotide
  Target: PCSK9; (+) strand; PAM type: NRG; PAM sequence: GAG
gttactgttgacagtagcat

SEQ ID NO: 16219 - DNA, 20 bp, Artificial Sequence
  Description of Artificial Sequence: Synthetic oligonucleotide
  Target: PCSK9; (+) strand; PAM type: NRG; PAM sequence: AGG
ttactgttgacagtagcatg

SEQ ID NO: 16220 - DNA, 20 bp, Artificial Sequence
  Description of Artificial Sequence: Synthetic oligonucleotide
  Target: PCSK9; (+) strand; PAM type: NRG; PAM sequence: TAG
ctgttgacagtagcatgagg

SEQ ID NO: 16221 - DNA, 20 bp, Artificial Sequence
  Description of Artificial Sequence: Synthetic oligonucleotide
  Target: PCSK9; (+) strand; PAM type: NRG; PAM sequence: TGG
cagtagcatgaggtagacca

SEQ ID NO: 16222 - DNA, 20 bp, Artificial Sequence
  Description of Artificial Sequence: Synthetic oligonucleotide
  Target: PCSK9; (+) strand; PAM type: NRG; PAM sequence: TGG
gaccatggcctgcaccaaaa

SEQ ID NO: 16223 - DNA, 20 bp, Artificial Sequence
  Description of Artificial Sequence: Synthetic oligonucleotide
  Target: PCSK9; (+) strand; PAM type: NRG; PAM sequence: GGG
accatggcctgcaccaaaat

SEQ ID NO: 16224 - DNA, 20 bp, Artificial Sequence
  Description of Artificial Sequence: Synthetic oligonucleotide
  Target: PCSK9; (+) strand; PAM type: NRG; PAM sequence: GGG
ccatggcctgcaccaaaatg

SEQ ID NO: 16225 - DNA, 20 bp, Artificial Sequence
  Description of Artificial Sequence: Synthetic oligonucleotide
  Target: PCSK9; (+) strand; PAM type: NRG; PAM sequence: GGG
catggcctgcaccaaaatgg

SEQ ID NO: 16226 - DNA, 20 bp, Artificial Sequence
  Description of Artificial Sequence: Synthetic oligonucleotide
  Target: PCSK9; (+) strand; PAM type: NRG; PAM sequence: GAG
tggcctgcaccaaaatgggg

SEQ ID NO: 16227 - DNA, 20 bp, Artificial Sequence
  Description of Artificial Sequence: Synthetic oligonucleotide
  Target: PCSK9; (+) strand; PAM type: NRG; PAM sequence: TGG
cctgcaccaaaatgggggag

SEQ ID NO: 16228 - DNA, 20 bp, Artificial Sequence
  Description of Artificial Sequence: Synthetic oligonucleotide
  Target: PCSK9; (+) strand; PAM type: NRG; PAM sequence: GAG
tgcaccaaaatgggggagtg

SEQ ID NO: 16229 - DNA, 20 bp, Artificial Sequence
  Description of Artificial Sequence: Synthetic oligonucleotide
  Target: PCSK9; (+) strand; PAM type: NRG; PAM sequence: GAG
tgggggagtggagtgccact

SEQ ID NO: 16230 - DNA, 20 bp, Artificial Sequence
  Description of Artificial Sequence: Synthetic oligonucleotide
  Target: PCSK9; (+) strand; PAM type: NRG; PAM sequence: AGG
gggggagtggagtgccactg

SEQ ID NO: 16231 - DNA, 20 bp, Artificial Sequence
  Description of Artificial Sequence: Synthetic oligonucleotide
  Target: PCSK9; (+) strand; PAM type: NRG; PAM sequence: CAG
gagtggagtgccactgaggc

SEQ ID NO: 16232 - DNA, 20 bp, Artificial Sequence
  Description of Artificial Sequence: Synthetic oligonucleotide
  Target: PCSK9; (+) strand; PAM type: NRG; PAM sequence: AAG
tggagtgccactgaggccag

SEQ ID NO: 16233 - DNA, 20 bp, Artificial Sequence
  Description of Artificial Sequence: Synthetic oligonucleotide
  Target: PCSK9; (+) strand; PAM type: NRG; PAM sequence: AGG
ggagtgccactgaggccaga

SEQ ID NO: 16234 - DNA, 20 bp, Artificial Sequence
  Description of Artificial Sequence: Synthetic oligonucleotide
  Target: PCSK9; (+) strand; PAM type: NRG; PAM sequence: AAG
ccagaaggaaccacaccctc

SEQ ID NO: 16235 - DNA, 20 bp, Artificial Sequence
  Description of Artificial Sequence: Synthetic oligonucleotide
  Target: PCSK9; (+) strand; PAM type: NRG; PAM sequence: AGG
cagaaggaaccacaccctca

SEQ ID NO: 16236 - DNA, 20 bp, Artificial Sequence
  Description of Artificial Sequence: Synthetic oligonucleotide
  Target: PCSK9; (+) strand; PAM type: NRG; PAM sequence: GGG
agaaggaaccacaccctcaa

SEQ ID NO: 16237 - DNA, 20 bp, Artificial Sequence
  Description of Artificial Sequence: Synthetic oligonucleotide
  Target: PCSK9; (+) strand; PAM type: NRG; PAM sequence: TGG
aggaaccacaccctcaaggg

SEQ ID NO: 16238 - DNA, 20 bp, Artificial Sequence
  Description of Artificial Sequence: Synthetic oligonucleotide
  Target: PCSK9; (+) strand; PAM type: NRG; PAM sequence: GGG
ggaaccacaccctcaagggt

SEQ ID NO: 16239 - DNA, 20 bp, Artificial Sequence
  Description of Artificial Sequence: Synthetic oligonucleotide
  Target: PCSK9; (+) strand; PAM type: NRG; PAM sequence: GGG
gaaccacaccctcaagggtg

SEQ ID NO: 16240 - DNA, 20 bp, Artificial Sequence
  Description of Artificial Sequence: Synthetic oligonucleotide
  Target: PCSK9; (+) strand; PAM type: NRG; PAM sequence: GAG
accacaccctcaagggtggg

SEQ ID NO: 16241 - DNA, 20 bp, Artificial Sequence
  Description of Artificial Sequence: Synthetic oligonucleotide
  Target: PCSK9; (+) strand; PAM type: NRG; PAM sequence: TGG
ccctcaagggtggggagtta

SEQ ID NO: 16242 - DNA, 20 bp, Artificial Sequence
  Description of Artificial Sequence: Synthetic oligonucleotide
  Target: PCSK9; (+) strand; PAM type: NRG; PAM sequence: TGG
aagggtggggagttatggta

SEQ ID NO: 16243 - DNA, 20 bp, Artificial Sequence
  Description of Artificial Sequence: Synthetic oligonucleotide
  Target: PCSK9; (+) strand; PAM type: NRG; PAM sequence: GGG
agggtggggagttatggtat

SEQ ID NO: 16244 - DNA, 20 bp, Artificial Sequence
  Description of Artificial Sequence: Synthetic oligonucleotide
  Target: PCSK9; (+) strand; PAM type: NRG; PAM sequence: GGG
gggtggggagttatggtatg

SEQ ID NO: 16245 - DNA, 20 bp, Artificial Sequence
  Description of Artificial Sequence: Synthetic oligonucleotide
  Target: PCSK9; (+) strand; PAM type: NRG; PAM sequence: GGG
ggtggggagttatggtatgg

SEQ ID NO: 16246 - DNA, 20 bp, Artificial Sequence
  Description of Artificial Sequence: Synthetic oligonucleotide
  Target: PCSK9; (+) strand; PAM type: NRG; PAM sequence: GGG
gtggggagttatggtatggg

SEQ ID NO: 16247 - DNA, 20 bp, Artificial Sequence
  Description of Artificial Sequence: Synthetic oligonucleotide
  Target: PCSK9; (+) strand; PAM type: NRG; PAM sequence: TAG
agttatggtatggggggtcc

SEQ ID NO: 16248 - DNA, 20 bp, Artificial Sequence
  Description of Artificial Sequence: Synthetic oligonucleotide
  Target: PCSK9; (+) strand; PAM type: NRG; PAM sequence: AGG
gttatggtatggggggtcct

SEQ ID NO: 16249 - DNA, 20 bp, Artificial Sequence
  Description of Artificial Sequence: Synthetic oligonucleotide
  Target: PCSK9; (+) strand; PAM type: NRG; PAM sequence: TGG
ggtatggggggtcctaggca

SEQ ID NO: 16250 - DNA, 20 bp, Artificial Sequence
  Description of Artificial Sequence: Synthetic oligonucleotide
  Target: PCSK9; (+) strand; PAM type: NRG; PAM sequence: GAG
tatggggggtcctaggcatg

SEQ ID NO: 16251 - DNA, 20 bp, Artificial Sequence
  Description of Artificial Sequence: Synthetic oligonucleotide
  Target: PCSK9; (+) strand; PAM type: NRG; PAM sequence: TAG
catggagtcttttaattctt

SEQ ID NO: 16252 - DNA, 20 bp, Artificial Sequence
  Description of Artificial Sequence: Synthetic oligonucleotide
  Target: PCSK9; (+) strand; PAM type: NRG; PAM sequence: TGG
tttaattctttagacaatcc

SEQ ID NO: 16253 - DNA, 20 bp, Artificial Sequence
  Description of Artificial Sequence: Synthetic oligonucleotide
  Target: PCSK9; (+) strand; PAM type: NRG; PAM sequence: GGG
ttaattctttagacaatcct

SEQ ID NO: 16254 - DNA, 20 bp, Artificial Sequence
  Description of Artificial Sequence: Synthetic oligonucleotide
  Target: PCSK9; (+) strand; PAM type: NRG; PAM sequence: GAG
aattctttagacaatcctgg

SEQ ID NO: 16255 - DNA, 20 bp, Artificial Sequence
  Description of Artificial Sequence: Synthetic oligonucleotide
  Target: PCSK9; (+) strand; PAM type: NRG; PAM sequence: CAG
gagcaactgtccctgtttca

SEQ ID NO: 16256 - DNA, 20 bp, Artificial Sequence
  Description of Artificial Sequence: Synthetic oligonucleotide
  Target: PCSK9; (+) strand; PAM type: NRG; PAM sequence: GAG
gcaactgtccctgtttcaca

SEQ ID NO: 16257 - DNA, 20 bp, Artificial Sequence
  Description of Artificial Sequence: Synthetic oligonucleotide
  Target: PCSK9; (+) strand; PAM type: NRG; PAM sequence: AGG
caactgtccctgtttcacag

SEQ ID NO: 16258 - DNA, 20 bp, Artificial Sequence
  Description of Artificial Sequence: Synthetic oligonucleotide
  Target: PCSK9; (+) strand; PAM type: NRG; PAM sequence: GGG
aactgtccctgtttcacaga

SEQ ID NO: 16259 - DNA, 20 bp, Artificial Sequence
  Description of Artificial Sequence: Synthetic oligonucleotide
  Target: PCSK9; (+) strand; PAM type: NRG; PAM sequence: CGG
tgtccctgtttcacagaggg

SEQ ID NO: 16260 - DNA, 20 bp, Artificial Sequence
  Description of Artificial Sequence: Synthetic oligonucleotide
  Target: PCSK9; (+) strand; PAM type: NRG; PAM sequence: GGG
gtccctgtttcacagagggc

SEQ ID NO: 16261 - DNA, 20 bp, Artificial Sequence
  Description of Artificial Sequence: Synthetic oligonucleotide
  Target: PCSK9; (+) strand; PAM type: NRG; PAM sequence: GGG
tccctgtttcacagagggcg

SEQ ID NO: 16262 - DNA, 20 bp, Artificial Sequence
  Description of Artificial Sequence: Synthetic oligonucleotide
  Target: PCSK9; (+) strand; PAM type: NRG; PAM sequence: CAG
tcacagagggcggggccaca

SEQ ID NO: 16263 - DNA, 20 bp, Artificial Sequence
  Description of Artificial Sequence: Synthetic oligonucleotide
  Target: PCSK9; (+) strand; PAM type: NRG; PAM sequence: TGG
agagggcggggccacacagc

SEQ ID NO: 16264 - DNA, 20 bp, Artificial Sequence
  Description of Artificial Sequence: Synthetic oligonucleotide
  Target: PCSK9; (+) strand; PAM type: NRG; PAM sequence: GAG
ggcggggccacacagctggt

SEQ ID NO: 16265 - DNA, 20 bp, Artificial Sequence
  Description of Artificial Sequence: Synthetic oligonucleotide
  Target: PCSK9; (+) strand; PAM type: NRG; PAM sequence: TGG
ggggccacacagctggtgag

SEQ ID NO: 16266 - DNA, 20 bp, Artificial Sequence
  Description of Artificial Sequence: Synthetic oligonucleotide
  Target: PCSK9; (+) strand; PAM type: NRG; PAM sequence: GGG
gggccacacagctggtgagt

SEQ ID NO: 16267 - DNA, 20 bp, Artificial Sequence
  Description of Artificial Sequence: Synthetic oligonucleotide
  Target: PCSK9; (+) strand; PAM type: NRG; PAM sequence: CAG
ccacacagctggtgagtggg

SEQ ID NO: 16268 - DNA, 20 bp, Artificial Sequence
  Description of Artificial Sequence: Synthetic oligonucleotide
  Target: PCSK9; (+) strand; PAM type: NRG; PAM sequence: AAG
cagctggtgagtgggcagcc

SEQ ID NO: 16269 - DNA, 20 bp, Artificial Sequence
  Description of Artificial Sequence: Synthetic oligonucleotide
  Target: PCSK9; (+) strand; PAM type: NRG; PAM sequence: AAG
gggcagccaagactctgttc

SEQ ID NO: 16270 - DNA, 20 bp, Artificial Sequence
  Description of Artificial Sequence: Synthetic oligonucleotide
  Target: PCSK9; (+) strand; PAM type: NRG; PAM sequence: TGG
agactctgttcaagtttgtg

SEQ ID NO: 16271 - DNA, 20 bp, Artificial Sequence
  Description of Artificial Sequence: Synthetic oligonucleotide
  Target: PCSK9; (+) strand; PAM type: NRG; PAM sequence: GGG
gactctgttcaagtttgtgt

SEQ ID NO: 16272 - DNA, 20 bp, Artificial Sequence
  Description of Artificial Sequence: Synthetic oligonucleotide
  Target: PCSK9; (+) strand; PAM type: NRG; PAM sequence: CGG
ttgtgtgggtccaacacttg

SEQ ID NO: 16273 - DNA, 20 bp, Artificial Sequence
  Description of Artificial Sequence: Synthetic oligonucleotide
  Target: PCSK9; (+) strand; PAM type: NRG; PAM sequence: CGG
gggtccaacacttgcggcca

SEQ ID NO: 16274 - DNA, 20 bp, Artificial Sequence
  Description of Artificial Sequence: Synthetic oligonucleotide
  Target: PCSK9; (+) strand; PAM type: NRG; PAM sequence: TGG
tccaacacttgcggccacgg

SEQ ID NO: 16275 - DNA, 20 bp, Artificial Sequence
  Description of Artificial Sequence: Synthetic oligonucleotide
  Target: PCSK9; (+) strand; PAM type: NRG; PAM sequence: GAG
caacacttgcggccacggtg

SEQ ID NO: 16276 - DNA, 20 bp, Artificial Sequence
  Description of Artificial Sequence: Synthetic oligonucleotide
  Target: PCSK9; (+) strand; PAM type: NRG; PAM sequence: AGG
aacacttgcggccacggtgg

SEQ ID NO: 16277 - DNA, 20 bp, Artificial Sequence
  Description of Artificial Sequence: Synthetic oligonucleotide
  Target: PCSK9; (+) strand; PAM type: NRG; PAM sequence: GGG
acacttgcggccacggtgga

SEQ ID NO: 16278 - DNA, 20 bp, Artificial Sequence
  Description of Artificial Sequence: Synthetic oligonucleotide
  Target: PCSK9; (+) strand; PAM type: NRG; PAM sequence: GGG
cacttgcggccacggtggag

SEQ ID NO: 16279 - DNA, 20 bp, Artificial Sequence
  Description of Artificial Sequence: Synthetic oligonucleotide
  Target: PCSK9; (+) strand; PAM type: NRG; PAM sequence: GAG
gccacggtggaggggcatct

SEQ ID NO: 16280 - DNA, 20 bp, Artificial Sequence
  Description of Artificial Sequence: Synthetic oligonucleotide
  Target: PCSK9; (+) strand; PAM type: NRG; PAM sequence: CAG
cggtggaggggcatctgagc

SEQ ID NO: 16281 - DNA, 20 bp, Artificial Sequence
  Description of Artificial Sequence: Synthetic oligonucleotide
  Target: PCSK9; (+) strand; PAM type: NRG; PAM sequence: AGG
ggtggaggggcatctgagcc

SEQ ID NO: 16282 - DNA, 20 bp, Artificial Sequence
  Description of Artificial Sequence: Synthetic oligonucleotide
  Target: PCSK9; (+) strand; PAM type: NRG; PAM sequence: CAG
ggggcatctgagccaggcct

SEQ ID NO: 16283 - DNA, 20 bp, Artificial Sequence
  Description of Artificial Sequence: Synthetic oligonucleotide
  Target: PCSK9; (+) strand; PAM type: NRG; PAM sequence: GAG
ggcatctgagccaggcctca

SEQ ID NO: 16284 - DNA, 20 bp, Artificial Sequence
  Description of Artificial Sequence: Synthetic oligonucleotide
  Target: PCSK9; (+) strand; PAM type: NRG; PAM sequence: GAG
catctgagccaggcctcaga

SEQ ID NO: 16285 - DNA, 20 bp, Artificial Sequence
  Description of Artificial Sequence: Synthetic oligonucleotide
  Target: PCSK9; (+) strand; PAM type: NRG; PAM sequence: TGG
ctgagccaggcctcagagag

SEQ ID NO: 16286 - DNA, 20 bp, Artificial Sequence
  Description of Artificial Sequence: Synthetic oligonucleotide
  Target: PCSK9; (+) strand; PAM type: NRG; PAM sequence: CGG
agccaggcctcagagagtgg

SEQ ID NO: 16287 - DNA, 20 bp, Artificial Sequence
  Description of Artificial Sequence: Synthetic oligonucleotide
  Target: PCSK9; (+) strand; PAM type: NRG; PAM sequence: GGG
gccaggcctcagagagtggc

SEQ ID NO: 16288 - DNA, 20 bp, Artificial Sequence
  Description of Artificial Sequence: Synthetic oligonucleotide
  Target: PCSK9; (+) strand; PAM type: NRG; PAM sequence: GGG
ccaggcctcagagagtggcg

SEQ ID NO: 16289 - DNA, 20 bp, Artificial Sequence
  Description of Artificial Sequence: Synthetic oligonucleotide
  Target: PCSK9; (+) strand; PAM type: NRG; PAM sequence: GGG
caggcctcagagagtggcgg

SEQ ID NO: 16290 - DNA, 20 bp, Artificial Sequence
  Description of Artificial Sequence: Synthetic oligonucleotide
  Target: PCSK9; (+) strand; PAM type: NRG; PAM sequence: AAG
gcctcagagagtggcggggg

SEQ ID NO: 16291 - DNA, 20 bp, Artificial Sequence
  Description of Artificial Sequence: Synthetic oligonucleotide
  Target: PCSK9; (+) strand; PAM type: NRG; PAM sequence: TGG
cagagagtggcgggggaagt

SEQ ID NO: 16292 - DNA, 20 bp, Artificial Sequence
  Description of Artificial Sequence: Synthetic oligonucleotide
  Target: PCSK9; (+) strand; PAM type: NRG; PAM sequence: GGG
agagagtggcgggggaagtt

SEQ ID NO: 16293 - DNA, 20 bp, Artificial Sequence
  Description of Artificial Sequence: Synthetic oligonucleotide
  Target: PCSK9; (+) strand; PAM type: NRG; PAM sequence: TGG
gagtggcgggggaagttggg

SEQ ID NO: 16294 - DNA, 20 bp, Artificial Sequence
  Description of Artificial Sequence: Synthetic oligonucleotide
  Target: PCSK9; (+) strand; PAM type: NRG; PAM sequence: GGG
agtggcgggggaagttgggt

SEQ ID NO: 16295 - DNA, 20 bp, Artificial Sequence
  Description of Artificial Sequence: Synthetic oligonucleotide
  Target: PCSK9; (+) strand; PAM type: NRG; PAM sequence: GGG
gtggcgggggaagttgggtg

SEQ ID NO: 16296 - DNA, 20 bp, Artificial Sequence
  Description of Artificial Sequence: Synthetic oligonucleotide
  Target: PCSK9; (+) strand; PAM type: NRG; PAM sequence: AAG
gcgggggaagttgggtgggg

SEQ ID NO: 16297 - DNA, 20 bp, Artificial Sequence
  Description of Artificial Sequence: Synthetic oligonucleotide
  Target: PCSK9; (+) strand; PAM type: NRG; PAM sequence: GAG
tgtgcccttctcattcctct

SEQ ID NO: 16298 - DNA, 20 bp, Artificial Sequence
  Description of Artificial Sequence: Synthetic oligonucleotide
  Target: PCSK9; (+) strand; PAM type: NRG; PAM sequence: AGG
gtgcccttctcattcctctg

SEQ ID NO: 16299 - DNA, 20 bp, Artificial Sequence
  Description of Artificial Sequence: Synthetic oligonucleotide
  Target: PCSK9; (+) strand; PAM type: NRG; PAM sequence: TGG
tcctctgaggctcatcctct

SEQ ID NO: 16300 - DNA, 20 bp, Artificial Sequence
  Description of Artificial Sequence: Synthetic oligonucleotide
  Target: PCSK9; (+) strand; PAM type: NRG; PAM sequence: TGG
ctcttggtgcctctctttca

SEQ ID NO: 16301 - DNA, 20 bp, Artificial Sequence
  Description of Artificial Sequence: Synthetic oligonucleotide
  Target: PCSK9; (+) strand; PAM type: NRG; PAM sequence: AAG
tggtgcctctctttcatgga

SEQ ID NO: 16302 - DNA, 20 bp, Artificial Sequence
  Description of Artificial Sequence: Synthetic oligonucleotide
  Target: PCSK9; (+) strand; PAM type: NRG; PAM sequence: AGG
ggtgcctctctttcatggaa

SEQ ID NO: 16303 - DNA, 20 bp, Artificial Sequence
  Description of Artificial Sequence: Synthetic oligonucleotide
  Target: PCSK9; (+) strand; PAM type: NRG; PAM sequence: GGG
gtgcctctctttcatggaaa

SEQ ID NO: 16304 - DNA, 20 bp, Artificial Sequence
  Description of Artificial Sequence: Synthetic oligonucleotide
  Target: PCSK9; (+) strand; PAM type: NRG; PAM sequence: AAG
ctttcatggaaagggataat

SEQ ID NO: 16305 - DNA, 20 bp, Artificial Sequence
  Description of Artificial Sequence: Synthetic oligonucleotide
  Target: PCSK9; (+) strand; PAM type: NRG; PAM sequence: AGG
tttcatggaaagggataata

SEQ ID NO: 16306 - DNA, 20 bp, Artificial Sequence
  Description of Artificial Sequence: Synthetic oligonucleotide
  Target: PCSK9; (+) strand; PAM type: NRG; PAM sequence: GAG
agggataataaggttattgt

SEQ ID NO: 16307 - DNA, 20 bp, Artificial Sequence
  Description of Artificial Sequence: Synthetic oligonucleotide
  Target: PCSK9; (+) strand; PAM type: NRG; PAM sequence: AGG
gggataataaggttattgtg

SEQ ID NO: 16308 - DNA, 20 bp, Artificial Sequence
  Description of Artificial Sequence: Synthetic oligonucleotide
  Target: PCSK9; (+) strand; PAM type: NRG; PAM sequence: GAG
ggttattgtgaggatcccct

SEQ ID NO: 16309 - DNA, 20 bp, Artificial Sequence
  Description of Artificial Sequence: Synthetic oligonucleotide
  Target: PCSK9; (+) strand; PAM type: NRG; PAM sequence: CAG
atcccctgagttcgtatatt

SEQ ID NO: 16310 - DNA, 20 bp, Artificial Sequence
  Description of Artificial Sequence: Synthetic oligonucleotide
  Target: PCSK9; (+) strand; PAM type: NRG; PAM sequence: TAG
agttcgtatattcagacgct

SEQ ID NO: 16311 - DNA, 20 bp, Artificial Sequence
  Description of Artificial Sequence: Synthetic oligonucleotide
  Target: PCSK9; (+) strand; PAM type: NRG; PAM sequence: CAG
cgtatattcagacgcttaga

SEQ ID NO: 16312 - DNA, 20 bp, Artificial Sequence
  Description of Artificial Sequence: Synthetic oligonucleotide
  Target: PCSK9; (+) strand; PAM type: NRG; PAM sequence: GAG
tatattcagacgcttagaca

SEQ ID NO: 16313 - DNA, 20 bp, Artificial Sequence
  Description of Artificial Sequence: Synthetic oligonucleotide
  Target: PCSK9; (+) strand; PAM type: NRG; PAM sequence: CAG
ttcagacgcttagacagagc

SEQ ID NO: 16314 - DNA, 20 bp, Artificial Sequence
  Description of Artificial Sequence: Synthetic oligonucleotide
  Target: PCSK9; (+) strand; PAM type: NRG; PAM sequence: AGG
tcagacgcttagacagagcc

SEQ ID NO: 16315 - DNA, 20 bp, Artificial Sequence
  Description of Artificial Sequence: Synthetic oligonucleotide
  Target: PCSK9; (+) strand; PAM type: NRG; PAM sequence: CAG
cgcttagacagagccaggca

SEQ ID NO: 16316 - DNA, 20 bp, Artificial Sequence
  Description of Artificial Sequence: Synthetic oligonucleotide
  Target: PCSK9; (+) strand; PAM type: NRG; PAM sequence: GAG
cttagacagagccaggcaca

SEQ ID NO: 16317 - DNA, 20 bp, Artificial Sequence
  Description of Artificial Sequence: Synthetic oligonucleotide
  Target: PCSK9; (+) strand; PAM type: NRG; PAM sequence: AAG
agacagagccaggcacagag

SEQ ID NO: 16318 - DNA, 20 bp, Artificial Sequence
  Description of Artificial Sequence: Synthetic oligonucleotide
  Target: PCSK9; (+) strand; PAM type: NRG; PAM sequence: AGG
gacagagccaggcacagaga

SEQ ID NO: 16319 - DNA, 20 bp, Artificial Sequence
  Description of Artificial Sequence: Synthetic oligonucleotide
  Target: PCSK9; (+) strand; PAM type: NRG; PAM sequence: GGG
acagagccaggcacagagaa

SEQ ID NO: 16320 - DNA, 20 bp, Artificial Sequence
  Description of Artificial Sequence: Synthetic oligonucleotide
  Target: PCSK9; (+) strand; PAM type: NRG; PAM sequence: CGG
gccaggcacagagaagggcc

SEQ ID NO: 16321 - DNA, 20 bp, Artificial Sequence
  Description of Artificial Sequence: Synthetic oligonucleotide
  Target: PCSK9; (+) strand; PAM type: NRG; PAM sequence: GGG
ccaggcacagagaagggccc

SEQ ID NO: 16322 - DNA, 20 bp, Artificial Sequence
  Description of Artificial Sequence: Synthetic oligonucleotide
  Target: PCSK9; (+) strand; PAM type: NRG; PAM sequence: GGG
caggcacagagaagggcccg

SEQ ID NO: 16323 - DNA, 20 bp, Artificial Sequence
  Description of Artificial Sequence: Synthetic oligonucleotide
  Target: PCSK9; (+) strand; PAM type: NRG; PAM sequence: TGG
cacagagaagggcccggggt

SEQ ID NO: 16324 - DNA, 20 bp, Artificial Sequence
  Description of Artificial Sequence: Synthetic oligonucleotide
  Target: PCSK9; (+) strand; PAM type: NRG; PAM sequence: TAG
gagaagggcccggggttggc

SEQ ID NO: 16325 - DNA, 20 bp, Artificial Sequence
  Description of Artificial Sequence: Synthetic oligonucleotide
  Target: PCSK9; (+) strand; PAM type: NRG; PAM sequence: TGG
gggttggctagtttgattgc

SEQ ID NO: 16326 - DNA, 20 bp, Artificial Sequence
  Description of Artificial Sequence: Synthetic oligonucleotide
  Target: PCSK9; (+) strand; PAM type: NRG; PAM sequence: CAG
gtgtaattgctaatatcttc

SEQ ID NO: 16327 - DNA, 20 bp, Artificial Sequence
  Description of Artificial Sequence: Synthetic oligonucleotide
  Target: PCSK9; (+) strand; PAM type: NRG; PAM sequence: TGG
taatatcttccagtttgtat

SEQ ID NO: 16328 - DNA, 20 bp, Artificial Sequence
  Description of Artificial Sequence: Synthetic oligonucleotide
  Target: PCSK9; (+) strand; PAM type: NRG; PAM sequence: AAG
tcttccagtttgtattggtc

SEQ ID NO: 16329 - DNA, 20 bp, Artificial Sequence
  Description of Artificial Sequence: Synthetic oligonucleotide
  Target: PCSK9; (+) strand; PAM type: NRG; PAM sequence: AGG
cttccagtttgtattggtca

SEQ ID NO: 16330 - DNA, 20 bp, Artificial Sequence
  Description of Artificial Sequence: Synthetic oligonucleotide
  Target: PCSK9; (+) strand; PAM type: NRG; PAM sequence: CAG
ttgtattggtcaaggttctg

SEQ ID NO: 16331 - DNA, 20 bp, Artificial Sequence
  Description of Artificial Sequence: Synthetic oligonucleotide
  Target: PCSK9; (+) strand; PAM type: NRG; PAM sequence: GAG
gtattggtcaaggttctgca

SEQ ID NO: 16332 - DNA, 20 bp, Artificial Sequence
  Description of Artificial Sequence: Synthetic oligonucleotide
  Target: PCSK9; (+) strand; PAM type: NRG; PAM sequence: AAG
ttggtcaaggttctgcagag

SEQ ID NO: 16333 - DNA, 20 bp, Artificial Sequence
  Description of Artificial Sequence: Synthetic oligonucleotide
  Target: PCSK9; (+) strand; PAM type: NRG; PAM sequence: CAG
gtcaaggttctgcagagaag

SEQ ID NO: 16334 - DNA, 20 bp, Artificial Sequence
  Description of Artificial Sequence: Synthetic oligonucleotide
  Target: PCSK9; (+) strand; PAM type: NRG; PAM sequence: CAG
gttctgcagagaagcagaac

SEQ ID NO: 16335 - DNA, 20 bp, Artificial Sequence
  Description of Artificial Sequence: Synthetic oligonucleotide
  Target: PCSK9; (+) strand; PAM type: NRG; PAM sequence: TAG
ctgcagagaagcagaaccag

SEQ ID NO: 16336 - DNA, 20 bp, Artificial Sequence
  Description of Artificial Sequence: Synthetic oligonucleotide
  Target: PCSK9; (+) strand; PAM type: NRG; PAM sequence: AGG
tgcagagaagcagaaccagt

SEQ ID NO: 16337 - DNA, 20 bp, Artificial Sequence
  Description of Artificial Sequence: Synthetic oligonucleotide
  Target: PCSK9; (+) strand; PAM type: NRG; PAM sequence: AAG
accagtaggatgtatatatt

SEQ ID NO: 16338 - DNA, 20 bp, Artificial Sequence
  Description of Artificial Sequence: Synthetic oligonucleotide
  Target: PCSK9; (+) strand; PAM type: NRG; PAM sequence: GAG
cagtaggatgtatatattaa

SEQ ID NO: 16339 - DNA, 20 bp, Artificial Sequence
  Description of Artificial Sequence: Synthetic oligonucleotide
  Target: PCSK9; (+) strand; PAM type: NRG; PAM sequence: AAG
atgtatatattaagagtttc

SEQ ID NO: 16340 - DNA, 20 bp, Artificial Sequence
  Description of Artificial Sequence: Synthetic oligonucleotide
  Target: PCSK9; (+) strand; PAM type: NRG; PAM sequence: CGG
ttcaagctcatgtgaccgtg

SEQ ID NO: 16341 - DNA, 20 bp, Artificial Sequence
  Description of Artificial Sequence: Synthetic oligonucleotide
  Target: PCSK9; (+) strand; PAM type: NRG; PAM sequence: GGG
tcaagctcatgtgaccgtgc

SEQ ID NO: 16342 - DNA, 20 bp, Artificial Sequence
  Description of Artificial Sequence: Synthetic oligonucleotide
  Target: PCSK9; (+) strand; PAM type: NRG; PAM sequence: TGG
gctcatgtgaccgtgcgggc

SEQ ID NO: 16343 - DNA, 20 bp, Artificial Sequence
  Description of Artificial Sequence: Synthetic oligonucleotide
  Target: PCSK9; (+) strand; PAM type: NRG; PAM sequence: AAG
atgtgaccgtgcgggctggc

SEQ ID NO: 16344 - DNA, 20 bp, Artificial Sequence
  Description of Artificial Sequence: Synthetic oligonucleotide
  Target: PCSK9; (+) strand; PAM type: NRG; PAM sequence: CAG
gctggcaagtctgaaatccg

SEQ ID NO: 16345 - DNA, 20 bp, Artificial Sequence
  Description of Artificial Sequence: Synthetic oligonucleotide
  Target: PCSK9; (+) strand; PAM type: NRG; PAM sequence: AGG
ctggcaagtctgaaatccgc

SEQ ID NO: 16346 - DNA, 20 bp, Artificial Sequence
  Description of Artificial Sequence: Synthetic oligonucleotide
  Target: PCSK9; (+) strand; PAM type: NRG; PAM sequence: GGG
tggcaagtctgaaatccgca

SEQ ID NO: 16347 - DNA, 20 bp, Artificial Sequence
  Description of Artificial Sequence: Synthetic oligonucleotide
  Target: PCSK9; (+) strand; PAM type: NRG; PAM sequence: CAG
caagtctgaaatccgcaggg

SEQ ID NO: 16348 - DNA, 20 bp, Artificial Sequence
  Description of Artificial Sequence: Synthetic oligonucleotide
  Target: PCSK9; (+) strand; PAM type: NRG; PAM sequence: AGG
aagtctgaaatccgcagggc

SEQ ID NO: 16349 - DNA, 20 bp, Artificial Sequence
  Description of Artificial Sequence: Synthetic oligonucleotide
  Target: PCSK9; (+) strand; PAM type: NRG; PAM sequence: CAG
ctgaaatccgcagggcaggc

SEQ ID NO: 16350 - DNA, 20 bp, Artificial Sequence
  Description of Artificial Sequence: Synthetic oligonucleotide
  Target: PCSK9; (+) strand; PAM type: NRG; PAM sequence: AGG
tgaaatccgcagggcaggcc

SEQ ID NO: 16351 - DNA, 20 bp, Artificial Sequence
  Description of Artificial Sequence: Synthetic oligonucleotide
  Target: PCSK9; (+) strand; PAM type: NRG; PAM sequence: CAG
aatccgcagggcaggccagg

SEQ ID NO: 16352 - DNA, 20 bp, Artificial Sequence
  Description of Artificial Sequence: Synthetic oligonucleotide
  Target: PCSK9; (+) strand; PAM type: NRG; PAM sequence: AGG
atccgcagggcaggccaggc

SEQ ID NO: 16353 - DNA, 20 bp, Artificial Sequence
  Description of Artificial Sequence: Synthetic oligonucleotide
  Target: PCSK9; (+) strand; PAM type: NRG; PAM sequence: TGG
gcagggcaggccaggcaggc

SEQ ID NO: 16354 - DNA, 20 bp, Artificial Sequence
  Description of Artificial Sequence: Synthetic oligonucleotide
  Target: PCSK9; (+) strand; PAM type: NRG; PAM sequence: CAG
aggcaggctggcaattcctg

SEQ ID NO: 16355 - DNA, 20 bp, Artificial Sequence
  Description of Artificial Sequence: Synthetic oligonucleotide
  Target: PCSK9; (+) strand; PAM type: NRG; PAM sequence: GAG
gaatttgatgttgcaatact

SEQ ID NO: 16356 - DNA, 20 bp, Artificial Sequence
  Description of Artificial Sequence: Synthetic oligonucleotide
  Target: PCSK9; (+) strand; PAM type: NRG; PAM sequence: AAG
atgttgcaatactgagtcct

SEQ ID NO: 16357 - DNA, 20 bp, Artificial Sequence
  Description of Artificial Sequence: Synthetic oligonucleotide
  Target: PCSK9; (+) strand; PAM type: NRG; PAM sequence: AGG
tgttgcaatactgagtccta

SEQ ID NO: 16358 - DNA, 20 bp, Artificial Sequence
  Description of Artificial Sequence: Synthetic oligonucleotide
  Target: PCSK9; (+) strand; PAM type: NRG; PAM sequence: CAG
tgcaatactgagtcctaagg

SEQ ID NO: 16359 - DNA, 20 bp, Artificial Sequence
  Description of Artificial Sequence: Synthetic oligonucleotide
  Target: PCSK9; (+) strand; PAM type: NRG; PAM sequence: TGG
actgagtcctaaggcagtcc

SEQ ID NO: 16360 - DNA, 20 bp, Artificial Sequence
  Description of Artificial Sequence: Synthetic oligonucleotide
  Target: PCSK9; (+) strand; PAM type: NRG; PAM sequence: GGG
ctgagtcctaaggcagtcct

SEQ ID NO: 16361 - DNA, 20 bp, Artificial Sequence
  Description of Artificial Sequence: Synthetic oligonucleotide
  Target: PCSK9; (+) strand; PAM type: NRG; PAM sequence: GGG
tgagtcctaaggcagtcctg

SEQ ID NO: 16362 - DNA, 20 bp, Artificial Sequence
  Description of Artificial Sequence: Synthetic oligonucleotide
  Target: PCSK9; (+) strand; PAM type: NRG; PAM sequence: CAG
gtcctaaggcagtcctgggg

SEQ ID NO: 16363 - DNA, 20 bp, Artificial Sequence
  Description of Artificial Sequence: Synthetic oligonucleotide
  Target: PCSK9; (+) strand; PAM type: NRG; PAM sequence: TGG
gggcagaattccttcttccc

SEQ ID NO: 16364 - DNA, 20 bp, Artificial Sequence
  Description of Artificial Sequence: Synthetic oligonucleotide
  Target: PCSK9; (+) strand; PAM type: NRG; PAM sequence: GGG
ggcagaattccttcttccct

SEQ ID NO: 16365 - DNA, 20 bp, Artificial Sequence
  Description of Artificial Sequence: Synthetic oligonucleotide
  Target: PCSK9; (+) strand; PAM type: NRG; PAM sequence: GAG
cagaattccttcttccctgg

SEQ ID NO: 16366 - DNA, 20 bp, Artificial Sequence
  Description of Artificial Sequence: Synthetic oligonucleotide
  Target: PCSK9; (+) strand; PAM type: NRG; PAM sequence: AGG
agaattccttcttccctggg

SEQ ID NO: 16367 - DNA, 20 bp, Artificial Sequence
  Description of Artificial Sequence: Synthetic oligonucleotide
  Target: PCSK9; (+) strand; PAM type: NRG; PAM sequence: CAG
ccttcttccctgggaggcct

SEQ ID NO: 16368 - DNA, 20 bp, Artificial Sequence
  Description of Artificial Sequence: Synthetic oligonucleotide
  Target: PCSK9; (+) strand; PAM type: NRG; PAM sequence: AAG
aggcctcagtctgttctctt

SEQ ID NO: 16369 - DNA, 20 bp, Artificial Sequence
  Description of Artificial Sequence: Synthetic oligonucleotide
  Target: PCSK9; (+) strand; PAM type: NRG; PAM sequence: AGG
ggcctcagtctgttctctta

SEQ ID NO: 16370 - DNA, 20 bp, Artificial Sequence
  Description of Artificial Sequence: Synthetic oligonucleotide
  Target: PCSK9; (+) strand; PAM type: NRG; PAM sequence: GAG
aggccttcaactgattaaat

SEQ ID NO: 16371 - DNA, 20 bp, Artificial Sequence
  Description of Artificial Sequence: Synthetic oligonucleotide
  Target: PCSK9; (+) strand; PAM type: NRG; PAM sequence: AGG
ggccttcaactgattaaatg

SEQ ID NO: 16372 - DNA, 20 bp, Artificial Sequence
  Description of Artificial Sequence: Synthetic oligonucleotide
  Target: PCSK9; (+) strand; PAM type: NRG; PAM sequence: AAG
tgattaaatgaggcctgccc

SEQ ID NO: 16373 - DNA, 20 bp, Artificial Sequence
  Description of Artificial Sequence: Synthetic oligonucleotide
  Target: PCSK9; (+) strand; PAM type: NRG; PAM sequence: TAG
aatgaggcctgcccaagtta

SEQ ID NO: 16374 - DNA, 20 bp, Artificial Sequence
  Description of Artificial Sequence: Synthetic oligonucleotide
  Target: PCSK9; (+) strand; PAM type: NRG; PAM sequence: GAG
tgaggcctgcccaagttata

SEQ ID NO: 16375 - DNA, 20 bp, Artificial Sequence
  Description of Artificial Sequence: Synthetic oligonucleotide
  Target: PCSK9; (+) strand; PAM type: NRG; PAM sequence: GAG
aggcctgcccaagttataga

SEQ ID NO: 16376 - DNA, 20 bp, Artificial Sequence
  Description of Artificial Sequence: Synthetic oligonucleotide
  Target: PCSK9; (+) strand; PAM type: NRG; PAM sequence: TAG
ccgtcttctgatttaaatgt

SEQ ID NO: 16377 - DNA, 20 bp, Artificial Sequence
  Description of Artificial Sequence: Synthetic oligonucleotide
  Target: PCSK9; (+) strand; PAM type: NRG; PAM sequence: CAG
acatctaaaaaatattttcg

SEQ ID NO: 16378 - DNA, 20 bp, Artificial Sequence
  Description of Artificial Sequence: Synthetic oligonucleotide
  Target: PCSK9; (+) strand; PAM type: NRG; PAM sequence: CAG
tctaaaaaatattttcgcag

SEQ ID NO: 16379 - DNA, 20 bp, Artificial Sequence
  Description of Artificial Sequence: Synthetic oligonucleotide
  Target: PCSK9; (+) strand; PAM type: NRG; PAM sequence: TGG
tttcgcagcagcatttccac

SEQ ID NO: 16380 - DNA, 20 bp, Artificial Sequence
  Description of Artificial Sequence: Synthetic oligonucleotide
  Target: PCSK9; (+) strand; PAM type: NRG; PAM sequence: CAG
actggcttttgaccaaacat

SEQ ID NO: 16381 - DNA, 20 bp, Artificial Sequence
  Description of Artificial Sequence: Synthetic oligonucleotide
  Target: PCSK9; (+) strand; PAM type: NRG; PAM sequence: AGG
ctggcttttgaccaaacatc

SEQ ID NO: 16382 - DNA, 20 bp, Artificial Sequence
  Description of Artificial Sequence: Synthetic oligonucleotide
  Target: PCSK9; (+) strand; PAM type: NRG; PAM sequence: AAG
tgaccaaacatcaggccaca

SEQ ID NO: 16383 - DNA, 20 bp, Artificial Sequence
  Description of Artificial Sequence: Synthetic oligonucleotide
  Target: PCSK9; (+) strand; PAM type: NRG; PAM sequence: AAG
aaccatcactctgtgcctgt

SEQ ID NO: 16384 - DNA, 20 bp, Artificial Sequence
  Description of Artificial Sequence: Synthetic oligonucleotide
  Target: PCSK9; (+) strand; PAM type: NRG; PAM sequence: AGG
accatcactctgtgcctgta

SEQ ID NO: 16385 - DNA, 20 bp, Artificial Sequence
  Description of Artificial Sequence: Synthetic oligonucleotide
  Target: PCSK9; (+) strand; PAM type: NRG; PAM sequence: GGG
ccatcactctgtgcctgtaa

SEQ ID NO: 16386 - DNA, 20 bp, Artificial Sequence
  Description of Artificial Sequence: Synthetic oligonucleotide
  Target: PCSK9; (+) strand; PAM type: NRG; PAM sequence: GAG
atcactctgtgcctgtaagg

SEQ ID NO: 16387 - DNA, 20 bp, Artificial Sequence
  Description of Artificial Sequence: Synthetic oligonucleotide
  Target: PCSK9; (+) strand; PAM type: NRG; PAM sequence: AGG
tcactctgtgcctgtaaggg

SEQ ID NO: 16388 - DNA, 20 bp, Artificial Sequence
  Description of Artificial Sequence: Synthetic oligonucleotide
  Target: PCSK9; (+) strand; PAM type: NRG; PAM sequence: GGG
cactctgtgcctgtaaggga

SEQ ID NO: 16389 - DNA, 20 bp, Artificial Sequence
  Description of Artificial Sequence: Synthetic oligonucleotide
  Target: PCSK9; (+) strand; PAM type: NRG; PAM sequence: GGG
actctgtgcctgtaagggag

SEQ ID NO: 16390 - DNA, 20 bp, Artificial Sequence
  Description of Artificial Sequence: Synthetic oligonucleotide
  Target: PCSK9; (+) strand; PAM type: NRG; PAM sequence: TGG
tgtgcctgtaagggaggggc

SEQ ID NO: 16391 - DNA, 20 bp, Artificial Sequence
  Description of Artificial Sequence: Synthetic oligonucleotide
  Target: PCSK9; (+) strand; PAM type: NRG; PAM sequence: GGG
gtgcctgtaagggaggggct

SEQ ID NO: 16392 - DNA, 20 bp, Artificial Sequence
  Description of Artificial Sequence: Synthetic oligonucleotide
  Target: PCSK9; (+) strand; PAM type: NRG; PAM sequence: AAG
ctgtaagggaggggctggga

SEQ ID NO: 16393 - DNA, 20 bp, Artificial Sequence
  Description of Artificial Sequence: Synthetic oligonucleotide
  Target: PCSK9; (+) strand; PAM type: NRG; PAM sequence: AGG
tgtaagggaggggctgggaa

SEQ ID NO: 16394 - DNA, 20 bp, Artificial Sequence
  Description of Artificial Sequence: Synthetic oligonucleotide
  Target: PCSK9; (+) strand; PAM type: NRG; PAM sequence: GGG
gtaagggaggggctgggaaa

SEQ ID NO: 16395 - DNA, 20 bp, Artificial Sequence
  Description of Artificial Sequence: Synthetic oligonucleotide
  Target: PCSK9; (+) strand; PAM type: NRG; PAM sequence: GGG
taagggaggggctgggaaag

SEQ ID NO: 16396 - DNA, 20 bp, Artificial Sequence
  Description of Artificial Sequence: Synthetic oligonucleotide
  Target: PCSK9; (+) strand; PAM type: NRG; PAM sequence: GAG
agggaggggctgggaaaggg

SEQ ID NO: 16397 - DNA, 20 bp, Artificial Sequence
  Description of Artificial Sequence: Synthetic oligonucleotide
  Target: PCSK9; (+) strand; PAM type: NRG; PAM sequence: CAG
gaggggctgggaaaggggag

SEQ ID NO: 16398 - DNA, 20 bp, Artificial Sequence
  Description of Artificial Sequence: Synthetic oligonucleotide
  Target: PCSK9; (+) strand; PAM type: NRG; PAM sequence: AGG
aggggctgggaaaggggagc

SEQ ID NO: 16399 - DNA, 20 bp, Artificial Sequence
  Description of Artificial Sequence: Synthetic oligonucleotide
  Target: PCSK9; (+) strand; PAM type: NRG; PAM sequence: AAG
aaaggggagcaggtctcccc

SEQ ID NO: 16400 - DNA, 20 bp, Artificial Sequence
  Description of Artificial Sequence: Synthetic oligonucleotide
  Target: PCSK9; (+) strand; PAM type: NRG; PAM sequence: AGG
aaggggagcaggtctcccca

SEQ ID NO: 16401 - DNA, 20 bp, Artificial Sequence
  Description of Artificial Sequence: Synthetic oligonucleotide
  Target: PCSK9; (+) strand; PAM type: NRG; PAM sequence: GGG
aggggagcaggtctccccaa

SEQ ID NO: 16402 - DNA, 20 bp, Artificial Sequence
  Description of Artificial Sequence: Synthetic oligonucleotide
  Target: PCSK9; (+) strand; PAM type: NRG; PAM sequence: GGG
ggggagcaggtctccccaag

SEQ ID NO: 16403 - DNA, 20 bp, Artificial Sequence
  Description of Artificial Sequence: Synthetic oligonucleotide
  Target: PCSK9; (+) strand; PAM type: NRG; PAM sequence: TGG
gtctccccaaggggtgacct

SEQ ID NO: 16404 - DNA, 20 bp, Artificial Sequence
  Description of Artificial Sequence: Synthetic oligonucleotide
  Target: PCSK9; (+) strand; PAM type: NRG; PAM sequence: CAG
gaccttggctttgttcctcc

SEQ ID NO: 16405 - DNA, 20 bp, Artificial Sequence
  Description of Artificial Sequence: Synthetic oligonucleotide
  Target: PCSK9; (+) strand; PAM type: NRG; PAM sequence: AGG
accttggctttgttcctccc

SEQ ID NO: 16406 - DNA, 20 bp, Artificial Sequence
  Description of Artificial Sequence: Synthetic oligonucleotide
  Target: PCSK9; (+) strand; PAM type: NRG; PAM sequence: TGG
ggctttgttcctcccaggcc

SEQ ID NO: 16407 - DNA, 20 bp, Artificial Sequence
  Description of Artificial Sequence: Synthetic oligonucleotide
  Target: PCSK9; (+) strand; PAM type: NRG; PAM sequence: GAG
ctttgttcctcccaggcctg

SEQ ID NO: 16408 - DNA, 20 bp, Artificial Sequence
  Description of Artificial Sequence: Synthetic oligonucleotide
  Target: PCSK9; (+) strand; PAM type: NRG; PAM sequence: CGG
tcccaggcctggagtttatt

SEQ ID NO: 16409 - DNA, 20 bp, Artificial Sequence
  Description of Artificial Sequence: Synthetic oligonucleotide
  Target: PCSK9; (+) strand; PAM type: NRG; PAM sequence: AAG
ggcctggagtttattcggaa

SEQ ID NO: 16410 - DNA, 20 bp, Artificial Sequence
  Description of Artificial Sequence: Synthetic oligonucleotide
  Target: PCSK9; (+) strand; PAM type: NRG; PAM sequence: CAG
tggagtttattcggaaaagc

SEQ ID NO: 16411 - DNA, 20 bp, Artificial Sequence
  Description of Artificial Sequence: Synthetic oligonucleotide
  Target: PCSK9; (+) strand; PAM type: NRG; PAM sequence: TGG
gtttattcggaaaagccagc

SEQ ID NO: 16412 - DNA, 20 bp, Artificial Sequence
  Description of Artificial Sequence: Synthetic oligonucleotide
  Target: PCSK9; (+) strand; PAM type: NRG; PAM sequence: CAG
ttcggaaaagccagctggtc

SEQ ID NO: 16413 - DNA, 20 bp, Artificial Sequence
  Description of Artificial Sequence: Synthetic oligonucleotide
  Target: PCSK9; (+) strand; PAM type: NRG; PAM sequence: TGG
aagccagctggtccagcctg

SEQ ID NO: 16414 - DNA, 20 bp, Artificial Sequence
  Description of Artificial Sequence: Synthetic oligonucleotide
  Target: PCSK9; (+) strand; PAM type: NRG; PAM sequence: GGG
agccagctggtccagcctgt

SEQ ID NO: 16415 - DNA, 20 bp, Artificial Sequence
  Description of Artificial Sequence: Synthetic oligonucleotide
  Target: PCSK9; (+) strand; PAM type: NRG; PAM sequence: GGG
gccagctggtccagcctgtg

SEQ ID NO: 16416 - DNA, 20 bp, Artificial Sequence
  Description of Artificial Sequence: Synthetic oligonucleotide
  Target: PCSK9; (+) strand; PAM type: NRG; PAM sequence: TGG
ggtccagcctgtggggccac

SEQ ID NO: 16417 - DNA, 20 bp, Artificial Sequence
  Description of Artificial Sequence: Synthetic oligonucleotide
  Target: PCSK9; (+) strand; PAM type: NRG; PAM sequence: TGG
ccagcctgtggggccactgg

SEQ ID NO: 16418 - DNA, 20 bp, Artificial Sequence
  Description of Artificial Sequence: Synthetic oligonucleotide
  Target: PCSK9; (+) strand; PAM type: NRG; PAM sequence: TGG
actggtggtgctgctgcccc

SEQ ID NO: 16419 - DNA, 20 bp, Artificial Sequence
  Description of Artificial Sequence: Synthetic oligonucleotide
  Target: PCSK9; (+) strand; PAM type: NRG; PAM sequence: CGG
ggtggtgctgctgcccctgg

SEQ ID NO: 16420 - DNA, 20 bp, Artificial Sequence
  Description of Artificial Sequence: Synthetic oligonucleotide
  Target: PCSK9; (+) strand; PAM type: NRG; PAM sequence: GGG
gtggtgctgctgcccctggc

SEQ ID NO: 16421 - DNA, 20 bp, Artificial Sequence
  Description of Artificial Sequence: Synthetic oligonucleotide
  Target: PCSK9; (+) strand; PAM type: NRG; PAM sequence: TGG
gtgctgctgcccctggcggg

SEQ ID NO: 16422 - DNA, 20 bp, Artificial Sequence
  Description of Artificial Sequence: Synthetic oligonucleotide
  Target: PCSK9; (+) strand; PAM type: NRG; PAM sequence: GGG
tgctgctgcccctggcgggt

SEQ ID NO: 16423 - DNA, 20 bp, Artificial Sequence
  Description of Artificial Sequence: Synthetic oligonucleotide
  Target: PCSK9; (+) strand; PAM type: NRG; PAM sequence: CAG
ctgcccctggcgggtgggta

SEQ ID NO: 16424 - DNA, 20 bp, Artificial Sequence
  Description of Artificial Sequence: Synthetic oligonucleotide
  Target: PCSK9; (+) strand; PAM type: NRG; PAM sequence: CAG
gcgtcctcaacgccgcctgc

SEQ ID NO: 16425 - DNA, 20 bp, Artificial Sequence
  Description of Artificial Sequence: Synthetic oligonucleotide
  Target: PCSK9; (+) strand; PAM type: NRG; PAM sequence: TGG
caacgccgcctgccagcgcc

SEQ ID NO: 16426 - DNA, 20 bp, Artificial Sequence
  Description of Artificial Sequence: Synthetic oligonucleotide
  Target: PCSK9; (+) strand; PAM type: NRG; PAM sequence: GAG
gccgcctgccagcgcctggc

SEQ ID NO: 16427 - DNA, 20 bp, Artificial Sequence
  Description of Artificial Sequence: Synthetic oligonucleotide
  Target: PCSK9; (+) strand; PAM type: NRG; PAM sequence: AGG
ccgcctgccagcgcctggcg

SEQ ID NO: 16428 - DNA, 20 bp, Artificial Sequence
  Description of Artificial Sequence: Synthetic oligonucleotide
  Target: PCSK9; (+) strand; PAM type: NRG; PAM sequence: GGG
cgcctgccagcgcctggcga

SEQ ID NO: 16429 - DNA, 20 bp, Artificial Sequence
  Description of Artificial Sequence: Synthetic oligonucleotide
  Target: PCSK9; (+) strand; PAM type: NRG; PAM sequence: TGG
tgccagcgcctggcgagggc

SEQ ID NO: 16430 - DNA, 20 bp, Artificial Sequence
  Description of Artificial Sequence: Synthetic oligonucleotide
  Target: PCSK9; (+) strand; PAM type: NRG; PAM sequence: GGG
gccagcgcctggcgagggct

SEQ ID NO: 16431 - DNA, 20 bp, Artificial Sequence
  Description of Artificial Sequence: Synthetic oligonucleotide
  Target: PCSK9; (+) strand; PAM type: NRG; PAM sequence: GGG
ccagcgcctggcgagggctg

SEQ ID NO: 16432 - DNA, 20 bp, Artificial Sequence
  Description of Artificial Sequence: Synthetic oligonucleotide
  Target: PCSK9; (+) strand; PAM type: NRG; PAM sequence: TGG
ggcgagggctggggtcgtgc

SEQ ID NO: 16433 - DNA, 20 bp, Artificial Sequence
  Description of Artificial Sequence: Synthetic oligonucleotide
  Target: PCSK9; (+) strand; PAM type: NRG; PAM sequence: CGG
gtcgtgctggtcaccgctgc

SEQ ID NO: 16434 - DNA, 20 bp, Artificial Sequence
  Description of Artificial Sequence: Synthetic oligonucleotide
  Target: PCSK9; (+) strand; PAM type: NRG; PAM sequence: CGG
tcaccgctgccggcaacttc

SEQ ID NO: 16435 - DNA, 20 bp, Artificial Sequence
  Description of Artificial Sequence: Synthetic oligonucleotide
  Target: PCSK9; (+) strand; PAM type: NRG; PAM sequence: GGG
caccgctgccggcaacttcc

SEQ ID NO: 16436 - DNA, 20 bp, Artificial Sequence
  Description of Artificial Sequence: Synthetic oligonucleotide
  Target: PCSK9; (+) strand; PAM type: NRG; PAM sequence: CAG
cgatgcctgcctctactccc

SEQ ID NO: 16437 - DNA, 20 bp, Artificial Sequence
  Description of Artificial Sequence: Synthetic oligonucleotide
  Target: PCSK9; (+) strand; PAM type: NRG; PAM sequence: CAG
ctgcctctactccccagcct

SEQ ID NO: 16438 - DNA, 20 bp, Artificial Sequence
  Description of Artificial Sequence: Synthetic oligonucleotide
  Target: PCSK9; (+) strand; PAM type: NRG; PAM sequence: GAG
actccccagcctcagctccc

SEQ ID NO: 16439 - DNA, 20 bp, Artificial Sequence
  Description of Artificial Sequence: Synthetic oligonucleotide
  Target: PCSK9; (+) strand; PAM type: NRG; PAM sequence: AGG
ctccccagcctcagctcccg

SEQ ID NO: 16440 - DNA, 20 bp, Artificial Sequence
  Description of Artificial Sequence: Synthetic oligonucleotide
  Target: PCSK9; (+) strand; PAM type: NRG; PAM sequence: TAG
cccagcctcagctcccgagg

SEQ ID NO: 16441 - DNA, 20 bp, Artificial Sequence
  Description of Artificial Sequence: Synthetic oligonucleotide
  Target: PCSK9; (+) strand; PAM type: NRG; PAM sequence: AGG
ccagcctcagctcccgaggt

SEQ ID NO: 16442 - DNA, 20 bp, Artificial Sequence
  Description of Artificial Sequence: Synthetic oligonucleotide
  Target: PCSK9; (+) strand; PAM type: NRG; PAM sequence: TGG
tcagctcccgaggtaggtgc

SEQ ID NO: 16443 - DNA, 20 bp, Artificial Sequence
  Description of Artificial Sequence: Synthetic oligonucleotide
  Target: PCSK9; (+) strand; PAM type: NRG; PAM sequence: GGG
cagctcccgaggtaggtgct

SEQ ID NO: 16444 - DNA, 20 bp, Artificial Sequence
  Description of Artificial Sequence: Synthetic oligonucleotide
  Target: PCSK9; (+) strand; PAM type: NRG; PAM sequence: GGG
agctcccgaggtaggtgctg

SEQ ID NO: 16445 - DNA, 20 bp, Artificial Sequence
  Description of Artificial Sequence: Synthetic oligonucleotide
  Target: PCSK9; (+) strand; PAM type: NRG; PAM sequence: AAG
ggtgctggggctgctgcccc

SEQ ID NO: 16446 - DNA, 20 bp, Artificial Sequence
  Description of Artificial Sequence: Synthetic oligonucleotide
  Target: PCSK9; (+) strand; PAM type: NRG; PAM sequence: AGG
gtgctggggctgctgcccca

SEQ ID NO: 16447 - DNA, 20 bp, Artificial Sequence
  Description of Artificial Sequence: Synthetic oligonucleotide
  Target: PCSK9; (+) strand; PAM type: NRG; PAM sequence: CGG
ggggctgctgccccaaggcg

SEQ ID NO: 16448 - DNA, 20 bp, Artificial Sequence
  Description of Artificial Sequence: Synthetic oligonucleotide
  Target: PCSK9; (+) strand; PAM type: NRG; PAM sequence: GGG
gggctgctgccccaaggcgc

SEQ ID NO: 16449 - DNA, 20 bp, Artificial Sequence
  Description of Artificial Sequence: Synthetic oligonucleotide
  Target: PCSK9; (+) strand; PAM type: NRG; PAM sequence: TAG
ctgctgccccaaggcgcggg

SEQ ID NO: 16450 - DNA, 20 bp, Artificial Sequence
  Description of Artificial Sequence: Synthetic oligonucleotide
  Target: PCSK9; (+) strand; PAM type: NRG; PAM sequence: AGG
tgctgccccaaggcgcgggt

SEQ ID NO: 16451 - DNA, 20 bp, Artificial Sequence
  Description of Artificial Sequence: Synthetic oligonucleotide
  Target: PCSK9; (+) strand; PAM type: NRG; PAM sequence: GGG
gctgccccaaggcgcgggta

SEQ ID NO: 16452 - DNA, 20 bp, Artificial Sequence
  Description of Artificial Sequence: Synthetic oligonucleotide
  Target: PCSK9; (+) strand; PAM type: NRG; PAM sequence: GGG
ctgccccaaggcgcgggtag

SEQ ID NO: 16453 - DNA, 20 bp, Artificial Sequence
  Description of Artificial Sequence: Synthetic oligonucleotide
  Target: PCSK9; (+) strand; PAM type: NRG; PAM sequence: GGG
tgccccaaggcgcgggtagg

SEQ ID NO: 16454 - DNA, 20 bp, Artificial Sequence
  Description of Artificial Sequence: Synthetic oligonucleotide
  Target: PCSK9; (+) strand; PAM type: NRG; PAM sequence: CGG
cccaaggcgcgggtaggggg

SEQ ID NO: 16455 - DNA, 20 bp, Artificial Sequence
  Description of Artificial Sequence: Synthetic oligonucleotide
  Target: PCSK9; (+) strand; PAM type: NRG; PAM sequence: GAG
caaggcgcgggtagggggcg

SEQ ID NO: 16456 - DNA, 20 bp, Artificial Sequence
  Description of Artificial Sequence: Synthetic oligonucleotide
  Target: PCSK9; (+) strand; PAM type: NRG; PAM sequence: AGG
aaggcgcgggtagggggcgg

SEQ ID NO: 16457 - DNA, 20 bp, Artificial Sequence
  Description of Artificial Sequence: Synthetic oligonucleotide
  Target: PCSK9; (+) strand; PAM type: NRG; PAM sequence: GGG
aggcgcgggtagggggcgga

SEQ ID NO: 16458 - DNA, 20 bp, Artificial Sequence
  Description of Artificial Sequence: Synthetic oligonucleotide
  Target: PCSK9; (+) strand; PAM type: NRG; PAM sequence: CGG
cgcgggtagggggcggaggg

SEQ ID NO: 16459 - DNA, 20 bp, Artificial Sequence
  Description of Artificial Sequence: Synthetic oligonucleotide
  Target: PCSK9; (+) strand; PAM type: NRG; PAM sequence: GAG
cgggtagggggcggagggcg

SEQ ID NO: 16460 - DNA, 20 bp, Artificial Sequence
  Description of Artificial Sequence: Synthetic oligonucleotide
  Target: PCSK9; (+) strand; PAM type: NRG; PAM sequence: AGG
gggtagggggcggagggcgg

SEQ ID NO: 16461 - DNA, 20 bp, Artificial Sequence
  Description of Artificial Sequence: Synthetic oligonucleotide
  Target: PCSK9; (+) strand; PAM type: NRG; PAM sequence: GGG
ggtagggggcggagggcgga

SEQ ID NO: 16462 - DNA, 20 bp, Artificial Sequence
  Description of Artificial Sequence: Synthetic oligonucleotide
  Target: PCSK9; (+) strand; PAM type: NRG; PAM sequence: CGG
agggggcggagggcggaggg

SEQ ID NO: 16463 - DNA, 20 bp, Artificial Sequence
  Description of Artificial Sequence: Synthetic oligonucleotide
  Target: PCSK9; (+) strand; PAM type: NRG; PAM sequence: GAG
ggggcggagggcggagggcg

SEQ ID NO: 16464 - DNA, 20 bp, Artificial Sequence
  Description of Artificial Sequence: Synthetic oligonucleotide
  Target: PCSK9; (+) strand; PAM type: NRG; PAM sequence: AGG
gggcggagggcggagggcgg

SEQ ID NO: 16465 - DNA, 20 bp, Artificial Sequence
  Description of Artificial Sequence: Synthetic oligonucleotide
  Target: PCSK9; (+) strand; PAM type: NRG; PAM sequence: GGG
ggcggagggcggagggcgga

SEQ ID NO: 16466 - DNA, 20 bp, Artificial Sequence
  Description of Artificial Sequence: Synthetic oligonucleotide
  Target: PCSK9; (+) strand; PAM type: NRG; PAM sequence: GAG
cggagggcggagggcggagg

SEQ ID NO: 16467 - DNA, 20 bp, Artificial Sequence
  Description of Artificial Sequence: Synthetic oligonucleotide
  Target: PCSK9; (+) strand; PAM type: NRG; PAM sequence: AGG
ggagggcggagggcggaggg

SEQ ID NO: 16468 - DNA, 20 bp, Artificial Sequence
  Description of Artificial Sequence: Synthetic oligonucleotide
  Target: PCSK9; (+) strand; PAM type: NRG; PAM sequence: GGG
gagggcggagggcggaggga

SEQ ID NO: 16469 - DNA, 20 bp, Artificial Sequence
  Description of Artificial Sequence: Synthetic oligonucleotide
  Target: PCSK9; (+) strand; PAM type: NRG; PAM sequence: CGG
ggcggagggcggagggaggg

SEQ ID NO: 16470 - DNA, 20 bp, Artificial Sequence
  Description of Artificial Sequence: Synthetic oligonucleotide
  Target: PCSK9; (+) strand; PAM type: NRG; PAM sequence: GGG
gcggagggcggagggagggc

SEQ ID NO: 16471 - DNA, 20 bp, Artificial Sequence
  Description of Artificial Sequence: Synthetic oligonucleotide
  Target: PCSK9; (+) strand; PAM type: NRG; PAM sequence: CGG
gagggcggagggagggcggg

SEQ ID NO: 16472 - DNA, 20 bp, Artificial Sequence
  Description of Artificial Sequence: Synthetic oligonucleotide
  Target: PCSK9; (+) strand; PAM type: NRG; PAM sequence: GGG
agggcggagggagggcgggc

SEQ ID NO: 16473 - DNA, 20 bp, Artificial Sequence
  Description of Artificial Sequence: Synthetic oligonucleotide
  Target: PCSK9; (+) strand; PAM type: NRG; PAM sequence: CAG
gcggagggagggcgggcggg

SEQ ID NO: 16474 - DNA, 20 bp, Artificial Sequence
  Description of Artificial Sequence: Synthetic oligonucleotide
  Target: PCSK9; (+) strand; PAM type: NRG; PAM sequence: AGG
cggagggagggcgggcgggc

SEQ ID NO: 16475 - DNA, 20 bp, Artificial Sequence
  Description of Artificial Sequence: Synthetic oligonucleotide
  Target: PCSK9; (+) strand; PAM type: NRG; PAM sequence: CGG
agggagggcgggcgggcagg

SEQ ID NO: 16476 - DNA, 20 bp, Artificial Sequence
  Description of Artificial Sequence: Synthetic oligonucleotide
  Target: PCSK9; (+) strand; PAM type: NRG; PAM sequence: GGG
gggagggcgggcgggcaggc

SEQ ID NO: 16477 - DNA, 20 bp, Artificial Sequence
  Description of Artificial Sequence: Synthetic oligonucleotide
  Target: PCSK9; (+) strand; PAM type: NRG; PAM sequence: TGG
gcgggcaggcgggcttcttg

SEQ ID NO: 16478 - DNA, 20 bp, Artificial Sequence
  Description of Artificial Sequence: Synthetic oligonucleotide
  Target: PCSK9; (+) strand; PAM type: NRG; PAM sequence: TGG
ggcgggcttcttgtggcacg

SEQ ID NO: 16479 - DNA, 20 bp, Artificial Sequence
  Description of Artificial Sequence: Synthetic oligonucleotide
  Target: PCSK9; (+) strand; PAM type: NRG; PAM sequence: GGG
gcgggcttcttgtggcacgt

SEQ ID NO: 16480 - DNA, 20 bp, Artificial Sequence
  Description of Artificial Sequence: Synthetic oligonucleotide
  Target: PCSK9; (+) strand; PAM type: NRG; PAM sequence: TGG
tgtggcacgtgggcttcttg

SEQ ID NO: 16481 - DNA, 20 bp, Artificial Sequence
  Description of Artificial Sequence: Synthetic oligonucleotide
  Target: PCSK9; (+) strand; PAM type: NRG; PAM sequence: TGG
ggcttcttgtggcacgttcc

SEQ ID NO: 16482 - DNA, 20 bp, Artificial Sequence
  Description of Artificial Sequence: Synthetic oligonucleotide
  Target: PCSK9; (+) strand; PAM type: NRG; PAM sequence: GAG
cttcttgtggcacgttcctg

SEQ ID NO: 16483 - DNA, 20 bp, Artificial Sequence
  Description of Artificial Sequence: Synthetic oligonucleotide
  Target: PCSK9; (+) strand; PAM type: NRG; PAM sequence: AGG
ttcttgtggcacgttcctgg

SEQ ID NO: 16484 - DNA, 20 bp, Artificial Sequence
  Description of Artificial Sequence: Synthetic oligonucleotide
  Target: PCSK9; (+) strand; PAM type: NRG; PAM sequence: TGG
tcctggaggccgaacccttc

SEQ ID NO: 16485 - DNA, 20 bp, Artificial Sequence
  Description of Artificial Sequence: Synthetic oligonucleotide
  Target: PCSK9; (+) strand; PAM type: NRG; PAM sequence: TGG
aggccgaacccttctggctt

SEQ ID NO: 16486 - DNA, 20 bp, Artificial Sequence
  Description of Artificial Sequence: Synthetic oligonucleotide
  Target: PCSK9; (+) strand; PAM type: NRG; PAM sequence: AAG
ccgaacccttctggctttgg

SEQ ID NO: 16487 - DNA, 20 bp, Artificial Sequence
  Description of Artificial Sequence: Synthetic oligonucleotide
  Target: PCSK9; (+) strand; PAM type: NRG; PAM sequence: AGG
cgaacccttctggctttgga

SEQ ID NO: 16488 - DNA, 20 bp, Artificial Sequence
  Description of Artificial Sequence: Synthetic oligonucleotide
  Target: PCSK9; (+) strand; PAM type: NRG; PAM sequence: GAG
aacccttctggctttggaag

SEQ ID NO: 16489 - DNA, 20 bp, Artificial Sequence
  Description of Artificial Sequence: Synthetic oligonucleotide
  Target: PCSK9; (+) strand; PAM type: NRG; PAM sequence: CAG
ctggctttggaaggagtcgt

SEQ ID NO: 16490 - DNA, 20 bp, Artificial Sequence
  Description of Artificial Sequence: Synthetic oligonucleotide
  Target: PCSK9; (+) strand; PAM type: NRG; PAM sequence: GAG
ggctttggaaggagtcgtca

SEQ ID NO: 16491 - DNA, 20 bp, Artificial Sequence
  Description of Artificial Sequence: Synthetic oligonucleotide
  Target: PCSK9; (+) strand; PAM type: NRG; PAM sequence: CGG
cgtcagagacccccgccatg

SEQ ID NO: 16492 - DNA, 20 bp, Artificial Sequence
  Description of Artificial Sequence: Synthetic oligonucleotide
  Target: PCSK9; (+) strand; PAM type: NRG; PAM sequence: GGG
gtcagagacccccgccatgc

SEQ ID NO: 16493 - DNA, 20 bp, Artificial Sequence
  Description of Artificial Sequence: Synthetic oligonucleotide
  Target: PCSK9; (+) strand; PAM type: NRG; PAM sequence: GAG
cagagacccccgccatgcgg

SEQ ID NO: 16494 - DNA, 20 bp, Artificial Sequence
  Description of Artificial Sequence: Synthetic oligonucleotide
  Target: PCSK9; (+) strand; PAM type: NRG; PAM sequence: AGG
agagacccccgccatgcggg

SEQ ID NO: 16495 - DNA, 20 bp, Artificial Sequence
  Description of Artificial Sequence: Synthetic oligonucleotide
  Target: PCSK9; (+) strand; PAM type: NRG; PAM sequence: TGG
acccccgccatgcgggaggc

SEQ ID NO: 16496 - DNA, 20 bp, Artificial Sequence
  Description of Artificial Sequence: Synthetic oligonucleotide
  Target: PCSK9; (+) strand; PAM type: NRG; PAM sequence: GGG
cccccgccatgcgggaggct

SEQ ID NO: 16497 - DNA, 20 bp, Artificial Sequence
  Description of Artificial Sequence: Synthetic oligonucleotide
  Target: PCSK9; (+) strand; PAM type: NRG; PAM sequence: GGG
ccccgccatgcgggaggctg

SEQ ID NO: 16498 - DNA, 20 bp, Artificial Sequence
  Description of Artificial Sequence: Synthetic oligonucleotide
  Target: PCSK9; (+) strand; PAM type: NRG; PAM sequence: GAG
ccgccatgcgggaggctggg

SEQ ID NO: 16499 - DNA, 20 bp, Artificial Sequence
  Description of Artificial Sequence: Synthetic oligonucleotide
  Target: PCSK9; (+) strand; PAM type: NRG; PAM sequence: AGG
cgccatgcgggaggctgggg

SEQ ID NO: 16500 - DNA, 20 bp, Artificial Sequence
  Description of Artificial Sequence: Synthetic oligonucleotide
  Target: PCSK9; (+) strand; PAM type: NRG; PAM sequence: AAG
catgcgggaggctggggagg

SEQ ID NO: 16501 - DNA, 20 bp, Artificial Sequence
  Description of Artificial Sequence: Synthetic oligonucleotide
  Target: PCSK9; (+) strand; PAM type: NRG; PAM sequence: AGG
atgcgggaggctggggagga

SEQ ID NO: 16502 - DNA, 20 bp, Artificial Sequence
  Description of Artificial Sequence: Synthetic oligonucleotide
  Target: PCSK9; (+) strand; PAM type: NRG; PAM sequence: GGG
tgcgggaggctggggaggaa

SEQ ID NO: 16503 - DNA, 20 bp, Artificial Sequence
  Description of Artificial Sequence: Synthetic oligonucleotide
  Target: PCSK9; (+) strand; PAM type: NRG; PAM sequence: GGG
gcgggaggctggggaggaag

SEQ ID NO: 16504 - DNA, 20 bp, Artificial Sequence
  Description of Artificial Sequence: Synthetic oligonucleotide
  Target: PCSK9; (+) strand; PAM type: NRG; PAM sequence: CAG
gctcgaaacctccatcatcg

SEQ ID NO: 16505 - DNA, 20 bp, Artificial Sequence
  Description of Artificial Sequence: Synthetic oligonucleotide
  Target: PCSK9; (+) strand; PAM type: NRG; PAM sequence: GAG
tcgaaacctccatcatcgca

SEQ ID NO: 16506 - DNA, 20 bp, Artificial Sequence
  Description of Artificial Sequence: Synthetic oligonucleotide
  Target: PCSK9; (+) strand; PAM type: NRG; PAM sequence: TAG
ccatcatcgcagagtctgaa

SEQ ID NO: 16507 - DNA, 20 bp, Artificial Sequence
  Description of Artificial Sequence: Synthetic oligonucleotide
  Target: PCSK9; (+) strand; PAM type: NRG; PAM sequence: CAG
tcatcgcagagtctgaatag

SEQ ID NO: 16508 - DNA, 20 bp, Artificial Sequence
  Description of Artificial Sequence: Synthetic oligonucleotide
  Target: PCSK9; (+) strand; PAM type: NRG; PAM sequence: TGG
tcgcagagtctgaatagcag

SEQ ID NO: 16509 - DNA, 20 bp, Artificial Sequence
  Description of Artificial Sequence: Synthetic oligonucleotide
  Target: PCSK9; (+) strand; PAM type: NRG; PAM sequence: TAG
ggccccgccatgcgcccacg

SEQ ID NO: 16510 - DNA, 20 bp, Artificial Sequence
  Description of Artificial Sequence: Synthetic oligonucleotide
  Target: PCSK9; (+) strand; PAM type: NRG; PAM sequence: CGG
cccgccatgcgcccacgtag

SEQ ID NO: 16511 - DNA, 20 bp, Artificial Sequence
  Description of Artificial Sequence: Synthetic oligonucleotide
  Target: PCSK9; (+) strand; PAM type: NRG; PAM sequence: TAG
cccacgtagcggcgcctacg

SEQ ID NO: 16512 - DNA, 20 bp, Artificial Sequence
  Description of Artificial Sequence: Synthetic oligonucleotide
  Target: PCSK9; (+) strand; PAM type: NRG; PAM sequence: TGG
cacgcccccacaccccgtcc

SEQ ID NO: 16513 - DNA, 20 bp, Artificial Sequence
  Description of Artificial Sequence: Synthetic oligonucleotide
  Target: PCSK9; (+) strand; PAM type: NRG; PAM sequence: AAG
cctggccactctccctcctg

SEQ ID NO: 16514 - DNA, 20 bp, Artificial Sequence
  Description of Artificial Sequence: Synthetic oligonucleotide
  Target: PCSK9; (+) strand; PAM type: NRG; PAM sequence: AGG
ctggccactctccctcctga

SEQ ID NO: 16515 - DNA, 20 bp, Artificial Sequence
  Description of Artificial Sequence: Synthetic oligonucleotide
  Target: PCSK9; (+) strand; PAM type: NRG; PAM sequence: TGG
tctccctcctgaaggtcttc

SEQ ID NO: 16516 - DNA, 20 bp, Artificial Sequence
  Description of Artificial Sequence: Synthetic oligonucleotide
  Target: PCSK9; (+) strand; PAM type: NRG; PAM sequence: CAG
cccctccccatctccatccc

SEQ ID NO: 16517 - DNA, 20 bp, Artificial Sequence
  Description of Artificial Sequence: Synthetic oligonucleotide
  Target: PCSK9; (+) strand; PAM type: NRG; PAM sequence: AGG
ccctccccatctccatcccc

SEQ ID NO: 16518 - DNA, 20 bp, Artificial Sequence
  Description of Artificial Sequence: Synthetic oligonucleotide
  Target: PCSK9; (+) strand; PAM type: NRG; PAM sequence: TGG
gtcctctgcccaatactctt

SEQ ID NO: 16519 - DNA, 20 bp, Artificial Sequence
  Description of Artificial Sequence: Synthetic oligonucleotide
  Target: PCSK9; (+) strand; PAM type: NRG; PAM sequence: GGG
tcctctgcccaatactcttt

SEQ ID NO: 16520 - DNA, 20 bp, Artificial Sequence
  Description of Artificial Sequence: Synthetic oligonucleotide
  Target: PCSK9; (+) strand; PAM type: NRG; PAM sequence: CAG
ctttgggcctccctgttgtc

SEQ ID NO: 16521 - DNA, 20 bp, Artificial Sequence
  Description of Artificial Sequence: Synthetic oligonucleotide
  Target: PCSK9; (+) strand; PAM type: NRG; PAM sequence: CGG
ctgttgtccagctctctccg

SEQ ID NO: 16522 - DNA, 20 bp, Artificial Sequence
  Description of Artificial Sequence: Synthetic oligonucleotide
  Target: PCSK9; (+) strand; PAM type: NRG; PAM sequence: GAG
ggctccatgactgacaactt

SEQ ID NO: 16523 - DNA, 20 bp, Artificial Sequence
  Description of Artificial Sequence: Synthetic oligonucleotide
  Target: PCSK9; (+) strand; PAM type: NRG; PAM sequence: AAG
ccatgactgacaacttgagc

SEQ ID NO: 16524 - DNA, 20 bp, Artificial Sequence
  Description of Artificial Sequence: Synthetic oligonucleotide
  Target: PCSK9; (+) strand; PAM type: NRG; PAM sequence: AGG
catgactgacaacttgagca

SEQ ID NO: 16525 - DNA, 20 bp, Artificial Sequence
  Description of Artificial Sequence: Synthetic oligonucleotide
  Target: PCSK9; (+) strand; PAM type: NRG; PAM sequence: TGG
ttgagcaaggctaatgtgaa

SEQ ID NO: 16526 - DNA, 20 bp, Artificial Sequence
  Description of Artificial Sequence: Synthetic oligonucleotide
  Target: PCSK9; (+) strand; PAM type: NRG; PAM sequence: GGG
tgagcaaggctaatgtgaat

SEQ ID NO: 16527 - DNA, 20 bp, Artificial Sequence
  Description of Artificial Sequence: Synthetic oligonucleotide
  Target: PCSK9; (+) strand; PAM type: NRG; PAM sequence: GAG
agcaaggctaatgtgaatgg

SEQ ID NO: 16528 - DNA, 20 bp, Artificial Sequence
  Description of Artificial Sequence: Synthetic oligonucleotide
  Target: PCSK9; (+) strand; PAM type: NRG; PAM sequence: CGG
aaggctaatgtgaatgggag

SEQ ID NO: 16529 - DNA, 20 bp, Artificial Sequence
  Description of Artificial Sequence: Synthetic oligonucleotide
  Target: PCSK9; (+) strand; PAM type: NRG; PAM sequence: GAG
taatgtgaatgggagcggtt

SEQ ID NO: 16530 - DNA, 20 bp, Artificial Sequence
  Description of Artificial Sequence: Synthetic oligonucleotide
  Target: PCSK9; (+) strand; PAM type: NRG; PAM sequence: AGG
aatgtgaatgggagcggttg

SEQ ID NO: 16531 - DNA, 20 bp, Artificial Sequence
  Description of Artificial Sequence: Synthetic oligonucleotide
  Target: PCSK9; (+) strand; PAM type: NRG; PAM sequence: GGG
atgtgaatgggagcggttga

SEQ ID NO: 16532 - DNA, 20 bp, Artificial Sequence
  Description of Artificial Sequence: Synthetic oligonucleotide
  Target: PCSK9; (+) strand; PAM type: NRG; PAM sequence: CAG
aatgggagcggttgagggct

SEQ ID NO: 16533 - DNA, 20 bp, Artificial Sequence
  Description of Artificial Sequence: Synthetic oligonucleotide
  Target: PCSK9; (+) strand; PAM type: NRG; PAM sequence: GAG
agggctcagacctctcaccc

SEQ ID NO: 16534 - DNA, 20 bp, Artificial Sequence
  Description of Artificial Sequence: Synthetic oligonucleotide
  Target: PCSK9; (+) strand; PAM type: NRG; PAM sequence: AGG
gggctcagacctctcacccg

SEQ ID NO: 16535 - DNA, 20 bp, Artificial Sequence
  Description of Artificial Sequence: Synthetic oligonucleotide
  Target: PCSK9; (+) strand; PAM type: NRG; PAM sequence: CAG
tctcacccgaggaacatcca

SEQ ID NO: 16536 - DNA, 20 bp, Artificial Sequence
  Description of Artificial Sequence: Synthetic oligonucleotide
  Target: PCSK9; (+) strand; PAM type: NRG; PAM sequence: GAG
tcacccgaggaacatccaca

SEQ ID NO: 16537 - DNA, 20 bp, Artificial Sequence
  Description of Artificial Sequence: Synthetic oligonucleotide
  Target: PCSK9; (+) strand; PAM type: NRG; PAM sequence: CGG
cacagagtgtgccgcatgcc

SEQ ID NO: 16538 - DNA, 20 bp, Artificial Sequence
  Description of Artificial Sequence: Synthetic oligonucleotide
  Target: PCSK9; (+) strand; PAM type: NRG; PAM sequence: CAG
agtgtgccgcatgcccggtg

SEQ ID NO: 16539 - DNA, 20 bp, Artificial Sequence
  Description of Artificial Sequence: Synthetic oligonucleotide
  Target: PCSK9; (+) strand; PAM type: NRG; PAM sequence: TGG
gccgcatgcccggtgcagtg

SEQ ID NO: 16540 - DNA, 20 bp, Artificial Sequence
  Description of Artificial Sequence: Synthetic oligonucleotide
  Target: PCSK9; (+) strand; PAM type: NRG; PAM sequence: CGG
tgcccggtgcagtgtggctg

SEQ ID NO: 16541 - DNA, 20 bp, Artificial Sequence
  Description of Artificial Sequence: Synthetic oligonucleotide
  Target: PCSK9; (+) strand; PAM type: NRG; PAM sequence: GGG
gcccggtgcagtgtggctgc

SEQ ID NO: 16542 - DNA, 20 bp, Artificial Sequence
  Description of Artificial Sequence: Synthetic oligonucleotide
  Target: PCSK9; (+) strand; PAM type: NRG; PAM sequence: GGG
cccggtgcagtgtggctgcg

SEQ ID NO: 16543 - DNA, 20 bp, Artificial Sequence
  Description of Artificial Sequence: Synthetic oligonucleotide
  Target: PCSK9; (+) strand; PAM type: NRG; PAM sequence: CAG
gcagtgtggctgcggggaca

SEQ ID NO: 16544 - DNA, 20 bp, Artificial Sequence
  Description of Artificial Sequence: Synthetic oligonucleotide
  Target: PCSK9; (+) strand; PAM type: NRG; PAM sequence: CGG
tggctgcggggacacagaca

SEQ ID NO: 16545 - DNA, 20 bp, Artificial Sequence
  Description of Artificial Sequence: Synthetic oligonucleotide
  Target: PCSK9; (+) strand; PAM type: NRG; PAM sequence: GAG
gctgcggggacacagacacg

SEQ ID NO: 16546 - DNA, 20 bp, Artificial Sequence
  Description of Artificial Sequence: Synthetic oligonucleotide
  Target: PCSK9; (+) strand; PAM type: NRG; PAM sequence: CGG
gggacacagacacggagcct

SEQ ID NO: 16547 - DNA, 20 bp, Artificial Sequence
  Description of Artificial Sequence: Synthetic oligonucleotide
  Target: PCSK9; (+) strand; PAM type: NRG; PAM sequence: GAG
agacacggagcctcggccct

SEQ ID NO: 16548 - DNA, 20 bp, Artificial Sequence
  Description of Artificial Sequence: Synthetic oligonucleotide
  Target: PCSK9; (+) strand; PAM type: NRG; PAM sequence: AGG
gacacggagcctcggccctg

SEQ ID NO: 16549 - DNA, 20 bp, Artificial Sequence
  Description of Artificial Sequence: Synthetic oligonucleotide
  Target: PCSK9; (+) strand; PAM type: NRG; PAM sequence: GAG
cacggagcctcggccctgag

SEQ ID NO: 16550 - DNA, 20 bp, Artificial Sequence
  Description of Artificial Sequence: Synthetic oligonucleotide
  Target: PCSK9; (+) strand; PAM type: NRG; PAM sequence: TGG
gagcctcggccctgaggagc

SEQ ID NO: 16551 - DNA, 20 bp, Artificial Sequence
  Description of Artificial Sequence: Synthetic oligonucleotide
  Target: PCSK9; (+) strand; PAM type: NRG; PAM sequence: GGG
agcctcggccctgaggagct

SEQ ID NO: 16552 - DNA, 20 bp, Artificial Sequence
  Description of Artificial Sequence: Synthetic oligonucleotide
  Target: PCSK9; (+) strand; PAM type: NRG; PAM sequence: GGG
gcctcggccctgaggagctg

SEQ ID NO: 16553 - DNA, 20 bp, Artificial Sequence
  Description of Artificial Sequence: Synthetic oligonucleotide
  Target: PCSK9; (+) strand; PAM type: NRG; PAM sequence: GGG
cctcggccctgaggagctgg

SEQ ID NO: 16554 - DNA, 20 bp, Artificial Sequence
  Description of Artificial Sequence: Synthetic oligonucleotide
  Target: PCSK9; (+) strand; PAM type: NRG; PAM sequence: GGG
ctcggccctgaggagctggg

SEQ ID NO: 16555 - DNA, 20 bp, Artificial Sequence
  Description of Artificial Sequence: Synthetic oligonucleotide
  Target: PCSK9; (+) strand; PAM type: NRG; PAM sequence: CAG
ggccctgaggagctgggggg

SEQ ID NO: 16556 - DNA, 20 bp, Artificial Sequence
  Description of Artificial Sequence: Synthetic oligonucleotide
  Target: PCSK9; (+) strand; PAM type: NRG; PAM sequence: CAG
cctctgacccaccactcctc

SEQ ID NO: 16557 - DNA, 20 bp, Artificial Sequence
  Description of Artificial Sequence: Synthetic oligonucleotide
  Target: PCSK9; (+) strand; PAM type: NRG; PAM sequence: CAG
acccaccactcctccagtgt

SEQ ID NO: 16558 - DNA, 20 bp, Artificial Sequence
  Description of Artificial Sequence: Synthetic oligonucleotide
  Target: PCSK9; (+) strand; PAM type: NRG; PAM sequence: AGG
cccaccactcctccagtgtc

SEQ ID NO: 16559 - DNA, 20 bp, Artificial Sequence
  Description of Artificial Sequence: Synthetic oligonucleotide
  Target: PCSK9; (+) strand; PAM type: NRG; PAM sequence: CGG
cctccagtgtcaggacactg

SEQ ID NO: 16560 - DNA, 20 bp, Artificial Sequence
  Description of Artificial Sequence: Synthetic oligonucleotide
  Target: PCSK9; (+) strand; PAM type: NRG; PAM sequence: GGG
ctccagtgtcaggacactgc

SEQ ID NO: 16561 - DNA, 20 bp, Artificial Sequence
  Description of Artificial Sequence: Synthetic oligonucleotide
  Target: PCSK9; (+) strand; PAM type: NRG; PAM sequence: TAG
gtcaggacactgcgggtatc

SEQ ID NO: 16562 - DNA, 20 bp, Artificial Sequence
  Description of Artificial Sequence: Synthetic oligonucleotide
  Target: PCSK9; (+) strand; PAM type: NRG; PAM sequence: AGG
tcaggacactgcgggtatct

SEQ ID NO: 16563 - DNA, 20 bp, Artificial Sequence
  Description of Artificial Sequence: Synthetic oligonucleotide
  Target: PCSK9; (+) strand; PAM type: NRG; PAM sequence: GGG
caggacactgcgggtatcta

SEQ ID NO: 16564 - DNA, 20 bp, Artificial Sequence
  Description of Artificial Sequence: Synthetic oligonucleotide
  Target: PCSK9; (+) strand; PAM type: NRG; PAM sequence: GGG
aggacactgcgggtatctag

SEQ ID NO: 16565 - DNA, 20 bp, Artificial Sequence
  Description of Artificial Sequence: Synthetic oligonucleotide
  Target: PCSK9; (+) strand; PAM type: NRG; PAM sequence: AAG
acactgcgggtatctagggg

SEQ ID NO: 16566 - DNA, 20 bp, Artificial Sequence
  Description of Artificial Sequence: Synthetic oligonucleotide
  Target: PCSK9; (+) strand; PAM type: NRG; PAM sequence: AGG
cactgcgggtatctagggga

SEQ ID NO: 16567 - DNA, 20 bp, Artificial Sequence
  Description of Artificial Sequence: Synthetic oligonucleotide
  Target: PCSK9; (+) strand; PAM type: NRG; PAM sequence: AAG
aaggaatcttgttccacttc

SEQ ID NO: 16568 - DNA, 20 bp, Artificial Sequence
  Description of Artificial Sequence: Synthetic oligonucleotide
  Target: PCSK9; (+) strand; PAM type: NRG; PAM sequence: TGG
atcttgttccacttcaagtc

SEQ ID NO: 16569 - DNA, 20 bp, Artificial Sequence
  Description of Artificial Sequence: Synthetic oligonucleotide
  Target: PCSK9; (+) strand; PAM type: NRG; PAM sequence: AAG
cacttcaagtctggaacttc

SEQ ID NO: 16570 - DNA, 20 bp, Artificial Sequence
  Description of Artificial Sequence: Synthetic oligonucleotide
  Target: PCSK9; (+) strand; PAM type: NRG; PAM sequence: TGG
gtgcgtgcgcgcgcgcgcgt

SEQ ID NO: 16571 - DNA, 20 bp, Artificial Sequence
  Description of Artificial Sequence: Synthetic oligonucleotide
  Target: PCSK9; (+) strand; PAM type: NRG; PAM sequence: GGG
tgcgtgcgcgcgcgcgcgtt

SEQ ID NO: 16572 - DNA, 20 bp, Artificial Sequence
  Description of Artificial Sequence: Synthetic oligonucleotide
  Target: PCSK9; (+) strand; PAM type: NRG; PAM sequence: GGG
gcgtgcgcgcgcgcgcgttg

SEQ ID NO: 16573 - DNA, 20 bp, Artificial Sequence
  Description of Artificial Sequence: Synthetic oligonucleotide
  Target: PCSK9; (+) strand; PAM type: NRG; PAM sequence: GGG
cgtgcgcgcgcgcgcgttgg

SEQ ID NO: 16574 - DNA, 20 bp, Artificial Sequence
  Description of Artificial Sequence: Synthetic oligonucleotide
  Target: PCSK9; (+) strand; PAM type: NRG; PAM sequence: TGG
gcgcgcgcgcgcgttggggg

SEQ ID NO: 16575 - DNA, 20 bp, Artificial Sequence
  Description of Artificial Sequence: Synthetic oligonucleotide
  Target: PCSK9; (+) strand; PAM type: NRG; PAM sequence: GGG
cgcgcgcgcgcgttgggggt

SEQ ID NO: 16576 - DNA, 20 bp, Artificial Sequence
  Description of Artificial Sequence: Synthetic oligonucleotide
  Target: PCSK9; (+) strand; PAM type: NRG; PAM sequence: GGG
gcgcgcgcgcgttgggggtg

SEQ ID NO: 16577 - DNA, 20 bp, Artificial Sequence
  Description of Artificial Sequence: Synthetic oligonucleotide
  Target: PCSK9; (+) strand; PAM type: NRG; PAM sequence: GGG
cgcgcgcgcgttgggggtgg

SEQ ID NO: 16578 - DNA, 20 bp, Artificial Sequence
  Description of Artificial Sequence: Synthetic oligonucleotide
  Target: PCSK9; (+) strand; PAM type: NRG; PAM sequence: CAG
cgcgttgggggtgggggttg

SEQ ID NO: 16579 - DNA, 20 bp, Artificial Sequence
  Description of Artificial Sequence: Synthetic oligonucleotide
  Target: PCSK9; (+) strand; PAM type: NRG; PAM sequence: GAG
cgttgggggtgggggttgca

SEQ ID NO: 16580 - DNA, 20 bp, Artificial Sequence
  Description of Artificial Sequence: Synthetic oligonucleotide
  Target: PCSK9; (+) strand; PAM type: NRG; PAM sequence: CAG
tgggggtgggggttgcagag

SEQ ID NO: 16581 - DNA, 20 bp, Artificial Sequence
  Description of Artificial Sequence: Synthetic oligonucleotide
  Target: PCSK9; (+) strand; PAM type: NRG; PAM sequence: CAG
cagagcagatgcgtacctga

SEQ ID NO: 16582 - DNA, 20 bp, Artificial Sequence
  Description of Artificial Sequence: Synthetic oligonucleotide
  Target: PCSK9; (+) strand; PAM type: NRG; PAM sequence: CGG
agcagatgcgtacctgacag

SEQ ID NO: 16583 - DNA, 20 bp, Artificial Sequence
  Description of Artificial Sequence: Synthetic oligonucleotide
  Target: PCSK9; (+) strand; PAM type: NRG; PAM sequence: TAG
cgtacctgacagcggtaacc

SEQ ID NO: 16584 - DNA, 20 bp, Artificial Sequence
  Description of Artificial Sequence: Synthetic oligonucleotide
  Target: PCSK9; (+) strand; PAM type: NRG; PAM sequence: AGG
gtacctgacagcggtaacct

SEQ ID NO: 16585 - DNA, 20 bp, Artificial Sequence
  Description of Artificial Sequence: Synthetic oligonucleotide
  Target: PCSK9; (+) strand; PAM type: NRG; PAM sequence: TGG
gcggtaacctaggtcccccc

SEQ ID NO: 16586 - DNA, 20 bp, Artificial Sequence
  Description of Artificial Sequence: Synthetic oligonucleotide
  Target: PCSK9; (+) strand; PAM type: NRG; PAM sequence: AAG
taggtcccccctggcctatc

SEQ ID NO: 16587 - DNA, 20 bp, Artificial Sequence
  Description of Artificial Sequence: Synthetic oligonucleotide
  Target: PCSK9; (+) strand; PAM type: NRG; PAM sequence: AGG
aggtcccccctggcctatca

SEQ ID NO: 16588 - DNA, 20 bp, Artificial Sequence
  Description of Artificial Sequence: Synthetic oligonucleotide
  Target: PCSK9; (+) strand; PAM type: NRG; PAM sequence: TGG
ctggcctatcaaggcttccc

SEQ ID NO: 16589 - DNA, 20 bp, Artificial Sequence
  Description of Artificial Sequence: Synthetic oligonucleotide
  Target: PCSK9; (+) strand; PAM type: NRG; PAM sequence: CGG
gcctatcaaggcttccctgg

SEQ ID NO: 16590 - DNA, 20 bp, Artificial Sequence
  Description of Artificial Sequence: Synthetic oligonucleotide
  Target: PCSK9; (+) strand; PAM type: NRG; PAM sequence: AAG
ttccctggcggccgaattta

SEQ ID NO: 16591 - DNA, 20 bp, Artificial Sequence
  Description of Artificial Sequence: Synthetic oligonucleotide
  Target: PCSK9; (+) strand; PAM type: NRG; PAM sequence: AGG
tccctggcggccgaatttaa

SEQ ID NO: 16592 - DNA, 20 bp, Artificial Sequence
  Description of Artificial Sequence: Synthetic oligonucleotide
  Target: PCSK9; (+) strand; PAM type: NRG; PAM sequence: AAG
cggccgaatttaaaggcatc

SEQ ID NO: 16593 - DNA, 20 bp, Artificial Sequence
  Description of Artificial Sequence: Synthetic oligonucleotide
  Target: PCSK9; (+) strand; PAM type: NRG; PAM sequence: AAG
ttaaaggcatcaagcaaaca

SEQ ID NO: 16594 - DNA, 20 bp, Artificial Sequence
  Description of Artificial Sequence: Synthetic oligonucleotide
  Target: PCSK9; (+) strand; PAM type: NRG; PAM sequence: CAG
acatctctgccttgtcctct

SEQ ID NO: 16595 - DNA, 20 bp, Artificial Sequence
  Description of Artificial Sequence: Synthetic oligonucleotide
  Target: PCSK9; (+) strand; PAM type: NRG; PAM sequence: TGG
gtcctctcagtttccccccg

SEQ ID NO: 16596 - DNA, 20 bp, Artificial Sequence
  Description of Artificial Sequence: Synthetic oligonucleotide
  Target: PCSK9; (+) strand; PAM type: NRG; PAM sequence: TAG
cagtttccccccgtggcact

SEQ ID NO: 16597 - DNA, 20 bp, Artificial Sequence
  Description of Artificial Sequence: Synthetic oligonucleotide
  Target: PCSK9; (+) strand; PAM type: NRG; PAM sequence: TAG
gaaccacttgatacaccgaa

SEQ ID NO: 16598 - DNA, 20 bp, Artificial Sequence
  Description of Artificial Sequence: Synthetic oligonucleotide
  Target: PCSK9; (+) strand; PAM type: NRG; PAM sequence: TAG
tagtttcctatctcccccac

SEQ ID NO: 16599 - DNA, 20 bp, Artificial Sequence
  Description of Artificial Sequence: Synthetic oligonucleotide
  Target: PCSK9; (+) strand; PAM type: NRG; PAM sequence: AGG
agtttcctatctcccccact

SEQ ID NO: 16600 - DNA, 20 bp, Artificial Sequence
  Description of Artificial Sequence: Synthetic oligonucleotide
  Target: PCSK9; (+) strand; PAM type: NRG; PAM sequence: CAG
ccactaggatgtaaactcca

SEQ ID NO: 16601 - DNA, 20 bp, Artificial Sequence
  Description of Artificial Sequence: Synthetic oligonucleotide
  Target: PCSK9; (+) strand; PAM type: NRG; PAM sequence: AGG
cactaggatgtaaactccac

SEQ ID NO: 16602 - DNA, 20 bp, Artificial Sequence
  Description of Artificial Sequence: Synthetic oligonucleotide
  Target: PCSK9; (+) strand; PAM type: NRG; PAM sequence: GGG
actaggatgtaaactccaca

SEQ ID NO: 16603 - DNA, 20 bp, Artificial Sequence
  Description of Artificial Sequence: Synthetic oligonucleotide
  Target: PCSK9; (+) strand; PAM type: NRG; PAM sequence: GGG
ctaggatgtaaactccacag

SEQ ID NO: 16604 - DNA, 20 bp, Artificial Sequence
  Description of Artificial Sequence: Synthetic oligonucleotide
  Target: PCSK9; (+) strand; PAM type: NRG; PAM sequence: TGG
tgtaaactccacaggggcat

SEQ ID NO: 16605 - DNA, 20 bp, Artificial Sequence
  Description of Artificial Sequence: Synthetic oligonucleotide
  Target: PCSK9; (+) strand; PAM type: NRG; PAM sequence: GGG
gtaaactccacaggggcatt

SEQ ID NO: 16606 - DNA, 20 bp, Artificial Sequence
  Description of Artificial Sequence: Synthetic oligonucleotide
  Target: PCSK9; (+) strand; PAM type: NRG; PAM sequence: TGG
ggggcattgggaatgctgcc

SEQ ID NO: 16607 - DNA, 20 bp, Artificial Sequence
  Description of Artificial Sequence: Synthetic oligonucleotide
  Target: PCSK9; (+) strand; PAM type: NRG; PAM sequence: TGG
ttgggaatgctgcctggcta

SEQ ID NO: 16608 - DNA, 20 bp, Artificial Sequence
  Description of Artificial Sequence: Synthetic oligonucleotide
  Target: PCSK9; (+) strand; PAM type: NRG; PAM sequence: TAG
ggaatgctgcctggctatgg

SEQ ID NO: 16609 - DNA, 20 bp, Artificial Sequence
  Description of Artificial Sequence: Synthetic oligonucleotide
  Target: PCSK9; (+) strand; PAM type: NRG; PAM sequence: AGG
gaatgctgcctggctatggt

SEQ ID NO: 16610 - DNA, 20 bp, Artificial Sequence
  Description of Artificial Sequence: Synthetic oligonucleotide
  Target: PCSK9; (+) strand; PAM type: NRG; PAM sequence: GGG
aatgctgcctggctatggta

SEQ ID NO: 16611 - DNA, 20 bp, Artificial Sequence
  Description of Artificial Sequence: Synthetic oligonucleotide
  Target: PCSK9; (+) strand; PAM type: NRG; PAM sequence: CAG
ctgcctggctatggtaggga

SEQ ID NO: 16612 - DNA, 20 bp, Artificial Sequence
  Description of Artificial Sequence: Synthetic oligonucleotide
  Target: PCSK9; (+) strand; PAM type: NRG; PAM sequence: GAG
gcctggctatggtagggaca

SEQ ID NO: 16613 - DNA, 20 bp, Artificial Sequence
  Description of Artificial Sequence: Synthetic oligonucleotide
  Target: PCSK9; (+) strand; PAM type: NRG; PAM sequence: AGG
cctggctatggtagggacag

SEQ ID NO: 16614 - DNA, 20 bp, Artificial Sequence
  Description of Artificial Sequence: Synthetic oligonucleotide
  Target: PCSK9; (+) strand; PAM type: NRG; PAM sequence: GGG
ctggctatggtagggacaga

SEQ ID NO: 16615 - DNA, 20 bp, Artificial Sequence
  Description of Artificial Sequence: Synthetic oligonucleotide
  Target: PCSK9; (+) strand; PAM type: NRG; PAM sequence: GGG
tggctatggtagggacagag

SEQ ID NO: 16616 - DNA, 20 bp, Artificial Sequence
  Description of Artificial Sequence: Synthetic oligonucleotide
  Target: PCSK9; (+) strand; PAM type: NRG; PAM sequence: GAG
gctatggtagggacagaggg

SEQ ID NO: 16617 - DNA, 20 bp, Artificial Sequence
  Description of Artificial Sequence: Synthetic oligonucleotide
  Target: PCSK9; (+) strand; PAM type: NRG; PAM sequence: CAG
gtagggacagaggggagcac

SEQ ID NO: 16618 - DNA, 20 bp, Artificial Sequence
  Description of Artificial Sequence: Synthetic oligonucleotide
  Target: PCSK9; (+) strand; PAM type: NRG; PAM sequence: AGG
tagggacagaggggagcacc

SEQ ID NO: 16619 - DNA, 20 bp, Artificial Sequence
  Description of Artificial Sequence: Synthetic oligonucleotide
  Target: PCSK9; (+) strand; PAM type: NRG; PAM sequence: GGG
agggacagaggggagcacca

SEQ ID NO: 16620 - DNA, 20 bp, Artificial Sequence
  Description of Artificial Sequence: Synthetic oligonucleotide
  Target: PCSK9; (+) strand; PAM type: NRG; PAM sequence: CGG
gacagaggggagcaccaggg

SEQ ID NO: 16621 - DNA, 20 bp, Artificial Sequence
  Description of Artificial Sequence: Synthetic oligonucleotide
  Target: PCSK9; (+) strand; PAM type: NRG; PAM sequence: GGG
acagaggggagcaccagggc

SEQ ID NO: 16622 - DNA, 20 bp, Artificial Sequence
  Description of Artificial Sequence: Synthetic oligonucleotide
  Target: PCSK9; (+) strand; PAM type: NRG; PAM sequence: GGG
cagaggggagcaccagggcg

SEQ ID NO: 16623 - DNA, 20 bp, Artificial Sequence
  Description of Artificial Sequence: Synthetic oligonucleotide
  Target: PCSK9; (+) strand; PAM type: NRG; PAM sequence: CAG
aggggagcaccagggcgggg

SEQ ID NO: 16624 - DNA, 20 bp, Artificial Sequence
  Description of Artificial Sequence: Synthetic oligonucleotide
  Target: PCSK9; (+) strand; PAM type: NRG; PAM sequence: AGG
ggggagcaccagggcggggc

SEQ ID NO: 16625 - DNA, 20 bp, Artificial Sequence
  Description of Artificial Sequence: Synthetic oligonucleotide
  Target: PCSK9; (+) strand; PAM type: NRG; PAM sequence: GGG
gggagcaccagggcggggca

SEQ ID NO: 16626 - DNA, 20 bp, Artificial Sequence
  Description of Artificial Sequence: Synthetic oligonucleotide
  Target: PCSK9; (+) strand; PAM type: NRG; PAM sequence: GGG
ggagcaccagggcggggcag

SEQ ID NO: 16627 - DNA, 20 bp, Artificial Sequence
  Description of Artificial Sequence: Synthetic oligonucleotide
  Target: PCSK9; (+) strand; PAM type: NRG; PAM sequence: CAG
ccagggcggggcaggggtgc

SEQ ID NO: 16628 - DNA, 20 bp, Artificial Sequence
  Description of Artificial Sequence: Synthetic oligonucleotide
  Target: PCSK9; (+) strand; PAM type: NRG; PAM sequence: GAG
agggcggggcaggggtgcca

SEQ ID NO: 16629 - DNA, 20 bp, Artificial Sequence
  Description of Artificial Sequence: Synthetic oligonucleotide
  Target: PCSK9; (+) strand; PAM type: NRG; PAM sequence: TGG
aggggtgccagagttctgcc

SEQ ID NO: 16630 - DNA, 20 bp, Artificial Sequence
  Description of Artificial Sequence: Synthetic oligonucleotide
  Target: PCSK9; (+) strand; PAM type: NRG; PAM sequence: GGG
ggggtgccagagttctgcct

SEQ ID NO: 16631 - DNA, 20 bp, Artificial Sequence
  Description of Artificial Sequence: Synthetic oligonucleotide
  Target: PCSK9; (+) strand; PAM type: NRG; PAM sequence: CAG
gtgccagagttctgcctggg

SEQ ID NO: 16632 - DNA, 20 bp, Artificial Sequence
  Description of Artificial Sequence: Synthetic oligonucleotide
  Target: PCSK9; (+) strand; PAM type: NRG; PAM sequence: CAG
cagagttctgcctgggcagt

SEQ ID NO: 16633 - DNA, 20 bp, Artificial Sequence
  Description of Artificial Sequence: Synthetic oligonucleotide
  Target: PCSK9; (+) strand; PAM type: NRG; PAM sequence: TAG
ctgggcagtcagattttcct

SEQ ID NO: 16634 - DNA, 20 bp, Artificial Sequence
  Description of Artificial Sequence: Synthetic oligonucleotide
  Target: PCSK9; (+) strand; PAM type: NRG; PAM sequence: AGG
tgggcagtcagattttcctt

SEQ ID NO: 16635 - DNA, 20 bp, Artificial Sequence
  Description of Artificial Sequence: Synthetic oligonucleotide
  Target: PCSK9; (+) strand; PAM type: NRG; PAM sequence: GAG
ggcagtcagattttccttag

SEQ ID NO: 16636 - DNA, 20 bp, Artificial Sequence
  Description of Artificial Sequence: Synthetic oligonucleotide
  Target: PCSK9; (+) strand; PAM type: NRG; PAM sequence: AGG
gcagtcagattttccttagg

SEQ ID NO: 16637 - DNA, 20 bp, Artificial Sequence
  Description of Artificial Sequence: Synthetic oligonucleotide
  Target: PCSK9; (+) strand; PAM type: NRG; PAM sequence: GGG
cagtcagattttccttagga

SEQ ID NO: 16638 - DNA, 20 bp, Artificial Sequence
  Description of Artificial Sequence: Synthetic oligonucleotide
  Target: PCSK9; (+) strand; PAM type: NRG; PAM sequence: GGG
agtcagattttccttaggag

SEQ ID NO: 16639 - DNA, 20 bp, Artificial Sequence
  Description of Artificial Sequence: Synthetic oligonucleotide
  Target: PCSK9; (+) strand; PAM type: NRG; PAM sequence: GAG
ttccttaggaggggacattt

SEQ ID NO: 16640 - DNA, 20 bp, Artificial Sequence
  Description of Artificial Sequence: Synthetic oligonucleotide
  Target: PCSK9; (+) strand; PAM type: NRG; PAM sequence: TGG
cttaggaggggacatttgag

SEQ ID NO: 16641 - DNA, 20 bp, Artificial Sequence
  Description of Artificial Sequence: Synthetic oligonucleotide
  Target: PCSK9; (+) strand; PAM type: NRG; PAM sequence: GGG
ttaggaggggacatttgagt

SEQ ID NO: 16642 - DNA, 20 bp, Artificial Sequence
  Description of Artificial Sequence: Synthetic oligonucleotide
  Target: PCSK9; (+) strand; PAM type: NRG; PAM sequence: CAG
acatttgagtgggacccaaa

SEQ ID NO: 16643 - DNA, 20 bp, Artificial Sequence
  Description of Artificial Sequence: Synthetic oligonucleotide
  Target: PCSK9; (+) strand; PAM type: NRG; PAM sequence: AGG
catttgagtgggacccaaac

SEQ ID NO: 16644 - DNA, 20 bp, Artificial Sequence
  Description of Artificial Sequence: Synthetic oligonucleotide
  Target: PCSK9; (+) strand; PAM type: NRG; PAM sequence: TAG
gtgggacccaaacaggtgta

SEQ ID NO: 16645 - DNA, 20 bp, Artificial Sequence
  Description of Artificial Sequence: Synthetic oligonucleotide
  Target: PCSK9; (+) strand; PAM type: NRG; PAM sequence: CAG
ggacccaaacaggtgtatag

SEQ ID NO: 16646 - DNA, 20 bp, Artificial Sequence
  Description of Artificial Sequence: Synthetic oligonucleotide
  Target: PCSK9; (+) strand; PAM type: NRG; PAM sequence: CAG
acaggtgtatagcagttgtc

SEQ ID NO: 16647 - DNA, 20 bp, Artificial Sequence
  Description of Artificial Sequence: Synthetic oligonucleotide
  Target: PCSK9; (+) strand; PAM type: NRG; PAM sequence: CAG
tgtatagcagttgtccagcc

SEQ ID NO: 16648 - DNA, 20 bp, Artificial Sequence
  Description of Artificial Sequence: Synthetic oligonucleotide
  Target: PCSK9; (+) strand; PAM type: NRG; PAM sequence: TGG
tagcagttgtccagcccagc

SEQ ID NO: 16649 - DNA, 20 bp, Artificial Sequence
  Description of Artificial Sequence: Synthetic oligonucleotide
  Target: PCSK9; (+) strand; PAM type: NRG; PAM sequence: AAG
agttgtccagcccagctggc

SEQ ID NO: 16650 - DNA, 20 bp, Artificial Sequence
  Description of Artificial Sequence: Synthetic oligonucleotide
  Target: PCSK9; (+) strand; PAM type: NRG; PAM sequence: AGG
gttgtccagcccagctggca

SEQ ID NO: 16651 - DNA, 20 bp, Artificial Sequence
  Description of Artificial Sequence: Synthetic oligonucleotide
  Target: PCSK9; (+) strand; PAM type: NRG; PAM sequence: GAG
cagcccagctggcaaggcct

SEQ ID NO: 16652 - DNA, 20 bp, Artificial Sequence
  Description of Artificial Sequence: Synthetic oligonucleotide
  Target: PCSK9; (+) strand; PAM type: NRG; PAM sequence: TGG
tgcctctgcaacccctctct

SEQ ID NO: 16653 - DNA, 20 bp, Artificial Sequence
  Description of Artificial Sequence: Synthetic oligonucleotide
  Target: PCSK9; (+) strand; PAM type: NRG; PAM sequence: GGG
gcctctgcaacccctctctt

SEQ ID NO: 16654 - DNA, 20 bp, Artificial Sequence
  Description of Artificial Sequence: Synthetic oligonucleotide
  Target: PCSK9; (+) strand; PAM type: NRG; PAM sequence: CAG
cacccacctcctcacctttc

SEQ ID NO: 16655 - DNA, 20 bp, Artificial Sequence
  Description of Artificial Sequence: Synthetic oligonucleotide
  Target: PCSK9; (+) strand; PAM type: NRG; PAM sequence: AGG
acccacctcctcacctttcc

SEQ ID NO: 16656 - DNA, 20 bp, Artificial Sequence
  Description of Artificial Sequence: Synthetic oligonucleotide
  Target: PCSK9; (+) strand; PAM type: NRG; PAM sequence: CAG
ctcacctttccaggtcatca

SEQ ID NO: 16657 - DNA, 20 bp, Artificial Sequence
  Description of Artificial Sequence: Synthetic oligonucleotide
  Target: PCSK9; (+) strand; PAM type: NRG; PAM sequence: TGG
cctttccaggtcatcacagt

SEQ ID NO: 16658 - DNA, 20 bp, Artificial Sequence
  Description of Artificial Sequence: Synthetic oligonucleotide
  Target: PCSK9; (+) strand; PAM type: NRG; PAM sequence: GGG
ctttccaggtcatcacagtt

SEQ ID NO: 16659 - DNA, 20 bp, Artificial Sequence
  Description of Artificial Sequence: Synthetic oligonucleotide
  Target: PCSK9; (+) strand; PAM type: NRG; PAM sequence: GGG
tttccaggtcatcacagttg

SEQ ID NO: 16660 - DNA, 20 bp, Artificial Sequence
  Description of Artificial Sequence: Synthetic oligonucleotide
  Target: PCSK9; (+) strand; PAM type: NRG; PAM sequence: AAG
agttggggccaccaatgccc

SEQ ID NO: 16661 - DNA, 20 bp, Artificial Sequence
  Description of Artificial Sequence: Synthetic oligonucleotide
  Target: PCSK9; (+) strand; PAM type: NRG; PAM sequence: CAG
gggccaccaatgcccaagac

SEQ ID NO: 16662 - DNA, 20 bp, Artificial Sequence
  Description of Artificial Sequence: Synthetic oligonucleotide
  Target: PCSK9; (+) strand; PAM type: NRG; PAM sequence: CGG
caccaatgcccaagaccagc

SEQ ID NO: 16663 - DNA, 20 bp, Artificial Sequence
  Description of Artificial Sequence: Synthetic oligonucleotide
  Target: PCSK9; (+) strand; PAM type: NRG; PAM sequence: TGG
ccaagaccagccggtgaccc

SEQ ID NO: 16664 - DNA, 20 bp, Artificial Sequence
  Description of Artificial Sequence: Synthetic oligonucleotide
  Target: PCSK9; (+) strand; PAM type: NRG; PAM sequence: GGG
caagaccagccggtgaccct

SEQ ID NO: 16665 - DNA, 20 bp, Artificial Sequence
  Description of Artificial Sequence: Synthetic oligonucleotide
  Target: PCSK9; (+) strand; PAM type: NRG; PAM sequence: GGG
aagaccagccggtgaccctg

SEQ ID NO: 16666 - DNA, 20 bp, Artificial Sequence
  Description of Artificial Sequence: Synthetic oligonucleotide
  Target: PCSK9; (+) strand; PAM type: NRG; PAM sequence: TGG
gccggtgaccctggggactt

SEQ ID NO: 16667 - DNA, 20 bp, Artificial Sequence
  Description of Artificial Sequence: Synthetic oligonucleotide
  Target: PCSK9; (+) strand; PAM type: NRG; PAM sequence: GGG
ccggtgaccctggggacttt

SEQ ID NO: 16668 - DNA, 20 bp, Artificial Sequence
  Description of Artificial Sequence: Synthetic oligonucleotide
  Target: PCSK9; (+) strand; PAM type: NRG; PAM sequence: GGG
cggtgaccctggggactttg

SEQ ID NO: 16669 - DNA, 20 bp, Artificial Sequence
  Description of Artificial Sequence: Synthetic oligonucleotide
  Target: PCSK9; (+) strand; PAM type: NRG; PAM sequence: TGG
gggactttggggaccaactt

SEQ ID NO: 16670 - DNA, 20 bp, Artificial Sequence
  Description of Artificial Sequence: Synthetic oligonucleotide
  Target: PCSK9; (+) strand; PAM type: NRG; PAM sequence: TGG
gaccaactttggccgctgtg

SEQ ID NO: 16671 - DNA, 20 bp, Artificial Sequence
  Description of Artificial Sequence: Synthetic oligonucleotide
  Target: PCSK9; (+) strand; PAM type: NRG; PAM sequence: CAG
ctgtgtggacctctttgccc

SEQ ID NO: 16672 - DNA, 20 bp, Artificial Sequence
  Description of Artificial Sequence: Synthetic oligonucleotide
  Target: PCSK9; (+) strand; PAM type: NRG; PAM sequence: AGG
tgtgtggacctctttgcccc

SEQ ID NO: 16673 - DNA, 20 bp, Artificial Sequence
  Description of Artificial Sequence: Synthetic oligonucleotide
  Target: PCSK9; (+) strand; PAM type: NRG; PAM sequence: GGG
gtgtggacctctttgcccca

SEQ ID NO: 16674 - DNA, 20 bp, Artificial Sequence
  Description of Artificial Sequence: Synthetic oligonucleotide
  Target: PCSK9; (+) strand; PAM type: NRG; PAM sequence: GGG
tgtggacctctttgccccag

SEQ ID NO: 16675 - DNA, 20 bp, Artificial Sequence
  Description of Artificial Sequence: Synthetic oligonucleotide
  Target: PCSK9; (+) strand; PAM type: NRG; PAM sequence: GAG
tggacctctttgccccaggg

SEQ ID NO: 16676 - DNA, 20 bp, Artificial Sequence
  Description of Artificial Sequence: Synthetic oligonucleotide
  Target: PCSK9; (+) strand; PAM type: NRG; PAM sequence: AGG
ggacctctttgccccagggg

SEQ ID NO: 16677 - DNA, 20 bp, Artificial Sequence
  Description of Artificial Sequence: Synthetic oligonucleotide
  Target: PCSK9; (+) strand; PAM type: NRG; PAM sequence: TGG
gccccaggggaggacatcat

SEQ ID NO: 16678 - DNA, 20 bp, Artificial Sequence
  Description of Artificial Sequence: Synthetic oligonucleotide
  Target: PCSK9; (+) strand; PAM type: NRG; PAM sequence: CAG
gaggacatcattggtgcctc

SEQ ID NO: 16679 - DNA, 20 bp, Artificial Sequence
  Description of Artificial Sequence: Synthetic oligonucleotide
  Target: PCSK9; (+) strand; PAM type: NRG; PAM sequence: CAG
attggtgcctccagcgactg

SEQ ID NO: 16680 - DNA, 20 bp, Artificial Sequence
  Description of Artificial Sequence: Synthetic oligonucleotide
  Target: PCSK9; (+) strand; PAM type: NRG; PAM sequence: CAG
gcagcacctgctttgtgtca

SEQ ID NO: 16681 - DNA, 20 bp, Artificial Sequence
  Description of Artificial Sequence: Synthetic oligonucleotide
  Target: PCSK9; (+) strand; PAM type: NRG; PAM sequence: GAG
agcacctgctttgtgtcaca

SEQ ID NO: 16682 - DNA, 20 bp, Artificial Sequence
  Description of Artificial Sequence: Synthetic oligonucleotide
  Target: PCSK9; (+) strand; PAM type: NRG; PAM sequence: TGG
acctgctttgtgtcacagag

SEQ ID NO: 16683 - DNA, 20 bp, Artificial Sequence
  Description of Artificial Sequence: Synthetic oligonucleotide
  Target: PCSK9; (+) strand; PAM type: NRG; PAM sequence: GGG
cctgctttgtgtcacagagt

SEQ ID NO: 16684 - DNA, 20 bp, Artificial Sequence
  Description of Artificial Sequence: Synthetic oligonucleotide
  Target: PCSK9; (+) strand; PAM type: NRG; PAM sequence: CAG
tgtcacagagtgggacatca

SEQ ID NO: 16685 - DNA, 20 bp, Artificial Sequence
  Description of Artificial Sequence: Synthetic oligonucleotide
  Target: PCSK9; (+) strand; PAM type: NRG; PAM sequence: AGG
gtcacagagtgggacatcac

SEQ ID NO: 16686 - DNA, 20 bp, Artificial Sequence
  Description of Artificial Sequence: Synthetic oligonucleotide
  Target: PCSK9; (+) strand; PAM type: NRG; PAM sequence: TGG
atcacaggctgctgcccacg

SEQ ID NO: 16687 - DNA, 20 bp, Artificial Sequence
  Description of Artificial Sequence: Synthetic oligonucleotide
  Target: PCSK9; (+) strand; PAM type: NRG; PAM sequence: TGG
caggctgctgcccacgtggc

SEQ ID NO: 16688 - DNA, 20 bp, Artificial Sequence
  Description of Artificial Sequence: Synthetic oligonucleotide
  Target: PCSK9; (+) strand; PAM type: NRG; PAM sequence: AAG
ctgctgcccacgtggctggt

SEQ ID NO: 16689 - DNA, 20 bp, Artificial Sequence
  Description of Artificial Sequence: Synthetic oligonucleotide
  Target: PCSK9; (+) strand; PAM type: NRG; PAM sequence: CGG
aagtcaccaccccactgcct

SEQ ID NO: 16690 - DNA, 20 bp, Artificial Sequence
  Description of Artificial Sequence: Synthetic oligonucleotide
  Target: PCSK9; (+) strand; PAM type: NRG; PAM sequence: CAG
ctcggccaccgtgatgctaa

SEQ ID NO: 16691 - DNA, 20 bp, Artificial Sequence
  Description of Artificial Sequence: Synthetic oligonucleotide
  Target: PCSK9; (+) strand; PAM type: NRG; PAM sequence: TGG
cgtgatgctaacagcccctt

SEQ ID NO: 16692 - DNA, 20 bp, Artificial Sequence
  Description of Artificial Sequence: Synthetic oligonucleotide
  Target: PCSK9; (+) strand; PAM type: NRG; PAM sequence: CAG
gatgctaacagcccctttgg

SEQ ID NO: 16693 - DNA, 20 bp, Artificial Sequence
  Description of Artificial Sequence: Synthetic oligonucleotide
  Target: PCSK9; (+) strand; PAM type: NRG; PAM sequence: CAG
ctaacagcccctttggcagt

SEQ ID NO: 16694 - DNA, 20 bp, Artificial Sequence
  Description of Artificial Sequence: Synthetic oligonucleotide
  Target: PCSK9; (+) strand; PAM type: NRG; PAM sequence: AGG
taacagcccctttggcagtc

SEQ ID NO: 16695 - DNA, 20 bp, Artificial Sequence
  Description of Artificial Sequence: Synthetic oligonucleotide
  Target: PCSK9; (+) strand; PAM type: NRG; PAM sequence: GGG
aacagcccctttggcagtca

SEQ ID NO: 16696 - DNA, 20 bp, Artificial Sequence
  Description of Artificial Sequence: Synthetic oligonucleotide
  Target: PCSK9; (+) strand; PAM type: NRG; PAM sequence: CGG
ttggcagtcagggtctgtgc

SEQ ID NO: 16697 - DNA, 20 bp, Artificial Sequence
  Description of Artificial Sequence: Synthetic oligonucleotide
  Target: PCSK9; (+) strand; PAM type: NRG; PAM sequence: GGG
tggcagtcagggtctgtgcc

SEQ ID NO: 16698 - DNA, 20 bp, Artificial Sequence
  Description of Artificial Sequence: Synthetic oligonucleotide
  Target: PCSK9; (+) strand; PAM type: NRG; PAM sequence: CAG
agggtctgtgccgggacctc

SEQ ID NO: 16699 - DNA, 20 bp, Artificial Sequence
  Description of Artificial Sequence: Synthetic oligonucleotide
  Target: PCSK9; (+) strand; PAM type: NRG; PAM sequence: CAG
tgtgccgggacctccagtgc

SEQ ID NO: 16700 - DNA, 20 bp, Artificial Sequence
  Description of Artificial Sequence: Synthetic oligonucleotide
  Target: PCSK9; (+) strand; PAM type: NRG; PAM sequence: AGG
gtgccgggacctccagtgcc

SEQ ID NO: 16701 - DNA, 20 bp, Artificial Sequence
  Description of Artificial Sequence: Synthetic oligonucleotide
  Target: PCSK9; (+) strand; PAM type: NRG; PAM sequence: CAG
ctccagtgccaggctctgtg

SEQ ID NO: 16702 - DNA, 20 bp, Artificial Sequence
  Description of Artificial Sequence: Synthetic oligonucleotide
  Target: PCSK9; (+) strand; PAM type: NRG; PAM sequence: AGG
tccagtgccaggctctgtgc

SEQ ID NO: 16703 - DNA, 20 bp, Artificial Sequence
  Description of Artificial Sequence: Synthetic oligonucleotide
  Target: PCSK9; (+) strand; PAM type: NRG; PAM sequence: GGG
ccagtgccaggctctgtgca

SEQ ID NO: 16704 - DNA, 20 bp, Artificial Sequence
  Description of Artificial Sequence: Synthetic oligonucleotide
  Target: PCSK9; (+) strand; PAM type: NRG; PAM sequence: GGG
cagtgccaggctctgtgcag

SEQ ID NO: 16705 - DNA, 20 bp, Artificial Sequence
  Description of Artificial Sequence: Synthetic oligonucleotide
  Target: PCSK9; (+) strand; PAM type: NRG; PAM sequence: GGG
agtgccaggctctgtgcagg

SEQ ID NO: 16706 - DNA, 20 bp, Artificial Sequence
  Description of Artificial Sequence: Synthetic oligonucleotide
  Target: PCSK9; (+) strand; PAM type: NRG; PAM sequence: CAG
caggctctgtgcagggggac

SEQ ID NO: 16707 - DNA, 20 bp, Artificial Sequence
  Description of Artificial Sequence: Synthetic oligonucleotide
  Target: PCSK9; (+) strand; PAM type: NRG; PAM sequence: GAG
ggctctgtgcagggggacca

SEQ ID NO: 16708 - DNA, 20 bp, Artificial Sequence
  Description of Artificial Sequence: Synthetic oligonucleotide
  Target: PCSK9; (+) strand; PAM type: NRG; PAM sequence: AAG
gtgcagggggaccagagatg

SEQ ID NO: 16709 - DNA, 20 bp, Artificial Sequence
  Description of Artificial Sequence: Synthetic oligonucleotide
  Target: PCSK9; (+) strand; PAM type: NRG; PAM sequence: TAG
cagggggaccagagatgaag

SEQ ID NO: 16710 - DNA, 20 bp, Artificial Sequence
  Description of Artificial Sequence: Synthetic oligonucleotide
  Target: PCSK9; (+) strand; PAM type: NRG; PAM sequence: AGG
agggggaccagagatgaagt

SEQ ID NO: 16711 - DNA, 20 bp, Artificial Sequence
  Description of Artificial Sequence: Synthetic oligonucleotide
  Target: PCSK9; (+) strand; PAM type: NRG; PAM sequence: TGG
cagagatgaagtaggcctga

SEQ ID NO: 16712 - DNA, 20 bp, Artificial Sequence
  Description of Artificial Sequence: Synthetic oligonucleotide
  Target: PCSK9; (+) strand; PAM type: NRG; PAM sequence: AAG
gtaggcctgatggtgccttc

SEQ ID NO: 16713 - DNA, 20 bp, Artificial Sequence
  Description of Artificial Sequence: Synthetic oligonucleotide
  Target: PCSK9; (+) strand; PAM type: NRG; PAM sequence: AGG
taggcctgatggtgccttca

SEQ ID NO: 16714 - DNA, 20 bp, Artificial Sequence
  Description of Artificial Sequence: Synthetic oligonucleotide
  Target: PCSK9; (+) strand; PAM type: NRG; PAM sequence: CAG
atggtgccttcaaggacact

SEQ ID NO: 16715 - DNA, 20 bp, Artificial Sequence
  Description of Artificial Sequence: Synthetic oligonucleotide
  Target: PCSK9; (+) strand; PAM type: NRG; PAM sequence: GAG
tcaaggacactcagtctgat

SEQ ID NO: 16716 - DNA, 20 bp, Artificial Sequence
  Description of Artificial Sequence: Synthetic oligonucleotide
  Target: PCSK9; (+) strand; PAM type: NRG; PAM sequence: AGG
caaggacactcagtctgatg

SEQ ID NO: 16717 - DNA, 20 bp, Artificial Sequence
  Description of Artificial Sequence: Synthetic oligonucleotide
  Target: PCSK9; (+) strand; PAM type: NRG; PAM sequence: GGG
aaggacactcagtctgatga

SEQ ID NO: 16718 - DNA, 20 bp, Artificial Sequence
  Description of Artificial Sequence: Synthetic oligonucleotide
  Target: PCSK9; (+) strand; PAM type: NRG; PAM sequence: GAG
ggacactcagtctgatgagg

SEQ ID NO: 16719 - DNA, 20 bp, Artificial Sequence
  Description of Artificial Sequence: Synthetic oligonucleotide
  Target: PCSK9; (+) strand; PAM type: NRG; PAM sequence: AGG
gacactcagtctgatgaggg

SEQ ID NO: 16720 - DNA, 20 bp, Artificial Sequence
  Description of Artificial Sequence: Synthetic oligonucleotide
  Target: PCSK9; (+) strand; PAM type: NRG; PAM sequence: GAG
ctcagtctgatgagggaggc

SEQ ID NO: 16721 - DNA, 20 bp, Artificial Sequence
  Description of Artificial Sequence: Synthetic oligonucleotide
  Target: PCSK9; (+) strand; PAM type: NRG; PAM sequence: CAG
tgatgagggaggcgagtgca

SEQ ID NO: 16722 - DNA, 20 bp, Artificial Sequence
  Description of Artificial Sequence: Synthetic oligonucleotide
  Target: PCSK9; (+) strand; PAM type: NRG; PAM sequence: GAG
atgagggaggcgagtgcaca

SEQ ID NO: 16723 - DNA, 20 bp, Artificial Sequence
  Description of Artificial Sequence: Synthetic oligonucleotide
  Target: PCSK9; (+) strand; PAM type: NRG; PAM sequence: AGG
tgagggaggcgagtgcacag

SEQ ID NO: 16724 - DNA, 20 bp, Artificial Sequence
  Description of Artificial Sequence: Synthetic oligonucleotide
  Target: PCSK9; (+) strand; PAM type: NRG; PAM sequence: GAG
cgagtgcacagaggaaacac

SEQ ID NO: 16725 - DNA, 20 bp, Artificial Sequence
  Description of Artificial Sequence: Synthetic oligonucleotide
  Target: PCSK9; (+) strand; PAM type: NRG; PAM sequence: AGG
gagtgcacagaggaaacacg

SEQ ID NO: 16726 - DNA, 20 bp, Artificial Sequence
  Description of Artificial Sequence: Synthetic oligonucleotide
  Target: PCSK9; (+) strand; PAM type: NRG; PAM sequence: CAG
gcacagaggaaacacgaggt

SEQ ID NO: 16727 - DNA, 20 bp, Artificial Sequence
  Description of Artificial Sequence: Synthetic oligonucleotide
  Target: PCSK9; (+) strand; PAM type: NRG; PAM sequence: AGG
cacagaggaaacacgaggtc

SEQ ID NO: 16728 - DNA, 20 bp, Artificial Sequence
  Description of Artificial Sequence: Synthetic oligonucleotide
  Target: PCSK9; (+) strand; PAM type: NRG; PAM sequence: GGG
acagaggaaacacgaggtca

SEQ ID NO: 16729 - DNA, 20 bp, Artificial Sequence
  Description of Artificial Sequence: Synthetic oligonucleotide
  Target: PCSK9; (+) strand; PAM type: NRG; PAM sequence: TAG
acacgaggtcagggctgtat

SEQ ID NO: 16730 - DNA, 20 bp, Artificial Sequence
  Description of Artificial Sequence: Synthetic oligonucleotide
  Target: PCSK9; (+) strand; PAM type: NRG; PAM sequence: GAG
acgaggtcagggctgtatta

SEQ ID NO: 16731 - DNA, 20 bp, Artificial Sequence
  Description of Artificial Sequence: Synthetic oligonucleotide
  Target: PCSK9; (+) strand; PAM type: NRG; PAM sequence: AGG
cgaggtcagggctgtattag

SEQ ID NO: 16732 - DNA, 20 bp, Artificial Sequence
  Description of Artificial Sequence: Synthetic oligonucleotide
  Target: PCSK9; (+) strand; PAM type: NRG; PAM sequence: GGG
gaggtcagggctgtattaga

SEQ ID NO: 16733 - DNA, 20 bp, Artificial Sequence
  Description of Artificial Sequence: Synthetic oligonucleotide
  Target: PCSK9; (+) strand; PAM type: NRG; PAM sequence: GAG
ggtcagggctgtattagagg

SEQ ID NO: 16734 - DNA, 20 bp, Artificial Sequence
  Description of Artificial Sequence: Synthetic oligonucleotide
  Target: PCSK9; (+) strand; PAM type: NRG; PAM sequence: CAG
gggctgtattagagggagcc

SEQ ID NO: 16735 - DNA, 20 bp, Artificial Sequence
  Description of Artificial Sequence: Synthetic oligonucleotide
  Target: PCSK9; (+) strand; PAM type: NRG; PAM sequence: GAG
gctgtattagagggagccca

SEQ ID NO: 16736 - DNA, 20 bp, Artificial Sequence
  Description of Artificial Sequence: Synthetic oligonucleotide
  Target: PCSK9; (+) strand; PAM type: NRG; PAM sequence: AGG
ctgtattagagggagcccag

SEQ ID NO: 16737 - DNA, 20 bp, Artificial Sequence
  Description of Artificial Sequence: Synthetic oligonucleotide
  Target: PCSK9; (+) strand; PAM type: NRG; PAM sequence: GAG
gtattagagggagcccagag

SEQ ID NO: 16738 - DNA, 20 bp, Artificial Sequence
  Description of Artificial Sequence: Synthetic oligonucleotide
  Target: PCSK9; (+) strand; PAM type: NRG; PAM sequence: AGG
tattagagggagcccagagg

SEQ ID NO: 16739 - DNA, 20 bp, Artificial Sequence
  Description of Artificial Sequence: Synthetic oligonucleotide
  Target: PCSK9; (+) strand; PAM type: NRG; PAM sequence: CAG
gcccagaggaggcacctgcc

SEQ ID NO: 16740 - DNA, 20 bp, Artificial Sequence
  Description of Artificial Sequence: Synthetic oligonucleotide
  Target: PCSK9; (+) strand; PAM type: NRG; PAM sequence: GAG
aggaggcacctgcccagccc

SEQ ID NO: 16741 - DNA, 20 bp, Artificial Sequence
  Description of Artificial Sequence: Synthetic oligonucleotide
  Target: PCSK9; (+) strand; PAM type: NRG; PAM sequence: AGG
ggaggcacctgcccagcccg

SEQ ID NO: 16742 - DNA, 20 bp, Artificial Sequence
  Description of Artificial Sequence: Synthetic oligonucleotide
  Target: PCSK9; (+) strand; PAM type: NRG; PAM sequence: GGG
gaggcacctgcccagcccga

SEQ ID NO: 16743 - DNA, 20 bp, Artificial Sequence
  Description of Artificial Sequence: Synthetic oligonucleotide
  Target: PCSK9; (+) strand; PAM type: NRG; PAM sequence: CAG
cacctgcccagcccgagggt

SEQ ID NO: 16744 - DNA, 20 bp, Artificial Sequence
  Description of Artificial Sequence: Synthetic oligonucleotide
  Target: PCSK9; (+) strand; PAM type: NRG; PAM sequence: GAG
cctgcccagcccgagggtca

SEQ ID NO: 16745 - DNA, 20 bp, Artificial Sequence
  Description of Artificial Sequence: Synthetic oligonucleotide
  Target: PCSK9; (+) strand; PAM type: NRG; PAM sequence: AAG
gcccagcccgagggtcagag

SEQ ID NO: 16746 - DNA, 20 bp, Artificial Sequence
  Description of Artificial Sequence: Synthetic oligonucleotide
  Target: PCSK9; (+) strand; PAM type: NRG; PAM sequence: AGG
cccagcccgagggtcagaga

SEQ ID NO: 16747 - DNA, 20 bp, Artificial Sequence
  Description of Artificial Sequence: Synthetic oligonucleotide
  Target: PCSK9; (+) strand; PAM type: NRG; PAM sequence: TGG
gagggtcagagaaggcatct

SEQ ID NO: 16748 - DNA, 20 bp, Artificial Sequence
  Description of Artificial Sequence: Synthetic oligonucleotide
  Target: PCSK9; (+) strand; PAM type: NRG; PAM sequence: GAG
gggtcagagaaggcatcttg

SEQ ID NO: 16749 - DNA, 20 bp, Artificial Sequence
  Description of Artificial Sequence: Synthetic oligonucleotide
  Target: PCSK9; (+) strand; PAM type: NRG; PAM sequence: AGG
ggtcagagaaggcatcttgg

SEQ ID NO: 16750 - DNA, 20 bp, Artificial Sequence
  Description of Artificial Sequence: Synthetic oligonucleotide
  Target: PCSK9; (+) strand; PAM type: NRG; PAM sequence: GAG
tcagagaaggcatcttggag

SEQ ID NO: 16751 - DNA, 20 bp, Artificial Sequence
  Description of Artificial Sequence: Synthetic oligonucleotide
  Target: PCSK9; (+) strand; PAM type: NRG; PAM sequence: AGG
cagagaaggcatcttggagg

SEQ ID NO: 16752 - DNA, 20 bp, Artificial Sequence
  Description of Artificial Sequence: Synthetic oligonucleotide
  Target: PCSK9; (+) strand; PAM type: NRG; PAM sequence: GGG
agagaaggcatcttggagga

SEQ ID NO: 16753 - DNA, 20 bp, Artificial Sequence
  Description of Artificial Sequence: Synthetic oligonucleotide
  Target: PCSK9; (+) strand; PAM type: NRG; PAM sequence: CGG
ttggaggagggacatttgat

SEQ ID NO: 16754 - DNA, 20 bp, Artificial Sequence
  Description of Artificial Sequence: Synthetic oligonucleotide
  Target: PCSK9; (+) strand; PAM type: NRG; PAM sequence: GGG
tggaggagggacatttgatc

SEQ ID NO: 16755 - DNA, 20 bp, Artificial Sequence
  Description of Artificial Sequence: Synthetic oligonucleotide
  Target: PCSK9; (+) strand; PAM type: NRG; PAM sequence: GAG
gaggagggacatttgatcgg

SEQ ID NO: 16756 - DNA, 20 bp, Artificial Sequence
  Description of Artificial Sequence: Synthetic oligonucleotide
  Target: PCSK9; (+) strand; PAM type: NRG; PAM sequence: TGG
acatttgatcgggagcttga

SEQ ID NO: 16757 - DNA, 20 bp, Artificial Sequence
  Description of Artificial Sequence: Synthetic oligonucleotide
  Target: PCSK9; (+) strand; PAM type: NRG; PAM sequence: TAG
tcgggagcttgatggatgaa

SEQ ID NO: 16758 - DNA, 20 bp, Artificial Sequence
  Description of Artificial Sequence: Synthetic oligonucleotide
  Target: PCSK9; (+) strand; PAM type: NRG; PAM sequence: AGG
cgggagcttgatggatgaat

SEQ ID NO: 16759 - DNA, 20 bp, Artificial Sequence
  Description of Artificial Sequence: Synthetic oligonucleotide
  Target: PCSK9; (+) strand; PAM type: NRG; PAM sequence: GAG
ggagcttgatggatgaatag

SEQ ID NO: 16760 - DNA, 20 bp, Artificial Sequence
  Description of Artificial Sequence: Synthetic oligonucleotide
  Target: PCSK9; (+) strand; PAM type: NRG; PAM sequence: TGG
tggatgaataggagttcacc

SEQ ID NO: 16761 - DNA, 20 bp, Artificial Sequence
  Description of Artificial Sequence: Synthetic oligonucleotide
  Target: PCSK9; (+) strand; PAM type: NRG; PAM sequence: AAG
taggagttcacctggccgat

SEQ ID NO: 16762 - DNA, 20 bp, Artificial Sequence
  Description of Artificial Sequence: Synthetic oligonucleotide
  Target: PCSK9; (+) strand; PAM type: NRG; PAM sequence: CAG
agttcacctggccgataaga

SEQ ID NO: 16763 - DNA, 20 bp, Artificial Sequence
  Description of Artificial Sequence: Synthetic oligonucleotide
  Target: PCSK9; (+) strand; PAM type: NRG; PAM sequence: AAG
ccgataagacagcaactacc

SEQ ID NO: 16764 - DNA, 20 bp, Artificial Sequence
  Description of Artificial Sequence: Synthetic oligonucleotide
  Target: PCSK9; (+) strand; PAM type: NRG; PAM sequence: AGG
cgataagacagcaactacca

SEQ ID NO: 16765 - DNA, 20 bp, Artificial Sequence
  Description of Artificial Sequence: Synthetic oligonucleotide
  Target: PCSK9; (+) strand; PAM type: NRG; PAM sequence: TAG
agacagcaactaccaaggct

SEQ ID NO: 16766 - DNA, 20 bp, Artificial Sequence
  Description of Artificial Sequence: Synthetic oligonucleotide
  Target: PCSK9; (+) strand; PAM type: NRG; PAM sequence: GAG
acagcaactaccaaggctta

SEQ ID NO: 16767 - DNA, 20 bp, Artificial Sequence
  Description of Artificial Sequence: Synthetic oligonucleotide
  Target: PCSK9; (+) strand; PAM type: NRG; PAM sequence: AGG
cagcaactaccaaggcttag

SEQ ID NO: 16768 - DNA, 20 bp, Artificial Sequence
  Description of Artificial Sequence: Synthetic oligonucleotide
  Target: PCSK9; (+) strand; PAM type: NRG; PAM sequence: GAG
ctaccaaggcttagaggtgt

SEQ ID NO: 16769 - DNA, 20 bp, Artificial Sequence
  Description of Artificial Sequence: Synthetic oligonucleotide
  Target: PCSK9; (+) strand; PAM type: NRG; PAM sequence: GAG
accaaggcttagaggtgtga

SEQ ID NO: 16770 - DNA, 20 bp, Artificial Sequence
  Description of Artificial Sequence: Synthetic oligonucleotide
  Target: PCSK9; (+) strand; PAM type: NRG; PAM sequence: AGG
ccaaggcttagaggtgtgag

SEQ ID NO: 16771 - DNA, 20 bp, Artificial Sequence
  Description of Artificial Sequence: Synthetic oligonucleotide
  Target: PCSK9; (+) strand; PAM type: NRG; PAM sequence: GAG
aaggcttagaggtgtgagag

SEQ ID NO: 16772 - DNA, 20 bp, Artificial Sequence
  Description of Artificial Sequence: Synthetic oligonucleotide
  Target: PCSK9; (+) strand; PAM type: NRG; PAM sequence: AGG
aggcttagaggtgtgagagg

SEQ ID NO: 16773 - DNA, 20 bp, Artificial Sequence
  Description of Artificial Sequence: Synthetic oligonucleotide
  Target: PCSK9; (+) strand; PAM type: NRG; PAM sequence: GAG
ggaggctgtcttacctcact

SEQ ID NO: 16774 - DNA, 20 bp, Artificial Sequence
  Description of Artificial Sequence: Synthetic oligonucleotide
  Target: PCSK9; (+) strand; PAM type: NRG; PAM sequence: AAG
gctgtcttacctcactgagt

SEQ ID NO: 16775 - DNA, 20 bp, Artificial Sequence
  Description of Artificial Sequence: Synthetic oligonucleotide
  Target: PCSK9; (+) strand; PAM type: NRG; PAM sequence: AGG
ctgtcttacctcactgagta

SEQ ID NO: 16776 - DNA, 20 bp, Artificial Sequence
  Description of Artificial Sequence: Synthetic oligonucleotide
  Target: PCSK9; (+) strand; PAM type: NRG; PAM sequence: CAG
acctcactgagtaaggactg

SEQ ID NO: 16777 - DNA, 20 bp, Artificial Sequence
  Description of Artificial Sequence: Synthetic oligonucleotide
  Target: PCSK9; (+) strand; PAM type: NRG; PAM sequence: AGG
cctcactgagtaaggactgc

SEQ ID NO: 16778 - DNA, 20 bp, Artificial Sequence
  Description of Artificial Sequence: Synthetic oligonucleotide
  Target: PCSK9; (+) strand; PAM type: NRG; PAM sequence: CGG
cactgagtaaggactgcagg

SEQ ID NO: 16779 - DNA, 20 bp, Artificial Sequence
  Description of Artificial Sequence: Synthetic oligonucleotide
  Target: PCSK9; (+) strand; PAM type: NRG; PAM sequence: GAG
actgcaggcggcttaccttc

SEQ ID NO: 16780 - DNA, 20 bp, Artificial Sequence
  Description of Artificial Sequence: Synthetic oligonucleotide
  Target: PCSK9; (+) strand; PAM type: NRG; PAM sequence: AAG
gcaggcggcttaccttcgag

SEQ ID NO: 16781 - DNA, 20 bp, Artificial Sequence
  Description of Artificial Sequence: Synthetic oligonucleotide
  Target: PCSK9; (+) strand; PAM type: NRG; PAM sequence: GAG
aggcggcttaccttcgagaa

SEQ ID NO: 16782 - DNA, 20 bp, Artificial Sequence
  Description of Artificial Sequence: Synthetic oligonucleotide
  Target: PCSK9; (+) strand; PAM type: NRG; PAM sequence: GAG
gcggcttaccttcgagaaga

SEQ ID NO: 16783 - DNA, 20 bp, Artificial Sequence
  Description of Artificial Sequence: Synthetic oligonucleotide
  Target: PCSK9; (+) strand; PAM type: NRG; PAM sequence: TAG
ttaccttcgagaagagagct

SEQ ID NO: 16784 - DNA, 20 bp, Artificial Sequence
  Description of Artificial Sequence: Synthetic oligonucleotide
  Target: PCSK9; (+) strand; PAM type: NRG; PAM sequence: TGG
atgtgtgtgcgtgtgtgcac

SEQ ID NO: 16785 - DNA, 20 bp, Artificial Sequence
  Description of Artificial Sequence: Synthetic oligonucleotide
  Target: PCSK9; (+) strand; PAM type: NRG; PAM sequence: CAG
tgtgtgcgtgtgtgcactgg

SEQ ID NO: 16786 - DNA, 20 bp, Artificial Sequence
  Description of Artificial Sequence: Synthetic oligonucleotide
  Target: PCSK9; (+) strand; PAM type: NRG; PAM sequence: AGG
gtgtgcgtgtgtgcactggc

SEQ ID NO: 16787 - DNA, 20 bp, Artificial Sequence
  Description of Artificial Sequence: Synthetic oligonucleotide
  Target: PCSK9; (+) strand; PAM type: NRG; PAM sequence: GAG
gtgcgtgtgtgcactggcag

SEQ ID NO: 16788 - DNA, 20 bp, Artificial Sequence
  Description of Artificial Sequence: Synthetic oligonucleotide
  Target: PCSK9; (+) strand; PAM type: NRG; PAM sequence: TGG
cactggcaggagtcccctgc

SEQ ID NO: 16789 - DNA, 20 bp, Artificial Sequence
  Description of Artificial Sequence: Synthetic oligonucleotide
  Target: PCSK9; (+) strand; PAM type: NRG; PAM sequence: GGG
actggcaggagtcccctgct

SEQ ID NO: 16790 - DNA, 20 bp, Artificial Sequence
  Description of Artificial Sequence: Synthetic oligonucleotide
  Target: PCSK9; (+) strand; PAM type: NRG; PAM sequence: GGG
ctggcaggagtcccctgctg

SEQ ID NO: 16791 - DNA, 20 bp, Artificial Sequence
  Description of Artificial Sequence: Synthetic oligonucleotide
  Target: PCSK9; (+) strand; PAM type: NRG; PAM sequence: CAG
gcaggagtcccctgctgggg

SEQ ID NO: 16792 - DNA, 20 bp, Artificial Sequence
  Description of Artificial Sequence: Synthetic oligonucleotide
  Target: PCSK9; (+) strand; PAM type: NRG; PAM sequence: AGG
caggagtcccctgctggggc

SEQ ID NO: 16793 - DNA, 20 bp, Artificial Sequence
  Description of Artificial Sequence: Synthetic oligonucleotide
  Target: PCSK9; (+) strand; PAM type: NRG; PAM sequence: GAG
ggagtcccctgctggggcag

SEQ ID NO: 16794 - DNA, 20 bp, Artificial Sequence
  Description of Artificial Sequence: Synthetic oligonucleotide
  Target: PCSK9; (+) strand; PAM type: NRG; PAM sequence: AGG
gagtcccctgctggggcagg

SEQ ID NO: 16795 - DNA, 20 bp, Artificial Sequence
  Description of Artificial Sequence: Synthetic oligonucleotide
  Target: PCSK9; (+) strand; PAM type: NRG; PAM sequence: GGG
agtcccctgctggggcagga

SEQ ID NO: 16796 - DNA, 20 bp, Artificial Sequence
  Description of Artificial Sequence: Synthetic oligonucleotide
  Target: PCSK9; (+) strand; PAM type: NRG; PAM sequence: CGG
ccctgctggggcaggagggc

SEQ ID NO: 16797 - DNA, 20 bp, Artificial Sequence
  Description of Artificial Sequence: Synthetic oligonucleotide
  Target: PCSK9; (+) strand; PAM type: NRG; PAM sequence: GGG
cctgctggggcaggagggcc

SEQ ID NO: 16798 - DNA, 20 bp, Artificial Sequence
  Description of Artificial Sequence: Synthetic oligonucleotide
  Target: PCSK9; (+) strand; PAM type: NRG; PAM sequence: CAG
ttcaccattcacccctgcac

SEQ ID NO: 16799 - DNA, 20 bp, Artificial Sequence
  Description of Artificial Sequence: Synthetic oligonucleotide
  Target: PCSK9; (+) strand; PAM type: NRG; PAM sequence: AGG
tcaccattcacccctgcacc

SEQ ID NO: 16800 - DNA, 20 bp, Artificial Sequence
  Description of Artificial Sequence: Synthetic oligonucleotide
  Target: PCSK9; (+) strand; PAM type: NRG; PAM sequence: CAG
cacccctgcaccaggcattg

SEQ ID NO: 16801 - DNA, 20 bp, Artificial Sequence
  Description of Artificial Sequence: Synthetic oligonucleotide
  Target: PCSK9; (+) strand; PAM type: NRG; PAM sequence: GAG
cagccatgatgctgtctgcc

SEQ ID NO: 16802 - DNA, 20 bp, Artificial Sequence
  Description of Artificial Sequence: Synthetic oligonucleotide
  Target: PCSK9; (+) strand; PAM type: NRG; PAM sequence: CGG
catgatgctgtctgccgagc

SEQ ID NO: 16803 - DNA, 20 bp, Artificial Sequence
  Description of Artificial Sequence: Synthetic oligonucleotide
  Target: PCSK9; (+) strand; PAM type: NRG; PAM sequence: GAG
tgatgctgtctgccgagccg

SEQ ID NO: 16804 - DNA, 20 bp, Artificial Sequence
  Description of Artificial Sequence: Synthetic oligonucleotide
  Target: PCSK9; (+) strand; PAM type: NRG; PAM sequence: TGG
tgccgagccggagctcaccc

SEQ ID NO: 16805 - DNA, 20 bp, Artificial Sequence
  Description of Artificial Sequence: Synthetic oligonucleotide
  Target: PCSK9; (+) strand; PAM type: NRG; PAM sequence: GAG
agccggagctcaccctggcc

SEQ ID NO: 16806 - DNA, 20 bp, Artificial Sequence
  Description of Artificial Sequence: Synthetic oligonucleotide
  Target: PCSK9; (+) strand; PAM type: NRG; PAM sequence: GAG
gagctcaccctggccgagtt

SEQ ID NO: 16807 - DNA, 20 bp, Artificial Sequence
  Description of Artificial Sequence: Synthetic oligonucleotide
  Target: PCSK9; (+) strand; PAM type: NRG; PAM sequence: AGG
agctcaccctggccgagttg

SEQ ID NO: 16808 - DNA, 20 bp, Artificial Sequence
  Description of Artificial Sequence: Synthetic oligonucleotide
  Target: PCSK9; (+) strand; PAM type: NRG; PAM sequence: CAG
tcaccctggccgagttgagg

SEQ ID NO: 16809 - DNA, 20 bp, Artificial Sequence
  Description of Artificial Sequence: Synthetic oligonucleotide
  Target: PCSK9; (+) strand; PAM type: NRG; PAM sequence: GAG
accctggccgagttgaggca

SEQ ID NO: 16810 - DNA, 20 bp, Artificial Sequence
  Description of Artificial Sequence: Synthetic oligonucleotide
  Target: PCSK9; (+) strand; PAM type: NRG; PAM sequence: AAG
actgatccacttctctgcca

SEQ ID NO: 16811 - DNA, 20 bp, Artificial Sequence
  Description of Artificial Sequence: Synthetic oligonucleotide
  Target: PCSK9; (+) strand; PAM type: NRG; PAM sequence: GAG
ctgccaaagatgtcatcaat

SEQ ID NO: 16812 - DNA, 20 bp, Artificial Sequence
  Description of Artificial Sequence: Synthetic oligonucleotide
  Target: PCSK9; (+) strand; PAM type: NRG; PAM sequence: AGG
tgccaaagatgtcatcaatg

SEQ ID NO: 16813 - DNA, 20 bp, Artificial Sequence
  Description of Artificial Sequence: Synthetic oligonucleotide
  Target: PCSK9; (+) strand; PAM type: NRG; PAM sequence: TGG
aagatgtcatcaatgaggcc

SEQ ID NO: 16814 - DNA, 20 bp, Artificial Sequence
  Description of Artificial Sequence: Synthetic oligonucleotide
  Target: PCSK9; (+) strand; PAM type: NRG; PAM sequence: GAG
tcaatgaggcctggttccct

SEQ ID NO: 16815 - DNA, 20 bp, Artificial Sequence
  Description of Artificial Sequence: Synthetic oligonucleotide
  Target: PCSK9; (+) strand; PAM type: NRG; PAM sequence: AGG
caatgaggcctggttccctg

SEQ ID NO: 16816 - DNA, 20 bp, Artificial Sequence
  Description of Artificial Sequence: Synthetic oligonucleotide
  Target: PCSK9; (+) strand; PAM type: NRG; PAM sequence: CAG
aggcctggttccctgaggac

SEQ ID NO: 16817 - DNA, 20 bp, Artificial Sequence
  Description of Artificial Sequence: Synthetic oligonucleotide
  Target: PCSK9; (+) strand; PAM type: NRG; PAM sequence: CGG
cctggttccctgaggaccag

SEQ ID NO: 16818 - DNA, 20 bp, Artificial Sequence
  Description of Artificial Sequence: Synthetic oligonucleotide
  Target: PCSK9; (+) strand; PAM type: NRG; PAM sequence: GGG
ctggttccctgaggaccagc

SEQ ID NO: 16819 - DNA, 20 bp, Artificial Sequence
  Description of Artificial Sequence: Synthetic oligonucleotide
  Target: PCSK9; (+) strand; PAM type: NRG; PAM sequence: TGG
gcgggtactgacccccaacc

SEQ ID NO: 16820 - DNA, 20 bp, Artificial Sequence
  Description of Artificial Sequence: Synthetic oligonucleotide
  Target: PCSK9; (+) strand; PAM type: NRG; PAM sequence: TGG
ggtactgacccccaacctgg

SEQ ID NO: 16821 - DNA, 20 bp, Artificial Sequence
  Description of Artificial Sequence: Synthetic oligonucleotide
  Target: PCSK9; (+) strand; PAM type: NRG; PAM sequence: CAG
ctggtggccgccctgccccc

SEQ ID NO: 16822 - DNA, 20 bp, Artificial Sequence
  Description of Artificial Sequence: Synthetic oligonucleotide
  Target: PCSK9; (+) strand; PAM type: NRG; PAM sequence: TGG
gccctgccccccagcaccca

SEQ ID NO: 16823 - DNA, 20 bp, Artificial Sequence
  Description of Artificial Sequence: Synthetic oligonucleotide
  Target: PCSK9; (+) strand; PAM type: NRG; PAM sequence: GGG
ccctgccccccagcacccat

SEQ ID NO: 16824 - DNA, 20 bp, Artificial Sequence
  Description of Artificial Sequence: Synthetic oligonucleotide
  Target: PCSK9; (+) strand; PAM type: NRG; PAM sequence: GGG
cctgccccccagcacccatg

SEQ ID NO: 16825 - DNA, 20 bp, Artificial Sequence
  Description of Artificial Sequence: Synthetic oligonucleotide
  Target: PCSK9; (+) strand; PAM type: NRG; PAM sequence: CAG
gccccccagcacccatgggg

SEQ ID NO: 16826 - DNA, 20 bp, Artificial Sequence
  Description of Artificial Sequence: Synthetic oligonucleotide
  Target: PCSK9; (+) strand; PAM type: NRG; PAM sequence: AGG
ccccccagcacccatggggc

SEQ ID NO: 16827 - DNA, 20 bp, Artificial Sequence
  Description of Artificial Sequence: Synthetic oligonucleotide
  Target: PCSK9; (+) strand; PAM type: NRG; PAM sequence: AAG
ccagcacccatggggcaggt

SEQ ID NO: 16828 - DNA, 20 bp, Artificial Sequence
  Description of Artificial Sequence: Synthetic oligonucleotide
  Target: PCSK9; (+) strand; PAM type: NRG; PAM sequence: CAG
gcacccatggggcaggtaag

SEQ ID NO: 16829 - DNA, 20 bp, Artificial Sequence
  Description of Artificial Sequence: Synthetic oligonucleotide
  Target: PCSK9; (+) strand; PAM type: NRG; PAM sequence: AGG
cacccatggggcaggtaagc

SEQ ID NO: 16830 - DNA, 20 bp, Artificial Sequence
  Description of Artificial Sequence: Synthetic oligonucleotide
  Target: PCSK9; (+) strand; PAM type: NRG; PAM sequence: TGG
catggggcaggtaagcagga

SEQ ID NO: 16831 - DNA, 20 bp, Artificial Sequence
  Description of Artificial Sequence: Synthetic oligonucleotide
  Target: PCSK9; (+) strand; PAM type: NRG; PAM sequence: CAG
ggggcaggtaagcaggatgg

SEQ ID NO: 16832 - DNA, 20 bp, Artificial Sequence
  Description of Artificial Sequence: Synthetic oligonucleotide
  Target: PCSK9; (+) strand; PAM type: NRG; PAM sequence: AGG
gggcaggtaagcaggatggc

SEQ ID NO: 16833 - DNA, 20 bp, Artificial Sequence
  Description of Artificial Sequence: Synthetic oligonucleotide
  Target: PCSK9; (+) strand; PAM type: NRG; PAM sequence: GGG
ggcaggtaagcaggatggca

SEQ ID NO: 16834 - DNA, 20 bp, Artificial Sequence
  Description of Artificial Sequence: Synthetic oligonucleotide
  Target: PCSK9; (+) strand; PAM type: NRG; PAM sequence: TGG
aggtaagcaggatggcaggg

SEQ ID NO: 16835 - DNA, 20 bp, Artificial Sequence
  Description of Artificial Sequence: Synthetic oligonucleotide
  Target: PCSK9; (+) strand; PAM type: NRG; PAM sequence: GGG
ggtaagcaggatggcagggt

SEQ ID NO: 16836 - DNA, 20 bp, Artificial Sequence
  Description of Artificial Sequence: Synthetic oligonucleotide
  Target: PCSK9; (+) strand; PAM type: NRG; PAM sequence: AAG
agcaggatggcagggtgggc

SEQ ID NO: 16837 - DNA, 20 bp, Artificial Sequence
  Description of Artificial Sequence: Synthetic oligonucleotide
  Target: PCSK9; (+) strand; PAM type: NRG; PAM sequence: CAG
gatggcagggtgggcaagtc

SEQ ID NO: 16838 - DNA, 20 bp, Artificial Sequence
  Description of Artificial Sequence: Synthetic oligonucleotide
  Target: PCSK9; (+) strand; PAM type: NRG; PAM sequence: AGG
atggcagggtgggcaagtcc

SEQ ID NO: 16839 - DNA, 20 bp, Artificial Sequence
  Description of Artificial Sequence: Synthetic oligonucleotide
  Target: PCSK9; (+) strand; PAM type: NRG; PAM sequence: TGG
cagggtgggcaagtccaggc

SEQ ID NO: 16840 - DNA, 20 bp, Artificial Sequence
  Description of Artificial Sequence: Synthetic oligonucleotide
  Target: PCSK9; (+) strand; PAM type: NRG; PAM sequence: GGG
agggtgggcaagtccaggct

SEQ ID NO: 16841 - DNA, 20 bp, Artificial Sequence
  Description of Artificial Sequence: Synthetic oligonucleotide
  Target: PCSK9; (+) strand; PAM type: NRG; PAM sequence: GGG
gggtgggcaagtccaggctg

SEQ ID NO: 16842 - DNA, 20 bp, Artificial Sequence
  Description of Artificial Sequence: Synthetic oligonucleotide
  Target: PCSK9; (+) strand; PAM type: NRG; PAM sequence: TGG
ggcaagtccaggctggggct

SEQ ID NO: 16843 - DNA, 20 bp, Artificial Sequence
  Description of Artificial Sequence: Synthetic oligonucleotide
  Target: PCSK9; (+) strand; PAM type: NRG; PAM sequence: GGG
gcaagtccaggctggggctt

SEQ ID NO: 16844 - DNA, 20 bp, Artificial Sequence
  Description of Artificial Sequence: Synthetic oligonucleotide
  Target: PCSK9; (+) strand; PAM type: NRG; PAM sequence: GAG
aagtccaggctggggcttgg

SEQ ID NO: 16845 - DNA, 20 bp, Artificial Sequence
  Description of Artificial Sequence: Synthetic oligonucleotide
  Target: PCSK9; (+) strand; PAM type: NRG; PAM sequence: AGG
agtccaggctggggcttggg

SEQ ID NO: 16846 - DNA, 20 bp, Artificial Sequence
  Description of Artificial Sequence: Synthetic oligonucleotide
  Target: PCSK9; (+) strand; PAM type: NRG; PAM sequence: CAG
ggaggtctgtgtgaccttga

SEQ ID NO: 16847 - DNA, 20 bp, Artificial Sequence
  Description of Artificial Sequence: Synthetic oligonucleotide
  Target: PCSK9; (+) strand; PAM type: NRG; PAM sequence: AAG
cccttctcccttgtctgtgt

SEQ ID NO: 16848 - DNA, 20 bp, Artificial Sequence
  Description of Artificial Sequence: Synthetic oligonucleotide
  Target: PCSK9; (+) strand; PAM type: NRG; PAM sequence: AGG
ccttctcccttgtctgtgta

SEQ ID NO: 16849 - DNA, 20 bp, Artificial Sequence
  Description of Artificial Sequence: Synthetic oligonucleotide
  Target: PCSK9; (+) strand; PAM type: NRG; PAM sequence: GAG
ttctcccttgtctgtgtaag

SEQ ID NO: 16850 - DNA, 20 bp, Artificial Sequence
  Description of Artificial Sequence: Synthetic oligonucleotide
  Target: PCSK9; (+) strand; PAM type: NRG; PAM sequence: AGG
tctcccttgtctgtgtaagg

SEQ ID NO: 16851 - DNA, 20 bp, Artificial Sequence
  Description of Artificial Sequence: Synthetic oligonucleotide
  Target: PCSK9; (+) strand; PAM type: NRG; PAM sequence: TAG
gaggatgacgccaccttaaa

SEQ ID NO: 16852 - DNA, 20 bp, Artificial Sequence
  Description of Artificial Sequence: Synthetic oligonucleotide
  Target: PCSK9; (+) strand; PAM type: NRG; PAM sequence: AGG
aggatgacgccaccttaaat

SEQ ID NO: 16853 - DNA, 20 bp, Artificial Sequence
  Description of Artificial Sequence: Synthetic oligonucleotide
  Target: PCSK9; (+) strand; PAM type: NRG; PAM sequence: GAG
caccttaaataggattaaat

SEQ ID NO: 16854 - DNA, 20 bp, Artificial Sequence
  Description of Artificial Sequence: Synthetic oligonucleotide
  Target: PCSK9; (+) strand; PAM type: NRG; PAM sequence: TGG
taaataggattaaatgagaa

SEQ ID NO: 16855 - DNA, 20 bp, Artificial Sequence
  Description of Artificial Sequence: Synthetic oligonucleotide
  Target: PCSK9; (+) strand; PAM type: NRG; PAM sequence: GGG
aaataggattaaatgagaat

SEQ ID NO: 16856 - DNA, 20 bp, Artificial Sequence
  Description of Artificial Sequence: Synthetic oligonucleotide
  Target: PCSK9; (+) strand; PAM type: NRG; PAM sequence: GGG
aataggattaaatgagaatg

SEQ ID NO: 16857 - DNA, 20 bp, Artificial Sequence
  Description of Artificial Sequence: Synthetic oligonucleotide
  Target: PCSK9; (+) strand; PAM type: NRG; PAM sequence: AAG
aaatgagaatggggctctga

SEQ ID NO: 16858 - DNA, 20 bp, Artificial Sequence
  Description of Artificial Sequence: Synthetic oligonucleotide
  Target: PCSK9; (+) strand; PAM type: NRG; PAM sequence: AGG
aatgagaatggggctctgaa

SEQ ID NO: 16859 - DNA, 20 bp, Artificial Sequence
  Description of Artificial Sequence: Synthetic oligonucleotide
  Target: PCSK9; (+) strand; PAM type: NRG; PAM sequence: GGG
atgagaatggggctctgaaa

SEQ ID NO: 16860 - DNA, 20 bp, Artificial Sequence
  Description of Artificial Sequence: Synthetic oligonucleotide
  Target: PCSK9; (+) strand; PAM type: NRG; PAM sequence: TAG
attttcataacgtgttttta

SEQ ID NO: 16861 - DNA, 20 bp, Artificial Sequence
  Description of Artificial Sequence: Synthetic oligonucleotide
  Target: PCSK9; (+) strand; PAM type: NRG; PAM sequence: GAG
tttcataacgtgtttttata

SEQ ID NO: 16862 - DNA, 20 bp, Artificial Sequence
  Description of Artificial Sequence: Synthetic oligonucleotide
  Target: PCSK9; (+) strand; PAM type: NRG; PAM sequence: CAG
ataacgtgtttttatagaga

SEQ ID NO: 16863 - DNA, 20 bp, Artificial Sequence
  Description of Artificial Sequence: Synthetic oligonucleotide
  Target: PCSK9; (+) strand; PAM type: NRG; PAM sequence: GAG
gtgtttttatagagacagtt

SEQ ID NO: 16864 - DNA, 20 bp, Artificial Sequence
  Description of Artificial Sequence: Synthetic oligonucleotide
  Target: PCSK9; (+) strand; PAM type: NRG; PAM sequence: AAG
gacagttgagtatgttcttt

SEQ ID NO: 16865 - DNA, 20 bp, Artificial Sequence
  Description of Artificial Sequence: Synthetic oligonucleotide
  Target: PCSK9; (+) strand; PAM type: NRG; PAM sequence: AAG
ctctctcctaccatgaacta

SEQ ID NO: 16866 - DNA, 20 bp, Artificial Sequence
  Description of Artificial Sequence: Synthetic oligonucleotide
  Target: PCSK9; (+) strand; PAM type: NRG; PAM sequence: TGG
ccatgaactaaagatttctg

SEQ ID NO: 16867 - DNA, 20 bp, Artificial Sequence
  Description of Artificial Sequence: Synthetic oligonucleotide
  Target: PCSK9; (+) strand; PAM type: NRG; PAM sequence: GAG
atgaactaaagatttctgtg

SEQ ID NO: 16868 - DNA, 20 bp, Artificial Sequence
  Description of Artificial Sequence: Synthetic oligonucleotide
  Target: PCSK9; (+) strand; PAM type: NRG; PAM sequence: AGG
tgaactaaagatttctgtgg

SEQ ID NO: 16869 - DNA, 20 bp, Artificial Sequence
  Description of Artificial Sequence: Synthetic oligonucleotide
  Target: PCSK9; (+) strand; PAM type: NRG; PAM sequence: CAG
tgtggaggtcccctcactcc

SEQ ID NO: 16870 - DNA, 20 bp, Artificial Sequence
  Description of Artificial Sequence: Synthetic oligonucleotide
  Target: PCSK9; (+) strand; PAM type: NRG; PAM sequence: CAG
ccagcaccccctcctcatcc

SEQ ID NO: 16871 - DNA, 20 bp, Artificial Sequence
  Description of Artificial Sequence: Synthetic oligonucleotide
  Target: PCSK9; (+) strand; PAM type: NRG; PAM sequence: AGG
cagcaccccctcctcatccc

SEQ ID NO: 16872 - DNA, 20 bp, Artificial Sequence
  Description of Artificial Sequence: Synthetic oligonucleotide
  Target: PCSK9; (+) strand; PAM type: NRG; PAM sequence: CAG
ctcatcccaggccctttttg

SEQ ID NO: 16873 - DNA, 20 bp, Artificial Sequence
  Description of Artificial Sequence: Synthetic oligonucleotide
  Target: PCSK9; (+) strand; PAM type: NRG; PAM sequence: AGG
tcatcccaggccctttttgc

SEQ ID NO: 16874 - DNA, 20 bp, Artificial Sequence
  Description of Artificial Sequence: Synthetic oligonucleotide
  Target: PCSK9; (+) strand; PAM type: NRG; PAM sequence: TGG
cccaggccctttttgcaggt

SEQ ID NO: 16875 - DNA, 20 bp, Artificial Sequence
  Description of Artificial Sequence: Synthetic oligonucleotide
  Target: PCSK9; (+) strand; PAM type: NRG; PAM sequence: CAG
aggccctttttgcaggttgg

SEQ ID NO: 16876 - DNA, 20 bp, Artificial Sequence
  Description of Artificial Sequence: Synthetic oligonucleotide
  Target: PCSK9; (+) strand; PAM type: NRG; PAM sequence: CAG
gcaggttggcagctgttttg

SEQ ID NO: 16877 - DNA, 20 bp, Artificial Sequence
  Description of Artificial Sequence: Synthetic oligonucleotide
  Target: PCSK9; (+) strand; PAM type: NRG; PAM sequence: AGG
caggttggcagctgttttgc

SEQ ID NO: 16878 - DNA, 20 bp, Artificial Sequence
  Description of Artificial Sequence: Synthetic oligonucleotide
  Target: PCSK9; (+) strand; PAM type: NRG; PAM sequence: TGG
agctgttttgcaggactgta

SEQ ID NO: 16879 - DNA, 20 bp, Artificial Sequence
  Description of Artificial Sequence: Synthetic oligonucleotide
  Target: PCSK9; (+) strand; PAM type: NRG; PAM sequence: CAG
gttttgcaggactgtatggt

SEQ ID NO: 16880 - DNA, 20 bp, Artificial Sequence
  Description of Artificial Sequence: Synthetic oligonucleotide
  Target: PCSK9; (+) strand; PAM type: NRG; PAM sequence: CGG
gactgtatggtcagcacact

SEQ ID NO: 16881 - DNA, 20 bp, Artificial Sequence
  Description of Artificial Sequence: Synthetic oligonucleotide
  Target: PCSK9; (+) strand; PAM type: NRG; PAM sequence: GGG
actgtatggtcagcacactc

SEQ ID NO: 16882 - DNA, 20 bp, Artificial Sequence
  Description of Artificial Sequence: Synthetic oligonucleotide
  Target: PCSK9; (+) strand; PAM type: NRG; PAM sequence: GGG
ctgtatggtcagcacactcg

SEQ ID NO: 16883 - DNA, 20 bp, Artificial Sequence
  Description of Artificial Sequence: Synthetic oligonucleotide
  Target: PCSK9; (+) strand; PAM type: NRG; PAM sequence: CGG
cagcacactcggggcctaca

SEQ ID NO: 16884 - DNA, 20 bp, Artificial Sequence
  Description of Artificial Sequence: Synthetic oligonucleotide
  Target: PCSK9; (+) strand; PAM type: NRG; PAM sequence: TGG
acactcggggcctacacgga

SEQ ID NO: 16885 - DNA, 20 bp, Artificial Sequence
  Description of Artificial Sequence: Synthetic oligonucleotide
  Target: PCSK9; (+) strand; PAM type: NRG; PAM sequence: CAG
ggggcctacacggatggcca

SEQ ID NO: 16886 - DNA, 20 bp, Artificial Sequence
  Description of Artificial Sequence: Synthetic oligonucleotide
  Target: PCSK9; (+) strand; PAM type: NRG; PAM sequence: CAG
agccgtcgcccgctgcgccc

SEQ ID NO: 16887 - DNA, 20 bp, Artificial Sequence
  Description of Artificial Sequence: Synthetic oligonucleotide
  Target: PCSK9; (+) strand; PAM type: NRG; PAM sequence: GAG
tcgcccgctgcgccccagat

SEQ ID NO: 16888 - DNA, 20 bp, Artificial Sequence
  Description of Artificial Sequence: Synthetic oligonucleotide
  Target: PCSK9; (+) strand; PAM type: NRG; PAM sequence: AGG
cgcccgctgcgccccagatg

SEQ ID NO: 16889 - DNA, 20 bp, Artificial Sequence
  Description of Artificial Sequence: Synthetic oligonucleotide
  Target: PCSK9; (+) strand; PAM type: NRG; PAM sequence: GAG
cccgctgcgccccagatgag

SEQ ID NO: 16890 - DNA, 20 bp, Artificial Sequence
  Description of Artificial Sequence: Synthetic oligonucleotide
  Target: PCSK9; (+) strand; PAM type: NRG; PAM sequence: GAG
gccccagatgaggagctgct

SEQ ID NO: 16891 - DNA, 20 bp, Artificial Sequence
  Description of Artificial Sequence: Synthetic oligonucleotide
  Target: PCSK9; (+) strand; PAM type: NRG; PAM sequence: CAG
gaggagctgctgagctgctc

SEQ ID NO: 16892 - DNA, 20 bp, Artificial Sequence
  Description of Artificial Sequence: Synthetic oligonucleotide
  Target: PCSK9; (+) strand; PAM type: NRG; PAM sequence: CAG
ctgagctgctccagtttctc

SEQ ID NO: 16893 - DNA, 20 bp, Artificial Sequence
  Description of Artificial Sequence: Synthetic oligonucleotide
  Target: PCSK9; (+) strand; PAM type: NRG; PAM sequence: AGG
tgagctgctccagtttctcc

SEQ ID NO: 16894 - DNA, 20 bp, Artificial Sequence
  Description of Artificial Sequence: Synthetic oligonucleotide
  Target: PCSK9; (+) strand; PAM type: NRG; PAM sequence: GAG
agctgctccagtttctccag

SEQ ID NO: 16895 - DNA, 20 bp, Artificial Sequence
  Description of Artificial Sequence: Synthetic oligonucleotide
  Target: PCSK9; (+) strand; PAM type: NRG; PAM sequence: TGG
tgctccagtttctccaggag

SEQ ID NO: 16896 - DNA, 20 bp, Artificial Sequence
  Description of Artificial Sequence: Synthetic oligonucleotide
  Target: PCSK9; (+) strand; PAM type: NRG; PAM sequence: GGG
gctccagtttctccaggagt

SEQ ID NO: 16897 - DNA, 20 bp, Artificial Sequence
  Description of Artificial Sequence: Synthetic oligonucleotide
  Target: PCSK9; (+) strand; PAM type: NRG; PAM sequence: AAG
ccagtttctccaggagtggg

SEQ ID NO: 16898 - DNA, 20 bp, Artificial Sequence
  Description of Artificial Sequence: Synthetic oligonucleotide
  Target: PCSK9; (+) strand; PAM type: NRG; PAM sequence: CGG
gtttctccaggagtgggaag

SEQ ID NO: 16899 - DNA, 20 bp, Artificial Sequence
  Description of Artificial Sequence: Synthetic oligonucleotide
  Target: PCSK9; (+) strand; PAM type: NRG; PAM sequence: CGG
tctccaggagtgggaagcgg

SEQ ID NO: 16900 - DNA, 20 bp, Artificial Sequence
  Description of Artificial Sequence: Synthetic oligonucleotide
  Target: PCSK9; (+) strand; PAM type: NRG; PAM sequence: GGG
ctccaggagtgggaagcggc

SEQ ID NO: 16901 - DNA, 20 bp, Artificial Sequence
  Description of Artificial Sequence: Synthetic oligonucleotide
  Target: PCSK9; (+) strand; PAM type: NRG; PAM sequence: GGG
tccaggagtgggaagcggcg

SEQ ID NO: 16902 - DNA, 20 bp, Artificial Sequence
  Description of Artificial Sequence: Synthetic oligonucleotide
  Target: PCSK9; (+) strand; PAM type: NRG; PAM sequence: GAG
ggagtgggaagcggcggggc

SEQ ID NO: 16903 - DNA, 20 bp, Artificial Sequence
  Description of Artificial Sequence: Synthetic oligonucleotide
  Target: PCSK9; (+) strand; PAM type: NRG; PAM sequence: TGG
gaagcggcggggcgagcgca

SEQ ID NO: 16904 - DNA, 20 bp, Artificial Sequence
  Description of Artificial Sequence: Synthetic oligonucleotide
  Target: PCSK9; (+) strand; PAM type: NRG; PAM sequence: GAG
agcggcggggcgagcgcatg

SEQ ID NO: 16905 - DNA, 20 bp, Artificial Sequence
  Description of Artificial Sequence: Synthetic oligonucleotide
  Target: PCSK9; (+) strand; PAM type: NRG; PAM sequence: AGG
gcggcggggcgagcgcatgg

SEQ ID NO: 16906 - DNA, 20 bp, Artificial Sequence
  Description of Artificial Sequence: Synthetic oligonucleotide
  Target: PCSK9; (+) strand; PAM type: NRG; PAM sequence: CAG
gtgtgtgtgtgtgtgtgtgt

SEQ ID NO: 16907 - DNA, 20 bp, Artificial Sequence
  Description of Artificial Sequence: Synthetic oligonucleotide
  Target: PCSK9; (+) strand; PAM type: NRG; PAM sequence: TGG
gtgtgtgtgtgtgtcagtgc

SEQ ID NO: 16908 - DNA, 20 bp, Artificial Sequence
  Description of Artificial Sequence: Synthetic oligonucleotide
  Target: PCSK9; (+) strand; PAM type: NRG; PAM sequence: GGG
tgtgtgtgtgtgtcagtgct

SEQ ID NO: 16909 - DNA, 20 bp, Artificial Sequence
  Description of Artificial Sequence: Synthetic oligonucleotide
  Target: PCSK9; (+) strand; PAM type: NRG; PAM sequence: CAG
gtgtgtcagtgctgggccct

SEQ ID NO: 16910 - DNA, 20 bp, Artificial Sequence
  Description of Artificial Sequence: Synthetic oligonucleotide
  Target: PCSK9; (+) strand; PAM type: NRG; PAM sequence: AGG
tgtgtcagtgctgggccctc

SEQ ID NO: 16911 - DNA, 20 bp, Artificial Sequence
  Description of Artificial Sequence: Synthetic oligonucleotide
  Target: PCSK9; (+) strand; PAM type: NRG; PAM sequence: GGG
gtgtcagtgctgggccctca

SEQ ID NO: 16912 - DNA, 20 bp, Artificial Sequence
  Description of Artificial Sequence: Synthetic oligonucleotide
  Target: PCSK9; (+) strand; PAM type: NRG; PAM sequence: CAG
gctgggccctcagggacccc

SEQ ID NO: 16913 - DNA, 20 bp, Artificial Sequence
  Description of Artificial Sequence: Synthetic oligonucleotide
  Target: PCSK9; (+) strand; PAM type: NRG; PAM sequence: AAG
ggccctcagggacccccagc

SEQ ID NO: 16914 - DNA, 20 bp, Artificial Sequence
  Description of Artificial Sequence: Synthetic oligonucleotide
  Target: PCSK9; (+) strand; PAM type: NRG; PAM sequence: CAG
cagcaagcccctccatcctc

SEQ ID NO: 16915 - DNA, 20 bp, Artificial Sequence
  Description of Artificial Sequence: Synthetic oligonucleotide
  Target: PCSK9; (+) strand; PAM type: NRG; PAM sequence: CAG
cccctccatcctccagactc

SEQ ID NO: 16916 - DNA, 20 bp, Artificial Sequence
  Description of Artificial Sequence: Synthetic oligonucleotide
  Target: PCSK9; (+) strand; PAM type: NRG; PAM sequence: AAG
ccagactccagctcttctgt

SEQ ID NO: 16917 - DNA, 20 bp, Artificial Sequence
  Description of Artificial Sequence: Synthetic oligonucleotide
  Target: PCSK9; (+) strand; PAM type: NRG; PAM sequence: CAG
ccagctcttctgtaagctta

SEQ ID NO: 16918 - DNA, 20 bp, Artificial Sequence
  Description of Artificial Sequence: Synthetic oligonucleotide
  Target: PCSK9; (+) strand; PAM type: NRG; PAM sequence: AGG
cagctcttctgtaagcttac

SEQ ID NO: 16919 - DNA, 20 bp, Artificial Sequence
  Description of Artificial Sequence: Synthetic oligonucleotide
  Target: PCSK9; (+) strand; PAM type: NRG; PAM sequence: GGG
agctcttctgtaagcttaca

SEQ ID NO: 16920 - DNA, 20 bp, Artificial Sequence
  Description of Artificial Sequence: Synthetic oligonucleotide
  Target: PCSK9; (+) strand; PAM type: NRG; PAM sequence: TGG
cttctgtaagcttacagggc

SEQ ID NO: 16921 - DNA, 20 bp, Artificial Sequence
  Description of Artificial Sequence: Synthetic oligonucleotide
  Target: PCSK9; (+) strand; PAM type: NRG; PAM sequence: CAG
tgtaagcttacagggctggc

SEQ ID NO: 16922 - DNA, 20 bp, Artificial Sequence
  Description of Artificial Sequence: Synthetic oligonucleotide
  Target: PCSK9; (+) strand; PAM type: NRG; PAM sequence: CAG
gcttacagggctggccagac

SEQ ID NO: 16923 - DNA, 20 bp, Artificial Sequence
  Description of Artificial Sequence: Synthetic oligonucleotide
  Target: PCSK9; (+) strand; PAM type: NRG; PAM sequence: AGG
cttacagggctggccagacc

SEQ ID NO: 16924 - DNA, 20 bp, Artificial Sequence
  Description of Artificial Sequence: Synthetic oligonucleotide
  Target: PCSK9; (+) strand; PAM type: NRG; PAM sequence: GAG
tacagggctggccagaccag

SEQ ID NO: 16925 - DNA, 20 bp, Artificial Sequence
  Description of Artificial Sequence: Synthetic oligonucleotide
  Target: PCSK9; (+) strand; PAM type: NRG; PAM sequence: TGG
agggctggccagaccaggag

SEQ ID NO: 16926 - DNA, 20 bp, Artificial Sequence
  Description of Artificial Sequence: Synthetic oligonucleotide
  Target: PCSK9; (+) strand; PAM type: NRG; PAM sequence: GGG
gggctggccagaccaggagt

SEQ ID NO: 16927 - DNA, 20 bp, Artificial Sequence
  Description of Artificial Sequence: Synthetic oligonucleotide
  Target: PCSK9; (+) strand; PAM type: NRG; PAM sequence: GGG
ggctggccagaccaggagtg

SEQ ID NO: 16928 - DNA, 20 bp, Artificial Sequence
  Description of Artificial Sequence: Synthetic oligonucleotide
  Target: PCSK9; (+) strand; PAM type: NRG; PAM sequence: CGG
ggggcactcctcacttcacg

SEQ ID NO: 16929 - DNA, 20 bp, Artificial Sequence
  Description of Artificial Sequence: Synthetic oligonucleotide
  Target: PCSK9; (+) strand; PAM type: NRG; PAM sequence: TGG
cactcctcacttcacgcggc

SEQ ID NO: 16930 - DNA, 20 bp, Artificial Sequence
  Description of Artificial Sequence: Synthetic oligonucleotide
  Target: PCSK9; (+) strand; PAM type: NRG; PAM sequence: GGG
actcctcacttcacgcggct

SEQ ID NO: 16931 - DNA, 20 bp, Artificial Sequence
  Description of Artificial Sequence: Synthetic oligonucleotide
  Target: PCSK9; (+) strand; PAM type: NRG; PAM sequence: GGG
ctcctcacttcacgcggctg

SEQ ID NO: 16932 - DNA, 20 bp, Artificial Sequence
  Description of Artificial Sequence: Synthetic oligonucleotide
  Target: PCSK9; (+) strand; PAM type: NRG; PAM sequence: GGG
tcctcacttcacgcggctgg

SEQ ID NO: 16933 - DNA, 20 bp, Artificial Sequence
  Description of Artificial Sequence: Synthetic oligonucleotide
  Target: PCSK9; (+) strand; PAM type: NRG; PAM sequence: TGG
ttcacgcggctgggggctgc

SEQ ID NO: 16934 - DNA, 20 bp, Artificial Sequence
  Description of Artificial Sequence: Synthetic oligonucleotide
  Target: PCSK9; (+) strand; PAM type: NRG; PAM sequence: GAG
cacgcggctgggggctgctg

SEQ ID NO: 16935 - DNA, 20 bp, Artificial Sequence
  Description of Artificial Sequence: Synthetic oligonucleotide
  Target: PCSK9; (+) strand; PAM type: NRG; PAM sequence: GAG
cgcggctgggggctgctgga

SEQ ID NO: 16936 - DNA, 20 bp, Artificial Sequence
  Description of Artificial Sequence: Synthetic oligonucleotide
  Target: PCSK9; (+) strand; PAM type: NRG; PAM sequence: GAG
cggctgggggctgctggaga

SEQ ID NO: 16937 - DNA, 20 bp, Artificial Sequence
  Description of Artificial Sequence: Synthetic oligonucleotide
  Target: PCSK9; (+) strand; PAM type: NRG; PAM sequence: CAG
ggggctgctggagagagcca

SEQ ID NO: 16938 - DNA, 20 bp, Artificial Sequence
  Description of Artificial Sequence: Synthetic oligonucleotide
  Target: PCSK9; (+) strand; PAM type: NRG; PAM sequence: CGG
gctgctggagagagccacag

SEQ ID NO: 16939 - DNA, 20 bp, Artificial Sequence
  Description of Artificial Sequence: Synthetic oligonucleotide
  Target: PCSK9; (+) strand; PAM type: NRG; PAM sequence: GGG
ctgctggagagagccacagc

SEQ ID NO: 16940 - DNA, 20 bp, Artificial Sequence
  Description of Artificial Sequence: Synthetic oligonucleotide
  Target: PCSK9; (+) strand; PAM type: NRG; PAM sequence: AAG
ctggagagagccacagcggg

SEQ ID NO: 16941 - DNA, 20 bp, Artificial Sequence
  Description of Artificial Sequence: Synthetic oligonucleotide
  Target: PCSK9; (+) strand; PAM type: NRG; PAM sequence: AGG
tggagagagccacagcggga

SEQ ID NO: 16942 - DNA, 20 bp, Artificial Sequence
  Description of Artificial Sequence: Synthetic oligonucleotide
  Target: PCSK9; (+) strand; PAM type: NRG; PAM sequence: GGG
ggagagagccacagcgggaa

SEQ ID NO: 16943 - DNA, 20 bp, Artificial Sequence
  Description of Artificial Sequence: Synthetic oligonucleotide
  Target: PCSK9; (+) strand; PAM type: NRG; PAM sequence: TAG
ccacagcgggaagggtttcc

SEQ ID NO: 16944 - DNA, 20 bp, Artificial Sequence
  Description of Artificial Sequence: Synthetic oligonucleotide
  Target: PCSK9; (+) strand; PAM type: NRG; PAM sequence: GAG
acagcgggaagggtttccta

SEQ ID NO: 16945 - DNA, 20 bp, Artificial Sequence
  Description of Artificial Sequence: Synthetic oligonucleotide
  Target: PCSK9; (+) strand; PAM type: NRG; PAM sequence: AGG
cagcgggaagggtttcctag

SEQ ID NO: 16946 - DNA, 20 bp, Artificial Sequence
  Description of Artificial Sequence: Synthetic oligonucleotide
  Target: PCSK9; (+) strand; PAM type: NRG; PAM sequence: CAG
gaagggtttcctagaggctg

SEQ ID NO: 16947 - DNA, 20 bp, Artificial Sequence
  Description of Artificial Sequence: Synthetic oligonucleotide
  Target: PCSK9; (+) strand; PAM type: NRG; PAM sequence: AGG
aagggtttcctagaggctgc

SEQ ID NO: 16948 - DNA, 20 bp, Artificial Sequence
  Description of Artificial Sequence: Synthetic oligonucleotide
  Target: PCSK9; (+) strand; PAM type: NRG; PAM sequence: CAG
gtttcctagaggctgcagga

SEQ ID NO: 16949 - DNA, 20 bp, Artificial Sequence
  Description of Artificial Sequence: Synthetic oligonucleotide
  Target: PCSK9; (+) strand; PAM type: NRG; PAM sequence: TGG
tagaggctgcaggacagtgc

SEQ ID NO: 16950 - DNA, 20 bp, Artificial Sequence
  Description of Artificial Sequence: Synthetic oligonucleotide
  Target: PCSK9; (+) strand; PAM type: NRG; PAM sequence: TGG
ggctgcaggacagtgctgga

SEQ ID NO: 16951 - DNA, 20 bp, Artificial Sequence
  Description of Artificial Sequence: Synthetic oligonucleotide
  Target: PCSK9; (+) strand; PAM type: NRG; PAM sequence: TGG
atggattttcaatgctcacc

SEQ ID NO: 16952 - DNA, 20 bp, Artificial Sequence
  Description of Artificial Sequence: Synthetic oligonucleotide
  Target: PCSK9; (+) strand; PAM type: NRG; PAM sequence: GGG
tggattttcaatgctcacct

SEQ ID NO: 16953 - DNA, 20 bp, Artificial Sequence
  Description of Artificial Sequence: Synthetic oligonucleotide
  Target: PCSK9; (+) strand; PAM type: NRG; PAM sequence: GAG
ttcaatgctcacctgggtgt

SEQ ID NO: 16954 - DNA, 20 bp, Artificial Sequence
  Description of Artificial Sequence: Synthetic oligonucleotide
  Target: PCSK9; (+) strand; PAM type: NRG; PAM sequence: CGG
ctcacctgggtgtgagcgtg

SEQ ID NO: 16955 - DNA, 20 bp, Artificial Sequence
  Description of Artificial Sequence: Synthetic oligonucleotide
  Target: PCSK9; (+) strand; PAM type: NRG; PAM sequence: CAG
acctgggtgtgagcgtgcgg

SEQ ID NO: 16956 - DNA, 20 bp, Artificial Sequence
  Description of Artificial Sequence: Synthetic oligonucleotide
  Target: PCSK9; (+) strand; PAM type: NRG; PAM sequence: AGG
cctgggtgtgagcgtgcggc

SEQ ID NO: 16957 - DNA, 20 bp, Artificial Sequence
  Description of Artificial Sequence: Synthetic oligonucleotide
  Target: PCSK9; (+) strand; PAM type: NRG; PAM sequence: GGG
ctgggtgtgagcgtgcggca

SEQ ID NO: 16958 - DNA, 20 bp, Artificial Sequence
  Description of Artificial Sequence: Synthetic oligonucleotide
  Target: PCSK9; (+) strand; PAM type: NRG; PAM sequence: GAG
agcgtgcggcagggccgcgt

SEQ ID NO: 16959 - DNA, 20 bp, Artificial Sequence
  Description of Artificial Sequence: Synthetic oligonucleotide
  Target: PCSK9; (+) strand; PAM type: NRG; PAM sequence: AGG
gcgtgcggcagggccgcgtg

SEQ ID NO: 16960 - DNA, 20 bp, Artificial Sequence
  Description of Artificial Sequence: Synthetic oligonucleotide
  Target: PCSK9; (+) strand; PAM type: NRG; PAM sequence: GGG
cgtgcggcagggccgcgtga

SEQ ID NO: 16961 - DNA, 20 bp, Artificial Sequence
  Description of Artificial Sequence: Synthetic oligonucleotide
  Target: PCSK9; (+) strand; PAM type: NRG; PAM sequence: CAG
cggcagggccgcgtgagggt

SEQ ID NO: 16962 - DNA, 20 bp, Artificial Sequence
  Description of Artificial Sequence: Synthetic oligonucleotide
  Target: PCSK9; (+) strand; PAM type: NRG; PAM sequence: TGG
gggtcagcgatctgctactc

SEQ ID NO: 16963 - DNA, 20 bp, Artificial Sequence
  Description of Artificial Sequence: Synthetic oligonucleotide
  Target: PCSK9; (+) strand; PAM type: NRG; PAM sequence: CAG
gcgatctgctactctggact

SEQ ID NO: 16964 - DNA, 20 bp, Artificial Sequence
  Description of Artificial Sequence: Synthetic oligonucleotide
  Target: PCSK9; (+) strand; PAM type: NRG; PAM sequence: TAG
actctggactcagccatctc

SEQ ID NO: 16965 - DNA, 20 bp, Artificial Sequence
  Description of Artificial Sequence: Synthetic oligonucleotide
  Target: PCSK9; (+) strand; PAM type: NRG; PAM sequence: AGG
ctctggactcagccatctct

SEQ ID NO: 16966 - DNA, 20 bp, Artificial Sequence
  Description of Artificial Sequence: Synthetic oligonucleotide
  Target: PCSK9; (+) strand; PAM type: NRG; PAM sequence: CAG
atctctaggcccctctcact

SEQ ID NO: 16967 - DNA, 20 bp, Artificial Sequence
  Description of Artificial Sequence: Synthetic oligonucleotide
  Target: PCSK9; (+) strand; PAM type: NRG; PAM sequence: AGG
tctctaggcccctctcactc

SEQ ID NO: 16968 - DNA, 20 bp, Artificial Sequence
  Description of Artificial Sequence: Synthetic oligonucleotide
  Target: PCSK9; (+) strand; PAM type: NRG; PAM sequence: TGG
cctctcactcaggtgctcca

SEQ ID NO: 16969 - DNA, 20 bp, Artificial Sequence
  Description of Artificial Sequence: Synthetic oligonucleotide
  Target: PCSK9; (+) strand; PAM type: NRG; PAM sequence: TGG
actcaggtgctccatggttc

SEQ ID NO: 16970 - DNA, 20 bp, Artificial Sequence
  Description of Artificial Sequence: Synthetic oligonucleotide
  Target: PCSK9; (+) strand; PAM type: NRG; PAM sequence: GGG
ctcaggtgctccatggttct

SEQ ID NO: 16971 - DNA, 20 bp, Artificial Sequence
  Description of Artificial Sequence: Synthetic oligonucleotide
  Target: PCSK9; (+) strand; PAM type: NRG; PAM sequence: GAG
caggtgctccatggttctgg

SEQ ID NO: 16972 - DNA, 20 bp, Artificial Sequence
  Description of Artificial Sequence: Synthetic oligonucleotide
  Target: PCSK9; (+) strand; PAM type: NRG; PAM sequence: GAG
gctccatggttctgggagct

SEQ ID NO: 16973 - DNA, 20 bp, Artificial Sequence
  Description of Artificial Sequence: Synthetic oligonucleotide
  Target: PCSK9; (+) strand; PAM type: NRG; PAM sequence: CAG
ggagctgagaaatctcaaac

SEQ ID NO: 16974 - DNA, 20 bp, Artificial Sequence
  Description of Artificial Sequence: Synthetic oligonucleotide
  Target: PCSK9; (+) strand; PAM type: NRG; PAM sequence: AAG
gaaatctcaaaccagcaaaa

SEQ ID NO: 16975 - DNA, 20 bp, Artificial Sequence
  Description of Artificial Sequence: Synthetic oligonucleotide
  Target: PCSK9; (+) strand; PAM type: NRG; PAM sequence: TGG
atctcaaaccagcaaaaaag

SEQ ID NO: 16976 - DNA, 20 bp, Artificial Sequence
  Description of Artificial Sequence: Synthetic oligonucleotide
  Target: PCSK9; (+) strand; PAM type: NRG; PAM sequence: CAG
tggaattgatgttgatgcta

SEQ ID NO: 16977 - DNA, 20 bp, Artificial Sequence
  Description of Artificial Sequence: Synthetic oligonucleotide
  Target: PCSK9; (+) strand; PAM type: NRG; PAM sequence: AGG
ggaattgatgttgatgctac

SEQ ID NO: 16978 - DNA, 20 bp, Artificial Sequence
  Description of Artificial Sequence: Synthetic oligonucleotide
  Target: PCSK9; (+) strand; PAM type: NRG; PAM sequence: TAG
ttgatgttgatgctacagga

SEQ ID NO: 16979 - DNA, 20 bp, Artificial Sequence
  Description of Artificial Sequence: Synthetic oligonucleotide
  Target: PCSK9; (+) strand; PAM type: NRG; PAM sequence: CAG
tgatgctacaggatagtgca

SEQ ID NO: 16980 - DNA, 20 bp, Artificial Sequence
  Description of Artificial Sequence: Synthetic oligonucleotide
  Target: PCSK9; (+) strand; PAM type: NRG; PAM sequence: TGG
gatagtgcacagatgccatc

SEQ ID NO: 16981 - DNA, 20 bp, Artificial Sequence
  Description of Artificial Sequence: Synthetic oligonucleotide
  Target: PCSK9; (+) strand; PAM type: NRG; PAM sequence: CAG
gcacagatgccatctggttg

SEQ ID NO: 16982 - DNA, 20 bp, Artificial Sequence
  Description of Artificial Sequence: Synthetic oligonucleotide
  Target: PCSK9; (+) strand; PAM type: NRG; PAM sequence: TGG
gccatctggttgcagcattt

SEQ ID NO: 16983 - DNA, 20 bp, Artificial Sequence
  Description of Artificial Sequence: Synthetic oligonucleotide
  Target: PCSK9; (+) strand; PAM type: NRG; PAM sequence: TGG
atctggttgcagcattttgg

SEQ ID NO: 16984 - DNA, 20 bp, Artificial Sequence
  Description of Artificial Sequence: Synthetic oligonucleotide
  Target: PCSK9; (+) strand; PAM type: NRG; PAM sequence: AAG
tggttgcagcattttggtgg

SEQ ID NO: 16985 - DNA, 20 bp, Artificial Sequence
  Description of Artificial Sequence: Synthetic oligonucleotide
  Target: PCSK9; (+) strand; PAM type: NRG; PAM sequence: AGG
ggttgcagcattttggtgga

SEQ ID NO: 16986 - DNA, 20 bp, Artificial Sequence
  Description of Artificial Sequence: Synthetic oligonucleotide
  Target: PCSK9; (+) strand; PAM type: NRG; PAM sequence: GGG
gttgcagcattttggtggaa

SEQ ID NO: 16987 - DNA, 20 bp, Artificial Sequence
  Description of Artificial Sequence: Synthetic oligonucleotide
  Target: PCSK9; (+) strand; PAM type: NRG; PAM sequence: CAG
gcagcattttggtggaaggg

SEQ ID NO: 16988 - DNA, 20 bp, Artificial Sequence
  Description of Artificial Sequence: Synthetic oligonucleotide
  Target: PCSK9; (+) strand; PAM type: NRG; PAM sequence: CAG
tttggtggaagggcagtgcc

SEQ ID NO: 16989 - DNA, 20 bp, Artificial Sequence
  Description of Artificial Sequence: Synthetic oligonucleotide
  Target: PCSK9; (+) strand; PAM type: NRG; PAM sequence: TAG
gtggaagggcagtgcccagc

SEQ ID NO: 16990 - DNA, 20 bp, Artificial Sequence
  Description of Artificial Sequence: Synthetic oligonucleotide
  Target: PCSK9; (+) strand; PAM type: NRG; PAM sequence: AGG
tggaagggcagtgcccagct

SEQ ID NO: 16991 - DNA, 20 bp, Artificial Sequence
  Description of Artificial Sequence: Synthetic oligonucleotide
  Target: PCSK9; (+) strand; PAM type: NRG; PAM sequence: GAG
gaagggcagtgcccagctag

SEQ ID NO: 16992 - DNA, 20 bp, Artificial Sequence
  Description of Artificial Sequence: Synthetic oligonucleotide
  Target: PCSK9; (+) strand; PAM type: NRG; PAM sequence: GAG
agggcagtgcccagctagga

SEQ ID NO: 16993 - DNA, 20 bp, Artificial Sequence
  Description of Artificial Sequence: Synthetic oligonucleotide
  Target: PCSK9; (+) strand; PAM type: NRG; PAM sequence: GAG
cagtgcccagctaggagagt

SEQ ID NO: 16994 - DNA, 20 bp, Artificial Sequence
  Description of Artificial Sequence: Synthetic oligonucleotide
  Target: PCSK9; (+) strand; PAM type: NRG; PAM sequence: AGG
agtgcccagctaggagagtg

SEQ ID NO: 16995 - DNA, 20 bp, Artificial Sequence
  Description of Artificial Sequence: Synthetic oligonucleotide
  Target: PCSK9; (+) strand; PAM type: NRG; PAM sequence: GAG
tgcccagctaggagagtgag

SEQ ID NO: 16996 - DNA, 20 bp, Artificial Sequence
  Description of Artificial Sequence: Synthetic oligonucleotide
  Target: PCSK9; (+) strand; PAM type: NRG; PAM sequence: AGG
gcccagctaggagagtgagg

SEQ ID NO: 16997 - DNA, 20 bp, Artificial Sequence
  Description of Artificial Sequence: Synthetic oligonucleotide
  Target: PCSK9; (+) strand; PAM type: NRG; PAM sequence: GGG
cccagctaggagagtgagga

SEQ ID NO: 16998 - DNA, 20 bp, Artificial Sequence
  Description of Artificial Sequence: Synthetic oligonucleotide
  Target: PCSK9; (+) strand; PAM type: NRG; PAM sequence: GGG
ccagctaggagagtgaggag

SEQ ID NO: 16999 - DNA, 20 bp, Artificial Sequence
  Description of Artificial Sequence: Synthetic oligonucleotide
  Target: PCSK9; (+) strand; PAM type: NRG; PAM sequence: CAG
gctaggagagtgaggagggg

SEQ ID NO: 17000 - DNA, 20 bp, Artificial Sequence
  Description of Artificial Sequence: Synthetic oligonucleotide
  Target: PCSK9; (+) strand; PAM type: NRG; PAM sequence: AGG
ctaggagagtgaggaggggc

SEQ ID NO: 17001 - DNA, 20 bp, Artificial Sequence
  Description of Artificial Sequence: Synthetic oligonucleotide
  Target: PCSK9; (+) strand; PAM type: NRG; PAM sequence: TGG
tgaggaggggcaggcatttc

SEQ ID NO: 17002 - DNA, 20 bp, Artificial Sequence
  Description of Artificial Sequence: Synthetic oligonucleotide
  Target: PCSK9; (+) strand; PAM type: NRG; PAM sequence: GAG
ggggcaggcatttctggctt

SEQ ID NO: 17003 - DNA, 20 bp, Artificial Sequence
  Description of Artificial Sequence: Synthetic oligonucleotide
  Target: PCSK9; (+) strand; PAM type: NRG; PAM sequence: AGG
gggcaggcatttctggcttg

SEQ ID NO: 17004 - DNA, 20 bp, Artificial Sequence
  Description of Artificial Sequence: Synthetic oligonucleotide
  Target: PCSK9; (+) strand; PAM type: NRG; PAM sequence: GAG
gcaggcatttctggcttgag

SEQ ID NO: 17005 - DNA, 20 bp, Artificial Sequence
  Description of Artificial Sequence: Synthetic oligonucleotide
  Target: PCSK9; (+) strand; PAM type: NRG; PAM sequence: TGG
gcatttctggcttgaggaga

SEQ ID NO: 17006 - DNA, 20 bp, Artificial Sequence
  Description of Artificial Sequence: Synthetic oligonucleotide
  Target: PCSK9; (+) strand; PAM type: NRG; PAM sequence: GGG
catttctggcttgaggagat

SEQ ID NO: 17007 - DNA, 20 bp, Artificial Sequence
  Description of Artificial Sequence: Synthetic oligonucleotide
  Target: PCSK9; (+) strand; PAM type: NRG; PAM sequence: GGG
atttctggcttgaggagatg

SEQ ID NO: 17008 - DNA, 20 bp, Artificial Sequence
  Description of Artificial Sequence: Synthetic oligonucleotide
  Target: PCSK9; (+) strand; PAM type: NRG; PAM sequence: GAG
tggggtcttaatgctcgtgt

SEQ ID NO: 17009 - DNA, 20 bp, Artificial Sequence
  Description of Artificial Sequence: Synthetic oligonucleotide
  Target: PCSK9; (+) strand; PAM type: NRG; PAM sequence: GAG
gggtcttaatgctcgtgtga

SEQ ID NO: 17010 - DNA, 20 bp, Artificial Sequence
  Description of Artificial Sequence: Synthetic oligonucleotide
  Target: PCSK9; (+) strand; PAM type: NRG; PAM sequence: AGG
ggtcttaatgctcgtgtgag

SEQ ID NO: 17011 - DNA, 20 bp, Artificial Sequence
  Description of Artificial Sequence: Synthetic oligonucleotide
  Target: PCSK9; (+) strand; PAM type: NRG; PAM sequence: CAG
cttaatgctcgtgtgagagg

SEQ ID NO: 17012 - DNA, 20 bp, Artificial Sequence
  Description of Artificial Sequence: Synthetic oligonucleotide
  Target: PCSK9; (+) strand; PAM type: NRG; PAM sequence: GAG
taatgctcgtgtgagaggca

SEQ ID NO: 17013 - DNA, 20 bp, Artificial Sequence
  Description of Artificial Sequence: Synthetic oligonucleotide
  Target: PCSK9; (+) strand; PAM type: NRG; PAM sequence: TGG
tgctcgtgtgagaggcagag

SEQ ID NO: 17014 - DNA, 20 bp, Artificial Sequence
  Description of Artificial Sequence: Synthetic oligonucleotide
  Target: PCSK9; (+) strand; PAM type: NRG; PAM sequence: GGG
gctcgtgtgagaggcagagt

SEQ ID NO: 17015 - DNA, 20 bp, Artificial Sequence
  Description of Artificial Sequence: Synthetic oligonucleotide
  Target: PCSK9; (+) strand; PAM type: NRG; PAM sequence: TGG
cgtgtgagaggcagagtggg

SEQ ID NO: 17016 - DNA, 20 bp, Artificial Sequence
  Description of Artificial Sequence: Synthetic oligonucleotide
  Target: PCSK9; (+) strand; PAM type: NRG; PAM sequence: GAG
tgtgagaggcagagtgggtg

SEQ ID NO: 17017 - DNA, 20 bp, Artificial Sequence
  Description of Artificial Sequence: Synthetic oligonucleotide
  Target: PCSK9; (+) strand; PAM type: NRG; PAM sequence: TGG
gagaggcagagtgggtggag

SEQ ID NO: 17018 - DNA, 20 bp, Artificial Sequence
  Description of Artificial Sequence: Synthetic oligonucleotide
  Target: PCSK9; (+) strand; PAM type: NRG; PAM sequence: GAG
gaggcagagtgggtggagtg

SEQ ID NO: 17019 - DNA, 20 bp, Artificial Sequence
  Description of Artificial Sequence: Synthetic oligonucleotide
  Target: PCSK9; (+) strand; PAM type: NRG; PAM sequence: TGG
cagagtgggtggagtggagc

SEQ ID NO: 17020 - DNA, 20 bp, Artificial Sequence
  Description of Artificial Sequence: Synthetic oligonucleotide
  Target: PCSK9; (+) strand; PAM type: NRG; PAM sequence: TGG
gtgggtggagtggagctggc

SEQ ID NO: 17021 - DNA, 20 bp, Artificial Sequence
  Description of Artificial Sequence: Synthetic oligonucleotide
  Target: PCSK9; (+) strand; PAM type: NRG; PAM sequence: TGG
agctggctggatccttgctt

SEQ ID NO: 17022 - DNA, 20 bp, Artificial Sequence
  Description of Artificial Sequence: Synthetic oligonucleotide
  Target: PCSK9; (+) strand; PAM type: NRG; PAM sequence: TGG
ggatccttgctttggcctcc

SEQ ID NO: 17023 - DNA, 20 bp, Artificial Sequence
  Description of Artificial Sequence: Synthetic oligonucleotide
  Target: PCSK9; (+) strand; PAM type: NRG; PAM sequence: TGG
ttttgaaaccactctgtgtt

SEQ ID NO: 17024 - DNA, 20 bp, Artificial Sequence
  Description of Artificial Sequence: Synthetic oligonucleotide
  Target: PCSK9; (+) strand; PAM type: NRG; PAM sequence: AAG
tgaaaccactctgtgtttgg

SEQ ID NO: 17025 - DNA, 20 bp, Artificial Sequence
  Description of Artificial Sequence: Synthetic oligonucleotide
  Target: PCSK9; (+) strand; PAM type: NRG; PAM sequence: GAG
ctgtgtttggaagaactttt

SEQ ID NO: 17026 - DNA, 20 bp, Artificial Sequence
  Description of Artificial Sequence: Synthetic oligonucleotide
  Target: PCSK9; (+) strand; PAM type: NRG; PAM sequence: CAG
tggaagaacttttgagtatt

SEQ ID NO: 17027 - DNA, 20 bp, Artificial Sequence
  Description of Artificial Sequence: Synthetic oligonucleotide
  Target: PCSK9; (+) strand; PAM type: NRG; PAM sequence: GAG
gaagaacttttgagtattca

SEQ ID NO: 17028 - DNA, 20 bp, Artificial Sequence
  Description of Artificial Sequence: Synthetic oligonucleotide
  Target: PCSK9; (+) strand; PAM type: NRG; PAM sequence: TGG
gagtattcagagctgcccac

SEQ ID NO: 17029 - DNA, 20 bp, Artificial Sequence
  Description of Artificial Sequence: Synthetic oligonucleotide
  Target: PCSK9; (+) strand; PAM type: NRG; PAM sequence: CAG
tattcagagctgcccactgg

SEQ ID NO: 17030 - DNA, 20 bp, Artificial Sequence
  Description of Artificial Sequence: Synthetic oligonucleotide
  Target: PCSK9; (+) strand; PAM type: NRG; PAM sequence: CAG
agagctgcccactggcagaa

SEQ ID NO: 17031 - DNA, 20 bp, Artificial Sequence
  Description of Artificial Sequence: Synthetic oligonucleotide
  Target: PCSK9; (+) strand; PAM type: NRG; PAM sequence: TGG
actggcagaacagtcttcct

SEQ ID NO: 17032 - DNA, 20 bp, Artificial Sequence
  Description of Artificial Sequence: Synthetic oligonucleotide
  Target: PCSK9; (+) strand; PAM type: NRG; PAM sequence: GGG
ctggcagaacagtcttcctt

SEQ ID NO: 17033 - DNA, 20 bp, Artificial Sequence
  Description of Artificial Sequence: Synthetic oligonucleotide
  Target: PCSK9; (+) strand; PAM type: NRG; PAM sequence: CAG
gcagaacagtcttccttggg

SEQ ID NO: 17034 - DNA, 20 bp, Artificial Sequence
  Description of Artificial Sequence: Synthetic oligonucleotide
  Target: PCSK9; (+) strand; PAM type: NRG; PAM sequence: AGG
cagaacagtcttccttgggc

SEQ ID NO: 17035 - DNA, 20 bp, Artificial Sequence
  Description of Artificial Sequence: Synthetic oligonucleotide
  Target: PCSK9; (+) strand; PAM type: NRG; PAM sequence: GAG
gaacagtcttccttgggcag

SEQ ID NO: 17036 - DNA, 20 bp, Artificial Sequence
  Description of Artificial Sequence: Synthetic oligonucleotide
  Target: PCSK9; (+) strand; PAM type: NRG; PAM sequence: GAG
agtcttccttgggcaggagt

SEQ ID NO: 17037 - DNA, 20 bp, Artificial Sequence
  Description of Artificial Sequence: Synthetic oligonucleotide
  Target: PCSK9; (+) strand; PAM type: NRG; PAM sequence: CAG
aggagtgagctccttgtccc

SEQ ID NO: 17038 - DNA, 20 bp, Artificial Sequence
  Description of Artificial Sequence: Synthetic oligonucleotide
  Target: PCSK9; (+) strand; PAM type: NRG; PAM sequence: AAG
agtgagctccttgtccccag

SEQ ID NO: 17039 - DNA, 20 bp, Artificial Sequence
  Description of Artificial Sequence: Synthetic oligonucleotide
  Target: PCSK9; (+) strand; PAM type: NRG; PAM sequence: AGG
gtgagctccttgtccccaga

SEQ ID NO: 17040 - DNA, 20 bp, Artificial Sequence
  Description of Artificial Sequence: Synthetic oligonucleotide
  Target: PCSK9; (+) strand; PAM type: NRG; PAM sequence: TGG
gctccttgtccccagaaggc

SEQ ID NO: 17041 - DNA, 20 bp, Artificial Sequence
  Description of Artificial Sequence: Synthetic oligonucleotide
  Target: PCSK9; (+) strand; PAM type: NRG; PAM sequence: GGG
ctccttgtccccagaaggct

SEQ ID NO: 17042 - DNA, 20 bp, Artificial Sequence
  Description of Artificial Sequence: Synthetic oligonucleotide
  Target: PCSK9; (+) strand; PAM type: NRG; PAM sequence: TGG
tgtccccagaaggctgggtc

SEQ ID NO: 17043 - DNA, 20 bp, Artificial Sequence
  Description of Artificial Sequence: Synthetic oligonucleotide
  Target: PCSK9; (+) strand; PAM type: NRG; PAM sequence: TGG
cccagaaggctgggtctggc

SEQ ID NO: 17044 - DNA, 20 bp, Artificial Sequence
  Description of Artificial Sequence: Synthetic oligonucleotide
  Target: PCSK9; (+) strand; PAM type: NRG; PAM sequence: TGG
ggctgggtctggctggcccc

SEQ ID NO: 17045 - DNA, 20 bp, Artificial Sequence
  Description of Artificial Sequence: Synthetic oligonucleotide
  Target: PCSK9; (+) strand; PAM type: NRG; PAM sequence: CAG
tgggtctggctggcccctgg

SEQ ID NO: 17046 - DNA, 20 bp, Artificial Sequence
  Description of Artificial Sequence: Synthetic oligonucleotide
  Target: PCSK9; (+) strand; PAM type: NRG; PAM sequence: AGG
gggtctggctggcccctggc

SEQ ID NO: 17047 - DNA, 20 bp, Artificial Sequence
  Description of Artificial Sequence: Synthetic oligonucleotide
  Target: PCSK9; (+) strand; PAM type: NRG; PAM sequence: GGG
ggtctggctggcccctggca

SEQ ID NO: 17048 - DNA, 20 bp, Artificial Sequence
  Description of Artificial Sequence: Synthetic oligonucleotide
  Target: PCSK9; (+) strand; PAM type: NRG; PAM sequence: GAG
cccctggcagggacactgat

SEQ ID NO: 17049 - DNA, 20 bp, Artificial Sequence
  Description of Artificial Sequence: Synthetic oligonucleotide
  Target: PCSK9; (+) strand; PAM type: NRG; PAM sequence: AGG
ccctggcagggacactgatg

SEQ ID NO: 17050 - DNA, 20 bp, Artificial Sequence
  Description of Artificial Sequence: Synthetic oligonucleotide
  Target: PCSK9; (+) strand; PAM type: NRG; PAM sequence: GGG
cctggcagggacactgatga

SEQ ID NO: 17051 - DNA, 20 bp, Artificial Sequence
  Description of Artificial Sequence: Synthetic oligonucleotide
  Target: PCSK9; (+) strand; PAM type: NRG; PAM sequence: GAG
ggacactgatgagggtgctt

SEQ ID NO: 17052 - DNA, 20 bp, Artificial Sequence
  Description of Artificial Sequence: Synthetic oligonucleotide
  Target: PCSK9; (+) strand; PAM type: NRG; PAM sequence: TAG
gtgcttgagttgatcctgtc

SEQ ID NO: 17053 - DNA, 20 bp, Artificial Sequence
  Description of Artificial Sequence: Synthetic oligonucleotide
  Target: PCSK9; (+) strand; PAM type: NRG; PAM sequence: AAG
agtccctttctgtgttttca

SEQ ID NO: 17054 - DNA, 20 bp, Artificial Sequence
  Description of Artificial Sequence: Synthetic oligonucleotide
  Target: PCSK9; (+) strand; PAM type: NRG; PAM sequence: AAG
tgttttcaaagcccattcta

SEQ ID NO: 17055 - DNA, 20 bp, Artificial Sequence
  Description of Artificial Sequence: Synthetic oligonucleotide
  Target: PCSK9; (+) strand; PAM type: NRG; PAM sequence: CAG
tttcaaagcccattctaaag

SEQ ID NO: 17056 - DNA, 20 bp, Artificial Sequence
  Description of Artificial Sequence: Synthetic oligonucleotide
  Target: PCSK9; (+) strand; PAM type: NRG; PAM sequence: AAG
ccatttccgtctttgactct

SEQ ID NO: 17057 - DNA, 20 bp, Artificial Sequence
  Description of Artificial Sequence: Synthetic oligonucleotide
  Target: PCSK9; (+) strand; PAM type: NRG; PAM sequence: AGG
catttccgtctttgactcta

SEQ ID NO: 17058 - DNA, 20 bp, Artificial Sequence
  Description of Artificial Sequence: Synthetic oligonucleotide
  Target: PCSK9; (+) strand; PAM type: NRG; PAM sequence: AAG
cgtctttgactctaaggccc

SEQ ID NO: 17059 - DNA, 20 bp, Artificial Sequence
  Description of Artificial Sequence: Synthetic oligonucleotide
  Target: PCSK9; (+) strand; PAM type: NRG; PAM sequence: AGG
gtctttgactctaaggccca

SEQ ID NO: 17060 - DNA, 20 bp, Artificial Sequence
  Description of Artificial Sequence: Synthetic oligonucleotide
  Target: PCSK9; (+) strand; PAM type: NRG; PAM sequence: GGG
tctttgactctaaggcccaa

SEQ ID NO: 17061 - DNA, 20 bp, Artificial Sequence
  Description of Artificial Sequence: Synthetic oligonucleotide
  Target: PCSK9; (+) strand; PAM type: NRG; PAM sequence: GGG
ctttgactctaaggcccaag

SEQ ID NO: 17062 - DNA, 20 bp, Artificial Sequence
  Description of Artificial Sequence: Synthetic oligonucleotide
  Target: PCSK9; (+) strand; PAM type: NRG; PAM sequence: GGG
tttgactctaaggcccaagg

SEQ ID NO: 17063 - DNA, 20 bp, Artificial Sequence
  Description of Artificial Sequence: Synthetic oligonucleotide
  Target: PCSK9; (+) strand; PAM type: NRG; PAM sequence: AAG
actctaaggcccaagggggc

SEQ ID NO: 17064 - DNA, 20 bp, Artificial Sequence
  Description of Artificial Sequence: Synthetic oligonucleotide
  Target: PCSK9; (+) strand; PAM type: NRG; PAM sequence: TGG
taaggcccaagggggcaagc

SEQ ID NO: 17065 - DNA, 20 bp, Artificial Sequence
  Description of Artificial Sequence: Synthetic oligonucleotide
  Target: PCSK9; (+) strand; PAM type: NRG; PAM sequence: CGG
aagggggcaagctggtctgc

SEQ ID NO: 17066 - DNA, 20 bp, Artificial Sequence
  Description of Artificial Sequence: Synthetic oligonucleotide
  Target: PCSK9; (+) strand; PAM type: NRG; PAM sequence: GGG
agggggcaagctggtctgcc

SEQ ID NO: 17067 - DNA, 20 bp, Artificial Sequence
  Description of Artificial Sequence: Synthetic oligonucleotide
  Target: PCSK9; (+) strand; PAM type: NRG; PAM sequence: TGG
tgccgggcccacaacgcttt

SEQ ID NO: 17068 - DNA, 20 bp, Artificial Sequence
  Description of Artificial Sequence: Synthetic oligonucleotide
  Target: PCSK9; (+) strand; PAM type: NRG; PAM sequence: GGG
gccgggcccacaacgctttt

SEQ ID NO: 17069 - DNA, 20 bp, Artificial Sequence
  Description of Artificial Sequence: Synthetic oligonucleotide
  Target: PCSK9; (+) strand; PAM type: NRG; PAM sequence: GGG
ccgggcccacaacgcttttg

SEQ ID NO: 17070 - DNA, 20 bp, Artificial Sequence
  Description of Artificial Sequence: Synthetic oligonucleotide
  Target: PCSK9; (+) strand; PAM type: NRG; PAM sequence: GGG
cgggcccacaacgcttttgg

SEQ ID NO: 17071 - DNA, 20 bp, Artificial Sequence
  Description of Artificial Sequence: Synthetic oligonucleotide
  Target: PCSK9; (+) strand; PAM type: NRG; PAM sequence: GAG
cccacaacgcttttgggggt

SEQ ID NO: 17072 - DNA, 20 bp, Artificial Sequence
  Description of Artificial Sequence: Synthetic oligonucleotide
  Target: PCSK9; (+) strand; PAM type: NRG; PAM sequence: AGG
ccacaacgcttttgggggtg

SEQ ID NO: 17073 - DNA, 20 bp, Artificial Sequence
  Description of Artificial Sequence: Synthetic oligonucleotide
  Target: PCSK9; (+) strand; PAM type: NRG; PAM sequence: GGG
cacaacgcttttgggggtga

SEQ ID NO: 17074 - DNA, 20 bp, Artificial Sequence
  Description of Artificial Sequence: Synthetic oligonucleotide
  Target: PCSK9; (+) strand; PAM type: NRG; PAM sequence: CAG
gagggtgtctacgccattgc

SEQ ID NO: 17075 - DNA, 20 bp, Artificial Sequence
  Description of Artificial Sequence: Synthetic oligonucleotide
  Target: PCSK9; (+) strand; PAM type: NRG; PAM sequence: AGG
agggtgtctacgccattgcc

SEQ ID NO: 17076 - DNA, 20 bp, Artificial Sequence
  Description of Artificial Sequence: Synthetic oligonucleotide
  Target: PCSK9; (+) strand; PAM type: NRG; PAM sequence: CAG
ccaggtgctgcctgctaccc

SEQ ID NO: 17077 - DNA, 20 bp, Artificial Sequence
  Description of Artificial Sequence: Synthetic oligonucleotide
  Target: PCSK9; (+) strand; PAM type: NRG; PAM sequence: AGG
caggtgctgcctgctacccc

SEQ ID NO: 17078 - DNA, 20 bp, Artificial Sequence
  Description of Artificial Sequence: Synthetic oligonucleotide
  Target: PCSK9; (+) strand; PAM type: NRG; PAM sequence: CAG
ctgctaccccaggccaactg

SEQ ID NO: 17079 - DNA, 20 bp, Artificial Sequence
  Description of Artificial Sequence: Synthetic oligonucleotide
  Target: PCSK9; (+) strand; PAM type: NRG; PAM sequence: CAG
ggccaactgcagcgtccaca

SEQ ID NO: 17080 - DNA, 20 bp, Artificial Sequence
  Description of Artificial Sequence: Synthetic oligonucleotide
  Target: PCSK9; (+) strand; PAM type: NRG; PAM sequence: CAG
cagcgtccacacagctccac

SEQ ID NO: 17081 - DNA, 20 bp, Artificial Sequence
  Description of Artificial Sequence: Synthetic oligonucleotide
  Target: PCSK9; (+) strand; PAM type: NRG; PAM sequence: GAG
tccacacagctccaccagct

SEQ ID NO: 17082 - DNA, 20 bp, Artificial Sequence
  Description of Artificial Sequence: Synthetic oligonucleotide
  Target: PCSK9; (+) strand; PAM type: NRG; PAM sequence: AGG
ccacacagctccaccagctg

SEQ ID NO: 17083 - DNA, 20 bp, Artificial Sequence
  Description of Artificial Sequence: Synthetic oligonucleotide
  Target: PCSK9; (+) strand; PAM type: NRG; PAM sequence: CAG
acagctccaccagctgaggc

SEQ ID NO: 17084 - DNA, 20 bp, Artificial Sequence
  Description of Artificial Sequence: Synthetic oligonucleotide
  Target: PCSK9; (+) strand; PAM type: NRG; PAM sequence: TGG
tccaccagctgaggccagca

SEQ ID NO: 17085 - DNA, 20 bp, Artificial Sequence
  Description of Artificial Sequence: Synthetic oligonucleotide
  Target: PCSK9; (+) strand; PAM type: NRG; PAM sequence: GGG
ccaccagctgaggccagcat

SEQ ID NO: 17086 - DNA, 20 bp, Artificial Sequence
  Description of Artificial Sequence: Synthetic oligonucleotide
  Target: PCSK9; (+) strand; PAM type: NRG; PAM sequence: GGG
caccagctgaggccagcatg

SEQ ID NO: 17087 - DNA, 20 bp, Artificial Sequence
  Description of Artificial Sequence: Synthetic oligonucleotide
  Target: PCSK9; (+) strand; PAM type: NRG; PAM sequence: CAG
cccgtgtccactgccaccaa

SEQ ID NO: 17088 - DNA, 20 bp, Artificial Sequence
  Description of Artificial Sequence: Synthetic oligonucleotide
  Target: PCSK9; (+) strand; PAM type: NRG; PAM sequence: AGG
ccgtgtccactgccaccaac

SEQ ID NO: 17089 - DNA, 20 bp, Artificial Sequence
  Description of Artificial Sequence: Synthetic oligonucleotide
  Target: PCSK9; (+) strand; PAM type: NRG; PAM sequence: GGG
cgtgtccactgccaccaaca

SEQ ID NO: 17090 - DNA, 20 bp, Artificial Sequence
  Description of Artificial Sequence: Synthetic oligonucleotide
  Target: PCSK9; (+) strand; PAM type: NRG; PAM sequence: CAG
ccaacagggccacgtcctca

SEQ ID NO: 17091 - DNA, 20 bp, Artificial Sequence
  Description of Artificial Sequence: Synthetic oligonucleotide
  Target: PCSK9; (+) strand; PAM type: NRG; PAM sequence: AGG
caacagggccacgtcctcac

SEQ ID NO: 17092 - DNA, 20 bp, Artificial Sequence
  Description of Artificial Sequence: Synthetic oligonucleotide
  Target: PCSK9; (+) strand; PAM type: NRG; PAM sequence: TAG
cagggccacgtcctcacagg

SEQ ID NO: 17093 - DNA, 20 bp, Artificial Sequence
  Description of Artificial Sequence: Synthetic oligonucleotide
  Target: PCSK9; (+) strand; PAM type: NRG; PAM sequence: AGG
agggccacgtcctcacaggt

SEQ ID NO: 17094 - DNA, 20 bp, Artificial Sequence
  Description of Artificial Sequence: Synthetic oligonucleotide
  Target: PCSK9; (+) strand; PAM type: NRG; PAM sequence: GAG
ggccacgtcctcacaggtag

SEQ ID NO: 17095 - DNA, 20 bp, Artificial Sequence
  Description of Artificial Sequence: Synthetic oligonucleotide
  Target: PCSK9; (+) strand; PAM type: NRG; PAM sequence: AGG
gccacgtcctcacaggtagg

SEQ ID NO: 17096 - DNA, 20 bp, Artificial Sequence
  Description of Artificial Sequence: Synthetic oligonucleotide
  Target: PCSK9; (+) strand; PAM type: NRG; PAM sequence: TGG
cgtcctcacaggtaggaggc

SEQ ID NO: 17097 - DNA, 20 bp, Artificial Sequence
  Description of Artificial Sequence: Synthetic oligonucleotide
  Target: PCSK9; (+) strand; PAM type: NRG; PAM sequence: GGG
gtcctcacaggtaggaggct

SEQ ID NO: 17098 - DNA, 20 bp, Artificial Sequence
  Description of Artificial Sequence: Synthetic oligonucleotide
  Target: PCSK9; (+) strand; PAM type: NRG; PAM sequence: TGG
gtaggaggctgggcttgccc

SEQ ID NO: 17099 - DNA, 20 bp, Artificial Sequence
  Description of Artificial Sequence: Synthetic oligonucleotide
  Target: PCSK9; (+) strand; PAM type: NRG; PAM sequence: GGG
taggaggctgggcttgccct

SEQ ID NO: 17100 - DNA, 20 bp, Artificial Sequence
  Description of Artificial Sequence: Synthetic oligonucleotide
  Target: PCSK9; (+) strand; PAM type: NRG; PAM sequence: GGG
aggaggctgggcttgccctg

SEQ ID NO: 17101 - DNA, 20 bp, Artificial Sequence
  Description of Artificial Sequence: Synthetic oligonucleotide
  Target: PCSK9; (+) strand; PAM type: NRG; PAM sequence: GAG
ggctgggcttgccctggggt

SEQ ID NO: 17102 - DNA, 20 bp, Artificial Sequence
  Description of Artificial Sequence: Synthetic oligonucleotide
  Target: PCSK9; (+) strand; PAM type: NRG; PAM sequence: AGG
gctgggcttgccctggggtg

SEQ ID NO: 17103 - DNA, 20 bp, Artificial Sequence
  Description of Artificial Sequence: Synthetic oligonucleotide
  Target: PCSK9; (+) strand; PAM type: NRG; PAM sequence: GAG
tgggcttgccctggggtgag

SEQ ID NO: 17104 - DNA, 20 bp, Artificial Sequence
  Description of Artificial Sequence: Synthetic oligonucleotide
  Target: PCSK9; (+) strand; PAM type: NRG; PAM sequence: AGG
gggcttgccctggggtgagg

SEQ ID NO: 17105 - DNA, 20 bp, Artificial Sequence
  Description of Artificial Sequence: Synthetic oligonucleotide
  Target: PCSK9; (+) strand; PAM type: NRG; PAM sequence: GGG
ggcttgccctggggtgagga

SEQ ID NO: 17106 - DNA, 20 bp, Artificial Sequence
  Description of Artificial Sequence: Synthetic oligonucleotide
  Target: PCSK9; (+) strand; PAM type: NRG; PAM sequence: GGG
gcttgccctggggtgaggag

SEQ ID NO: 17107 - DNA, 20 bp, Artificial Sequence
  Description of Artificial Sequence: Synthetic oligonucleotide
  Target: PCSK9; (+) strand; PAM type: NRG; PAM sequence: GAG
cttatgcacccactgcccgc

SEQ ID NO: 17108 - DNA, 20 bp, Artificial Sequence
  Description of Artificial Sequence: Synthetic oligonucleotide
  Target: PCSK9; (+) strand; PAM type: NRG; PAM sequence: AGG
ttatgcacccactgcccgcg

SEQ ID NO: 17109 - DNA, 20 bp, Artificial Sequence
  Description of Artificial Sequence: Synthetic oligonucleotide
  Target: PCSK9; (+) strand; PAM type: NRG; PAM sequence: TGG
cacccactgcccgcgaggct

SEQ ID NO: 17110 - DNA, 20 bp, Artificial Sequence
  Description of Artificial Sequence: Synthetic oligonucleotide
  Target: PCSK9; (+) strand; PAM type: NRG; PAM sequence: AAG
ccgcgaggcttggtcctcac

SEQ ID NO: 17111 - DNA, 20 bp, Artificial Sequence
  Description of Artificial Sequence: Synthetic oligonucleotide
  Target: PCSK9; (+) strand; PAM type: NRG; PAM sequence: GAG
tcctcacaagtgtgatccat

SEQ ID NO: 17112 - DNA, 20 bp, Artificial Sequence
  Description of Artificial Sequence: Synthetic oligonucleotide
  Target: PCSK9; (+) strand; PAM type: NRG; PAM sequence: AAG
aagtgtgatccatgagactc

SEQ ID NO: 17113 - DNA, 20 bp, Artificial Sequence
  Description of Artificial Sequence: Synthetic oligonucleotide
  Target: PCSK9; (+) strand; PAM type: NRG; PAM sequence: CAG
tgagactcaagcctgacttg

SEQ ID NO: 17114 - DNA, 20 bp, Artificial Sequence
  Description of Artificial Sequence: Synthetic oligonucleotide
  Target: PCSK9; (+) strand; PAM type: NRG; PAM sequence: TGG
tgacttgcagttccatactc

SEQ ID NO: 17115 - DNA, 20 bp, Artificial Sequence
  Description of Artificial Sequence: Synthetic oligonucleotide
  Target: PCSK9; (+) strand; PAM type: NRG; PAM sequence: GAG
ctgccacttccatgcccttt

SEQ ID NO: 17116 - DNA, 20 bp, Artificial Sequence
  Description of Artificial Sequence: Synthetic oligonucleotide
  Target: PCSK9; (+) strand; PAM type: NRG; PAM sequence: TGG
acttccatgccctttgagcc

SEQ ID NO: 17117 - DNA, 20 bp, Artificial Sequence
  Description of Artificial Sequence: Synthetic oligonucleotide
  Target: PCSK9; (+) strand; PAM type: NRG; PAM sequence: GGG
cttccatgccctttgagcct

SEQ ID NO: 17118 - DNA, 20 bp, Artificial Sequence
  Description of Artificial Sequence: Synthetic oligonucleotide
  Target: PCSK9; (+) strand; PAM type: NRG; PAM sequence: CAG
ccatgccctttgagcctggg

SEQ ID NO: 17119 - DNA, 20 bp, Artificial Sequence
  Description of Artificial Sequence: Synthetic oligonucleotide
  Target: PCSK9; (+) strand; PAM type: NRG; PAM sequence: AGG
catgccctttgagcctgggc

SEQ ID NO: 17120 - DNA, 20 bp, Artificial Sequence
  Description of Artificial Sequence: Synthetic oligonucleotide
  Target: PCSK9; (+) strand; PAM type: NRG; PAM sequence: CAG
gaccttacttctcctcatct

SEQ ID NO: 17121 - DNA, 20 bp, Artificial Sequence
  Description of Artificial Sequence: Synthetic oligonucleotide
  Target: PCSK9; (+) strand; PAM type: NRG; PAM sequence: AAG
atctcagcttcctcctccat

SEQ ID NO: 17122 - DNA, 20 bp, Artificial Sequence
  Description of Artificial Sequence: Synthetic oligonucleotide
  Target: PCSK9; (+) strand; PAM type: NRG; PAM sequence: GAG
ctcagcttcctcctccataa

SEQ ID NO: 17123 - DNA, 20 bp, Artificial Sequence
  Description of Artificial Sequence: Synthetic oligonucleotide
  Target: PCSK9; (+) strand; PAM type: NRG; PAM sequence: AGG
tcagcttcctcctccataag

SEQ ID NO: 17124 - DNA, 20 bp, Artificial Sequence
  Description of Artificial Sequence: Synthetic oligonucleotide
  Target: PCSK9; (+) strand; PAM type: NRG; PAM sequence: GGG
cagcttcctcctccataaga

SEQ ID NO: 17125 - DNA, 20 bp, Artificial Sequence
  Description of Artificial Sequence: Synthetic oligonucleotide
  Target: PCSK9; (+) strand; PAM type: NRG; PAM sequence: AAG
cctcctccataagagggaaa

SEQ ID NO: 17126 - DNA, 20 bp, Artificial Sequence
  Description of Artificial Sequence: Synthetic oligonucleotide
  Target: PCSK9; (+) strand; PAM type: NRG; PAM sequence: AGG
ctcctccataagagggaaaa

SEQ ID NO: 17127 - DNA, 20 bp, Artificial Sequence
  Description of Artificial Sequence: Synthetic oligonucleotide
  Target: PCSK9; (+) strand; PAM type: NRG; PAM sequence: AAG
tacctgcctcattgtgttgc

SEQ ID NO: 17128 - DNA, 20 bp, Artificial Sequence
  Description of Artificial Sequence: Synthetic oligonucleotide
  Target: PCSK9; (+) strand; PAM type: NRG; PAM sequence: AGG
acctgcctcattgtgttgca

SEQ ID NO: 17129 - DNA, 20 bp, Artificial Sequence
  Description of Artificial Sequence: Synthetic oligonucleotide
  Target: PCSK9; (+) strand; PAM type: NRG; PAM sequence: GAG
ctgcctcattgtgttgcaag

SEQ ID NO: 17130 - DNA, 20 bp, Artificial Sequence
  Description of Artificial Sequence: Synthetic oligonucleotide
  Target: PCSK9; (+) strand; PAM type: NRG; PAM sequence: TGG
ctcattgtgttgcaaggaga

SEQ ID NO: 17131 - DNA, 20 bp, Artificial Sequence
  Description of Artificial Sequence: Synthetic oligonucleotide
  Target: PCSK9; (+) strand; PAM type: NRG; PAM sequence: GGG
tcattgtgttgcaaggagat

SEQ ID NO: 17132 - DNA, 20 bp, Artificial Sequence
  Description of Artificial Sequence: Synthetic oligonucleotide
  Target: PCSK9; (+) strand; PAM type: NRG; PAM sequence: CAG
ttgtgttgcaaggagatggg

SEQ ID NO: 17133 - DNA, 20 bp, Artificial Sequence
  Description of Artificial Sequence: Synthetic oligonucleotide
  Target: PCSK9; (+) strand; PAM type: NRG; PAM sequence: TAG
gcaaggagatgggcagcatc

SEQ ID NO: 17134 - DNA, 20 bp, Artificial Sequence
  Description of Artificial Sequence: Synthetic oligonucleotide
  Target: PCSK9; (+) strand; PAM type: NRG; PAM sequence: AGG
caaggagatgggcagcatct

SEQ ID NO: 17135 - DNA, 20 bp, Artificial Sequence
  Description of Artificial Sequence: Synthetic oligonucleotide
  Target: PCSK9; (+) strand; PAM type: NRG; PAM sequence: GGG
aaggagatgggcagcatcta

SEQ ID NO: 17136 - DNA, 20 bp, Artificial Sequence
  Description of Artificial Sequence: Synthetic oligonucleotide
  Target: PCSK9; (+) strand; PAM type: NRG; PAM sequence: TGG
atgggcagcatctagggcac

SEQ ID NO: 17137 - DNA, 20 bp, Artificial Sequence
  Description of Artificial Sequence: Synthetic oligonucleotide
  Target: PCSK9; (+) strand; PAM type: NRG; PAM sequence: TGG
cagcatctagggcactggcc

SEQ ID NO: 17138 - DNA, 20 bp, Artificial Sequence
  Description of Artificial Sequence: Synthetic oligonucleotide
  Target: PCSK9; (+) strand; PAM type: NRG; PAM sequence: GAG
gcatctagggcactggcctg

SEQ ID NO: 17139 - DNA, 20 bp, Artificial Sequence
  Description of Artificial Sequence: Synthetic oligonucleotide
  Target: PCSK9; (+) strand; PAM type: NRG; PAM sequence: CAG
ggcactggcctggagtatcg

SEQ ID NO: 17140 - DNA, 20 bp, Artificial Sequence
  Description of Artificial Sequence: Synthetic oligonucleotide
  Target: PCSK9; (+) strand; PAM type: NRG; PAM sequence: AGG
gcactggcctggagtatcgc

SEQ ID NO: 17141 - DNA, 20 bp, Artificial Sequence
  Description of Artificial Sequence: Synthetic oligonucleotide
  Target: PCSK9; (+) strand; PAM type: NRG; PAM sequence: AAG
gtatcgcaggtgctttgcct

SEQ ID NO: 17142 - DNA, 20 bp, Artificial Sequence
  Description of Artificial Sequence: Synthetic oligonucleotide
  Target: PCSK9; (+) strand; PAM type: NRG; PAM sequence: AGG
tatcgcaggtgctttgccta

SEQ ID NO: 17143 - DNA, 20 bp, Artificial Sequence
  Description of Artificial Sequence: Synthetic oligonucleotide
  Target: PCSK9; (+) strand; PAM type: NRG; PAM sequence: TGG
cgcaggtgctttgcctaagg

SEQ ID NO: 17144 - DNA, 20 bp, Artificial Sequence
  Description of Artificial Sequence: Synthetic oligonucleotide
  Target: PCSK9; (+) strand; PAM type: NRG; PAM sequence: CAG
gtgctttgcctaaggtggtg

SEQ ID NO: 17145 - DNA, 20 bp, Artificial Sequence
  Description of Artificial Sequence: Synthetic oligonucleotide
  Target: PCSK9; (+) strand; PAM type: NRG; PAM sequence: CAG
ttgcctaaggtggtgcagtc

SEQ ID NO: 17146 - DNA, 20 bp, Artificial Sequence
  Description of Artificial Sequence: Synthetic oligonucleotide
  Target: PCSK9; (+) strand; PAM type: NRG; PAM sequence: AGG
tgcctaaggtggtgcagtcc

SEQ ID NO: 17147 - DNA, 20 bp, Artificial Sequence
  Description of Artificial Sequence: Synthetic oligonucleotide
  Target: PCSK9; (+) strand; PAM type: NRG; PAM sequence: GAG
cctaaggtggtgcagtccag

SEQ ID NO: 17148 - DNA, 20 bp, Artificial Sequence
  Description of Artificial Sequence: Synthetic oligonucleotide
  Target: PCSK9; (+) strand; PAM type: NRG; PAM sequence: GAG
taaggtggtgcagtccagga

SEQ ID NO: 17149 - DNA, 20 bp, Artificial Sequence
  Description of Artificial Sequence: Synthetic oligonucleotide
  Target: PCSK9; (+) strand; PAM type: NRG; PAM sequence: AGG
aaggtggtgcagtccaggag

SEQ ID NO: 17150 - DNA, 20 bp, Artificial Sequence
  Description of Artificial Sequence: Synthetic oligonucleotide
  Target: PCSK9; (+) strand; PAM type: NRG; PAM sequence: CAG
gtggtgcagtccaggagagg

SEQ ID NO: 17151 - DNA, 20 bp, Artificial Sequence
  Description of Artificial Sequence: Synthetic oligonucleotide
  Target: PCSK9; (+) strand; PAM type: NRG; PAM sequence: CAG
cagtccaggagaggcagctc

SEQ ID NO: 17152 - DNA, 20 bp, Artificial Sequence
  Description of Artificial Sequence: Synthetic oligonucleotide
  Target: PCSK9; (+) strand; PAM type: NRG; PAM sequence: GAG
gtccaggagaggcagctcca

SEQ ID NO: 17153 - DNA, 20 bp, Artificial Sequence
  Description of Artificial Sequence: Synthetic oligonucleotide
  Target: PCSK9; (+) strand; PAM type: NRG; PAM sequence: GAG
ccaggagaggcagctccaga

SEQ ID NO: 17154 - DNA, 20 bp, Artificial Sequence
  Description of Artificial Sequence: Synthetic oligonucleotide
  Target: PCSK9; (+) strand; PAM type: NRG; PAM sequence: GAG
aggagaggcagctccagaga

SEQ ID NO: 17155 - DNA, 20 bp, Artificial Sequence
  Description of Artificial Sequence: Synthetic oligonucleotide
  Target: PCSK9; (+) strand; PAM type: NRG; PAM sequence: AGG
ggagaggcagctccagagag

SEQ ID NO: 17156 - DNA, 20 bp, Artificial Sequence
  Description of Artificial Sequence: Synthetic oligonucleotide
  Target: PCSK9; (+) strand; PAM type: NRG; PAM sequence: CGG
cagctccagagagaggcccc

SEQ ID NO: 17157 - DNA, 20 bp, Artificial Sequence
  Description of Artificial Sequence: Synthetic oligonucleotide
  Target: PCSK9; (+) strand; PAM type: NRG; PAM sequence: TGG
tccagagagaggcccccggc

SEQ ID NO: 17158 - DNA, 20 bp, Artificial Sequence
  Description of Artificial Sequence: Synthetic oligonucleotide
  Target: PCSK9; (+) strand; PAM type: NRG; PAM sequence: GGG
ccagagagaggcccccggct

SEQ ID NO: 17159 - DNA, 20 bp, Artificial Sequence
  Description of Artificial Sequence: Synthetic oligonucleotide
  Target: PCSK9; (+) strand; PAM type: NRG; PAM sequence: GGG
cagagagaggcccccggctg

SEQ ID NO: 17160 - DNA, 20 bp, Artificial Sequence
  Description of Artificial Sequence: Synthetic oligonucleotide
  Target: PCSK9; (+) strand; PAM type: NRG; PAM sequence: AAG
aggcccccggctggggctga

SEQ ID NO: 17161 - DNA, 20 bp, Artificial Sequence
  Description of Artificial Sequence: Synthetic oligonucleotide
  Target: PCSK9; (+) strand; PAM type: NRG; PAM sequence: AGG
ggcccccggctggggctgaa

SEQ ID NO: 17162 - DNA, 20 bp, Artificial Sequence
  Description of Artificial Sequence: Synthetic oligonucleotide
  Target: PCSK9; (+) strand; PAM type: NRG; PAM sequence: GAG
cccccggctggggctgaaag

SEQ ID NO: 17163 - DNA, 20 bp, Artificial Sequence
  Description of Artificial Sequence: Synthetic oligonucleotide
  Target: PCSK9; (+) strand; PAM type: NRG; PAM sequence: AGG
ccccggctggggctgaaagg

SEQ ID NO: 17164 - DNA, 20 bp, Artificial Sequence
  Description of Artificial Sequence: Synthetic oligonucleotide
  Target: PCSK9; (+) strand; PAM type: NRG; PAM sequence: GGG
cccggctggggctgaaagga

SEQ ID NO: 17165 - DNA, 20 bp, Artificial Sequence
  Description of Artificial Sequence: Synthetic oligonucleotide
  Target: PCSK9; (+) strand; PAM type: NRG; PAM sequence: CAG
ggctggggctgaaaggaggg

SEQ ID NO: 17166 - DNA, 20 bp, Artificial Sequence
  Description of Artificial Sequence: Synthetic oligonucleotide
  Target: PCSK9; (+) strand; PAM type: NRG; PAM sequence: CGG
gctgaaaggagggcagacct

SEQ ID NO: 17167 - DNA, 20 bp, Artificial Sequence
  Description of Artificial Sequence: Synthetic oligonucleotide
  Target: PCSK9; (+) strand; PAM type: NRG; PAM sequence: TAG
aatttcaccctgccgctcta

SEQ ID NO: 17168 - DNA, 20 bp, Artificial Sequence
  Description of Artificial Sequence: Synthetic oligonucleotide
  Target: PCSK9; (+) strand; PAM type: NRG; PAM sequence: TGG
cgctctatagctgtgtgact

SEQ ID NO: 17169 - DNA, 20 bp, Artificial Sequence
  Description of Artificial Sequence: Synthetic oligonucleotide
  Target: PCSK9; (+) strand; PAM type: NRG; PAM sequence: GGG
gctctatagctgtgtgactt

SEQ ID NO: 17170 - DNA, 20 bp, Artificial Sequence
  Description of Artificial Sequence: Synthetic oligonucleotide
  Target: PCSK9; (+) strand; PAM type: NRG; PAM sequence: GAG
attacttaacatctctgtat

SEQ ID NO: 17171 - DNA, 20 bp, Artificial Sequence
  Description of Artificial Sequence: Synthetic oligonucleotide
  Target: PCSK9; (+) strand; PAM type: NRG; PAM sequence: AGG
ttacttaacatctctgtatg

SEQ ID NO: 17172 - DNA, 20 bp, Artificial Sequence
  Description of Artificial Sequence: Synthetic oligonucleotide
  Target: PCSK9; (+) strand; PAM type: NRG; PAM sequence: GAG
tctctgtatgaggaaatgat

SEQ ID NO: 17173 - DNA, 20 bp, Artificial Sequence
  Description of Artificial Sequence: Synthetic oligonucleotide
  Target: PCSK9; (+) strand; PAM type: NRG; PAM sequence: AAG
atgaggaaatgatgagtgct

SEQ ID NO: 17174 - DNA, 20 bp, Artificial Sequence
  Description of Artificial Sequence: Synthetic oligonucleotide
  Target: PCSK9; (+) strand; PAM type: NRG; PAM sequence: TAG
aatgatgagtgctaagcact

SEQ ID NO: 17175 - DNA, 20 bp, Artificial Sequence
  Description of Artificial Sequence: Synthetic oligonucleotide
  Target: PCSK9; (+) strand; PAM type: NRG; PAM sequence: TAG
tgagtgctaagcacttagct

SEQ ID NO: 17176 - DNA, 20 bp, Artificial Sequence
  Description of Artificial Sequence: Synthetic oligonucleotide
  Target: PCSK9; (+) strand; PAM type: NRG; PAM sequence: CGG
ctaagcacttagcttagtgc

SEQ ID NO: 17177 - DNA, 20 bp, Artificial Sequence
  Description of Artificial Sequence: Synthetic oligonucleotide
  Target: PCSK9; (+) strand; PAM type: NRG; PAM sequence: GGG
taagcacttagcttagtgcc

SEQ ID NO: 17178 - DNA, 20 bp, Artificial Sequence
  Description of Artificial Sequence: Synthetic oligonucleotide
  Target: PCSK9; (+) strand; PAM type: NRG; PAM sequence: TAG
tgccgggacaatataaattc

SEQ ID NO: 17179 - DNA, 20 bp, Artificial Sequence
  Description of Artificial Sequence: Synthetic oligonucleotide
  Target: PCSK9; (+) strand; PAM type: NRG; PAM sequence: CAG
tcacccgttgctttaaaatc

SEQ ID NO: 17180 - DNA, 20 bp, Artificial Sequence
  Description of Artificial Sequence: Synthetic oligonucleotide
  Target: PCSK9; (+) strand; PAM type: NRG; PAM sequence: TGG
ttgctttaaaatccagcctc

SEQ ID NO: 17181 - DNA, 20 bp, Artificial Sequence
  Description of Artificial Sequence: Synthetic oligonucleotide
  Target: PCSK9; (+) strand; PAM type: NRG; PAM sequence: TAG
ttaaaatccagcctctggta

SEQ ID NO: 17182 - DNA, 20 bp, Artificial Sequence
  Description of Artificial Sequence: Synthetic oligonucleotide
  Target: PCSK9; (+) strand; PAM type: NRG; PAM sequence: AGG
taaaatccagcctctggtat

SEQ ID NO: 17183 - DNA, 20 bp, Artificial Sequence
  Description of Artificial Sequence: Synthetic oligonucleotide
  Target: PCSK9; (+) strand; PAM type: NRG; PAM sequence: CGG
ctggtataggcaactattga

SEQ ID NO: 17184 - DNA, 20 bp, Artificial Sequence
  Description of Artificial Sequence: Synthetic oligonucleotide
  Target: PCSK9; (+) strand; PAM type: NRG; PAM sequence: GGG
tggtataggcaactattgac

SEQ ID NO: 17185 - DNA, 20 bp, Artificial Sequence
  Description of Artificial Sequence: Synthetic oligonucleotide
  Target: PCSK9; (+) strand; PAM type: NRG; PAM sequence: CAG
ccctgtgtcgaaaacatgcc

SEQ ID NO: 17186 - DNA, 20 bp, Artificial Sequence
  Description of Artificial Sequence: Synthetic oligonucleotide
  Target: PCSK9; (+) strand; PAM type: NRG; PAM sequence: AGG
cctgtgtcgaaaacatgccc

SEQ ID NO: 17187 - DNA, 20 bp, Artificial Sequence
  Description of Artificial Sequence: Synthetic oligonucleotide
  Target: PCSK9; (+) strand; PAM type: NRG; PAM sequence: CAG
gtgtcgaaaacatgcccagg

SEQ ID NO: 17188 - DNA, 20 bp, Artificial Sequence
  Description of Artificial Sequence: Synthetic oligonucleotide
  Target: PCSK9; (+) strand; PAM type: NRG; PAM sequence: AGG
tgtcgaaaacatgcccaggc

SEQ ID NO: 17189 - DNA, 20 bp, Artificial Sequence
  Description of Artificial Sequence: Synthetic oligonucleotide
  Target: PCSK9; (+) strand; PAM type: NRG; PAM sequence: TAG
cgaaaacatgcccaggcagg

SEQ ID NO: 17190 - DNA, 20 bp, Artificial Sequence
  Description of Artificial Sequence: Synthetic oligonucleotide
  Target: PCSK9; (+) strand; PAM type: NRG; PAM sequence: CAG
aaacatgcccaggcaggtag

SEQ ID NO: 17191 - DNA, 20 bp, Artificial Sequence
  Description of Artificial Sequence: Synthetic oligonucleotide
  Target: PCSK9; (+) strand; PAM type: NRG; PAM sequence: AGG
aacatgcccaggcaggtagc

SEQ ID NO: 17192 - DNA, 20 bp, Artificial Sequence
  Description of Artificial Sequence: Synthetic oligonucleotide
  Target: PCSK9; (+) strand; PAM type: NRG; PAM sequence: AAG
atgcccaggcaggtagcagg

SEQ ID NO: 17193 - DNA, 20 bp, Artificial Sequence
  Description of Artificial Sequence: Synthetic oligonucleotide
  Target: PCSK9; (+) strand; PAM type: NRG; PAM sequence: CAG
aggcaggtagcaggaagtca

SEQ ID NO: 17194 - DNA, 20 bp, Artificial Sequence
  Description of Artificial Sequence: Synthetic oligonucleotide
  Target: PCSK9; (+) strand; PAM type: NRG; PAM sequence: TGG
aggtagcaggaagtcacaga

SEQ ID NO: 17195 - DNA, 20 bp, Artificial Sequence
  Description of Artificial Sequence: Synthetic oligonucleotide
  Target: PCSK9; (+) strand; PAM type: NRG; PAM sequence: GGG
ggtagcaggaagtcacagat

SEQ ID NO: 17196 - DNA, 20 bp, Artificial Sequence
  Description of Artificial Sequence: Synthetic oligonucleotide
  Target: PCSK9; (+) strand; PAM type: NRG; PAM sequence: GGG
gtagcaggaagtcacagatg

SEQ ID NO: 17197 - DNA, 20 bp, Artificial Sequence
  Description of Artificial Sequence: Synthetic oligonucleotide
  Target: PCSK9; (+) strand; PAM type: NRG; PAM sequence: TGG
agtcacagatggggacctct

SEQ ID NO: 17198 - DNA, 20 bp, Artificial Sequence
  Description of Artificial Sequence: Synthetic oligonucleotide
  Target: PCSK9; (+) strand; PAM type: NRG; PAM sequence: GGG
gtcacagatggggacctctt

SEQ ID NO: 17199 - DNA, 20 bp, Artificial Sequence
  Description of Artificial Sequence: Synthetic oligonucleotide
  Target: PCSK9; (+) strand; PAM type: NRG; PAM sequence: GGG
tcacagatggggacctcttg

SEQ ID NO: 17200 - DNA, 20 bp, Artificial Sequence
  Description of Artificial Sequence: Synthetic oligonucleotide
  Target: PCSK9; (+) strand; PAM type: NRG; PAM sequence: AAG
tggggacctcttggggcatc

SEQ ID NO: 17201 - DNA, 20 bp, Artificial Sequence
  Description of Artificial Sequence: Synthetic oligonucleotide
  Target: PCSK9; (+) strand; PAM type: NRG; PAM sequence: AGG
ggggacctcttggggcatca

SEQ ID NO: 17202 - DNA, 20 bp, Artificial Sequence
  Description of Artificial Sequence: Synthetic oligonucleotide
  Target: PCSK9; (+) strand; PAM type: NRG; PAM sequence: GGG
gggacctcttggggcatcaa

SEQ ID NO: 17203 - DNA, 20 bp, Artificial Sequence
  Description of Artificial Sequence: Synthetic oligonucleotide
  Target: PCSK9; (+) strand; PAM type: NRG; PAM sequence: TGG
cctcttggggcatcaaggga

SEQ ID NO: 17204 - DNA, 20 bp, Artificial Sequence
  Description of Artificial Sequence: Synthetic oligonucleotide
  Target: PCSK9; (+) strand; PAM type: NRG; PAM sequence: GAG
gcatcaagggatggtgccct

SEQ ID NO: 17205 - DNA, 20 bp, Artificial Sequence
  Description of Artificial Sequence: Synthetic oligonucleotide
  Target: PCSK9; (+) strand; PAM type: NRG; PAM sequence: AGG
catcaagggatggtgccctg

SEQ ID NO: 17206 - DNA, 20 bp, Artificial Sequence
  Description of Artificial Sequence: Synthetic oligonucleotide
  Target: PCSK9; (+) strand; PAM type: NRG; PAM sequence: GAG
agggatggtgccctgaggct

SEQ ID NO: 17207 - DNA, 20 bp, Artificial Sequence
  Description of Artificial Sequence: Synthetic oligonucleotide
  Target: PCSK9; (+) strand; PAM type: NRG; PAM sequence: TGG
gccctgaggctgagctgttc

SEQ ID NO: 17208 - DNA, 20 bp, Artificial Sequence
  Description of Artificial Sequence: Synthetic oligonucleotide
  Target: PCSK9; (+) strand; PAM type: NRG; PAM sequence: TGG
tgaggctgagctgttctggt

SEQ ID NO: 17209 - DNA, 20 bp, Artificial Sequence
  Description of Artificial Sequence: Synthetic oligonucleotide
  Target: PCSK9; (+) strand; PAM type: NRG; PAM sequence: GGG
gaggctgagctgttctggtt

SEQ ID NO: 17210 - DNA, 20 bp, Artificial Sequence
  Description of Artificial Sequence: Synthetic oligonucleotide
  Target: PCSK9; (+) strand; PAM type: NRG; PAM sequence: TGG
gctgagctgttctggttggg

SEQ ID NO: 17211 - DNA, 20 bp, Artificial Sequence
  Description of Artificial Sequence: Synthetic oligonucleotide
  Target: PCSK9; (+) strand; PAM type: NRG; PAM sequence: GAG
tgagctgttctggttgggtg

SEQ ID NO: 17212 - DNA, 20 bp, Artificial Sequence
  Description of Artificial Sequence: Synthetic oligonucleotide
  Target: PCSK9; (+) strand; PAM type: NRG; PAM sequence: GAG
gttctggttgggtggagcat

SEQ ID NO: 17213 - DNA, 20 bp, Artificial Sequence
  Description of Artificial Sequence: Synthetic oligonucleotide
  Target: PCSK9; (+) strand; PAM type: NRG; PAM sequence: GAG
tctggttgggtggagcatga

SEQ ID NO: 17214 - DNA, 20 bp, Artificial Sequence
  Description of Artificial Sequence: Synthetic oligonucleotide
  Target: PCSK9; (+) strand; PAM type: NRG; PAM sequence: AGG
ctggttgggtggagcatgag

SEQ ID NO: 17215 - DNA, 20 bp, Artificial Sequence
  Description of Artificial Sequence: Synthetic oligonucleotide
  Target: PCSK9; (+) strand; PAM type: NRG; PAM sequence: TGG
tgggtggagcatgagaggtc

SEQ ID NO: 17216 - DNA, 20 bp, Artificial Sequence
  Description of Artificial Sequence: Synthetic oligonucleotide
  Target: PCSK9; (+) strand; PAM type: NRG; PAM sequence: GGG
gggtggagcatgagaggtct

SEQ ID NO: 17217 - DNA, 20 bp, Artificial Sequence
  Description of Artificial Sequence: Synthetic oligonucleotide
  Target: PCSK9; (+) strand; PAM type: NRG; PAM sequence: AAG
tggagcatgagaggtctggg

SEQ ID NO: 17218 - DNA, 20 bp, Artificial Sequence
  Description of Artificial Sequence: Synthetic oligonucleotide
  Target: PCSK9; (+) strand; PAM type: NRG; PAM sequence: CAG
gcatgagaggtctgggaaga

SEQ ID NO: 17219 - DNA, 20 bp, Artificial Sequence
  Description of Artificial Sequence: Synthetic oligonucleotide
  Target: PCSK9; (+) strand; PAM type: NRG; PAM sequence: TGG
tgagaggtctgggaagacag

SEQ ID NO: 17220 - DNA, 20 bp, Artificial Sequence
  Description of Artificial Sequence: Synthetic oligonucleotide
  Target: PCSK9; (+) strand; PAM type: NRG; PAM sequence: GGG
gagaggtctgggaagacagt

SEQ ID NO: 17221 - DNA, 20 bp, Artificial Sequence
  Description of Artificial Sequence: Synthetic oligonucleotide
  Target: PCSK9; (+) strand; PAM type: NRG; PAM sequence: CAG
ctgggaagacagtgggactc

SEQ ID NO: 17222 - DNA, 20 bp, Artificial Sequence
  Description of Artificial Sequence: Synthetic oligonucleotide
  Target: PCSK9; (+) strand; PAM type: NRG; PAM sequence: TGG
aagacagtgggactccagcc

SEQ ID NO: 17223 - DNA, 20 bp, Artificial Sequence
  Description of Artificial Sequence: Synthetic oligonucleotide
  Target: PCSK9; (+) strand; PAM type: NRG; PAM sequence: AAG
gtgggactccagcctggaat

SEQ ID NO: 17224 - DNA, 20 bp, Artificial Sequence
  Description of Artificial Sequence: Synthetic oligonucleotide
  Target: PCSK9; (+) strand; PAM type: NRG; PAM sequence: GAG
gggactccagcctggaataa

SEQ ID NO: 17225 - DNA, 20 bp, Artificial Sequence
  Description of Artificial Sequence: Synthetic oligonucleotide
  Target: PCSK9; (+) strand; PAM type: NRG; PAM sequence: AGG
ggactccagcctggaataag

SEQ ID NO: 17226 - DNA, 20 bp, Artificial Sequence
  Description of Artificial Sequence: Synthetic oligonucleotide
  Target: PCSK9; (+) strand; PAM type: NRG; PAM sequence: CAG
ccagcctggaataagaggct

SEQ ID NO: 17227 - DNA, 20 bp, Artificial Sequence
  Description of Artificial Sequence: Synthetic oligonucleotide
  Target: PCSK9; (+) strand; PAM type: NRG; PAM sequence: GAG
agcctggaataagaggctca

SEQ ID NO: 17228 - DNA, 20 bp, Artificial Sequence
  Description of Artificial Sequence: Synthetic oligonucleotide
  Target: PCSK9; (+) strand; PAM type: NRG; PAM sequence: GAG
ctcagagttgattctcgtct

SEQ ID NO: 17229 - DNA, 20 bp, Artificial Sequence
  Description of Artificial Sequence: Synthetic oligonucleotide
  Target: PCSK9; (+) strand; PAM type: NRG; PAM sequence: CAG
gattctcgtctgagcacgtc

SEQ ID NO: 17230 - DNA, 20 bp, Artificial Sequence
  Description of Artificial Sequence: Synthetic oligonucleotide
  Target: PCSK9; (+) strand; PAM type: NRG; PAM sequence: AGG
attctcgtctgagcacgtcc

SEQ ID NO: 17231 - DNA, 20 bp, Artificial Sequence
  Description of Artificial Sequence: Synthetic oligonucleotide
  Target: PCSK9; (+) strand; PAM type: NRG; PAM sequence: GGG
ttctcgtctgagcacgtcca

SEQ ID NO: 17232 - DNA, 20 bp, Artificial Sequence
  Description of Artificial Sequence: Synthetic oligonucleotide
  Target: PCSK9; (+) strand; PAM type: NRG; PAM sequence: GGG
tctcgtctgagcacgtccag

SEQ ID NO: 17233 - DNA, 20 bp, Artificial Sequence
  Description of Artificial Sequence: Synthetic oligonucleotide
  Target: PCSK9; (+) strand; PAM type: NRG; PAM sequence: GAG
gcacgtccaggggaaccact

SEQ ID NO: 17234 - DNA, 20 bp, Artificial Sequence
  Description of Artificial Sequence: Synthetic oligonucleotide
  Target: PCSK9; (+) strand; PAM type: NRG; PAM sequence: AGG
cacgtccaggggaaccactg

SEQ ID NO: 17235 - DNA, 20 bp, Artificial Sequence
  Description of Artificial Sequence: Synthetic oligonucleotide
  Target: PCSK9; (+) strand; PAM type: NRG; PAM sequence: GGG
acgtccaggggaaccactga

SEQ ID NO: 17236 - DNA, 20 bp, Artificial Sequence
  Description of Artificial Sequence: Synthetic oligonucleotide
  Target: PCSK9; (+) strand; PAM type: NRG; PAM sequence: TGG
caggggaaccactgagggtt

SEQ ID NO: 17237 - DNA, 20 bp, Artificial Sequence
  Description of Artificial Sequence: Synthetic oligonucleotide
  Target: PCSK9; (+) strand; PAM type: NRG; PAM sequence: GGG
aggggaaccactgagggttt

SEQ ID NO: 17238 - DNA, 20 bp, Artificial Sequence
  Description of Artificial Sequence: Synthetic oligonucleotide
  Target: PCSK9; (+) strand; PAM type: NRG; PAM sequence: CAG
aaccactgagggtttgggaa

SEQ ID NO: 17239 - DNA, 20 bp, Artificial Sequence
  Description of Artificial Sequence: Synthetic oligonucleotide
  Target: PCSK9; (+) strand; PAM type: NRG; PAM sequence: AGG
accactgagggtttgggaac

SEQ ID NO: 17240 - DNA, 20 bp, Artificial Sequence
  Description of Artificial Sequence: Synthetic oligonucleotide
  Target: PCSK9; (+) strand; PAM type: NRG; PAM sequence: GAG
cactgagggtttgggaacag

SEQ ID NO: 17241 - DNA, 20 bp, Artificial Sequence
  Description of Artificial Sequence: Synthetic oligonucleotide
  Target: PCSK9; (+) strand; PAM type: NRG; PAM sequence: GAG
ctgagggtttgggaacagga

SEQ ID NO: 17242 - DNA, 20 bp, Artificial Sequence
  Description of Artificial Sequence: Synthetic oligonucleotide
  Target: PCSK9; (+) strand; PAM type: NRG; PAM sequence: GAG
gggtttgggaacaggagagt

SEQ ID NO: 17243 - DNA, 20 bp, Artificial Sequence
  Description of Artificial Sequence: Synthetic oligonucleotide
  Target: PCSK9; (+) strand; PAM type: NRG; PAM sequence: AGG
ggtttgggaacaggagagtg

SEQ ID NO: 17244 - DNA, 20 bp, Artificial Sequence
  Description of Artificial Sequence: Synthetic oligonucleotide
  Target: PCSK9; (+) strand; PAM type: NRG; PAM sequence: GGG
gtttgggaacaggagagtga

SEQ ID NO: 17245 - DNA, 20 bp, Artificial Sequence
  Description of Artificial Sequence: Synthetic oligonucleotide
  Target: PCSK9; (+) strand; PAM type: NRG; PAM sequence: GAG
gggaacaggagagtgagggt

SEQ ID NO: 17246 - DNA, 20 bp, Artificial Sequence
  Description of Artificial Sequence: Synthetic oligonucleotide
  Target: PCSK9; (+) strand; PAM type: NRG; PAM sequence: TGG
ggagagtgagggtgagaacc

SEQ ID NO: 17247 - DNA, 20 bp, Artificial Sequence
  Description of Artificial Sequence: Synthetic oligonucleotide
  Target: PCSK9; (+) strand; PAM type: NRG; PAM sequence: TGG
tgagggtgagaacctggttc

SEQ ID NO: 17248 - DNA, 20 bp, Artificial Sequence
  Description of Artificial Sequence: Synthetic oligonucleotide
  Target: PCSK9; (+) strand; PAM type: NRG; PAM sequence: GGG
gagggtgagaacctggttct

SEQ ID NO: 17249 - DNA, 20 bp, Artificial Sequence
  Description of Artificial Sequence: Synthetic oligonucleotide
  Target: PCSK9; (+) strand; PAM type: NRG; PAM sequence: CAG
tgagaacctggttctgggca

SEQ ID NO: 17250 - DNA, 20 bp, Artificial Sequence
  Description of Artificial Sequence: Synthetic oligonucleotide
  Target: PCSK9; (+) strand; PAM type: NRG; PAM sequence: CAG
gaacctggttctgggcacag

SEQ ID NO: 17251 - DNA, 20 bp, Artificial Sequence
  Description of Artificial Sequence: Synthetic oligonucleotide
  Target: PCSK9; (+) strand; PAM type: NRG; PAM sequence: AGG
aacctggttctgggcacagc

SEQ ID NO: 17252 - DNA, 20 bp, Artificial Sequence
  Description of Artificial Sequence: Synthetic oligonucleotide
  Target: PCSK9; (+) strand; PAM type: NRG; PAM sequence: TGG
tggttctgggcacagcaggc

SEQ ID NO: 17253 - DNA, 20 bp, Artificial Sequence
  Description of Artificial Sequence: Synthetic oligonucleotide
  Target: PCSK9; (+) strand; PAM type: NRG; PAM sequence: TAG
gggcacagcaggctggcatg

SEQ ID NO: 17254 - DNA, 20 bp, Artificial Sequence
  Description of Artificial Sequence: Synthetic oligonucleotide
  Target: PCSK9; (+) strand; PAM type: NRG; PAM sequence: AGG
ggcacagcaggctggcatgt

SEQ ID NO: 17255 - DNA, 20 bp, Artificial Sequence
  Description of Artificial Sequence: Synthetic oligonucleotide
  Target: PCSK9; (+) strand; PAM type: NRG; PAM sequence: TGG
cagcaggctggcatgtagga

SEQ ID NO: 17256 - DNA, 20 bp, Artificial Sequence
  Description of Artificial Sequence: Synthetic oligonucleotide
  Target: PCSK9; (+) strand; PAM type: NRG; PAM sequence: CAG
tggcatgtaggatggatgtt

SEQ ID NO: 17257 - DNA, 20 bp, Artificial Sequence
  Description of Artificial Sequence: Synthetic oligonucleotide
  Target: PCSK9; (+) strand; PAM type: NRG; PAM sequence: AGG
ggcatgtaggatggatgttc

SEQ ID NO: 17258 - DNA, 20 bp, Artificial Sequence
  Description of Artificial Sequence: Synthetic oligonucleotide
  Target: PCSK9; (+) strand; PAM type: NRG; PAM sequence: AAG
tgtaggatggatgttcagga

SEQ ID NO: 17259 - DNA, 20 bp, Artificial Sequence
  Description of Artificial Sequence: Synthetic oligonucleotide
  Target: PCSK9; (+) strand; PAM type: NRG; PAM sequence: GAG
gatggatgttcaggaaagat

SEQ ID NO: 17260 - DNA, 20 bp, Artificial Sequence
  Description of Artificial Sequence: Synthetic oligonucleotide
  Target: PCSK9; (+) strand; PAM type: NRG; PAM sequence: TAG
atgttcaggaaagatgagca

SEQ ID NO: 17261 - DNA, 20 bp, Artificial Sequence
  Description of Artificial Sequence: Synthetic oligonucleotide
  Target: PCSK9; (+) strand; PAM type: NRG; PAM sequence: CAG
tcaggaaagatgagcatagt

SEQ ID NO: 17262 - DNA, 20 bp, Artificial Sequence
  Description of Artificial Sequence: Synthetic oligonucleotide
  Target: PCSK9; (+) strand; PAM type: NRG; PAM sequence: AGG
caggaaagatgagcatagtc

SEQ ID NO: 17263 - DNA, 20 bp, Artificial Sequence
  Description of Artificial Sequence: Synthetic oligonucleotide
  Target: PCSK9; (+) strand; PAM type: NRG; PAM sequence: TGG
gaaagatgagcatagtcagg

SEQ ID NO: 17264 - DNA, 20 bp, Artificial Sequence
  Description of Artificial Sequence: Synthetic oligonucleotide
  Target: PCSK9; (+) strand; PAM type: NRG; PAM sequence: TGG
gatgagcatagtcaggtggc

SEQ ID NO: 17265 - DNA, 20 bp, Artificial Sequence
  Description of Artificial Sequence: Synthetic oligonucleotide
  Target: PCSK9; (+) strand; PAM type: NRG; PAM sequence: CAG
aggtggctggtgcccttgtc

SEQ ID NO: 17266 - DNA, 20 bp, Artificial Sequence
  Description of Artificial Sequence: Synthetic oligonucleotide
  Target: PCSK9; (+) strand; PAM type: NRG; PAM sequence: AGG
ggtggctggtgcccttgtcc

SEQ ID NO: 17267 - DNA, 20 bp, Artificial Sequence
  Description of Artificial Sequence: Synthetic oligonucleotide
  Target: PCSK9; (+) strand; PAM type: NRG; PAM sequence: GGG
gtggctggtgcccttgtcca

SEQ ID NO: 17268 - DNA, 20 bp, Artificial Sequence
  Description of Artificial Sequence: Synthetic oligonucleotide
  Target: PCSK9; (+) strand; PAM type: NRG; PAM sequence: GGG
tggctggtgcccttgtccag

SEQ ID NO: 17269 - DNA, 20 bp, Artificial Sequence
  Description of Artificial Sequence: Synthetic oligonucleotide
  Target: PCSK9; (+) strand; PAM type: NRG; PAM sequence: GAG
gctggtgcccttgtccaggg

SEQ ID NO: 17270 - DNA, 20 bp, Artificial Sequence
  Description of Artificial Sequence: Synthetic oligonucleotide
  Target: PCSK9; (+) strand; PAM type: NRG; PAM sequence: GAG
tggtgcccttgtccagggga

SEQ ID NO: 17271 - DNA, 20 bp, Artificial Sequence
  Description of Artificial Sequence: Synthetic oligonucleotide
  Target: PCSK9; (+) strand; PAM type: NRG; PAM sequence: AGG
ggtgcccttgtccaggggag

SEQ ID NO: 17272 - DNA, 20 bp, Artificial Sequence
  Description of Artificial Sequence: Synthetic oligonucleotide
  Target: PCSK9; (+) strand; PAM type: NRG; PAM sequence: CAG
gtccaggggagaggctccgt

SEQ ID NO: 17273 - DNA, 20 bp, Artificial Sequence
  Description of Artificial Sequence: Synthetic oligonucleotide
  Target: PCSK9; (+) strand; PAM type: NRG; PAM sequence: AGG
tccaggggagaggctccgtc

SEQ ID NO: 17274 - DNA, 20 bp, Artificial Sequence
  Description of Artificial Sequence: Synthetic oligonucleotide
  Target: PCSK9; (+) strand; PAM type: NRG; PAM sequence: CAG
gggagaggctccgtcaggtt

SEQ ID NO: 17275 - DNA, 20 bp, Artificial Sequence
  Description of Artificial Sequence: Synthetic oligonucleotide
  Target: PCSK9; (+) strand; PAM type: NRG; PAM sequence: AGG
ggagaggctccgtcaggttc

SEQ ID NO: 17276 - DNA, 20 bp, Artificial Sequence
  Description of Artificial Sequence: Synthetic oligonucleotide
  Target: PCSK9; (+) strand; PAM type: NRG; PAM sequence: GGG
gagaggctccgtcaggttca

SEQ ID NO: 17277 - DNA, 20 bp, Artificial Sequence
  Description of Artificial Sequence: Synthetic oligonucleotide
  Target: PCSK9; (+) strand; PAM type: NRG; PAM sequence: GGG
agaggctccgtcaggttcag

SEQ ID NO: 17278 - DNA, 20 bp, Artificial Sequence
  Description of Artificial Sequence: Synthetic oligonucleotide
  Target: PCSK9; (+) strand; PAM type: NRG; PAM sequence: TGG
tccgtcaggttcaggggtcc

SEQ ID NO: 17279 - DNA, 20 bp, Artificial Sequence
  Description of Artificial Sequence: Synthetic oligonucleotide
  Target: PCSK9; (+) strand; PAM type: NRG; PAM sequence: TGG
caggttcaggggtcctggct

SEQ ID NO: 17280 - DNA, 20 bp, Artificial Sequence
  Description of Artificial Sequence: Synthetic oligonucleotide
  Target: PCSK9; (+) strand; PAM type: NRG; PAM sequence: GAG
ggttcaggggtcctggcttg

SEQ ID NO: 17281 - DNA, 20 bp, Artificial Sequence
  Description of Artificial Sequence: Synthetic oligonucleotide
  Target: PCSK9; (+) strand; PAM type: NRG; PAM sequence: AGG
gttcaggggtcctggcttgg

SEQ ID NO: 17282 - DNA, 20 bp, Artificial Sequence
  Description of Artificial Sequence: Synthetic oligonucleotide
  Target: PCSK9; (+) strand; PAM type: NRG; PAM sequence: GGG
ttcaggggtcctggcttgga

SEQ ID NO: 17283 - DNA, 20 bp, Artificial Sequence
  Description of Artificial Sequence: Synthetic oligonucleotide
  Target: PCSK9; (+) strand; PAM type: NRG; PAM sequence: AAG
aggggtcctggcttggaggg

SEQ ID NO: 17284 - DNA, 20 bp, Artificial Sequence
  Description of Artificial Sequence: Synthetic oligonucleotide
  Target: PCSK9; (+) strand; PAM type: NRG; PAM sequence: TGG
gctctaatcacgctcccctt

SEQ ID NO: 17285 - DNA, 20 bp, Artificial Sequence
  Description of Artificial Sequence: Synthetic oligonucleotide
  Target: PCSK9; (+) strand; PAM type: NRG; PAM sequence: AAG
ctaatcacgctcccctttgg

SEQ ID NO: 17286 - DNA, 20 bp, Artificial Sequence
  Description of Artificial Sequence: Synthetic oligonucleotide
  Target: PCSK9; (+) strand; PAM type: NRG; PAM sequence: CAG
cgctcccctttggaagtgct

SEQ ID NO: 17287 - DNA, 20 bp, Artificial Sequence
  Description of Artificial Sequence: Synthetic oligonucleotide
  Target: PCSK9; (+) strand; PAM type: NRG; PAM sequence: GAG
tttggaagtgctcagccgat

SEQ ID NO: 17288 - DNA, 20 bp, Artificial Sequence
  Description of Artificial Sequence: Synthetic oligonucleotide
  Target: PCSK9; (+) strand; PAM type: NRG; PAM sequence: CAG
gtgctcagccgatgagctca

SEQ ID NO: 17289 - DNA, 20 bp, Artificial Sequence
  Description of Artificial Sequence: Synthetic oligonucleotide
  Target: PCSK9; (+) strand; PAM type: NRG; PAM sequence: AGG
tgctcagccgatgagctcac

SEQ ID NO: 17290 - DNA, 20 bp, Artificial Sequence
  Description of Artificial Sequence: Synthetic oligonucleotide
  Target: PCSK9; (+) strand; PAM type: NRG; PAM sequence: CAG
atgagctcacaggcacatgt

SEQ ID NO: 17291 - DNA, 20 bp, Artificial Sequence
  Description of Artificial Sequence: Synthetic oligonucleotide
  Target: PCSK9; (+) strand; PAM type: NRG; PAM sequence: AAG
cacaggcacatgtcagtttg

SEQ ID NO: 17292 - DNA, 20 bp, Artificial Sequence
  Description of Artificial Sequence: Synthetic oligonucleotide
  Target: PCSK9; (+) strand; PAM type: NRG; PAM sequence: TGG
cacatgtcagtttgaagtca

SEQ ID NO: 17293 - DNA, 20 bp, Artificial Sequence
  Description of Artificial Sequence: Synthetic oligonucleotide
  Target: PCSK9; (+) strand; PAM type: NRG; PAM sequence: AAG
tcatggaatctgactccatg

SEQ ID NO: 17294 - DNA, 20 bp, Artificial Sequence
  Description of Artificial Sequence: Synthetic oligonucleotide
  Target: PCSK9; (+) strand; PAM type: NRG; PAM sequence: AAG
actccatgaagcgcacctca

SEQ ID NO: 17295 - DNA, 20 bp, Artificial Sequence
  Description of Artificial Sequence: Synthetic oligonucleotide
  Target: PCSK9; (+) strand; PAM type: NRG; PAM sequence: GAG
tccatgaagcgcacctcaaa

SEQ ID NO: 17296 - DNA, 20 bp, Artificial Sequence
  Description of Artificial Sequence: Synthetic oligonucleotide
  Target: PCSK9; (+) strand; PAM type: NRG; PAM sequence: CAG
cctcaaagagcaccattttg

SEQ ID NO: 17297 - DNA, 20 bp, Artificial Sequence
  Description of Artificial Sequence: Synthetic oligonucleotide
  Target: PCSK9; (+) strand; PAM type: NRG; PAM sequence: AAG
aagagcaccattttgcagct

SEQ ID NO: 17298 - DNA, 20 bp, Artificial Sequence
  Description of Artificial Sequence: Synthetic oligonucleotide
  Target: PCSK9; (+) strand; PAM type: NRG; PAM sequence: AGG
agagcaccattttgcagcta

SEQ ID NO: 17299 - DNA, 20 bp, Artificial Sequence
  Description of Artificial Sequence: Synthetic oligonucleotide
  Target: PCSK9; (+) strand; PAM type: NRG; PAM sequence: GGG
gagcaccattttgcagctaa

SEQ ID NO: 17300 - DNA, 20 bp, Artificial Sequence
  Description of Artificial Sequence: Synthetic oligonucleotide
  Target: PCSK9; (+) strand; PAM type: NRG; PAM sequence: CAG
ttttgcagctaagggaactg

SEQ ID NO: 17301 - DNA, 20 bp, Artificial Sequence
  Description of Artificial Sequence: Synthetic oligonucleotide
  Target: PCSK9; (+) strand; PAM type: NRG; PAM sequence: AGG
tttgcagctaagggaactgc

SEQ ID NO: 17302 - DNA, 20 bp, Artificial Sequence
  Description of Artificial Sequence: Synthetic oligonucleotide
  Target: PCSK9; (+) strand; PAM type: NRG; PAM sequence: TGG
cagctaagggaactgcaggc

SEQ ID NO: 17303 - DNA, 20 bp, Artificial Sequence
  Description of Artificial Sequence: Synthetic oligonucleotide
  Target: PCSK9; (+) strand; PAM type: NRG; PAM sequence: GAG
aactgcaggctggacatgct

SEQ ID NO: 17304 - DNA, 20 bp, Artificial Sequence
  Description of Artificial Sequence: Synthetic oligonucleotide
  Target: PCSK9; (+) strand; PAM type: NRG; PAM sequence: TGG
tgcaggctggacatgctgag

SEQ ID NO: 17305 - DNA, 20 bp, Artificial Sequence
  Description of Artificial Sequence: Synthetic oligonucleotide
  Target: PCSK9; (+) strand; PAM type: NRG; PAM sequence: GAG
acatgctgagtggctgcccc

SEQ ID NO: 17306 - DNA, 20 bp, Artificial Sequence
  Description of Artificial Sequence: Synthetic oligonucleotide
  Target: PCSK9; (+) strand; PAM type: NRG; PAM sequence: CAG
gtggctgccccgagcccttg

SEQ ID NO: 17307 - DNA, 20 bp, Artificial Sequence
  Description of Artificial Sequence: Synthetic oligonucleotide
  Target: PCSK9; (+) strand; PAM type: NRG; PAM sequence: TAG
ctgccccgagcccttgcagc

SEQ ID NO: 17308 - DNA, 20 bp, Artificial Sequence
  Description of Artificial Sequence: Synthetic oligonucleotide
  Target: PCSK9; (+) strand; PAM type: NRG; PAM sequence: AGG
tgccccgagcccttgcagct

SEQ ID NO: 17309 - DNA, 20 bp, Artificial Sequence
  Description of Artificial Sequence: Synthetic oligonucleotide
  Target: PCSK9; (+) strand; PAM type: NRG; PAM sequence: TAG
gagcccttgcagctaggaca

SEQ ID NO: 17310 - DNA, 20 bp, Artificial Sequence
  Description of Artificial Sequence: Synthetic oligonucleotide
  Target: PCSK9; (+) strand; PAM type: NRG; PAM sequence: GAG
gcccttgcagctaggacata

SEQ ID NO: 17311 - DNA, 20 bp, Artificial Sequence
  Description of Artificial Sequence: Synthetic oligonucleotide
  Target: PCSK9; (+) strand; PAM type: NRG; PAM sequence: TAG
agctaggacatagagaatgc

SEQ ID NO: 17312 - DNA, 20 bp, Artificial Sequence
  Description of Artificial Sequence: Synthetic oligonucleotide
  Target: PCSK9; (+) strand; PAM type: NRG; PAM sequence: CAG
aaccacaaccctaccatgtt

SEQ ID NO: 17313 - DNA, 20 bp, Artificial Sequence
  Description of Artificial Sequence: Synthetic oligonucleotide
  Target: PCSK9; (+) strand; PAM type: NRG; PAM sequence: GAG
ccacaaccctaccatgttca

SEQ ID NO: 17314 - DNA, 20 bp, Artificial Sequence
  Description of Artificial Sequence: Synthetic oligonucleotide
  Target: PCSK9; (+) strand; PAM type: NRG; PAM sequence: CAG
accatgttcagagcacatgc

SEQ ID NO: 17315 - DNA, 20 bp, Artificial Sequence
  Description of Artificial Sequence: Synthetic oligonucleotide
  Target: PCSK9; (+) strand; PAM type: NRG; PAM sequence: AGG
ccatgttcagagcacatgcc

SEQ ID NO: 17316 - DNA, 20 bp, Artificial Sequence
  Description of Artificial Sequence: Synthetic oligonucleotide
  Target: PCSK9; (+) strand; PAM type: NRG; PAM sequence: TGG
gcacatgccaggctccatgc

SEQ ID NO: 17317 - DNA, 20 bp, Artificial Sequence
  Description of Artificial Sequence: Synthetic oligonucleotide
  Target: PCSK9; (+) strand; PAM type: NRG; PAM sequence: GGG
cacatgccaggctccatgct

SEQ ID NO: 17318 - DNA, 20 bp, Artificial Sequence
  Description of Artificial Sequence: Synthetic oligonucleotide
  Target: PCSK9; (+) strand; PAM type: NRG; PAM sequence: GGG
acatgccaggctccatgctg

SEQ ID NO: 17319 - DNA, 20 bp, Artificial Sequence
  Description of Artificial Sequence: Synthetic oligonucleotide
  Target: PCSK9; (+) strand; PAM type: NRG; PAM sequence: CAG
cttcgcacgtgtcatcttca

SEQ ID NO: 17320 - DNA, 20 bp, Artificial Sequence
  Description of Artificial Sequence: Synthetic oligonucleotide
  Target: PCSK9; (+) strand; PAM type: NRG; PAM sequence: GAG
catcttcacagtgtccctgt

SEQ ID NO: 17321 - DNA, 20 bp, Artificial Sequence
  Description of Artificial Sequence: Synthetic oligonucleotide
  Target: PCSK9; (+) strand; PAM type: NRG; PAM sequence: TAG
cttcacagtgtccctgtgag

SEQ ID NO: 17322 - DNA, 20 bp, Artificial Sequence
  Description of Artificial Sequence: Synthetic oligonucleotide
  Target: PCSK9; (+) strand; PAM type: NRG; PAM sequence: AGG
ttcacagtgtccctgtgagt

SEQ ID NO: 17323 - DNA, 20 bp, Artificial Sequence
  Description of Artificial Sequence: Synthetic oligonucleotide
  Target: PCSK9; (+) strand; PAM type: NRG; PAM sequence: TGG
agtgtccctgtgagtaggtg

SEQ ID NO: 17324 - DNA, 20 bp, Artificial Sequence
  Description of Artificial Sequence: Synthetic oligonucleotide
  Target: PCSK9; (+) strand; PAM type: NRG; PAM sequence: GAG
tctctttccatcttacaaat

SEQ ID NO: 17325 - DNA, 20 bp, Artificial Sequence
  Description of Artificial Sequence: Synthetic oligonucleotide
  Target: PCSK9; (+) strand; PAM type: NRG; PAM sequence: CAG
ccatcttacaaatgagtaaa

SEQ ID NO: 17326 - DNA, 20 bp, Artificial Sequence
  Description of Artificial Sequence: Synthetic oligonucleotide
  Target: PCSK9; (+) strand; PAM type: NRG; PAM sequence: GAG
atcttacaaatgagtaaaca

SEQ ID NO: 17327 - DNA, 20 bp, Artificial Sequence
  Description of Artificial Sequence: Synthetic oligonucleotide
  Target: PCSK9; (+) strand; PAM type: NRG; PAM sequence: CAG
caaatgagtaaacagagcct

SEQ ID NO: 17328 - DNA, 20 bp, Artificial Sequence
  Description of Artificial Sequence: Synthetic oligonucleotide
  Target: PCSK9; (+) strand; PAM type: NRG; PAM sequence: TAG
gagtaaacagagcctcagtg

SEQ ID NO: 17329 - DNA, 20 bp, Artificial Sequence
  Description of Artificial Sequence: Synthetic oligonucleotide
  Target: PCSK9; (+) strand; PAM type: NRG; PAM sequence: AAG
aacagagcctcagtgtagct

SEQ ID NO: 17330 - DNA, 20 bp, Artificial Sequence
  Description of Artificial Sequence: Synthetic oligonucleotide
  Target: PCSK9; (+) strand; PAM type: NRG; PAM sequence: TAG
tagctaagtaaccactattt

SEQ ID NO: 17331 - DNA, 20 bp, Artificial Sequence
  Description of Artificial Sequence: Synthetic oligonucleotide
  Target: PCSK9; (+) strand; PAM type: NRG; PAM sequence: AGG
agctaagtaaccactatttt

SEQ ID NO: 17332 - DNA, 20 bp, Artificial Sequence
  Description of Artificial Sequence: Synthetic oligonucleotide
  Target: PCSK9; (+) strand; PAM type: NRG; PAM sequence: TAG
aaccactattttaggtttct

SEQ ID NO: 17333 - DNA, 20 bp, Artificial Sequence
  Description of Artificial Sequence: Synthetic oligonucleotide
  Target: PCSK9; (+) strand; PAM type: NRG; PAM sequence: TGG
attttaggtttcttagccaa

SEQ ID NO: 17334 - DNA, 20 bp, Artificial Sequence
  Description of Artificial Sequence: Synthetic oligonucleotide
  Target: PCSK9; (+) strand; PAM type: NRG; PAM sequence: GGG
ttttaggtttcttagccaat

SEQ ID NO: 17335 - DNA, 20 bp, Artificial Sequence
  Description of Artificial Sequence: Synthetic oligonucleotide
  Target: PCSK9; (+) strand; PAM type: NRG; PAM sequence: AAG
aatgggtgtgtctgactcct

SEQ ID NO: 17336 - DNA, 20 bp, Artificial Sequence
  Description of Artificial Sequence: Synthetic oligonucleotide
  Target: PCSK9; (+) strand; PAM type: NRG; PAM sequence: TGG
gtgtctgactcctaagccca

SEQ ID NO: 17337 - DNA, 20 bp, Artificial Sequence
  Description of Artificial Sequence: Synthetic oligonucleotide
  Target: PCSK9; (+) strand; PAM type: NRG; PAM sequence: GAG
gtctgactcctaagcccatg

SEQ ID NO: 17338 - DNA, 20 bp, Artificial Sequence
  Description of Artificial Sequence: Synthetic oligonucleotide
  Target: PCSK9; (+) strand; PAM type: NRG; PAM sequence: AGG
tctgactcctaagcccatgg

SEQ ID NO: 17339 - DNA, 20 bp, Artificial Sequence
  Description of Artificial Sequence: Synthetic oligonucleotide
  Target: PCSK9; (+) strand; PAM type: NRG; PAM sequence: GGG
ctgactcctaagcccatgga

SEQ ID NO: 17340 - DNA, 20 bp, Artificial Sequence
  Description of Artificial Sequence: Synthetic oligonucleotide
  Target: PCSK9; (+) strand; PAM type: NRG; PAM sequence: GAG
aagcccatggagggcattct

SEQ ID NO: 17341 - DNA, 20 bp, Artificial Sequence
  Description of Artificial Sequence: Synthetic oligonucleotide
  Target: PCSK9; (+) strand; PAM type: NRG; PAM sequence: AGG
agcccatggagggcattctg

SEQ ID NO: 17342 - DNA, 20 bp, Artificial Sequence
  Description of Artificial Sequence: Synthetic oligonucleotide
  Target: PCSK9; (+) strand; PAM type: NRG; PAM sequence: TGG
ccatggagggcattctgagg

SEQ ID NO: 17343 - DNA, 20 bp, Artificial Sequence
  Description of Artificial Sequence: Synthetic oligonucleotide
  Target: PCSK9; (+) strand; PAM type: NRG; PAM sequence: CAG
gagggcattctgaggtggtt

SEQ ID NO: 17344 - DNA, 20 bp, Artificial Sequence
  Description of Artificial Sequence: Synthetic oligonucleotide
  Target: PCSK9; (+) strand; PAM type: NRG; PAM sequence: CAG
gcattctgaggtggttcaga

SEQ ID NO: 17345 - DNA, 20 bp, Artificial Sequence
  Description of Artificial Sequence: Synthetic oligonucleotide
  Target: PCSK9; (+) strand; PAM type: NRG; PAM sequence: CGG
gaggtggttcagacagaccc

SEQ ID NO: 17346 - DNA, 20 bp, Artificial Sequence
  Description of Artificial Sequence: Synthetic oligonucleotide
  Target: PCSK9; (+) strand; PAM type: NRG; PAM sequence: TGG
acccttgaacttctgcctgc

SEQ ID NO: 17347 - DNA, 20 bp, Artificial Sequence
  Description of Artificial Sequence: Synthetic oligonucleotide
  Target: PCSK9; (+) strand; PAM type: NRG; PAM sequence: TAG
acttctgcctgctggctgca

SEQ ID NO: 17348 - DNA, 20 bp, Artificial Sequence
  Description of Artificial Sequence: Synthetic oligonucleotide
  Target: PCSK9; (+) strand; PAM type: NRG; PAM sequence: AGG
cttctgcctgctggctgcat

SEQ ID NO: 17349 - DNA, 20 bp, Artificial Sequence
  Description of Artificial Sequence: Synthetic oligonucleotide
  Target: PCSK9; (+) strand; PAM type: NRG; PAM sequence: GGG
ttctgcctgctggctgcata

SEQ ID NO: 17350 - DNA, 20 bp, Artificial Sequence
  Description of Artificial Sequence: Synthetic oligonucleotide
  Target: PCSK9; (+) strand; PAM type: NRG; PAM sequence: GAG
ctgcctgctggctgcatagg

SEQ ID NO: 17351 - DNA, 20 bp, Artificial Sequence
  Description of Artificial Sequence: Synthetic oligonucleotide
  Target: PCSK9; (+) strand; PAM type: NRG; PAM sequence: AGG
tgcctgctggctgcataggg

SEQ ID NO: 17352 - DNA, 20 bp, Artificial Sequence
  Description of Artificial Sequence: Synthetic oligonucleotide
  Target: PCSK9; (+) strand; PAM type: NRG; PAM sequence: GGG
gcctgctggctgcataggga

SEQ ID NO: 17353 - DNA, 20 bp, Artificial Sequence
  Description of Artificial Sequence: Synthetic oligonucleotide
  Target: PCSK9; (+) strand; PAM type: NRG; PAM sequence: GGG
cctgctggctgcatagggag

SEQ ID NO: 17354 - DNA, 20 bp, Artificial Sequence
  Description of Artificial Sequence: Synthetic oligonucleotide
  Target: PCSK9; (+) strand; PAM type: NRG; PAM sequence: TGG
ctggctgcatagggaggggc

SEQ ID NO: 17355 - DNA, 20 bp, Artificial Sequence
  Description of Artificial Sequence: Synthetic oligonucleotide
  Target: PCSK9; (+) strand; PAM type: NRG; PAM sequence: GGG
tggctgcatagggaggggct

SEQ ID NO: 17356 - DNA, 20 bp, Artificial Sequence
  Description of Artificial Sequence: Synthetic oligonucleotide
  Target: PCSK9; (+) strand; PAM type: NRG; PAM sequence: GGG
ggctgcatagggaggggctg

SEQ ID NO: 17357 - DNA, 20 bp, Artificial Sequence
  Description of Artificial Sequence: Synthetic oligonucleotide
  Target: PCSK9; (+) strand; PAM type: NRG; PAM sequence: GGG
gctgcatagggaggggctgg

SEQ ID NO: 17358 - DNA, 20 bp, Artificial Sequence
  Description of Artificial Sequence: Synthetic oligonucleotide
  Target: PCSK9; (+) strand; PAM type: NRG; PAM sequence: GGG
ctgcatagggaggggctggg

SEQ ID NO: 17359 - DNA, 20 bp, Artificial Sequence
  Description of Artificial Sequence: Synthetic oligonucleotide
  Target: PCSK9; (+) strand; PAM type: NRG; PAM sequence: GAG
gcatagggaggggctggggg

SEQ ID NO: 17360 - DNA, 20 bp, Artificial Sequence
  Description of Artificial Sequence: Synthetic oligonucleotide
  Target: PCSK9; (+) strand; PAM type: NRG; PAM sequence: GAG
ggaggggctggggggagttt

SEQ ID NO: 17361 - DNA, 20 bp, Artificial Sequence
  Description of Artificial Sequence: Synthetic oligonucleotide
  Target: PCSK9; (+) strand; PAM type: NRG; PAM sequence: CAG
tggggggagtttgagcatct

SEQ ID NO: 17362 - DNA, 20 bp, Artificial Sequence
  Description of Artificial Sequence: Synthetic oligonucleotide
  Target: PCSK9; (+) strand; PAM type: NRG; PAM sequence: AGG
ggggggagtttgagcatctc

SEQ ID NO: 17363 - DNA, 20 bp, Artificial Sequence
  Description of Artificial Sequence: Synthetic oligonucleotide
  Target: PCSK9; (+) strand; PAM type: NRG; PAM sequence: TAG
agtttgagcatctcaggcca

SEQ ID NO: 17364 - DNA, 20 bp, Artificial Sequence
  Description of Artificial Sequence: Synthetic oligonucleotide
  Target: PCSK9; (+) strand; PAM type: NRG; PAM sequence: GAG
tttgagcatctcaggccata

SEQ ID NO: 17365 - DNA, 20 bp, Artificial Sequence
  Description of Artificial Sequence: Synthetic oligonucleotide
  Target: PCSK9; (+) strand; PAM type: NRG; PAM sequence: TGG
tgcctcactgtctccatctc

SEQ ID NO: 17366 - DNA, 20 bp, Artificial Sequence
  Description of Artificial Sequence: Synthetic oligonucleotide
  Target: PCSK9; (+) strand; PAM type: NRG; PAM sequence: GGG
gcctcactgtctccatctct

SEQ ID NO: 17367 - DNA, 20 bp, Artificial Sequence
  Description of Artificial Sequence: Synthetic oligonucleotide
  Target: PCSK9; (+) strand; PAM type: NRG; PAM sequence: TGG
tcactgtctccatctctggg

SEQ ID NO: 17368 - DNA, 20 bp, Artificial Sequence
  Description of Artificial Sequence: Synthetic oligonucleotide
  Target: PCSK9; (+) strand; PAM type: NRG; PAM sequence: AAG
tgtctccatctctgggtgga

SEQ ID NO: 17369 - DNA, 20 bp, Artificial Sequence
  Description of Artificial Sequence: Synthetic oligonucleotide
  Target: PCSK9; (+) strand; PAM type: NRG; PAM sequence: TGG
tccatctctgggtggaaaga

SEQ ID NO: 17370 - DNA, 20 bp, Artificial Sequence
  Description of Artificial Sequence: Synthetic oligonucleotide
  Target: PCSK9; (+) strand; PAM type: NRG; PAM sequence: GAG
ggaaagatggtgttttccct

SEQ ID NO: 17371 - DNA, 20 bp, Artificial Sequence
  Description of Artificial Sequence: Synthetic oligonucleotide
  Target: PCSK9; (+) strand; PAM type: NRG; PAM sequence: AAG
ggtgttttccctgagaaact

SEQ ID NO: 17372 - DNA, 20 bp, Artificial Sequence
  Description of Artificial Sequence: Synthetic oligonucleotide
  Target: PCSK9; (+) strand; PAM type: NRG; PAM sequence: AGG
gtgttttccctgagaaacta

SEQ ID NO: 17373 - DNA, 20 bp, Artificial Sequence
  Description of Artificial Sequence: Synthetic oligonucleotide
  Target: PCSK9; (+) strand; PAM type: NRG; PAM sequence: CAG
ttccctgagaaactaaggct

SEQ ID NO: 17374 - DNA, 20 bp, Artificial Sequence
  Description of Artificial Sequence: Synthetic oligonucleotide
  Target: PCSK9; (+) strand; PAM type: NRG; PAM sequence: GAG
ccctgagaaactaaggctca

SEQ ID NO: 17375 - DNA, 20 bp, Artificial Sequence
  Description of Artificial Sequence: Synthetic oligonucleotide
  Target: PCSK9; (+) strand; PAM type: NRG; PAM sequence: GAG
ctgagaaactaaggctcaga

SEQ ID NO: 17376 - DNA, 20 bp, Artificial Sequence
  Description of Artificial Sequence: Synthetic oligonucleotide
  Target: PCSK9; (+) strand; PAM type: NRG; PAM sequence: AGG
tgagaaactaaggctcagag

SEQ ID NO: 17377 - DNA, 20 bp, Artificial Sequence
  Description of Artificial Sequence: Synthetic oligonucleotide
  Target: PCSK9; (+) strand; PAM type: NRG; PAM sequence: TGG
taaggctcagagaggttgaa

SEQ ID NO: 17378 - DNA, 20 bp, Artificial Sequence
  Description of Artificial Sequence: Synthetic oligonucleotide
  Target: PCSK9; (+) strand; PAM type: NRG; PAM sequence: AAG
agaggttgaatggctctccc

SEQ ID NO: 17379 - DNA, 20 bp, Artificial Sequence
  Description of Artificial Sequence: Synthetic oligonucleotide
  Target: PCSK9; (+) strand; PAM type: NRG; PAM sequence: AGG
gaggttgaatggctctccca

SEQ ID NO: 17380 - DNA, 20 bp, Artificial Sequence
  Description of Artificial Sequence: Synthetic oligonucleotide
  Target: PCSK9; (+) strand; PAM type: NRG; PAM sequence: CAG
atggctctcccaaggtcaca

SEQ ID NO: 17381 - DNA, 20 bp, Artificial Sequence
  Description of Artificial Sequence: Synthetic oligonucleotide
  Target: PCSK9; (+) strand; PAM type: NRG; PAM sequence: TGG
ctctcccaaggtcacacagc

SEQ ID NO: 17382 - DNA, 20 bp, Artificial Sequence
  Description of Artificial Sequence: Synthetic oligonucleotide
  Target: PCSK9; (+) strand; PAM type: NRG; PAM sequence: CAG
cccaaggtcacacagctggt

SEQ ID NO: 17383 - DNA, 20 bp, Artificial Sequence
  Description of Artificial Sequence: Synthetic oligonucleotide
  Target: PCSK9; (+) strand; PAM type: NRG; PAM sequence: CAG
gtcacacagctggtcagctg

SEQ ID NO: 17384 - DNA, 20 bp, Artificial Sequence
  Description of Artificial Sequence: Synthetic oligonucleotide
  Target: PCSK9; (+) strand; PAM type: NRG; PAM sequence: GAG
cacacagctggtcagctgca

SEQ ID NO: 17385 - DNA, 20 bp, Artificial Sequence
  Description of Artificial Sequence: Synthetic oligonucleotide
  Target: PCSK9; (+) strand; PAM type: NRG; PAM sequence: GAG
agctggtcagctgcagagtt

SEQ ID NO: 17386 - DNA, 20 bp, Artificial Sequence
  Description of Artificial Sequence: Synthetic oligonucleotide
  Target: PCSK9; (+) strand; PAM type: NRG; PAM sequence: CAG
cagctgcagagttgagaaca

SEQ ID NO: 17387 - DNA, 20 bp, Artificial Sequence
  Description of Artificial Sequence: Synthetic oligonucleotide
  Target: PCSK9; (+) strand; PAM type: NRG; PAM sequence: AGG
agctgcagagttgagaacac

SEQ ID NO: 17388 - DNA, 20 bp, Artificial Sequence
  Description of Artificial Sequence: Synthetic oligonucleotide
  Target: PCSK9; (+) strand; PAM type: NRG; PAM sequence: GAG
ctgcagagttgagaacacag

SEQ ID NO: 17389 - DNA, 20 bp, Artificial Sequence
  Description of Artificial Sequence: Synthetic oligonucleotide
  Target: PCSK9; (+) strand; PAM type: NRG; PAM sequence: TGG
agttgagaacacaggagtcc

SEQ ID NO: 17390 - DNA, 20 bp, Artificial Sequence
  Description of Artificial Sequence: Synthetic oligonucleotide
  Target: PCSK9; (+) strand; PAM type: NRG; PAM sequence: CAG
aacacaggagtcctggtgct

SEQ ID NO: 17391 - DNA, 20 bp, Artificial Sequence
  Description of Artificial Sequence: Synthetic oligonucleotide
  Target: PCSK9; (+) strand; PAM type: NRG; PAM sequence: AGG
acacaggagtcctggtgctc

SEQ ID NO: 17392 - DNA, 20 bp, Artificial Sequence
  Description of Artificial Sequence: Synthetic oligonucleotide
  Target: PCSK9; (+) strand; PAM type: NRG; PAM sequence: CAG
aggagtcctggtgctcaggc

SEQ ID NO: 17393 - DNA, 20 bp, Artificial Sequence
  Description of Artificial Sequence: Synthetic oligonucleotide
  Target: PCSK9; (+) strand; PAM type: NRG; PAM sequence: GAG
cagcatctctttttttcttt

SEQ ID NO: 17394 - DNA, 20 bp, Artificial Sequence
  Description of Artificial Sequence: Synthetic oligonucleotide
  Target: PCSK9; (+) strand; PAM type: NRG; PAM sequence: TAG
ttttttctttgagttgtttc

SEQ ID NO: 17395 - DNA, 20 bp, Artificial Sequence
  Description of Artificial Sequence: Synthetic oligonucleotide
  Target: PCSK9; (+) strand; PAM type: NRG; PAM sequence: AGG
tttttctttgagttgtttct

SEQ ID NO: 17396 - DNA, 20 bp, Artificial Sequence
  Description of Artificial Sequence: Synthetic oligonucleotide
  Target: PCSK9; (+) strand; PAM type: NRG; PAM sequence: TAG
tgagttgtttctaggtttcc

SEQ ID NO: 17397 - DNA, 20 bp, Artificial Sequence
  Description of Artificial Sequence: Synthetic oligonucleotide
  Target: PCSK9; (+) strand; PAM type: NRG; PAM sequence: CAG
aggtttcctagctcttgcct

SEQ ID NO: 17398 - DNA, 20 bp, Artificial Sequence
  Description of Artificial Sequence: Synthetic oligonucleotide
  Target: PCSK9; (+) strand; PAM type: NRG; PAM sequence: AAG
agctcttgcctcagacctta

SEQ ID NO: 17399 - DNA, 20 bp, Artificial Sequence
  Description of Artificial Sequence: Synthetic oligonucleotide
  Target: PCSK9; (+) strand; PAM type: NRG; PAM sequence: GAG
ctcttgcctcagaccttaaa

SEQ ID NO: 17400 - DNA, 20 bp, Artificial Sequence
  Description of Artificial Sequence: Synthetic oligonucleotide
  Target: PCSK9; (+) strand; PAM type: NRG; PAM sequence: GAG
cttgcctcagaccttaaaga

SEQ ID NO: 17401 - DNA, 20 bp, Artificial Sequence
  Description of Artificial Sequence: Synthetic oligonucleotide
  Target: PCSK9; (+) strand; PAM type: NRG; PAM sequence: GAG
tgcctcagaccttaaagaga

SEQ ID NO: 17402 - DNA, 20 bp, Artificial Sequence
  Description of Artificial Sequence: Synthetic oligonucleotide
  Target: PCSK9; (+) strand; PAM type: NRG; PAM sequence: AGG
gcctcagaccttaaagagag

SEQ ID NO: 17403 - DNA, 20 bp, Artificial Sequence
  Description of Artificial Sequence: Synthetic oligonucleotide
  Target: PCSK9; (+) strand; PAM type: NRG; PAM sequence: GGG
cctcagaccttaaagagaga

SEQ ID NO: 17404 - DNA, 20 bp, Artificial Sequence
  Description of Artificial Sequence: Synthetic oligonucleotide
  Target: PCSK9; (+) strand; PAM type: NRG; PAM sequence: TGG
cttaaagagagagggtctga

SEQ ID NO: 17405 - DNA, 20 bp, Artificial Sequence
  Description of Artificial Sequence: Synthetic oligonucleotide
  Target: PCSK9; (+) strand; PAM type: NRG; PAM sequence: GGG
ttaaagagagagggtctgat

SEQ ID NO: 17406 - DNA, 20 bp, Artificial Sequence
  Description of Artificial Sequence: Synthetic oligonucleotide
  Target: PCSK9; (+) strand; PAM type: NRG; PAM sequence: GGG
taaagagagagggtctgatg

SEQ ID NO: 17407 - DNA, 20 bp, Artificial Sequence
  Description of Artificial Sequence: Synthetic oligonucleotide
  Target: PCSK9; (+) strand; PAM type: NRG; PAM sequence: TGG
gagagagggtctgatgggga

SEQ ID NO: 17408 - DNA, 20 bp, Artificial Sequence
  Description of Artificial Sequence: Synthetic oligonucleotide
  Target: PCSK9; (+) strand; PAM type: NRG; PAM sequence: GGG
agagagggtctgatggggat

SEQ ID NO: 17409 - DNA, 20 bp, Artificial Sequence
  Description of Artificial Sequence: Synthetic oligonucleotide
  Target: PCSK9; (+) strand; PAM type: NRG; PAM sequence: TGG
ggtctgatggggatgggcac

SEQ ID NO: 17410 - DNA, 20 bp, Artificial Sequence
  Description of Artificial Sequence: Synthetic oligonucleotide
  Target: PCSK9; (+) strand; PAM type: NRG; PAM sequence: GAG
tctgatggggatgggcactg

SEQ ID NO: 17411 - DNA, 20 bp, Artificial Sequence
  Description of Artificial Sequence: Synthetic oligonucleotide
  Target: PCSK9; (+) strand; PAM type: NRG; PAM sequence: CGG
atggggatgggcactggaga

SEQ ID NO: 17412 - DNA, 20 bp, Artificial Sequence
  Description of Artificial Sequence: Synthetic oligonucleotide
  Target: PCSK9; (+) strand; PAM type: NRG; PAM sequence: GAG
ggggatgggcactggagacg

SEQ ID NO: 17413 - DNA, 20 bp, Artificial Sequence
  Description of Artificial Sequence: Synthetic oligonucleotide
  Target: PCSK9; (+) strand; PAM type: NRG; PAM sequence: CAG
gcactggagacggagcatcc

SEQ ID NO: 17414 - DNA, 20 bp, Artificial Sequence
  Description of Artificial Sequence: Synthetic oligonucleotide
  Target: PCSK9; (+) strand; PAM type: NRG; PAM sequence: GAG
catcccagcatttcacatct

SEQ ID NO: 17415 - DNA, 20 bp, Artificial Sequence
  Description of Artificial Sequence: Synthetic oligonucleotide
  Target: PCSK9; (+) strand; PAM type: NRG; PAM sequence: TGG
ccagcatttcacatctgagc

SEQ ID NO: 17416 - DNA, 20 bp, Artificial Sequence
  Description of Artificial Sequence: Synthetic oligonucleotide
  Target: PCSK9; (+) strand; PAM type: NRG; PAM sequence: CAG
gagctggctttcctctgccc

SEQ ID NO: 17417 - DNA, 20 bp, Artificial Sequence
  Description of Artificial Sequence: Synthetic oligonucleotide
  Target: PCSK9; (+) strand; PAM type: NRG; PAM sequence: AGG
agctggctttcctctgcccc

SEQ ID NO: 17418 - DNA, 20 bp, Artificial Sequence
  Description of Artificial Sequence: Synthetic oligonucleotide
  Target: PCSK9; (+) strand; PAM type: NRG; PAM sequence: CAG
ctttcctctgccccaggctg

SEQ ID NO: 17419 - DNA, 20 bp, Artificial Sequence
  Description of Artificial Sequence: Synthetic oligonucleotide
  Target: PCSK9; (+) strand; PAM type: NRG; PAM sequence: TGG
ccccaggctgcagctcccac

SEQ ID NO: 17420 - DNA, 20 bp, Artificial Sequence
  Description of Artificial Sequence: Synthetic oligonucleotide
  Target: PCSK9; (+) strand; PAM type: NRG; PAM sequence: GGG
cccaggctgcagctcccact

SEQ ID NO: 17421 - DNA, 20 bp, Artificial Sequence
  Description of Artificial Sequence: Synthetic oligonucleotide
  Target: PCSK9; (+) strand; PAM type: NRG; PAM sequence: GAG
caggctgcagctcccactgg

SEQ ID NO: 17422 - DNA, 20 bp, Artificial Sequence
  Description of Artificial Sequence: Synthetic oligonucleotide
  Target: PCSK9; (+) strand; PAM type: NRG; PAM sequence: AGG
aggctgcagctcccactggg

SEQ ID NO: 17423 - DNA, 20 bp, Artificial Sequence
  Description of Artificial Sequence: Synthetic oligonucleotide
  Target: PCSK9; (+) strand; PAM type: NRG; PAM sequence: TGG
ctgcagctcccactgggagg

SEQ ID NO: 17424 - DNA, 20 bp, Artificial Sequence
  Description of Artificial Sequence: Synthetic oligonucleotide
  Target: PCSK9; (+) strand; PAM type: NRG; PAM sequence: GAG
gcagctcccactgggaggtg

SEQ ID NO: 17425 - DNA, 20 bp, Artificial Sequence
  Description of Artificial Sequence: Synthetic oligonucleotide
  Target: PCSK9; (+) strand; PAM type: NRG; PAM sequence: AGG
cagctcccactgggaggtgg

SEQ ID NO: 17426 - DNA, 20 bp, Artificial Sequence
  Description of Artificial Sequence: Synthetic oligonucleotide
  Target: PCSK9; (+) strand; PAM type: NRG; PAM sequence: TGG
cactgggaggtggaggacct

SEQ ID NO: 17427 - DNA, 20 bp, Artificial Sequence
  Description of Artificial Sequence: Synthetic oligonucleotide
  Target: PCSK9; (+) strand; PAM type: NRG; PAM sequence: AAG
tggaggaccttggcacccac

SEQ ID NO: 17428 - DNA, 20 bp, Artificial Sequence
  Description of Artificial Sequence: Synthetic oligonucleotide
  Target: PCSK9; (+) strand; PAM type: NRG; PAM sequence: GAG
acccacaagccgcctgtgct

SEQ ID NO: 17429 - DNA, 20 bp, Artificial Sequence
  Description of Artificial Sequence: Synthetic oligonucleotide
  Target: PCSK9; (+) strand; PAM type: NRG; PAM sequence: AGG
cccacaagccgcctgtgctg

SEQ ID NO: 17430 - DNA, 20 bp, Artificial Sequence
  Description of Artificial Sequence: Synthetic oligonucleotide
  Target: PCSK9; (+) strand; PAM type: NRG; PAM sequence: GAG
gccgcctgtgctgaggccac

SEQ ID NO: 17431 - DNA, 20 bp, Artificial Sequence
  Description of Artificial Sequence: Synthetic oligonucleotide
  Target: PCSK9; (+) strand; PAM type: NRG; PAM sequence: AGG
ccgcctgtgctgaggccacg

SEQ ID NO: 17432 - DNA, 20 bp, Artificial Sequence
  Description of Artificial Sequence: Synthetic oligonucleotide
  Target: PCSK9; (+) strand; PAM type: NRG; PAM sequence: CAG
ctgtgctgaggccacgaggt

SEQ ID NO: 17433 - DNA, 20 bp, Artificial Sequence
  Description of Artificial Sequence: Synthetic oligonucleotide
  Target: PCSK9; (+) strand; PAM type: NRG; PAM sequence: CAG
ggccacgaggtcagcccaac

SEQ ID NO: 17434 - DNA, 20 bp, Artificial Sequence
  Description of Artificial Sequence: Synthetic oligonucleotide
  Target: PCSK9; (+) strand; PAM type: NRG; PAM sequence: TGG
aggtcagcccaaccagtgcg

SEQ ID NO: 17435 - DNA, 20 bp, Artificial Sequence
  Description of Artificial Sequence: Synthetic oligonucleotide
  Target: PCSK9; (+) strand; PAM type: NRG; PAM sequence: GGG
ggtcagcccaaccagtgcgt

SEQ ID NO: 17436 - DNA, 20 bp, Artificial Sequence
  Description of Artificial Sequence: Synthetic oligonucleotide
  Target: PCSK9; (+) strand; PAM type: NRG; PAM sequence: CAG
cccaaccagtgcgtgggcca

SEQ ID NO: 17437 - DNA, 20 bp, Artificial Sequence
  Description of Artificial Sequence: Synthetic oligonucleotide
  Target: PCSK9; (+) strand; PAM type: NRG; PAM sequence: AGG
ccaaccagtgcgtgggccac

SEQ ID NO: 17438 - DNA, 20 bp, Artificial Sequence
  Description of Artificial Sequence: Synthetic oligonucleotide
  Target: PCSK9; (+) strand; PAM type: NRG; PAM sequence: GGG
caaccagtgcgtgggccaca

SEQ ID NO: 17439 - DNA, 20 bp, Artificial Sequence
  Description of Artificial Sequence: Synthetic oligonucleotide
  Target: PCSK9; (+) strand; PAM type: NRG; PAM sequence: GAG
accagtgcgtgggccacagg

SEQ ID NO: 17440 - DNA, 20 bp, Artificial Sequence
  Description of Artificial Sequence: Synthetic oligonucleotide
  Target: PCSK9; (+) strand; PAM type: NRG; PAM sequence: AGG
ccagtgcgtgggccacaggg

SEQ ID NO: 17441 - DNA, 20 bp, Artificial Sequence
  Description of Artificial Sequence: Synthetic oligonucleotide
  Target: PCSK9; (+) strand; PAM type: NRG; PAM sequence: CAG
tgcgtgggccacagggaggc

SEQ ID NO: 17442 - DNA, 20 bp, Artificial Sequence
  Description of Artificial Sequence: Synthetic oligonucleotide
  Target: PCSK9; (+) strand; PAM type: NRG; PAM sequence: CAG
cgcttcctgctgccatgccc

SEQ ID NO: 17443 - DNA, 20 bp, Artificial Sequence
  Description of Artificial Sequence: Synthetic oligonucleotide
  Target: PCSK9; (+) strand; PAM type: NRG; PAM sequence: AGG
gcttcctgctgccatgcccc

SEQ ID NO: 17444 - DNA, 20 bp, Artificial Sequence
  Description of Artificial Sequence: Synthetic oligonucleotide
  Target: PCSK9; (+) strand; PAM type: NRG; PAM sequence: TGG
ctgctgccatgccccaggtc

SEQ ID NO: 17445 - DNA, 20 bp, Artificial Sequence
  Description of Artificial Sequence: Synthetic oligonucleotide
  Target: PCSK9; (+) strand; PAM type: NRG; PAM sequence: AAG
tgccccaggtctggaatgca

SEQ ID NO: 17446 - DNA, 20 bp, Artificial Sequence
  Description of Artificial Sequence: Synthetic oligonucleotide
  Target: PCSK9; (+) strand; PAM type: NRG; PAM sequence: AAG
caggtctggaatgcaaagtc

SEQ ID NO: 17447 - DNA, 20 bp, Artificial Sequence
  Description of Artificial Sequence: Synthetic oligonucleotide
  Target: PCSK9; (+) strand; PAM type: NRG; PAM sequence: AGG
aggtctggaatgcaaagtca

SEQ ID NO: 17448 - DNA, 20 bp, Artificial Sequence
  Description of Artificial Sequence: Synthetic oligonucleotide
  Target: PCSK9; (+) strand; PAM type: NRG; PAM sequence: GAG
gtctggaatgcaaagtcaag

SEQ ID NO: 17449 - DNA, 20 bp, Artificial Sequence
  Description of Artificial Sequence: Synthetic oligonucleotide
  Target: PCSK9; (+) strand; PAM type: NRG; PAM sequence: TGG
gaatgcaaagtcaaggagca

SEQ ID NO: 17450 - DNA, 20 bp, Artificial Sequence
  Description of Artificial Sequence: Synthetic oligonucleotide
  Target: PCSK9; (+) strand; PAM type: NRG; PAM sequence: CGG
agtcaaggagcatggaatcc

SEQ ID NO: 17451 - DNA, 20 bp, Artificial Sequence
  Description of Artificial Sequence: Synthetic oligonucleotide
  Target: PCSK9; (+) strand; PAM type: NRG; PAM sequence: CAG
agcatggaatcccggcccct

SEQ ID NO: 17452 - DNA, 20 bp, Artificial Sequence
  Description of Artificial Sequence: Synthetic oligonucleotide
  Target: PCSK9; (+) strand; PAM type: NRG; PAM sequence: AGG
gcatggaatcccggcccctc

SEQ ID NO: 17453 - DNA, 20 bp, Artificial Sequence
  Description of Artificial Sequence: Synthetic oligonucleotide
  Target: PCSK9; (+) strand; PAM type: NRG; PAM sequence: GAG
atggaatcccggcccctcag

SEQ ID NO: 17454 - DNA, 20 bp, Artificial Sequence
  Description of Artificial Sequence: Synthetic oligonucleotide
  Target: PCSK9; (+) strand; PAM type: NRG; PAM sequence: CAG
gaatcccggcccctcaggag

SEQ ID NO: 17455 - DNA, 20 bp, Artificial Sequence
  Description of Artificial Sequence: Synthetic oligonucleotide
  Target: PCSK9; (+) strand; PAM type: NRG; PAM sequence: AGG
aatcccggcccctcaggagc

SEQ ID NO: 17456 - DNA, 20 bp, Artificial Sequence
  Description of Artificial Sequence: Synthetic oligonucleotide
  Target: PCSK9; (+) strand; PAM type: NRG; PAM sequence: AAG
cggcccctcaggagcaggtg

SEQ ID NO: 17457 - DNA, 20 bp, Artificial Sequence
  Description of Artificial Sequence: Synthetic oligonucleotide
  Target: PCSK9; (+) strand; PAM type: NRG; PAM sequence: GAG
gcccctcaggagcaggtgaa

SEQ ID NO: 17458 - DNA, 20 bp, Artificial Sequence
  Description of Artificial Sequence: Synthetic oligonucleotide
  Target: PCSK9; (+) strand; PAM type: NRG; PAM sequence: AGG
cccctcaggagcaggtgaag

SEQ ID NO: 17459 - DNA, 20 bp, Artificial Sequence
  Description of Artificial Sequence: Synthetic oligonucleotide
  Target: PCSK9; (+) strand; PAM type: NRG; PAM sequence: GAG
gagcaggtgaagaggcccgt

SEQ ID NO: 17460 - DNA, 20 bp, Artificial Sequence
  Description of Artificial Sequence: Synthetic oligonucleotide
  Target: PCSK9; (+) strand; PAM type: NRG; PAM sequence: AGG
agcaggtgaagaggcccgtg

SEQ ID NO: 17461 - DNA, 20 bp, Artificial Sequence
  Description of Artificial Sequence: Synthetic oligonucleotide
  Target: PCSK9; (+) strand; PAM type: NRG; PAM sequence: CGG
ggtgaagaggcccgtgaggc

SEQ ID NO: 17462 - DNA, 20 bp, Artificial Sequence
  Description of Artificial Sequence: Synthetic oligonucleotide
  Target: PCSK9; (+) strand; PAM type: NRG; PAM sequence: GGG
gtgaagaggcccgtgaggcc

SEQ ID NO: 17463 - DNA, 20 bp, Artificial Sequence
  Description of Artificial Sequence: Synthetic oligonucleotide
  Target: PCSK9; (+) strand; PAM type: NRG; PAM sequence: TGG
aagaggcccgtgaggccggg

SEQ ID NO: 17464 - DNA, 20 bp, Artificial Sequence
  Description of Artificial Sequence: Synthetic oligonucleotide
  Target: PCSK9; (+) strand; PAM type: NRG; PAM sequence: GGG
agaggcccgtgaggccgggt

SEQ ID NO: 17465 - DNA, 20 bp, Artificial Sequence
  Description of Artificial Sequence: Synthetic oligonucleotide
  Target: PCSK9; (+) strand; PAM type: NRG; PAM sequence: TGG
ggcccgtgaggccgggtggg

SEQ ID NO: 17466 - DNA, 20 bp, Artificial Sequence
  Description of Artificial Sequence: Synthetic oligonucleotide
  Target: PCSK9; (+) strand; PAM type: NRG; PAM sequence: GGG
gcccgtgaggccgggtgggt

SEQ ID NO: 17467 - DNA, 20 bp, Artificial Sequence
  Description of Artificial Sequence: Synthetic oligonucleotide
  Target: PCSK9; (+) strand; PAM type: NRG; PAM sequence: GGG
cccgtgaggccgggtgggtg

SEQ ID NO: 17468 - DNA, 20 bp, Artificial Sequence
  Description of Artificial Sequence: Synthetic oligonucleotide
  Target: PCSK9; (+) strand; PAM type: NRG; PAM sequence: CAG
tgctgcgtgtctctcctgca

SEQ ID NO: 17469 - DNA, 20 bp, Artificial Sequence
  Description of Artificial Sequence: Synthetic oligonucleotide
  Target: PCSK9; (+) strand; PAM type: NRG; PAM sequence: CAG
cctgcacagcttttctgtgt

SEQ ID NO: 17470 - DNA, 20 bp, Artificial Sequence
  Description of Artificial Sequence: Synthetic oligonucleotide
  Target: PCSK9; (+) strand; PAM type: NRG; PAM sequence: CAG
accaccataccgccatgcat

SEQ ID NO: 17471 - DNA, 20 bp, Artificial Sequence
  Description of Artificial Sequence: Synthetic oligonucleotide
  Target: PCSK9; (+) strand; PAM type: NRG; PAM sequence: AGG
ccaccataccgccatgcatc

SEQ ID NO: 17472 - DNA, 20 bp, Artificial Sequence
  Description of Artificial Sequence: Synthetic oligonucleotide
  Target: PCSK9; (+) strand; PAM type: NRG; PAM sequence: GGG
caccataccgccatgcatca

SEQ ID NO: 17473 - DNA, 20 bp, Artificial Sequence
  Description of Artificial Sequence: Synthetic oligonucleotide
  Target: PCSK9; (+) strand; PAM type: NRG; PAM sequence: TGG
cataccgccatgcatcaggg

SEQ ID NO: 17474 - DNA, 20 bp, Artificial Sequence
  Description of Artificial Sequence: Synthetic oligonucleotide
  Target: PCSK9; (+) strand; PAM type: NRG; PAM sequence: CGG
accgccatgcatcagggtgg

SEQ ID NO: 17475 - DNA, 20 bp, Artificial Sequence
  Description of Artificial Sequence: Synthetic oligonucleotide
  Target: PCSK9; (+) strand; PAM type: NRG; PAM sequence: CAG
gcatcagggtggcggtttgc

SEQ ID NO: 17476 - DNA, 20 bp, Artificial Sequence
  Description of Artificial Sequence: Synthetic oligonucleotide
  Target: PCSK9; (+) strand; PAM type: NRG; PAM sequence: AGG
catcagggtggcggtttgcc

SEQ ID NO: 17477 - DNA, 20 bp, Artificial Sequence
  Description of Artificial Sequence: Synthetic oligonucleotide
  Target: PCSK9; (+) strand; PAM type: NRG; PAM sequence: TAG
cagggtggcggtttgccagg

SEQ ID NO: 17478 - DNA, 20 bp, Artificial Sequence
  Description of Artificial Sequence: Synthetic oligonucleotide
  Target: PCSK9; (+) strand; PAM type: NRG; PAM sequence: TGG
ggtttgccaggtagatgctg

SEQ ID NO: 17479 - DNA, 20 bp, Artificial Sequence
  Description of Artificial Sequence: Synthetic oligonucleotide
  Target: PCSK9; (+) strand; PAM type: NRG; PAM sequence: GGG
gtttgccaggtagatgctgt

SEQ ID NO: 17480 - DNA, 20 bp, Artificial Sequence
  Description of Artificial Sequence: Synthetic oligonucleotide
  Target: PCSK9; (+) strand; PAM type: NRG; PAM sequence: CAG
tgccaggtagatgctgtggg

SEQ ID NO: 17481 - DNA, 20 bp, Artificial Sequence
  Description of Artificial Sequence: Synthetic oligonucleotide
  Target: PCSK9; (+) strand; PAM type: NRG; PAM sequence: TGG
gggcagcttccgccattgtg

SEQ ID NO: 17482 - DNA, 20 bp, Artificial Sequence
  Description of Artificial Sequence: Synthetic oligonucleotide
  Target: PCSK9; (+) strand; PAM type: NRG; PAM sequence: CAG
agcttccgccattgtgtgga

SEQ ID NO: 17483 - DNA, 20 bp, Artificial Sequence
  Description of Artificial Sequence: Synthetic oligonucleotide
  Target: PCSK9; (+) strand; PAM type: NRG; PAM sequence: TGG
catgtatatgtgtctctgtg

SEQ ID NO: 17484 - DNA, 20 bp, Artificial Sequence
  Description of Artificial Sequence: Synthetic oligonucleotide
  Target: PCSK9; (+) strand; PAM type: NRG; PAM sequence: TGG
tatatgtgtctctgtgtggc

SEQ ID NO: 17485 - DNA, 20 bp, Artificial Sequence
  Description of Artificial Sequence: Synthetic oligonucleotide
  Target: PCSK9; (+) strand; PAM type: NRG; PAM sequence: GGG
atatgtgtctctgtgtggct

SEQ ID NO: 17486 - DNA, 20 bp, Artificial Sequence
  Description of Artificial Sequence: Synthetic oligonucleotide
  Target: PCSK9; (+) strand; PAM type: NRG; PAM sequence: CAG
ggtctgtttttgcttttgtc

SEQ ID NO: 17487 - DNA, 20 bp, Artificial Sequence
  Description of Artificial Sequence: Synthetic oligonucleotide
  Target: PCSK9; (+) strand; PAM type: NRG; PAM sequence: CAG
gtttttgcttttgtccagat

SEQ ID NO: 17488 - DNA, 20 bp, Artificial Sequence
  Description of Artificial Sequence: Synthetic oligonucleotide
  Target: PCSK9; (+) strand; PAM type: NRG; PAM sequence: AAG
ttgcttttgtccagatcagt

SEQ ID NO: 17489 - DNA, 20 bp, Artificial Sequence
  Description of Artificial Sequence: Synthetic oligonucleotide
  Target: PCSK9; (+) strand; PAM type: NRG; PAM sequence: AGG
tgcttttgtccagatcagta

SEQ ID NO: 17490 - DNA, 20 bp, Artificial Sequence
  Description of Artificial Sequence: Synthetic oligonucleotide
  Target: PCSK9; (+) strand; PAM type: NRG; PAM sequence: TGG
gatcagtaaggtttgctacc

SEQ ID NO: 17491 - DNA, 20 bp, Artificial Sequence
  Description of Artificial Sequence: Synthetic oligonucleotide
  Target: PCSK9; (+) strand; PAM type: NRG; PAM sequence: GGG
atcagtaaggtttgctacct

SEQ ID NO: 17492 - DNA, 20 bp, Artificial Sequence
  Description of Artificial Sequence: Synthetic oligonucleotide
  Target: PCSK9; (+) strand; PAM type: NRG; PAM sequence: TGG
cctgggtaccccactccact

SEQ ID NO: 17493 - DNA, 20 bp, Artificial Sequence
  Description of Artificial Sequence: Synthetic oligonucleotide
  Target: PCSK9; (+) strand; PAM type: NRG; PAM sequence: GAG
tgggtaccccactccacttg

SEQ ID NO: 17494 - DNA, 20 bp, Artificial Sequence
  Description of Artificial Sequence: Synthetic oligonucleotide
  Target: PCSK9; (+) strand; PAM type: NRG; PAM sequence: TAG
gtaccccactccacttggag

SEQ ID NO: 17495 - DNA, 20 bp, Artificial Sequence
  Description of Artificial Sequence: Synthetic oligonucleotide
  Target: PCSK9; (+) strand; PAM type: NRG; PAM sequence: TGG
gagtagaatgtgcataaata

SEQ ID NO: 17496 - DNA, 20 bp, Artificial Sequence
  Description of Artificial Sequence: Synthetic oligonucleotide
  Target: PCSK9; (+) strand; PAM type: NRG; PAM sequence: AAG
atgtgcataaatatggcata

SEQ ID NO: 17497 - DNA, 20 bp, Artificial Sequence
  Description of Artificial Sequence: Synthetic oligonucleotide
  Target: PCSK9; (+) strand; PAM type: NRG; PAM sequence: GAG
tgattgatctatttttttct

SEQ ID NO: 17498 - DNA, 20 bp, Artificial Sequence
  Description of Artificial Sequence: Synthetic oligonucleotide
  Target: PCSK9; (+) strand; PAM type: NRG; PAM sequence: TGG
tgatctatttttttctgaga

SEQ ID NO: 17499 - DNA, 20 bp, Artificial Sequence
  Description of Artificial Sequence: Synthetic oligonucleotide
  Target: PCSK9; (+) strand; PAM type: NRG; PAM sequence: GGG
gatctatttttttctgagat

SEQ ID NO: 17500 - DNA, 20 bp, Artificial Sequence
  Description of Artificial Sequence: Synthetic oligonucleotide
  Target: PCSK9; (+) strand; PAM type: NRG; PAM sequence: GGG
atctatttttttctgagatg

SEQ ID NO: 17501 - DNA, 20 bp, Artificial Sequence
  Description of Artificial Sequence: Synthetic oligonucleotide
  Target: PCSK9; (+) strand; PAM type: NRG; PAM sequence: CAG
tggggtcttgctgtgttgcc

SEQ ID NO: 17502 - DNA, 20 bp, Artificial Sequence
  Description of Artificial Sequence: Synthetic oligonucleotide
  Target: PCSK9; (+) strand; PAM type: NRG; PAM sequence: AGG
ggggtcttgctgtgttgccc

SEQ ID NO: 17503 - DNA, 20 bp, Artificial Sequence
  Description of Artificial Sequence: Synthetic oligonucleotide
  Target: PCSK9; (+) strand; PAM type: NRG; PAM sequence: TGG
tcttgctgtgttgcccaggc

SEQ ID NO: 17504 - DNA, 20 bp, Artificial Sequence
  Description of Artificial Sequence: Synthetic oligonucleotide
  Target: PCSK9; (+) strand; PAM type: NRG; PAM sequence: TGG
ccaggctggtctcaaattcc

SEQ ID NO: 17505 - DNA, 20 bp, Artificial Sequence
  Description of Artificial Sequence: Synthetic oligonucleotide
  Target: PCSK9; (+) strand; PAM type: NRG; PAM sequence: GGG
caggctggtctcaaattcct

SEQ ID NO: 17506 - DNA, 20 bp, Artificial Sequence
  Description of Artificial Sequence: Synthetic oligonucleotide
  Target: PCSK9; (+) strand; PAM type: NRG; PAM sequence: AAG
ggtctcaaattcctgggctc

SEQ ID NO: 17507 - DNA, 20 bp, Artificial Sequence
  Description of Artificial Sequence: Synthetic oligonucleotide
  Target: PCSK9; (+) strand; PAM type: NRG; PAM sequence: TGG
cctgggctcaagcaatcctc

SEQ ID NO: 17508 - DNA, 20 bp, Artificial Sequence
  Description of Artificial Sequence: Synthetic oligonucleotide
  Target: PCSK9; (+) strand; PAM type: NRG; PAM sequence: CAG
ctcaagcaatcctctggtct

SEQ ID NO: 17509 - DNA, 20 bp, Artificial Sequence
  Description of Artificial Sequence: Synthetic oligonucleotide
  Target: PCSK9; (+) strand; PAM type: NRG; PAM sequence: AAG
cctctggtctcagcctcccc

SEQ ID NO: 17510 - DNA, 20 bp, Artificial Sequence
  Description of Artificial Sequence: Synthetic oligonucleotide
  Target: PCSK9; (+) strand; PAM type: NRG; PAM sequence: TGG
gtctcagcctccccaagtgt

SEQ ID NO: 17511 - DNA, 20 bp, Artificial Sequence
  Description of Artificial Sequence: Synthetic oligonucleotide
  Target: PCSK9; (+) strand; PAM type: NRG; PAM sequence: GGG
tctcagcctccccaagtgtt

SEQ ID NO: 17512 - DNA, 20 bp, Artificial Sequence
  Description of Artificial Sequence: Synthetic oligonucleotide
  Target: PCSK9; (+) strand; PAM type: NRG; PAM sequence: TAG
ctccccaagtgttgggatta

SEQ ID NO: 17513 - DNA, 20 bp, Artificial Sequence
  Description of Artificial Sequence: Synthetic oligonucleotide
  Target: PCSK9; (+) strand; PAM type: NRG; PAM sequence: AGG
tccccaagtgttgggattat

SEQ ID NO: 17514 - DNA, 20 bp, Artificial Sequence
  Description of Artificial Sequence: Synthetic oligonucleotide
  Target: PCSK9; (+) strand; PAM type: NRG; PAM sequence: GAG
agtgttgggattataggcat

SEQ ID NO: 17515 - DNA, 20 bp, Artificial Sequence
  Description of Artificial Sequence: Synthetic oligonucleotide
  Target: PCSK9; (+) strand; PAM type: NRG; PAM sequence: TGG
taggcatgagccgctgcacc

SEQ ID NO: 17516 - DNA, 20 bp, Artificial Sequence
  Description of Artificial Sequence: Synthetic oligonucleotide
  Target: PCSK9; (+) strand; PAM type: NRG; PAM sequence: TGG
gatctatttaacaaacctgc

SEQ ID NO: 17517 - DNA, 20 bp, Artificial Sequence
  Description of Artificial Sequence: Synthetic oligonucleotide
  Target: PCSK9; (+) strand; PAM type: NRG; PAM sequence: GGG
atctatttaacaaacctgct

SEQ ID NO: 17518 - DNA, 20 bp, Artificial Sequence
  Description of Artificial Sequence: Synthetic oligonucleotide
  Target: PCSK9; (+) strand; PAM type: NRG; PAM sequence: GAG
ctatttaacaaacctgctgg

SEQ ID NO: 17519 - DNA, 20 bp, Artificial Sequence
  Description of Artificial Sequence: Synthetic oligonucleotide
  Target: PCSK9; (+) strand; PAM type: NRG; PAM sequence: AGG
tatttaacaaacctgctggg

SEQ ID NO: 17520 - DNA, 20 bp, Artificial Sequence
  Description of Artificial Sequence: Synthetic oligonucleotide
  Target: PCSK9; (+) strand; PAM type: NRG; PAM sequence: GGG
atttaacaaacctgctggga

SEQ ID NO: 17521 - DNA, 20 bp, Artificial Sequence
  Description of Artificial Sequence: Synthetic oligonucleotide
  Target: PCSK9; (+) strand; PAM type: NRG; PAM sequence: CAG
caaacctgctgggagggtct

SEQ ID NO: 17522 - DNA, 20 bp, Artificial Sequence
  Description of Artificial Sequence: Synthetic oligonucleotide
  Target: PCSK9; (+) strand; PAM type: NRG; PAM sequence: AGG
aaacctgctgggagggtctc

SEQ ID NO: 17523 - DNA, 20 bp, Artificial Sequence
  Description of Artificial Sequence: Synthetic oligonucleotide
  Target: PCSK9; (+) strand; PAM type: NRG; PAM sequence: GGG
aacctgctgggagggtctca

SEQ ID NO: 17524 - DNA, 20 bp, Artificial Sequence
  Description of Artificial Sequence: Synthetic oligonucleotide
  Target: PCSK9; (+) strand; PAM type: NRG; PAM sequence: CAG
tgctgggagggtctcagggt

SEQ ID NO: 17525 - DNA, 20 bp, Artificial Sequence
  Description of Artificial Sequence: Synthetic oligonucleotide
  Target: PCSK9; (+) strand; PAM type: NRG; PAM sequence: AGG
gctgggagggtctcagggtc

SEQ ID NO: 17526 - DNA, 20 bp, Artificial Sequence
  Description of Artificial Sequence: Synthetic oligonucleotide
  Target: PCSK9; (+) strand; PAM type: NRG; PAM sequence: GAG
tgggagggtctcagggtcag

SEQ ID NO: 17527 - DNA, 20 bp, Artificial Sequence
  Description of Artificial Sequence: Synthetic oligonucleotide
  Target: PCSK9; (+) strand; PAM type: NRG; PAM sequence: CAG
gagggtctcagggtcaggag

SEQ ID NO: 17528 - DNA, 20 bp, Artificial Sequence
  Description of Artificial Sequence: Synthetic oligonucleotide
  Target: PCSK9; (+) strand; PAM type: NRG; PAM sequence: TGG
ctcagggtcaggagcagcac

SEQ ID NO: 17529 - DNA, 20 bp, Artificial Sequence
  Description of Artificial Sequence: Synthetic oligonucleotide
  Target: PCSK9; (+) strand; PAM type: NRG; PAM sequence: GGG
tcagggtcaggagcagcact

SEQ ID NO: 17530 - DNA, 20 bp, Artificial Sequence
  Description of Artificial Sequence: Synthetic oligonucleotide
  Target: PCSK9; (+) strand; PAM type: NRG; PAM sequence: GAG
caggagcagcactgggctct

SEQ ID NO: 17531 - DNA, 20 bp, Artificial Sequence
  Description of Artificial Sequence: Synthetic oligonucleotide
  Target: PCSK9; (+) strand; PAM type: NRG; PAM sequence: AGG
aggagcagcactgggctctg

SEQ ID NO: 17532 - DNA, 20 bp, Artificial Sequence
  Description of Artificial Sequence: Synthetic oligonucleotide
  Target: PCSK9; (+) strand; PAM type: NRG; PAM sequence: CAG
agcactgggctctgaggaca

SEQ ID NO: 17533 - DNA, 20 bp, Artificial Sequence
  Description of Artificial Sequence: Synthetic oligonucleotide
  Target: PCSK9; (+) strand; PAM type: NRG; PAM sequence: GAG
cactgggctctgaggacaca

SEQ ID NO: 17534 - DNA, 20 bp, Artificial Sequence
  Description of Artificial Sequence: Synthetic oligonucleotide
  Target: PCSK9; (+) strand; PAM type: NRG; PAM sequence: CAG
ctgaggacacagagctcact

SEQ ID NO: 17535 - DNA, 20 bp, Artificial Sequence
  Description of Artificial Sequence: Synthetic oligonucleotide
  Target: PCSK9; (+) strand; PAM type: NRG; PAM sequence: CAG
gagctcactcagccgtgacc

SEQ ID NO: 17536 - DNA, 20 bp, Artificial Sequence
  Description of Artificial Sequence: Synthetic oligonucleotide
  Target: PCSK9; (+) strand; PAM type: NRG; PAM sequence: GAG
gctcactcagccgtgaccca

SEQ ID NO: 17537 - DNA, 20 bp, Artificial Sequence
  Description of Artificial Sequence: Synthetic oligonucleotide
  Target: PCSK9; (+) strand; PAM type: NRG; PAM sequence: AGG
ctcactcagccgtgacccag

SEQ ID NO: 17538 - DNA, 20 bp, Artificial Sequence
  Description of Artificial Sequence: Synthetic oligonucleotide
  Target: PCSK9; (+) strand; PAM type: NRG; PAM sequence: GGG
tcactcagccgtgacccaga

SEQ ID NO: 17539 - DNA, 20 bp, Artificial Sequence
  Description of Artificial Sequence: Synthetic oligonucleotide
  Target: PCSK9; (+) strand; PAM type: NRG; PAM sequence: GGG
cactcagccgtgacccagag

SEQ ID NO: 17540 - DNA, 20 bp, Artificial Sequence
  Description of Artificial Sequence: Synthetic oligonucleotide
  Target: PCSK9; (+) strand; PAM type: NRG; PAM sequence: GGG
actcagccgtgacccagagg

SEQ ID NO: 17541 - DNA, 20 bp, Artificial Sequence
  Description of Artificial Sequence: Synthetic oligonucleotide
  Target: PCSK9; (+) strand; PAM type: NRG; PAM sequence: GAG
gtgacccagagggggtgcct

SEQ ID NO: 17542 - DNA, 20 bp, Artificial Sequence
  Description of Artificial Sequence: Synthetic oligonucleotide
  Target: PCSK9; (+) strand; PAM type: NRG; PAM sequence: AAG
ggtgcctgagctgcatgctg

SEQ ID NO: 17543 - DNA, 20 bp, Artificial Sequence
  Description of Artificial Sequence: Synthetic oligonucleotide
  Target: PCSK9; (+) strand; PAM type: NRG; PAM sequence: AGG
gtgcctgagctgcatgctga

SEQ ID NO: 17544 - DNA, 20 bp, Artificial Sequence
  Description of Artificial Sequence: Synthetic oligonucleotide
  Target: PCSK9; (+) strand; PAM type: NRG; PAM sequence: TAG
agctgcatgctgaaggttgt

SEQ ID NO: 17545 - DNA, 20 bp, Artificial Sequence
  Description of Artificial Sequence: Synthetic oligonucleotide
  Target: PCSK9; (+) strand; PAM type: NRG; PAM sequence: CAG
ctgaaggttgttagcatgac

SEQ ID NO: 17546 - DNA, 20 bp, Artificial Sequence
  Description of Artificial Sequence: Synthetic oligonucleotide
  Target: PCSK9; (+) strand; PAM type: NRG; PAM sequence: AAG
aggttgttagcatgaccagc

SEQ ID NO: 17547 - DNA, 20 bp, Artificial Sequence
  Description of Artificial Sequence: Synthetic oligonucleotide
  Target: PCSK9; (+) strand; PAM type: NRG; PAM sequence: AGG
ggttgttagcatgaccagca

SEQ ID NO: 17548 - DNA, 20 bp, Artificial Sequence
  Description of Artificial Sequence: Synthetic oligonucleotide
  Target: PCSK9; (+) strand; PAM type: NRG; PAM sequence: AAG
gttagcatgaccagcaaggc

SEQ ID NO: 17549 - DNA, 20 bp, Artificial Sequence
  Description of Artificial Sequence: Synthetic oligonucleotide
  Target: PCSK9; (+) strand; PAM type: NRG; PAM sequence: AAG
catgaccagcaaggcaagaa

SEQ ID NO: 17550 - DNA, 20 bp, Artificial Sequence
  Description of Artificial Sequence: Synthetic oligonucleotide
  Target: PCSK9; (+) strand; PAM type: NRG; PAM sequence: AGG
atgaccagcaaggcaagaaa

SEQ ID NO: 17551 - DNA, 20 bp, Artificial Sequence
  Description of Artificial Sequence: Synthetic oligonucleotide
  Target: PCSK9; (+) strand; PAM type: NRG; PAM sequence: GAG
aggcaagaaaaggccctgcc

SEQ ID NO: 17552 - DNA, 20 bp, Artificial Sequence
  Description of Artificial Sequence: Synthetic oligonucleotide
  Target: PCSK9; (+) strand; PAM type: NRG; PAM sequence: TAG
agaaaaggccctgccgagat

SEQ ID NO: 17553 - DNA, 20 bp, Artificial Sequence
  Description of Artificial Sequence: Synthetic oligonucleotide
  Target: PCSK9; (+) strand; PAM type: NRG; PAM sequence: AAG
aaggccctgccgagattagc

SEQ ID NO: 17554 - DNA, 20 bp, Artificial Sequence
  Description of Artificial Sequence: Synthetic oligonucleotide
  Target: PCSK9; (+) strand; PAM type: NRG; PAM sequence: AGG
aggccctgccgagattagca

SEQ ID NO: 17555 - DNA, 20 bp, Artificial Sequence
  Description of Artificial Sequence: Synthetic oligonucleotide
  Target: PCSK9; (+) strand; PAM type: NRG; PAM sequence: AAG
agattagcaaggcatgtgcc

SEQ ID NO: 17556 - DNA, 20 bp, Artificial Sequence
  Description of Artificial Sequence: Synthetic oligonucleotide
  Target: PCSK9; (+) strand; PAM type: NRG; PAM sequence: TGG
gcaaggcatgtgccaagccc

SEQ ID NO: 17557 - DNA, 20 bp, Artificial Sequence
  Description of Artificial Sequence: Synthetic oligonucleotide
  Target: PCSK9; (+) strand; PAM type: NRG; PAM sequence: CAG
tgccaagccctggaatgtga

SEQ ID NO: 17558 - DNA, 20 bp, Artificial Sequence
  Description of Artificial Sequence: Synthetic oligonucleotide
  Target: PCSK9; (+) strand; PAM type: NRG; PAM sequence: CGG
aagccctggaatgtgacagc

SEQ ID NO: 17559 - DNA, 20 bp, Artificial Sequence
  Description of Artificial Sequence: Synthetic oligonucleotide
  Target: PCSK9; (+) strand; PAM type: NRG; PAM sequence: GGG
agccctggaatgtgacagcc

SEQ ID NO: 17560 - DNA, 20 bp, Artificial Sequence
  Description of Artificial Sequence: Synthetic oligonucleotide
  Target: PCSK9; (+) strand; PAM type: NRG; PAM sequence: TAG
aatgtgacagccgggccttc

SEQ ID NO: 17561 - DNA, 20 bp, Artificial Sequence
  Description of Artificial Sequence: Synthetic oligonucleotide
  Target: PCSK9; (+) strand; PAM type: NRG; PAM sequence: GAG
gccgggccttctagaaacct

SEQ ID NO: 17562 - DNA, 20 bp, Artificial Sequence
  Description of Artificial Sequence: Synthetic oligonucleotide
  Target: PCSK9; (+) strand; PAM type: NRG; PAM sequence: AAG
gagtgtataactctccttaa

SEQ ID NO: 17563 - DNA, 20 bp, Artificial Sequence
  Description of Artificial Sequence: Synthetic oligonucleotide
  Target: PCSK9; (+) strand; PAM type: NRG; PAM sequence: CAG
gtataactctccttaaaagc

SEQ ID NO: 17564 - DNA, 20 bp, Artificial Sequence
  Description of Artificial Sequence: Synthetic oligonucleotide
  Target: PCSK9; (+) strand; PAM type: NRG; PAM sequence: TAG
taactctccttaaaagccag

SEQ ID NO: 17565 - DNA, 20 bp, Artificial Sequence
  Description of Artificial Sequence: Synthetic oligonucleotide
  Target: PCSK9; (+) strand; PAM type: NRG; PAM sequence: AGG
aactctccttaaaagccagt

SEQ ID NO: 17566 - DNA, 20 bp, Artificial Sequence
  Description of Artificial Sequence: Synthetic oligonucleotide
  Target: PCSK9; (+) strand; PAM type: NRG; PAM sequence: GAG
ctctccttaaaagccagtag

SEQ ID NO: 17567 - DNA, 20 bp, Artificial Sequence
  Description of Artificial Sequence: Synthetic oligonucleotide
  Target: PCSK9; (+) strand; PAM type: NRG; PAM sequence: AAG
agccagtaggagctcctcaa

SEQ ID NO: 17568 - DNA, 20 bp, Artificial Sequence
  Description of Artificial Sequence: Synthetic oligonucleotide
  Target: PCSK9; (+) strand; PAM type: NRG; PAM sequence: AGG
gccagtaggagctcctcaaa

SEQ ID NO: 17569 - DNA, 20 bp, Artificial Sequence
  Description of Artificial Sequence: Synthetic oligonucleotide
  Target: PCSK9; (+) strand; PAM type: NRG; PAM sequence: CAG
agtaggagctcctcaaaagg

SEQ ID NO: 17570 - DNA, 20 bp, Artificial Sequence
  Description of Artificial Sequence: Synthetic oligonucleotide
  Target: PCSK9; (+) strand; PAM type: NRG; PAM sequence: AAG
gctcctcaaaaggcagccct

SEQ ID NO: 17571 - DNA, 20 bp, Artificial Sequence
  Description of Artificial Sequence: Synthetic oligonucleotide
  Target: PCSK9; (+) strand; PAM type: NRG; PAM sequence: AGG
ctcctcaaaaggcagcccta

SEQ ID NO: 17572 - DNA, 20 bp, Artificial Sequence
  Description of Artificial Sequence: Synthetic oligonucleotide
  Target: PCSK9; (+) strand; PAM type: NRG; PAM sequence: GAG
cctcaaaaggcagccctaag

SEQ ID NO: 17573 - DNA, 20 bp, Artificial Sequence
  Description of Artificial Sequence: Synthetic oligonucleotide
  Target: PCSK9; (+) strand; PAM type: NRG; PAM sequence: CAG
agtccactcttaaatgaact

SEQ ID NO: 17574 - DNA, 20 bp, Artificial Sequence
  Description of Artificial Sequence: Synthetic oligonucleotide
  Target: PCSK9; (+) strand; PAM type: NRG; PAM sequence: GAG
tccactcttaaatgaactca

SEQ ID NO: 17575 - DNA, 20 bp, Artificial Sequence
  Description of Artificial Sequence: Synthetic oligonucleotide
  Target: PCSK9; (+) strand; PAM type: NRG; PAM sequence: CAG
ctcttaaatgaactcagagt

SEQ ID NO: 17576 - DNA, 20 bp, Artificial Sequence
  Description of Artificial Sequence: Synthetic oligonucleotide
  Target: PCSK9; (+) strand; PAM type: NRG; PAM sequence: AAG
cagagtcagttttaaaatgc

SEQ ID NO: 17577 - DNA, 20 bp, Artificial Sequence
  Description of Artificial Sequence: Synthetic oligonucleotide
  Target: PCSK9; (+) strand; PAM type: NRG; PAM sequence: TGG
atgcaagtctgtgttgattc

SEQ ID NO: 17578 - DNA, 20 bp, Artificial Sequence
  Description of Artificial Sequence: Synthetic oligonucleotide
  Target: PCSK9; (+) strand; PAM type: NRG; PAM sequence: TGG
agtctgtgttgattctggtc

SEQ ID NO: 17579 - DNA, 20 bp, Artificial Sequence
  Description of Artificial Sequence: Synthetic oligonucleotide
  Target: PCSK9; (+) strand; PAM type: NRG; PAM sequence: TGG
tgtgttgattctggtctgga

SEQ ID NO: 17580 - DNA, 20 bp, Artificial Sequence
  Description of Artificial Sequence: Synthetic oligonucleotide
  Target: PCSK9; (+) strand; PAM type: NRG; PAM sequence: GAG
gtctggatggtgcattcctc

SEQ ID NO: 17581 - DNA, 20 bp, Artificial Sequence
  Description of Artificial Sequence: Synthetic oligonucleotide
  Target: PCSK9; (+) strand; PAM type: NRG; PAM sequence: GAG
ctggatggtgcattcctcga

SEQ ID NO: 17582 - DNA, 20 bp, Artificial Sequence
  Description of Artificial Sequence: Synthetic oligonucleotide
  Target: PCSK9; (+) strand; PAM type: NRG; PAM sequence: AAG
ggtgcattcctcgagagcaa

SEQ ID NO: 17583 - DNA, 20 bp, Artificial Sequence
  Description of Artificial Sequence: Synthetic oligonucleotide
  Target: PCSK9; (+) strand; PAM type: NRG; PAM sequence: CAG
cattcctcgagagcaaaaga

SEQ ID NO: 17584 - DNA, 20 bp, Artificial Sequence
  Description of Artificial Sequence: Synthetic oligonucleotide
  Target: PCSK9; (+) strand; PAM type: NRG; PAM sequence: TGG
tcgagagcaaaagacagtct

SEQ ID NO: 17585 - DNA, 20 bp, Artificial Sequence
  Description of Artificial Sequence: Synthetic oligonucleotide
  Target: PCSK9; (+) strand; PAM type: NRG; PAM sequence: TGG
gcaaaagacagtcttggtct

SEQ ID NO: 17586 - DNA, 20 bp, Artificial Sequence
  Description of Artificial Sequence: Synthetic oligonucleotide
  Target: PCSK9; (+) strand; PAM type: NRG; PAM sequence: TGG
ggtcttggatccacttgccc

SEQ ID NO: 17587 - DNA, 20 bp, Artificial Sequence
  Description of Artificial Sequence: Synthetic oligonucleotide
  Target: PCSK9; (+) strand; PAM type: NRG; PAM sequence: GGG
gtcttggatccacttgccct

SEQ ID NO: 17588 - DNA, 20 bp, Artificial Sequence
  Description of Artificial Sequence: Synthetic oligonucleotide
  Target: PCSK9; (+) strand; PAM type: NRG; PAM sequence: GAG
ccacttgccctgggtacact

SEQ ID NO: 17589 - DNA, 20 bp, Artificial Sequence
  Description of Artificial Sequence: Synthetic oligonucleotide
  Target: PCSK9; (+) strand; PAM type: NRG; PAM sequence: AGG
cacttgccctgggtacactg

SEQ ID NO: 17590 - DNA, 20 bp, Artificial Sequence
  Description of Artificial Sequence: Synthetic oligonucleotide
  Target: PCSK9; (+) strand; PAM type: NRG; PAM sequence: GGG
acttgccctgggtacactga

SEQ ID NO: 17591 - DNA, 20 bp, Artificial Sequence
  Description of Artificial Sequence: Synthetic oligonucleotide
  Target: PCSK9; (+) strand; PAM type: NRG; PAM sequence: TAG
ctgggtacactgagggctgc

SEQ ID NO: 17592 - DNA, 20 bp, Artificial Sequence
  Description of Artificial Sequence: Synthetic oligonucleotide
  Target: PCSK9; (+) strand; PAM type: NRG; PAM sequence: AGG
tgggtacactgagggctgct

SEQ ID NO: 17593 - DNA, 20 bp, Artificial Sequence
  Description of Artificial Sequence: Synthetic oligonucleotide
  Target: PCSK9; (+) strand; PAM type: NRG; PAM sequence: CAG
cactgagggctgctaggttc

SEQ ID NO: 17594 - DNA, 20 bp, Artificial Sequence
  Description of Artificial Sequence: Synthetic oligonucleotide
  Target: PCSK9; (+) strand; PAM type: NRG; PAM sequence: AGG
actgagggctgctaggttcc

SEQ ID NO: 17595 - DNA, 20 bp, Artificial Sequence
  Description of Artificial Sequence: Synthetic oligonucleotide
  Target: PCSK9; (+) strand; PAM type: NRG; PAM sequence: TGG
taggttccaggtgctcttcc

SEQ ID NO: 17596 - DNA, 20 bp, Artificial Sequence
  Description of Artificial Sequence: Synthetic oligonucleotide
  Target: PCSK9; (+) strand; PAM type: NRG; PAM sequence: TGG
ccaggtgctcttcctggcac

SEQ ID NO: 17597 - DNA, 20 bp, Artificial Sequence
  Description of Artificial Sequence: Synthetic oligonucleotide
  Target: PCSK9; (+) strand; PAM type: NRG; PAM sequence: GGG
caggtgctcttcctggcact

SEQ ID NO: 17598 - DNA, 20 bp, Artificial Sequence
  Description of Artificial Sequence: Synthetic oligonucleotide
  Target: PCSK9; (+) strand; PAM type: NRG; PAM sequence: GGG
aggtgctcttcctggcactg

SEQ ID NO: 17599 - DNA, 20 bp, Artificial Sequence
  Description of Artificial Sequence: Synthetic oligonucleotide
  Target: PCSK9; (+) strand; PAM type: NRG; PAM sequence: GAG
gtgctcttcctggcactggg

SEQ ID NO: 17600 - DNA, 20 bp, Artificial Sequence
  Description of Artificial Sequence: Synthetic oligonucleotide
  Target: PCSK9; (+) strand; PAM type: NRG; PAM sequence: AGG
tgctcttcctggcactgggg

SEQ ID NO: 17601 - DNA, 20 bp, Artificial Sequence
  Description of Artificial Sequence: Synthetic oligonucleotide
  Target: PCSK9; (+) strand; PAM type: NRG; PAM sequence: GGG
gctcttcctggcactgggga

SEQ ID NO: 17602 - DNA, 20 bp, Artificial Sequence
  Description of Artificial Sequence: Synthetic oligonucleotide
  Target: PCSK9; (+) strand; PAM type: NRG; PAM sequence: CAG
cctggcactggggagggata

SEQ ID NO: 17603 - DNA, 20 bp, Artificial Sequence
  Description of Artificial Sequence: Synthetic oligonucleotide
  Target: PCSK9; (+) strand; PAM type: NRG; PAM sequence: AGG
ctggcactggggagggatac

SEQ ID NO: 17604 - DNA, 20 bp, Artificial Sequence
  Description of Artificial Sequence: Synthetic oligonucleotide
  Target: PCSK9; (+) strand; PAM type: NRG; PAM sequence: AAG
ctggggagggatacaggccc

SEQ ID NO: 17605 - DNA, 20 bp, Artificial Sequence
  Description of Artificial Sequence: Synthetic oligonucleotide
  Target: PCSK9; (+) strand; PAM type: NRG; PAM sequence: GAG
ggggagggatacaggcccaa

SEQ ID NO: 17606 - DNA, 20 bp, Artificial Sequence
  Description of Artificial Sequence: Synthetic oligonucleotide
  Target: PCSK9; (+) strand; PAM type: NRG; PAM sequence: TGG
agacatgctgttctccctcc

SEQ ID NO: 17607 - DNA, 20 bp, Artificial Sequence
  Description of Artificial Sequence: Synthetic oligonucleotide
  Target: PCSK9; (+) strand; PAM type: NRG; PAM sequence: GAG
acatgctgttctccctcctg

SEQ ID NO: 17608 - DNA, 20 bp, Artificial Sequence
  Description of Artificial Sequence: Synthetic oligonucleotide
  Target: PCSK9; (+) strand; PAM type: NRG; PAM sequence: TAG
ccctcctggagcatctattt

SEQ ID NO: 17609 - DNA, 20 bp, Artificial Sequence
  Description of Artificial Sequence: Synthetic oligonucleotide
  Target: PCSK9; (+) strand; PAM type: NRG; PAM sequence: TGG
tcctggagcatctattttag

SEQ ID NO: 17610 - DNA, 20 bp, Artificial Sequence
  Description of Artificial Sequence: Synthetic oligonucleotide
  Target: PCSK9; (+) strand; PAM type: NRG; PAM sequence: GAG
ctggagcatctattttagtg

SEQ ID NO: 17611 - DNA, 20 bp, Artificial Sequence
  Description of Artificial Sequence: Synthetic oligonucleotide
  Target: PCSK9; (+) strand; PAM type: NRG; PAM sequence: AGG
tggagcatctattttagtgg

SEQ ID NO: 17612 - DNA, 20 bp, Artificial Sequence
  Description of Artificial Sequence: Synthetic oligonucleotide
  Target: PCSK9; (+) strand; PAM type: NRG; PAM sequence: AAG
agcatctattttagtggagg

SEQ ID NO: 17613 - DNA, 20 bp, Artificial Sequence
  Description of Artificial Sequence: Synthetic oligonucleotide
  Target: PCSK9; (+) strand; PAM type: NRG; PAM sequence: CAG
tctattttagtggaggaaga

SEQ ID NO: 17614 - DNA, 20 bp, Artificial Sequence
  Description of Artificial Sequence: Synthetic oligonucleotide
  Target: PCSK9; (+) strand; PAM type: NRG; PAM sequence: TAG
cagaaaacaaaccattaata

SEQ ID NO: 17615 - DNA, 20 bp, Artificial Sequence
  Description of Artificial Sequence: Synthetic oligonucleotide
  Target: PCSK9; (+) strand; PAM type: NRG; PAM sequence: GAG
gaaaacaaaccattaatata

SEQ ID NO: 17616 - DNA, 20 bp, Artificial Sequence
  Description of Artificial Sequence: Synthetic oligonucleotide
  Target: PCSK9; (+) strand; PAM type: NRG; PAM sequence: AAG
cattaatatagagtactgaa

SEQ ID NO: 17617 - DNA, 20 bp, Artificial Sequence
  Description of Artificial Sequence: Synthetic oligonucleotide
  Target: PCSK9; (+) strand; PAM type: NRG; PAM sequence: TGG
agagtactgaaaagatgcga

SEQ ID NO: 17618 - DNA, 20 bp, Artificial Sequence
  Description of Artificial Sequence: Synthetic oligonucleotide
  Target: PCSK9; (+) strand; PAM type: NRG; PAM sequence: GAG
agtactgaaaagatgcgatg

SEQ ID NO: 17619 - DNA, 20 bp, Artificial Sequence
  Description of Artificial Sequence: Synthetic oligonucleotide
  Target: PCSK9; (+) strand; PAM type: NRG; PAM sequence: TAG
agatgcgatggagaaaacta

SEQ ID NO: 17620 - DNA, 20 bp, Artificial Sequence
  Description of Artificial Sequence: Synthetic oligonucleotide
  Target: PCSK9; (+) strand; PAM type: NRG; PAM sequence: AAG
gcgatggagaaaactatagc

SEQ ID NO: 17621 - DNA, 20 bp, Artificial Sequence
  Description of Artificial Sequence: Synthetic oligonucleotide
  Target: PCSK9; (+) strand; PAM type: NRG; PAM sequence: AGG
cgatggagaaaactatagca

SEQ ID NO: 17622 - DNA, 20 bp, Artificial Sequence
  Description of Artificial Sequence: Synthetic oligonucleotide
  Target: PCSK9; (+) strand; PAM type: NRG; PAM sequence: AAG
tggagaaaactatagcaagg

SEQ ID NO: 17623 - DNA, 20 bp, Artificial Sequence
  Description of Artificial Sequence: Synthetic oligonucleotide
  Target: PCSK9; (+) strand; PAM type: NRG; PAM sequence: AGG
ggagaaaactatagcaagga

SEQ ID NO: 17624 - DNA, 20 bp, Artificial Sequence
  Description of Artificial Sequence: Synthetic oligonucleotide
  Target: PCSK9; (+) strand; PAM type: NRG; PAM sequence: GGG
gagaaaactatagcaaggaa

SEQ ID NO: 17625 - DNA, 20 bp, Artificial Sequence
  Description of Artificial Sequence: Synthetic oligonucleotide
  Target: PCSK9; (+) strand; PAM type: NRG; PAM sequence: TGG
aactatagcaaggaagggaa

SEQ ID NO: 17626 - DNA, 20 bp, Artificial Sequence
  Description of Artificial Sequence: Synthetic oligonucleotide
  Target: PCSK9; (+) strand; PAM type: NRG; PAM sequence: GGG
actatagcaaggaagggaat

SEQ ID NO: 17627 - DNA, 20 bp, Artificial Sequence
  Description of Artificial Sequence: Synthetic oligonucleotide
  Target: PCSK9; (+) strand; PAM type: NRG; PAM sequence: GGG
ctatagcaaggaagggaatg

SEQ ID NO: 17628 - DNA, 20 bp, Artificial Sequence
  Description of Artificial Sequence: Synthetic oligonucleotide
  Target: PCSK9; (+) strand; PAM type: NRG; PAM sequence: TGG
tagcaaggaagggaatgggg

SEQ ID NO: 17629 - DNA, 20 bp, Artificial Sequence
  Description of Artificial Sequence: Synthetic oligonucleotide
  Target: PCSK9; (+) strand; PAM type: NRG; PAM sequence: GGG
agcaaggaagggaatggggt

SEQ ID NO: 17630 - DNA, 20 bp, Artificial Sequence
  Description of Artificial Sequence: Synthetic oligonucleotide
  Target: PCSK9; (+) strand; PAM type: NRG; PAM sequence: GAG
caaggaagggaatggggtgg

SEQ ID NO: 17631 - DNA, 20 bp, Artificial Sequence
  Description of Artificial Sequence: Synthetic oligonucleotide
  Target: PCSK9; (+) strand; PAM type: NRG; PAM sequence: GAG
aggaagggaatggggtggga

SEQ ID NO: 17632 - DNA, 20 bp, Artificial Sequence
  Description of Artificial Sequence: Synthetic oligonucleotide
  Target: PCSK9; (+) strand; PAM type: NRG; PAM sequence: GAG
gaagggaatggggtgggaga

SEQ ID NO: 17633 - DNA, 20 bp, Artificial Sequence
  Description of Artificial Sequence: Synthetic oligonucleotide
  Target: PCSK9; (+) strand; PAM type: NRG; PAM sequence: AGG
aagggaatggggtgggagag

SEQ ID NO: 17634 - DNA, 20 bp, Artificial Sequence
  Description of Artificial Sequence: Synthetic oligonucleotide
  Target: PCSK9; (+) strand; PAM type: NRG; PAM sequence: CAG
gaatggggtgggagagaggt

SEQ ID NO: 17635 - DNA, 20 bp, Artificial Sequence
  Description of Artificial Sequence: Synthetic oligonucleotide
  Target: PCSK9; (+) strand; PAM type: NRG; PAM sequence: AGG
aatggggtgggagagaggtc

SEQ ID NO: 17636 - DNA, 20 bp, Artificial Sequence
  Description of Artificial Sequence: Synthetic oligonucleotide
  Target: PCSK9; (+) strand; PAM type: NRG; PAM sequence: GAG
tggggtgggagagaggtcag

SEQ ID NO: 17637 - DNA, 20 bp, Artificial Sequence
  Description of Artificial Sequence: Synthetic oligonucleotide
  Target: PCSK9; (+) strand; PAM type: NRG; PAM sequence: GAG
gggtgggagagaggtcagga

SEQ ID NO: 17638 - DNA, 20 bp, Artificial Sequence
  Description of Artificial Sequence: Synthetic oligonucleotide
  Target: PCSK9; (+) strand; PAM type: NRG; PAM sequence: AGG
ggtgggagagaggtcaggag

SEQ ID NO: 17639 - DNA, 20 bp, Artificial Sequence
  Description of Artificial Sequence: Synthetic oligonucleotide
  Target: PCSK9; (+) strand; PAM type: NRG; PAM sequence: AAG
tcaggagaggtctcgctgac

SEQ ID NO: 17640 - DNA, 20 bp, Artificial Sequence
  Description of Artificial Sequence: Synthetic oligonucleotide
  Target: PCSK9; (+) strand; PAM type: NRG; PAM sequence: AGG
caggagaggtctcgctgaca

SEQ ID NO: 17641 - DNA, 20 bp, Artificial Sequence
  Description of Artificial Sequence: Synthetic oligonucleotide
  Target: PCSK9; (+) strand; PAM type: NRG; PAM sequence: TGG
gagaggtctcgctgacaagg

SEQ ID NO: 17642 - DNA, 20 bp, Artificial Sequence
  Description of Artificial Sequence: Synthetic oligonucleotide
  Target: PCSK9; (+) strand; PAM type: NRG; PAM sequence: CAG
cgctgacaaggtggacgaaa

SEQ ID NO: 17643 - DNA, 20 bp, Artificial Sequence
  Description of Artificial Sequence: Synthetic oligonucleotide
  Target: PCSK9; (+) strand; PAM type: NRG; PAM sequence: AGG
gctgacaaggtggacgaaac

SEQ ID NO: 17644 - DNA, 20 bp, Artificial Sequence
  Description of Artificial Sequence: Synthetic oligonucleotide
  Target: PCSK9; (+) strand; PAM type: NRG; PAM sequence: GAG
aggtggacgaaacaggccat

SEQ ID NO: 17645 - DNA, 20 bp, Artificial Sequence
  Description of Artificial Sequence: Synthetic oligonucleotide
  Target: PCSK9; (+) strand; PAM type: NRG; PAM sequence: AGG
ggtggacgaaacaggccatg

SEQ ID NO: 17646 - DNA, 20 bp, Artificial Sequence
  Description of Artificial Sequence: Synthetic oligonucleotide
  Target: PCSK9; (+) strand; PAM type: NRG; PAM sequence: CAG
ggacgaaacaggccatgagg

SEQ ID NO: 17647 - DNA, 20 bp, Artificial Sequence
  Description of Artificial Sequence: Synthetic oligonucleotide
  Target: PCSK9; (+) strand; PAM type: NRG; PAM sequence: GAG
acgaaacaggccatgaggca

SEQ ID NO: 17648 - DNA, 20 bp, Artificial Sequence
  Description of Artificial Sequence: Synthetic oligonucleotide
  Target: PCSK9; (+) strand; PAM type: NRG; PAM sequence: CAG
atgaggcagagaacatgttc

SEQ ID NO: 17649 - DNA, 20 bp, Artificial Sequence
  Description of Artificial Sequence: Synthetic oligonucleotide
  Target: PCSK9; (+) strand; PAM type: NRG; PAM sequence: AGG
tgaggcagagaacatgttcc

SEQ ID NO: 17650 - DNA, 20 bp, Artificial Sequence
  Description of Artificial Sequence: Synthetic oligonucleotide
  Target: PCSK9; (+) strand; PAM type: NRG; PAM sequence: AAG
cagagaacatgttccaggca

SEQ ID NO: 17651 - DNA, 20 bp, Artificial Sequence
  Description of Artificial Sequence: Synthetic oligonucleotide
  Target: PCSK9; (+) strand; PAM type: NRG; PAM sequence: AAG
aacatgttccaggcaaagca

SEQ ID NO: 17652 - DNA, 20 bp, Artificial Sequence
  Description of Artificial Sequence: Synthetic oligonucleotide
  Target: PCSK9; (+) strand; PAM type: NRG; PAM sequence: AGG
acatgttccaggcaaagcaa

SEQ ID NO: 17653 - DNA, 20 bp, Artificial Sequence
  Description of Artificial Sequence: Synthetic oligonucleotide
  Target: PCSK9; (+) strand; PAM type: NRG; PAM sequence: CAG
ccaggcaaagcaaaggcccc

SEQ ID NO: 17654 - DNA, 20 bp, Artificial Sequence
  Description of Artificial Sequence: Synthetic oligonucleotide
  Target: PCSK9; (+) strand; PAM type: NRG; PAM sequence: AGG
caggcaaagcaaaggccccc

SEQ ID NO: 17655 - DNA, 20 bp, Artificial Sequence
  Description of Artificial Sequence: Synthetic oligonucleotide
  Target: PCSK9; (+) strand; PAM type: NRG; PAM sequence: TGG
gcaaagcaaaggcccccagg

SEQ ID NO: 17656 - DNA, 20 bp, Artificial Sequence
  Description of Artificial Sequence: Synthetic oligonucleotide
  Target: PCSK9; (+) strand; PAM type: NRG; PAM sequence: GGG
caaagcaaaggcccccaggt

SEQ ID NO: 17657 - DNA, 20 bp, Artificial Sequence
  Description of Artificial Sequence: Synthetic oligonucleotide
  Target: PCSK9; (+) strand; PAM type: NRG; PAM sequence: GGG
aaagcaaaggcccccaggtg

SEQ ID NO: 17658 - DNA, 20 bp, Artificial Sequence
  Description of Artificial Sequence: Synthetic oligonucleotide
  Target: PCSK9; (+) strand; PAM type: NRG; PAM sequence: CAG
ggcccccaggtggggatgtg

SEQ ID NO: 17659 - DNA, 20 bp, Artificial Sequence
  Description of Artificial Sequence: Synthetic oligonucleotide
  Target: PCSK9; (+) strand; PAM type: NRG; PAM sequence: AGG
gcccccaggtggggatgtgc

SEQ ID NO: 17660 - DNA, 20 bp, Artificial Sequence
  Description of Artificial Sequence: Synthetic oligonucleotide
  Target: PCSK9; (+) strand; PAM type: NRG; PAM sequence: GGG
cccccaggtggggatgtgca

SEQ ID NO: 17661 - DNA, 20 bp, Artificial Sequence
  Description of Artificial Sequence: Synthetic oligonucleotide
  Target: PCSK9; (+) strand; PAM type: NRG; PAM sequence: GAG
cccaggtggggatgtgcagg

SEQ ID NO: 17662 - DNA, 20 bp, Artificial Sequence
  Description of Artificial Sequence: Synthetic oligonucleotide
  Target: PCSK9; (+) strand; PAM type: NRG; PAM sequence: CAG
tggggatgtgcagggagtac

SEQ ID NO: 17663 - DNA, 20 bp, Artificial Sequence
  Description of Artificial Sequence: Synthetic oligonucleotide
  Target: PCSK9; (+) strand; PAM type: NRG; PAM sequence: AGG
ggggatgtgcagggagtacc

SEQ ID NO: 17664 - DNA, 20 bp, Artificial Sequence
  Description of Artificial Sequence: Synthetic oligonucleotide
  Target: PCSK9; (+) strand; PAM type: NRG; PAM sequence: CAG
tgcagggagtaccaggaaac

SEQ ID NO: 17665 - DNA, 20 bp, Artificial Sequence
  Description of Artificial Sequence: Synthetic oligonucleotide
  Target: PCSK9; (+) strand; PAM type: NRG; PAM sequence: GAG
cagggagtaccaggaaacca

SEQ ID NO: 17666 - DNA, 20 bp, Artificial Sequence
  Description of Artificial Sequence: Synthetic oligonucleotide
  Target: PCSK9; (+) strand; PAM type: NRG; PAM sequence: GAG
gggagtaccaggaaaccaga

SEQ ID NO: 17667 - DNA, 20 bp, Artificial Sequence
  Description of Artificial Sequence: Synthetic oligonucleotide
  Target: PCSK9; (+) strand; PAM type: NRG; PAM sequence: AGG
ggagtaccaggaaaccagag

SEQ ID NO: 17668 - DNA, 20 bp, Artificial Sequence
  Description of Artificial Sequence: Synthetic oligonucleotide
  Target: PCSK9; (+) strand; PAM type: NRG; PAM sequence: TGG
gtaccaggaaaccagagagg

SEQ ID NO: 17669 - DNA, 20 bp, Artificial Sequence
  Description of Artificial Sequence: Synthetic oligonucleotide
  Target: PCSK9; (+) strand; PAM type: NRG; PAM sequence: GGG
taccaggaaaccagagaggt

SEQ ID NO: 17670 - DNA, 20 bp, Artificial Sequence
  Description of Artificial Sequence: Synthetic oligonucleotide
  Target: PCSK9; (+) strand; PAM type: NRG; PAM sequence: TAG
ggaaaccagagaggtgggaa

SEQ ID NO: 17671 - DNA, 20 bp, Artificial Sequence
  Description of Artificial Sequence: Synthetic oligonucleotide
  Target: PCSK9; (+) strand; PAM type: NRG; PAM sequence: GAG
agagaggtgggaatagttat

SEQ ID NO: 17672 - DNA, 20 bp, Artificial Sequence
  Description of Artificial Sequence: Synthetic oligonucleotide
  Target: PCSK9; (+) strand; PAM type: NRG; PAM sequence: TGG
aggtgggaatagttatgaga

SEQ ID NO: 17673 - DNA, 20 bp, Artificial Sequence
  Description of Artificial Sequence: Synthetic oligonucleotide
  Target: PCSK9; (+) strand; PAM type: NRG; PAM sequence: GGG
ggtgggaatagttatgagat

SEQ ID NO: 17674 - DNA, 20 bp, Artificial Sequence
  Description of Artificial Sequence: Synthetic oligonucleotide
  Target: PCSK9; (+) strand; PAM type: NRG; PAM sequence: GGG
gtgggaatagttatgagatg

SEQ ID NO: 17675 - DNA, 20 bp, Artificial Sequence
  Description of Artificial Sequence: Synthetic oligonucleotide
  Target: PCSK9; (+) strand; PAM type: NRG; PAM sequence: GGG
tgggaatagttatgagatgg

SEQ ID NO: 17676 - DNA, 20 bp, Artificial Sequence
  Description of Artificial Sequence: Synthetic oligonucleotide
  Target: PCSK9; (+) strand; PAM type: NRG; PAM sequence: GGG
gggaatagttatgagatggg

SEQ ID NO: 17677 - DNA, 20 bp, Artificial Sequence
  Description of Artificial Sequence: Synthetic oligonucleotide
  Target: PCSK9; (+) strand; PAM type: NRG; PAM sequence: CAG
ttatgagatggggggtgcct

SEQ ID NO: 17678 - DNA, 20 bp, Artificial Sequence
  Description of Artificial Sequence: Synthetic oligonucleotide
  Target: PCSK9; (+) strand; PAM type: NRG; PAM sequence: GAG
atgagatggggggtgcctca

SEQ ID NO: 17679 - DNA, 20 bp, Artificial Sequence
  Description of Artificial Sequence: Synthetic oligonucleotide
  Target: PCSK9; (+) strand; PAM type: NRG; PAM sequence: AGG
tgagatggggggtgcctcag

SEQ ID NO: 17680 - DNA, 20 bp, Artificial Sequence
  Description of Artificial Sequence: Synthetic oligonucleotide
  Target: PCSK9; (+) strand; PAM type: NRG; PAM sequence: GGG
gagatggggggtgcctcaga

SEQ ID NO: 17681 - DNA, 20 bp, Artificial Sequence
  Description of Artificial Sequence: Synthetic oligonucleotide
  Target: PCSK9; (+) strand; PAM type: NRG; PAM sequence: GGG
agatggggggtgcctcagag

SEQ ID NO: 17682 - DNA, 20 bp, Artificial Sequence
  Description of Artificial Sequence: Synthetic oligonucleotide
  Target: PCSK9; (+) strand; PAM type: NRG; PAM sequence: CAG
ggggggtgcctcagagggga

SEQ ID NO: 17683 - DNA, 20 bp, Artificial Sequence
  Description of Artificial Sequence: Synthetic oligonucleotide
  Target: PCSK9; (+) strand; PAM type: NRG; PAM sequence: AGG
gggggtgcctcagaggggac

SEQ ID NO: 17684 - DNA, 20 bp, Artificial Sequence
  Description of Artificial Sequence: Synthetic oligonucleotide
  Target: PCSK9; (+) strand; PAM type: NRG; PAM sequence: GGG
ggggtgcctcagaggggaca

SEQ ID NO: 17685 - DNA, 20 bp, Artificial Sequence
  Description of Artificial Sequence: Synthetic oligonucleotide
  Target: PCSK9; (+) strand; PAM type: NRG; PAM sequence: AAG
gcctcagaggggacagggcc

SEQ ID NO: 17686 - DNA, 20 bp, Artificial Sequence
  Description of Artificial Sequence: Synthetic oligonucleotide
  Target: PCSK9; (+) strand; PAM type: NRG; PAM sequence: CAG
cagaggggacagggccaagt

SEQ ID NO: 17687 - DNA, 20 bp, Artificial Sequence
  Description of Artificial Sequence: Synthetic oligonucleotide
  Target: PCSK9; (+) strand; PAM type: NRG; PAM sequence: AGG
agaggggacagggccaagtc

SEQ ID NO: 17688 - DNA, 20 bp, Artificial Sequence
  Description of Artificial Sequence: Synthetic oligonucleotide
  Target: PCSK9; (+) strand; PAM type: NRG; PAM sequence: GAG
gggacagggccaagtcaggt

SEQ ID NO: 17689 - DNA, 20 bp, Artificial Sequence
  Description of Artificial Sequence: Synthetic oligonucleotide
  Target: PCSK9; (+) strand; PAM type: NRG; PAM sequence: GAG
ggccaagtcaggtgagacct

SEQ ID NO: 17690 - DNA, 20 bp, Artificial Sequence
  Description of Artificial Sequence: Synthetic oligonucleotide
  Target: PCSK9; (+) strand; PAM type: NRG; PAM sequence: AGG
gccaagtcaggtgagacctg

SEQ ID NO: 17691 - DNA, 20 bp, Artificial Sequence
  Description of Artificial Sequence: Synthetic oligonucleotide
  Target: PCSK9; (+) strand; PAM type: NRG; PAM sequence: GGG
ccaagtcaggtgagacctga

SEQ ID NO: 17692 - DNA, 20 bp, Artificial Sequence
  Description of Artificial Sequence: Synthetic oligonucleotide
  Target: PCSK9; (+) strand; PAM type: NRG; PAM sequence: CAG
caggtgagacctgagggtca

SEQ ID NO: 17693 - DNA, 20 bp, Artificial Sequence
  Description of Artificial Sequence: Synthetic oligonucleotide
  Target: PCSK9; (+) strand; PAM type: NRG; PAM sequence: CAG
tgagacctgagggtcacagt

SEQ ID NO: 17694 - DNA, 20 bp, Artificial Sequence
  Description of Artificial Sequence: Synthetic oligonucleotide
  Target: PCSK9; (+) strand; PAM type: NRG; PAM sequence: CAG
gacctgagggtcacagtcag

SEQ ID NO: 17695 - DNA, 20 bp, Artificial Sequence
  Description of Artificial Sequence: Synthetic oligonucleotide
  Target: PCSK9; (+) strand; PAM type: NRG; PAM sequence: GAG
tgagggtcacagtcagcagt

SEQ ID NO: 17696 - DNA, 20 bp, Artificial Sequence
  Description of Artificial Sequence: Synthetic oligonucleotide
  Target: PCSK9; (+) strand; PAM type: NRG; PAM sequence: TGG
ggtcacagtcagcagtgagc

SEQ ID NO: 17697 - DNA, 20 bp, Artificial Sequence
  Description of Artificial Sequence: Synthetic oligonucleotide
  Target: PCSK9; (+) strand; PAM type: NRG; PAM sequence: GGG
gtcacagtcagcagtgagct

SEQ ID NO: 17698 - DNA, 20 bp, Artificial Sequence
  Description of Artificial Sequence: Synthetic oligonucleotide
  Target: PCSK9; (+) strand; PAM type: NRG; PAM sequence: GGG
tcacagtcagcagtgagctg

SEQ ID NO: 17699 - DNA, 20 bp, Artificial Sequence
  Description of Artificial Sequence: Synthetic oligonucleotide
  Target: PCSK9; (+) strand; PAM type: NRG; PAM sequence: CAG
agcagtgagctggggccatg

SEQ ID NO: 17700 - DNA, 20 bp, Artificial Sequence
  Description of Artificial Sequence: Synthetic oligonucleotide
  Target: PCSK9; (+) strand; PAM type: NRG; PAM sequence: AGG
gcagtgagctggggccatgc

SEQ ID NO: 17701 - DNA, 20 bp, Artificial Sequence
  Description of Artificial Sequence: Synthetic oligonucleotide
  Target: PCSK9; (+) strand; PAM type: NRG; PAM sequence: GGG
cagtgagctggggccatgca

SEQ ID NO: 17702 - DNA, 20 bp, Artificial Sequence
  Description of Artificial Sequence: Synthetic oligonucleotide
  Target: PCSK9; (+) strand; PAM type: NRG; PAM sequence: GGG
agtgagctggggccatgcag

SEQ ID NO: 17703 - DNA, 20 bp, Artificial Sequence
  Description of Artificial Sequence: Synthetic oligonucleotide
  Target: PCSK9; (+) strand; PAM type: NRG; PAM sequence: TGG
gctggggccatgcaggggtc

SEQ ID NO: 17704 - DNA, 20 bp, Artificial Sequence
  Description of Artificial Sequence: Synthetic oligonucleotide
  Target: PCSK9; (+) strand; PAM type: NRG; PAM sequence: CAG
gccatgcaggggtctggcct

SEQ ID NO: 17705 - DNA, 20 bp, Artificial Sequence
  Description of Artificial Sequence: Synthetic oligonucleotide
  Target: PCSK9; (+) strand; PAM type: NRG; PAM sequence: GAG
catgcaggggtctggcctca

SEQ ID NO: 17706 - DNA, 20 bp, Artificial Sequence
  Description of Artificial Sequence: Synthetic oligonucleotide
  Target: PCSK9; (+) strand; PAM type: NRG; PAM sequence: AGG
atgcaggggtctggcctcag

SEQ ID NO: 17707 - DNA, 20 bp, Artificial Sequence
  Description of Artificial Sequence: Synthetic oligonucleotide
  Target: PCSK9; (+) strand; PAM type: NRG; PAM sequence: GAG
gcaggggtctggcctcagag

SEQ ID NO: 17708 - DNA, 20 bp, Artificial Sequence
  Description of Artificial Sequence: Synthetic oligonucleotide
  Target: PCSK9; (+) strand; PAM type: NRG; PAM sequence: TGG
ggtctggcctcagaggagtg

SEQ ID NO: 17709 - DNA, 20 bp, Artificial Sequence
  Description of Artificial Sequence: Synthetic oligonucleotide
  Target: PCSK9; (+) strand; PAM type: NRG; PAM sequence: TGG
ggcctcagaggagtgtggtc

SEQ ID NO: 17710 - DNA, 20 bp, Artificial Sequence
  Description of Artificial Sequence: Synthetic oligonucleotide
  Target: PCSK9; (+) strand; PAM type: NRG; PAM sequence: TGG
cagaggagtgtggtctggcc

SEQ ID NO: 17711 - DNA, 20 bp, Artificial Sequence
  Description of Artificial Sequence: Synthetic oligonucleotide
  Target: PCSK9; (+) strand; PAM type: NRG; PAM sequence: TGG
tggatctgaacctctcactg

SEQ ID NO: 17712 - DNA, 20 bp, Artificial Sequence
  Description of Artificial Sequence: Synthetic oligonucleotide
  Target: PCSK9; (+) strand; PAM type: NRG; PAM sequence: TAG
ctgaacctctcactgtggcc

SEQ ID NO: 17713 - DNA, 20 bp, Artificial Sequence
  Description of Artificial Sequence: Synthetic oligonucleotide
  Target: PCSK9; (+) strand; PAM type: NRG; PAM sequence: GAG
ctcactgtggcctagctgct

SEQ ID NO: 17714 - DNA, 20 bp, Artificial Sequence
  Description of Artificial Sequence: Synthetic oligonucleotide
  Target: PCSK9; (+) strand; PAM type: NRG; PAM sequence: GAG
tgtggcctagctgctgagct

SEQ ID NO: 17715 - DNA, 20 bp, Artificial Sequence
  Description of Artificial Sequence: Synthetic oligonucleotide
  Target: PCSK9; (+) strand; PAM type: NRG; PAM sequence: AAG
ggcctagctgctgagctgag

SEQ ID NO: 17716 - DNA, 20 bp, Artificial Sequence
  Description of Artificial Sequence: Synthetic oligonucleotide
  Target: PCSK9; (+) strand; PAM type: NRG; PAM sequence: GAG
cctagctgctgagctgagaa

SEQ ID NO: 17717 - DNA, 20 bp, Artificial Sequence
  Description of Artificial Sequence: Synthetic oligonucleotide
  Target: PCSK9; (+) strand; PAM type: NRG; PAM sequence: AAG
ctgagctgagaagagatgac

SEQ ID NO: 17718 - DNA, 20 bp, Artificial Sequence
  Description of Artificial Sequence: Synthetic oligonucleotide
  Target: PCSK9; (+) strand; PAM type: NRG; PAM sequence: AGG
tgagctgagaagagatgaca

SEQ ID NO: 17719 - DNA, 20 bp, Artificial Sequence
  Description of Artificial Sequence: Synthetic oligonucleotide
  Target: PCSK9; (+) strand; PAM type: NRG; PAM sequence: TGG
agaagagatgacaaggacct

SEQ ID NO: 17720 - DNA, 20 bp, Artificial Sequence
  Description of Artificial Sequence: Synthetic oligonucleotide
  Target: PCSK9; (+) strand; PAM type: NRG; PAM sequence: GGG
gaagagatgacaaggacctt

SEQ ID NO: 17721 - DNA, 20 bp, Artificial Sequence
  Description of Artificial Sequence: Synthetic oligonucleotide
  Target: PCSK9; (+) strand; PAM type: NRG; PAM sequence: CAG
gagatgacaaggaccttggg

SEQ ID NO: 17722 - DNA, 20 bp, Artificial Sequence
  Description of Artificial Sequence: Synthetic oligonucleotide
  Target: PCSK9; (+) strand; PAM type: NRG; PAM sequence: AAG
atgacaaggaccttgggcag

SEQ ID NO: 17723 - DNA, 20 bp, Artificial Sequence
  Description of Artificial Sequence: Synthetic oligonucleotide
  Target: PCSK9; (+) strand; PAM type: NRG; PAM sequence: CAG
acaaggaccttgggcagaag

SEQ ID NO: 17724 - DNA, 20 bp, Artificial Sequence
  Description of Artificial Sequence: Synthetic oligonucleotide
  Target: PCSK9; (+) strand; PAM type: NRG; PAM sequence: AGG
caaggaccttgggcagaagc

SEQ ID NO: 17725 - DNA, 20 bp, Artificial Sequence
  Description of Artificial Sequence: Synthetic oligonucleotide
  Target: PCSK9; (+) strand; PAM type: NRG; PAM sequence: GGG
aaggaccttgggcagaagca

SEQ ID NO: 17726 - DNA, 20 bp, Artificial Sequence
  Description of Artificial Sequence: Synthetic oligonucleotide
  Target: PCSK9; (+) strand; PAM type: NRG; PAM sequence: GAG
ggaccttgggcagaagcagg

SEQ ID NO: 17727 - DNA, 20 bp, Artificial Sequence
  Description of Artificial Sequence: Synthetic oligonucleotide
  Target: PCSK9; (+) strand; PAM type: NRG; PAM sequence: TGG
ttgggcagaagcagggagac

SEQ ID NO: 17728 - DNA, 20 bp, Artificial Sequence
  Description of Artificial Sequence: Synthetic oligonucleotide
  Target: PCSK9; (+) strand; PAM type: NRG; PAM sequence: GAG
gggcagaagcagggagactg

SEQ ID NO: 17729 - DNA, 20 bp, Artificial Sequence
  Description of Artificial Sequence: Synthetic oligonucleotide
  Target: PCSK9; (+) strand; PAM type: NRG; PAM sequence: AGG
ggcagaagcagggagactgg

SEQ ID NO: 17730 - DNA, 20 bp, Artificial Sequence
  Description of Artificial Sequence: Synthetic oligonucleotide
  Target: PCSK9; (+) strand; PAM type: NRG; PAM sequence: GGG
gcagaagcagggagactgga

SEQ ID NO: 17731 - DNA, 20 bp, Artificial Sequence
  Description of Artificial Sequence: Synthetic oligonucleotide
  Target: PCSK9; (+) strand; PAM type: NRG; PAM sequence: GAG
agaagcagggagactggagg

SEQ ID NO: 17732 - DNA, 20 bp, Artificial Sequence
  Description of Artificial Sequence: Synthetic oligonucleotide
  Target: PCSK9; (+) strand; PAM type: NRG; PAM sequence: AGG
gaagcagggagactggaggg

SEQ ID NO: 17733 - DNA, 20 bp, Artificial Sequence
  Description of Artificial Sequence: Synthetic oligonucleotide
  Target: PCSK9; (+) strand; PAM type: NRG; PAM sequence: CGG
gcagggagactggagggagg

SEQ ID NO: 17734 - DNA, 20 bp, Artificial Sequence
  Description of Artificial Sequence: Synthetic oligonucleotide
  Target: PCSK9; (+) strand; PAM type: NRG; PAM sequence: TGG
gggagactggagggaggcgg

SEQ ID NO: 17735 - DNA, 20 bp, Artificial Sequence
  Description of Artificial Sequence: Synthetic oligonucleotide
  Target: PCSK9; (+) strand; PAM type: NRG; PAM sequence: GAG
gagactggagggaggcggtg

SEQ ID NO: 17736 - DNA, 20 bp, Artificial Sequence
  Description of Artificial Sequence: Synthetic oligonucleotide
  Target: PCSK9; (+) strand; PAM type: NRG; PAM sequence: AGG
agactggagggaggcggtgg

SEQ ID NO: 17737 - DNA, 20 bp, Artificial Sequence
  Description of Artificial Sequence: Synthetic oligonucleotide
  Target: PCSK9; (+) strand; PAM type: NRG; PAM sequence: GGG
gactggagggaggcggtgga

SEQ ID NO: 17738 - DNA, 20 bp, Artificial Sequence
  Description of Artificial Sequence: Synthetic oligonucleotide
  Target: PCSK9; (+) strand; PAM type: NRG; PAM sequence: CAG
gagggaggcggtggagggtc

SEQ ID NO: 17739 - DNA, 20 bp, Artificial Sequence
  Description of Artificial Sequence: Synthetic oligonucleotide
  Target: PCSK9; (+) strand; PAM type: NRG; PAM sequence: AGG
agggaggcggtggagggtcc

SEQ ID NO: 17740 - DNA, 20 bp, Artificial Sequence
  Description of Artificial Sequence: Synthetic oligonucleotide
  Target: PCSK9; (+) strand; PAM type: NRG; PAM sequence: TGG
gcggtggagggtccaggcgt

SEQ ID NO: 17741 - DNA, 20 bp, Artificial Sequence
  Description of Artificial Sequence: Synthetic oligonucleotide
  Target: PCSK9; (+) strand; PAM type: NRG; PAM sequence: GGG
cggtggagggtccaggcgtt

SEQ ID NO: 17742 - DNA, 20 bp, Artificial Sequence
  Description of Artificial Sequence: Synthetic oligonucleotide
  Target: PCSK9; (+) strand; PAM type: NRG; PAM sequence: GGG
ggtggagggtccaggcgttg

SEQ ID NO: 17743 - DNA, 20 bp, Artificial Sequence
  Description of Artificial Sequence: Synthetic oligonucleotide
  Target: PCSK9; (+) strand; PAM type: NRG; PAM sequence: CGG
ggagggtccaggcgttgggg

SEQ ID NO: 17744 - DNA, 20 bp, Artificial Sequence
  Description of Artificial Sequence: Synthetic oligonucleotide
  Target: PCSK9; (+) strand; PAM type: NRG; PAM sequence: GGG
gagggtccaggcgttggggc

SEQ ID NO: 17745 - DNA, 20 bp, Artificial Sequence
  Description of Artificial Sequence: Synthetic oligonucleotide
  Target: PCSK9; (+) strand; PAM type: NRG; PAM sequence: GGG
agggtccaggcgttggggcg

SEQ ID NO: 17746 - DNA, 20 bp, Artificial Sequence
  Description of Artificial Sequence: Synthetic oligonucleotide
  Target: PCSK9; (+) strand; PAM type: NRG; PAM sequence: CAG
ccaggcgttggggcggggct

SEQ ID NO: 17747 - DNA, 20 bp, Artificial Sequence
  Description of Artificial Sequence: Synthetic oligonucleotide
  Target: PCSK9; (+) strand; PAM type: NRG; PAM sequence: AGG
caggcgttggggcggggctc

SEQ ID NO: 17748 - DNA, 20 bp, Artificial Sequence
  Description of Artificial Sequence: Synthetic oligonucleotide
  Target: PCSK9; (+) strand; PAM type: NRG; PAM sequence: TGG
cgttggggcggggctcaggc

SEQ ID NO: 17749 - DNA, 20 bp, Artificial Sequence
  Description of Artificial Sequence: Synthetic oligonucleotide
  Target: PCSK9; (+) strand; PAM type: NRG; PAM sequence: GAG
ttggggcggggctcaggctg

SEQ ID NO: 17750 - DNA, 20 bp, Artificial Sequence
  Description of Artificial Sequence: Synthetic oligonucleotide
  Target: PCSK9; (+) strand; PAM type: NRG; PAM sequence: AAG
ggggctcaggctggagtctg

SEQ ID NO: 17751 - DNA, 20 bp, Artificial Sequence
  Description of Artificial Sequence: Synthetic oligonucleotide
  Target: PCSK9; (+) strand; PAM type: NRG; PAM sequence: AGG
gggctcaggctggagtctga

SEQ ID NO: 17752 - DNA, 20 bp, Artificial Sequence
  Description of Artificial Sequence: Synthetic oligonucleotide
  Target: PCSK9; (+) strand; PAM type: NRG; PAM sequence: GGG
ggctcaggctggagtctgaa

SEQ ID NO: 17753 - DNA, 20 bp, Artificial Sequence
  Description of Artificial Sequence: Synthetic oligonucleotide
  Target: PCSK9; (+) strand; PAM type: NRG; PAM sequence: GAG
ctcaggctggagtctgaagg

SEQ ID NO: 17754 - DNA, 20 bp, Artificial Sequence
  Description of Artificial Sequence: Synthetic oligonucleotide
  Target: PCSK9; (+) strand; PAM type: NRG; PAM sequence: CAG
tggagtctgaagggagcctg

SEQ ID NO: 17755 - DNA, 20 bp, Artificial Sequence
  Description of Artificial Sequence: Synthetic oligonucleotide
  Target: PCSK9; (+) strand; PAM type: NRG; PAM sequence: AGG
ggagtctgaagggagcctgc

SEQ ID NO: 17756 - DNA, 20 bp, Artificial Sequence
  Description of Artificial Sequence: Synthetic oligonucleotide
  Target: PCSK9; (+) strand; PAM type: NRG; PAM sequence: TGG
ctgaagggagcctgcaggcc

SEQ ID NO: 17757 - DNA, 20 bp, Artificial Sequence
  Description of Artificial Sequence: Synthetic oligonucleotide
  Target: PCSK9; (+) strand; PAM type: NRG; PAM sequence: TGG
aagggagcctgcaggcctgg

SEQ ID NO: 17758 - DNA, 20 bp, Artificial Sequence
  Description of Artificial Sequence: Synthetic oligonucleotide
  Target: PCSK9; (+) strand; PAM type: NRG; PAM sequence: GGG
agggagcctgcaggcctggt

SEQ ID NO: 17759 - DNA, 20 bp, Artificial Sequence
  Description of Artificial Sequence: Synthetic oligonucleotide
  Target: PCSK9; (+) strand; PAM type: NRG; PAM sequence: TGG
gagcctgcaggcctggtggg

SEQ ID NO: 17760 - DNA, 20 bp, Artificial Sequence
  Description of Artificial Sequence: Synthetic oligonucleotide
  Target: PCSK9; (+) strand; PAM type: NRG; PAM sequence: TGG
gcaggcctggtgggtggatg

SEQ ID NO: 17761 - DNA, 20 bp, Artificial Sequence
  Description of Artificial Sequence: Synthetic oligonucleotide
  Target: PCSK9; (+) strand; PAM type: NRG; PAM sequence: GGG
caggcctggtgggtggatgt

SEQ ID NO: 17762 - DNA, 20 bp, Artificial Sequence
  Description of Artificial Sequence: Synthetic oligonucleotide
  Target: PCSK9; (+) strand; PAM type: NRG; PAM sequence: TGG
gcctggtgggtggatgtggg

SEQ ID NO: 17763 - DNA, 20 bp, Artificial Sequence
  Description of Artificial Sequence: Synthetic oligonucleotide
  Target: PCSK9; (+) strand; PAM type: NRG; PAM sequence: GGG
cctggtgggtggatgtgggt

SEQ ID NO: 17764 - DNA, 20 bp, Artificial Sequence
  Description of Artificial Sequence: Synthetic oligonucleotide
  Target: PCSK9; (+) strand; PAM type: NRG; PAM sequence: GAG
tggtgggtggatgtgggtgg

SEQ ID NO: 17765 - DNA, 20 bp, Artificial Sequence
  Description of Artificial Sequence: Synthetic oligonucleotide
  Target: PCSK9; (+) strand; PAM type: NRG; PAM sequence: GAG
gtgggtggatgtgggtggga

SEQ ID NO: 17766 - DNA, 20 bp, Artificial Sequence
  Description of Artificial Sequence: Synthetic oligonucleotide
  Target: PCSK9; (+) strand; PAM type: NRG; PAM sequence: AGG
tgggtggatgtgggtgggag

SEQ ID NO: 17767 - DNA, 20 bp, Artificial Sequence
  Description of Artificial Sequence: Synthetic oligonucleotide
  Target: PCSK9; (+) strand; PAM type: NRG; PAM sequence: GGG
gggtggatgtgggtgggaga

SEQ ID NO: 17768 - DNA, 20 bp, Artificial Sequence
  Description of Artificial Sequence: Synthetic oligonucleotide
  Target: PCSK9; (+) strand; PAM type: NRG; PAM sequence: GGG
ggtggatgtgggtgggagag

SEQ ID NO: 17769 - DNA, 20 bp, Artificial Sequence
  Description of Artificial Sequence: Synthetic oligonucleotide
  Target: PCSK9; (+) strand; PAM type: NRG; PAM sequence: GGG
gtggatgtgggtgggagagg

SEQ ID NO: 17770 - DNA, 20 bp, Artificial Sequence
  Description of Artificial Sequence: Synthetic oligonucleotide
  Target: PCSK9; (+) strand; PAM type: NRG; PAM sequence: GAG
ggatgtgggtgggagagggg

SEQ ID NO: 17771 - DNA, 20 bp, Artificial Sequence
  Description of Artificial Sequence: Synthetic oligonucleotide
  Target: PCSK9; (+) strand; PAM type: NRG; PAM sequence: AGG
gatgtgggtgggagaggggg

SEQ ID NO: 17772 - DNA, 20 bp, Artificial Sequence
  Description of Artificial Sequence: Synthetic oligonucleotide
  Target: PCSK9; (+) strand; PAM type: NRG; PAM sequence: TGG
tgggtgggagagggggagga

SEQ ID NO: 17773 - DNA, 20 bp, Artificial Sequence
  Description of Artificial Sequence: Synthetic oligonucleotide
  Target: PCSK9; (+) strand; PAM type: NRG; PAM sequence: AAG
gagagggggaggatggcacc

SEQ ID NO: 17774 - DNA, 20 bp, Artificial Sequence
  Description of Artificial Sequence: Synthetic oligonucleotide
  Target: PCSK9; (+) strand; PAM type: NRG; PAM sequence: AGG
agagggggaggatggcacca

SEQ ID NO: 17775 - DNA, 20 bp, Artificial Sequence
  Description of Artificial Sequence: Synthetic oligonucleotide
  Target: PCSK9; (+) strand; PAM type: NRG; PAM sequence: CGG
gggaggatggcaccaaggct

SEQ ID NO: 17776 - DNA, 20 bp, Artificial Sequence
  Description of Artificial Sequence: Synthetic oligonucleotide
  Target: PCSK9; (+) strand; PAM type: NRG; PAM sequence: GGG
ggaggatggcaccaaggctc

SEQ ID NO: 17777 - DNA, 20 bp, Artificial Sequence
  Description of Artificial Sequence: Synthetic oligonucleotide
  Target: PCSK9; (+) strand; PAM type: NRG; PAM sequence: TGG
ggcaccaaggctcgggcccc

SEQ ID NO: 17778 - DNA, 20 bp, Artificial Sequence
  Description of Artificial Sequence: Synthetic oligonucleotide
  Target: PCSK9; (+) strand; PAM type: NRG; PAM sequence: CAG
ccaaggctcgggcccctgga

SEQ ID NO: 17779 - DNA, 20 bp, Artificial Sequence
  Description of Artificial Sequence: Synthetic oligonucleotide
  Target: PCSK9; (+) strand; PAM type: NRG; PAM sequence: TGG
ggctcgggcccctggacaga

SEQ ID NO: 17780 - DNA, 20 bp, Artificial Sequence
  Description of Artificial Sequence: Synthetic oligonucleotide
  Target: PCSK9; (+) strand; PAM type: NRG; PAM sequence: GAG
ctcgggcccctggacagatg

SEQ ID NO: 17781 - DNA, 20 bp, Artificial Sequence
  Description of Artificial Sequence: Synthetic oligonucleotide
  Target: PCSK9; (+) strand; PAM type: NRG; PAM sequence: AAG
ggacagatggagttgccatt

SEQ ID NO: 17782 - DNA, 20 bp, Artificial Sequence
  Description of Artificial Sequence: Synthetic oligonucleotide
  Target: PCSK9; (+) strand; PAM type: NRG; PAM sequence: TGG
cagatggagttgccattaag

SEQ ID NO: 17783 - DNA, 20 bp, Artificial Sequence
  Description of Artificial Sequence: Synthetic oligonucleotide
  Target: PCSK9; (+) strand; PAM type: NRG; PAM sequence: GGG
agatggagttgccattaagt

SEQ ID NO: 17784 - DNA, 20 bp, Artificial Sequence
  Description of Artificial Sequence: Synthetic oligonucleotide
  Target: PCSK9; (+) strand; PAM type: NRG; PAM sequence: TGG
ggagttgccattaagtggga

SEQ ID NO: 17785 - DNA, 20 bp, Artificial Sequence
  Description of Artificial Sequence: Synthetic oligonucleotide
  Target: PCSK9; (+) strand; PAM type: NRG; PAM sequence: GGG
gagttgccattaagtgggat

SEQ ID NO: 17786 - DNA, 20 bp, Artificial Sequence
  Description of Artificial Sequence: Synthetic oligonucleotide
  Target: PCSK9; (+) strand; PAM type: NRG; PAM sequence: GGG
agttgccattaagtgggatg

SEQ ID NO: 17787 - DNA, 20 bp, Artificial Sequence
  Description of Artificial Sequence: Synthetic oligonucleotide
  Target: PCSK9; (+) strand; PAM type: NRG; PAM sequence: CAG
tgccattaagtgggatgggg

SEQ ID NO: 17788 - DNA, 20 bp, Artificial Sequence
  Description of Artificial Sequence: Synthetic oligonucleotide
  Target: PCSK9; (+) strand; PAM type: NRG; PAM sequence: AGG
gccattaagtgggatggggc

SEQ ID NO: 17789 - DNA, 20 bp, Artificial Sequence
  Description of Artificial Sequence: Synthetic oligonucleotide
  Target: PCSK9; (+) strand; PAM type: NRG; PAM sequence: TGG
aagtgggatggggcaggcta

SEQ ID NO: 17790 - DNA, 20 bp, Artificial Sequence
  Description of Artificial Sequence: Synthetic oligonucleotide
  Target: PCSK9; (+) strand; PAM type: NRG; PAM sequence: GGG
agtgggatggggcaggctat

SEQ ID NO: 17791 - DNA, 20 bp, Artificial Sequence
  Description of Artificial Sequence: Synthetic oligonucleotide
  Target: PCSK9; (+) strand; PAM type: NRG; PAM sequence: GGG
gtgggatggggcaggctatg

SEQ ID NO: 17792 - DNA, 20 bp, Artificial Sequence
  Description of Artificial Sequence: Synthetic oligonucleotide
  Target: PCSK9; (+) strand; PAM type: NRG; PAM sequence: CAG
ggggcaggctatggggccat

SEQ ID NO: 17793 - DNA, 20 bp, Artificial Sequence
  Description of Artificial Sequence: Synthetic oligonucleotide
  Target: PCSK9; (+) strand; PAM type: NRG; PAM sequence: CAG
ggctatggggccatcagttt

SEQ ID NO: 17794 - DNA, 20 bp, Artificial Sequence
  Description of Artificial Sequence: Synthetic oligonucleotide
  Target: PCSK9; (+) strand; PAM type: NRG; PAM sequence: GAG
ctatggggccatcagtttca

SEQ ID NO: 17795 - DNA, 20 bp, Artificial Sequence
  Description of Artificial Sequence: Synthetic oligonucleotide
  Target: PCSK9; (+) strand; PAM type: NRG; PAM sequence: AGG
tatggggccatcagtttcag

SEQ ID NO: 17796 - DNA, 20 bp, Artificial Sequence
  Description of Artificial Sequence: Synthetic oligonucleotide
  Target: PCSK9; (+) strand; PAM type: NRG; PAM sequence: GGG
atggggccatcagtttcaga

SEQ ID NO: 17797 - DNA, 20 bp, Artificial Sequence
  Description of Artificial Sequence: Synthetic oligonucleotide
  Target: PCSK9; (+) strand; PAM type: NRG; PAM sequence: GAG
gccatcagtttcagagggat

SEQ ID NO: 17798 - DNA, 20 bp, Artificial Sequence
  Description of Artificial Sequence: Synthetic oligonucleotide
  Target: PCSK9; (+) strand; PAM type: NRG; PAM sequence: TGG
cagtttcagagggatgagtt

SEQ ID NO: 17799 - DNA, 20 bp, Artificial Sequence
  Description of Artificial Sequence: Synthetic oligonucleotide
  Target: PCSK9; (+) strand; PAM type: NRG; PAM sequence: TGG
cagagggatgagtttggcac

SEQ ID NO: 17800 - DNA, 20 bp, Artificial Sequence
  Description of Artificial Sequence: Synthetic oligonucleotide
  Target: PCSK9; (+) strand; PAM type: NRG; PAM sequence: TGG
ggatgagtttggcactggca

SEQ ID NO: 17801 - DNA, 20 bp, Artificial Sequence
  Description of Artificial Sequence: Synthetic oligonucleotide
  Target: PCSK9; (+) strand; PAM type: NRG; PAM sequence: TAG
tgagtttggcactggcatgg

SEQ ID NO: 17802 - DNA, 20 bp, Artificial Sequence
  Description of Artificial Sequence: Synthetic oligonucleotide
  Target: PCSK9; (+) strand; PAM type: NRG; PAM sequence: AGG
gagtttggcactggcatggt

SEQ ID NO: 17803 - DNA, 20 bp, Artificial Sequence
  Description of Artificial Sequence: Synthetic oligonucleotide
  Target: PCSK9; (+) strand; PAM type: NRG; PAM sequence: CGG
taggcatctgtctatctcca

SEQ ID NO: 17804 - DNA, 20 bp, Artificial Sequence
  Description of Artificial Sequence: Synthetic oligonucleotide
  Target: PCSK9; (+) strand; PAM type: NRG; PAM sequence: CAG
tatctccacggccctcaaac

SEQ ID NO: 17805 - DNA, 20 bp, Artificial Sequence
  Description of Artificial Sequence: Synthetic oligonucleotide
  Target: PCSK9; (+) strand; PAM type: NRG; PAM sequence: AGG
atctccacggccctcaaacc

SEQ ID NO: 17806 - DNA, 20 bp, Artificial Sequence
  Description of Artificial Sequence: Synthetic oligonucleotide
  Target: PCSK9; (+) strand; PAM type: NRG; PAM sequence: AAG
cggccctcaaaccaggcatg

SEQ ID NO: 17807 - DNA, 20 bp, Artificial Sequence
  Description of Artificial Sequence: Synthetic oligonucleotide
  Target: PCSK9; (+) strand; PAM type: NRG; PAM sequence: CAG
ccctcaaaccaggcatgaag

SEQ ID NO: 17808 - DNA, 20 bp, Artificial Sequence
  Description of Artificial Sequence: Synthetic oligonucleotide
  Target: PCSK9; (+) strand; PAM type: NRG; PAM sequence: AGG
cctcaaaccaggcatgaagc

SEQ ID NO: 17809 - DNA, 20 bp, Artificial Sequence
  Description of Artificial Sequence: Synthetic oligonucleotide
  Target: PCSK9; (+) strand; PAM type: NRG; PAM sequence: GAG
tcaaaccaggcatgaagcag

SEQ ID NO: 17810 - DNA, 20 bp, Artificial Sequence
  Description of Artificial Sequence: Synthetic oligonucleotide
  Target: PCSK9; (+) strand; PAM type: NRG; PAM sequence: TGG
gaagcaggagctcacgtgtt

SEQ ID NO: 17811 - DNA, 20 bp, Artificial Sequence
  Description of Artificial Sequence: Synthetic oligonucleotide
  Target: PCSK9; (+) strand; PAM type: NRG; PAM sequence: CAG
caggagctcacgtgtttggt

SEQ ID NO: 17812 - DNA, 20 bp, Artificial Sequence
  Description of Artificial Sequence: Synthetic oligonucleotide
  Target: PCSK9; (+) strand; PAM type: NRG; PAM sequence: TGG
ctcacgtgtttggtcagcca

SEQ ID NO: 17813 - DNA, 20 bp, Artificial Sequence
  Description of Artificial Sequence: Synthetic oligonucleotide
  Target: PCSK9; (+) strand; PAM type: NRG; PAM sequence: CAG
gtgtttggtcagccatggtg

SEQ ID NO: 17814 - DNA, 20 bp, Artificial Sequence
  Description of Artificial Sequence: Synthetic oligonucleotide
  Target: PCSK9; (+) strand; PAM type: NRG; PAM sequence: TGG
agccatggtgcagaaccgcc

SEQ ID NO: 17815 - DNA, 20 bp, Artificial Sequence
  Description of Artificial Sequence: Synthetic oligonucleotide
  Target: PCSK9; (+) strand; PAM type: NRG; PAM sequence: GGG
gccatggtgcagaaccgcct

SEQ ID NO: 17816 - DNA, 20 bp, Artificial Sequence
  Description of Artificial Sequence: Synthetic oligonucleotide
  Target: PCSK9; (+) strand; PAM type: NRG; PAM sequence: TGG
atggtgcagaaccgcctggg

SEQ ID NO: 17817 - DNA, 20 bp, Artificial Sequence
  Description of Artificial Sequence: Synthetic oligonucleotide
  Target: PCSK9; (+) strand; PAM type: NRG; PAM sequence: GGG
tggtgcagaaccgcctgggt

SEQ ID NO: 17818 - DNA, 20 bp, Artificial Sequence
  Description of Artificial Sequence: Synthetic oligonucleotide
  Target: PCSK9; (+) strand; PAM type: NRG; PAM sequence: GAG
gtgcagaaccgcctgggtgg

SEQ ID NO: 17819 - DNA, 20 bp, Artificial Sequence
  Description of Artificial Sequence: Synthetic oligonucleotide
  Target: PCSK9; (+) strand; PAM type: NRG; PAM sequence: AGG
tgcagaaccgcctgggtggg

SEQ ID NO: 17820 - DNA, 20 bp, Artificial Sequence
  Description of Artificial Sequence: Synthetic oligonucleotide
  Target: PCSK9; (+) strand; PAM type: NRG; PAM sequence: CGG
aaccgcctgggtgggaggtg

SEQ ID NO: 17821 - DNA, 20 bp, Artificial Sequence
  Description of Artificial Sequence: Synthetic oligonucleotide
  Target: PCSK9; (+) strand; PAM type: NRG; PAM sequence: GGG
accgcctgggtgggaggtgc

SEQ ID NO: 17822 - DNA, 20 bp, Artificial Sequence
  Description of Artificial Sequence: Synthetic oligonucleotide
  Target: PCSK9; (+) strand; PAM type: NRG; PAM sequence: GGG
ccgcctgggtgggaggtgcg

SEQ ID NO: 17823 - DNA, 20 bp, Artificial Sequence
  Description of Artificial Sequence: Synthetic oligonucleotide
  Target: PCSK9; (+) strand; PAM type: NRG; PAM sequence: TGG
cctgggtgggaggtgcgggg

SEQ ID NO: 17824 - DNA, 20 bp, Artificial Sequence
  Description of Artificial Sequence: Synthetic oligonucleotide
  Target: PCSK9; (+) strand; PAM type: NRG; PAM sequence: GGG
ctgggtgggaggtgcggggt

SEQ ID NO: 17825 - DNA, 20 bp, Artificial Sequence
  Description of Artificial Sequence: Synthetic oligonucleotide
  Target: PCSK9; (+) strand; PAM type: NRG; PAM sequence: GAG
gggtgggaggtgcggggtgg

SEQ ID NO: 17826 - DNA, 20 bp, Artificial Sequence
  Description of Artificial Sequence: Synthetic oligonucleotide
  Target: PCSK9; (+) strand; PAM type: NRG; PAM sequence: CGG
ggtgcggggtgggagataca

SEQ ID NO: 17827 - DNA, 20 bp, Artificial Sequence
  Description of Artificial Sequence: Synthetic oligonucleotide
  Target: PCSK9; (+) strand; PAM type: NRG; PAM sequence: TGG
atacacggttgtgtcccaaa

SEQ ID NO: 17828 - DNA, 20 bp, Artificial Sequence
  Description of Artificial Sequence: Synthetic oligonucleotide
  Target: PCSK9; (+) strand; PAM type: NRG; PAM sequence: GGG
tacacggttgtgtcccaaat

SEQ ID NO: 17829 - DNA, 20 bp, Artificial Sequence
  Description of Artificial Sequence: Synthetic oligonucleotide
  Target: PCSK9; (+) strand; PAM type: NRG; PAM sequence: GAG
ttgtgtcccaaatgggctct

SEQ ID NO: 17830 - DNA, 20 bp, Artificial Sequence
  Description of Artificial Sequence: Synthetic oligonucleotide
  Target: PCSK9; (+) strand; PAM type: NRG; PAM sequence: CAG
gtcccaaatgggctctgagc

SEQ ID NO: 17831 - DNA, 20 bp, Artificial Sequence
  Description of Artificial Sequence: Synthetic oligonucleotide
  Target: PCSK9; (+) strand; PAM type: NRG; PAM sequence: GAG
caaatgggctctgagccagc

SEQ ID NO: 17832 - DNA, 20 bp, Artificial Sequence
  Description of Artificial Sequence: Synthetic oligonucleotide
  Target: PCSK9; (+) strand; PAM type: NRG; PAM sequence: AGG
aaatgggctctgagccagcg

SEQ ID NO: 17833 - DNA, 20 bp, Artificial Sequence
  Description of Artificial Sequence: Synthetic oligonucleotide
  Target: PCSK9; (+) strand; PAM type: NRG; PAM sequence: GGG
aatgggctctgagccagcga

SEQ ID NO: 17834 - DNA, 20 bp, Artificial Sequence
  Description of Artificial Sequence: Synthetic oligonucleotide
  Target: PCSK9; (+) strand; PAM type: NRG; PAM sequence: TGG
agcgagggccgtctgcactt

SEQ ID NO: 17835 - DNA, 20 bp, Artificial Sequence
  Description of Artificial Sequence: Synthetic oligonucleotide
  Target: PCSK9; (+) strand; PAM type: NRG; PAM sequence: CAG
ccgtctgcactttggcctca

SEQ ID NO: 17836 - DNA, 20 bp, Artificial Sequence
  Description of Artificial Sequence: Synthetic oligonucleotide
  Target: PCSK9; (+) strand; PAM type: NRG; PAM sequence: AAG
tctgcactttggcctcacag

SEQ ID NO: 17837 - DNA, 20 bp, Artificial Sequence
  Description of Artificial Sequence: Synthetic oligonucleotide
  Target: PCSK9; (+) strand; PAM type: NRG; PAM sequence: AGG
ctgcactttggcctcacaga

SEQ ID NO: 17838 - DNA, 20 bp, Artificial Sequence
  Description of Artificial Sequence: Synthetic oligonucleotide
  Target: PCSK9; (+) strand; PAM type: NRG; PAM sequence: CGG
ttggcctcacagaaggatgt

SEQ ID NO: 17839 - DNA, 20 bp, Artificial Sequence
  Description of Artificial Sequence: Synthetic oligonucleotide
  Target: PCSK9; (+) strand; PAM type: NRG; PAM sequence: GAG
ggcctcacagaaggatgtcg

SEQ ID NO: 17840 - DNA, 20 bp, Artificial Sequence
  Description of Artificial Sequence: Synthetic oligonucleotide
  Target: PCSK9; (+) strand; PAM type: NRG; PAM sequence: AGG
gcctcacagaaggatgtcgg

SEQ ID NO: 17841 - DNA, 20 bp, Artificial Sequence
  Description of Artificial Sequence: Synthetic oligonucleotide
  Target: PCSK9; (+) strand; PAM type: NRG; PAM sequence: GGG
cctcacagaaggatgtcgga

SEQ ID NO: 17842 - DNA, 20 bp, Artificial Sequence
  Description of Artificial Sequence: Synthetic oligonucleotide
  Target: PCSK9; (+) strand; PAM type: NRG; PAM sequence: GAG
tcacagaaggatgtcggagg

SEQ ID NO: 17843 - DNA, 20 bp, Artificial Sequence
  Description of Artificial Sequence: Synthetic oligonucleotide
  Target: PCSK9; (+) strand; PAM type: NRG; PAM sequence: AAG
ggatgtcggagggagaaatg

SEQ ID NO: 17844 - DNA, 20 bp, Artificial Sequence
  Description of Artificial Sequence: Synthetic oligonucleotide
  Target: PCSK9; (+) strand; PAM type: NRG; PAM sequence: TGG
tcggagggagaaatgaagtg

SEQ ID NO: 17845 - DNA, 20 bp, Artificial Sequence
  Description of Artificial Sequence: Synthetic oligonucleotide
  Target: PCSK9; (+) strand; PAM type: NRG; PAM sequence: GGG
cggagggagaaatgaagtgt

SEQ ID NO: 17846 - DNA, 20 bp, Artificial Sequence
  Description of Artificial Sequence: Synthetic oligonucleotide
  Target: PCSK9; (+) strand; PAM type: NRG; PAM sequence: TGG
agggagaaatgaagtgtggg

SEQ ID NO: 17847 - DNA, 20 bp, Artificial Sequence
  Description of Artificial Sequence: Synthetic oligonucleotide
  Target: PCSK9; (+) strand; PAM type: NRG; PAM sequence: GGG
gggagaaatgaagtgtgggt

SEQ ID NO: 17848 - DNA, 20 bp, Artificial Sequence
  Description of Artificial Sequence: Synthetic oligonucleotide
  Target: PCSK9; (+) strand; PAM type: NRG; PAM sequence: GGG
ggagaaatgaagtgtgggtg

SEQ ID NO: 17849 - DNA, 20 bp, Artificial Sequence
  Description of Artificial Sequence: Synthetic oligonucleotide
  Target: PCSK9; (+) strand; PAM type: NRG; PAM sequence: GGG
gagaaatgaagtgtgggtgg

SEQ ID NO: 17850 - DNA, 20 bp, Artificial Sequence
  Description of Artificial Sequence: Synthetic oligonucleotide
  Target: PCSK9; (+) strand; PAM type: NRG; PAM sequence: CGG
tgaagtgtgggtgggggtcc

SEQ ID NO: 17851 - DNA, 20 bp, Artificial Sequence
  Description of Artificial Sequence: Synthetic oligonucleotide
  Target: PCSK9; (+) strand; PAM type: NRG; PAM sequence: GGG
gaagtgtgggtgggggtccc

SEQ ID NO: 17852 - DNA, 20 bp, Artificial Sequence
  Description of Artificial Sequence: Synthetic oligonucleotide
  Target: PCSK9; (+) strand; PAM type: NRG; PAM sequence: TAG
gtgggggtcccgggccacgc

SEQ ID NO: 17853 - DNA, 20 bp, Artificial Sequence
  Description of Artificial Sequence: Synthetic oligonucleotide
  Target: PCSK9; (+) strand; PAM type: NRG; PAM sequence: CGG
gacatgtgctttcttttcct

SEQ ID NO: 17854 - DNA, 20 bp, Artificial Sequence
  Description of Artificial Sequence: Synthetic oligonucleotide
  Target: PCSK9; (+) strand; PAM type: NRG; PAM sequence: GGG
acatgtgctttcttttcctc

SEQ ID NO: 17855 - DNA, 20 bp, Artificial Sequence
  Description of Artificial Sequence: Synthetic oligonucleotide
  Target: PCSK9; (+) strand; PAM type: NRG; PAM sequence: TGG
gctttcttttcctcgggctc

SEQ ID NO: 17856 - DNA, 20 bp, Artificial Sequence
  Description of Artificial Sequence: Synthetic oligonucleotide
  Target: PCSK9; (+) strand; PAM type: NRG; PAM sequence: CAG
ttcttttcctcgggctctgg

SEQ ID NO: 17857 - DNA, 20 bp, Artificial Sequence
  Description of Artificial Sequence: Synthetic oligonucleotide
  Target: PCSK9; (+) strand; PAM type: NRG; PAM sequence: AGG
tcttttcctcgggctctggc

SEQ ID NO: 17858 - DNA, 20 bp, Artificial Sequence
  Description of Artificial Sequence: Synthetic oligonucleotide
  Target: PCSK9; (+) strand; PAM type: NRG; PAM sequence: TGG
cgggctctggcaggtgaccg

SEQ ID NO: 17859 - DNA, 20 bp, Artificial Sequence
  Description of Artificial Sequence: Synthetic oligonucleotide
  Target: PCSK9; (+) strand; PAM type: NRG; PAM sequence: GAG
ggcaggtgaccgtggcctgc

SEQ ID NO: 17860 - DNA, 20 bp, Artificial Sequence
  Description of Artificial Sequence: Synthetic oligonucleotide
  Target: PCSK9; (+) strand; PAM type: NRG; PAM sequence: AGG
gcaggtgaccgtggcctgcg

SEQ ID NO: 17861 - DNA, 20 bp, Artificial Sequence
  Description of Artificial Sequence: Synthetic oligonucleotide
  Target: PCSK9; (+) strand; PAM type: NRG; PAM sequence: GAG
aggtgaccgtggcctgcgag

SEQ ID NO: 17862 - DNA, 20 bp, Artificial Sequence
  Description of Artificial Sequence: Synthetic oligonucleotide
  Target: PCSK9; (+) strand; PAM type: NRG; PAM sequence: AGG
ggtgaccgtggcctgcgagg

SEQ ID NO: 17863 - DNA, 20 bp, Artificial Sequence
  Description of Artificial Sequence: Synthetic oligonucleotide
  Target: PCSK9; (+) strand; PAM type: NRG; PAM sequence: GGG
gtgaccgtggcctgcgagga

SEQ ID NO: 17864 - DNA, 20 bp, Artificial Sequence
  Description of Artificial Sequence: Synthetic oligonucleotide
  Target: PCSK9; (+) strand; PAM type: NRG; PAM sequence: TGG
ccgtggcctgcgaggagggc

SEQ ID NO: 17865 - DNA, 20 bp, Artificial Sequence
  Description of Artificial Sequence: Synthetic oligonucleotide
  Target: PCSK9; (+) strand; PAM type: NRG; PAM sequence: TGG
gaggagggctggaccctgac

SEQ ID NO: 17866 - DNA, 20 bp, Artificial Sequence
  Description of Artificial Sequence: Synthetic oligonucleotide
  Target: PCSK9; (+) strand; PAM type: NRG; PAM sequence: CAG
ggctggaccctgactggctg

SEQ ID NO: 17867 - DNA, 20 bp, Artificial Sequence
  Description of Artificial Sequence: Synthetic oligonucleotide
  Target: PCSK9; (+) strand; PAM type: NRG; PAM sequence: TGG
actggctgcagtgccctccc

SEQ ID NO: 17868 - DNA, 20 bp, Artificial Sequence
  Description of Artificial Sequence: Synthetic oligonucleotide
  Target: PCSK9; (+) strand; PAM type: NRG; PAM sequence: GGG
ctggctgcagtgccctccct

SEQ ID NO: 17869 - DNA, 20 bp, Artificial Sequence
  Description of Artificial Sequence: Synthetic oligonucleotide
  Target: PCSK9; (+) strand; PAM type: NRG; PAM sequence: TGG
ccctgggacctcccacgtcc

SEQ ID NO: 17870 - DNA, 20 bp, Artificial Sequence
  Description of Artificial Sequence: Synthetic oligonucleotide
  Target: PCSK9; (+) strand; PAM type: NRG; PAM sequence: GGG
cctgggacctcccacgtcct

SEQ ID NO: 17871 - DNA, 20 bp, Artificial Sequence
  Description of Artificial Sequence: Synthetic oligonucleotide
  Target: PCSK9; (+) strand; PAM type: NRG; PAM sequence: GGG
ctgggacctcccacgtcctg

SEQ ID NO: 17872 - DNA, 20 bp, Artificial Sequence
  Description of Artificial Sequence: Synthetic oligonucleotide
  Target: PCSK9; (+) strand; PAM type: NRG; PAM sequence: GGG
tgggacctcccacgtcctgg

SEQ ID NO: 17873 - DNA, 20 bp, Artificial Sequence
  Description of Artificial Sequence: Synthetic oligonucleotide
  Target: PCSK9; (+) strand; PAM type: NRG; PAM sequence: TAG
cgtcctgggggcctacgccg

SEQ ID NO: 17874 - DNA, 20 bp, Artificial Sequence
  Description of Artificial Sequence: Synthetic oligonucleotide
  Target: PCSK9; (+) strand; PAM type: NRG; PAM sequence: TAG
cgccgtagacaacacgtgtg

SEQ ID NO: 17875 - DNA, 20 bp, Artificial Sequence
  Description of Artificial Sequence: Synthetic oligonucleotide
  Target: PCSK9; (+) strand; PAM type: NRG; PAM sequence: CAG
gtagacaacacgtgtgtagt

SEQ ID NO: 17876 - DNA, 20 bp, Artificial Sequence
  Description of Artificial Sequence: Synthetic oligonucleotide
  Target: PCSK9; (+) strand; PAM type: NRG; PAM sequence: AGG
tagacaacacgtgtgtagtc

SEQ ID NO: 17877 - DNA, 20 bp, Artificial Sequence
  Description of Artificial Sequence: Synthetic oligonucleotide
  Target: PCSK9; (+) strand; PAM type: NRG; PAM sequence: GAG
gacaacacgtgtgtagtcag

SEQ ID NO: 17878 - DNA, 20 bp, Artificial Sequence
  Description of Artificial Sequence: Synthetic oligonucleotide
  Target: PCSK9; (+) strand; PAM type: NRG; PAM sequence: CGG
acacgtgtgtagtcaggagc

SEQ ID NO: 17879 - DNA, 20 bp, Artificial Sequence
  Description of Artificial Sequence: Synthetic oligonucleotide
  Target: PCSK9; (+) strand; PAM type: NRG; PAM sequence: GGG
cacgtgtgtagtcaggagcc

SEQ ID NO: 17880 - DNA, 20 bp, Artificial Sequence
  Description of Artificial Sequence: Synthetic oligonucleotide
  Target: PCSK9; (+) strand; PAM type: NRG; PAM sequence: CAG
gtagtcaggagccgggacgt

SEQ ID NO: 17881 - DNA, 20 bp, Artificial Sequence
  Description of Artificial Sequence: Synthetic oligonucleotide
  Target: PCSK9; (+) strand; PAM type: NRG; PAM sequence: CAG
gagccgggacgtcagcacta

SEQ ID NO: 17882 - DNA, 20 bp, Artificial Sequence
  Description of Artificial Sequence: Synthetic oligonucleotide
  Target: PCSK9; (+) strand; PAM type: NRG; PAM sequence: AGG
agccgggacgtcagcactac

SEQ ID NO: 17883 - DNA, 20 bp, Artificial Sequence
  Description of Artificial Sequence: Synthetic oligonucleotide
  Target: PCSK9; (+) strand; PAM type: NRG; PAM sequence: CAG
cgggacgtcagcactacagg

SEQ ID NO: 17884 - DNA, 20 bp, Artificial Sequence
  Description of Artificial Sequence: Synthetic oligonucleotide
  Target: PCSK9; (+) strand; PAM type: NRG; PAM sequence: CAG
gtcagcactacaggcagcac

SEQ ID NO: 17885 - DNA, 20 bp, Artificial Sequence
  Description of Artificial Sequence: Synthetic oligonucleotide
  Target: PCSK9; (+) strand; PAM type: NRG; PAM sequence: AAG
cactacaggcagcaccagcg

SEQ ID NO: 17886 - DNA, 20 bp, Artificial Sequence
  Description of Artificial Sequence: Synthetic oligonucleotide
  Target: PCSK9; (+) strand; PAM type: NRG; PAM sequence: AGG
actacaggcagcaccagcga

SEQ ID NO: 17887 - DNA, 20 bp, Artificial Sequence
  Description of Artificial Sequence: Synthetic oligonucleotide
  Target: PCSK9; (+) strand; PAM type: NRG; PAM sequence: GGG
ctacaggcagcaccagcgaa

SEQ ID NO: 17888 - DNA, 20 bp, Artificial Sequence
  Description of Artificial Sequence: Synthetic oligonucleotide
  Target: PCSK9; (+) strand; PAM type: NRG; PAM sequence: GGG
tacaggcagcaccagcgaag

SEQ ID NO: 17889 - DNA, 20 bp, Artificial Sequence
  Description of Artificial Sequence: Synthetic oligonucleotide
  Target: PCSK9; (+) strand; PAM type: NRG; PAM sequence: CAG
caccagcgaaggggccgtga

SEQ ID NO: 17890 - DNA, 20 bp, Artificial Sequence
  Description of Artificial Sequence: Synthetic oligonucleotide
  Target: PCSK9; (+) strand; PAM type: NRG; PAM sequence: CGG
cagccgttgccatctgctgc

SEQ ID NO: 17891 - DNA, 20 bp, Artificial Sequence
  Description of Artificial Sequence: Synthetic oligonucleotide
  Target: PCSK9; (+) strand; PAM type: NRG; PAM sequence: GAG
gccgttgccatctgctgccg

SEQ ID NO: 17892 - DNA, 20 bp, Artificial Sequence
  Description of Artificial Sequence: Synthetic oligonucleotide
  Target: PCSK9; (+) strand; PAM type: NRG; PAM sequence: CGG
ttgccatctgctgccggagc

SEQ ID NO: 17893 - DNA, 20 bp, Artificial Sequence
  Description of Artificial Sequence: Synthetic oligonucleotide
  Target: PCSK9; (+) strand; PAM type: NRG; PAM sequence: TGG
ctgctgccggagccggcacc

SEQ ID NO: 17894 - DNA, 20 bp, Artificial Sequence
  Description of Artificial Sequence: Synthetic oligonucleotide
  Target: PCSK9; (+) strand; PAM type: NRG; PAM sequence: CAG
gccggagccggcacctggcg

SEQ ID NO: 17895 - DNA, 20 bp, Artificial Sequence
  Description of Artificial Sequence: Synthetic oligonucleotide
  Target: PCSK9; (+) strand; PAM type: NRG; PAM sequence: AGG
ccggagccggcacctggcgc

SEQ ID NO: 17896 - DNA, 20 bp, Artificial Sequence
  Description of Artificial Sequence: Synthetic oligonucleotide
  Target: PCSK9; (+) strand; PAM type: NRG; PAM sequence: CAG
ggcacctggcgcaggcctcc

SEQ ID NO: 17897 - DNA, 20 bp, Artificial Sequence
  Description of Artificial Sequence: Synthetic oligonucleotide
  Target: PCSK9; (+) strand; PAM type: NRG; PAM sequence: AGG
gcacctggcgcaggcctccc

SEQ ID NO: 17898 - DNA, 20 bp, Artificial Sequence
  Description of Artificial Sequence: Synthetic oligonucleotide
  Target: PCSK9; (+) strand; PAM type: NRG; PAM sequence: GAG
acctggcgcaggcctcccag

SEQ ID NO: 17899 - DNA, 20 bp, Artificial Sequence
  Description of Artificial Sequence: Synthetic oligonucleotide
  Target: PCSK9; (+) strand; PAM type: NRG; PAM sequence: CAG
cgcaggcctcccaggagctc

SEQ ID NO: 17900 - DNA, 20 bp, Artificial Sequence
  Description of Artificial Sequence: Synthetic oligonucleotide
  Target: PCSK9; (+) strand; PAM type: NRG; PAM sequence: CAG
cctcccaggagctccagtga

SEQ ID NO: 17901 - DNA, 20 bp, Artificial Sequence
  Description of Artificial Sequence: Synthetic oligonucleotide
  Target: PCSK9; (+) strand; PAM type: NRG; PAM sequence: CAG
ctccagtgacagccccatcc

SEQ ID NO: 17902 - DNA, 20 bp, Artificial Sequence
  Description of Artificial Sequence: Synthetic oligonucleotide
  Target: PCSK9; (+) strand; PAM type: NRG; PAM sequence: AGG
tccagtgacagccccatccc

SEQ ID NO: 17903 - DNA, 20 bp, Artificial Sequence
  Description of Artificial Sequence: Synthetic oligonucleotide
  Target: PCSK9; (+) strand; PAM type: NRG; PAM sequence: TGG
gtgacagccccatcccagga

SEQ ID NO: 17904 - DNA, 20 bp, Artificial Sequence
  Description of Artificial Sequence: Synthetic oligonucleotide
  Target: PCSK9; (+) strand; PAM type: NRG; PAM sequence: GGG
tgacagccccatcccaggat

SEQ ID NO: 17905 - DNA, 20 bp, Artificial Sequence
  Description of Artificial Sequence: Synthetic oligonucleotide
  Target: PCSK9; (+) strand; PAM type: NRG; PAM sequence: TGG
cccatcccaggatgggtgtc

SEQ ID NO: 17906 - DNA, 20 bp, Artificial Sequence
  Description of Artificial Sequence: Synthetic oligonucleotide
  Target: PCSK9; (+) strand; PAM type: NRG; PAM sequence: GGG
ccatcccaggatgggtgtct

SEQ ID NO: 17907 - DNA, 20 bp, Artificial Sequence
  Description of Artificial Sequence: Synthetic oligonucleotide
  Target: PCSK9; (+) strand; PAM type: NRG; PAM sequence: GGG
catcccaggatgggtgtctg

SEQ ID NO: 17908 - DNA, 20 bp, Artificial Sequence
  Description of Artificial Sequence: Synthetic oligonucleotide
  Target: PCSK9; (+) strand; PAM type: NRG; PAM sequence: GAG
tcccaggatgggtgtctggg

SEQ ID NO: 17909 - DNA, 20 bp, Artificial Sequence
  Description of Artificial Sequence: Synthetic oligonucleotide
  Target: PCSK9; (+) strand; PAM type: NRG; PAM sequence: AGG
cccaggatgggtgtctgggg

SEQ ID NO: 17910 - DNA, 20 bp, Artificial Sequence
  Description of Artificial Sequence: Synthetic oligonucleotide
  Target: PCSK9; (+) strand; PAM type: NRG; PAM sequence: GGG
ccaggatgggtgtctgggga

SEQ ID NO: 17911 - DNA, 20 bp, Artificial Sequence
  Description of Artificial Sequence: Synthetic oligonucleotide
  Target: PCSK9; (+) strand; PAM type: NRG; PAM sequence: AAG
atgggtgtctggggagggtc

SEQ ID NO: 17912 - DNA, 20 bp, Artificial Sequence
  Description of Artificial Sequence: Synthetic oligonucleotide
  Target: PCSK9; (+) strand; PAM type: NRG; PAM sequence: AGG
tgggtgtctggggagggtca

SEQ ID NO: 17913 - DNA, 20 bp, Artificial Sequence
  Description of Artificial Sequence: Synthetic oligonucleotide
  Target: PCSK9; (+) strand; PAM type: NRG; PAM sequence: GGG
gggtgtctggggagggtcaa

SEQ ID NO: 17914 - DNA, 20 bp, Artificial Sequence
  Description of Artificial Sequence: Synthetic oligonucleotide
  Target: PCSK9; (+) strand; PAM type: NRG; PAM sequence: TGG
gtctggggagggtcaagggc

SEQ ID NO: 17915 - DNA, 20 bp, Artificial Sequence
  Description of Artificial Sequence: Synthetic oligonucleotide
  Target: PCSK9; (+) strand; PAM type: NRG; PAM sequence: GGG
tctggggagggtcaagggct

SEQ ID NO: 17916 - DNA, 20 bp, Artificial Sequence
  Description of Artificial Sequence: Synthetic oligonucleotide
  Target: PCSK9; (+) strand; PAM type: NRG; PAM sequence: GGG
ctggggagggtcaagggctg

SEQ ID NO: 17917 - DNA, 20 bp, Artificial Sequence
  Description of Artificial Sequence: Synthetic oligonucleotide
  Target: PCSK9; (+) strand; PAM type: NRG; PAM sequence: GAG
gagggtcaagggctggggct

SEQ ID NO: 17918 - DNA, 20 bp, Artificial Sequence
  Description of Artificial Sequence: Synthetic oligonucleotide
  Target: PCSK9; (+) strand; PAM type: NRG; PAM sequence: TGG
gctggggctgagctttaaaa

SEQ ID NO: 17919 - DNA, 20 bp, Artificial Sequence
  Description of Artificial Sequence: Synthetic oligonucleotide
  Target: PCSK9; (+) strand; PAM type: NRG; PAM sequence: CAG
gttccgacttgtccctctct

SEQ ID NO: 17920 - DNA, 20 bp, Artificial Sequence
  Description of Artificial Sequence: Synthetic oligonucleotide
  Target: PCSK9; (+) strand; PAM type: NRG; PAM sequence: TGG
gtccctctctcagccctcca

SEQ ID NO: 17921 - DNA, 20 bp, Artificial Sequence
  Description of Artificial Sequence: Synthetic oligonucleotide
  Target: PCSK9; (+) strand; PAM type: NRG; PAM sequence: TGG
tctctcagccctccatggcc

SEQ ID NO: 17922 - DNA, 20 bp, Artificial Sequence
  Description of Artificial Sequence: Synthetic oligonucleotide
  Target: PCSK9; (+) strand; PAM type: NRG; PAM sequence: GAG
agccctccatggcctggcac

SEQ ID NO: 17923 - DNA, 20 bp, Artificial Sequence
  Description of Artificial Sequence: Synthetic oligonucleotide
  Target: PCSK9; (+) strand; PAM type: NRG; PAM sequence: AGG
gccctccatggcctggcacg

SEQ ID NO: 17924 - DNA, 20 bp, Artificial Sequence
  Description of Artificial Sequence: Synthetic oligonucleotide
  Target: PCSK9; (+) strand; PAM type: NRG; PAM sequence: GGG
ccctccatggcctggcacga

SEQ ID NO: 17925 - DNA, 20 bp, Artificial Sequence
  Description of Artificial Sequence: Synthetic oligonucleotide
  Target: PCSK9; (+) strand; PAM type: NRG; PAM sequence: GGG
cctccatggcctggcacgag

SEQ ID NO: 17926 - DNA, 20 bp, Artificial Sequence
  Description of Artificial Sequence: Synthetic oligonucleotide
  Target: PCSK9; (+) strand; PAM type: NRG; PAM sequence: TGG
catggcctggcacgagggga

SEQ ID NO: 17927 - DNA, 20 bp, Artificial Sequence
  Description of Artificial Sequence: Synthetic oligonucleotide
  Target: PCSK9; (+) strand; PAM type: NRG; PAM sequence: GGG
atggcctggcacgaggggat

SEQ ID NO: 17928 - DNA, 20 bp, Artificial Sequence
  Description of Artificial Sequence: Synthetic oligonucleotide
  Target: PCSK9; (+) strand; PAM type: NRG; PAM sequence: GGG
tggcctggcacgaggggatg

SEQ ID NO: 17929 - DNA, 20 bp, Artificial Sequence
  Description of Artificial Sequence: Synthetic oligonucleotide
  Target: PCSK9; (+) strand; PAM type: NRG; PAM sequence: CGG
tggggatgcttccgcctttc

SEQ ID NO: 17930 - DNA, 20 bp, Artificial Sequence
  Description of Artificial Sequence: Synthetic oligonucleotide
  Target: PCSK9; (+) strand; PAM type: NRG; PAM sequence: GGG
ggggatgcttccgcctttcc

SEQ ID NO: 17931 - DNA, 20 bp, Artificial Sequence
  Description of Artificial Sequence: Synthetic oligonucleotide
  Target: PCSK9; (+) strand; PAM type: NRG; PAM sequence: GGG
gggatgcttccgcctttccg

SEQ ID NO: 17932 - DNA, 20 bp, Artificial Sequence
  Description of Artificial Sequence: Synthetic oligonucleotide
  Target: PCSK9; (+) strand; PAM type: NRG; PAM sequence: TGG
ttccgcctttccggggctgc

SEQ ID NO: 17933 - DNA, 20 bp, Artificial Sequence
  Description of Artificial Sequence: Synthetic oligonucleotide
  Target: PCSK9; (+) strand; PAM type: NRG; PAM sequence: TGG
cctttccggggctgctggcc

SEQ ID NO: 17934 - DNA, 20 bp, Artificial Sequence
  Description of Artificial Sequence: Synthetic oligonucleotide
  Target: PCSK9; (+) strand; PAM type: NRG; PAM sequence: GAG
gggctgctggcctggccctt

SEQ ID NO: 17935 - DNA, 20 bp, Artificial Sequence
  Description of Artificial Sequence: Synthetic oligonucleotide
  Target: PCSK9; (+) strand; PAM type: NRG; PAM sequence: TGG
ctgctggcctggcccttgag

SEQ ID NO: 17936 - DNA, 20 bp, Artificial Sequence
  Description of Artificial Sequence: Synthetic oligonucleotide
  Target: PCSK9; (+) strand; PAM type: NRG; PAM sequence: GGG
tgctggcctggcccttgagt

SEQ ID NO: 17937 - DNA, 20 bp, Artificial Sequence
  Description of Artificial Sequence: Synthetic oligonucleotide
  Target: PCSK9; (+) strand; PAM type: NRG; PAM sequence: GGG
gctggcctggcccttgagtg

SEQ ID NO: 17938 - DNA, 20 bp, Artificial Sequence
  Description of Artificial Sequence: Synthetic oligonucleotide
  Target: PCSK9; (+) strand; PAM type: NRG; PAM sequence: CAG
ggcctggcccttgagtgggg

SEQ ID NO: 17939 - DNA, 20 bp, Artificial Sequence
  Description of Artificial Sequence: Synthetic oligonucleotide
  Target: PCSK9; (+) strand; PAM type: NRG; PAM sequence: TGG
agtggggcagcctccttgcc

SEQ ID NO: 17940 - DNA, 20 bp, Artificial Sequence
  Description of Artificial Sequence: Synthetic oligonucleotide
  Target: PCSK9; (+) strand; PAM type: NRG; PAM sequence: TGG
tgcctggaactcactcactc

SEQ ID NO: 17941 - DNA, 20 bp, Artificial Sequence
  Description of Artificial Sequence: Synthetic oligonucleotide
  Target: PCSK9; (+) strand; PAM type: NRG; PAM sequence: GGG
gcctggaactcactcactct

SEQ ID NO: 17942 - DNA, 20 bp, Artificial Sequence
  Description of Artificial Sequence: Synthetic oligonucleotide
  Target: PCSK9; (+) strand; PAM type: NRG; PAM sequence: CAG
cactctgggtgcctcctccc

SEQ ID NO: 17943 - DNA, 20 bp, Artificial Sequence
  Description of Artificial Sequence: Synthetic oligonucleotide
  Target: PCSK9; (+) strand; PAM type: NRG; PAM sequence: AGG
actctgggtgcctcctcccc

SEQ ID NO: 17944 - DNA, 20 bp, Artificial Sequence
  Description of Artificial Sequence: Synthetic oligonucleotide
  Target: PCSK9; (+) strand; PAM type: NRG; PAM sequence: TGG
ctgggtgcctcctccccagg

SEQ ID NO: 17945 - DNA, 20 bp, Artificial Sequence
  Description of Artificial Sequence: Synthetic oligonucleotide
  Target: PCSK9; (+) strand; PAM type: NRG; PAM sequence: GAG
gggtgcctcctccccaggtg

SEQ ID NO: 17946 - DNA, 20 bp, Artificial Sequence
  Description of Artificial Sequence: Synthetic oligonucleotide
  Target: PCSK9; (+) strand; PAM type: NRG; PAM sequence: AGG
ggtgcctcctccccaggtgg

SEQ ID NO: 17947 - DNA, 20 bp, Artificial Sequence
  Description of Artificial Sequence: Synthetic oligonucleotide
  Target: PCSK9; (+) strand; PAM type: NRG; PAM sequence: CAG
tcctccccaggtggaggtgc

SEQ ID NO: 17948 - DNA, 20 bp, Artificial Sequence
  Description of Artificial Sequence: Synthetic oligonucleotide
  Target: PCSK9; (+) strand; PAM type: NRG; PAM sequence: AGG
cctccccaggtggaggtgcc

SEQ ID NO: 17949 - DNA, 20 bp, Artificial Sequence
  Description of Artificial Sequence: Synthetic oligonucleotide
  Target: PCSK9; (+) strand; PAM type: NRG; PAM sequence: AAG
ccccaggtggaggtgccagg

SEQ ID NO: 17950 - DNA, 20 bp, Artificial Sequence
  Description of Artificial Sequence: Synthetic oligonucleotide
  Target: PCSK9; (+) strand; PAM type: NRG; PAM sequence: TGG
ggaagctccctccctcactg

SEQ ID NO: 17951 - DNA, 20 bp, Artificial Sequence
  Description of Artificial Sequence: Synthetic oligonucleotide
  Target: PCSK9; (+) strand; PAM type: NRG; PAM sequence: GGG
gaagctccctccctcactgt

SEQ ID NO: 17952 - DNA, 20 bp, Artificial Sequence
  Description of Artificial Sequence: Synthetic oligonucleotide
  Target: PCSK9; (+) strand; PAM type: NRG; PAM sequence: GGG
aagctccctccctcactgtg

SEQ ID NO: 17953 - DNA, 20 bp, Artificial Sequence
  Description of Artificial Sequence: Synthetic oligonucleotide
  Target: PCSK9; (+) strand; PAM type: NRG; PAM sequence: CAG
ggggcatttcaccattcaaa

SEQ ID NO: 17954 - DNA, 20 bp, Artificial Sequence
  Description of Artificial Sequence: Synthetic oligonucleotide
  Target: PCSK9; (+) strand; PAM type: NRG; PAM sequence: AGG
gggcatttcaccattcaaac

SEQ ID NO: 17955 - DNA, 20 bp, Artificial Sequence
  Description of Artificial Sequence: Synthetic oligonucleotide
  Target: PCSK9; (+) strand; PAM type: NRG; PAM sequence: GAG
tttcaccattcaaacaggtc

SEQ ID NO: 17956 - DNA, 20 bp, Artificial Sequence
  Description of Artificial Sequence: Synthetic oligonucleotide
  Target: PCSK9; (+) strand; PAM type: NRG; PAM sequence: CGG
caaacaggtcgagctgtgct

SEQ ID NO: 17957 - DNA, 20 bp, Artificial Sequence
  Description of Artificial Sequence: Synthetic oligonucleotide
  Target: PCSK9; (+) strand; PAM type: NRG; PAM sequence: GGG
aaacaggtcgagctgtgctc

SEQ ID NO: 17958 - DNA, 20 bp, Artificial Sequence
  Description of Artificial Sequence: Synthetic oligonucleotide
  Target: PCSK9; (+) strand; PAM type: NRG; PAM sequence: CAG
gagctgtgctcgggtgctgc

SEQ ID NO: 17959 - DNA, 20 bp, Artificial Sequence
  Description of Artificial Sequence: Synthetic oligonucleotide
  Target: PCSK9; (+) strand; PAM type: NRG; PAM sequence: TGG
tcccaatgtgccgatgtccg

SEQ ID NO: 17960 - DNA, 20 bp, Artificial Sequence
  Description of Artificial Sequence: Synthetic oligonucleotide
  Target: PCSK9; (+) strand; PAM type: NRG; PAM sequence: GGG
cccaatgtgccgatgtccgt

SEQ ID NO: 17961 - DNA, 20 bp, Artificial Sequence
  Description of Artificial Sequence: Synthetic oligonucleotide
  Target: PCSK9; (+) strand; PAM type: NRG; PAM sequence: CAG
aatgtgccgatgtccgtggg

SEQ ID NO: 17962 - DNA, 20 bp, Artificial Sequence
  Description of Artificial Sequence: Synthetic oligonucleotide
  Target: PCSK9; (+) strand; PAM type: NRG; PAM sequence: GAG
tgggcagaatgacttttatt

SEQ ID NO: 17963 - DNA, 20 bp, Artificial Sequence
  Description of Artificial Sequence: Synthetic oligonucleotide
  Target: PCSK9; (+) strand; PAM type: NRG; PAM sequence: CAG
attgagctcttgttccgtgc

SEQ ID NO: 17964 - DNA, 20 bp, Artificial Sequence
  Description of Artificial Sequence: Synthetic oligonucleotide
  Target: PCSK9; (+) strand; PAM type: NRG; PAM sequence: AGG
ttgagctcttgttccgtgcc

SEQ ID NO: 17965 - DNA, 20 bp, Artificial Sequence
  Description of Artificial Sequence: Synthetic oligonucleotide
  Target: PCSK9; (+) strand; PAM type: NRG; PAM sequence: CAG
cgtgccaggcattcaatcct

SEQ ID NO: 17966 - DNA, 20 bp, Artificial Sequence
  Description of Artificial Sequence: Synthetic oligonucleotide
  Target: PCSK9; (+) strand; PAM type: NRG; PAM sequence: AGG
gtgccaggcattcaatcctc

SEQ ID NO: 17967 - DNA, 20 bp, Artificial Sequence
  Description of Artificial Sequence: Synthetic oligonucleotide
  Target: PCSK9; (+) strand; PAM type: NRG; PAM sequence: AAG
tcaatcctcaggtctccacc

SEQ ID NO: 17968 - DNA, 20 bp, Artificial Sequence
  Description of Artificial Sequence: Synthetic oligonucleotide
  Target: PCSK9; (+) strand; PAM type: NRG; PAM sequence: AGG
caatcctcaggtctccacca

SEQ ID NO: 17969 - DNA, 20 bp, Artificial Sequence
  Description of Artificial Sequence: Synthetic oligonucleotide
  Target: PCSK9; (+) strand; PAM type: NRG; PAM sequence: GAG
atcctcaggtctccaccaag

SEQ ID NO: 17970 - DNA, 20 bp, Artificial Sequence
  Description of Artificial Sequence: Synthetic oligonucleotide
  Target: PCSK9; (+) strand; PAM type: NRG; PAM sequence: AGG
tcctcaggtctccaccaagg

SEQ ID NO: 17971 - DNA, 20 bp, Artificial Sequence
  Description of Artificial Sequence: Synthetic oligonucleotide
  Target: PCSK9; (+) strand; PAM type: NRG; PAM sequence: CAG
tcaggtctccaccaaggagg

SEQ ID NO: 17972 - DNA, 20 bp, Artificial Sequence
  Description of Artificial Sequence: Synthetic oligonucleotide
  Target: PCSK9; (+) strand; PAM type: NRG; PAM sequence: AGG
caggtctccaccaaggaggc

SEQ ID NO: 17973 - DNA, 20 bp, Artificial Sequence
  Description of Artificial Sequence: Synthetic oligonucleotide
  Target: PCSK9; (+) strand; PAM type: NRG; PAM sequence: TGG
aggaggcaggattcttccca

SEQ ID NO: 17974 - DNA, 20 bp, Artificial Sequence
  Description of Artificial Sequence: Synthetic oligonucleotide
  Target: PCSK9; (+) strand; PAM type: NRG; PAM sequence: TAG
ggcaggattcttcccatgga

SEQ ID NO: 17975 - DNA, 20 bp, Artificial Sequence
  Description of Artificial Sequence: Synthetic oligonucleotide
  Target: PCSK9; (+) strand; PAM type: NRG; PAM sequence: AGG
gcaggattcttcccatggat

SEQ ID NO: 17976 - DNA, 20 bp, Artificial Sequence
  Description of Artificial Sequence: Synthetic oligonucleotide
  Target: PCSK9; (+) strand; PAM type: NRG; PAM sequence: GGG
caggattcttcccatggata

SEQ ID NO: 17977 - DNA, 20 bp, Artificial Sequence
  Description of Artificial Sequence: Synthetic oligonucleotide
  Target: PCSK9; (+) strand; PAM type: NRG; PAM sequence: GGG
aggattcttcccatggatag

SEQ ID NO: 17978 - DNA, 20 bp, Artificial Sequence
  Description of Artificial Sequence: Synthetic oligonucleotide
  Target: PCSK9; (+) strand; PAM type: NRG; PAM sequence: GAG
gattcttcccatggataggg

SEQ ID NO: 17979 - DNA, 20 bp, Artificial Sequence
  Description of Artificial Sequence: Synthetic oligonucleotide
  Target: PCSK9; (+) strand; PAM type: NRG; PAM sequence: AGG
attcttcccatggatagggg

SEQ ID NO: 17980 - DNA, 20 bp, Artificial Sequence
  Description of Artificial Sequence: Synthetic oligonucleotide
  Target: PCSK9; (+) strand; PAM type: NRG; PAM sequence: GGG
ttcttcccatggatagggga

SEQ ID NO: 17981 - DNA, 20 bp, Artificial Sequence
  Description of Artificial Sequence: Synthetic oligonucleotide
  Target: PCSK9; (+) strand; PAM type: NRG; PAM sequence: GGG
tcttcccatggataggggag

SEQ ID NO: 17982 - DNA, 20 bp, Artificial Sequence
  Description of Artificial Sequence: Synthetic oligonucleotide
  Target: PCSK9; (+) strand; PAM type: NRG; PAM sequence: GGG
cttcccatggataggggagg

SEQ ID NO: 17983 - DNA, 20 bp, Artificial Sequence
  Description of Artificial Sequence: Synthetic oligonucleotide
  Target: PCSK9; (+) strand; PAM type: NRG; PAM sequence: CGG
cccatggataggggaggggg

SEQ ID NO: 17984 - DNA, 20 bp, Artificial Sequence
  Description of Artificial Sequence: Synthetic oligonucleotide
  Target: PCSK9; (+) strand; PAM type: NRG; PAM sequence: TAG
atggataggggagggggcgg

SEQ ID NO: 17985 - DNA, 20 bp, Artificial Sequence
  Description of Artificial Sequence: Synthetic oligonucleotide
  Target: PCSK9; (+) strand; PAM type: NRG; PAM sequence: AGG
tggataggggagggggcggt

SEQ ID NO: 17986 - DNA, 20 bp, Artificial Sequence
  Description of Artificial Sequence: Synthetic oligonucleotide
  Target: PCSK9; (+) strand; PAM type: NRG; PAM sequence: GGG
ggataggggagggggcggta

SEQ ID NO: 17987 - DNA, 20 bp, Artificial Sequence
  Description of Artificial Sequence: Synthetic oligonucleotide
  Target: PCSK9; (+) strand; PAM type: NRG; PAM sequence: GGG
gataggggagggggcggtag

SEQ ID NO: 17988 - DNA, 20 bp, Artificial Sequence
  Description of Artificial Sequence: Synthetic oligonucleotide
  Target: PCSK9; (+) strand; PAM type: NRG; PAM sequence: CAG
ggagggggcggtaggggctg

SEQ ID NO: 17989 - DNA, 20 bp, Artificial Sequence
  Description of Artificial Sequence: Synthetic oligonucleotide
  Target: PCSK9; (+) strand; PAM type: NRG; PAM sequence: AGG
gagggggcggtaggggctgc

SEQ ID NO: 17990 - DNA, 20 bp, Artificial Sequence
  Description of Artificial Sequence: Synthetic oligonucleotide
  Target: PCSK9; (+) strand; PAM type: NRG; PAM sequence: GGG
agggggcggtaggggctgca

SEQ ID NO: 17991 - DNA, 20 bp, Artificial Sequence
  Description of Artificial Sequence: Synthetic oligonucleotide
  Target: PCSK9; (+) strand; PAM type: NRG; PAM sequence: TGG
gctgcagggacaaacatcgt

SEQ ID NO: 17992 - DNA, 20 bp, Artificial Sequence
  Description of Artificial Sequence: Synthetic oligonucleotide
  Target: PCSK9; (+) strand; PAM type: NRG; PAM sequence: GGG
ctgcagggacaaacatcgtt

SEQ ID NO: 17993 - DNA, 20 bp, Artificial Sequence
  Description of Artificial Sequence: Synthetic oligonucleotide
  Target: PCSK9; (+) strand; PAM type: NRG; PAM sequence: GGG
tgcagggacaaacatcgttg

SEQ ID NO: 17994 - DNA, 20 bp, Artificial Sequence
  Description of Artificial Sequence: Synthetic oligonucleotide
  Target: PCSK9; (+) strand; PAM type: NRG; PAM sequence: GGG
gcagggacaaacatcgttgg

SEQ ID NO: 17995 - DNA, 20 bp, Artificial Sequence
  Description of Artificial Sequence: Synthetic oligonucleotide
  Target: PCSK9; (+) strand; PAM type: NRG; PAM sequence: GGG
cagggacaaacatcgttggg

SEQ ID NO: 17996 - DNA, 20 bp, Artificial Sequence
  Description of Artificial Sequence: Synthetic oligonucleotide
  Target: PCSK9; (+) strand; PAM type: NRG; PAM sequence: GAG
gacaaacatcgttggggggt

SEQ ID NO: 17997 - DNA, 20 bp, Artificial Sequence
  Description of Artificial Sequence: Synthetic oligonucleotide
  Target: PCSK9; (+) strand; PAM type: NRG; PAM sequence: AAG
tcgttggggggtgagtgtga

SEQ ID NO: 17998 - DNA, 20 bp, Artificial Sequence
  Description of Artificial Sequence: Synthetic oligonucleotide
  Target: PCSK9; (+) strand; PAM type: NRG; PAM sequence: AGG
cgttggggggtgagtgtgaa

SEQ ID NO: 17999 - DNA, 20 bp, Artificial Sequence
  Description of Artificial Sequence: Synthetic oligonucleotide
  Target: PCSK9; (+) strand; PAM type: NRG; PAM sequence: TGG
gtgagtgtgaaaggtgctga

SEQ ID NO: 18000 - DNA, 20 bp, Artificial Sequence
  Description of Artificial Sequence: Synthetic oligonucleotide
  Target: PCSK9; (+) strand; PAM type: NRG; PAM sequence: CAG
gtgctgatggccctcatctc

SEQ ID NO: 18001 - DNA, 20 bp, Artificial Sequence
  Description of Artificial Sequence: Synthetic oligonucleotide
  Target: PCSK9; (+) strand; PAM type: NRG; PAM sequence: TGG
ccctcatctccagctaactg

SEQ ID NO: 18002 - DNA, 20 bp, Artificial Sequence
  Description of Artificial Sequence: Synthetic oligonucleotide
  Target: PCSK9; (+) strand; PAM type: NRG; PAM sequence: GAG
ctcatctccagctaactgtg

SEQ ID NO: 18003 - DNA, 20 bp, Artificial Sequence
  Description of Artificial Sequence: Synthetic oligonucleotide
  Target: PCSK9; (+) strand; PAM type: NRG; PAM sequence: AAG
atctccagctaactgtggag

SEQ ID NO: 18004 - DNA, 20 bp, Artificial Sequence
  Description of Artificial Sequence: Synthetic oligonucleotide
  Target: PCSK9; (+) strand; PAM type: NRG; PAM sequence: TGG
gctaactgtggagaagcccc

SEQ ID NO: 18005 - DNA, 20 bp, Artificial Sequence
  Description of Artificial Sequence: Synthetic oligonucleotide
  Target: PCSK9; (+) strand; PAM type: NRG; PAM sequence: GGG
ctaactgtggagaagcccct

SEQ ID NO: 18006 - DNA, 20 bp, Artificial Sequence
  Description of Artificial Sequence: Synthetic oligonucleotide
  Target: PCSK9; (+) strand; PAM type: NRG; PAM sequence: GGG
taactgtggagaagcccctg

SEQ ID NO: 18007 - DNA, 20 bp, Artificial Sequence
  Description of Artificial Sequence: Synthetic oligonucleotide
  Target: PCSK9; (+) strand; PAM type: NRG; PAM sequence: GGG
aactgtggagaagcccctgg

SEQ ID NO: 18008 - DNA, 20 bp, Artificial Sequence
  Description of Artificial Sequence: Synthetic oligonucleotide
  Target: PCSK9; (+) strand; PAM type: NRG; PAM sequence: TGG
cctgggggctccctgattaa

SEQ ID NO: 18009 - DNA, 20 bp, Artificial Sequence
  Description of Artificial Sequence: Synthetic oligonucleotide
  Target: PCSK9; (+) strand; PAM type: NRG; PAM sequence: GAG
tgggggctccctgattaatg

SEQ ID NO: 18010 - DNA, 20 bp, Artificial Sequence
  Description of Artificial Sequence: Synthetic oligonucleotide
  Target: PCSK9; (+) strand; PAM type: NRG; PAM sequence: AGG
gggggctccctgattaatgg

SEQ ID NO: 18011 - DNA, 20 bp, Artificial Sequence
  Description of Artificial Sequence: Synthetic oligonucleotide
  Target: PCSK9; (+) strand; PAM type: NRG; PAM sequence: TAG
ctccctgattaatggaggct

SEQ ID NO: 18012 - DNA, 20 bp, Artificial Sequence
  Description of Artificial Sequence: Synthetic oligonucleotide
  Target: PCSK9; (+) strand; PAM type: NRG; PAM sequence: TGG
ttaatggaggcttagctttc

SEQ ID NO: 18013 - DNA, 20 bp, Artificial Sequence
  Description of Artificial Sequence: Synthetic oligonucleotide
  Target: PCSK9; (+) strand; PAM type: NRG; PAM sequence: TGG
tggaggcttagctttctgga

SEQ ID NO: 18014 - DNA, 20 bp, Artificial Sequence
  Description of Artificial Sequence: Synthetic oligonucleotide
  Target: PCSK9; (+) strand; PAM type: NRG; PAM sequence: TAG
ttagctttctggatggcatc

SEQ ID NO: 18015 - DNA, 20 bp, Artificial Sequence
  Description of Artificial Sequence: Synthetic oligonucleotide
  Target: PCSK9; (+) strand; PAM type: NRG; PAM sequence: CAG
ctttctggatggcatctagc

SEQ ID NO: 18016 - DNA, 20 bp, Artificial Sequence
  Description of Artificial Sequence: Synthetic oligonucleotide
  Target: PCSK9; (+) strand; PAM type: NRG; PAM sequence: GAG
ttctggatggcatctagcca

SEQ ID NO: 18017 - DNA, 20 bp, Artificial Sequence
  Description of Artificial Sequence: Synthetic oligonucleotide
  Target: PCSK9; (+) strand; PAM type: NRG; PAM sequence: AGG
tctggatggcatctagccag

SEQ ID NO: 18018 - DNA, 20 bp, Artificial Sequence
  Description of Artificial Sequence: Synthetic oligonucleotide
  Target: PCSK9; (+) strand; PAM type: NRG; PAM sequence: TGG
gatggcatctagccagaggc

SEQ ID NO: 18019 - DNA, 20 bp, Artificial Sequence
  Description of Artificial Sequence: Synthetic oligonucleotide
  Target: PCSK9; (+) strand; PAM type: NRG; PAM sequence: GAG
tggcatctagccagaggctg

SEQ ID NO: 18020 - DNA, 20 bp, Artificial Sequence
  Description of Artificial Sequence: Synthetic oligonucleotide
  Target: PCSK9; (+) strand; PAM type: NRG; PAM sequence: CAG
atctagccagaggctggaga

SEQ ID NO: 18021 - DNA, 20 bp, Artificial Sequence
  Description of Artificial Sequence: Synthetic oligonucleotide
  Target: PCSK9; (+) strand; PAM type: NRG; PAM sequence: AGG
tctagccagaggctggagac

SEQ ID NO: 18022 - DNA, 20 bp, Artificial Sequence
  Description of Artificial Sequence: Synthetic oligonucleotide
  Target: PCSK9; (+) strand; PAM type: NRG; PAM sequence: TGG
gctggagacaggtgcgcccc

SEQ ID NO: 18023 - DNA, 20 bp, Artificial Sequence
  Description of Artificial Sequence: Synthetic oligonucleotide
  Target: PCSK9; (+) strand; PAM type: NRG; PAM sequence: TGG
ggagacaggtgcgcccctgg

SEQ ID NO: 18024 - DNA, 20 bp, Artificial Sequence
  Description of Artificial Sequence: Synthetic oligonucleotide
  Target: PCSK9; (+) strand; PAM type: NRG; PAM sequence: CAG
aggtgcgcccctggtggtca

SEQ ID NO: 18025 - DNA, 20 bp, Artificial Sequence
  Description of Artificial Sequence: Synthetic oligonucleotide
  Target: PCSK9; (+) strand; PAM type: NRG; PAM sequence: AGG
ggtgcgcccctggtggtcac

SEQ ID NO: 18026 - DNA, 20 bp, Artificial Sequence
  Description of Artificial Sequence: Synthetic oligonucleotide
  Target: PCSK9; (+) strand; PAM type: NRG; PAM sequence: TGG
ggtggtcacaggctgtgcct

SEQ ID NO: 18027 - DNA, 20 bp, Artificial Sequence
  Description of Artificial Sequence: Synthetic oligonucleotide
  Target: PCSK9; (+) strand; PAM type: NRG; PAM sequence: GAG
aggctgtgccttggtttcct

SEQ ID NO: 18028 - DNA, 20 bp, Artificial Sequence
  Description of Artificial Sequence: Synthetic oligonucleotide
  Target: PCSK9; (+) strand; PAM type: NRG; PAM sequence: CAG
acctttactctgctctatgc

SEQ ID NO: 18029 - DNA, 20 bp, Artificial Sequence
  Description of Artificial Sequence: Synthetic oligonucleotide
  Target: PCSK9; (+) strand; PAM type: NRG; PAM sequence: AGG
cctttactctgctctatgcc

SEQ ID NO: 18030 - DNA, 20 bp, Artificial Sequence
  Description of Artificial Sequence: Synthetic oligonucleotide
  Target: PCSK9; (+) strand; PAM type: NRG; PAM sequence: TAG
tgctctatgccaggctgtgc

SEQ ID NO: 18031 - DNA, 20 bp, Artificial Sequence
  Description of Artificial Sequence: Synthetic oligonucleotide
  Target: PCSK9; (+) strand; PAM type: NRG; PAM sequence: AAG
ggctgtgctagcaacaccca

SEQ ID NO: 18032 - DNA, 20 bp, Artificial Sequence
  Description of Artificial Sequence: Synthetic oligonucleotide
  Target: PCSK9; (+) strand; PAM type: NRG; PAM sequence: AGG
gctgtgctagcaacacccaa

SEQ ID NO: 18033 - DNA, 20 bp, Artificial Sequence
  Description of Artificial Sequence: Synthetic oligonucleotide
  Target: PCSK9; (+) strand; PAM type: NRG; PAM sequence: TGG
gtgctagcaacacccaaagg

SEQ ID NO: 18034 - DNA, 20 bp, Artificial Sequence
  Description of Artificial Sequence: Synthetic oligonucleotide
  Target: PCSK9; (+) strand; PAM type: NRG; PAM sequence: CGG
caacacccaaaggtggcctg

SEQ ID NO: 18035 - DNA, 20 bp, Artificial Sequence
  Description of Artificial Sequence: Synthetic oligonucleotide
  Target: PCSK9; (+) strand; PAM type: NRG; PAM sequence: GGG
aacacccaaaggtggcctgc

SEQ ID NO: 18036 - DNA, 20 bp, Artificial Sequence
  Description of Artificial Sequence: Synthetic oligonucleotide
  Target: PCSK9; (+) strand; PAM type: NRG; PAM sequence: GGG
acacccaaaggtggcctgcg

SEQ ID NO: 18037 - DNA, 20 bp, Artificial Sequence
  Description of Artificial Sequence: Synthetic oligonucleotide
  Target: PCSK9; (+) strand; PAM type: NRG; PAM sequence: GAG
acccaaaggtggcctgcggg

SEQ ID NO: 18038 - DNA, 20 bp, Artificial Sequence
  Description of Artificial Sequence: Synthetic oligonucleotide
  Target: PCSK9; (+) strand; PAM type: NRG; PAM sequence: TAG
gcctgcggggagccatcacc

SEQ ID NO: 18039 - DNA, 20 bp, Artificial Sequence
  Description of Artificial Sequence: Synthetic oligonucleotide
  Target: PCSK9; (+) strand; PAM type: NRG; PAM sequence: AGG
cctgcggggagccatcacct

SEQ ID NO: 18040 - DNA, 20 bp, Artificial Sequence
  Description of Artificial Sequence: Synthetic oligonucleotide
  Target: PCSK9; (+) strand; PAM type: NRG; PAM sequence: CGG
gccatcacctaggactgact

SEQ ID NO: 18041 - DNA, 20 bp, Artificial Sequence
  Description of Artificial Sequence: Synthetic oligonucleotide
  Target: PCSK9; (+) strand; PAM type: NRG; PAM sequence: CAG
atcacctaggactgactcgg

SEQ ID NO: 18042 - DNA, 20 bp, Artificial Sequence
  Description of Artificial Sequence: Synthetic oligonucleotide
  Target: PCSK9; (+) strand; PAM type: NRG; PAM sequence: CAG
aggactgactcggcagtgtg

SEQ ID NO: 18043 - DNA, 20 bp, Artificial Sequence
  Description of Artificial Sequence: Synthetic oligonucleotide
  Target: PCSK9; (+) strand; PAM type: NRG; PAM sequence: TGG
actgactcggcagtgtgcag

SEQ ID NO: 18044 - DNA, 20 bp, Artificial Sequence
  Description of Artificial Sequence: Synthetic oligonucleotide
  Target: PCSK9; (+) strand; PAM type: NRG; PAM sequence: CAG
cagtggtgcatgcactgtct

SEQ ID NO: 18045 - DNA, 20 bp, Artificial Sequence
  Description of Artificial Sequence: Synthetic oligonucleotide
  Target: PCSK9; (+) strand; PAM type: NRG; PAM sequence: CGG
agccaacccgctccactacc

SEQ ID NO: 18046 - DNA, 20 bp, Artificial Sequence
  Description of Artificial Sequence: Synthetic oligonucleotide
  Target: PCSK9; (+) strand; PAM type: NRG; PAM sequence: CAG
caacccgctccactacccgg

SEQ ID NO: 18047 - DNA, 20 bp, Artificial Sequence
  Description of Artificial Sequence: Synthetic oligonucleotide
  Target: PCSK9; (+) strand; PAM type: NRG; PAM sequence: AGG
aacccgctccactacccggc

SEQ ID NO: 18048 - DNA, 20 bp, Artificial Sequence
  Description of Artificial Sequence: Synthetic oligonucleotide
  Target: PCSK9; (+) strand; PAM type: NRG; PAM sequence: GGG
acccgctccactacccggca

SEQ ID NO: 18049 - DNA, 20 bp, Artificial Sequence
  Description of Artificial Sequence: Synthetic oligonucleotide
  Target: PCSK9; (+) strand; PAM type: NRG; PAM sequence: CAG
acattcgcacccctacttca

SEQ ID NO: 18050 - DNA, 20 bp, Artificial Sequence
  Description of Artificial Sequence: Synthetic oligonucleotide
  Target: PCSK9; (+) strand; PAM type: NRG; PAM sequence: GAG
attcgcacccctacttcaca

SEQ ID NO: 18051 - DNA, 20 bp, Artificial Sequence
  Description of Artificial Sequence: Synthetic oligonucleotide
  Target: PCSK9; (+) strand; PAM type: NRG; PAM sequence: AGG
ttcgcacccctacttcacag

SEQ ID NO: 18052 - DNA, 20 bp, Artificial Sequence
  Description of Artificial Sequence: Synthetic oligonucleotide
  Target: PCSK9; (+) strand; PAM type: NRG; PAM sequence: AAG
gcacccctacttcacagagg

SEQ ID NO: 18053 - DNA, 20 bp, Artificial Sequence
  Description of Artificial Sequence: Synthetic oligonucleotide
  Target: PCSK9; (+) strand; PAM type: NRG; PAM sequence: TGG
acttcacagaggaagaaacc

SEQ ID NO: 18054 - DNA, 20 bp, Artificial Sequence
  Description of Artificial Sequence: Synthetic oligonucleotide
  Target: PCSK9; (+) strand; PAM type: NRG; PAM sequence: CAG
cagaggaagaaacctggaac

SEQ ID NO: 18055 - DNA, 20 bp, Artificial Sequence
  Description of Artificial Sequence: Synthetic oligonucleotide
  Target: PCSK9; (+) strand; PAM type: NRG; PAM sequence: GAG
gaggaagaaacctggaacca

SEQ ID NO: 18056 - DNA, 20 bp, Artificial Sequence
  Description of Artificial Sequence: Synthetic oligonucleotide
  Target: PCSK9; (+) strand; PAM type: NRG; PAM sequence: AGG
aggaagaaacctggaaccag

SEQ ID NO: 18057 - DNA, 20 bp, Artificial Sequence
  Description of Artificial Sequence: Synthetic oligonucleotide
  Target: PCSK9; (+) strand; PAM type: NRG; PAM sequence: GGG
ggaagaaacctggaaccaga

SEQ ID NO: 18058 - DNA, 20 bp, Artificial Sequence
  Description of Artificial Sequence: Synthetic oligonucleotide
  Target: PCSK9; (+) strand; PAM type: NRG; PAM sequence: GGG
gaagaaacctggaaccagag

SEQ ID NO: 18059 - DNA, 20 bp, Artificial Sequence
  Description of Artificial Sequence: Synthetic oligonucleotide
  Target: PCSK9; (+) strand; PAM type: NRG; PAM sequence: GGG
aagaaacctggaaccagagg

SEQ ID NO: 18060 - DNA, 20 bp, Artificial Sequence
  Description of Artificial Sequence: Synthetic oligonucleotide
  Target: PCSK9; (+) strand; PAM type: NRG; PAM sequence: AAG
ccagagggggcgtgcctgcc

SEQ ID NO: 18061 - DNA, 20 bp, Artificial Sequence
  Description of Artificial Sequence: Synthetic oligonucleotide
  Target: PCSK9; (+) strand; PAM type: NRG; PAM sequence: CAG
gcgtgcctgccaagctcaca

SEQ ID NO: 18062 - DNA, 20 bp, Artificial Sequence
  Description of Artificial Sequence: Synthetic oligonucleotide
  Target: PCSK9; (+) strand; PAM type: NRG; PAM sequence: CAG
tgcctgccaagctcacacag

SEQ ID NO: 18063 - DNA, 20 bp, Artificial Sequence
  Description of Artificial Sequence: Synthetic oligonucleotide
  Target: PCSK9; (+) strand; PAM type: NRG; PAM sequence: AGG
gcctgccaagctcacacagc

SEQ ID NO: 18064 - DNA, 20 bp, Artificial Sequence
  Description of Artificial Sequence: Synthetic oligonucleotide
  Target: PCSK9; (+) strand; PAM type: NRG; PAM sequence: GAG
aagctcacacagcaggaact

SEQ ID NO: 18065 - DNA, 20 bp, Artificial Sequence
  Description of Artificial Sequence: Synthetic oligonucleotide
  Target: PCSK9; (+) strand; PAM type: NRG; PAM sequence: CAG
tcacacagcaggaactgagc

SEQ ID NO: 18066 - DNA, 20 bp, Artificial Sequence
  Description of Artificial Sequence: Synthetic oligonucleotide
  Target: PCSK9; (+) strand; PAM type: NRG; PAM sequence: CAG
caggaactgagccagaaacg

SEQ ID NO: 18067 - DNA, 20 bp, Artificial Sequence
  Description of Artificial Sequence: Synthetic oligonucleotide
  Target: PCSK9; (+) strand; PAM type: NRG; PAM sequence: TGG
actgagccagaaacgcagat

SEQ ID NO: 18068 - DNA, 20 bp, Artificial Sequence
  Description of Artificial Sequence: Synthetic oligonucleotide
  Target: PCSK9; (+) strand; PAM type: NRG; PAM sequence: GGG
ctgagccagaaacgcagatt

SEQ ID NO: 18069 - DNA, 20 bp, Artificial Sequence
  Description of Artificial Sequence: Synthetic oligonucleotide
  Target: PCSK9; (+) strand; PAM type: NRG; PAM sequence: TGG
gccagaaacgcagattgggc

SEQ ID NO: 18070 - DNA, 20 bp, Artificial Sequence
  Description of Artificial Sequence: Synthetic oligonucleotide
  Target: PCSK9; (+) strand; PAM type: NRG; PAM sequence: AAG
cgcagattgggctggctctg

SEQ ID NO: 18071 - DNA, 20 bp, Artificial Sequence
  Description of Artificial Sequence: Synthetic oligonucleotide
  Target: PCSK9; (+) strand; PAM type: NRG; PAM sequence: AAG
attgggctggctctgaagcc

SEQ ID NO: 18072 - DNA, 20 bp, Artificial Sequence
  Description of Artificial Sequence: Synthetic oligonucleotide
  Target: PCSK9; (+) strand; PAM type: NRG; PAM sequence: CGG
aagcctcttcttacttcacc

SEQ ID NO: 18073 - DNA, 20 bp, Artificial Sequence
  Description of Artificial Sequence: Synthetic oligonucleotide
  Target: PCSK9; (+) strand; PAM type: NRG; PAM sequence: TGG
ctcttcttacttcacccggc

SEQ ID NO: 18074 - DNA, 20 bp, Artificial Sequence
  Description of Artificial Sequence: Synthetic oligonucleotide
  Target: PCSK9; (+) strand; PAM type: NRG; PAM sequence: GGG
tcttcttacttcacccggct

SEQ ID NO: 18075 - DNA, 20 bp, Artificial Sequence
  Description of Artificial Sequence: Synthetic oligonucleotide
  Target: PCSK9; (+) strand; PAM type: NRG; PAM sequence: CGG
ggctgggctcctcattttta

SEQ ID NO: 18076 - DNA, 20 bp, Artificial Sequence
  Description of Artificial Sequence: Synthetic oligonucleotide
  Target: PCSK9; (+) strand; PAM type: NRG; PAM sequence: GGG
gctgggctcctcatttttac

SEQ ID NO: 18077 - DNA, 20 bp, Artificial Sequence
  Description of Artificial Sequence: Synthetic oligonucleotide
  Target: PCSK9; (+) strand; PAM type: NRG; PAM sequence: CAG
ctcctcatttttacgggtaa

SEQ ID NO: 18078 - DNA, 20 bp, Artificial Sequence
  Description of Artificial Sequence: Synthetic oligonucleotide
  Target: PCSK9; (+) strand; PAM type: NRG; PAM sequence: GAG
tcatttttacgggtaacagt

SEQ ID NO: 18079 - DNA, 20 bp, Artificial Sequence
  Description of Artificial Sequence: Synthetic oligonucleotide
  Target: PCSK9; (+) strand; PAM type: NRG; PAM sequence: AGG
catttttacgggtaacagtg

SEQ ID NO: 18080 - DNA, 20 bp, Artificial Sequence
  Description of Artificial Sequence: Synthetic oligonucleotide
  Target: PCSK9; (+) strand; PAM type: NRG; PAM sequence: TGG
tttacgggtaacagtgaggc

SEQ ID NO: 18081 - DNA, 20 bp, Artificial Sequence
  Description of Artificial Sequence: Synthetic oligonucleotide
  Target: PCSK9; (+) strand; PAM type: NRG; PAM sequence: GGG
ttacgggtaacagtgaggct

SEQ ID NO: 18082 - DNA, 20 bp, Artificial Sequence
  Description of Artificial Sequence: Synthetic oligonucleotide
  Target: PCSK9; (+) strand; PAM type: NRG; PAM sequence: AAG
cgggtaacagtgaggctggg

SEQ ID NO: 18083 - DNA, 20 bp, Artificial Sequence
  Description of Artificial Sequence: Synthetic oligonucleotide
  Target: PCSK9; (+) strand; PAM type: NRG; PAM sequence: AGG
gggtaacagtgaggctggga

SEQ ID NO: 18084 - DNA, 20 bp, Artificial Sequence
  Description of Artificial Sequence: Synthetic oligonucleotide
  Target: PCSK9; (+) strand; PAM type: NRG; PAM sequence: GGG
ggtaacagtgaggctgggaa

SEQ ID NO: 18085 - DNA, 20 bp, Artificial Sequence
  Description of Artificial Sequence: Synthetic oligonucleotide
  Target: PCSK9; (+) strand; PAM type: NRG; PAM sequence: GGG
gtaacagtgaggctgggaag

SEQ ID NO: 18086 - DNA, 20 bp, Artificial Sequence
  Description of Artificial Sequence: Synthetic oligonucleotide
  Target: PCSK9; (+) strand; PAM type: NRG; PAM sequence: CAG
tgaggctgggaaggggaaca

SEQ ID NO: 18087 - DNA, 20 bp, Artificial Sequence
  Description of Artificial Sequence: Synthetic oligonucleotide
  Target: PCSK9; (+) strand; PAM type: NRG; PAM sequence: CAG
ctgggaaggggaacacagac

SEQ ID NO: 18088 - DNA, 20 bp, Artificial Sequence
  Description of Artificial Sequence: Synthetic oligonucleotide
  Target: PCSK9; (+) strand; PAM type: NRG; PAM sequence: AGG
tgggaaggggaacacagacc

SEQ ID NO: 18089 - DNA, 20 bp, Artificial Sequence
  Description of Artificial Sequence: Synthetic oligonucleotide
  Target: PCSK9; (+) strand; PAM type: NRG; PAM sequence: AAG
gaaggggaacacagaccagg

SEQ ID NO: 18090 - DNA, 20 bp, Artificial Sequence
  Description of Artificial Sequence: Synthetic oligonucleotide
  Target: PCSK9; (+) strand; PAM type: NRG; PAM sequence: CGG
ggaacacagaccaggaagct

SEQ ID NO: 18091 - DNA, 20 bp, Artificial Sequence
  Description of Artificial Sequence: Synthetic oligonucleotide
  Target: PCSK9; (+) strand; PAM type: NRG; PAM sequence: GAG
cacagaccaggaagctcggt

SEQ ID NO: 18092 - DNA, 20 bp, Artificial Sequence
  Description of Artificial Sequence: Synthetic oligonucleotide
  Target: PCSK9; (+) strand; PAM type: NRG; PAM sequence: TGG
ccaggaagctcggtgagtga

SEQ ID NO: 18093 - DNA, 20 bp, Artificial Sequence
  Description of Artificial Sequence: Synthetic oligonucleotide
  Target: PCSK9; (+) strand; PAM type: NRG; PAM sequence: CAG
ggaagctcggtgagtgatgg

SEQ ID NO: 18094 - DNA, 20 bp, Artificial Sequence
  Description of Artificial Sequence: Synthetic oligonucleotide
  Target: PCSK9; (+) strand; PAM type: NRG; PAM sequence: CAG
tgatggcagaacgatgcctg

SEQ ID NO: 18095 - DNA, 20 bp, Artificial Sequence
  Description of Artificial Sequence: Synthetic oligonucleotide
  Target: PCSK9; (+) strand; PAM type: NRG; PAM sequence: AGG
gatggcagaacgatgcctgc

SEQ ID NO: 18096 - DNA, 20 bp, Artificial Sequence
  Description of Artificial Sequence: Synthetic oligonucleotide
  Target: PCSK9; (+) strand; PAM type: NRG; PAM sequence: TGG
cagaacgatgcctgcaggca

SEQ ID NO: 18097 - DNA, 20 bp, Artificial Sequence
  Description of Artificial Sequence: Synthetic oligonucleotide
  Target: PCSK9; (+) strand; PAM type: NRG; PAM sequence: CAG
gaactttttccgttatcacc

SEQ ID NO: 18098 - DNA, 20 bp, Artificial Sequence
  Description of Artificial Sequence: Synthetic oligonucleotide
  Target: PCSK9; (+) strand; PAM type: NRG; PAM sequence: AGG
aactttttccgttatcaccc

SEQ ID NO: 18099 - DNA, 20 bp, Artificial Sequence
  Description of Artificial Sequence: Synthetic oligonucleotide
  Target: PCSK9; (+) strand; PAM type: NRG; PAM sequence: TGG
atcacccaggcctgattcac

SEQ ID NO: 18100 - DNA, 20 bp, Artificial Sequence
  Description of Artificial Sequence: Synthetic oligonucleotide
  Target: PCSK9; (+) strand; PAM type: NRG; PAM sequence: TGG
ccaggcctgattcactggcc

SEQ ID NO: 18101 - DNA, 20 bp, Artificial Sequence
  Description of Artificial Sequence: Synthetic oligonucleotide
  Target: PCSK9; (+) strand; PAM type: NRG; PAM sequence: CGG
ggcctgattcactggcctgg

SEQ ID NO: 18102 - DNA, 20 bp, Artificial Sequence
  Description of Artificial Sequence: Synthetic oligonucleotide
  Target: PCSK9; (+) strand; PAM type: NRG; PAM sequence: GAG
cctgattcactggcctggcg

SEQ ID NO: 18103 - DNA, 20 bp, Artificial Sequence
  Description of Artificial Sequence: Synthetic oligonucleotide
  Target: PCSK9; (+) strand; PAM type: NRG; PAM sequence: AAG
ggcctggcggagatgcttct

SEQ ID NO: 18104 - DNA, 20 bp, Artificial Sequence
  Description of Artificial Sequence: Synthetic oligonucleotide
  Target: PCSK9; (+) strand; PAM type: NRG; PAM sequence: AGG
gcctggcggagatgcttcta

SEQ ID NO: 18105 - DNA, 20 bp, Artificial Sequence
  Description of Artificial Sequence: Synthetic oligonucleotide
  Target: PCSK9; (+) strand; PAM type: NRG; PAM sequence: TGG
gcggagatgcttctaaggca

SEQ ID NO: 18106 - DNA, 20 bp, Artificial Sequence
  Description of Artificial Sequence: Synthetic oligonucleotide
  Target: PCSK9; (+) strand; PAM type: NRG; PAM sequence: CGG
agatgcttctaaggcatggt

SEQ ID NO: 18107 - DNA, 20 bp, Artificial Sequence
  Description of Artificial Sequence: Synthetic oligonucleotide
  Target: PCSK9; (+) strand; PAM type: NRG; PAM sequence: GGG
gatgcttctaaggcatggtc

SEQ ID NO: 18108 - DNA, 20 bp, Artificial Sequence
  Description of Artificial Sequence: Synthetic oligonucleotide
  Target: PCSK9; (+) strand; PAM type: NRG; PAM sequence: GGG
atgcttctaaggcatggtcg

SEQ ID NO: 18109 - DNA, 20 bp, Artificial Sequence
  Description of Artificial Sequence: Synthetic oligonucleotide
  Target: PCSK9; (+) strand; PAM type: NRG; PAM sequence: GGG
tgcttctaaggcatggtcgg

SEQ ID NO: 18110 - DNA, 20 bp, Artificial Sequence
  Description of Artificial Sequence: Synthetic oligonucleotide
  Target: PCSK9; (+) strand; PAM type: NRG; PAM sequence: GAG
cttctaaggcatggtcgggg

SEQ ID NO: 18111 - DNA, 20 bp, Artificial Sequence
  Description of Artificial Sequence: Synthetic oligonucleotide
  Target: PCSK9; (+) strand; PAM type: NRG; PAM sequence: GAG
tctaaggcatggtcggggga

SEQ ID NO: 18112 - DNA, 20 bp, Artificial Sequence
  Description of Artificial Sequence: Synthetic oligonucleotide
  Target: PCSK9; (+) strand; PAM type: NRG; PAM sequence: AGG
ctaaggcatggtcgggggag

SEQ ID NO: 18113 - DNA, 20 bp, Artificial Sequence
  Description of Artificial Sequence: Synthetic oligonucleotide
  Target: PCSK9; (+) strand; PAM type: NRG; PAM sequence: GGG
taaggcatggtcgggggaga

SEQ ID NO: 18114 - DNA, 20 bp, Artificial Sequence
  Description of Artificial Sequence: Synthetic oligonucleotide
  Target: PCSK9; (+) strand; PAM type: NRG; PAM sequence: GAG
gccaacaactgtccctcctt

SEQ ID NO: 18115 - DNA, 20 bp, Artificial Sequence
  Description of Artificial Sequence: Synthetic oligonucleotide
  Target: PCSK9; (+) strand; PAM type: NRG; PAM sequence: CAG
aactgtccctccttgagcac

SEQ ID NO: 18116 - DNA, 20 bp, Artificial Sequence
  Description of Artificial Sequence: Synthetic oligonucleotide
  Target: PCSK9; (+) strand; PAM type: NRG; PAM sequence: AAG
cttgagcaccagccccaccc

SEQ ID NO: 18117 - DNA, 20 bp, Artificial Sequence
  Description of Artificial Sequence: Synthetic oligonucleotide
  Target: PCSK9; (+) strand; PAM type: NRG; PAM sequence: AAG
agcaccagccccacccaagc

SEQ ID NO: 18118 - DNA, 20 bp, Artificial Sequence
  Description of Artificial Sequence: Synthetic oligonucleotide
  Target: PCSK9; (+) strand; PAM type: NRG; PAM sequence: CAG
accagccccacccaagcaag

SEQ ID NO: 18119 - DNA, 20 bp, Artificial Sequence
  Description of Artificial Sequence: Synthetic oligonucleotide
  Target: PCSK9; (+) strand; PAM type: NRG; PAM sequence: TGG
gcaagcagacatttatcttt

SEQ ID NO: 18120 - DNA, 20 bp, Artificial Sequence
  Description of Artificial Sequence: Synthetic oligonucleotide
  Target: PCSK9; (+) strand; PAM type: NRG; PAM sequence: GGG
caagcagacatttatctttt

SEQ ID NO: 18121 - DNA, 20 bp, Artificial Sequence
  Description of Artificial Sequence: Synthetic oligonucleotide
  Target: PCSK9; (+) strand; PAM type: NRG; PAM sequence: CAG
tcctctctgttgccttttta

SEQ ID NO: 18122 - DNA, 20 bp, Artificial Sequence
  Description of Artificial Sequence: Synthetic oligonucleotide
  Target: PCSK9; (+) strand; PAM type: NRG; PAM sequence: TAG
ctttttacagccaacttttc

SEQ ID NO: 18123 - DNA, 20 bp, Artificial Sequence
  Description of Artificial Sequence: Synthetic oligonucleotide
  Target: PCSK9; (+) strand; PAM type: NRG; PAM sequence: AAG
tgttttgcttttgtaacttg

SEQ ID NO: 18124 - DNA, 20 bp, Artificial Sequence
  Description of Artificial Sequence: Synthetic oligonucleotide
  Target: PCSK9; (+) strand; PAM type: NRG; PAM sequence: TGG
taacttgaagatatttattc

SEQ ID NO: 18125 - DNA, 20 bp, Artificial Sequence
  Description of Artificial Sequence: Synthetic oligonucleotide
  Target: PCSK9; (+) strand; PAM type: NRG; PAM sequence: GGG
aacttgaagatatttattct

SEQ ID NO: 18126 - DNA, 20 bp, Artificial Sequence
  Description of Artificial Sequence: Synthetic oligonucleotide
  Target: PCSK9; (+) strand; PAM type: NRG; PAM sequence: TAG
gatatttattctgggttttg

SEQ ID NO: 18127 - DNA, 20 bp, Artificial Sequence
  Description of Artificial Sequence: Synthetic oligonucleotide
  Target: PCSK9; (+) strand; PAM type: NRG; PAM sequence: TGG
ttgtagcatttttattaata

SEQ ID NO: 18128 - DNA, 20 bp, Artificial Sequence
  Description of Artificial Sequence: Synthetic oligonucleotide
  Target: PCSK9; (+) strand; PAM type: NRG; PAM sequence: TAG
acgttgtcctaactcttgca

SEQ ID NO: 18129 - DNA, 20 bp, Artificial Sequence
  Description of Artificial Sequence: Synthetic oligonucleotide
  Target: PCSK9; (+) strand; PAM type: NRG; PAM sequence: TAG
cttgcatagacttgactgcc

SEQ ID NO: 18130 - DNA, 20 bp, Artificial Sequence
  Description of Artificial Sequence: Synthetic oligonucleotide
  Target: PCSK9; (+) strand; PAM type: NRG; PAM sequence: AGG
ttgcatagacttgactgcct

SEQ ID NO: 18131 - DNA, 20 bp, Artificial Sequence
  Description of Artificial Sequence: Synthetic oligonucleotide
  Target: PCSK9; (+) strand; PAM type: NRG; PAM sequence: GGG
tgcatagacttgactgccta

SEQ ID NO: 18132 - DNA, 20 bp, Artificial Sequence
  Description of Artificial Sequence: Synthetic oligonucleotide
  Target: PCSK9; (+) strand; PAM type: NRG; PAM sequence: TAG
gggtgatgccttgcttatac

SEQ ID NO: 18133 - DNA, 20 bp, Artificial Sequence
  Description of Artificial Sequence: Synthetic oligonucleotide
  Target: PCSK9; (+) strand; PAM type: NRG; PAM sequence: AGG
ggtgatgccttgcttatact

SEQ ID NO: 18134 - DNA, 20 bp, Artificial Sequence
  Description of Artificial Sequence: Synthetic oligonucleotide
  Target: PCSK9; (+) strand; PAM type: NRG; PAM sequence: TGG
gccttgcttatactaggaac

SEQ ID NO: 18135 - DNA, 20 bp, Artificial Sequence
  Description of Artificial Sequence: Synthetic oligonucleotide
  Target: PCSK9; (+) strand; PAM type: NRG; PAM sequence: GGG
ccttgcttatactaggaact

SEQ ID NO: 18136 - DNA, 20 bp, Artificial Sequence
  Description of Artificial Sequence: Synthetic oligonucleotide
  Target: PCSK9; (+) strand; PAM type: NRG; PAM sequence: AAG
gcttatactaggaactgggt

SEQ ID NO: 18137 - DNA, 20 bp, Artificial Sequence
  Description of Artificial Sequence: Synthetic oligonucleotide
  Target: PCSK9; (+) strand; PAM type: NRG; PAM sequence: TAG
aactgggtaagtttgttgaa

SEQ ID NO: 18138 - DNA, 20 bp, Artificial Sequence
  Description of Artificial Sequence: Synthetic oligonucleotide
  Target: PCSK9; (+) strand; PAM type: NRG; PAM sequence: GAG
ggtaagtttgttgaatagtt

SEQ ID NO: 18139 - DNA, 20 bp, Artificial Sequence
  Description of Artificial Sequence: Synthetic oligonucleotide
  Target: PCSK9; (+) strand; PAM type: NRG; PAM sequence: AAG
agtttgttgaatagttgagt

SEQ ID NO: 18140 - DNA, 20 bp, Artificial Sequence
  Description of Artificial Sequence: Synthetic oligonucleotide
  Target: PCSK9; (+) strand; PAM type: NRG; PAM sequence: AAG
gttgaatagttgagtaagcc

SEQ ID NO: 18141 - DNA, 20 bp, Artificial Sequence
  Description of Artificial Sequence: Synthetic oligonucleotide
  Target: PCSK9; (+) strand; PAM type: NRG; PAM sequence: GAG
gagtaagccaagtatttgat

SEQ ID NO: 18142 - DNA, 20 bp, Artificial Sequence
  Description of Artificial Sequence: Synthetic oligonucleotide
  Target: PCSK9; (+) strand; PAM type: NRG; PAM sequence: GAG
ttgatgagtacttttatctt

SEQ ID NO: 18143 - DNA, 20 bp, Artificial Sequence
  Description of Artificial Sequence: Synthetic oligonucleotide
  Target: PCSK9; (+) strand; PAM type: NRG; PAM sequence: AAG
agtacttttatcttgagtac

SEQ ID NO: 18144 - DNA, 20 bp, Artificial Sequence
  Description of Artificial Sequence: Synthetic oligonucleotide
  Target: PCSK9; (+) strand; PAM type: NRG; PAM sequence: TGG
tttatcttgagtacaagtat

SEQ ID NO: 18145 - DNA, 20 bp, Artificial Sequence
  Description of Artificial Sequence: Synthetic oligonucleotide
  Target: PCSK9; (+) strand; PAM type: NRG; PAM sequence: GGG
ttatcttgagtacaagtatt

SEQ ID NO: 18146 - DNA, 20 bp, Artificial Sequence
  Description of Artificial Sequence: Synthetic oligonucleotide
  Target: PCSK9; (+) strand; PAM type: NRG; PAM sequence: AAG
cttgagtacaagtattgggc

SEQ ID NO: 18147 - DNA, 20 bp, Artificial Sequence
  Description of Artificial Sequence: Synthetic oligonucleotide
  Target: PCSK9; (+) strand; PAM type: NRG; PAM sequence: TGG
tacaagtattgggcaagtac

SEQ ID NO: 18148 - DNA, 20 bp, Artificial Sequence
  Description of Artificial Sequence: Synthetic oligonucleotide
  Target: PCSK9; (+) strand; PAM type: NRG; PAM sequence: TAG
cttactccttgtgcctatcc

SEQ ID NO: 18149 - DNA, 20 bp, Artificial Sequence
  Description of Artificial Sequence: Synthetic oligonucleotide
  Target: PCSK9; (+) strand; PAM type: NRG; PAM sequence: AGG
ttactccttgtgcctatcct

SEQ ID NO: 18150 - DNA, 20 bp, Artificial Sequence
  Description of Artificial Sequence: Synthetic oligonucleotide
  Target: PCSK9; (+) strand; PAM type: NRG; PAM sequence: CAG
atgaaatgaatgtcttcctg

SEQ ID NO: 18151 - DNA, 20 bp, Artificial Sequence
  Description of Artificial Sequence: Synthetic oligonucleotide
  Target: PCSK9; (+) strand; PAM type: NRG; PAM sequence: CAG
agctcccctgaccaccctga

SEQ ID NO: 18152 - DNA, 20 bp, Artificial Sequence
  Description of Artificial Sequence: Synthetic oligonucleotide
  Target: PCSK9; (+) strand; PAM type: NRG; PAM sequence: AAG
cctgaccaccctgacagtca

SEQ ID NO: 18153 - DNA, 20 bp, Artificial Sequence
  Description of Artificial Sequence: Synthetic oligonucleotide
  Target: PCSK9; (+) strand; PAM type: NRG; PAM sequence: TGG
cagtcaaagtgcctcctcct

SEQ ID NO: 18154 - DNA, 20 bp, Artificial Sequence
  Description of Artificial Sequence: Synthetic oligonucleotide
  Target: PCSK9; (+) strand; PAM type: NRG; PAM sequence: CAG
aagtgcctcctccttggtga

SEQ ID NO: 18155 - DNA, 20 bp, Artificial Sequence
  Description of Artificial Sequence: Synthetic oligonucleotide
  Target: PCSK9; (+) strand; PAM type: NRG; PAM sequence: AGG
agtgcctcctccttggtgac

SEQ ID NO: 18156 - DNA, 20 bp, Artificial Sequence
  Description of Artificial Sequence: Synthetic oligonucleotide
  Target: PCSK9; (+) strand; PAM type: NRG; PAM sequence: CAG
ccttggtgacaggtgcccta

SEQ ID NO: 18157 - DNA, 20 bp, Artificial Sequence
  Description of Artificial Sequence: Synthetic oligonucleotide
  Target: PCSK9; (+) strand; PAM type: NRG; PAM sequence: TAG
acaggtgccctacagcactc

SEQ ID NO: 18158 - DNA, 20 bp, Artificial Sequence
  Description of Artificial Sequence: Synthetic oligonucleotide
  Target: PCSK9; (+) strand; PAM type: NRG; PAM sequence: CAG
ccttttcattcttttctccc

SEQ ID NO: 18159 - DNA, 20 bp, Artificial Sequence
  Description of Artificial Sequence: Synthetic oligonucleotide
  Target: PCSK9; (+) strand; PAM type: NRG; PAM sequence: TGG
attcttttctccccagtacc

SEQ ID NO: 18160 - DNA, 20 bp, Artificial Sequence
  Description of Artificial Sequence: Synthetic oligonucleotide
  Target: PCSK9; (+) strand; PAM type: NRG; PAM sequence: CAG
tctccccagtacctggcaca

SEQ ID NO: 18161 - DNA, 20 bp, Artificial Sequence
  Description of Artificial Sequence: Synthetic oligonucleotide
  Target: PCSK9; (+) strand; PAM type: NRG; PAM sequence: TGG
ccagtacctggcacacagcc

SEQ ID NO: 18162 - DNA, 20 bp, Artificial Sequence
  Description of Artificial Sequence: Synthetic oligonucleotide
  Target: PCSK9; (+) strand; PAM type: NRG; PAM sequence: GAG
cctggcacacagcctggccc

SEQ ID NO: 18163 - DNA, 20 bp, Artificial Sequence
  Description of Artificial Sequence: Synthetic oligonucleotide
  Target: PCSK9; (+) strand; PAM type: NRG; PAM sequence: CGG
cagcctggcccgagtattta

SEQ ID NO: 18164 - DNA, 20 bp, Artificial Sequence
  Description of Artificial Sequence: Synthetic oligonucleotide
  Target: PCSK9; (+) strand; PAM type: NRG; PAM sequence: AAG
ggcccgagtatttacggaat

SEQ ID NO: 18165 - DNA, 20 bp, Artificial Sequence
  Description of Artificial Sequence: Synthetic oligonucleotide
  Target: PCSK9; (+) strand; PAM type: NRG; PAM sequence: CAG
agtatttacggaataagtta

SEQ ID NO: 18166 - DNA, 20 bp, Artificial Sequence
  Description of Artificial Sequence: Synthetic oligonucleotide
  Target: PCSK9; (+) strand; PAM type: NRG; PAM sequence: CAG
tacggaataagttacagtgc

SEQ ID NO: 18167 - DNA, 20 bp, Artificial Sequence
  Description of Artificial Sequence: Synthetic oligonucleotide
  Target: PCSK9; (+) strand; PAM type: NRG; PAM sequence: GAG
gtgccagatgcttctgtaat

SEQ ID NO: 18168 - DNA, 20 bp, Artificial Sequence
  Description of Artificial Sequence: Synthetic oligonucleotide
  Target: PCSK9; (+) strand; PAM type: NRG; PAM sequence: CAG
cagatgcttctgtaatgagc

SEQ ID NO: 18169 - DNA, 20 bp, Artificial Sequence
  Description of Artificial Sequence: Synthetic oligonucleotide
  Target: PCSK9; (+) strand; PAM type: NRG; PAM sequence: AAG
ttctgtaatgagccagtgct

SEQ ID NO: 18170 - DNA, 20 bp, Artificial Sequence
  Description of Artificial Sequence: Synthetic oligonucleotide
  Target: PCSK9; (+) strand; PAM type: NRG; PAM sequence: TGG
atgagccagtgctaagtcca

SEQ ID NO: 18171 - DNA, 20 bp, Artificial Sequence
  Description of Artificial Sequence: Synthetic oligonucleotide
  Target: PCSK9; (+) strand; PAM type: NRG; PAM sequence: CAG
ttttttcatgatttaaaatt

SEQ ID NO: 18172 - DNA, 20 bp, Artificial Sequence
  Description of Artificial Sequence: Synthetic oligonucleotide
  Target: PCSK9; (+) strand; PAM type: NRG; PAM sequence: CAG
tcatgatttaaaattcagaa

SEQ ID NO: 18173 - DNA, 20 bp, Artificial Sequence
  Description of Artificial Sequence: Synthetic oligonucleotide
  Target: PCSK9; (+) strand; PAM type: NRG; PAM sequence: CAG
tttaaaattcagaacagtct

SEQ ID NO: 18174 - DNA, 20 bp, Artificial Sequence
  Description of Artificial Sequence: Synthetic oligonucleotide
  Target: PCSK9; (+) strand; PAM type: NRG; PAM sequence: TGG
aattcagaacagtctcagat

SEQ ID NO: 18175 - DNA, 20 bp, Artificial Sequence
  Description of Artificial Sequence: Synthetic oligonucleotide
  Target: PCSK9; (+) strand; PAM type: NRG; PAM sequence: GGG
attcagaacagtctcagatt

SEQ ID NO: 18176 - DNA, 20 bp, Artificial Sequence
  Description of Artificial Sequence: Synthetic oligonucleotide
  Target: PCSK9; (+) strand; PAM type: NRG; PAM sequence: TGG
cagtctcagattgggtgcaa

SEQ ID NO: 18177 - DNA, 20 bp, Artificial Sequence
  Description of Artificial Sequence: Synthetic oligonucleotide
  Target: PCSK9; (+) strand; PAM type: NRG; PAM sequence: CAG
atggctcacacctgtaatct

SEQ ID NO: 18178 - DNA, 20 bp, Artificial Sequence
  Description of Artificial Sequence: Synthetic oligonucleotide
  Target: PCSK9; (+) strand; PAM type: NRG; PAM sequence: TGG
cacctgtaatctcagtactt

SEQ ID NO: 18179 - DNA, 20 bp, Artificial Sequence
  Description of Artificial Sequence: Synthetic oligonucleotide
  Target: PCSK9; (+) strand; PAM type: NRG; PAM sequence: GGG
acctgtaatctcagtacttt

SEQ ID NO: 18180 - DNA, 20 bp, Artificial Sequence
  Description of Artificial Sequence: Synthetic oligonucleotide
  Target: PCSK9; (+) strand; PAM type: NRG; PAM sequence: GAG
ctgtaatctcagtactttgg

SEQ ID NO: 18181 - DNA, 20 bp, Artificial Sequence
  Description of Artificial Sequence: Synthetic oligonucleotide
  Target: PCSK9; (+) strand; PAM type: NRG; PAM sequence: AGG
tgtaatctcagtactttggg

SEQ ID NO: 18182 - DNA, 20 bp, Artificial Sequence
  Description of Artificial Sequence: Synthetic oligonucleotide
  Target: PCSK9; (+) strand; PAM type: NRG; PAM sequence: GAG
tctcagtactttgggaggct

SEQ ID NO: 18183 - DNA, 20 bp, Artificial Sequence
  Description of Artificial Sequence: Synthetic oligonucleotide
  Target: PCSK9; (+) strand; PAM type: NRG; PAM sequence: AGG
ctcagtactttgggaggctg

SEQ ID NO: 18184 - DNA, 20 bp, Artificial Sequence
  Description of Artificial Sequence: Synthetic oligonucleotide
  Target: PCSK9; (+) strand; PAM type: NRG; PAM sequence: CAG
agtactttgggaggctgagg

SEQ ID NO: 18185 - DNA, 20 bp, Artificial Sequence
  Description of Artificial Sequence: Synthetic oligonucleotide
  Target: PCSK9; (+) strand; PAM type: NRG; PAM sequence: AGG
gtactttgggaggctgaggc

SEQ ID NO: 18186 - DNA, 20 bp, Artificial Sequence
  Description of Artificial Sequence: Synthetic oligonucleotide
  Target: PCSK9; (+) strand; PAM type: NRG; PAM sequence: GAG
actttgggaggctgaggcag

SEQ ID NO: 18187 - DNA, 20 bp, Artificial Sequence
  Description of Artificial Sequence: Synthetic oligonucleotide
  Target: PCSK9; (+) strand; PAM type: NRG; PAM sequence: AGG
ctttgggaggctgaggcagg

SEQ ID NO: 18188 - DNA, 20 bp, Artificial Sequence
  Description of Artificial Sequence: Synthetic oligonucleotide
  Target: PCSK9; (+) strand; PAM type: NRG; PAM sequence: TAG
gcaggaggattgcttgtgtt

SEQ ID NO: 18189 - DNA, 20 bp, Artificial Sequence
  Description of Artificial Sequence: Synthetic oligonucleotide
  Target: PCSK9; (+) strand; PAM type: NRG; PAM sequence: AGG
caggaggattgcttgtgttt

SEQ ID NO: 18190 - DNA, 20 bp, Artificial Sequence
  Description of Artificial Sequence: Synthetic oligonucleotide
  Target: PCSK9; (+) strand; PAM type: NRG; PAM sequence: AAG
ttgcttgtgtttaggaattc

SEQ ID NO: 18191 - DNA, 20 bp, Artificial Sequence
  Description of Artificial Sequence: Synthetic oligonucleotide
  Target: PCSK9; (+) strand; PAM type: NRG; PAM sequence: TGG
tgtttaggaattcaagaccc

SEQ ID NO: 18192 - DNA, 20 bp, Artificial Sequence
  Description of Artificial Sequence: Synthetic oligonucleotide
  Target: PCSK9; (+) strand; PAM type: NRG; PAM sequence: GGG
gtttaggaattcaagaccct

SEQ ID NO: 18193 - DNA, 20 bp, Artificial Sequence
  Description of Artificial Sequence: Synthetic oligonucleotide
  Target: PCSK9; (+) strand; PAM type: NRG; PAM sequence: CAG
gaattcaagaccctgggcaa

SEQ ID NO: 18194 - DNA, 20 bp, Artificial Sequence
  Description of Artificial Sequence: Synthetic oligonucleotide
  Target: PCSK9; (+) strand; PAM type: NRG; PAM sequence: GAG
tcaagaccctgggcaacagt

SEQ ID NO: 18195 - DNA, 20 bp, Artificial Sequence
  Description of Artificial Sequence: Synthetic oligonucleotide
  Target: PCSK9; (+) strand; PAM type: NRG; PAM sequence: AAG
gtctctataaaaaaatttaa

SEQ ID NO: 18196 - DNA, 20 bp, Artificial Sequence
  Description of Artificial Sequence: Synthetic oligonucleotide
  Target: PCSK9; (+) strand; PAM type: NRG; PAM sequence: TAG
tataaaaaaatttaaaagat

SEQ ID NO: 18197 - DNA, 20 bp, Artificial Sequence
  Description of Artificial Sequence: Synthetic oligonucleotide
  Target: PCSK9; (+) strand; PAM type: NRG; PAM sequence: GAG
aaaaaatttaaaagattagc

SEQ ID NO: 18198 - DNA, 20 bp, Artificial Sequence
  Description of Artificial Sequence: Synthetic oligonucleotide
  Target: PCSK9; (+) strand; PAM type: NRG; PAM sequence: AGG
aaaaatttaaaagattagcg

SEQ ID NO: 18199 - DNA, 20 bp, Artificial Sequence
  Description of Artificial Sequence: Synthetic oligonucleotide
  Target: PCSK9; (+) strand; PAM type: NRG; PAM sequence: TGG
tttaaaagattagcgaggtg

SEQ ID NO: 18200 - DNA, 20 bp, Artificial Sequence
  Description of Artificial Sequence: Synthetic oligonucleotide
  Target: PCSK9; (+) strand; PAM type: NRG; PAM sequence: TAG
aaaagattagcgaggtgtgg

SEQ ID NO: 18201 - DNA, 20 bp, Artificial Sequence
  Description of Artificial Sequence: Synthetic oligonucleotide
  Target: PCSK9; (+) strand; PAM type: NRG; PAM sequence: TGG
ggtgtggtagcacatgcctg

SEQ ID NO: 18202 - DNA, 20 bp, Artificial Sequence
  Description of Artificial Sequence: Synthetic oligonucleotide
  Target: PCSK9; (+) strand; PAM type: NRG; PAM sequence: CGG
gtagcacatgcctgtggtcc

SEQ ID NO: 18203 - DNA, 20 bp, Artificial Sequence
  Description of Artificial Sequence: Synthetic oligonucleotide
  Target: PCSK9; (+) strand; PAM type: NRG; PAM sequence: CAG
tgcctgtggtcccggctact

SEQ ID NO: 18204 - DNA, 20 bp, Artificial Sequence
  Description of Artificial Sequence: Synthetic oligonucleotide
  Target: PCSK9; (+) strand; PAM type: NRG; PAM sequence: AGG
gcctgtggtcccggctactc

SEQ ID NO: 18205 - DNA, 20 bp, Artificial Sequence
  Description of Artificial Sequence: Synthetic oligonucleotide
  Target: PCSK9; (+) strand; PAM type: NRG; PAM sequence: GAG
ctgtggtcccggctactcag

SEQ ID NO: 18206 - DNA, 20 bp, Artificial Sequence
  Description of Artificial Sequence: Synthetic oligonucleotide
  Target: PCSK9; (+) strand; PAM type: NRG; PAM sequence: AGG
tgtggtcccggctactcagg

SEQ ID NO: 18207 - DNA, 20 bp, Artificial Sequence
  Description of Artificial Sequence: Synthetic oligonucleotide
  Target: PCSK9; (+) strand; PAM type: NRG; PAM sequence: TGG
ggctactcaggaggctgata

SEQ ID NO: 18208 - DNA, 20 bp, Artificial Sequence
  Description of Artificial Sequence: Synthetic oligonucleotide
  Target: PCSK9; (+) strand; PAM type: NRG; PAM sequence: GGG
gctactcaggaggctgatat

SEQ ID NO: 18209 - DNA, 20 bp, Artificial Sequence
  Description of Artificial Sequence: Synthetic oligonucleotide
  Target: PCSK9; (+) strand; PAM type: NRG; PAM sequence: GAG
tactcaggaggctgatatgg

SEQ ID NO: 18210 - DNA, 20 bp, Artificial Sequence
  Description of Artificial Sequence: Synthetic oligonucleotide
  Target: PCSK9; (+) strand; PAM type: NRG; PAM sequence: AGG
actcaggaggctgatatggg

SEQ ID NO: 18211 - DNA, 20 bp, Artificial Sequence
  Description of Artificial Sequence: Synthetic oligonucleotide
  Target: PCSK9; (+) strand; PAM type: NRG; PAM sequence: GAG
ctgatatgggaggcttgctt

SEQ ID NO: 18212 - DNA, 20 bp, Artificial Sequence
  Description of Artificial Sequence: Synthetic oligonucleotide
  Target: PCSK9; (+) strand; PAM type: NRG; PAM sequence: TGG
tatgggaggcttgcttgagc

SEQ ID NO: 18213 - DNA, 20 bp, Artificial Sequence
  Description of Artificial Sequence: Synthetic oligonucleotide
  Target: PCSK9; (+) strand; PAM type: NRG; PAM sequence: GGG
atgggaggcttgcttgagct

SEQ ID NO: 18214 - DNA, 20 bp, Artificial Sequence
  Description of Artificial Sequence: Synthetic oligonucleotide
  Target: PCSK9; (+) strand; PAM type: NRG; PAM sequence: GAG
gggaggcttgcttgagctgg

SEQ ID NO: 18215 - DNA, 20 bp, Artificial Sequence
  Description of Artificial Sequence: Synthetic oligonucleotide
  Target: PCSK9; (+) strand; PAM type: NRG; PAM sequence: AGG
ggaggcttgcttgagctggg

SEQ ID NO: 18216 - DNA, 20 bp, Artificial Sequence
  Description of Artificial Sequence: Synthetic oligonucleotide
  Target: PCSK9; (+) strand; PAM type: NRG; PAM sequence: GAG
cttgcttgagctgggaggct

SEQ ID NO: 18217 - DNA, 20 bp, Artificial Sequence
  Description of Artificial Sequence: Synthetic oligonucleotide
  Target: PCSK9; (+) strand; PAM type: NRG; PAM sequence: AGG
ttgcttgagctgggaggctg

SEQ ID NO: 18218 - DNA, 20 bp, Artificial Sequence
  Description of Artificial Sequence: Synthetic oligonucleotide
  Target: PCSK9; (+) strand; PAM type: NRG; PAM sequence: GGG
tgcttgagctgggaggctga

SEQ ID NO: 18219 - DNA, 20 bp, Artificial Sequence
  Description of Artificial Sequence: Synthetic oligonucleotide
  Target: PCSK9; (+) strand; PAM type: NRG; PAM sequence: CAG
gagctgggaggctgagggtg

SEQ ID NO: 18220 - DNA, 20 bp, Artificial Sequence
  Description of Artificial Sequence: Synthetic oligonucleotide
  Target: PCSK9; (+) strand; PAM type: NRG; PAM sequence: GAG
tgggaggctgagggtgcagt

SEQ ID NO: 18221 - DNA, 20 bp, Artificial Sequence
  Description of Artificial Sequence: Synthetic oligonucleotide
  Target: PCSK9; (+) strand; PAM type: NRG; PAM sequence: CAG
attacatcatcactgcactg

SEQ ID NO: 18222 - DNA, 20 bp, Artificial Sequence
  Description of Artificial Sequence: Synthetic oligonucleotide
  Target: PCSK9; (+) strand; PAM type: NRG; PAM sequence: TGG
atcatcactgcactgcagcc

SEQ ID NO: 18223 - DNA, 20 bp, Artificial Sequence
  Description of Artificial Sequence: Synthetic oligonucleotide
  Target: PCSK9; (+) strand; PAM type: NRG; PAM sequence: GGG
tcatcactgcactgcagcct

SEQ ID NO: 18224 - DNA, 20 bp, Artificial Sequence
  Description of Artificial Sequence: Synthetic oligonucleotide
  Target: PCSK9; (+) strand; PAM type: NRG; PAM sequence: CAG
ctgcactgcagcctgggtta

SEQ ID NO: 18225 - DNA, 20 bp, Artificial Sequence
  Description of Artificial Sequence: Synthetic oligonucleotide
  Target: PCSK9; (+) strand; PAM type: NRG; PAM sequence: GAG
gcactgcagcctgggttaca

SEQ ID NO: 18226 - DNA, 20 bp, Artificial Sequence
  Description of Artificial Sequence: Synthetic oligonucleotide
  Target: PCSK9; (+) strand; PAM type: NRG; PAM sequence: TGG
cataatgatcccattcaatg

SEQ ID NO: 18227 - DNA, 20 bp, Artificial Sequence
  Description of Artificial Sequence: Synthetic oligonucleotide
  Target: PCSK9; (+) strand; PAM type: NRG; PAM sequence: GGG
ataatgatcccattcaatgt

SEQ ID NO: 18228 - DNA, 20 bp, Artificial Sequence
  Description of Artificial Sequence: Synthetic oligonucleotide
  Target: PCSK9; (+) strand; PAM type: NRG; PAM sequence: CAG
cccattcaatgtgggacctc

SEQ ID NO: 18229 - DNA, 20 bp, Artificial Sequence
  Description of Artificial Sequence: Synthetic oligonucleotide
  Target: PCSK9; (+) strand; PAM type: NRG; PAM sequence: AGG
ccattcaatgtgggacctcc

SEQ ID NO: 18230 - DNA, 20 bp, Artificial Sequence
  Description of Artificial Sequence: Synthetic oligonucleotide
  Target: PCSK9; (+) strand; PAM type: NRG; PAM sequence: AAG
acctccaggccctccactct

SEQ ID NO: 18231 - DNA, 20 bp, Artificial Sequence
  Description of Artificial Sequence: Synthetic oligonucleotide
  Target: PCSK9; (+) strand; PAM type: NRG; PAM sequence: AGG
cctccaggccctccactcta

SEQ ID NO: 18232 - DNA, 20 bp, Artificial Sequence
  Description of Artificial Sequence: Synthetic oligonucleotide
  Target: PCSK9; (+) strand; PAM type: NRG; PAM sequence: TGG
caggccctccactctaaggc

SEQ ID NO: 18233 - DNA, 20 bp, Artificial Sequence
  Description of Artificial Sequence: Synthetic oligonucleotide
  Target: PCSK9; (+) strand; PAM type: NRG; PAM sequence: TAG
cactctaaggctggtgaata

SEQ ID NO: 18234 - DNA, 20 bp, Artificial Sequence
  Description of Artificial Sequence: Synthetic oligonucleotide
  Target: PCSK9; (+) strand; PAM type: NRG; PAM sequence: AAG
ctggtgaatatagctgtctt

SEQ ID NO: 18235 - DNA, 20 bp, Artificial Sequence
  Description of Artificial Sequence: Synthetic oligonucleotide
  Target: PCSK9; (+) strand; PAM type: NRG; PAM sequence: AAG
tgaatatagctgtcttaagc

SEQ ID NO: 18236 - DNA, 20 bp, Artificial Sequence
  Description of Artificial Sequence: Synthetic oligonucleotide
  Target: PCSK9; (+) strand; PAM type: NRG; PAM sequence: TAG
aagcaagttctctctctctc

SEQ ID NO: 18237 - DNA, 20 bp, Artificial Sequence
  Description of Artificial Sequence: Synthetic oligonucleotide
  Target: PCSK9; (+) strand; PAM type: NRG; PAM sequence: CAG
aagttctctctctctctaga

SEQ ID NO: 18238 - DNA, 20 bp, Artificial Sequence
  Description of Artificial Sequence: Synthetic oligonucleotide
  Target: PCSK9; (+) strand; PAM type: NRG; PAM sequence: AAG
ctctagacagcccatgtcat

SEQ ID NO: 18239 - DNA, 20 bp, Artificial Sequence
  Description of Artificial Sequence: Synthetic oligonucleotide
  Target: PCSK9; (+) strand; PAM type: NRG; PAM sequence: AGG
tctagacagcccatgtcata

SEQ ID NO: 18240 - DNA, 20 bp, Artificial Sequence
  Description of Artificial Sequence: Synthetic oligonucleotide
  Target: PCSK9; (+) strand; PAM type: NRG; PAM sequence: CAG
gcccatgtcataaggaatct

SEQ ID NO: 18241 - DNA, 20 bp, Artificial Sequence
  Description of Artificial Sequence: Synthetic oligonucleotide
  Target: PCSK9; (+) strand; PAM type: NRG; PAM sequence: AGG
cccatgtcataaggaatctc

SEQ ID NO: 18242 - DNA, 20 bp, Artificial Sequence
  Description of Artificial Sequence: Synthetic oligonucleotide
  Target: PCSK9; (+) strand; PAM type: NRG; PAM sequence: CAG
atctcaggcaaaattcctcc

SEQ ID NO: 18243 - DNA, 20 bp, Artificial Sequence
  Description of Artificial Sequence: Synthetic oligonucleotide
  Target: PCSK9; (+) strand; PAM type: NRG; PAM sequence: CAG
gattacattttctgacaatt

SEQ ID NO: 18244 - DNA, 20 bp, Artificial Sequence
  Description of Artificial Sequence: Synthetic oligonucleotide
  Target: PCSK9; (+) strand; PAM type: NRG; PAM sequence: TGG
tgacaattcagtgtcatata

SEQ ID NO: 18245 - DNA, 20 bp, Artificial Sequence
  Description of Artificial Sequence: Synthetic oligonucleotide
  Target: PCSK9; (+) strand; PAM type: NRG; PAM sequence: AAG
aattcagtgtcatatatgga

SEQ ID NO: 18246 - DNA, 20 bp, Artificial Sequence
  Description of Artificial Sequence: Synthetic oligonucleotide
  Target: PCSK9; (+) strand; PAM type: NRG; PAM sequence: AAG
gtcatatatggaaagcattc

SEQ ID NO: 18247 - DNA, 20 bp, Artificial Sequence
  Description of Artificial Sequence: Synthetic oligonucleotide
  Target: PCSK9; (+) strand; PAM type: NRG; PAM sequence: GAG
catatatggaaagcattcaa

SEQ ID NO: 18248 - DNA, 20 bp, Artificial Sequence
  Description of Artificial Sequence: Synthetic oligonucleotide
  Target: PCSK9; (+) strand; PAM type: NRG; PAM sequence: CAG
ggaaagcattcaagagttga

SEQ ID NO: 18249 - DNA, 20 bp, Artificial Sequence
  Description of Artificial Sequence: Synthetic oligonucleotide
  Target: PCSK9; (+) strand; PAM type: NRG; PAM sequence: TGG
agcattcaagagttgacaga

SEQ ID NO: 18250 - DNA, 20 bp, Artificial Sequence
  Description of Artificial Sequence: Synthetic oligonucleotide
  Target: PCSK9; (+) strand; PAM type: NRG; PAM sequence: TGG
caagagttgacagatggcaa

SEQ ID NO: 18251 - DNA, 20 bp, Artificial Sequence
  Description of Artificial Sequence: Synthetic oligonucleotide
  Target: PCSK9; (+) strand; PAM type: NRG; PAM sequence: TGG
actgtgttatctctgcccgt

SEQ ID NO: 18252 - DNA, 20 bp, Artificial Sequence
  Description of Artificial Sequence: Synthetic oligonucleotide
  Target: PCSK9; (+) strand; PAM type: NRG; PAM sequence: TAG
tatctctgcccgttggaacc

SEQ ID NO: 18253 - DNA, 20 bp, Artificial Sequence
  Description of Artificial Sequence: Synthetic oligonucleotide
  Target: PCSK9; (+) strand; PAM type: NRG; PAM sequence: AGG
atctctgcccgttggaacct

SEQ ID NO: 18254 - DNA, 20 bp, Artificial Sequence
  Description of Artificial Sequence: Synthetic oligonucleotide
  Target: PCSK9; (+) strand; PAM type: NRG; PAM sequence: TGG
cccgttggaacctaggcctg

SEQ ID NO: 18255 - DNA, 20 bp, Artificial Sequence
  Description of Artificial Sequence: Synthetic oligonucleotide
  Target: PCSK9; (+) strand; PAM type: NRG; PAM sequence: TAG
ctaggcctgtggtgcaaccc

SEQ ID NO: 18256 - DNA, 20 bp, Artificial Sequence
  Description of Artificial Sequence: Synthetic oligonucleotide
  Target: PCSK9; (+) strand; PAM type: NRG; PAM sequence: CAG
ctctctctccttcccctcca

SEQ ID NO: 18257 - DNA, 20 bp, Artificial Sequence
  Description of Artificial Sequence: Synthetic oligonucleotide
  Target: PCSK9; (+) strand; PAM type: NRG; PAM sequence: AAG
tccttcccctccacagaatc

SEQ ID NO: 18258 - DNA, 20 bp, Artificial Sequence
  Description of Artificial Sequence: Synthetic oligonucleotide
  Target: PCSK9; (+) strand; PAM type: NRG; PAM sequence: CAG
ccctccacagaatcaagtat

SEQ ID NO: 18259 - DNA, 20 bp, Artificial Sequence
  Description of Artificial Sequence: Synthetic oligonucleotide
  Target: PCSK9; (+) strand; PAM type: NRG; PAM sequence: TGG
ccacagaatcaagtatcagc

SEQ ID NO: 18260 - DNA, 20 bp, Artificial Sequence
  Description of Artificial Sequence: Synthetic oligonucleotide
  Target: PCSK9; (+) strand; PAM type: NRG; PAM sequence: TAG
agaatcaagtatcagctggt

SEQ ID NO: 18261 - DNA, 20 bp, Artificial Sequence
  Description of Artificial Sequence: Synthetic oligonucleotide
  Target: PCSK9; (+) strand; PAM type: NRG; PAM sequence: GAG
aatcaagtatcagctggtta

SEQ ID NO: 18262 - DNA, 20 bp, Artificial Sequence
  Description of Artificial Sequence: Synthetic oligonucleotide
  Target: PCSK9; (+) strand; PAM type: NRG; PAM sequence: CAG
gttagagatccacaccctga

SEQ ID NO: 18263 - DNA, 20 bp, Artificial Sequence
  Description of Artificial Sequence: Synthetic oligonucleotide
  Target: PCSK9; (+) strand; PAM type: NRG; PAM sequence: TGG
ccctgacagctctgtgatgt

SEQ ID NO: 18264 - DNA, 20 bp, Artificial Sequence
  Description of Artificial Sequence: Synthetic oligonucleotide
  Target: PCSK9; (+) strand; PAM type: NRG; PAM sequence: TGG
tctgtgatgttggaacaact

SEQ ID NO: 18265 - DNA, 20 bp, Artificial Sequence
  Description of Artificial Sequence: Synthetic oligonucleotide
  Target: PCSK9; (+) strand; PAM type: NRG; PAM sequence: CAG
ttggaacaacttggttcttg

SEQ ID NO: 18266 - DNA, 20 bp, Artificial Sequence
  Description of Artificial Sequence: Synthetic oligonucleotide
  Target: PCSK9; (+) strand; PAM type: NRG; PAM sequence: GAG
ggaacaacttggttcttgca

SEQ ID NO: 18267 - DNA, 20 bp, Artificial Sequence
  Description of Artificial Sequence: Synthetic oligonucleotide
  Target: PCSK9; (+) strand; PAM type: NRG; PAM sequence: AGG
gaacaacttggttcttgcag

SEQ ID NO: 18268 - DNA, 20 bp, Artificial Sequence
  Description of Artificial Sequence: Synthetic oligonucleotide
  Target: PCSK9; (+) strand; PAM type: NRG; PAM sequence: GGG
aacaacttggttcttgcaga

SEQ ID NO: 18269 - DNA, 20 bp, Artificial Sequence
  Description of Artificial Sequence: Synthetic oligonucleotide
  Target: PCSK9; (+) strand; PAM type: NRG; PAM sequence: TAG
acttggttcttgcagagggt

SEQ ID NO: 18270 - DNA, 20 bp, Artificial Sequence
  Description of Artificial Sequence: Synthetic oligonucleotide
  Target: PCSK9; (+) strand; PAM type: NRG; PAM sequence: CAG
tggttcttgcagagggttag

SEQ ID NO: 18271 - DNA, 20 bp, Artificial Sequence
  Description of Artificial Sequence: Synthetic oligonucleotide
  Target: PCSK9; (+) strand; PAM type: NRG; PAM sequence: AGG
ggttcttgcagagggttagc

SEQ ID NO: 18272 - DNA, 20 bp, Artificial Sequence
  Description of Artificial Sequence: Synthetic oligonucleotide
  Target: PCSK9; (+) strand; PAM type: NRG; PAM sequence: TGG
tcttgcagagggttagcagg

SEQ ID NO: 18273 - DNA, 20 bp, Artificial Sequence
  Description of Artificial Sequence: Synthetic oligonucleotide
  Target: PCSK9; (+) strand; PAM type: NRG; PAM sequence: CAG
gagggttagcaggtggtcac

SEQ ID NO: 18274 - DNA, 20 bp, Artificial Sequence
  Description of Artificial Sequence: Synthetic oligonucleotide
  Target: PCSK9; (+) strand; PAM type: NRG; PAM sequence: AGG
agggttagcaggtggtcacc

SEQ ID NO: 18275 - DNA, 20 bp, Artificial Sequence
  Description of Artificial Sequence: Synthetic oligonucleotide
  Target: PCSK9; (+) strand; PAM type: NRG; PAM sequence: GGG
gggttagcaggtggtcacca

SEQ ID NO: 18276 - DNA, 20 bp, Artificial Sequence
  Description of Artificial Sequence: Synthetic oligonucleotide
  Target: PCSK9; (+) strand; PAM type: NRG; PAM sequence: CGG
agcaggtggtcaccagggat

SEQ ID NO: 18277 - DNA, 20 bp, Artificial Sequence
  Description of Artificial Sequence: Synthetic oligonucleotide
  Target: PCSK9; (+) strand; PAM type: NRG; PAM sequence: GGG
gcaggtggtcaccagggatc

SEQ ID NO: 18278 - DNA, 20 bp, Artificial Sequence
  Description of Artificial Sequence: Synthetic oligonucleotide
  Target: PCSK9; (+) strand; PAM type: NRG; PAM sequence: GGG
caggtggtcaccagggatcg

SEQ ID NO: 18279 - DNA, 20 bp, Artificial Sequence
  Description of Artificial Sequence: Synthetic oligonucleotide
  Target: PCSK9; (+) strand; PAM type: NRG; PAM sequence: GAG
ggtggtcaccagggatcggg

SEQ ID NO: 18280 - DNA, 20 bp, Artificial Sequence
  Description of Artificial Sequence: Synthetic oligonucleotide
  Target: PCSK9; (+) strand; PAM type: NRG; PAM sequence: AGG
gtggtcaccagggatcgggg

SEQ ID NO: 18281 - DNA, 20 bp, Artificial Sequence
  Description of Artificial Sequence: Synthetic oligonucleotide
  Target: PCSK9; (+) strand; PAM type: NRG; PAM sequence: AAG
gtcaccagggatcggggagg

SEQ ID NO: 18282 - DNA, 20 bp, Artificial Sequence
  Description of Artificial Sequence: Synthetic oligonucleotide
  Target: PCSK9; (+) strand; PAM type: NRG; PAM sequence: AGG
tcaccagggatcggggagga

SEQ ID NO: 18283 - DNA, 20 bp, Artificial Sequence
  Description of Artificial Sequence: Synthetic oligonucleotide
  Target: PCSK9; (+) strand; PAM type: NRG; PAM sequence: GGG
caccagggatcggggaggaa

SEQ ID NO: 18284 - DNA, 20 bp, Artificial Sequence
  Description of Artificial Sequence: Synthetic oligonucleotide
  Target: PCSK9; (+) strand; PAM type: NRG; PAM sequence: GGG
accagggatcggggaggaag

SEQ ID NO: 18285 - DNA, 20 bp, Artificial Sequence
  Description of Artificial Sequence: Synthetic oligonucleotide
  Target: PCSK9; (+) strand; PAM type: NRG; PAM sequence: TGG
ggatcggggaggaaggggtg

SEQ ID NO: 18286 - DNA, 20 bp, Artificial Sequence
  Description of Artificial Sequence: Synthetic oligonucleotide
  Target: PCSK9; (+) strand; PAM type: NRG; PAM sequence: CAG
ggaggaaggggtgtggcttg

SEQ ID NO: 18287 - DNA, 20 bp, Artificial Sequence
  Description of Artificial Sequence: Synthetic oligonucleotide
  Target: PCSK9; (+) strand; PAM type: NRG; PAM sequence: AGG
gaggaaggggtgtggcttgc

SEQ ID NO: 18288 - DNA, 20 bp, Artificial Sequence
  Description of Artificial Sequence: Synthetic oligonucleotide
  Target: PCSK9; (+) strand; PAM type: NRG; PAM sequence: AAG
gaaggggtgtggcttgcagg

SEQ ID NO: 18289 - DNA, 20 bp, Artificial Sequence
  Description of Artificial Sequence: Synthetic oligonucleotide
  Target: PCSK9; (+) strand; PAM type: NRG; PAM sequence: AGG
aaggggtgtggcttgcagga

SEQ ID NO: 18290 - DNA, 20 bp, Artificial Sequence
  Description of Artificial Sequence: Synthetic oligonucleotide
  Target: PCSK9; (+) strand; PAM type: NRG; PAM sequence: TGG
cttgcaggaaggcgaaaatc

SEQ ID NO: 18291 - DNA, 20 bp, Artificial Sequence
  Description of Artificial Sequence: Synthetic oligonucleotide
  Target: PCSK9; (+) strand; PAM type: NRG; PAM sequence: TAG
aggaaggcgaaaatctggac

SEQ ID NO: 18292 - DNA, 20 bp, Artificial Sequence
  Description of Artificial Sequence: Synthetic oligonucleotide
  Target: PCSK9; (+) strand; PAM type: NRG; PAM sequence: TAG
cgaaaatctggactagcaaa

SEQ ID NO: 18293 - DNA, 20 bp, Artificial Sequence
  Description of Artificial Sequence: Synthetic oligonucleotide
  Target: PCSK9; (+) strand; PAM type: NRG; PAM sequence: AGG
gaaaatctggactagcaaat

SEQ ID NO: 18294 - DNA, 20 bp, Artificial Sequence
  Description of Artificial Sequence: Synthetic oligonucleotide
  Target: PCSK9; (+) strand; PAM type: NRG; PAM sequence: GGG
aaaatctggactagcaaata

SEQ ID NO: 18295 - DNA, 20 bp, Artificial Sequence
  Description of Artificial Sequence: Synthetic oligonucleotide
  Target: PCSK9; (+) strand; PAM type: NRG; PAM sequence: AAG
atctggactagcaaataggg

SEQ ID NO: 18296 - DNA, 20 bp, Artificial Sequence
  Description of Artificial Sequence: Synthetic oligonucleotide
  Target: PCSK9; (+) strand; PAM type: NRG; PAM sequence: AGG
tctggactagcaaataggga

SEQ ID NO: 18297 - DNA, 20 bp, Artificial Sequence
  Description of Artificial Sequence: Synthetic oligonucleotide
  Target: PCSK9; (+) strand; PAM type: NRG; PAM sequence: GGG
ctggactagcaaatagggaa

SEQ ID NO: 18298 - DNA, 20 bp, Artificial Sequence
  Description of Artificial Sequence: Synthetic oligonucleotide
  Target: PCSK9; (+) strand; PAM type: NRG; PAM sequence: GGG
tggactagcaaatagggaag

SEQ ID NO: 18299 - DNA, 20 bp, Artificial Sequence
  Description of Artificial Sequence: Synthetic oligonucleotide
  Target: PCSK9; (+) strand; PAM type: NRG; PAM sequence: GAG
atagggaaggggacccatgt

SEQ ID NO: 18300 - DNA, 20 bp, Artificial Sequence
  Description of Artificial Sequence: Synthetic oligonucleotide
  Target: PCSK9; (+) strand; PAM type: NRG; PAM sequence: TGG
gggacccatgtgagcaacgc

SEQ ID NO: 18301 - DNA, 20 bp, Artificial Sequence
  Description of Artificial Sequence: Synthetic oligonucleotide
  Target: PCSK9; (+) strand; PAM type: NRG; PAM sequence: TAG
atgtgagcaacgctggccac

SEQ ID NO: 18302 - DNA, 20 bp, Artificial Sequence
  Description of Artificial Sequence: Synthetic oligonucleotide
  Target: PCSK9; (+) strand; PAM type: NRG; PAM sequence: AGG
tgtgagcaacgctggccact

SEQ ID NO: 18303 - DNA, 20 bp, Artificial Sequence
  Description of Artificial Sequence: Synthetic oligonucleotide
  Target: PCSK9; (+) strand; PAM type: NRG; PAM sequence: GAG
caacgctggccactaggaat

SEQ ID NO: 18304 - DNA, 20 bp, Artificial Sequence
  Description of Artificial Sequence: Synthetic oligonucleotide
  Target: PCSK9; (+) strand; PAM type: NRG; PAM sequence: GAG
tggccactaggaatgagact

SEQ ID NO: 18305 - DNA, 20 bp, Artificial Sequence
  Description of Artificial Sequence: Synthetic oligonucleotide
  Target: PCSK9; (+) strand; PAM type: NRG; PAM sequence: TGG
aggaatgagactgagacctg

SEQ ID NO: 18306 - DNA, 20 bp, Artificial Sequence
  Description of Artificial Sequence: Synthetic oligonucleotide
  Target: PCSK9; (+) strand; PAM type: NRG; PAM sequence: GGG
ggaatgagactgagacctgt

SEQ ID NO: 18307 - DNA, 20 bp, Artificial Sequence
  Description of Artificial Sequence: Synthetic oligonucleotide
  Target: PCSK9; (+) strand; PAM type: NRG; PAM sequence: TAG
agactgagacctgtgggatc

SEQ ID NO: 18308 - DNA, 20 bp, Artificial Sequence
  Description of Artificial Sequence: Synthetic oligonucleotide
  Target: PCSK9; (+) strand; PAM type: NRG; PAM sequence: AAG
tgagacctgtgggatctagc

SEQ ID NO: 18309 - DNA, 20 bp, Artificial Sequence
  Description of Artificial Sequence: Synthetic oligonucleotide
  Target: PCSK9; (+) strand; PAM type: NRG; PAM sequence: AAG
gacctgtgggatctagcaag

SEQ ID NO: 18310 - DNA, 20 bp, Artificial Sequence
  Description of Artificial Sequence: Synthetic oligonucleotide
  Target: PCSK9; (+) strand; PAM type: NRG; PAM sequence: CAG
gtgggatctagcaagaagcc

SEQ ID NO: 18311 - DNA, 20 bp, Artificial Sequence
  Description of Artificial Sequence: Synthetic oligonucleotide
  Target: PCSK9; (+) strand; PAM type: NRG; PAM sequence: CAG
agcaagaagcccagtgtgac

SEQ ID NO: 18312 - DNA, 20 bp, Artificial Sequence
  Description of Artificial Sequence: Synthetic oligonucleotide
  Target: PCSK9; (+) strand; PAM type: NRG; PAM sequence: TGG
accagcgacacgatctatgc

SEQ ID NO: 18313 - DNA, 20 bp, Artificial Sequence
  Description of Artificial Sequence: Synthetic oligonucleotide
  Target: PCSK9; (+) strand; PAM type: NRG; PAM sequence: GGG
ccagcgacacgatctatgct

SEQ ID NO: 18314 - DNA, 20 bp, Artificial Sequence
  Description of Artificial Sequence: Synthetic oligonucleotide
  Target: PCSK9; (+) strand; PAM type: NRG; PAM sequence: GGG
cagcgacacgatctatgctg

SEQ ID NO: 18315 - DNA, 20 bp, Artificial Sequence
  Description of Artificial Sequence: Synthetic oligonucleotide
  Target: PCSK9; (+) strand; PAM type: NRG; PAM sequence: TGG
gatctatgctggggaccact

SEQ ID NO: 18316 - DNA, 20 bp, Artificial Sequence
  Description of Artificial Sequence: Synthetic oligonucleotide
  Target: PCSK9; (+) strand; PAM type: NRG; PAM sequence: GGG
atctatgctggggaccactt

SEQ ID NO: 18317 - DNA, 20 bp, Artificial Sequence
  Description of Artificial Sequence: Synthetic oligonucleotide
  Target: PCSK9; (+) strand; PAM type: NRG; PAM sequence: GAG
ctatgctggggaccacttgg

SEQ ID NO: 18318 - DNA, 20 bp, Artificial Sequence
  Description of Artificial Sequence: Synthetic oligonucleotide
  Target: PCSK9; (+) strand; PAM type: NRG; PAM sequence: GAG
atgctggggaccacttggga

SEQ ID NO: 18319 - DNA, 20 bp, Artificial Sequence
  Description of Artificial Sequence: Synthetic oligonucleotide
  Target: PCSK9; (+) strand; PAM type: NRG; PAM sequence: AAG
ggaccacttgggagagccaa

SEQ ID NO: 18320 - DNA, 20 bp, Artificial Sequence
  Description of Artificial Sequence: Synthetic oligonucleotide
  Target: PCSK9; (+) strand; PAM type: NRG; PAM sequence: TGG
cttgggagagccaaaagctt

SEQ ID NO: 18321 - DNA, 20 bp, Artificial Sequence
  Description of Artificial Sequence: Synthetic oligonucleotide
  Target: PCSK9; (+) strand; PAM type: NRG; PAM sequence: TGG
gggagagccaaaagctttgg

SEQ ID NO: 18322 - DNA, 20 bp, Artificial Sequence
  Description of Artificial Sequence: Synthetic oligonucleotide
  Target: PCSK9; (+) strand; PAM type: NRG; PAM sequence: GAG
gagagccaaaagctttggtg

SEQ ID NO: 18323 - DNA, 20 bp, Artificial Sequence
  Description of Artificial Sequence: Synthetic oligonucleotide
  Target: PCSK9; (+) strand; PAM type: NRG; PAM sequence: TGG
aaagctttggtggagatgaa

SEQ ID NO: 18324 - DNA, 20 bp, Artificial Sequence
  Description of Artificial Sequence: Synthetic oligonucleotide
  Target: PCSK9; (+) strand; PAM type: NRG; PAM sequence: GAG
agctttggtggagatgaatg

SEQ ID NO: 18325 - DNA, 20 bp, Artificial Sequence
  Description of Artificial Sequence: Synthetic oligonucleotide
  Target: PCSK9; (+) strand; PAM type: NRG; PAM sequence: AAG
tgaatggagaccatcaacct

SEQ ID NO: 18326 - DNA, 20 bp, Artificial Sequence
  Description of Artificial Sequence: Synthetic oligonucleotide
  Target: PCSK9; (+) strand; PAM type: NRG; PAM sequence: CAG
ggagaccatcaacctaagtt

SEQ ID NO: 18327 - DNA, 20 bp, Artificial Sequence
  Description of Artificial Sequence: Synthetic oligonucleotide
  Target: PCSK9; (+) strand; PAM type: NRG; PAM sequence: AAG
taagttcagcatcctcctct

SEQ ID NO: 18328 - DNA, 20 bp, Artificial Sequence
  Description of Artificial Sequence: Synthetic oligonucleotide
  Target: PCSK9; (+) strand; PAM type: NRG; PAM sequence: CAG
gcatcctcctctaagctttg

SEQ ID NO: 18329 - DNA, 20 bp, Artificial Sequence
  Description of Artificial Sequence: Synthetic oligonucleotide
  Target: PCSK9; (+) strand; PAM type: NRG; PAM sequence: TGG
tttgcagatgaatcctgaaa

SEQ ID NO: 18330 - DNA, 20 bp, Artificial Sequence
  Description of Artificial Sequence: Synthetic oligonucleotide
  Target: PCSK9; (+) strand; PAM type: NRG; PAM sequence: CAG
cagatgaatcctgaaatggt

SEQ ID NO: 18331 - DNA, 20 bp, Artificial Sequence
  Description of Artificial Sequence: Synthetic oligonucleotide
  Target: PCSK9; (+) strand; PAM type: NRG; PAM sequence: CAG
cctgaaatggtcagcccctc

SEQ ID NO: 18332 - DNA, 20 bp, Artificial Sequence
  Description of Artificial Sequence: Synthetic oligonucleotide
  Target: PCSK9; (+) strand; PAM type: NRG; PAM sequence: GAG
tgaaatggtcagcccctcca

SEQ ID NO: 18333 - DNA, 20 bp, Artificial Sequence
  Description of Artificial Sequence: Synthetic oligonucleotide
  Target: PCSK9; (+) strand; PAM type: NRG; PAM sequence: AAG
tggtcagcccctccagagaa

SEQ ID NO: 18334 - DNA, 20 bp, Artificial Sequence
  Description of Artificial Sequence: Synthetic oligonucleotide
  Target: PCSK9; (+) strand; PAM type: NRG; PAM sequence: CAG
agcccctccagagaaaagaa

SEQ ID NO: 18335 - DNA, 20 bp, Artificial Sequence
  Description of Artificial Sequence: Synthetic oligonucleotide
  Target: PCSK9; (+) strand; PAM type: NRG; PAM sequence: CAG
tccagagaaaagaacagcaa

SEQ ID NO: 18336 - DNA, 20 bp, Artificial Sequence
  Description of Artificial Sequence: Synthetic oligonucleotide
  Target: PCSK9; (+) strand; PAM type: NRG; PAM sequence: AGG
ccagagaaaagaacagcaac

SEQ ID NO: 18337 - DNA, 20 bp, Artificial Sequence
  Description of Artificial Sequence: Synthetic oligonucleotide
  Target: PCSK9; (+) strand; PAM type: NRG; PAM sequence: CAG
gaaaagaacagcaacaggct

SEQ ID NO: 18338 - DNA, 20 bp, Artificial Sequence
  Description of Artificial Sequence: Synthetic oligonucleotide
  Target: PCSK9; (+) strand; PAM type: NRG; PAM sequence: GAG
aaagaacagcaacaggctca

SEQ ID NO: 18339 - DNA, 20 bp, Artificial Sequence
  Description of Artificial Sequence: Synthetic oligonucleotide
  Target: PCSK9; (+) strand; PAM type: NRG; PAM sequence: AGG
aagaacagcaacaggctcag

SEQ ID NO: 18340 - DNA, 20 bp, Artificial Sequence
  Description of Artificial Sequence: Synthetic oligonucleotide
  Target: PCSK9; (+) strand; PAM type: NRG; PAM sequence: CAG
caacaggctcagaggaccca

SEQ ID NO: 18341 - DNA, 20 bp, Artificial Sequence
  Description of Artificial Sequence: Synthetic oligonucleotide
  Target: PCSK9; (+) strand; PAM type: NRG; PAM sequence: TAG
ggacccacagtcccctttat

SEQ ID NO: 18342 - DNA, 20 bp, Artificial Sequence
  Description of Artificial Sequence: Synthetic oligonucleotide
  Target: PCSK9; (+) strand; PAM type: NRG; PAM sequence: AAG
cagtcccctttattagtgta

SEQ ID NO: 18343 - DNA, 20 bp, Artificial Sequence
  Description of Artificial Sequence: Synthetic oligonucleotide
  Target: PCSK9; (+) strand; PAM type: NRG; PAM sequence: AAG
ctttattagtgtaaagtact

SEQ ID NO: 18344 - DNA, 20 bp, Artificial Sequence
  Description of Artificial Sequence: Synthetic oligonucleotide
  Target: PCSK9; (+) strand; PAM type: NRG; PAM sequence: GAG
ttattagtgtaaagtactaa

SEQ ID NO: 18345 - DNA, 20 bp, Artificial Sequence
  Description of Artificial Sequence: Synthetic oligonucleotide
  Target: PCSK9; (+) strand; PAM type: NRG; PAM sequence: AGG
tattagtgtaaagtactaag

SEQ ID NO: 18346 - DNA, 20 bp, Artificial Sequence
  Description of Artificial Sequence: Synthetic oligonucleotide
  Target: PCSK9; (+) strand; PAM type: NRG; PAM sequence: CAG
aaagtactaagaggaatcaa

SEQ ID NO: 18347 - DNA, 20 bp, Artificial Sequence
  Description of Artificial Sequence: Synthetic oligonucleotide
  Target: PCSK9; (+) strand; PAM type: NRG; PAM sequence: TAG
taagaggaatcaacagcatt

SEQ ID NO: 18348 - DNA, 20 bp, Artificial Sequence
  Description of Artificial Sequence: Synthetic oligonucleotide
  Target: PCSK9; (+) strand; PAM type: NRG; PAM sequence: CAG
gaatcaacagcatttagcac

SEQ ID NO: 18349 - DNA, 20 bp, Artificial Sequence
  Description of Artificial Sequence: Synthetic oligonucleotide
  Target: PCSK9; (+) strand; PAM type: NRG; PAM sequence: AGG
aatcaacagcatttagcacc

SEQ ID NO: 18350 - DNA, 20 bp, Artificial Sequence
  Description of Artificial Sequence: Synthetic oligonucleotide
  Target: PCSK9; (+) strand; PAM type: NRG; PAM sequence: CAG
acagcatttagcaccaggca

SEQ ID NO: 18351 - DNA, 20 bp, Artificial Sequence
  Description of Artificial Sequence: Synthetic oligonucleotide
  Target: PCSK9; (+) strand; PAM type: NRG; PAM sequence: AGG
cagcatttagcaccaggcac

SEQ ID NO: 18352 - DNA, 20 bp, Artificial Sequence
  Description of Artificial Sequence: Synthetic oligonucleotide
  Target: PCSK9; (+) strand; PAM type: NRG; PAM sequence: CGG
tcgtgttcccccgcccacta

SEQ ID NO: 18353 - DNA, 20 bp, Artificial Sequence
  Description of Artificial Sequence: Synthetic oligonucleotide
  Target: PCSK9; (+) strand; PAM type: NRG; PAM sequence: AAG
cggctgtgttctgatatatg

SEQ ID NO: 18354 - DNA, 20 bp, Artificial Sequence
  Description of Artificial Sequence: Synthetic oligonucleotide
  Target: PCSK9; (+) strand; PAM type: NRG; PAM sequence: TGG
gtgttctgatatatgaagaa

SEQ ID NO: 18355 - DNA, 20 bp, Artificial Sequence
  Description of Artificial Sequence: Synthetic oligonucleotide
  Target: PCSK9; (+) strand; PAM type: NRG; PAM sequence: CGG
ttctgatatatgaagaatgg

SEQ ID NO: 18356 - DNA, 20 bp, Artificial Sequence
  Description of Artificial Sequence: Synthetic oligonucleotide
  Target: PCSK9; (+) strand; PAM type: NRG; PAM sequence: AAG
gatatatgaagaatggcggc

SEQ ID NO: 18357 - DNA, 20 bp, Artificial Sequence
  Description of Artificial Sequence: Synthetic oligonucleotide
  Target: PCSK9; (+) strand; PAM type: NRG; PAM sequence: TAG
aaaaatttattttatactct

SEQ ID NO: 18358 - DNA, 20 bp, Artificial Sequence
  Description of Artificial Sequence: Synthetic oligonucleotide
  Target: PCSK9; (+) strand; PAM type: NRG; PAM sequence: AAG
aatttattttatactcttag

SEQ ID NO: 18359 - DNA, 20 bp, Artificial Sequence
  Description of Artificial Sequence: Synthetic oligonucleotide
  Target: PCSK9; (+) strand; PAM type: NRG; PAM sequence: AAG
attttatactcttagaagct

SEQ ID NO: 18360 - DNA, 20 bp, Artificial Sequence
  Description of Artificial Sequence: Synthetic oligonucleotide
  Target: PCSK9; (+) strand; PAM type: NRG; PAM sequence: TAG
tgccacacatgaaccaaatt

SEQ ID NO: 18361 - DNA, 20 bp, Artificial Sequence
  Description of Artificial Sequence: Synthetic oligonucleotide
  Target: PCSK9; (+) strand; PAM type: NRG; PAM sequence: AAG
catgaaccaaatttagaatt

SEQ ID NO: 18362 - DNA, 20 bp, Artificial Sequence
  Description of Artificial Sequence: Synthetic oligonucleotide
  Target: PCSK9; (+) strand; PAM type: NRG; PAM sequence: AGG
atgaaccaaatttagaatta

SEQ ID NO: 18363 - DNA, 20 bp, Artificial Sequence
  Description of Artificial Sequence: Synthetic oligonucleotide
  Target: PCSK9; (+) strand; PAM type: NRG; PAM sequence: TAG
ttagaattaaggttcttccc

SEQ ID NO: 18364 - DNA, 20 bp, Artificial Sequence
  Description of Artificial Sequence: Synthetic oligonucleotide
  Target: PCSK9; (+) strand; PAM type: NRG; PAM sequence: AAG
ccttttgaaattttataaac

SEQ ID NO: 18365 - DNA, 20 bp, Artificial Sequence
  Description of Artificial Sequence: Synthetic oligonucleotide
  Target: PCSK9; (+) strand; PAM type: NRG; PAM sequence: AAG
ataaacaagattttatacac

SEQ ID NO: 18366 - DNA, 20 bp, Artificial Sequence
  Description of Artificial Sequence: Synthetic oligonucleotide
  Target: PCSK9; (+) strand; PAM type: NRG; PAM sequence: GAG
aaacaagattttatacacaa

SEQ ID NO: 18367 - DNA, 20 bp, Artificial Sequence
  Description of Artificial Sequence: Synthetic oligonucleotide
  Target: PCSK9; (+) strand; PAM type: NRG; PAM sequence: AGG
aacaagattttatacacaag

SEQ ID NO: 18368 - DNA, 20 bp, Artificial Sequence
  Description of Artificial Sequence: Synthetic oligonucleotide
  Target: PCSK9; (+) strand; PAM type: NRG; PAM sequence: TAG
aagattttatacacaagagg

SEQ ID NO: 18369 - DNA, 20 bp, Artificial Sequence
  Description of Artificial Sequence: Synthetic oligonucleotide
  Target: PCSK9; (+) strand; PAM type: NRG; PAM sequence: CAG
attttatacacaagaggtag

SEQ ID NO: 18370 - DNA, 20 bp, Artificial Sequence
  Description of Artificial Sequence: Synthetic oligonucleotide
  Target: PCSK9; (+) strand; PAM type: NRG; PAM sequence: GAG
tttatacacaagaggtagca

SEQ ID NO: 18371 - DNA, 20 bp, Artificial Sequence
  Description of Artificial Sequence: Synthetic oligonucleotide
  Target: PCSK9; (+) strand; PAM type: NRG; PAM sequence: AGG
ttatacacaagaggtagcag

SEQ ID NO: 18372 - DNA, 20 bp, Artificial Sequence
  Description of Artificial Sequence: Synthetic oligonucleotide
  Target: PCSK9; (+) strand; PAM type: NRG; PAM sequence: CAG
gaggtagcagaggaaaattc

SEQ ID NO: 18373 - DNA, 20 bp, Artificial Sequence
  Description of Artificial Sequence: Synthetic oligonucleotide
  Target: PCSK9; (+) strand; PAM type: NRG; PAM sequence: AAG
aattccagtctgcttgttcc

SEQ ID NO: 18374 - DNA, 20 bp, Artificial Sequence
  Description of Artificial Sequence: Synthetic oligonucleotide
  Target: PCSK9; (+) strand; PAM type: NRG; PAM sequence: CAG
cagtctgcttgttccaagct

SEQ ID NO: 18375 - DNA, 20 bp, Artificial Sequence
  Description of Artificial Sequence: Synthetic oligonucleotide
  Target: PCSK9; (+) strand; PAM type: NRG; PAM sequence: AAG
tctgcttgttccaagctcag

SEQ ID NO: 18376 - DNA, 20 bp, Artificial Sequence
  Description of Artificial Sequence: Synthetic oligonucleotide
  Target: PCSK9; (+) strand; PAM type: NRG; PAM sequence: AGG
ctgcttgttccaagctcaga

SEQ ID NO: 18377 - DNA, 20 bp, Artificial Sequence
  Description of Artificial Sequence: Synthetic oligonucleotide
  Target: PCSK9; (+) strand; PAM type: NRG; PAM sequence: TAG
aactgcacacacctcgatgt

SEQ ID NO: 18378 - DNA, 20 bp, Artificial Sequence
  Description of Artificial Sequence: Synthetic oligonucleotide
  Target: PCSK9; (+) strand; PAM type: NRG; PAM sequence: CAG
tgcacacacctcgatgttag

SEQ ID NO: 18379 - DNA, 20 bp, Artificial Sequence
  Description of Artificial Sequence: Synthetic oligonucleotide
  Target: PCSK9; (+) strand; PAM type: NRG; PAM sequence: AGG
gcacacacctcgatgttagc

SEQ ID NO: 18380 - DNA, 20 bp, Artificial Sequence
  Description of Artificial Sequence: Synthetic oligonucleotide
  Target: PCSK9; (+) strand; PAM type: NRG; PAM sequence: GGG
cacacacctcgatgttagca

SEQ ID NO: 18381 - DNA, 20 bp, Artificial Sequence
  Description of Artificial Sequence: Synthetic oligonucleotide
  Target: PCSK9; (+) strand; PAM type: NRG; PAM sequence: AAG
acacctcgatgttagcaggg

SEQ ID NO: 18382 - DNA, 20 bp, Artificial Sequence
  Description of Artificial Sequence: Synthetic oligonucleotide
  Target: PCSK9; (+) strand; PAM type: NRG; PAM sequence: AGG
cacctcgatgttagcaggga

SEQ ID NO: 18383 - DNA, 20 bp, Artificial Sequence
  Description of Artificial Sequence: Synthetic oligonucleotide
  Target: PCSK9; (+) strand; PAM type: NRG; PAM sequence: TGG
ctcgatgttagcagggaagg

SEQ ID NO: 18384 - DNA, 20 bp, Artificial Sequence
  Description of Artificial Sequence: Synthetic oligonucleotide
  Target: PCSK9; (+) strand; PAM type: NRG; PAM sequence: GGG
tcgatgttagcagggaaggt

SEQ ID NO: 18385 - DNA, 20 bp, Artificial Sequence
  Description of Artificial Sequence: Synthetic oligonucleotide
  Target: PCSK9; (+) strand; PAM type: NRG; PAM sequence: GGG
cgatgttagcagggaaggtg

SEQ ID NO: 18386 - DNA, 20 bp, Artificial Sequence
  Description of Artificial Sequence: Synthetic oligonucleotide
  Target: PCSK9; (+) strand; PAM type: NRG; PAM sequence: CAG
tgttagcagggaaggtgggg

SEQ ID NO: 18387 - DNA, 20 bp, Artificial Sequence
  Description of Artificial Sequence: Synthetic oligonucleotide
  Target: PCSK9; (+) strand; PAM type: NRG; PAM sequence: AGG
gttagcagggaaggtggggc

SEQ ID NO: 18388 - DNA, 20 bp, Artificial Sequence
  Description of Artificial Sequence: Synthetic oligonucleotide
  Target: PCSK9; (+) strand; PAM type: NRG; PAM sequence: CAG
gcagggaaggtggggcagga

SEQ ID NO: 18389 - DNA, 20 bp, Artificial Sequence
  Description of Artificial Sequence: Synthetic oligonucleotide
  Target: PCSK9; (+) strand; PAM type: NRG; PAM sequence: AGG
cagggaaggtggggcaggac

SEQ ID NO: 18390 - DNA, 20 bp, Artificial Sequence
  Description of Artificial Sequence: Synthetic oligonucleotide
  Target: PCSK9; (+) strand; PAM type: NRG; PAM sequence: GGG
agggaaggtggggcaggaca

SEQ ID NO: 18391 - DNA, 20 bp, Artificial Sequence
  Description of Artificial Sequence: Synthetic oligonucleotide
  Target: PCSK9; (+) strand; PAM type: NRG; PAM sequence: AAG
aaggtggggcaggacagggt

SEQ ID NO: 18392 - DNA, 20 bp, Artificial Sequence
  Description of Artificial Sequence: Synthetic oligonucleotide
  Target: PCSK9; (+) strand; PAM type: NRG; PAM sequence: CGG
acagggtaagtctgatgata

SEQ ID NO: 18393 - DNA, 20 bp, Artificial Sequence
  Description of Artificial Sequence: Synthetic oligonucleotide
  Target: PCSK9; (+) strand; PAM type: NRG; PAM sequence: TAG
agtctgatgatacggcactc

SEQ ID NO: 18394 - DNA, 20 bp, Artificial Sequence
  Description of Artificial Sequence: Synthetic oligonucleotide
  Target: PCSK9; (+) strand; PAM type: NRG; PAM sequence: TAG
ctagttcctaaaactgactg

SEQ ID NO: 18395 - DNA, 20 bp, Artificial Sequence
  Description of Artificial Sequence: Synthetic oligonucleotide
  Target: PCSK9; (+) strand; PAM type: NRG; PAM sequence: CAG
ctaaaactgactgtagttgt

SEQ ID NO: 18396 - DNA, 20 bp, Artificial Sequence
  Description of Artificial Sequence: Synthetic oligonucleotide
  Target: PCSK9; (+) strand; PAM type: NRG; PAM sequence: GAG
gtagttgtcagtgaccgtgt

SEQ ID NO: 18397 - DNA, 20 bp, Artificial Sequence
  Description of Artificial Sequence: Synthetic oligonucleotide
  Target: PCSK9; (+) strand; PAM type: NRG; PAM sequence: AGG
tagttgtcagtgaccgtgtg

SEQ ID NO: 18398 - DNA, 20 bp, Artificial Sequence
  Description of Artificial Sequence: Synthetic oligonucleotide
  Target: PCSK9; (+) strand; PAM type: NRG; PAM sequence: CAG
cagtgaccgtgtgaggactc

SEQ ID NO: 18399 - DNA, 20 bp, Artificial Sequence
  Description of Artificial Sequence: Synthetic oligonucleotide
  Target: PCSK9; (+) strand; PAM type: NRG; PAM sequence: AGG
agtgaccgtgtgaggactcc

SEQ ID NO: 18400 - DNA, 20 bp, Artificial Sequence
  Description of Artificial Sequence: Synthetic oligonucleotide
  Target: PCSK9; (+) strand; PAM type: NRG; PAM sequence: GAG
tgaccgtgtgaggactccag

SEQ ID NO: 18401 - DNA, 20 bp, Artificial Sequence
  Description of Artificial Sequence: Synthetic oligonucleotide
  Target: PCSK9; (+) strand; PAM type: NRG; PAM sequence: AAG
ccgtgtgaggactccaggag

SEQ ID NO: 18402 - DNA, 20 bp, Artificial Sequence
  Description of Artificial Sequence: Synthetic oligonucleotide
  Target: PCSK9; (+) strand; PAM type: NRG; PAM sequence: TGG
gaggactccaggagaagtcg

SEQ ID NO: 18403 - DNA, 20 bp, Artificial Sequence
  Description of Artificial Sequence: Synthetic oligonucleotide
  Target: PCSK9; (+) strand; PAM type: NRG; PAM sequence: GAG
actccaggagaagtcgtggt

SEQ ID NO: 18404 - DNA, 20 bp, Artificial Sequence
  Description of Artificial Sequence: Synthetic oligonucleotide
  Target: PCSK9; (+) strand; PAM type: NRG; PAM sequence: TGG
agtcgtggtgagatgcccgc

SEQ ID NO: 18405 - DNA, 20 bp, Artificial Sequence
  Description of Artificial Sequence: Synthetic oligonucleotide
  Target: PCSK9; (+) strand; PAM type: NRG; PAM sequence: GGG
gtcgtggtgagatgcccgct

SEQ ID NO: 18406 - DNA, 20 bp, Artificial Sequence
  Description of Artificial Sequence: Synthetic oligonucleotide
  Target: PCSK9; (+) strand; PAM type: NRG; PAM sequence: CAG
gggatgcttgttttctttcc

SEQ ID NO: 18407 - DNA, 20 bp, Artificial Sequence
  Description of Artificial Sequence: Synthetic oligonucleotide
  Target: PCSK9; (+) strand; PAM type: NRG; PAM sequence: AGG
ggatgcttgttttctttccc

SEQ ID NO: 18408 - DNA, 20 bp, Artificial Sequence
  Description of Artificial Sequence: Synthetic oligonucleotide
  Target: PCSK9; (+) strand; PAM type: NRG; PAM sequence: CGG
ctttcccaggatgccttcaa

SEQ ID NO: 18409 - DNA, 20 bp, Artificial Sequence
  Description of Artificial Sequence: Synthetic oligonucleotide
  Target: PCSK9; (+) strand; PAM type: NRG; PAM sequence: GGG
tttcccaggatgccttcaac

SEQ ID NO: 18410 - DNA, 20 bp, Artificial Sequence
  Description of Artificial Sequence: Synthetic oligonucleotide
  Target: PCSK9; (+) strand; PAM type: NRG; PAM sequence: CAG
cccaggatgccttcaacggg

SEQ ID NO: 18411 - DNA, 20 bp, Artificial Sequence
  Description of Artificial Sequence: Synthetic oligonucleotide
  Target: PCSK9; (+) strand; PAM type: NRG; PAM sequence: CGG
atgccttcaacgggcagaat

SEQ ID NO: 18412 - DNA, 20 bp, Artificial Sequence
  Description of Artificial Sequence: Synthetic oligonucleotide
  Target: PCSK9; (+) strand; PAM type: NRG; PAM sequence: AAG
cgggcagaatcggccatctt

SEQ ID NO: 18413 - DNA, 20 bp, Artificial Sequence
  Description of Artificial Sequence: Synthetic oligonucleotide
  Target: PCSK9; (+) strand; PAM type: NRG; PAM sequence: CGG
agaatcggccatcttaagat

SEQ ID NO: 18414 - DNA, 20 bp, Artificial Sequence
  Description of Artificial Sequence: Synthetic oligonucleotide
  Target: PCSK9; (+) strand; PAM type: NRG; PAM sequence: AAG
atcttaagatcggcctcact

SEQ ID NO: 18415 - DNA, 20 bp, Artificial Sequence
  Description of Artificial Sequence: Synthetic oligonucleotide
  Target: PCSK9; (+) strand; PAM type: NRG; PAM sequence: AGG
tcttaagatcggcctcacta

SEQ ID NO: 18416 - DNA, 20 bp, Artificial Sequence
  Description of Artificial Sequence: Synthetic oligonucleotide
  Target: PCSK9; (+) strand; PAM type: NRG; PAM sequence: GGG
cttaagatcggcctcactaa

SEQ ID NO: 18417 - DNA, 20 bp, Artificial Sequence
  Description of Artificial Sequence: Synthetic oligonucleotide
  Target: PCSK9; (+) strand; PAM type: NRG; PAM sequence: GAG
taagatcggcctcactaagg

SEQ ID NO: 18418 - DNA, 20 bp, Artificial Sequence
  Description of Artificial Sequence: Synthetic oligonucleotide
  Target: PCSK9; (+) strand; PAM type: NRG; PAM sequence: GAG
cctcactaagggagcttctt

SEQ ID NO: 18419 - DNA, 20 bp, Artificial Sequence
  Description of Artificial Sequence: Synthetic oligonucleotide
  Target: PCSK9; (+) strand; PAM type: NRG; PAM sequence: CAG
gggagcttcttgagaacaca

SEQ ID NO: 18420 - DNA, 20 bp, Artificial Sequence
  Description of Artificial Sequence: Synthetic oligonucleotide
  Target: PCSK9; (+) strand; PAM type: NRG; PAM sequence: GAG
tgagaacacacagcattatt

SEQ ID NO: 18421 - DNA, 20 bp, Artificial Sequence
  Description of Artificial Sequence: Synthetic oligonucleotide
  Target: PCSK9; (+) strand; PAM type: NRG; PAM sequence: CAG
tgcaattcctgctctgtttg

SEQ ID NO: 18422 - DNA, 20 bp, Artificial Sequence
  Description of Artificial Sequence: Synthetic oligonucleotide
  Target: PCSK9; (+) strand; PAM type: NRG; PAM sequence: AAG
ctgtttgcagaccattttga

SEQ ID NO: 18423 - DNA, 20 bp, Artificial Sequence
  Description of Artificial Sequence: Synthetic oligonucleotide
  Target: PCSK9; (+) strand; PAM type: NRG; PAM sequence: AGG
tgtttgcagaccattttgaa

SEQ ID NO: 18424 - DNA, 20 bp, Artificial Sequence
  Description of Artificial Sequence: Synthetic oligonucleotide
  Target: PCSK9; (+) strand; PAM type: NRG; PAM sequence: TGG
aacatcttcatccaaaaaat

SEQ ID NO: 18425 - DNA, 20 bp, Artificial Sequence
  Description of Artificial Sequence: Synthetic oligonucleotide
  Target: PCSK9; (+) strand; PAM type: NRG; PAM sequence: CAG
atcttcatccaaaaaattgg

SEQ ID NO: 18426 - DNA, 20 bp, Artificial Sequence
  Description of Artificial Sequence: Synthetic oligonucleotide
  Target: PCSK9; (+) strand; PAM type: NRG; PAM sequence: AAG
gtaaaaatgacaactcttcc

SEQ ID NO: 18427 - DNA, 20 bp, Artificial Sequence
  Description of Artificial Sequence: Synthetic oligonucleotide
  Target: PCSK9; (+) strand; PAM type: NRG; PAM sequence: AGG
taaaaatgacaactcttcca

SEQ ID NO: 18428 - DNA, 20 bp, Artificial Sequence
  Description of Artificial Sequence: Synthetic oligonucleotide
  Target: PCSK9; (+) strand; PAM type: NRG; PAM sequence: AAG
aatgacaactcttccaaggt

SEQ ID NO: 18429 - DNA, 20 bp, Artificial Sequence
  Description of Artificial Sequence: Synthetic oligonucleotide
  Target: PCSK9; (+) strand; PAM type: NRG; PAM sequence: AAG
ctgttgtactacattaaaaa

SEQ ID NO: 18430 - DNA, 20 bp, Artificial Sequence
  Description of Artificial Sequence: Synthetic oligonucleotide
  Target: PCSK9; (+) strand; PAM type: NRG; PAM sequence: CAG
actacattaaaaaaagtcat

SEQ ID NO: 18431 - DNA, 20 bp, Artificial Sequence
  Description of Artificial Sequence: Synthetic oligonucleotide
  Target: PCSK9; (+) strand; PAM type: NRG; PAM sequence: CAG
acattaaaaaaagtcatcag

SEQ ID NO: 18432 - DNA, 20 bp, Artificial Sequence
  Description of Artificial Sequence: Synthetic oligonucleotide
  Target: PCSK9; (+) strand; PAM type: NRG; PAM sequence: AGG
cattaaaaaaagtcatcagc

SEQ ID NO: 18433 - DNA, 20 bp, Artificial Sequence
  Description of Artificial Sequence: Synthetic oligonucleotide
  Target: PCSK9; (+) strand; PAM type: NRG; PAM sequence: TAG
atcagcaggttcattgactg

SEQ ID NO: 18434 - DNA, 20 bp, Artificial Sequence
  Description of Artificial Sequence: Synthetic oligonucleotide
  Target: PCSK9; (+) strand; PAM type: NRG; PAM sequence: CAG
ggttcattgactgtagctgt

SEQ ID NO: 18435 - DNA, 20 bp, Artificial Sequence
  Description of Artificial Sequence: Synthetic oligonucleotide
  Target: PCSK9; (+) strand; PAM type: NRG; PAM sequence: AAG
gactgtagctgtcagcaatc

SEQ ID NO: 18436 - DNA, 20 bp, Artificial Sequence
  Description of Artificial Sequence: Synthetic oligonucleotide
  Target: PCSK9; (+) strand; PAM type: NRG; PAM sequence: TGG
tgtagctgtcagcaatcaag

SEQ ID NO: 18437 - DNA, 20 bp, Artificial Sequence
  Description of Artificial Sequence: Synthetic oligonucleotide
  Target: PCSK9; (+) strand; PAM type: NRG; PAM sequence: CAG
gtcagcaatcaagtggttac

SEQ ID NO: 18438 - DNA, 20 bp, Artificial Sequence
  Description of Artificial Sequence: Synthetic oligonucleotide
  Target: PCSK9; (+) strand; PAM type: NRG; PAM sequence: AAG
caatcaagtggttaccagca

SEQ ID NO: 18439 - DNA, 20 bp, Artificial Sequence
  Description of Artificial Sequence: Synthetic oligonucleotide
  Target: PCSK9; (+) strand; PAM type: NRG; PAM sequence: TGG
taccagcaaagtgaaaacga

SEQ ID NO: 18440 - DNA, 20 bp, Artificial Sequence
  Description of Artificial Sequence: Synthetic oligonucleotide
  Target: PCSK9; (+) strand; PAM type: NRG; PAM sequence: CAG
agtgaaaacgatggtcattg

SEQ ID NO: 18441 - DNA, 20 bp, Artificial Sequence
  Description of Artificial Sequence: Synthetic oligonucleotide
  Target: PCSK9; (+) strand; PAM type: NRG; PAM sequence: AAG
ggtcattgcagcaacaatat

SEQ ID NO: 18442 - DNA, 20 bp, Artificial Sequence
  Description of Artificial Sequence: Synthetic oligonucleotide
  Target: PCSK9; (+) strand; PAM type: NRG; PAM sequence: AAG
aatataagcaacatgatctg

SEQ ID NO: 18443 - DNA, 20 bp, Artificial Sequence
  Description of Artificial Sequence: Synthetic oligonucleotide
  Target: PCSK9; (+) strand; PAM type: NRG; PAM sequence: CGG
tctgaagcgtataatataca

SEQ ID NO: 18444 - DNA, 20 bp, Artificial Sequence
  Description of Artificial Sequence: Synthetic oligonucleotide
  Target: PCSK9; (+) strand; PAM type: NRG; PAM sequence: TGG
gaagcgtataatatacacgg

SEQ ID NO: 18445 - DNA, 20 bp, Artificial Sequence
  Description of Artificial Sequence: Synthetic oligonucleotide
  Target: PCSK9; (+) strand; PAM type: NRG; PAM sequence: AAG
cacggtggacgatcctgatg

SEQ ID NO: 18446 - DNA, 20 bp, Artificial Sequence
  Description of Artificial Sequence: Synthetic oligonucleotide
  Target: PCSK9; (+) strand; PAM type: NRG; PAM sequence: CAG
acgatcctgatgaagcttta

SEQ ID NO: 18447 - DNA, 20 bp, Artificial Sequence
  Description of Artificial Sequence: Synthetic oligonucleotide
  Target: PCSK9; (+) strand; PAM type: NRG; PAM sequence: GAG
tcctgatgaagctttacagt

SEQ ID NO: 18448 - DNA, 20 bp, Artificial Sequence
  Description of Artificial Sequence: Synthetic oligonucleotide
  Target: PCSK9; (+) strand; PAM type: NRG; PAM sequence: AGG
cctgatgaagctttacagtg

SEQ ID NO: 18449 - DNA, 20 bp, Artificial Sequence
  Description of Artificial Sequence: Synthetic oligonucleotide
  Target: PCSK9; (+) strand; PAM type: NRG; PAM sequence: CGG
atgaagctttacagtgagga

SEQ ID NO: 18450 - DNA, 20 bp, Artificial Sequence
  Description of Artificial Sequence: Synthetic oligonucleotide
  Target: PCSK9; (+) strand; PAM type: NRG; PAM sequence: CAG
aagctttacagtgaggacgg

SEQ ID NO: 18451 - DNA, 20 bp, Artificial Sequence
  Description of Artificial Sequence: Synthetic oligonucleotide
  Target: PCSK9; (+) strand; PAM type: NRG; PAM sequence: AGG
agctttacagtgaggacggc

SEQ ID NO: 18452 - DNA, 20 bp, Artificial Sequence
  Description of Artificial Sequence: Synthetic oligonucleotide
  Target: PCSK9; (+) strand; PAM type: NRG; PAM sequence: TAG
acagtgaggacggcaggtgc

SEQ ID NO: 18453 - DNA, 20 bp, Artificial Sequence
  Description of Artificial Sequence: Synthetic oligonucleotide
  Target: PCSK9; (+) strand; PAM type: NRG; PAM sequence: AGG
cagtgaggacggcaggtgct

SEQ ID NO: 18454 - DNA, 20 bp, Artificial Sequence
  Description of Artificial Sequence: Synthetic oligonucleotide
  Target: PCSK9; (+) strand; PAM type: NRG; PAM sequence: GGG
agtgaggacggcaggtgcta

SEQ ID NO: 18455 - DNA, 20 bp, Artificial Sequence
  Description of Artificial Sequence: Synthetic oligonucleotide
  Target: PCSK9; (+) strand; PAM type: NRG; PAM sequence: GGG
gtgaggacggcaggtgctag

SEQ ID NO: 18456 - DNA, 20 bp, Artificial Sequence
  Description of Artificial Sequence: Synthetic oligonucleotide
  Target: PCSK9; (+) strand; PAM type: NRG; PAM sequence: CGG
gacggcaggtgctaggggtg

SEQ ID NO: 18457 - DNA, 20 bp, Artificial Sequence
  Description of Artificial Sequence: Synthetic oligonucleotide
  Target: PCSK9; (+) strand; PAM type: NRG; PAM sequence: AAG
ggcaggtgctaggggtgcgg

SEQ ID NO: 18458 - DNA, 20 bp, Artificial Sequence
  Description of Artificial Sequence: Synthetic oligonucleotide
  Target: PCSK9; (+) strand; PAM type: NRG; PAM sequence: AGG
gcaggtgctaggggtgcgga

SEQ ID NO: 18459 - DNA, 20 bp, Artificial Sequence
  Description of Artificial Sequence: Synthetic oligonucleotide
  Target: PCSK9; (+) strand; PAM type: NRG; PAM sequence: TAG
tgcggaaggcgttgtttcca

SEQ ID NO: 18460 - DNA, 20 bp, Artificial Sequence
  Description of Artificial Sequence: Synthetic oligonucleotide
  Target: PCSK9; (+) strand; PAM type: NRG; PAM sequence: AGG
gcggaaggcgttgtttccat

SEQ ID NO: 18461 - DNA, 20 bp, Artificial Sequence
  Description of Artificial Sequence: Synthetic oligonucleotide
  Target: PCSK9; (+) strand; PAM type: NRG; PAM sequence: AAG
gcgttgtttccataggaaat

SEQ ID NO: 18462 - DNA, 20 bp, Artificial Sequence
  Description of Artificial Sequence: Synthetic oligonucleotide
  Target: PCSK9; (+) strand; PAM type: NRG; PAM sequence: AGG
cgttgtttccataggaaata

SEQ ID NO: 18463 - DNA, 20 bp, Artificial Sequence
  Description of Artificial Sequence: Synthetic oligonucleotide
  Target: PCSK9; (+) strand; PAM type: NRG; PAM sequence: GGG
gttgtttccataggaaataa

SEQ ID NO: 18464 - DNA, 20 bp, Artificial Sequence
  Description of Artificial Sequence: Synthetic oligonucleotide
  Target: PCSK9; (+) strand; PAM type: NRG; PAM sequence: GGG
ttgtttccataggaaataag

SEQ ID NO: 18465 - DNA, 20 bp, Artificial Sequence
  Description of Artificial Sequence: Synthetic oligonucleotide
  Target: PCSK9; (+) strand; PAM type: NRG; PAM sequence: TAG
tccataggaaataaggggac

SEQ ID NO: 18466 - DNA, 20 bp, Artificial Sequence
  Description of Artificial Sequence: Synthetic oligonucleotide
  Target: PCSK9; (+) strand; PAM type: NRG; PAM sequence: AAG
ataggaaataaggggactag

SEQ ID NO: 18467 - DNA, 20 bp, Artificial Sequence
  Description of Artificial Sequence: Synthetic oligonucleotide
  Target: PCSK9; (+) strand; PAM type: NRG; PAM sequence: TGG
ggaaataaggggactagaag

SEQ ID NO: 18468 - DNA, 20 bp, Artificial Sequence
  Description of Artificial Sequence: Synthetic oligonucleotide
  Target: PCSK9; (+) strand; PAM type: NRG; PAM sequence: TGG
ggcaatttcactcctgattt

SEQ ID NO: 18469 - DNA, 20 bp, Artificial Sequence
  Description of Artificial Sequence: Synthetic oligonucleotide
  Target: PCSK9; (+) strand; PAM type: NRG; PAM sequence: GGG
gcaatttcactcctgatttt

SEQ ID NO: 18470 - DNA, 20 bp, Artificial Sequence
  Description of Artificial Sequence: Synthetic oligonucleotide
  Target: PCSK9; (+) strand; PAM type: NRG; PAM sequence: GAG
actcctgattttgggctcct

SEQ ID NO: 18471 - DNA, 20 bp, Artificial Sequence
  Description of Artificial Sequence: Synthetic oligonucleotide
  Target: PCSK9; (+) strand; PAM type: NRG; PAM sequence: GAG
tcctgattttgggctcctga

SEQ ID NO: 18472 - DNA, 20 bp, Artificial Sequence
  Description of Artificial Sequence: Synthetic oligonucleotide
  Target: PCSK9; (+) strand; PAM type: NRG; PAM sequence: CAG
attttgggctcctgagagtg

SEQ ID NO: 18473 - DNA, 20 bp, Artificial Sequence
  Description of Artificial Sequence: Synthetic oligonucleotide
  Target: PCSK9; (+) strand; PAM type: NRG; PAM sequence: CAG
gctcctgagagtgcagtcgc

SEQ ID NO: 18474 - DNA, 20 bp, Artificial Sequence
  Description of Artificial Sequence: Synthetic oligonucleotide
  Target: PCSK9; (+) strand; PAM type: NRG; PAM sequence: CAG
agtcgccagcgatgatatcc

SEQ ID NO: 18475 - DNA, 20 bp, Artificial Sequence
  Description of Artificial Sequence: Synthetic oligonucleotide
  Target: PCSK9; (+) strand; PAM type: NRG; PAM sequence: TGG
ccagcgatgatatcccagtg

SEQ ID NO: 18476 - DNA, 20 bp, Artificial Sequence
  Description of Artificial Sequence: Synthetic oligonucleotide
  Target: PCSK9; (+) strand; PAM type: NRG; PAM sequence: CAG
atcccagtgtggatcatcgc

SEQ ID NO: 18477 - DNA, 20 bp, Artificial Sequence
  Description of Artificial Sequence: Synthetic oligonucleotide
  Target: PCSK9; (+) strand; PAM type: NRG; PAM sequence: AAG
tggatcatcgccagcatttc

SEQ ID NO: 18478 - DNA, 20 bp, Artificial Sequence
  Description of Artificial Sequence: Synthetic oligonucleotide
  Target: PCSK9; (+) strand; PAM type: NRG; PAM sequence: AGG
ggatcatcgccagcatttca

SEQ ID NO: 18479 - DNA, 20 bp, Artificial Sequence
  Description of Artificial Sequence: Synthetic oligonucleotide
  Target: PCSK9; (+) strand; PAM type: NRG; PAM sequence: TGG
tcatgtcccacacaatctct

SEQ ID NO: 18480 - DNA, 20 bp, Artificial Sequence
  Description of Artificial Sequence: Synthetic oligonucleotide
  Target: PCSK9; (+) strand; PAM type: NRG; PAM sequence: GAG
gtcccacacaatctcttggt

SEQ ID NO: 18481 - DNA, 20 bp, Artificial Sequence
  Description of Artificial Sequence: Synthetic oligonucleotide
  Target: PCSK9; (+) strand; PAM type: NRG; PAM sequence: AGG
tcccacacaatctcttggtg

SEQ ID NO: 18482 - DNA, 20 bp, Artificial Sequence
  Description of Artificial Sequence: Synthetic oligonucleotide
  Target: PCSK9; (+) strand; PAM type: NRG; PAM sequence: TGG
acaatctcttggtgaggatg

SEQ ID NO: 18483 - DNA, 20 bp, Artificial Sequence
  Description of Artificial Sequence: Synthetic oligonucleotide
  Target: PCSK9; (+) strand; PAM type: NRG; PAM sequence: GGG
caatctcttggtgaggatgt

SEQ ID NO: 18484 - DNA, 20 bp, Artificial Sequence
  Description of Artificial Sequence: Synthetic oligonucleotide
  Target: PCSK9; (+) strand; PAM type: NRG; PAM sequence: CGG
tctcttggtgaggatgtggg

SEQ ID NO: 18485 - DNA, 20 bp, Artificial Sequence
  Description of Artificial Sequence: Synthetic oligonucleotide
  Target: PCSK9; (+) strand; PAM type: NRG; PAM sequence: GAG
tcttggtgaggatgtgggcg

SEQ ID NO: 18486 - DNA, 20 bp, Artificial Sequence
  Description of Artificial Sequence: Synthetic oligonucleotide
  Target: PCSK9; (+) strand; PAM type: NRG; PAM sequence: GAG
ttggtgaggatgtgggcgga

SEQ ID NO: 18487 - DNA, 20 bp, Artificial Sequence
  Description of Artificial Sequence: Synthetic oligonucleotide
  Target: PCSK9; (+) strand; PAM type: NRG; PAM sequence: AAG
gtgaggatgtgggcggagag

SEQ ID NO: 18488 - DNA, 20 bp, Artificial Sequence
  Description of Artificial Sequence: Synthetic oligonucleotide
  Target: PCSK9; (+) strand; PAM type: NRG; PAM sequence: AGG
tgaggatgtgggcggagaga

SEQ ID NO: 18489 - DNA, 20 bp, Artificial Sequence
  Description of Artificial Sequence: Synthetic oligonucleotide
  Target: PCSK9; (+) strand; PAM type: NRG; PAM sequence: GAG
gatgtgggcggagagaaggt

SEQ ID NO: 18490 - DNA, 20 bp, Artificial Sequence
  Description of Artificial Sequence: Synthetic oligonucleotide
  Target: PCSK9; (+) strand; PAM type: NRG; PAM sequence: TAG
gggcggagagaaggtgagaa

SEQ ID NO: 18491 - DNA, 20 bp, Artificial Sequence
  Description of Artificial Sequence: Synthetic oligonucleotide
  Target: PCSK9; (+) strand; PAM type: NRG; PAM sequence: AGG
ggcggagagaaggtgagaat

SEQ ID NO: 18492 - DNA, 20 bp, Artificial Sequence
  Description of Artificial Sequence: Synthetic oligonucleotide
  Target: PCSK9; (+) strand; PAM type: NRG; PAM sequence: GGG
gcggagagaaggtgagaata

SEQ ID NO: 18493 - DNA, 20 bp, Artificial Sequence
  Description of Artificial Sequence: Synthetic oligonucleotide
  Target: PCSK9; (+) strand; PAM type: NRG; PAM sequence: TAG
gagagaaggtgagaataggg

SEQ ID NO: 18494 - DNA, 20 bp, Artificial Sequence
  Description of Artificial Sequence: Synthetic oligonucleotide
  Target: PCSK9; (+) strand; PAM type: NRG; PAM sequence: AGG
agagaaggtgagaatagggt

SEQ ID NO: 18495 - DNA, 20 bp, Artificial Sequence
  Description of Artificial Sequence: Synthetic oligonucleotide
  Target: PCSK9; (+) strand; PAM type: NRG; PAM sequence: GGG
gagaaggtgagaatagggta

SEQ ID NO: 18496 - DNA, 20 bp, Artificial Sequence
  Description of Artificial Sequence: Synthetic oligonucleotide
  Target: PCSK9; (+) strand; PAM type: NRG; PAM sequence: GGG
agaaggtgagaatagggtag

SEQ ID NO: 18497 - DNA, 20 bp, Artificial Sequence
  Description of Artificial Sequence: Synthetic oligonucleotide
  Target: PCSK9; (+) strand; PAM type: NRG; PAM sequence: CAG
tgagaatagggtaggggaaa

SEQ ID NO: 18498 - DNA, 20 bp, Artificial Sequence
  Description of Artificial Sequence: Synthetic oligonucleotide
  Target: PCSK9; (+) strand; PAM type: NRG; PAM sequence: TAG
gaatagggtaggggaaacag

SEQ ID NO: 18499 - DNA, 20 bp, Artificial Sequence
  Description of Artificial Sequence: Synthetic oligonucleotide
  Target: PCSK9; (+) strand; PAM type: NRG; PAM sequence: AGG
aatagggtaggggaaacagt

SEQ ID NO: 18500 - DNA, 20 bp, Artificial Sequence
  Description of Artificial Sequence: Synthetic oligonucleotide
  Target: PCSK9; (+) strand; PAM type: NRG; PAM sequence: CAG
gggtaggggaaacagtagga

SEQ ID NO: 18501 - DNA, 20 bp, Artificial Sequence
  Description of Artificial Sequence: Synthetic oligonucleotide
  Target: PCSK9; (+) strand; PAM type: NRG; PAM sequence: AGG
ggtaggggaaacagtaggac

SEQ ID NO: 18502 - DNA, 20 bp, Artificial Sequence
  Description of Artificial Sequence: Synthetic oligonucleotide
  Target: PCSK9; (+) strand; PAM type: NRG; PAM sequence: AAG
aggggaaacagtaggacagg

SEQ ID NO: 18503 - DNA, 20 bp, Artificial Sequence
  Description of Artificial Sequence: Synthetic oligonucleotide
  Target: PCSK9; (+) strand; PAM type: NRG; PAM sequence: TGG
attcacgtactcaaaaccaa

SEQ ID NO: 18504 - DNA, 20 bp, Artificial Sequence
  Description of Artificial Sequence: Synthetic oligonucleotide
  Target: PCSK9; (+) strand; PAM type: NRG; PAM sequence: TAG
cacgtactcaaaaccaatgg

SEQ ID NO: 18505 - DNA, 20 bp, Artificial Sequence
  Description of Artificial Sequence: Synthetic oligonucleotide
  Target: PCSK9; (+) strand; PAM type: NRG; PAM sequence: AAG
aacatcacatttcaaactgc

SEQ ID NO: 18506 - DNA, 20 bp, Artificial Sequence
  Description of Artificial Sequence: Synthetic oligonucleotide
  Target: PCSK9; (+) strand; PAM type: NRG; PAM sequence: TGG
atttcaaactgcaagaccat

SEQ ID NO: 18507 - DNA, 20 bp, Artificial Sequence
  Description of Artificial Sequence: Synthetic oligonucleotide
  Target: PCSK9; (+) strand; PAM type: NRG; PAM sequence: AAG
aagaccattggaaccgtctg

SEQ ID NO: 18508 - DNA, 20 bp, Artificial Sequence
  Description of Artificial Sequence: Synthetic oligonucleotide
  Target: PCSK9; (+) strand; PAM type: NRG; PAM sequence: AAG
tcgcctctgtccgtttctct

SEQ ID NO: 18509 - DNA, 20 bp, Artificial Sequence
  Description of Artificial Sequence: Synthetic oligonucleotide
  Target: PCSK9; (+) strand; PAM type: NRG; PAM sequence: AGG
cgcctctgtccgtttctcta

SEQ ID NO: 18510 - DNA, 20 bp, Artificial Sequence
  Description of Artificial Sequence: Synthetic oligonucleotide
  Target: PCSK9; (+) strand; PAM type: NRG; PAM sequence: GGG
gcctctgtccgtttctctaa

SEQ ID NO: 18511 - DNA, 20 bp, Artificial Sequence
  Description of Artificial Sequence: Synthetic oligonucleotide
  Target: PCSK9; (+) strand; PAM type: NRG; PAM sequence: CAG
tgtccgtttctctaagggta

SEQ ID NO: 18512 - DNA, 20 bp, Artificial Sequence
  Description of Artificial Sequence: Synthetic oligonucleotide
  Target: PCSK9; (+) strand; PAM type: NRG; PAM sequence: AAG
aagggtacagttctgctctt

SEQ ID NO: 18513 - DNA, 20 bp, Artificial Sequence
  Description of Artificial Sequence: Synthetic oligonucleotide
  Target: PCSK9; (+) strand; PAM type: NRG; PAM sequence: TGG
acagttctgctcttaagtgc

SEQ ID NO: 18514 - DNA, 20 bp, Artificial Sequence
  Description of Artificial Sequence: Synthetic oligonucleotide
  Target: PCSK9; (+) strand; PAM type: NRG; PAM sequence: CAG
tgctggcccttccatcttct

SEQ ID NO: 18515 - DNA, 20 bp, Artificial Sequence
  Description of Artificial Sequence: Synthetic oligonucleotide
  Target: PCSK9; (+) strand; PAM type: NRG; PAM sequence: AAG
tcttctcagtgtgtttgaca

SEQ ID NO: 18516 - DNA, 20 bp, Artificial Sequence
  Description of Artificial Sequence: Synthetic oligonucleotide
  Target: PCSK9; (+) strand; PAM type: NRG; PAM sequence: AGG
cttctcagtgtgtttgacaa

SEQ ID NO: 18517 - DNA, 20 bp, Artificial Sequence
  Description of Artificial Sequence: Synthetic oligonucleotide
  Target: PCSK9; (+) strand; PAM type: NRG; PAM sequence: CAG
caaaggccactgccaacctc

SEQ ID NO: 18518 - DNA, 20 bp, Artificial Sequence
  Description of Artificial Sequence: Synthetic oligonucleotide
  Target: PCSK9; (+) strand; PAM type: NRG; PAM sequence: AAG
ggccactgccaacctccagc

SEQ ID NO: 18519 - DNA, 20 bp, Artificial Sequence
  Description of Artificial Sequence: Synthetic oligonucleotide
  Target: PCSK9; (+) strand; PAM type: NRG; PAM sequence: CAG
tgccaacctccagcaagtca

SEQ ID NO: 18520 - DNA, 20 bp, Artificial Sequence
  Description of Artificial Sequence: Synthetic oligonucleotide
  Target: PCSK9; (+) strand; PAM type: NRG; PAM sequence: AAG
caagtcacagaataacaatg

SEQ ID NO: 18521 - DNA, 20 bp, Artificial Sequence
  Description of Artificial Sequence: Synthetic oligonucleotide
  Target: PCSK9; (+) strand; PAM type: NRG; PAM sequence: CAG
agaataacaatgaagtctga

SEQ ID NO: 18522 - DNA, 20 bp, Artificial Sequence
  Description of Artificial Sequence: Synthetic oligonucleotide
  Target: PCSK9; (+) strand; PAM type: NRG; PAM sequence: CAG
aacaatgaagtctgacagca

SEQ ID NO: 18523 - DNA, 20 bp, Artificial Sequence
  Description of Artificial Sequence: Synthetic oligonucleotide
  Target: PCSK9; (+) strand; PAM type: NRG; PAM sequence: CAG
agcacagaaaccctcactgc

SEQ ID NO: 18524 - DNA, 20 bp, Artificial Sequence
  Description of Artificial Sequence: Synthetic oligonucleotide
  Target: PCSK9; (+) strand; PAM type: NRG; PAM sequence: GAG
cacagaaaccctcactgcca

SEQ ID NO: 18525 - DNA, 20 bp, Artificial Sequence
  Description of Artificial Sequence: Synthetic oligonucleotide
  Target: PCSK9; (+) strand; PAM type: NRG; PAM sequence: AAG
cctcactgccagagaatgaa

SEQ ID NO: 18526 - DNA, 20 bp, Artificial Sequence
  Description of Artificial Sequence: Synthetic oligonucleotide
  Target: PCSK9; (+) strand; PAM type: NRG; PAM sequence: TGG
ctgccagagaatgaaaagac

SEQ ID NO: 18527 - DNA, 20 bp, Artificial Sequence
  Description of Artificial Sequence: Synthetic oligonucleotide
  Target: PCSK9; (+) strand; PAM type: NRG; PAM sequence: GGG
tgccagagaatgaaaagact

SEQ ID NO: 18528 - DNA, 20 bp, Artificial Sequence
  Description of Artificial Sequence: Synthetic oligonucleotide
  Target: PCSK9; (+) strand; PAM type: NRG; PAM sequence: TGG
agaatgaaaagactgggcca

SEQ ID NO: 18529 - DNA, 20 bp, Artificial Sequence
  Description of Artificial Sequence: Synthetic oligonucleotide
  Target: PCSK9; (+) strand; PAM type: NRG; PAM sequence: GAG
tgaaaagactgggccatggc

SEQ ID NO: 18530 - DNA, 20 bp, Artificial Sequence
  Description of Artificial Sequence: Synthetic oligonucleotide
  Target: PCSK9; (+) strand; PAM type: NRG; PAM sequence: GAG
aaaagactgggccatggcga

SEQ ID NO: 18531 - DNA, 20 bp, Artificial Sequence
  Description of Artificial Sequence: Synthetic oligonucleotide
  Target: PCSK9; (+) strand; PAM type: NRG; PAM sequence: CAG
actgggccatggcgagagca

SEQ ID NO: 18532 - DNA, 20 bp, Artificial Sequence
  Description of Artificial Sequence: Synthetic oligonucleotide
  Target: PCSK9; (+) strand; PAM type: NRG; PAM sequence: GAG
catggcgagagcacagtaat

SEQ ID NO: 18533 - DNA, 20 bp, Artificial Sequence
  Description of Artificial Sequence: Synthetic oligonucleotide
  Target: PCSK9; (+) strand; PAM type: NRG; PAM sequence: TGG
gtaatgagatgccatctgcc

SEQ ID NO: 18534 - DNA, 20 bp, Artificial Sequence
  Description of Artificial Sequence: Synthetic oligonucleotide
  Target: PCSK9; (+) strand; PAM type: NRG; PAM sequence: CAG
cacatgcccacacaatgcca

SEQ ID NO: 18535 - DNA, 20 bp, Artificial Sequence
  Description of Artificial Sequence: Synthetic oligonucleotide
  Target: PCSK9; (+) strand; PAM type: NRG; PAM sequence: CAG
atgcccacacaatgccacag

SEQ ID NO: 18536 - DNA, 20 bp, Artificial Sequence
  Description of Artificial Sequence: Synthetic oligonucleotide
  Target: PCSK9; (+) strand; PAM type: NRG; PAM sequence: CAG
ccacacaatgccacagcagc

SEQ ID NO: 18537 - DNA, 20 bp, Artificial Sequence
  Description of Artificial Sequence: Synthetic oligonucleotide
  Target: PCSK9; (+) strand; PAM type: NRG; PAM sequence: CAG
acaatgccacagcagccaga

SEQ ID NO: 18538 - DNA, 20 bp, Artificial Sequence
  Description of Artificial Sequence: Synthetic oligonucleotide
  Target: PCSK9; (+) strand; PAM type: NRG; PAM sequence: AGG
caatgccacagcagccagac

SEQ ID NO: 18539 - DNA, 20 bp, Artificial Sequence
  Description of Artificial Sequence: Synthetic oligonucleotide
  Target: PCSK9; (+) strand; PAM type: NRG; PAM sequence: CAG
cagcagccagacaggcactt

SEQ ID NO: 18540 - DNA, 20 bp, Artificial Sequence
  Description of Artificial Sequence: Synthetic oligonucleotide
  Target: PCSK9; (+) strand; PAM type: NRG; PAM sequence: AGG
agcagccagacaggcacttc

SEQ ID NO: 18541 - DNA, 20 bp, Artificial Sequence
  Description of Artificial Sequence: Synthetic oligonucleotide
  Target: PCSK9; (+) strand; PAM type: NRG; PAM sequence: GGG
gcagccagacaggcacttca

SEQ ID NO: 18542 - DNA, 20 bp, Artificial Sequence
  Description of Artificial Sequence: Synthetic oligonucleotide
  Target: PCSK9; (+) strand; PAM type: NRG; PAM sequence: TGG
ccagacaggcacttcagggc

SEQ ID NO: 18543 - DNA, 20 bp, Artificial Sequence
  Description of Artificial Sequence: Synthetic oligonucleotide
  Target: PCSK9; (+) strand; PAM type: NRG; PAM sequence: TGG
ctggctgcgcctctgtgact

SEQ ID NO: 18544 - DNA, 20 bp, Artificial Sequence
  Description of Artificial Sequence: Synthetic oligonucleotide
  Target: PCSK9; (+) strand; PAM type: NRG; PAM sequence: CAG
ctgtgacttggcaaatctga

SEQ ID NO: 18545 - DNA, 20 bp, Artificial Sequence
  Description of Artificial Sequence: Synthetic oligonucleotide
  Target: PCSK9; (+) strand; PAM type: NRG; PAM sequence: TGG
caaatctgacagtgaaaacc

SEQ ID NO: 18546 - DNA, 20 bp, Artificial Sequence
  Description of Artificial Sequence: Synthetic oligonucleotide
  Target: PCSK9; (+) strand; PAM type: NRG; PAM sequence: AAG
gtgaaaacctggcacttcct

SEQ ID NO: 18547 - DNA, 20 bp, Artificial Sequence
  Description of Artificial Sequence: Synthetic oligonucleotide
  Target: PCSK9; (+) strand; PAM type: NRG; PAM sequence: AGG
tgaaaacctggcacttccta

SEQ ID NO: 18548 - DNA, 20 bp, Artificial Sequence
  Description of Artificial Sequence: Synthetic oligonucleotide
  Target: PCSK9; (+) strand; PAM type: NRG; PAM sequence: TAG
tggcacttcctaaggctccc

SEQ ID NO: 18549 - DNA, 20 bp, Artificial Sequence
  Description of Artificial Sequence: Synthetic oligonucleotide
  Target: PCSK9; (+) strand; PAM type: NRG; PAM sequence: TGG
aggctccctagttctgtgca

SEQ ID NO: 18550 - DNA, 20 bp, Artificial Sequence
  Description of Artificial Sequence: Synthetic oligonucleotide
  Target: PCSK9; (+) strand; PAM type: NRG; PAM sequence: GAG
tccctagttctgtgcatggt

SEQ ID NO: 18551 - DNA, 20 bp, Artificial Sequence
  Description of Artificial Sequence: Synthetic oligonucleotide
  Target: PCSK9; (+) strand; PAM type: NRG; PAM sequence: AAG
gtgcatggtgagatgaaaat

SEQ ID NO: 18552 - DNA, 20 bp, Artificial Sequence
  Description of Artificial Sequence: Synthetic oligonucleotide
  Target: PCSK9; (+) strand; PAM type: NRG; PAM sequence: AGG
tgcatggtgagatgaaaata

SEQ ID NO: 18553 - DNA, 20 bp, Artificial Sequence
  Description of Artificial Sequence: Synthetic oligonucleotide
  Target: PCSK9; (+) strand; PAM type: NRG; PAM sequence: CAG
atggtgagatgaaaataagg

SEQ ID NO: 18554 - DNA, 20 bp, Artificial Sequence
  Description of Artificial Sequence: Synthetic oligonucleotide
  Target: PCSK9; (+) strand; PAM type: NRG; PAM sequence: AGG
tggtgagatgaaaataaggc

SEQ ID NO: 18555 - DNA, 20 bp, Artificial Sequence
  Description of Artificial Sequence: Synthetic oligonucleotide
  Target: PCSK9; (+) strand; PAM type: NRG; PAM sequence: AAG
taaggcaggacctgtaacta

SEQ ID NO: 18556 - DNA, 20 bp, Artificial Sequence
  Description of Artificial Sequence: Synthetic oligonucleotide
  Target: PCSK9; (+) strand; PAM type: NRG; PAM sequence: AGG
aaggcaggacctgtaactaa

SEQ ID NO: 18557 - DNA, 20 bp, Artificial Sequence
  Description of Artificial Sequence: Synthetic oligonucleotide
  Target: PCSK9; (+) strand; PAM type: NRG; PAM sequence: CAG
acctgtaactaaaggcaaaa

SEQ ID NO: 18558 - DNA, 20 bp, Artificial Sequence
  Description of Artificial Sequence: Synthetic oligonucleotide
  Target: PCSK9; (+) strand; PAM type: NRG; PAM sequence: AGG
cctgtaactaaaggcaaaac

SEQ ID NO: 18559 - DNA, 20 bp, Artificial Sequence
  Description of Artificial Sequence: Synthetic oligonucleotide
  Target: PCSK9; (+) strand; PAM type: NRG; PAM sequence: GGG
ctgtaactaaaggcaaaaca

SEQ ID NO: 18560 - DNA, 20 bp, Artificial Sequence
  Description of Artificial Sequence: Synthetic oligonucleotide
  Target: PCSK9; (+) strand; PAM type: NRG; PAM sequence: GAG
caaaacagggccgaaaatgt

SEQ ID NO: 18561 - DNA, 20 bp, Artificial Sequence
  Description of Artificial Sequence: Synthetic oligonucleotide
  Target: PCSK9; (+) strand; PAM type: NRG; PAM sequence: TGG
caaaatatatatgaaatatg

SEQ ID NO: 18562 - DNA, 20 bp, Artificial Sequence
  Description of Artificial Sequence: Synthetic oligonucleotide
  Target: PCSK9; (+) strand; PAM type: NRG; PAM sequence: GGG
aaaatatatatgaaatatgt

SEQ ID NO: 18563 - DNA, 20 bp, Artificial Sequence
  Description of Artificial Sequence: Synthetic oligonucleotide
  Target: PCSK9; (+) strand; PAM type: NRG; PAM sequence: AAG
acctctcccccacaccataa

SEQ ID NO: 18564 - DNA, 20 bp, Artificial Sequence
  Description of Artificial Sequence: Synthetic oligonucleotide
  Target: PCSK9; (+) strand; PAM type: NRG; PAM sequence: AGG
cctctcccccacaccataaa

SEQ ID NO: 18565 - DNA, 20 bp, Artificial Sequence
  Description of Artificial Sequence: Synthetic oligonucleotide
  Target: PCSK9; (+) strand; PAM type: NRG; PAM sequence: GGG
ctctcccccacaccataaaa

SEQ ID NO: 18566 - DNA, 20 bp, Artificial Sequence
  Description of Artificial Sequence: Synthetic oligonucleotide
  Target: PCSK9; (+) strand; PAM type: NRG; PAM sequence: GAG
ctcccccacaccataaaagg

SEQ ID NO: 18567 - DNA, 20 bp, Artificial Sequence
  Description of Artificial Sequence: Synthetic oligonucleotide
  Target: PCSK9; (+) strand; PAM type: NRG; PAM sequence: TGG
cccacaccataaaagggagc

SEQ ID NO: 18568 - DNA, 20 bp, Artificial Sequence
  Description of Artificial Sequence: Synthetic oligonucleotide
  Target: PCSK9; (+) strand; PAM type: NRG; PAM sequence: GAG
aaaagggagctggtataaat

SEQ ID NO: 18569 - DNA, 20 bp, Artificial Sequence
  Description of Artificial Sequence: Synthetic oligonucleotide
  Target: PCSK9; (+) strand; PAM type: NRG; PAM sequence: TGG
agctggtataaatgagtgaa

SEQ ID NO: 18570 - DNA, 20 bp, Artificial Sequence
  Description of Artificial Sequence: Synthetic oligonucleotide
  Target: PCSK9; (+) strand; PAM type: NRG; PAM sequence: TGG
gagtgaatggtgctatactt

SEQ ID NO: 18571 - DNA, 20 bp, Artificial Sequence
  Description of Artificial Sequence: Synthetic oligonucleotide
  Target: PCSK9; (+) strand; PAM type: NRG; PAM sequence: TGG
actttggaaatacgactaaa

SEQ ID NO: 18572 - DNA, 20 bp, Artificial Sequence
  Description of Artificial Sequence: Synthetic oligonucleotide
  Target: PCSK9; (+) strand; PAM type: NRG; PAM sequence: TGG
tggaaatacgactaaatgga

SEQ ID NO: 18573 - DNA, 20 bp, Artificial Sequence
  Description of Artificial Sequence: Synthetic oligonucleotide
  Target: PCSK9; (+) strand; PAM type: NRG; PAM sequence: TGG
aattgctttatatttatttc

SEQ ID NO: 18574 - DNA, 20 bp, Artificial Sequence
  Description of Artificial Sequence: Synthetic oligonucleotide
  Target: PCSK9; (+) strand; PAM type: NRG; PAM sequence: GGG
attgctttatatttatttct

SEQ ID NO: 18575 - DNA, 20 bp, Artificial Sequence
  Description of Artificial Sequence: Synthetic oligonucleotide
  Target: PCSK9; (+) strand; PAM type: NRG; PAM sequence: CAG
ttaaaccttgactgactttt

SEQ ID NO: 18576 - DNA, 20 bp, Artificial Sequence
  Description of Artificial Sequence: Synthetic oligonucleotide
  Target: PCSK9; (+) strand; PAM type: NRG; PAM sequence: TAG
actgacttttcagtgttaat

SEQ ID NO: 18577 - DNA, 20 bp, Artificial Sequence
  Description of Artificial Sequence: Synthetic oligonucleotide
  Target: PCSK9; (+) strand; PAM type: NRG; PAM sequence: GAG
cagtgttaattagtcatgtt

SEQ ID NO: 18578 - DNA, 20 bp, Artificial Sequence
  Description of Artificial Sequence: Synthetic oligonucleotide
  Target: PCSK9; (+) strand; PAM type: NRG; PAM sequence: AGG
agtgttaattagtcatgttg

SEQ ID NO: 18579 - DNA, 20 bp, Artificial Sequence
  Description of Artificial Sequence: Synthetic oligonucleotide
  Target: PCSK9; (+) strand; PAM type: NRG; PAM sequence: GAG
tgttaattagtcatgttgag

SEQ ID NO: 18580 - DNA, 20 bp, Artificial Sequence
  Description of Artificial Sequence: Synthetic oligonucleotide
  Target: PCSK9; (+) strand; PAM type: NRG; PAM sequence: AAG
acaataactatgaaactcac

SEQ ID NO: 18581 - DNA, 20 bp, Artificial Sequence
  Description of Artificial Sequence: Synthetic oligonucleotide
  Target: PCSK9; (+) strand; PAM type: NRG; PAM sequence: CAG
ataactatgaaactcacaag

SEQ ID NO: 18582 - DNA, 20 bp, Artificial Sequence
  Description of Artificial Sequence: Synthetic oligonucleotide
  Target: PCSK9; (+) strand; PAM type: NRG; PAM sequence: TAG
gcagtgtgtaccaactcaaa

SEQ ID NO: 18583 - DNA, 20 bp, Artificial Sequence
  Description of Artificial Sequence: Synthetic oligonucleotide
  Target: PCSK9; (+) strand; PAM type: NRG; PAM sequence: AAG
cttcatatacaaccaatacc

SEQ ID NO: 18584 - DNA, 20 bp, Artificial Sequence
  Description of Artificial Sequence: Synthetic oligonucleotide
  Target: PCSK9; (+) strand; PAM type: NRG; PAM sequence: AGG
ttcatatacaaccaatacca

SEQ ID NO: 18585 - DNA, 20 bp, Artificial Sequence
  Description of Artificial Sequence: Synthetic oligonucleotide
  Target: PCSK9; (+) strand; PAM type: NRG; PAM sequence: GGG
tcatatacaaccaataccaa

SEQ ID NO: 18586 - DNA, 20 bp, Artificial Sequence
  Description of Artificial Sequence: Synthetic oligonucleotide
  Target: PCSK9; (+) strand; PAM type: NRG; PAM sequence: CAG
acaaccaataccaagggttt

SEQ ID NO: 18587 - DNA, 20 bp, Artificial Sequence
  Description of Artificial Sequence: Synthetic oligonucleotide
  Target: PCSK9; (+) strand; PAM type: NRG; PAM sequence: AAG
ggtttcagtaattatgtttt

SEQ ID NO: 18588 - DNA, 20 bp, Artificial Sequence
  Description of Artificial Sequence: Synthetic oligonucleotide
  Target: PCSK9; (+) strand; PAM type: NRG; PAM sequence: AAG
agtaattatgttttaagcaa

SEQ ID NO: 18589 - DNA, 20 bp, Artificial Sequence
  Description of Artificial Sequence: Synthetic oligonucleotide
  Target: PCSK9; (+) strand; PAM type: NRG; PAM sequence: CAG
taagcaaaagcaaacgattg

SEQ ID NO: 18590 - DNA, 20 bp, Artificial Sequence
  Description of Artificial Sequence: Synthetic oligonucleotide
  Target: PCSK9; (+) strand; PAM type: NRG; PAM sequence: AAG
gattgcagatcacatgattt

SEQ ID NO: 18591 - DNA, 20 bp, Artificial Sequence
  Description of Artificial Sequence: Synthetic oligonucleotide
  Target: PCSK9; (+) strand; PAM type: NRG; PAM sequence: CAG
gatcacatgatttaagacta

SEQ ID NO: 18592 - DNA, 20 bp, Artificial Sequence
  Description of Artificial Sequence: Synthetic oligonucleotide
  Target: PCSK9; (+) strand; PAM type: NRG; PAM sequence: AAG
agtttattcaatatgtctcc

SEQ ID NO: 18593 - DNA, 20 bp, Artificial Sequence
  Description of Artificial Sequence: Synthetic oligonucleotide
  Target: PCSK9; (+) strand; PAM type: NRG; PAM sequence: AAG
atatgtctccaagcattaaa

SEQ ID NO: 18594 - DNA, 20 bp, Artificial Sequence
  Description of Artificial Sequence: Synthetic oligonucleotide
  Target: PCSK9; (+) strand; PAM type: NRG; PAM sequence: AAG
attaaaaagataattctgtg

SEQ ID NO: 18595 - DNA, 20 bp, Artificial Sequence
  Description of Artificial Sequence: Synthetic oligonucleotide
  Target: PCSK9; (+) strand; PAM type: NRG; PAM sequence: CAG
taattctgtgaagttaaact

SEQ ID NO: 18596 - DNA, 20 bp, Artificial Sequence
  Description of Artificial Sequence: Synthetic oligonucleotide
  Target: PCSK9; (+) strand; PAM type: NRG; PAM sequence: AAG
ctcagtaaaattatatctta

SEQ ID NO: 18597 - DNA, 20 bp, Artificial Sequence
  Description of Artificial Sequence: Synthetic oligonucleotide
  Target: PCSK9; (+) strand; PAM type: NRG; PAM sequence: TGG
tgctgtttttaaaatctgtt

SEQ ID NO: 18598 - DNA, 20 bp, Artificial Sequence
  Description of Artificial Sequence: Synthetic oligonucleotide
  Target: PCSK9; (+) strand; PAM type: NRG; PAM sequence: GGG
gctgtttttaaaatctgttt

SEQ ID NO: 18599 - DNA, 20 bp, Artificial Sequence
  Description of Artificial Sequence: Synthetic oligonucleotide
  Target: PCSK9; (+) strand; PAM type: NRG; PAM sequence: GGG
ctgtttttaaaatctgtttg

SEQ ID NO: 18600 - DNA, 20 bp, Artificial Sequence
  Description of Artificial Sequence: Synthetic oligonucleotide
  Target: PCSK9; (+) strand; PAM type: NRG; PAM sequence: AAG
gaacaactcataacttcttt

SEQ ID NO: 18601 - DNA, 20 bp, Artificial Sequence
  Description of Artificial Sequence: Synthetic oligonucleotide
  Target: PCSK9; (+) strand; PAM type: NRG; PAM sequence: TGG
aataatgcaccctgtacttc

SEQ ID NO: 18602 - DNA, 20 bp, Artificial Sequence
  Description of Artificial Sequence: Synthetic oligonucleotide
  Target: PCSK9; (+) strand; PAM type: NRG; PAM sequence: GAG
taatgcaccctgtacttctg

SEQ ID NO: 18603 - DNA, 20 bp, Artificial Sequence
  Description of Artificial Sequence: Synthetic oligonucleotide
  Target: PCSK9; (+) strand; PAM type: NRG; PAM sequence: CAG
ccctgtacttctggagaaca

SEQ ID NO: 18604 - DNA, 20 bp, Artificial Sequence
  Description of Artificial Sequence: Synthetic oligonucleotide
  Target: PCSK9; (+) strand; PAM type: NRG; PAM sequence: CAG
tcttttcaatctaattatat

SEQ ID NO: 18605 - DNA, 20 bp, Artificial Sequence
  Description of Artificial Sequence: Synthetic oligonucleotide
  Target: PCSK9; (+) strand; PAM type: NRG; PAM sequence: AAG
tatatcagaaaaatatcttc

SEQ ID NO: 18606 - DNA, 20 bp, Artificial Sequence
  Description of Artificial Sequence: Synthetic oligonucleotide
  Target: PCSK9; (+) strand; PAM type: NRG; PAM sequence: GAG
tatcagaaaaatatcttcaa

SEQ ID NO: 18607 - DNA, 20 bp, Artificial Sequence
  Description of Artificial Sequence: Synthetic oligonucleotide
  Target: PCSK9; (+) strand; PAM type: NRG; PAM sequence: TAG
gaaaaatatcttcaagagct

SEQ ID NO: 18608 - DNA, 20 bp, Artificial Sequence
  Description of Artificial Sequence: Synthetic oligonucleotide
  Target: PCSK9; (+) strand; PAM type: NRG; PAM sequence: TGG
ccaatttttgatcctgatcc

SEQ ID NO: 18609 - DNA, 20 bp, Artificial Sequence
  Description of Artificial Sequence: Synthetic oligonucleotide
  Target: PCSK9; (+) strand; PAM type: NRG; PAM sequence: AAG
gatcctggtaacctttcatc

SEQ ID NO: 18610 - DNA, 20 bp, Artificial Sequence
  Description of Artificial Sequence: Synthetic oligonucleotide
  Target: PCSK9; (+) strand; PAM type: NRG; PAM sequence: AAG
gtaacctttcatcaagatcc

SEQ ID NO: 18611 - DNA, 20 bp, Artificial Sequence
  Description of Artificial Sequence: Synthetic oligonucleotide
  Target: PCSK9; (+) strand; PAM type: NRG; PAM sequence: TAG
tcaagatccaagcttatgca

SEQ ID NO: 18612 - DNA, 20 bp, Artificial Sequence
  Description of Artificial Sequence: Synthetic oligonucleotide
  Target: PCSK9; (+) strand; PAM type: NRG; PAM sequence: AGG
caagatccaagcttatgcat

SEQ ID NO: 18613 - DNA, 20 bp, Artificial Sequence
  Description of Artificial Sequence: Synthetic oligonucleotide
  Target: PCSK9; (+) strand; PAM type: NRG; PAM sequence: GGG
aagatccaagcttatgcata

SEQ ID NO: 18614 - DNA, 20 bp, Artificial Sequence
  Description of Artificial Sequence: Synthetic oligonucleotide
  Target: PCSK9; (+) strand; PAM type: NRG; PAM sequence: TAG
ttatgcatagggttctcatc

SEQ ID NO: 18615 - DNA, 20 bp, Artificial Sequence
  Description of Artificial Sequence: Synthetic oligonucleotide
  Target: PCSK9; (+) strand; PAM type: NRG; PAM sequence: TAG
catctgaaattctatacaaa

SEQ ID NO: 18616 - DNA, 20 bp, Artificial Sequence
  Description of Artificial Sequence: Synthetic oligonucleotide
  Target: PCSK9; (+) strand; PAM type: NRG; PAM sequence: AGG
atctgaaattctatacaaat

SEQ ID NO: 18617 - DNA, 20 bp, Artificial Sequence
  Description of Artificial Sequence: Synthetic oligonucleotide
  Target: PCSK9; (+) strand; PAM type: NRG; PAM sequence: GGG
tctgaaattctatacaaata

SEQ ID NO: 18618 - DNA, 20 bp, Artificial Sequence
  Description of Artificial Sequence: Synthetic oligonucleotide
  Target: PCSK9; (+) strand; PAM type: NRG; PAM sequence: GAG
tgaaattctatacaaatagg

SEQ ID NO: 18619 - DNA, 20 bp, Artificial Sequence
  Description of Artificial Sequence: Synthetic oligonucleotide
  Target: PCSK9; (+) strand; PAM type: NRG; PAM sequence: AAG
agggagacatattaaataca

SEQ ID NO: 18620 - DNA, 20 bp, Artificial Sequence
  Description of Artificial Sequence: Synthetic oligonucleotide
  Target: PCSK9; (+) strand; PAM type: NRG; PAM sequence: AGG
gggagacatattaaatacaa

SEQ ID NO: 18621 - DNA, 20 bp, Artificial Sequence
  Description of Artificial Sequence: Synthetic oligonucleotide
  Target: PCSK9; (+) strand; PAM type: NRG; PAM sequence: AAG
aattactattttacaatgaa

SEQ ID NO: 18622 - DNA, 20 bp, Artificial Sequence
  Description of Artificial Sequence: Synthetic oligonucleotide
  Target: PCSK9; (+) strand; PAM type: NRG; PAM sequence: AGG
attactattttacaatgaaa

SEQ ID NO: 18623 - DNA, 20 bp, Artificial Sequence
  Description of Artificial Sequence: Synthetic oligonucleotide
  Target: PCSK9; (+) strand; PAM type: NRG; PAM sequence: TGG
atctttacatcattttaaat

SEQ ID NO: 18624 - DNA, 20 bp, Artificial Sequence
  Description of Artificial Sequence: Synthetic oligonucleotide
  Target: PCSK9; (+) strand; PAM type: NRG; PAM sequence: AAG
ttcctgtttaatattactgc

SEQ ID NO: 18625 - DNA, 20 bp, Artificial Sequence
  Description of Artificial Sequence: Synthetic oligonucleotide
  Target: PCSK9; (+) strand; PAM type: NRG; PAM sequence: AAG
atttgcccccacatatctaa

SEQ ID NO: 18626 - DNA, 20 bp, Artificial Sequence
  Description of Artificial Sequence: Synthetic oligonucleotide
  Target: PCSK9; (+) strand; PAM type: NRG; PAM sequence: CAG
tgcccccacatatctaaaag

SEQ ID NO: 18627 - DNA, 20 bp, Artificial Sequence
  Description of Artificial Sequence: Synthetic oligonucleotide
  Target: PCSK9; (+) strand; PAM type: NRG; PAM sequence: AAG
ttcttaaaatataaaaacca

SEQ ID NO: 18628 - DNA, 20 bp, Artificial Sequence
  Description of Artificial Sequence: Synthetic oligonucleotide
  Target: PCSK9; (+) strand; PAM type: NRG; PAM sequence: AGG
tcttaaaatataaaaaccaa

SEQ ID NO: 18629 - DNA, 20 bp, Artificial Sequence
  Description of Artificial Sequence: Synthetic oligonucleotide
  Target: PCSK9; (+) strand; PAM type: NRG; PAM sequence: TAG
aaccaaaggaatttcttttg

SEQ ID NO: 18630 - DNA, 20 bp, Artificial Sequence
  Description of Artificial Sequence: Synthetic oligonucleotide
  Target: PCSK9; (+) strand; PAM type: NRG; PAM sequence: TAG
gaatttcttttgtagcatcg

SEQ ID NO: 18631 - DNA, 20 bp, Artificial Sequence
  Description of Artificial Sequence: Synthetic oligonucleotide
  Target: PCSK9; (+) strand; PAM type: NRG; PAM sequence: GAG
atttcttttgtagcatcgta

SEQ ID NO: 18632 - DNA, 20 bp, Artificial Sequence
  Description of Artificial Sequence: Synthetic oligonucleotide
  Target: PCSK9; (+) strand; PAM type: NRG; PAM sequence: AAG
cttttgtagcatcgtagaga

SEQ ID NO: 18633 - DNA, 20 bp, Artificial Sequence
  Description of Artificial Sequence: Synthetic oligonucleotide
  Target: PCSK9; (+) strand; PAM type: NRG; PAM sequence: CAG
tagcatcgtagagaaagcaa

SEQ ID NO: 18634 - DNA, 20 bp, Artificial Sequence
  Description of Artificial Sequence: Synthetic oligonucleotide
  Target: PCSK9; (+) strand; PAM type: NRG; PAM sequence: AAG
tgtatgttcgtgtaacaaaa

SEQ ID NO: 18635 - DNA, 20 bp, Artificial Sequence
  Description of Artificial Sequence: Synthetic oligonucleotide
  Target: PCSK9; (+) strand; PAM type: NRG; PAM sequence: TGG
gtaacaaaaaagtctgccac

SEQ ID NO: 18636 - DNA, 20 bp, Artificial Sequence
  Description of Artificial Sequence: Synthetic oligonucleotide
  Target: PCSK9; (+) strand; PAM type: NRG; PAM sequence: CAG
tctatttccgaaaatctcca

SEQ ID NO: 18637 - DNA, 20 bp, Artificial Sequence
  Description of Artificial Sequence: Synthetic oligonucleotide
  Target: PCSK9; (+) strand; PAM type: NRG; PAM sequence: TAG
cagaaatgtgaatccacata

SEQ ID NO: 18638 - DNA, 20 bp, Artificial Sequence
  Description of Artificial Sequence: Synthetic oligonucleotide
  Target: PCSK9; (+) strand; PAM type: NRG; PAM sequence: CGG
ccacatatagaccacgctcc

SEQ ID NO: 18639 - DNA, 20 bp, Artificial Sequence
  Description of Artificial Sequence: Synthetic oligonucleotide
  Target: PCSK9; (+) strand; PAM type: NRG; PAM sequence: GGG
cacatatagaccacgctccc

SEQ ID NO: 18640 - DNA, 20 bp, Artificial Sequence
  Description of Artificial Sequence: Synthetic oligonucleotide
  Target: PCSK9; (+) strand; PAM type: NRG; PAM sequence: CAG
tatagaccacgctcccggga

SEQ ID NO: 18641 - DNA, 20 bp, Artificial Sequence
  Description of Artificial Sequence: Synthetic oligonucleotide
  Target: PCSK9; (+) strand; PAM type: NRG; PAM sequence: CGG
gggacagctgatccacatgc

SEQ ID NO: 18642 - DNA, 20 bp, Artificial Sequence
  Description of Artificial Sequence: Synthetic oligonucleotide
  Target: PCSK9; (+) strand; PAM type: NRG; PAM sequence: GAG
gacagctgatccacatgccg

SEQ ID NO: 18643 - DNA, 20 bp, Artificial Sequence
  Description of Artificial Sequence: Synthetic oligonucleotide
  Target: PCSK9; (+) strand; PAM type: NRG; PAM sequence: CAG
ggagttctcccactgccaaa

SEQ ID NO: 18644 - DNA, 20 bp, Artificial Sequence
  Description of Artificial Sequence: Synthetic oligonucleotide
  Target: PCSK9; (+) strand; PAM type: NRG; PAM sequence: TAG
caaacagctcccaaaccttc

SEQ ID NO: 18645 - DNA, 20 bp, Artificial Sequence
  Description of Artificial Sequence: Synthetic oligonucleotide
  Target: PCSK9; (+) strand; PAM type: NRG; PAM sequence: TGG
acagctcccaaaccttctag

SEQ ID NO: 18646 - DNA, 20 bp, Artificial Sequence
  Description of Artificial Sequence: Synthetic oligonucleotide
  Target: PCSK9; (+) strand; PAM type: NRG; PAM sequence: GAG
ggcttaaaaatgctttcctt

SEQ ID NO: 18647 - DNA, 20 bp, Artificial Sequence
  Description of Artificial Sequence: Synthetic oligonucleotide
  Target: PCSK9; (+) strand; PAM type: NRG; PAM sequence: AAG
gagaaatacacgatccgccc

SEQ ID NO: 18648 - DNA, 20 bp, Artificial Sequence
  Description of Artificial Sequence: Synthetic oligonucleotide
  Target: PCSK9; (+) strand; PAM type: NRG; PAM sequence: CAG
tacacgatccgcccaagtca

SEQ ID NO: 18649 - DNA, 20 bp, Artificial Sequence
  Description of Artificial Sequence: Synthetic oligonucleotide
  Target: PCSK9; (+) strand; PAM type: NRG; PAM sequence: CAG
acgatccgcccaagtcacag

SEQ ID NO: 18650 - DNA, 20 bp, Artificial Sequence
  Description of Artificial Sequence: Synthetic oligonucleotide
  Target: PCSK9; (+) strand; PAM type: NRG; PAM sequence: CAG
ccaagtcacagcagctttcc

SEQ ID NO: 18651 - DNA, 20 bp, Artificial Sequence
  Description of Artificial Sequence: Synthetic oligonucleotide
  Target: PCSK9; (+) strand; PAM type: NRG; PAM sequence: CAG
agctttcccagtccaatctc

SEQ ID NO: 18652 - DNA, 20 bp, Artificial Sequence
  Description of Artificial Sequence: Synthetic oligonucleotide
  Target: PCSK9; (+) strand; PAM type: NRG; PAM sequence: AGG
gctttcccagtccaatctcc

SEQ ID NO: 18653 - DNA, 20 bp, Artificial Sequence
  Description of Artificial Sequence: Synthetic oligonucleotide
  Target: PCSK9; (+) strand; PAM type: NRG; PAM sequence: AAG
ccaatctccaggctcttcca

SEQ ID NO: 18654 - DNA, 20 bp, Artificial Sequence
  Description of Artificial Sequence: Synthetic oligonucleotide
  Target: PCSK9; (+) strand; PAM type: NRG; PAM sequence: AGG
caatctccaggctcttccaa

SEQ ID NO: 18655 - DNA, 20 bp, Artificial Sequence
  Description of Artificial Sequence: Synthetic oligonucleotide
  Target: PCSK9; (+) strand; PAM type: NRG; PAM sequence: GGG
aatctccaggctcttccaaa

SEQ ID NO: 18656 - DNA, 20 bp, Artificial Sequence
  Description of Artificial Sequence: Synthetic oligonucleotide
  Target: PCSK9; (+) strand; PAM type: NRG; PAM sequence: GAG
caggctcttccaaagggttc

SEQ ID NO: 18657 - DNA, 20 bp, Artificial Sequence
  Description of Artificial Sequence: Synthetic oligonucleotide
  Target: PCSK9; (+) strand; PAM type: NRG; PAM sequence: AAG
gggttcgagattctgattcc

SEQ ID NO: 18658 - DNA, 20 bp, Artificial Sequence
  Description of Artificial Sequence: Synthetic oligonucleotide
  Target: PCSK9; (+) strand; PAM type: NRG; PAM sequence: AAG
ttcgagattctgattccaag

SEQ ID NO: 18659 - DNA, 20 bp, Artificial Sequence
  Description of Artificial Sequence: Synthetic oligonucleotide
  Target: PCSK9; (+) strand; PAM type: NRG; PAM sequence: AGG
tcgagattctgattccaaga

SEQ ID NO: 18660 - DNA, 20 bp, Artificial Sequence
  Description of Artificial Sequence: Synthetic oligonucleotide
  Target: PCSK9; (+) strand; PAM type: NRG; PAM sequence: GAG
tctgattccaagaaggtgct

SEQ ID NO: 18661 - DNA, 20 bp, Artificial Sequence
  Description of Artificial Sequence: Synthetic oligonucleotide
  Target: PCSK9; (+) strand; PAM type: NRG; PAM sequence: CAG
ccaagaaggtgctgagcatc

SEQ ID NO: 18662 - DNA, 20 bp, Artificial Sequence
  Description of Artificial Sequence: Synthetic oligonucleotide
  Target: PCSK9; (+) strand; PAM type: NRG; PAM sequence: CAG
tattgtgtcttgactcctct

SEQ ID NO: 18663 - DNA, 20 bp, Artificial Sequence
  Description of Artificial Sequence: Synthetic oligonucleotide
  Target: PCSK9; (+) strand; PAM type: NRG; PAM sequence: AGG
attgtgtcttgactcctctc

SEQ ID NO: 18664 - DNA, 20 bp, Artificial Sequence
  Description of Artificial Sequence: Synthetic oligonucleotide
  Target: PCSK9; (+) strand; PAM type: NRG; PAM sequence: TGG
tgtcttgactcctctcaggc

SEQ ID NO: 18665 - DNA, 20 bp, Artificial Sequence
  Description of Artificial Sequence: Synthetic oligonucleotide
  Target: PCSK9; (+) strand; PAM type: NRG; PAM sequence: GGG
gtcttgactcctctcaggct

SEQ ID NO: 18666 - DNA, 20 bp, Artificial Sequence
  Description of Artificial Sequence: Synthetic oligonucleotide
  Target: PCSK9; (+) strand; PAM type: NRG; PAM sequence: TAG
tcaggctgggcatgttcctc

SEQ ID NO: 18667 - DNA, 20 bp, Artificial Sequence
  Description of Artificial Sequence: Synthetic oligonucleotide
  Target: PCSK9; (+) strand; PAM type: NRG; PAM sequence: AGG
caggctgggcatgttcctct

SEQ ID NO: 18668 - DNA, 20 bp, Artificial Sequence
  Description of Artificial Sequence: Synthetic oligonucleotide
  Target: PCSK9; (+) strand; PAM type: NRG; PAM sequence: GGG
aggctgggcatgttcctcta

SEQ ID NO: 18669 - DNA, 20 bp, Artificial Sequence
  Description of Artificial Sequence: Synthetic oligonucleotide
  Target: PCSK9; (+) strand; PAM type: NRG; PAM sequence: AAG
ctctagggatcaacatcatc

SEQ ID NO: 18670 - DNA, 20 bp, Artificial Sequence
  Description of Artificial Sequence: Synthetic oligonucleotide
  Target: PCSK9; (+) strand; PAM type: NRG; PAM sequence: AGG
tctagggatcaacatcatca

SEQ ID NO: 18671 - DNA, 20 bp, Artificial Sequence
  Description of Artificial Sequence: Synthetic oligonucleotide
  Target: PCSK9; (+) strand; PAM type: NRG; PAM sequence: TGG
tctcaactcaccaatcatca

SEQ ID NO: 18672 - DNA, 20 bp, Artificial Sequence
  Description of Artificial Sequence: Synthetic oligonucleotide
  Target: PCSK9; (+) strand; PAM type: NRG; PAM sequence: GGG
ctcaactcaccaatcatcat

SEQ ID NO: 18673 - DNA, 20 bp, Artificial Sequence
  Description of Artificial Sequence: Synthetic oligonucleotide
  Target: PCSK9; (+) strand; PAM type: NRG; PAM sequence: GAG
caactcaccaatcatcatgg

SEQ ID NO: 18674 - DNA, 20 bp, Artificial Sequence
  Description of Artificial Sequence: Synthetic oligonucleotide
  Target: PCSK9; (+) strand; PAM type: NRG; PAM sequence: CAG
atgggagattctgaaccctg

SEQ ID NO: 18675 - DNA, 20 bp, Artificial Sequence
  Description of Artificial Sequence: Synthetic oligonucleotide
  Target: PCSK9; (+) strand; PAM type: NRG; PAM sequence: AAG
agattctgaaccctgcagaa

SEQ ID NO: 18676 - DNA, 20 bp, Artificial Sequence
  Description of Artificial Sequence: Synthetic oligonucleotide
  Target: PCSK9; (+) strand; PAM type: NRG; PAM sequence: AAG
ctgaaccctgcagaaaagaa

SEQ ID NO: 18677 - DNA, 20 bp, Artificial Sequence
  Description of Artificial Sequence: Synthetic oligonucleotide
  Target: PCSK9; (+) strand; PAM type: NRG; PAM sequence: AGG
tgaaccctgcagaaaagaaa

SEQ ID NO: 18678 - DNA, 20 bp, Artificial Sequence
  Description of Artificial Sequence: Synthetic oligonucleotide
  Target: PCSK9; (+) strand; PAM type: NRG; PAM sequence: AAG
accctgcagaaaagaaaagg

SEQ ID NO: 18679 - DNA, 20 bp, Artificial Sequence
  Description of Artificial Sequence: Synthetic oligonucleotide
  Target: PCSK9; (+) strand; PAM type: NRG; PAM sequence: AAG
cagaaaagaaaaggaagtta

SEQ ID NO: 18680 - DNA, 20 bp, Artificial Sequence
  Description of Artificial Sequence: Synthetic oligonucleotide
  Target: PCSK9; (+) strand; PAM type: NRG; PAM sequence: CGG
aaaggaagttaaagttcata

SEQ ID NO: 18681 - DNA, 20 bp, Artificial Sequence
  Description of Artificial Sequence: Synthetic oligonucleotide
  Target: PCSK9; (+) strand; PAM type: NRG; PAM sequence: TAG
gaagttaaagttcatacggt

SEQ ID NO: 18682 - DNA, 20 bp, Artificial Sequence
  Description of Artificial Sequence: Synthetic oligonucleotide
  Target: PCSK9; (+) strand; PAM type: NRG; PAM sequence: GAG
agttaaagttcatacggtta

SEQ ID NO: 18683 - DNA, 20 bp, Artificial Sequence
  Description of Artificial Sequence: Synthetic oligonucleotide
  Target: PCSK9; (+) strand; PAM type: NRG; PAM sequence: AAG
aagttcatacggttagagaa

SEQ ID NO: 18684 - DNA, 20 bp, Artificial Sequence
  Description of Artificial Sequence: Synthetic oligonucleotide
  Target: PCSK9; (+) strand; PAM type: NRG; PAM sequence: AGG
agttcatacggttagagaaa

SEQ ID NO: 18685 - DNA, 20 bp, Artificial Sequence
  Description of Artificial Sequence: Synthetic oligonucleotide
  Target: PCSK9; (+) strand; PAM type: NRG; PAM sequence: TGG
aatttaaacatgtcttcatc

SEQ ID NO: 18686 - DNA, 20 bp, Artificial Sequence
  Description of Artificial Sequence: Synthetic oligonucleotide
  Target: PCSK9; (+) strand; PAM type: NRG; PAM sequence: AAG
acttaatgcaatgtttatca

SEQ ID NO: 18687 - DNA, 20 bp, Artificial Sequence
  Description of Artificial Sequence: Synthetic oligonucleotide
  Target: PCSK9; (+) strand; PAM type: NRG; PAM sequence: AGG
cttaatgcaatgtttatcaa

SEQ ID NO: 18688 - DNA, 20 bp, Artificial Sequence
  Description of Artificial Sequence: Synthetic oligonucleotide
  Target: PCSK9; (+) strand; PAM type: NRG; PAM sequence: GGG
ttaatgcaatgtttatcaaa

SEQ ID NO: 18689 - DNA, 20 bp, Artificial Sequence
  Description of Artificial Sequence: Synthetic oligonucleotide
  Target: PCSK9; (+) strand; PAM type: NRG; PAM sequence: TAG
tacatttctatgatctcatt

SEQ ID NO: 18690 - DNA, 20 bp, Artificial Sequence
  Description of Artificial Sequence: Synthetic oligonucleotide
  Target: PCSK9; (+) strand; PAM type: NRG; PAM sequence: CAG
tttctatgatctcatttagt

SEQ ID NO: 18691 - DNA, 20 bp, Artificial Sequence
  Description of Artificial Sequence: Synthetic oligonucleotide
  Target: PCSK9; (+) strand; PAM type: NRG; PAM sequence: CAG
atttagtcagtgaaacaacc

SEQ ID NO: 18692 - DNA, 20 bp, Artificial Sequence
  Description of Artificial Sequence: Synthetic oligonucleotide
  Target: PCSK9; (+) strand; PAM type: NRG; PAM sequence: AAG
acaacccagcgacttgtcta

SEQ ID NO: 18693 - DNA, 20 bp, Artificial Sequence
  Description of Artificial Sequence: Synthetic oligonucleotide
  Target: PCSK9; (+) strand; PAM type: NRG; PAM sequence: GAG
atgctactctgcacccatgt

SEQ ID NO: 18694 - DNA, 20 bp, Artificial Sequence
  Description of Artificial Sequence: Synthetic oligonucleotide
  Target: PCSK9; (+) strand; PAM type: NRG; PAM sequence: CAG
tctgcacccatgtgagaacg

SEQ ID NO: 18695 - DNA, 20 bp, Artificial Sequence
  Description of Artificial Sequence: Synthetic oligonucleotide
  Target: PCSK9; (+) strand; PAM type: NRG; PAM sequence: GAG
tgcacccatgtgagaacgca

SEQ ID NO: 18696 - DNA, 20 bp, Artificial Sequence
  Description of Artificial Sequence: Synthetic oligonucleotide
  Target: PCSK9; (+) strand; PAM type: NRG; PAM sequence: CAG
acccatgtgagaacgcagag

SEQ ID NO: 18697 - DNA, 20 bp, Artificial Sequence
  Description of Artificial Sequence: Synthetic oligonucleotide
  Target: PCSK9; (+) strand; PAM type: NRG; PAM sequence: AAG
gagaacgcagagcagtgata

SEQ ID NO: 18698 - DNA, 20 bp, Artificial Sequence
  Description of Artificial Sequence: Synthetic oligonucleotide
  Target: PCSK9; (+) strand; PAM type: NRG; PAM sequence: TGG
acgcagagcagtgataaagc

SEQ ID NO: 18699 - DNA, 20 bp, Artificial Sequence
  Description of Artificial Sequence: Synthetic oligonucleotide
  Target: PCSK9; (+) strand; PAM type: NRG; PAM sequence: GGG
cgcagagcagtgataaagct

SEQ ID NO: 18700 - DNA, 20 bp, Artificial Sequence
  Description of Artificial Sequence: Synthetic oligonucleotide
  Target: PCSK9; (+) strand; PAM type: NRG; PAM sequence: GAG
cagagcagtgataaagctgg

SEQ ID NO: 18701 - DNA, 20 bp, Artificial Sequence
  Description of Artificial Sequence: Synthetic oligonucleotide
  Target: PCSK9; (+) strand; PAM type: NRG; PAM sequence: GAG
gagcagtgataaagctggga

SEQ ID NO: 18702 - DNA, 20 bp, Artificial Sequence
  Description of Artificial Sequence: Synthetic oligonucleotide
  Target: PCSK9; (+) strand; PAM type: NRG; PAM sequence: AGG
agcagtgataaagctgggag

SEQ ID NO: 18703 - DNA, 20 bp, Artificial Sequence
  Description of Artificial Sequence: Synthetic oligonucleotide
  Target: PCSK9; (+) strand; PAM type: NRG; PAM sequence: TGG
aaagctgggagaggcattga

SEQ ID NO: 18704 - DNA, 20 bp, Artificial Sequence
  Description of Artificial Sequence: Synthetic oligonucleotide
  Target: PCSK9; (+) strand; PAM type: NRG; PAM sequence: TGG
ccattgtgcccgcttcacgt

SEQ ID NO: 18705 - DNA, 20 bp, Artificial Sequence
  Description of Artificial Sequence: Synthetic oligonucleotide
  Target: PCSK9; (+) strand; PAM type: NRG; PAM sequence: GGG
cattgtgcccgcttcacgtt

SEQ ID NO: 18706 - DNA, 20 bp, Artificial Sequence
  Description of Artificial Sequence: Synthetic oligonucleotide
  Target: PCSK9; (+) strand; PAM type: NRG; PAM sequence: GAG
cttcacgttgggcactgtgt

SEQ ID NO: 18707 - DNA, 20 bp, Artificial Sequence
  Description of Artificial Sequence: Synthetic oligonucleotide
  Target: PCSK9; (+) strand; PAM type: NRG; PAM sequence: TGG
tgccctgcacctgccaaata

SEQ ID NO: 18708 - DNA, 20 bp, Artificial Sequence
  Description of Artificial Sequence: Synthetic oligonucleotide
  Target: PCSK9; (+) strand; PAM type: NRG; PAM sequence: GGG
gccctgcacctgccaaatat

SEQ ID NO: 18709 - DNA, 20 bp, Artificial Sequence
  Description of Artificial Sequence: Synthetic oligonucleotide
  Target: PCSK9; (+) strand; PAM type: NRG; PAM sequence: TGG
cacctgccaaatatgggctc

SEQ ID NO: 18710 - DNA, 20 bp, Artificial Sequence
  Description of Artificial Sequence: Synthetic oligonucleotide
  Target: PCSK9; (+) strand; PAM type: NRG; PAM sequence: GGG
acctgccaaatatgggctct

SEQ ID NO: 18711 - DNA, 20 bp, Artificial Sequence
  Description of Artificial Sequence: Synthetic oligonucleotide
  Target: PCSK9; (+) strand; PAM type: NRG; PAM sequence: TGG
tatgggctctgggtcactcc

SEQ ID NO: 18712 - DNA, 20 bp, Artificial Sequence
  Description of Artificial Sequence: Synthetic oligonucleotide
  Target: PCSK9; (+) strand; PAM type: NRG; PAM sequence: GGG
atgggctctgggtcactcct

SEQ ID NO: 18713 - DNA, 20 bp, Artificial Sequence
  Description of Artificial Sequence: Synthetic oligonucleotide
  Target: PCSK9; (+) strand; PAM type: NRG; PAM sequence: AAG
ctgggtcactcctgggtctg

SEQ ID NO: 18714 - DNA, 20 bp, Artificial Sequence
  Description of Artificial Sequence: Synthetic oligonucleotide
  Target: PCSK9; (+) strand; PAM type: NRG; PAM sequence: AGG
tgggtcactcctgggtctga

SEQ ID NO: 18715 - DNA, 20 bp, Artificial Sequence
  Description of Artificial Sequence: Synthetic oligonucleotide
  Target: PCSK9; (+) strand; PAM type: NRG; PAM sequence: TGG
tacctctgttaccatctgtg

SEQ ID NO: 18716 - DNA, 20 bp, Artificial Sequence
  Description of Artificial Sequence: Synthetic oligonucleotide
  Target: PCSK9; (+) strand; PAM type: NRG; PAM sequence: TGG
gttaccatctgtgtggcctt

SEQ ID NO: 18717 - DNA, 20 bp, Artificial Sequence
  Description of Artificial Sequence: Synthetic oligonucleotide
  Target: PCSK9; (+) strand; PAM type: NRG; PAM sequence: TGG
tggcctttggcttacacact

SEQ ID NO: 18718 - DNA, 20 bp, Artificial Sequence
  Description of Artificial Sequence: Synthetic oligonucleotide
  Target: PCSK9; (+) strand; PAM type: NRG; PAM sequence: TGG
tgaatactcaccgtgtgcca

SEQ ID NO: 18719 - DNA, 20 bp, Artificial Sequence
  Description of Artificial Sequence: Synthetic oligonucleotide
  Target: PCSK9; (+) strand; PAM type: NRG; PAM sequence: GGG
gaatactcaccgtgtgccat

SEQ ID NO: 18720 - DNA, 20 bp, Artificial Sequence
  Description of Artificial Sequence: Synthetic oligonucleotide
  Target: PCSK9; (+) strand; PAM type: NRG; PAM sequence: GGG
aatactcaccgtgtgccatg

SEQ ID NO: 18721 - DNA, 20 bp, Artificial Sequence
  Description of Artificial Sequence: Synthetic oligonucleotide
  Target: PCSK9; (+) strand; PAM type: NRG; PAM sequence: TAG
cgtgtgccatggggctgatc

SEQ ID NO: 18722 - DNA, 20 bp, Artificial Sequence
  Description of Artificial Sequence: Synthetic oligonucleotide
  Target: PCSK9; (+) strand; PAM type: NRG; PAM sequence: TGG
tgccatggggctgatctagt

SEQ ID NO: 18723 - DNA, 20 bp, Artificial Sequence
  Description of Artificial Sequence: Synthetic oligonucleotide
  Target: PCSK9; (+) strand; PAM type: NRG; PAM sequence: GAG
ccatggggctgatctagttg

SEQ ID NO: 18724 - DNA, 20 bp, Artificial Sequence
  Description of Artificial Sequence: Synthetic oligonucleotide
  Target: PCSK9; (+) strand; PAM type: NRG; PAM sequence: TGG
ggggctgatctagttggagc

SEQ ID NO: 18725 - DNA, 20 bp, Artificial Sequence
  Description of Artificial Sequence: Synthetic oligonucleotide
  Target: PCSK9; (+) strand; PAM type: NRG; PAM sequence: GGG
gggctgatctagttggagct

SEQ ID NO: 18726 - DNA, 20 bp, Artificial Sequence
  Description of Artificial Sequence: Synthetic oligonucleotide
  Target: PCSK9; (+) strand; PAM type: NRG; PAM sequence: GGG
ggctgatctagttggagctg

SEQ ID NO: 18727 - DNA, 20 bp, Artificial Sequence
  Description of Artificial Sequence: Synthetic oligonucleotide
  Target: PCSK9; (+) strand; PAM type: NRG; PAM sequence: TGG
tgatctagttggagctgggg

SEQ ID NO: 18728 - DNA, 20 bp, Artificial Sequence
  Description of Artificial Sequence: Synthetic oligonucleotide
  Target: PCSK9; (+) strand; PAM type: NRG; PAM sequence: GGG
gatctagttggagctggggt

SEQ ID NO: 18729 - DNA, 20 bp, Artificial Sequence
  Description of Artificial Sequence: Synthetic oligonucleotide
  Target: PCSK9; (+) strand; PAM type: NRG; PAM sequence: GGG
atctagttggagctggggtg

SEQ ID NO: 18730 - DNA, 20 bp, Artificial Sequence
  Description of Artificial Sequence: Synthetic oligonucleotide
  Target: PCSK9; (+) strand; PAM type: NRG; PAM sequence: GAG
ctagttggagctggggtggg

SEQ ID NO: 18731 - DNA, 20 bp, Artificial Sequence
  Description of Artificial Sequence: Synthetic oligonucleotide
  Target: PCSK9; (+) strand; PAM type: NRG; PAM sequence: AGG
tagttggagctggggtgggg

SEQ ID NO: 18732 - DNA, 20 bp, Artificial Sequence
  Description of Artificial Sequence: Synthetic oligonucleotide
  Target: PCSK9; (+) strand; PAM type: NRG; PAM sequence: GAG
gttggagctggggtggggag

SEQ ID NO: 18733 - DNA, 20 bp, Artificial Sequence
  Description of Artificial Sequence: Synthetic oligonucleotide
  Target: PCSK9; (+) strand; PAM type: NRG; PAM sequence: AAG
gagctggggtggggaggagc

SEQ ID NO: 18734 - DNA, 20 bp, Artificial Sequence
  Description of Artificial Sequence: Synthetic oligonucleotide
  Target: PCSK9; (+) strand; PAM type: NRG; PAM sequence: AGG
agctggggtggggaggagca

SEQ ID NO: 18735 - DNA, 20 bp, Artificial Sequence
  Description of Artificial Sequence: Synthetic oligonucleotide
  Target: PCSK9; (+) strand; PAM type: NRG; PAM sequence: CAG
ggggtggggaggagcaagga

SEQ ID NO: 18736 - DNA, 20 bp, Artificial Sequence
  Description of Artificial Sequence: Synthetic oligonucleotide
  Target: PCSK9; (+) strand; PAM type: NRG; PAM sequence: AAG
gagcaaggacagtctctcta

SEQ ID NO: 18737 - DNA, 20 bp, Artificial Sequence
  Description of Artificial Sequence: Synthetic oligonucleotide
  Target: PCSK9; (+) strand; PAM type: NRG; PAM sequence: AAG
tctctctaaagtgacaacct

SEQ ID NO: 18738 - DNA, 20 bp, Artificial Sequence
  Description of Artificial Sequence: Synthetic oligonucleotide
  Target: PCSK9; (+) strand; PAM type: NRG; PAM sequence: GAG
ctaaagtgacaacctaagct

SEQ ID NO: 18739 - DNA, 20 bp, Artificial Sequence
  Description of Artificial Sequence: Synthetic oligonucleotide
  Target: PCSK9; (+) strand; PAM type: NRG; PAM sequence: GAG
agtgacaacctaagctgagt

SEQ ID NO: 18740 - DNA, 20 bp, Artificial Sequence
  Description of Artificial Sequence: Synthetic oligonucleotide
  Target: PCSK9; (+) strand; PAM type: NRG; PAM sequence: GAG
tgacaacctaagctgagtga

SEQ ID NO: 18741 - DNA, 20 bp, Artificial Sequence
  Description of Artificial Sequence: Synthetic oligonucleotide
  Target: PCSK9; (+) strand; PAM type: NRG; PAM sequence: TGG
aacctaagctgagtgagagt

SEQ ID NO: 18742 - DNA, 20 bp, Artificial Sequence
  Description of Artificial Sequence: Synthetic oligonucleotide
  Target: PCSK9; (+) strand; PAM type: NRG; PAM sequence: GGG
acctaagctgagtgagagtt

SEQ ID NO: 18743 - DNA, 20 bp, Artificial Sequence
  Description of Artificial Sequence: Synthetic oligonucleotide
  Target: PCSK9; (+) strand; PAM type: NRG; PAM sequence: GGG
cctaagctgagtgagagttg

SEQ ID NO: 18744 - DNA, 20 bp, Artificial Sequence
  Description of Artificial Sequence: Synthetic oligonucleotide
  Target: PCSK9; (+) strand; PAM type: NRG; PAM sequence: GGG
ctaagctgagtgagagttgg

SEQ ID NO: 18745 - DNA, 20 bp, Artificial Sequence
  Description of Artificial Sequence: Synthetic oligonucleotide
  Target: PCSK9; (+) strand; PAM type: NRG; PAM sequence: GAG
gctgagtgagagttgggggt

SEQ ID NO: 18746 - DNA, 20 bp, Artificial Sequence
  Description of Artificial Sequence: Synthetic oligonucleotide
  Target: PCSK9; (+) strand; PAM type: NRG; PAM sequence: TAG
gagtgagagttgggggtgag

SEQ ID NO: 18747 - DNA, 20 bp, Artificial Sequence
  Description of Artificial Sequence: Synthetic oligonucleotide
  Target: PCSK9; (+) strand; PAM type: NRG; PAM sequence: AGG
agtgagagttgggggtgagt

SEQ ID NO: 18748 - DNA, 20 bp, Artificial Sequence
  Description of Artificial Sequence: Synthetic oligonucleotide
  Target: PCSK9; (+) strand; PAM type: NRG; PAM sequence: GGG
gtgagagttgggggtgagta

SEQ ID NO: 18749 - DNA, 20 bp, Artificial Sequence
  Description of Artificial Sequence: Synthetic oligonucleotide
  Target: PCSK9; (+) strand; PAM type: NRG; PAM sequence: GGG
tgagagttgggggtgagtag

SEQ ID NO: 18750 - DNA, 20 bp, Artificial Sequence
  Description of Artificial Sequence: Synthetic oligonucleotide
  Target: PCSK9; (+) strand; PAM type: NRG; PAM sequence: GGG
gagagttgggggtgagtagg

SEQ ID NO: 18751 - DNA, 20 bp, Artificial Sequence
  Description of Artificial Sequence: Synthetic oligonucleotide
  Target: PCSK9; (+) strand; PAM type: NRG; PAM sequence: GGG
agagttgggggtgagtaggg

SEQ ID NO: 18752 - DNA, 20 bp, Artificial Sequence
  Description of Artificial Sequence: Synthetic oligonucleotide
  Target: PCSK9; (+) strand; PAM type: NRG; PAM sequence: GAG
ggggtgagtaggggggccct

SEQ ID NO: 18753 - DNA, 20 bp, Artificial Sequence
  Description of Artificial Sequence: Synthetic oligonucleotide
  Target: PCSK9; (+) strand; PAM type: NRG; PAM sequence: AGG
gggtgagtaggggggccctg

SEQ ID NO: 18754 - DNA, 20 bp, Artificial Sequence
  Description of Artificial Sequence: Synthetic oligonucleotide
  Target: PCSK9; (+) strand; PAM type: NRG; PAM sequence: TGG
tgagtaggggggccctgagg

SEQ ID NO: 18755 - DNA, 20 bp, Artificial Sequence
  Description of Artificial Sequence: Synthetic oligonucleotide
  Target: PCSK9; (+) strand; PAM type: NRG; PAM sequence: AAG
gtaggggggccctgaggtgg

SEQ ID NO: 18756 - DNA, 20 bp, Artificial Sequence
  Description of Artificial Sequence: Synthetic oligonucleotide
  Target: PCSK9; (+) strand; PAM type: NRG; PAM sequence: AGG
taggggggccctgaggtgga

SEQ ID NO: 18757 - DNA, 20 bp, Artificial Sequence
  Description of Artificial Sequence: Synthetic oligonucleotide
  Target: PCSK9; (+) strand; PAM type: NRG; PAM sequence: AAG
gggggccctgaggtggaagg

SEQ ID NO: 18758 - DNA, 20 bp, Artificial Sequence
  Description of Artificial Sequence: Synthetic oligonucleotide
  Target: PCSK9; (+) strand; PAM type: NRG; PAM sequence: GAG
gggccctgaggtggaaggaa

SEQ ID NO: 18759 - DNA, 20 bp, Artificial Sequence
  Description of Artificial Sequence: Synthetic oligonucleotide
  Target: PCSK9; (+) strand; PAM type: NRG; PAM sequence: GAG
gccctgaggtggaaggaaga

SEQ ID NO: 18760 - DNA, 20 bp, Artificial Sequence
  Description of Artificial Sequence: Synthetic oligonucleotide
  Target: PCSK9; (+) strand; PAM type: NRG; PAM sequence: CAG
tacatttgataaataaaatt

SEQ ID NO: 18761 - DNA, 20 bp, Artificial Sequence
  Description of Artificial Sequence: Synthetic oligonucleotide
  Target: PCSK9; (+) strand; PAM type: NRG; PAM sequence: TGG
gataaataaaattcagaaaa

SEQ ID NO: 18762 - DNA, 20 bp, Artificial Sequence
  Description of Artificial Sequence: Synthetic oligonucleotide
  Target: PCSK9; (+) strand; PAM type: NRG; PAM sequence: GGG
ataaataaaattcagaaaat

SEQ ID NO: 18763 - DNA, 20 bp, Artificial Sequence
  Description of Artificial Sequence: Synthetic oligonucleotide
  Target: PCSK9; (+) strand; PAM type: NRG; PAM sequence: CAG
ataaaattcagaaaatgggc

SEQ ID NO: 18764 - DNA, 20 bp, Artificial Sequence
  Description of Artificial Sequence: Synthetic oligonucleotide
  Target: PCSK9; (+) strand; PAM type: NRG; PAM sequence: AGG
taaaattcagaaaatgggcc

SEQ ID NO: 18765 - DNA, 20 bp, Artificial Sequence
  Description of Artificial Sequence: Synthetic oligonucleotide
  Target: PCSK9; (+) strand; PAM type: NRG; PAM sequence: CAG
ttcagaaaatgggccaggca

SEQ ID NO: 18766 - DNA, 20 bp, Artificial Sequence
  Description of Artificial Sequence: Synthetic oligonucleotide
  Target: PCSK9; (+) strand; PAM type: NRG; PAM sequence: CAG
gtcgcttatgcctgtaatcc

SEQ ID NO: 18767 - DNA, 20 bp, Artificial Sequence
  Description of Artificial Sequence: Synthetic oligonucleotide
  Target: PCSK9; (+) strand; PAM type: NRG; PAM sequence: TGG
tgcctgtaatcccagctact

SEQ ID NO: 18768 - DNA, 20 bp, Artificial Sequence
  Description of Artificial Sequence: Synthetic oligonucleotide
  Target: PCSK9; (+) strand; PAM type: NRG; PAM sequence: GGG
gcctgtaatcccagctactt

SEQ ID NO: 18769 - DNA, 20 bp, Artificial Sequence
  Description of Artificial Sequence: Synthetic oligonucleotide
  Target: PCSK9; (+) strand; PAM type: NRG; PAM sequence: GAG
ctgtaatcccagctacttgg

SEQ ID NO: 18770 - DNA, 20 bp, Artificial Sequence
  Description of Artificial Sequence: Synthetic oligonucleotide
  Target: PCSK9; (+) strand; PAM type: NRG; PAM sequence: AGG
tgtaatcccagctacttggg

SEQ ID NO: 18771 - DNA, 20 bp, Artificial Sequence
  Description of Artificial Sequence: Synthetic oligonucleotide
  Target: PCSK9; (+) strand; PAM type: NRG; PAM sequence: GAG
tcccagctacttgggaggct

SEQ ID NO: 18772 - DNA, 20 bp, Artificial Sequence
  Description of Artificial Sequence: Synthetic oligonucleotide
  Target: PCSK9; (+) strand; PAM type: NRG; PAM sequence: AGG
cccagctacttgggaggctg

SEQ ID NO: 18773 - DNA, 20 bp, Artificial Sequence
  Description of Artificial Sequence: Synthetic oligonucleotide
  Target: PCSK9; (+) strand; PAM type: NRG; PAM sequence: AAG
gctacttgggaggctgaggc

SEQ ID NO: 18774 - DNA, 20 bp, Artificial Sequence
  Description of Artificial Sequence: Synthetic oligonucleotide
  Target: PCSK9; (+) strand; PAM type: NRG; PAM sequence: AGG
ctacttgggaggctgaggca

SEQ ID NO: 18775 - DNA, 20 bp, Artificial Sequence
  Description of Artificial Sequence: Synthetic oligonucleotide
  Target: PCSK9; (+) strand; PAM type: NRG; PAM sequence: GAG
acttgggaggctgaggcaag

SEQ ID NO: 18776 - DNA, 20 bp, Artificial Sequence
  Description of Artificial Sequence: Synthetic oligonucleotide
  Target: PCSK9; (+) strand; PAM type: NRG; PAM sequence: TGG
gctgaggcaaggagaatcgc

SEQ ID NO: 18777 - DNA, 20 bp, Artificial Sequence
  Description of Artificial Sequence: Synthetic oligonucleotide
  Target: PCSK9; (+) strand; PAM type: NRG; PAM sequence: TGG
caaggagaatcgctggaacc

SEQ ID NO: 18778 - DNA, 20 bp, Artificial Sequence
  Description of Artificial Sequence: Synthetic oligonucleotide
  Target: PCSK9; (+) strand; PAM type: NRG; PAM sequence: GGG
aaggagaatcgctggaacct

SEQ ID NO: 18779 - DNA, 20 bp, Artificial Sequence
  Description of Artificial Sequence: Synthetic oligonucleotide
  Target: PCSK9; (+) strand; PAM type: NRG; PAM sequence: GAG
ggagaatcgctggaacctgg

SEQ ID NO: 18780 - DNA, 20 bp, Artificial Sequence
  Description of Artificial Sequence: Synthetic oligonucleotide
  Target: PCSK9; (+) strand; PAM type: NRG; PAM sequence: AAG
gaatcgctggaacctgggag

SEQ ID NO: 18781 - DNA, 20 bp, Artificial Sequence
  Description of Artificial Sequence: Synthetic oligonucleotide
  Target: PCSK9; (+) strand; PAM type: NRG; PAM sequence: AGG
aatcgctggaacctgggaga

SEQ ID NO: 18782 - DNA, 20 bp, Artificial Sequence
  Description of Artificial Sequence: Synthetic oligonucleotide
  Target: PCSK9; (+) strand; PAM type: NRG; PAM sequence: GAG
tcgctggaacctgggagaag

SEQ ID NO: 18783 - DNA, 20 bp, Artificial Sequence
  Description of Artificial Sequence: Synthetic oligonucleotide
  Target: PCSK9; (+) strand; PAM type: NRG; PAM sequence: AGG
cgctggaacctgggagaagg

SEQ ID NO: 18784 - DNA, 20 bp, Artificial Sequence
  Description of Artificial Sequence: Synthetic oligonucleotide
  Target: PCSK9; (+) strand; PAM type: NRG; PAM sequence: TAG
tggaacctgggagaaggagg

SEQ ID NO: 18785 - DNA, 20 bp, Artificial Sequence
  Description of Artificial Sequence: Synthetic oligonucleotide
  Target: PCSK9; (+) strand; PAM type: NRG; PAM sequence: CAG
aacctgggagaaggaggtag

SEQ ID NO: 18786 - DNA, 20 bp, Artificial Sequence
  Description of Artificial Sequence: Synthetic oligonucleotide
  Target: PCSK9; (+) strand; PAM type: NRG; PAM sequence: GAG
tgggagaaggaggtagcagt

SEQ ID NO: 18787 - DNA, 20 bp, Artificial Sequence
  Description of Artificial Sequence: Synthetic oligonucleotide
  Target: PCSK9; (+) strand; PAM type: NRG; PAM sequence: AGG
gggagaaggaggtagcagtg

SEQ ID NO: 18788 - DNA, 20 bp, Artificial Sequence
  Description of Artificial Sequence: Synthetic oligonucleotide
  Target: PCSK9; (+) strand; PAM type: NRG; PAM sequence: GAG
gaaggaggtagcagtgaggt

SEQ ID NO: 18789 - DNA, 20 bp, Artificial Sequence
  Description of Artificial Sequence: Synthetic oligonucleotide
  Target: PCSK9; (+) strand; PAM type: NRG; PAM sequence: CAG
gagattgcaccactgcactc

SEQ ID NO: 18790 - DNA, 20 bp, Artificial Sequence
  Description of Artificial Sequence: Synthetic oligonucleotide
  Target: PCSK9; (+) strand; PAM type: NRG; PAM sequence: TGG
tgcaccactgcactccagcc

SEQ ID NO: 18791 - DNA, 20 bp, Artificial Sequence
  Description of Artificial Sequence: Synthetic oligonucleotide
  Target: PCSK9; (+) strand; PAM type: NRG; PAM sequence: GGG
gcaccactgcactccagcct

SEQ ID NO: 18792 - DNA, 20 bp, Artificial Sequence
  Description of Artificial Sequence: Synthetic oligonucleotide
  Target: PCSK9; (-) strand; PAM type: YTN; PAM sequence: TTA
aggtacagaccccaaatgga

SEQ ID NO: 18793 - DNA, 20 bp, Artificial Sequence
  Description of Artificial Sequence: Synthetic oligonucleotide
  Target: PCSK9; (-) strand; PAM type: YTN; PAM sequence: TTT
aaggtacagaccccaaatgg

SEQ ID NO: 18794 - DNA, 20 bp, Artificial Sequence
  Description of Artificial Sequence: Synthetic oligonucleotide
  Target: PCSK9; (-) strand; PAM type: YTN; PAM sequence: CTG
cataaacaacataagattta

SEQ ID NO: 18795 - DNA, 20 bp, Artificial Sequence
  Description of Artificial Sequence: Synthetic oligonucleotide
  Target: PCSK9; (-) strand; PAM type: YTN; PAM sequence: CTC
tgcataaacaacataagatt

SEQ ID NO: 18796 - DNA, 20 bp, Artificial Sequence
  Description of Artificial Sequence: Synthetic oligonucleotide
  Target: PCSK9; (-) strand; PAM type: YTN; PAM sequence: TTG
tctctgcataaacaacataa

SEQ ID NO: 18797 - DNA, 20 bp, Artificial Sequence
  Description of Artificial Sequence: Synthetic oligonucleotide
  Target: PCSK9; (-) strand; PAM type: YTN; PAM sequence: TTT
gtctctgcataaacaacata

SEQ ID NO: 18798 - DNA, 20 bp, Artificial Sequence
  Description of Artificial Sequence: Synthetic oligonucleotide
  Target: PCSK9; (-) strand; PAM type: YTN; PAM sequence: TTG
tatatataatgtttgtctct

SEQ ID NO: 18799 - DNA, 20 bp, Artificial Sequence
  Description of Artificial Sequence: Synthetic oligonucleotide
  Target: PCSK9; (-) strand; PAM type: YTN; PAM sequence: TTT
gtatatataatgtttgtctc

SEQ ID NO: 18800 - DNA, 20 bp, Artificial Sequence
  Description of Artificial Sequence: Synthetic oligonucleotide
  Target: PCSK9; (-) strand; PAM type: YTN; PAM sequence: TTA
catttgtatatataatgttt

SEQ ID NO: 18801 - DNA, 20 bp, Artificial Sequence
  Description of Artificial Sequence: Synthetic oligonucleotide
  Target: PCSK9; (-) strand; PAM type: YTN; PAM sequence: TTC
aataaagtggttacatttgt

SEQ ID NO: 18802 - DNA, 20 bp, Artificial Sequence
  Description of Artificial Sequence: Synthetic oligonucleotide
  Target: PCSK9; (-) strand; PAM type: YTN; PAM sequence: TTT
caataaagtggttacatttg

SEQ ID NO: 18803 - DNA, 20 bp, Artificial Sequence
  Description of Artificial Sequence: Synthetic oligonucleotide
  Target: PCSK9; (-) strand; PAM type: YTN; PAM sequence: TTA
tgatcccatttcaataaagt

SEQ ID NO: 18804 - DNA, 20 bp, Artificial Sequence
  Description of Artificial Sequence: Synthetic oligonucleotide
  Target: PCSK9; (-) strand; PAM type: YTN; PAM sequence: TTA
aacagcatgttatgatccca

SEQ ID NO: 18805 - DNA, 20 bp, Artificial Sequence
  Description of Artificial Sequence: Synthetic oligonucleotide
  Target: PCSK9; (-) strand; PAM type: YTN; PAM sequence: TTT
aaacagcatgttatgatccc

SEQ ID NO: 18806 - DNA, 20 bp, Artificial Sequence
  Description of Artificial Sequence: Synthetic oligonucleotide
  Target: PCSK9; (-) strand; PAM type: YTN; PAM sequence: TTT
taaacagcatgttatgatcc

SEQ ID NO: 18807 - DNA, 20 bp, Artificial Sequence
  Description of Artificial Sequence: Synthetic oligonucleotide
  Target: PCSK9; (-) strand; PAM type: YTN; PAM sequence: CTT
ttaaacagcatgttatgatc

SEQ ID NO: 18808 - DNA, 20 bp, Artificial Sequence
  Description of Artificial Sequence: Synthetic oligonucleotide
  Target: PCSK9; (-) strand; PAM type: YTN; PAM sequence: TTG
acatggaaagatgtccaaca

SEQ ID NO: 18809 - DNA, 20 bp, Artificial Sequence
  Description of Artificial Sequence: Synthetic oligonucleotide
  Target: PCSK9; (-) strand; PAM type: YTN; PAM sequence: TTA
tatattgacatggaaagatg

SEQ ID NO: 18810 - DNA, 20 bp, Artificial Sequence
  Description of Artificial Sequence: Synthetic oligonucleotide
  Target: PCSK9; (-) strand; PAM type: YTN; PAM sequence: TTT
atatattgacatggaaagat

SEQ ID NO: 18811 - DNA, 20 bp, Artificial Sequence
  Description of Artificial Sequence: Synthetic oligonucleotide
  Target: PCSK9; (-) strand; PAM type: YTN; PAM sequence: CTG
gtaaaaagaaataaatggag

SEQ ID NO: 18812 - DNA, 20 bp, Artificial Sequence
  Description of Artificial Sequence: Synthetic oligonucleotide
  Target: PCSK9; (-) strand; PAM type: YTN; PAM sequence: TTG
gcagctggtaaaaagaaata

SEQ ID NO: 18813 - DNA, 20 bp, Artificial Sequence
  Description of Artificial Sequence: Synthetic oligonucleotide
  Target: PCSK9; (-) strand; PAM type: YTN; PAM sequence: TTT
ggcagctggtaaaaagaaat

SEQ ID NO: 18814 - DNA, 20 bp, Artificial Sequence
  Description of Artificial Sequence: Synthetic oligonucleotide
  Target: PCSK9; (-) strand; PAM type: YTN; PAM sequence: TTC
atatggtgggatatttggca

SEQ ID NO: 18815 - DNA, 20 bp, Artificial Sequence
  Description of Artificial Sequence: Synthetic oligonucleotide
  Target: PCSK9; (-) strand; PAM type: YTN; PAM sequence: CTG
ttcatatggtgggatatttg

SEQ ID NO: 18816 - DNA, 20 bp, Artificial Sequence
  Description of Artificial Sequence: Synthetic oligonucleotide
  Target: PCSK9; (-) strand; PAM type: YTN; PAM sequence: TTA
gtctgttcatatggtgggat

SEQ ID NO: 18817 - DNA, 20 bp, Artificial Sequence
  Description of Artificial Sequence: Synthetic oligonucleotide
  Target: PCSK9; (-) strand; PAM type: YTN; PAM sequence: TTT
agtctgttcatatggtggga

SEQ ID NO: 18818 - DNA, 20 bp, Artificial Sequence
  Description of Artificial Sequence: Synthetic oligonucleotide
  Target: PCSK9; (-) strand; PAM type: YTN; PAM sequence: TTT
tagtctgttcatatggtggg

SEQ ID NO: 18819 - DNA, 20 bp, Artificial Sequence
  Description of Artificial Sequence: Synthetic oligonucleotide
  Target: PCSK9; (-) strand; PAM type: YTN; PAM sequence: TTC
atcaatggagggacagattt

SEQ ID NO: 18820 - DNA, 20 bp, Artificial Sequence
  Description of Artificial Sequence: Synthetic oligonucleotide
  Target: PCSK9; (-) strand; PAM type: YTN; PAM sequence: TTC
agcaatccaaacattcatca

SEQ ID NO: 18821 - DNA, 20 bp, Artificial Sequence
  Description of Artificial Sequence: Synthetic oligonucleotide
  Target: PCSK9; (-) strand; PAM type: YTN; PAM sequence: TTC
caggggttcagcaatccaaa

SEQ ID NO: 18822 - DNA, 20 bp, Artificial Sequence
  Description of Artificial Sequence: Synthetic oligonucleotide
  Target: PCSK9; (-) strand; PAM type: YTN; PAM sequence: CTT
ccaggggttcagcaatccaa

SEQ ID NO: 18823 - DNA, 20 bp, Artificial Sequence
  Description of Artificial Sequence: Synthetic oligonucleotide
  Target: PCSK9; (-) strand; PAM type: YTN; PAM sequence: TTC
ttccaggggttcagcaatcc

SEQ ID NO: 18824 - DNA, 20 bp, Artificial Sequence
  Description of Artificial Sequence: Synthetic oligonucleotide
  Target: PCSK9; (-) strand; PAM type: YTN; PAM sequence: TTT
cttccaggggttcagcaatc

SEQ ID NO: 18825 - DNA, 20 bp, Artificial Sequence
  Description of Artificial Sequence: Synthetic oligonucleotide
  Target: PCSK9; (-) strand; PAM type: YTN; PAM sequence: TTG
aatttcttccaggggttcag

SEQ ID NO: 18826 - DNA, 20 bp, Artificial Sequence
  Description of Artificial Sequence: Synthetic oligonucleotide
  Target: PCSK9; (-) strand; PAM type: YTN; PAM sequence: TTA
ttgaatttcttccaggggtt

SEQ ID NO: 18827 - DNA, 20 bp, Artificial Sequence
  Description of Artificial Sequence: Synthetic oligonucleotide
  Target: PCSK9; (-) strand; PAM type: YTN; PAM sequence: CTT
attgaatttcttccaggggt

SEQ ID NO: 18828 - DNA, 20 bp, Artificial Sequence
  Description of Artificial Sequence: Synthetic oligonucleotide
  Target: PCSK9; (-) strand; PAM type: YTN; PAM sequence: CTC
ttattgaatttcttccaggg

SEQ ID NO: 18829 - DNA, 20 bp, Artificial Sequence
  Description of Artificial Sequence: Synthetic oligonucleotide
  Target: PCSK9; (-) strand; PAM type: YTN; PAM sequence: TTG
ctcttattgaatttcttcca

SEQ ID NO: 18830 - DNA, 20 bp, Artificial Sequence
  Description of Artificial Sequence: Synthetic oligonucleotide
  Target: PCSK9; (-) strand; PAM type: YTN; PAM sequence: TTT
gctcttattgaatttcttcc

SEQ ID NO: 18831 - DNA, 20 bp, Artificial Sequence
  Description of Artificial Sequence: Synthetic oligonucleotide
  Target: PCSK9; (-) strand; PAM type: YTN; PAM sequence: CTG
tttgctcttattgaatttct

SEQ ID NO: 18832 - DNA, 20 bp, Artificial Sequence
  Description of Artificial Sequence: Synthetic oligonucleotide
  Target: PCSK9; (-) strand; PAM type: YTN; PAM sequence: TTC
tgtttgctcttattgaattt

SEQ ID NO: 18833 - DNA, 20 bp, Artificial Sequence
  Description of Artificial Sequence: Synthetic oligonucleotide
  Target: PCSK9; (-) strand; PAM type: YTN; PAM sequence: CTT
ctgtttgctcttattgaatt

SEQ ID NO: 18834 - DNA, 20 bp, Artificial Sequence
  Description of Artificial Sequence: Synthetic oligonucleotide
  Target: PCSK9; (-) strand; PAM type: YTN; PAM sequence: TTA
cacttctgtttgctcttatt

SEQ ID NO: 18835 - DNA, 20 bp, Artificial Sequence
  Description of Artificial Sequence: Synthetic oligonucleotide
  Target: PCSK9; (-) strand; PAM type: YTN; PAM sequence: CTG
ccagggtgtcatatattaca

SEQ ID NO: 18836 - DNA, 20 bp, Artificial Sequence
  Description of Artificial Sequence: Synthetic oligonucleotide
  Target: PCSK9; (-) strand; PAM type: YTN; PAM sequence: TTG
atctgccagggtgtcatata

SEQ ID NO: 18837 - DNA, 20 bp, Artificial Sequence
  Description of Artificial Sequence: Synthetic oligonucleotide
  Target: PCSK9; (-) strand; PAM type: YTN; PAM sequence: TTT
gatctgccagggtgtcatat

SEQ ID NO: 18838 - DNA, 20 bp, Artificial Sequence
  Description of Artificial Sequence: Synthetic oligonucleotide
  Target: PCSK9; (-) strand; PAM type: YTN; PAM sequence: CTT
tgatctgccagggtgtcata

SEQ ID NO: 18839 - DNA, 20 bp, Artificial Sequence
  Description of Artificial Sequence: Synthetic oligonucleotide
  Target: PCSK9; (-) strand; PAM type: YTN; PAM sequence: CTC
actttgatctgccagggtgt

SEQ ID NO: 18840 - DNA, 20 bp, Artificial Sequence
  Description of Artificial Sequence: Synthetic oligonucleotide
  Target: PCSK9; (-) strand; PAM type: YTN; PAM sequence: CTC
tcactttgatctgccagggt

SEQ ID NO: 18841 - DNA, 20 bp, Artificial Sequence
  Description of Artificial Sequence: Synthetic oligonucleotide
  Target: PCSK9; (-) strand; PAM type: YTN; PAM sequence: CTA
ataaaactctcactttgatc

SEQ ID NO: 18842 - DNA, 20 bp, Artificial Sequence
  Description of Artificial Sequence: Synthetic oligonucleotide
  Target: PCSK9; (-) strand; PAM type: YTN; PAM sequence: CTC
taataaaactctcactttga

SEQ ID NO: 18843 - DNA, 20 bp, Artificial Sequence
  Description of Artificial Sequence: Synthetic oligonucleotide
  Target: PCSK9; (-) strand; PAM type: YTN; PAM sequence: CTC
ctctaataaaactctcactt

SEQ ID NO: 18844 - DNA, 20 bp, Artificial Sequence
  Description of Artificial Sequence: Synthetic oligonucleotide
  Target: PCSK9; (-) strand; PAM type: YTN; PAM sequence: CTG
tctcctctaataaaactctc

SEQ ID NO: 18845 - DNA, 20 bp, Artificial Sequence
  Description of Artificial Sequence: Synthetic oligonucleotide
  Target: PCSK9; (-) strand; PAM type: YTN; PAM sequence: TTA
ctgtctcctctaataaaact

SEQ ID NO: 18846 - DNA, 20 bp, Artificial Sequence
  Description of Artificial Sequence: Synthetic oligonucleotide
  Target: PCSK9; (-) strand; PAM type: YTN; PAM sequence: TTT
actgtctcctctaataaaac

SEQ ID NO: 18847 - DNA, 20 bp, Artificial Sequence
  Description of Artificial Sequence: Synthetic oligonucleotide
  Target: PCSK9; (-) strand; PAM type: YTN; PAM sequence: CTT
tactgtctcctctaataaaa

SEQ ID NO: 18848 - DNA, 20 bp, Artificial Sequence
  Description of Artificial Sequence: Synthetic oligonucleotide
  Target: PCSK9; (-) strand; PAM type: YTN; PAM sequence: CTC
caccagctttactgtctcct

SEQ ID NO: 18849 - DNA, 20 bp, Artificial Sequence
  Description of Artificial Sequence: Synthetic oligonucleotide
  Target: PCSK9; (-) strand; PAM type: YTN; PAM sequence: CTC
cccgctccaccagctttact

SEQ ID NO: 18850 - DNA, 20 bp, Artificial Sequence
  Description of Artificial Sequence: Synthetic oligonucleotide
  Target: PCSK9; (-) strand; PAM type: YTN; PAM sequence: CTC
tccccgctccaccagcttta

SEQ ID NO: 18851 - DNA, 20 bp, Artificial Sequence
  Description of Artificial Sequence: Synthetic oligonucleotide
  Target: PCSK9; (-) strand; PAM type: YTN; PAM sequence: TTA
gctctccccgctccaccagc

SEQ ID NO: 18852 - DNA, 20 bp, Artificial Sequence
  Description of Artificial Sequence: Synthetic oligonucleotide
  Target: PCSK9; (-) strand; PAM type: YTN; PAM sequence: CTT
agctctccccgctccaccag

SEQ ID NO: 18853 - DNA, 20 bp, Artificial Sequence
  Description of Artificial Sequence: Synthetic oligonucleotide
  Target: PCSK9; (-) strand; PAM type: YTN; PAM sequence: TTC
acttagctctccccgctcca

SEQ ID NO: 18854 - DNA, 20 bp, Artificial Sequence
  Description of Artificial Sequence: Synthetic oligonucleotide
  Target: PCSK9; (-) strand; PAM type: YTN; PAM sequence: TTG
attcacttagctctccccgc

SEQ ID NO: 18855 - DNA, 20 bp, Artificial Sequence
  Description of Artificial Sequence: Synthetic oligonucleotide
  Target: PCSK9; (-) strand; PAM type: YTN; PAM sequence: CTG
caacatgttgattcacttag

SEQ ID NO: 18856 - DNA, 20 bp, Artificial Sequence
  Description of Artificial Sequence: Synthetic oligonucleotide
  Target: PCSK9; (-) strand; PAM type: YTN; PAM sequence: CTC
cgactgcaacatgttgattc

SEQ ID NO: 18857 - DNA, 20 bp, Artificial Sequence
  Description of Artificial Sequence: Synthetic oligonucleotide
  Target: PCSK9; (-) strand; PAM type: YTN; PAM sequence: CTG
gctccgactgcaacatgttg

SEQ ID NO: 18858 - DNA, 20 bp, Artificial Sequence
  Description of Artificial Sequence: Synthetic oligonucleotide
  Target: PCSK9; (-) strand; PAM type: YTN; PAM sequence: TTG
gggtggtatgagtcctggct

SEQ ID NO: 18859 - DNA, 20 bp, Artificial Sequence
  Description of Artificial Sequence: Synthetic oligonucleotide
  Target: PCSK9; (-) strand; PAM type: YTN; PAM sequence: CTT
ggggtggtatgagtcctggc

SEQ ID NO: 18860 - DNA, 20 bp, Artificial Sequence
  Description of Artificial Sequence: Synthetic oligonucleotide
  Target: PCSK9; (-) strand; PAM type: YTN; PAM sequence: CTC
ttggggtggtatgagtcctg

SEQ ID NO: 18861 - DNA, 20 bp, Artificial Sequence
  Description of Artificial Sequence: Synthetic oligonucleotide
  Target: PCSK9; (-) strand; PAM type: YTN; PAM sequence: CTG
cctcttggggtggtatgagt

SEQ ID NO: 18862 - DNA, 20 bp, Artificial Sequence
  Description of Artificial Sequence: Synthetic oligonucleotide
  Target: PCSK9; (-) strand; PAM type: YTN; PAM sequence: CTC
ctgcctcttggggtggtatg

SEQ ID NO: 18863 - DNA, 20 bp, Artificial Sequence
  Description of Artificial Sequence: Synthetic oligonucleotide
  Target: PCSK9; (-) strand; PAM type: YTN; PAM sequence: CTG
cctcctgcctcttggggtgg

SEQ ID NO: 18864 - DNA, 20 bp, Artificial Sequence
  Description of Artificial Sequence: Synthetic oligonucleotide
  Target: PCSK9; (-) strand; PAM type: YTN; PAM sequence: CTG
cgctgcctcctgcctcttgg

SEQ ID NO: 18865 - DNA, 20 bp, Artificial Sequence
  Description of Artificial Sequence: Synthetic oligonucleotide
  Target: PCSK9; (-) strand; PAM type: YTN; PAM sequence: CTG
gctgcgctgcctcctgcctc

SEQ ID NO: 18866 - DNA, 20 bp, Artificial Sequence
  Description of Artificial Sequence: Synthetic oligonucleotide
  Target: PCSK9; (-) strand; PAM type: YTN; PAM sequence: TTC
tggctgcgctgcctcctgcc

SEQ ID NO: 18867 - DNA, 20 bp, Artificial Sequence
  Description of Artificial Sequence: Synthetic oligonucleotide
  Target: PCSK9; (-) strand; PAM type: YTN; PAM sequence: CTT
ctggctgcgctgcctcctgc

SEQ ID NO: 18868 - DNA, 20 bp, Artificial Sequence
  Description of Artificial Sequence: Synthetic oligonucleotide
  Target: PCSK9; (-) strand; PAM type: YTN; PAM sequence: CTC
agtgcccttctggctgcgct

SEQ ID NO: 18869 - DNA, 20 bp, Artificial Sequence
  Description of Artificial Sequence: Synthetic oligonucleotide
  Target: PCSK9; (-) strand; PAM type: YTN; PAM sequence: CTC
ctcagtgcccttctggctgc

SEQ ID NO: 18870 - DNA, 20 bp, Artificial Sequence
  Description of Artificial Sequence: Synthetic oligonucleotide
  Target: PCSK9; (-) strand; PAM type: YTN; PAM sequence: CTG
tggccatggctcctcagtgc

SEQ ID NO: 18871 - DNA, 20 bp, Artificial Sequence
  Description of Artificial Sequence: Synthetic oligonucleotide
  Target: PCSK9; (-) strand; PAM type: YTN; PAM sequence: CTG
ggagccacagggagctgtgg

SEQ ID NO: 18872 - DNA, 20 bp, Artificial Sequence
  Description of Artificial Sequence: Synthetic oligonucleotide
  Target: PCSK9; (-) strand; PAM type: YTN; PAM sequence: CTG
ctgggagccacagggagctg

SEQ ID NO: 18873 - DNA, 20 bp, Artificial Sequence
  Description of Artificial Sequence: Synthetic oligonucleotide
  Target: PCSK9; (-) strand; PAM type: YTN; PAM sequence: CTG
gtcccgctgctgggagccac

SEQ ID NO: 18874 - DNA, 20 bp, Artificial Sequence
  Description of Artificial Sequence: Synthetic oligonucleotide
  Target: PCSK9; (-) strand; PAM type: YTN; PAM sequence: TTG
catctggtcccgctgctggg

SEQ ID NO: 18875 - DNA, 20 bp, Artificial Sequence
  Description of Artificial Sequence: Synthetic oligonucleotide
  Target: PCSK9; (-) strand; PAM type: YTN; PAM sequence: TTT
gcatctggtcccgctgctgg

SEQ ID NO: 18876 - DNA, 20 bp, Artificial Sequence
  Description of Artificial Sequence: Synthetic oligonucleotide
  Target: PCSK9; (-) strand; PAM type: YTN; PAM sequence: CTG
aacagggtataggaagccca

SEQ ID NO: 18877 - DNA, 20 bp, Artificial Sequence
  Description of Artificial Sequence: Synthetic oligonucleotide
  Target: PCSK9; (-) strand; PAM type: YTN; PAM sequence: CTC
agtaaagactgaacagggta

SEQ ID NO: 18878 - DNA, 20 bp, Artificial Sequence
  Description of Artificial Sequence: Synthetic oligonucleotide
  Target: PCSK9; (-) strand; PAM type: YTN; PAM sequence: CTG
actcagtaaagactgaacag

SEQ ID NO: 18879 - DNA, 20 bp, Artificial Sequence
  Description of Artificial Sequence: Synthetic oligonucleotide
  Target: PCSK9; (-) strand; PAM type: YTN; PAM sequence: TTC
tgactcagtaaagactgaac

SEQ ID NO: 18880 - DNA, 20 bp, Artificial Sequence
  Description of Artificial Sequence: Synthetic oligonucleotide
  Target: PCSK9; (-) strand; PAM type: YTN; PAM sequence: CTT
ctgactcagtaaagactgaa

SEQ ID NO: 18881 - DNA, 20 bp, Artificial Sequence
  Description of Artificial Sequence: Synthetic oligonucleotide
  Target: PCSK9; (-) strand; PAM type: YTN; PAM sequence: TTA
aaacagcttctgactcagta

SEQ ID NO: 18882 - DNA, 20 bp, Artificial Sequence
  Description of Artificial Sequence: Synthetic oligonucleotide
  Target: PCSK9; (-) strand; PAM type: YTN; PAM sequence: CTT
aaaacagcttctgactcagt

SEQ ID NO: 18883 - DNA, 20 bp, Artificial Sequence
  Description of Artificial Sequence: Synthetic oligonucleotide
  Target: PCSK9; (-) strand; PAM type: YTN; PAM sequence: CTC
ttaaaacagcttctgactca

SEQ ID NO: 18884 - DNA, 20 bp, Artificial Sequence
  Description of Artificial Sequence: Synthetic oligonucleotide
  Target: PCSK9; (-) strand; PAM type: YTN; PAM sequence: CTC
agctcttaaaacagcttctg

SEQ ID NO: 18885 - DNA, 20 bp, Artificial Sequence
  Description of Artificial Sequence: Synthetic oligonucleotide
  Target: PCSK9; (-) strand; PAM type: YTN; PAM sequence: CTG
taaaatgggtgtgctcagct

SEQ ID NO: 18886 - DNA, 20 bp, Artificial Sequence
  Description of Artificial Sequence: Synthetic oligonucleotide
  Target: PCSK9; (-) strand; PAM type: YTN; PAM sequence: CTG
ctgtaaaatgggtgtgctca

SEQ ID NO: 18887 - DNA, 20 bp, Artificial Sequence
  Description of Artificial Sequence: Synthetic oligonucleotide
  Target: PCSK9; (-) strand; PAM type: YTN; PAM sequence: CTC
tgctgtaaaatgggtgtgct

SEQ ID NO: 18888 - DNA, 20 bp, Artificial Sequence
  Description of Artificial Sequence: Synthetic oligonucleotide
  Target: PCSK9; (-) strand; PAM type: YTN; PAM sequence: TTC
cgtaagaagctctgctgtaa

SEQ ID NO: 18889 - DNA, 20 bp, Artificial Sequence
  Description of Artificial Sequence: Synthetic oligonucleotide
  Target: PCSK9; (-) strand; PAM type: YTN; PAM sequence: TTT
ccgtaagaagctctgctgta

SEQ ID NO: 18890 - DNA, 20 bp, Artificial Sequence
  Description of Artificial Sequence: Synthetic oligonucleotide
  Target: PCSK9; (-) strand; PAM type: YTN; PAM sequence: TTT
tccgtaagaagctctgctgt

SEQ ID NO: 18891 - DNA, 20 bp, Artificial Sequence
  Description of Artificial Sequence: Synthetic oligonucleotide
  Target: PCSK9; (-) strand; PAM type: YTN; PAM sequence: CTT
ttccgtaagaagctctgctg

SEQ ID NO: 18892 - DNA, 20 bp, Artificial Sequence
  Description of Artificial Sequence: Synthetic oligonucleotide
  Target: PCSK9; (-) strand; PAM type: YTN; PAM sequence: CTG
gcccaatggcccaggatgga

SEQ ID NO: 18893 - DNA, 20 bp, Artificial Sequence
  Description of Artificial Sequence: Synthetic oligonucleotide
  Target: PCSK9; (-) strand; PAM type: YTN; PAM sequence: CTG
gagctggcccaatggcccag

SEQ ID NO: 18894 - DNA, 20 bp, Artificial Sequence
  Description of Artificial Sequence: Synthetic oligonucleotide
  Target: PCSK9; (-) strand; PAM type: YTN; PAM sequence: TTC
aaggatgaggctggagctgg

SEQ ID NO: 18895 - DNA, 20 bp, Artificial Sequence
  Description of Artificial Sequence: Synthetic oligonucleotide
  Target: PCSK9; (-) strand; PAM type: YTN; PAM sequence: CTA
gcaaggaccccagcgatgta

SEQ ID NO: 18896 - DNA, 20 bp, Artificial Sequence
  Description of Artificial Sequence: Synthetic oligonucleotide
  Target: PCSK9; (-) strand; PAM type: YTN; PAM sequence: CTA
atataatctagcaaggaccc

SEQ ID NO: 18897 - DNA, 20 bp, Artificial Sequence
  Description of Artificial Sequence: Synthetic oligonucleotide
  Target: PCSK9; (-) strand; PAM type: YTN; PAM sequence: CTA
aagtgtgtggaggccctaat

SEQ ID NO: 18898 - DNA, 20 bp, Artificial Sequence
  Description of Artificial Sequence: Synthetic oligonucleotide
  Target: PCSK9; (-) strand; PAM type: YTN; PAM sequence: TTG
tgcaaacggagagcaactaa

SEQ ID NO: 18899 - DNA, 20 bp, Artificial Sequence
  Description of Artificial Sequence: Synthetic oligonucleotide
  Target: PCSK9; (-) strand; PAM type: YTN; PAM sequence: CTA
atgatatagaaatcattgtg

SEQ ID NO: 18900 - DNA, 20 bp, Artificial Sequence
  Description of Artificial Sequence: Synthetic oligonucleotide
  Target: PCSK9; (-) strand; PAM type: YTN; PAM sequence: TTA
ggcaagtggacaaagaggta

SEQ ID NO: 18901 - DNA, 20 bp, Artificial Sequence
  Description of Artificial Sequence: Synthetic oligonucleotide
  Target: PCSK9; (-) strand; PAM type: YTN; PAM sequence: CTA
aggaaataattaggcaagtg

SEQ ID NO: 18902 - DNA, 20 bp, Artificial Sequence
  Description of Artificial Sequence: Synthetic oligonucleotide
  Target: PCSK9; (-) strand; PAM type: YTN; PAM sequence: TTA
tcctaaggaaataattaggc

SEQ ID NO: 18903 - DNA, 20 bp, Artificial Sequence
  Description of Artificial Sequence: Synthetic oligonucleotide
  Target: PCSK9; (-) strand; PAM type: YTN; PAM sequence: TTT
atcctaaggaaataattagg

SEQ ID NO: 18904 - DNA, 20 bp, Artificial Sequence
  Description of Artificial Sequence: Synthetic oligonucleotide
  Target: PCSK9; (-) strand; PAM type: YTN; PAM sequence: TTA
ggaatttatcctaaggaaat

SEQ ID NO: 18905 - DNA, 20 bp, Artificial Sequence
  Description of Artificial Sequence: Synthetic oligonucleotide
  Target: PCSK9; (-) strand; PAM type: YTN; PAM sequence: CTT
aggaatttatcctaaggaaa

SEQ ID NO: 18906 - DNA, 20 bp, Artificial Sequence
  Description of Artificial Sequence: Synthetic oligonucleotide
  Target: PCSK9; (-) strand; PAM type: YTN; PAM sequence: TTC
ttaggaatttatcctaagga

SEQ ID NO: 18907 - DNA, 20 bp, Artificial Sequence
  Description of Artificial Sequence: Synthetic oligonucleotide
  Target: PCSK9; (-) strand; PAM type: YTN; PAM sequence: TTT
cttaggaatttatcctaagg

SEQ ID NO: 18908 - DNA, 20 bp, Artificial Sequence
  Description of Artificial Sequence: Synthetic oligonucleotide
  Target: PCSK9; (-) strand; PAM type: YTN; PAM sequence: TTG
atttcttaggaatttatcct

SEQ ID NO: 18909 - DNA, 20 bp, Artificial Sequence
  Description of Artificial Sequence: Synthetic oligonucleotide
  Target: PCSK9; (-) strand; PAM type: YTN; PAM sequence: TTT
gatttcttaggaatttatcc

SEQ ID NO: 18910 - DNA, 20 bp, Artificial Sequence
  Description of Artificial Sequence: Synthetic oligonucleotide
  Target: PCSK9; (-) strand; PAM type: YTN; PAM sequence: CTA
tttgatttcttaggaattta

SEQ ID NO: 18911 - DNA, 20 bp, Artificial Sequence
  Description of Artificial Sequence: Synthetic oligonucleotide
  Target: PCSK9; (-) strand; PAM type: YTN; PAM sequence: CTA
gctatttgatttcttaggaa

SEQ ID NO: 18912 - DNA, 20 bp, Artificial Sequence
  Description of Artificial Sequence: Synthetic oligonucleotide
  Target: PCSK9; (-) strand; PAM type: YTN; PAM sequence: CTG
acctagctatttgatttctt

SEQ ID NO: 18913 - DNA, 20 bp, Artificial Sequence
  Description of Artificial Sequence: Synthetic oligonucleotide
  Target: PCSK9; (-) strand; PAM type: YTN; PAM sequence: CTA
tatactgacctagctatttg

SEQ ID NO: 18914 - DNA, 20 bp, Artificial Sequence
  Description of Artificial Sequence: Synthetic oligonucleotide
  Target: PCSK9; (-) strand; PAM type: YTN; PAM sequence: CTG
tgaaaatgtgctatatactg

SEQ ID NO: 18915 - DNA, 20 bp, Artificial Sequence
  Description of Artificial Sequence: Synthetic oligonucleotide
  Target: PCSK9; (-) strand; PAM type: YTN; PAM sequence: CTA
gtcagtagcaaactgtgaaa

SEQ ID NO: 18916 - DNA, 20 bp, Artificial Sequence
  Description of Artificial Sequence: Synthetic oligonucleotide
  Target: PCSK9; (-) strand; PAM type: YTN; PAM sequence: CTC
tagtcagtagcaaactgtga

SEQ ID NO: 18917 - DNA, 20 bp, Artificial Sequence
  Description of Artificial Sequence: Synthetic oligonucleotide
  Target: PCSK9; (-) strand; PAM type: YTN; PAM sequence: TTA
atatctctagtcagtagcaa

SEQ ID NO: 18918 - DNA, 20 bp, Artificial Sequence
  Description of Artificial Sequence: Synthetic oligonucleotide
  Target: PCSK9; (-) strand; PAM type: YTN; PAM sequence: TTT
aatatctctagtcagtagca

SEQ ID NO: 18919 - DNA, 20 bp, Artificial Sequence
  Description of Artificial Sequence: Synthetic oligonucleotide
  Target: PCSK9; (-) strand; PAM type: YTN; PAM sequence: CTT
taatatctctagtcagtagc

SEQ ID NO: 18920 - DNA, 20 bp, Artificial Sequence
  Description of Artificial Sequence: Synthetic oligonucleotide
  Target: PCSK9; (-) strand; PAM type: YTN; PAM sequence: TTG
tacctttaatatctctagtc

SEQ ID NO: 18921 - DNA, 20 bp, Artificial Sequence
  Description of Artificial Sequence: Synthetic oligonucleotide
  Target: PCSK9; (-) strand; PAM type: YTN; PAM sequence: TTT
gtacctttaatatctctagt

SEQ ID NO: 18922 - DNA, 20 bp, Artificial Sequence
  Description of Artificial Sequence: Synthetic oligonucleotide
  Target: PCSK9; (-) strand; PAM type: YTN; PAM sequence: TTT
tgtacctttaatatctctag

SEQ ID NO: 18923 - DNA, 20 bp, Artificial Sequence
  Description of Artificial Sequence: Synthetic oligonucleotide
  Target: PCSK9; (-) strand; PAM type: YTN; PAM sequence: TTT
ttgtacctttaatatctcta

SEQ ID NO: 18924 - DNA, 20 bp, Artificial Sequence
  Description of Artificial Sequence: Synthetic oligonucleotide
  Target: PCSK9; (-) strand; PAM type: YTN; PAM sequence: CTG
tttttgtacctttaatatct

SEQ ID NO: 18925 - DNA, 20 bp, Artificial Sequence
  Description of Artificial Sequence: Synthetic oligonucleotide
  Target: PCSK9; (-) strand; PAM type: YTN; PAM sequence: CTG
gctgtttttgtacctttaat

SEQ ID NO: 18926 - DNA, 20 bp, Artificial Sequence
  Description of Artificial Sequence: Synthetic oligonucleotide
  Target: PCSK9; (-) strand; PAM type: YTN; PAM sequence: TTC
tggctgtttttgtaccttta

SEQ ID NO: 18927 - DNA, 20 bp, Artificial Sequence
  Description of Artificial Sequence: Synthetic oligonucleotide
  Target: PCSK9; (-) strand; PAM type: YTN; PAM sequence: CTA
attctggctgtttttgtacc

SEQ ID NO: 18928 - DNA, 20 bp, Artificial Sequence
  Description of Artificial Sequence: Synthetic oligonucleotide
  Target: PCSK9; (-) strand; PAM type: YTN; PAM sequence: CTA
catctaattctggctgtttt

SEQ ID NO: 18929 - DNA, 20 bp, Artificial Sequence
  Description of Artificial Sequence: Synthetic oligonucleotide
  Target: PCSK9; (-) strand; PAM type: YTN; PAM sequence: CTC
tacatctaattctggctgtt

SEQ ID NO: 18930 - DNA, 20 bp, Artificial Sequence
  Description of Artificial Sequence: Synthetic oligonucleotide
  Target: PCSK9; (-) strand; PAM type: YTN; PAM sequence: TTG
cgactctacatctaattctg

SEQ ID NO: 18931 - DNA, 20 bp, Artificial Sequence
  Description of Artificial Sequence: Synthetic oligonucleotide
  Target: PCSK9; (-) strand; PAM type: YTN; PAM sequence: CTT
gcgactctacatctaattct

SEQ ID NO: 18932 - DNA, 20 bp, Artificial Sequence
  Description of Artificial Sequence: Synthetic oligonucleotide
  Target: PCSK9; (-) strand; PAM type: YTN; PAM sequence: CTC
ccttgcgactctacatctaa

SEQ ID NO: 18933 - DNA, 20 bp, Artificial Sequence
  Description of Artificial Sequence: Synthetic oligonucleotide
  Target: PCSK9; (-) strand; PAM type: YTN; PAM sequence: TTA
gtaacaaaactcccttgcga

SEQ ID NO: 18934 - DNA, 20 bp, Artificial Sequence
  Description of Artificial Sequence: Synthetic oligonucleotide
  Target: PCSK9; (-) strand; PAM type: YTN; PAM sequence: CTT
agtaacaaaactcccttgcg

SEQ ID NO: 18935 - DNA, 20 bp, Artificial Sequence
  Description of Artificial Sequence: Synthetic oligonucleotide
  Target: PCSK9; (-) strand; PAM type: YTN; PAM sequence: TTA
gaaatgacgtcttagtaaca

SEQ ID NO: 18936 - DNA, 20 bp, Artificial Sequence
  Description of Artificial Sequence: Synthetic oligonucleotide
  Target: PCSK9; (-) strand; PAM type: YTN; PAM sequence: CTG
attagaaatgacgtcttagt

SEQ ID NO: 18937 - DNA, 20 bp, Artificial Sequence
  Description of Artificial Sequence: Synthetic oligonucleotide
  Target: PCSK9; (-) strand; PAM type: YTN; PAM sequence: CTC
cctgattagaaatgacgtct

SEQ ID NO: 18938 - DNA, 20 bp, Artificial Sequence
  Description of Artificial Sequence: Synthetic oligonucleotide
  Target: PCSK9; (-) strand; PAM type: YTN; PAM sequence: TTC
tccctgattagaaatgacgt

SEQ ID NO: 18939 - DNA, 20 bp, Artificial Sequence
  Description of Artificial Sequence: Synthetic oligonucleotide
  Target: PCSK9; (-) strand; PAM type: YTN; PAM sequence: TTT
ctccctgattagaaatgacg

SEQ ID NO: 18940 - DNA, 20 bp, Artificial Sequence
  Description of Artificial Sequence: Synthetic oligonucleotide
  Target: PCSK9; (-) strand; PAM type: YTN; PAM sequence: TTT
tctccctgattagaaatgac

SEQ ID NO: 18941 - DNA, 20 bp, Artificial Sequence
  Description of Artificial Sequence: Synthetic oligonucleotide
  Target: PCSK9; (-) strand; PAM type: YTN; PAM sequence: TTT
ttctccctgattagaaatga

SEQ ID NO: 18942 - DNA, 20 bp, Artificial Sequence
  Description of Artificial Sequence: Synthetic oligonucleotide
  Target: PCSK9; (-) strand; PAM type: YTN; PAM sequence: TTT
tttctccctgattagaaatg

SEQ ID NO: 18943 - DNA, 20 bp, Artificial Sequence
  Description of Artificial Sequence: Synthetic oligonucleotide
  Target: PCSK9; (-) strand; PAM type: YTN; PAM sequence: CTC
attttttctccctgattaga

SEQ ID NO: 18944 - DNA, 20 bp, Artificial Sequence
  Description of Artificial Sequence: Synthetic oligonucleotide
  Target: PCSK9; (-) strand; PAM type: YTN; PAM sequence: TTC
cgtaactcattttttctccc

SEQ ID NO: 18945 - DNA, 20 bp, Artificial Sequence
  Description of Artificial Sequence: Synthetic oligonucleotide
  Target: PCSK9; (-) strand; PAM type: YTN; PAM sequence: TTA
ttccgtaactcattttttct

SEQ ID NO: 18946 - DNA, 20 bp, Artificial Sequence
  Description of Artificial Sequence: Synthetic oligonucleotide
  Target: PCSK9; (-) strand; PAM type: YTN; PAM sequence: TTT
attccgtaactcattttttc

SEQ ID NO: 18947 - DNA, 20 bp, Artificial Sequence
  Description of Artificial Sequence: Synthetic oligonucleotide
  Target: PCSK9; (-) strand; PAM type: YTN; PAM sequence: TTC
caataccgtttattccgtaa

SEQ ID NO: 18948 - DNA, 20 bp, Artificial Sequence
  Description of Artificial Sequence: Synthetic oligonucleotide
  Target: PCSK9; (-) strand; PAM type: YTN; PAM sequence: TTG
ttccaataccgtttattccg

SEQ ID NO: 18949 - DNA, 20 bp, Artificial Sequence
  Description of Artificial Sequence: Synthetic oligonucleotide
  Target: PCSK9; (-) strand; PAM type: YTN; PAM sequence: CTA
ttgttccaataccgtttatt

SEQ ID NO: 18950 - DNA, 20 bp, Artificial Sequence
  Description of Artificial Sequence: Synthetic oligonucleotide
  Target: PCSK9; (-) strand; PAM type: YTN; PAM sequence: CTA
gcctattgttccaataccgt

SEQ ID NO: 18951 - DNA, 20 bp, Artificial Sequence
  Description of Artificial Sequence: Synthetic oligonucleotide
  Target: PCSK9; (-) strand; PAM type: YTN; PAM sequence: CTC
cagaaggctagcctattgtt

SEQ ID NO: 18952 - DNA, 20 bp, Artificial Sequence
  Description of Artificial Sequence: Synthetic oligonucleotide
  Target: PCSK9; (-) strand; PAM type: YTN; PAM sequence: TTC
tccagaaggctagcctattg

SEQ ID NO: 18953 - DNA, 20 bp, Artificial Sequence
  Description of Artificial Sequence: Synthetic oligonucleotide
  Target: PCSK9; (-) strand; PAM type: YTN; PAM sequence: TTT
ctccagaaggctagcctatt

SEQ ID NO: 18954 - DNA, 20 bp, Artificial Sequence
  Description of Artificial Sequence: Synthetic oligonucleotide
  Target: PCSK9; (-) strand; PAM type: YTN; PAM sequence: TTT
tctccagaaggctagcctat

SEQ ID NO: 18955 - DNA, 20 bp, Artificial Sequence
  Description of Artificial Sequence: Synthetic oligonucleotide
  Target: PCSK9; (-) strand; PAM type: YTN; PAM sequence: TTT
ttctccagaaggctagccta

SEQ ID NO: 18956 - DNA, 20 bp, Artificial Sequence
  Description of Artificial Sequence: Synthetic oligonucleotide
  Target: PCSK9; (-) strand; PAM type: YTN; PAM sequence: TTA
tttttctccagaaggctagc

SEQ ID NO: 18957 - DNA, 20 bp, Artificial Sequence
  Description of Artificial Sequence: Synthetic oligonucleotide
  Target: PCSK9; (-) strand; PAM type: YTN; PAM sequence: TTG
tataaggagtgaggttattt

SEQ ID NO: 18958 - DNA, 20 bp, Artificial Sequence
  Description of Artificial Sequence: Synthetic oligonucleotide
  Target: PCSK9; (-) strand; PAM type: YTN; PAM sequence: TTT
gtataaggagtgaggttatt

SEQ ID NO: 18959 - DNA, 20 bp, Artificial Sequence
  Description of Artificial Sequence: Synthetic oligonucleotide
  Target: PCSK9; (-) strand; PAM type: YTN; PAM sequence: TTT
tgtataaggagtgaggttat

SEQ ID NO: 18960 - DNA, 20 bp, Artificial Sequence
  Description of Artificial Sequence: Synthetic oligonucleotide
  Target: PCSK9; (-) strand; PAM type: YTN; PAM sequence: CTT
ttgtataaggagtgaggtta

SEQ ID NO: 18961 - DNA, 20 bp, Artificial Sequence
  Description of Artificial Sequence: Synthetic oligonucleotide
  Target: PCSK9; (-) strand; PAM type: YTN; PAM sequence: TTA
cttttgtataaggagtgagg

SEQ ID NO: 18962 - DNA, 20 bp, Artificial Sequence
  Description of Artificial Sequence: Synthetic oligonucleotide
  Target: PCSK9; (-) strand; PAM type: YTN; PAM sequence: TTT
acttttgtataaggagtgag

SEQ ID NO: 18963 - DNA, 20 bp, Artificial Sequence
  Description of Artificial Sequence: Synthetic oligonucleotide
  Target: PCSK9; (-) strand; PAM type: YTN; PAM sequence: CTG
ggatttacttttgtataagg

SEQ ID NO: 18964 - DNA, 20 bp, Artificial Sequence
  Description of Artificial Sequence: Synthetic oligonucleotide
  Target: PCSK9; (-) strand; PAM type: YTN; PAM sequence: TTC
cactgggatttacttttgta

SEQ ID NO: 18965 - DNA, 20 bp, Artificial Sequence
  Description of Artificial Sequence: Synthetic oligonucleotide
  Target: PCSK9; (-) strand; PAM type: YTN; PAM sequence: CTT
ccactgggatttacttttgt

SEQ ID NO: 18966 - DNA, 20 bp, Artificial Sequence
  Description of Artificial Sequence: Synthetic oligonucleotide
  Target: PCSK9; (-) strand; PAM type: YTN; PAM sequence: TTG
gcttccactgggatttactt

SEQ ID NO: 18967 - DNA, 20 bp, Artificial Sequence
  Description of Artificial Sequence: Synthetic oligonucleotide
  Target: PCSK9; (-) strand; PAM type: YTN; PAM sequence: CTT
ggcttccactgggatttact

SEQ ID NO: 18968 - DNA, 20 bp, Artificial Sequence
  Description of Artificial Sequence: Synthetic oligonucleotide
  Target: PCSK9; (-) strand; PAM type: YTN; PAM sequence: TTA
atatcttggcttccactggg

SEQ ID NO: 18969 - DNA, 20 bp, Artificial Sequence
  Description of Artificial Sequence: Synthetic oligonucleotide
  Target: PCSK9; (-) strand; PAM type: YTN; PAM sequence: TTT
aatatcttggcttccactgg

SEQ ID NO: 18970 - DNA, 20 bp, Artificial Sequence
  Description of Artificial Sequence: Synthetic oligonucleotide
  Target: PCSK9; (-) strand; PAM type: YTN; PAM sequence: TTT
taatatcttggcttccactg

SEQ ID NO: 18971 - DNA, 20 bp, Artificial Sequence
  Description of Artificial Sequence: Synthetic oligonucleotide
  Target: PCSK9; (-) strand; PAM type: YTN; PAM sequence: TTT
ttaatatcttggcttccact

SEQ ID NO: 18972 - DNA, 20 bp, Artificial Sequence
  Description of Artificial Sequence: Synthetic oligonucleotide
  Target: PCSK9; (-) strand; PAM type: YTN; PAM sequence: TTT
tttaatatcttggcttccac

SEQ ID NO: 18973 - DNA, 20 bp, Artificial Sequence
  Description of Artificial Sequence: Synthetic oligonucleotide
  Target: PCSK9; (-) strand; PAM type: YTN; PAM sequence: TTT
ttttaatatcttggcttcca

SEQ ID NO: 18974 - DNA, 20 bp, Artificial Sequence
  Description of Artificial Sequence: Synthetic oligonucleotide
  Target: PCSK9; (-) strand; PAM type: YTN; PAM sequence: CTT
tttttaatatcttggcttcc

SEQ ID NO: 18975 - DNA, 20 bp, Artificial Sequence
  Description of Artificial Sequence: Synthetic oligonucleotide
  Target: PCSK9; (-) strand; PAM type: YTN; PAM sequence: TTA
aatctttttttaatatcttg

SEQ ID NO: 18976 - DNA, 20 bp, Artificial Sequence
  Description of Artificial Sequence: Synthetic oligonucleotide
  Target: PCSK9; (-) strand; PAM type: YTN; PAM sequence: TTT
aaatctttttttaatatctt

SEQ ID NO: 18977 - DNA, 20 bp, Artificial Sequence
  Description of Artificial Sequence: Synthetic oligonucleotide
  Target: PCSK9; (-) strand; PAM type: YTN; PAM sequence: TTT
taaatctttttttaatatct

SEQ ID NO: 18978 - DNA, 20 bp, Artificial Sequence
  Description of Artificial Sequence: Synthetic oligonucleotide
  Target: PCSK9; (-) strand; PAM type: YTN; PAM sequence: TTT
ttaaatctttttttaatatc

SEQ ID NO: 18979 - DNA, 20 bp, Artificial Sequence
  Description of Artificial Sequence: Synthetic oligonucleotide
  Target: PCSK9; (-) strand; PAM type: YTN; PAM sequence: TTT
tttaaatctttttttaatat

SEQ ID NO: 18980 - DNA, 20 bp, Artificial Sequence
  Description of Artificial Sequence: Synthetic oligonucleotide
  Target: PCSK9; (-) strand; PAM type: YTN; PAM sequence: CTT
ttttaaatctttttttaata

SEQ ID NO: 18981 - DNA, 20 bp, Artificial Sequence
  Description of Artificial Sequence: Synthetic oligonucleotide
  Target: PCSK9; (-) strand; PAM type: YTN; PAM sequence: CTC
cttttttaaatcttttttta

SEQ ID NO: 18982 - DNA, 20 bp, Artificial Sequence
  Description of Artificial Sequence: Synthetic oligonucleotide
  Target: PCSK9; (-) strand; PAM type: YTN; PAM sequence: TTG
tcctccttttttaaatcttt

SEQ ID NO: 18983 - DNA, 20 bp, Artificial Sequence
  Description of Artificial Sequence: Synthetic oligonucleotide
  Target: PCSK9; (-) strand; PAM type: YTN; PAM sequence: TTA
tcaagatcatataaaaattg

SEQ ID NO: 18984 - DNA, 20 bp, Artificial Sequence
  Description of Artificial Sequence: Synthetic oligonucleotide
  Target: PCSK9; (-) strand; PAM type: YTN; PAM sequence: CTT
atcaagatcatataaaaatt

SEQ ID NO: 18985 - DNA, 20 bp, Artificial Sequence
  Description of Artificial Sequence: Synthetic oligonucleotide
  Target: PCSK9; (-) strand; PAM type: YTN; PAM sequence: CTC
cttatcaagatcatataaaa

SEQ ID NO: 18986 - DNA, 20 bp, Artificial Sequence
  Description of Artificial Sequence: Synthetic oligonucleotide
  Target: PCSK9; (-) strand; PAM type: YTN; PAM sequence: CTC
ctccttatcaagatcatata

SEQ ID NO: 18987 - DNA, 20 bp, Artificial Sequence
  Description of Artificial Sequence: Synthetic oligonucleotide
  Target: PCSK9; (-) strand; PAM type: YTN; PAM sequence: TTA
gaaaggcctcctccttatca

SEQ ID NO: 18988 - DNA, 20 bp, Artificial Sequence
  Description of Artificial Sequence: Synthetic oligonucleotide
  Target: PCSK9; (-) strand; PAM type: YTN; PAM sequence: CTT
agaaaggcctcctccttatc

SEQ ID NO: 18989 - DNA, 20 bp, Artificial Sequence
  Description of Artificial Sequence: Synthetic oligonucleotide
  Target: PCSK9; (-) strand; PAM type: YTN; PAM sequence: CTG
tgcttagaaaggcctcctcc

SEQ ID NO: 18990 - DNA, 20 bp, Artificial Sequence
  Description of Artificial Sequence: Synthetic oligonucleotide
  Target: PCSK9; (-) strand; PAM type: YTN; PAM sequence: TTG
tactgtgcttagaaaggcct

SEQ ID NO: 18991 - DNA, 20 bp, Artificial Sequence
  Description of Artificial Sequence: Synthetic oligonucleotide
  Target: PCSK9; (-) strand; PAM type: YTN; PAM sequence: TTT
gtactgtgcttagaaaggcc

SEQ ID NO: 18992 - DNA, 20 bp, Artificial Sequence
  Description of Artificial Sequence: Synthetic oligonucleotide
  Target: PCSK9; (-) strand; PAM type: YTN; PAM sequence: TTT
tgtactgtgcttagaaaggc

SEQ ID NO: 18993 - DNA, 20 bp, Artificial Sequence
  Description of Artificial Sequence: Synthetic oligonucleotide
  Target: PCSK9; (-) strand; PAM type: YTN; PAM sequence: TTG
attttgtactgtgcttagaa

SEQ ID NO: 18994 - DNA, 20 bp, Artificial Sequence
  Description of Artificial Sequence: Synthetic oligonucleotide
  Target: PCSK9; (-) strand; PAM type: YTN; PAM sequence: CTT
gattttgtactgtgcttaga

SEQ ID NO: 18995 - DNA, 20 bp, Artificial Sequence
  Description of Artificial Sequence: Synthetic oligonucleotide
  Target: PCSK9; (-) strand; PAM type: YTN; PAM sequence: TTC
ttgattttgtactgtgctta

SEQ ID NO: 18996 - DNA, 20 bp, Artificial Sequence
  Description of Artificial Sequence: Synthetic oligonucleotide
  Target: PCSK9; (-) strand; PAM type: YTN; PAM sequence: CTT
cttgattttgtactgtgctt

SEQ ID NO: 18997 - DNA, 20 bp, Artificial Sequence
  Description of Artificial Sequence: Synthetic oligonucleotide
  Target: PCSK9; (-) strand; PAM type: YTN; PAM sequence: TTC
atgacttcttgattttgtac

SEQ ID NO: 18998 - DNA, 20 bp, Artificial Sequence
  Description of Artificial Sequence: Synthetic oligonucleotide
  Target: PCSK9; (-) strand; PAM type: YTN; PAM sequence: TTT
catgacttcttgattttgta

SEQ ID NO: 18999 - DNA, 20 bp, Artificial Sequence
  Description of Artificial Sequence: Synthetic oligonucleotide
  Target: PCSK9; (-) strand; PAM type: YTN; PAM sequence: TTA
tttcatgacttcttgatttt

SEQ ID NO: 19000 - DNA, 20 bp, Artificial Sequence
  Description of Artificial Sequence: Synthetic oligonucleotide
  Target: PCSK9; (-) strand; PAM type: YTN; PAM sequence: TTT
atttcatgacttcttgattt

SEQ ID NO: 19001 - DNA, 20 bp, Artificial Sequence
  Description of Artificial Sequence: Synthetic oligonucleotide
  Target: PCSK9; (-) strand; PAM type: YTN; PAM sequence: TTT
tatttcatgacttcttgatt

SEQ ID NO: 19002 - DNA, 20 bp, Artificial Sequence
  Description of Artificial Sequence: Synthetic oligonucleotide
  Target: PCSK9; (-) strand; PAM type: YTN; PAM sequence: CTT
ttatttcatgacttcttgat

SEQ ID NO: 19003 - DNA, 20 bp, Artificial Sequence
  Description of Artificial Sequence: Synthetic oligonucleotide
  Target: PCSK9; (-) strand; PAM type: YTN; PAM sequence: TTA
tcagccttttatttcatgac

SEQ ID NO: 19004 - DNA, 20 bp, Artificial Sequence
  Description of Artificial Sequence: Synthetic oligonucleotide
  Target: PCSK9; (-) strand; PAM type: YTN; PAM sequence: CTT
atcagccttttatttcatga

SEQ ID NO: 19005 - DNA, 20 bp, Artificial Sequence
  Description of Artificial Sequence: Synthetic oligonucleotide
  Target: PCSK9; (-) strand; PAM type: YTN; PAM sequence: TTC
atggagtcaaacttatcagc

SEQ ID NO: 19006 - DNA, 20 bp, Artificial Sequence
  Description of Artificial Sequence: Synthetic oligonucleotide
  Target: PCSK9; (-) strand; PAM type: YTN; PAM sequence: TTT
catggagtcaaacttatcag

SEQ ID NO: 19007 - DNA, 20 bp, Artificial Sequence
  Description of Artificial Sequence: Synthetic oligonucleotide
  Target: PCSK9; (-) strand; PAM type: YTN; PAM sequence: TTT
tcatggagtcaaacttatca

SEQ ID NO: 19008 - DNA, 20 bp, Artificial Sequence
  Description of Artificial Sequence: Synthetic oligonucleotide
  Target: PCSK9; (-) strand; PAM type: YTN; PAM sequence: TTA
attttcatggagtcaaactt

SEQ ID NO: 19009 - DNA, 20 bp, Artificial Sequence
  Description of Artificial Sequence: Synthetic oligonucleotide
  Target: PCSK9; (-) strand; PAM type: YTN; PAM sequence: TTT
aattttcatggagtcaaact

SEQ ID NO: 19010 - DNA, 20 bp, Artificial Sequence
  Description of Artificial Sequence: Synthetic oligonucleotide
  Target: PCSK9; (-) strand; PAM type: YTN; PAM sequence: TTT
taattttcatggagtcaaac

SEQ ID NO: 19011 - DNA, 20 bp, Artificial Sequence
  Description of Artificial Sequence: Synthetic oligonucleotide
  Target: PCSK9; (-) strand; PAM type: YTN; PAM sequence: TTC
catagaaaattttaattttc

SEQ ID NO: 19012 - DNA, 20 bp, Artificial Sequence
  Description of Artificial Sequence: Synthetic oligonucleotide
  Target: PCSK9; (-) strand; PAM type: YTN; PAM sequence: TTT
ccatagaaaattttaatttt

SEQ ID NO: 19013 - DNA, 20 bp, Artificial Sequence
  Description of Artificial Sequence: Synthetic oligonucleotide
  Target: PCSK9; (-) strand; PAM type: YTN; PAM sequence: TTT
tccatagaaaattttaattt

SEQ ID NO: 19014 - DNA, 20 bp, Artificial Sequence
  Description of Artificial Sequence: Synthetic oligonucleotide
  Target: PCSK9; (-) strand; PAM type: YTN; PAM sequence: TTT
ttccatagaaaattttaatt

SEQ ID NO: 19015 - DNA, 20 bp, Artificial Sequence
  Description of Artificial Sequence: Synthetic oligonucleotide
  Target: PCSK9; (-) strand; PAM type: YTN; PAM sequence: TTT
tttccatagaaaattttaat

SEQ ID NO: 19016 - DNA, 20 bp, Artificial Sequence
  Description of Artificial Sequence: Synthetic oligonucleotide
  Target: PCSK9; (-) strand; PAM type: YTN; PAM sequence: TTT
ttttccatagaaaattttaa

SEQ ID NO: 19017 - DNA, 20 bp, Artificial Sequence
  Description of Artificial Sequence: Synthetic oligonucleotide
  Target: PCSK9; (-) strand; PAM type: YTN; PAM sequence: TTG
tatttttttccatagaaaat

SEQ ID NO: 19018 - DNA, 20 bp, Artificial Sequence
  Description of Artificial Sequence: Synthetic oligonucleotide
  Target: PCSK9; (-) strand; PAM type: YTN; PAM sequence: TTA
ttgtatttttttccatagaa

SEQ ID NO: 19019 - DNA, 20 bp, Artificial Sequence
  Description of Artificial Sequence: Synthetic oligonucleotide
  Target: PCSK9; (-) strand; PAM type: YTN; PAM sequence: TTT
attgtatttttttccataga

SEQ ID NO: 19020 - DNA, 20 bp, Artificial Sequence
  Description of Artificial Sequence: Synthetic oligonucleotide
  Target: PCSK9; (-) strand; PAM type: YTN; PAM sequence: CTT
tattgtatttttttccatag

SEQ ID NO: 19021 - DNA, 20 bp, Artificial Sequence
  Description of Artificial Sequence: Synthetic oligonucleotide
  Target: PCSK9; (-) strand; PAM type: YTN; PAM sequence: TTG
actttattgtatttttttcc

SEQ ID NO: 19022 - DNA, 20 bp, Artificial Sequence
  Description of Artificial Sequence: Synthetic oligonucleotide
  Target: PCSK9; (-) strand; PAM type: YTN; PAM sequence: TTT
gactttattgtatttttttc

SEQ ID NO: 19023 - DNA, 20 bp, Artificial Sequence
  Description of Artificial Sequence: Synthetic oligonucleotide
  Target: PCSK9; (-) strand; PAM type: YTN; PAM sequence: TTT
tgactttattgtattttttt

SEQ ID NO: 19024 - DNA, 20 bp, Artificial Sequence
  Description of Artificial Sequence: Synthetic oligonucleotide
  Target: PCSK9; (-) strand; PAM type: YTN; PAM sequence: TTT
ttgactttattgtatttttt

SEQ ID NO: 19025 - DNA, 20 bp, Artificial Sequence
  Description of Artificial Sequence: Synthetic oligonucleotide
  Target: PCSK9; (-) strand; PAM type: YTN; PAM sequence: TTG
atttttgactttattgtatt

SEQ ID NO: 19026 - DNA, 20 bp, Artificial Sequence
  Description of Artificial Sequence: Synthetic oligonucleotide
  Target: PCSK9; (-) strand; PAM type: YTN; PAM sequence: TTG
attgatttttgactttattg

SEQ ID NO: 19027 - DNA, 20 bp, Artificial Sequence
  Description of Artificial Sequence: Synthetic oligonucleotide
  Target: PCSK9; (-) strand; PAM type: YTN; PAM sequence: TTG
ttgattgatttttgacttta

SEQ ID NO: 19028 - DNA, 20 bp, Artificial Sequence
  Description of Artificial Sequence: Synthetic oligonucleotide
  Target: PCSK9; (-) strand; PAM type: YTN; PAM sequence: TTT
gttgattgatttttgacttt

SEQ ID NO: 19029 - DNA, 20 bp, Artificial Sequence
  Description of Artificial Sequence: Synthetic oligonucleotide
  Target: PCSK9; (-) strand; PAM type: YTN; PAM sequence: TTC
cagtttgttgattgattttt

SEQ ID NO: 19030 - DNA, 20 bp, Artificial Sequence
  Description of Artificial Sequence: Synthetic oligonucleotide
  Target: PCSK9; (-) strand; PAM type: YTN; PAM sequence: TTT
ccagtttgttgattgatttt

SEQ ID NO: 19031 - DNA, 20 bp, Artificial Sequence
  Description of Artificial Sequence: Synthetic oligonucleotide
  Target: PCSK9; (-) strand; PAM type: YTN; PAM sequence: TTT
tccagtttgttgattgattt

SEQ ID NO: 19032 - DNA, 20 bp, Artificial Sequence
  Description of Artificial Sequence: Synthetic oligonucleotide
  Target: PCSK9; (-) strand; PAM type: YTN; PAM sequence: CTA
ttttccagtttgttgattga

SEQ ID NO: 19033 - DNA, 20 bp, Artificial Sequence
  Description of Artificial Sequence: Synthetic oligonucleotide
  Target: PCSK9; (-) strand; PAM type: YTN; PAM sequence: TTG
caaatctattttccagtttg

SEQ ID NO: 19034 - DNA, 20 bp, Artificial Sequence
  Description of Artificial Sequence: Synthetic oligonucleotide
  Target: PCSK9; (-) strand; PAM type: YTN; PAM sequence: TTA
tgtatgttgcaaatctattt

SEQ ID NO: 19035 - DNA, 20 bp, Artificial Sequence
  Description of Artificial Sequence: Synthetic oligonucleotide
  Target: PCSK9; (-) strand; PAM type: YTN; PAM sequence: CTT
atgtatgttgcaaatctatt

SEQ ID NO: 19036 - DNA, 20 bp, Artificial Sequence
  Description of Artificial Sequence: Synthetic oligonucleotide
  Target: PCSK9; (-) strand; PAM type: YTN; PAM sequence: CTC
ttatgtatgttgcaaatcta

SEQ ID NO: 19037 - DNA, 20 bp, Artificial Sequence
  Description of Artificial Sequence: Synthetic oligonucleotide
  Target: PCSK9; (-) strand; PAM type: YTN; PAM sequence: CTG
tctcttatgtatgttgcaaa

SEQ ID NO: 19038 - DNA, 20 bp, Artificial Sequence
  Description of Artificial Sequence: Synthetic oligonucleotide
  Target: PCSK9; (-) strand; PAM type: YTN; PAM sequence: CTG
ctgtctcttatgtatgttgc

SEQ ID NO: 19039 - DNA, 20 bp, Artificial Sequence
  Description of Artificial Sequence: Synthetic oligonucleotide
  Target: PCSK9; (-) strand; PAM type: YTN; PAM sequence: TTA
gcctgctgtctcttatgtat

SEQ ID NO: 19040 - DNA, 20 bp, Artificial Sequence
  Description of Artificial Sequence: Synthetic oligonucleotide
  Target: PCSK9; (-) strand; PAM type: YTN; PAM sequence: TTA
tgtataataccaaaattagc

SEQ ID NO: 19041 - DNA, 20 bp, Artificial Sequence
  Description of Artificial Sequence: Synthetic oligonucleotide
  Target: PCSK9; (-) strand; PAM type: YTN; PAM sequence: TTT
atgtataataccaaaattag

SEQ ID NO: 19042 - DNA, 20 bp, Artificial Sequence
  Description of Artificial Sequence: Synthetic oligonucleotide
  Target: PCSK9; (-) strand; PAM type: YTN; PAM sequence: TTT
tatgtataataccaaaatta

SEQ ID NO: 19043 - DNA, 20 bp, Artificial Sequence
  Description of Artificial Sequence: Synthetic oligonucleotide
  Target: PCSK9; (-) strand; PAM type: YTN; PAM sequence: TTT
ttatgtataataccaaaatt

SEQ ID NO: 19044 - DNA, 20 bp, Artificial Sequence
  Description of Artificial Sequence: Synthetic oligonucleotide
  Target: PCSK9; (-) strand; PAM type: YTN; PAM sequence: CTT
tttatgtataataccaaaat

SEQ ID NO: 19045 - DNA, 20 bp, Artificial Sequence
  Description of Artificial Sequence: Synthetic oligonucleotide
  Target: PCSK9; (-) strand; PAM type: YTN; PAM sequence: TTG
taatagctttttatgtataa

SEQ ID NO: 19046 - DNA, 20 bp, Artificial Sequence
  Description of Artificial Sequence: Synthetic oligonucleotide
  Target: PCSK9; (-) strand; PAM type: YTN; PAM sequence: TTT
gtaatagctttttatgtata

SEQ ID NO: 19047 - DNA, 20 bp, Artificial Sequence
  Description of Artificial Sequence: Synthetic oligonucleotide
  Target: PCSK9; (-) strand; PAM type: YTN; PAM sequence: TTG
atgatttgtaatagcttttt

SEQ ID NO: 19048 - DNA, 20 bp, Artificial Sequence
  Description of Artificial Sequence: Synthetic oligonucleotide
  Target: PCSK9; (-) strand; PAM type: YTN; PAM sequence: TTT
gatgatttgtaatagctttt

SEQ ID NO: 19049 - DNA, 20 bp, Artificial Sequence
  Description of Artificial Sequence: Synthetic oligonucleotide
  Target: PCSK9; (-) strand; PAM type: YTN; PAM sequence: TTG
tttgatgatttgtaatagct

SEQ ID NO: 19050 - DNA, 20 bp, Artificial Sequence
  Description of Artificial Sequence: Synthetic oligonucleotide
  Target: PCSK9; (-) strand; PAM type: YTN; PAM sequence: TTT
gtttgatgatttgtaatagc

SEQ ID NO: 19051 - DNA, 20 bp, Artificial Sequence
  Description of Artificial Sequence: Synthetic oligonucleotide
  Target: PCSK9; (-) strand; PAM type: YTN; PAM sequence: TTT
tgtttgatgatttgtaatag

SEQ ID NO: 19052 - DNA, 20 bp, Artificial Sequence
  Description of Artificial Sequence: Synthetic oligonucleotide
  Target: PCSK9; (-) strand; PAM type: YTN; PAM sequence: CTT
ttgtttgatgatttgtaata

SEQ ID NO: 19053 - DNA, 20 bp, Artificial Sequence
  Description of Artificial Sequence: Synthetic oligonucleotide
  Target: PCSK9; (-) strand; PAM type: YTN; PAM sequence: CTG
tggagcttttgtttgatgat

SEQ ID NO: 19054 - DNA, 20 bp, Artificial Sequence
  Description of Artificial Sequence: Synthetic oligonucleotide
  Target: PCSK9; (-) strand; PAM type: YTN; PAM sequence: TTG
gctgtggagcttttgtttga

SEQ ID NO: 19055 - DNA, 20 bp, Artificial Sequence
  Description of Artificial Sequence: Synthetic oligonucleotide
  Target: PCSK9; (-) strand; PAM type: YTN; PAM sequence: TTT
ggctgtggagcttttgtttg

SEQ ID NO: 19056 - DNA, 20 bp, Artificial Sequence
  Description of Artificial Sequence: Synthetic oligonucleotide
  Target: PCSK9; (-) strand; PAM type: YTN; PAM sequence: TTT
tggctgtggagcttttgttt

SEQ ID NO: 19057 - DNA, 20 bp, Artificial Sequence
  Description of Artificial Sequence: Synthetic oligonucleotide
  Target: PCSK9; (-) strand; PAM type: YTN; PAM sequence: TTC
attttggctgtggagctttt

SEQ ID NO: 19058 - DNA, 20 bp, Artificial Sequence
  Description of Artificial Sequence: Synthetic oligonucleotide
  Target: PCSK9; (-) strand; PAM type: YTN; PAM sequence: TTT
cattttggctgtggagcttt

SEQ ID NO: 19059 - DNA, 20 bp, Artificial Sequence
  Description of Artificial Sequence: Synthetic oligonucleotide
  Target: PCSK9; (-) strand; PAM type: YTN; PAM sequence: TTT
tcattttggctgtggagctt

SEQ ID NO: 19060 - DNA, 20 bp, Artificial Sequence
  Description of Artificial Sequence: Synthetic oligonucleotide
  Target: PCSK9; (-) strand; PAM type: YTN; PAM sequence: TTT
ttcattttggctgtggagct

SEQ ID NO: 19061 - DNA, 20 bp, Artificial Sequence
  Description of Artificial Sequence: Synthetic oligonucleotide
  Target: PCSK9; (-) strand; PAM type: YTN; PAM sequence: TTT
tttcattttggctgtggagc

SEQ ID NO: 19062 - DNA, 20 bp, Artificial Sequence
  Description of Artificial Sequence: Synthetic oligonucleotide
  Target: PCSK9; (-) strand; PAM type: YTN; PAM sequence: TTC
attttttcattttggctgtg

SEQ ID NO: 19063 - DNA, 20 bp, Artificial Sequence
  Description of Artificial Sequence: Synthetic oligonucleotide
  Target: PCSK9; (-) strand; PAM type: YTN; PAM sequence: CTT
cattttttcattttggctgt

SEQ ID NO: 19064 - DNA, 20 bp, Artificial Sequence
  Description of Artificial Sequence: Synthetic oligonucleotide
  Target: PCSK9; (-) strand; PAM type: YTN; PAM sequence: CTC
ttcattttttcattttggct

SEQ ID NO: 19065 - DNA, 20 bp, Artificial Sequence
  Description of Artificial Sequence: Synthetic oligonucleotide
  Target: PCSK9; (-) strand; PAM type: YTN; PAM sequence: CTG
tctcttcattttttcatttt

SEQ ID NO: 19066 - DNA, 20 bp, Artificial Sequence
  Description of Artificial Sequence: Synthetic oligonucleotide
  Target: PCSK9; (-) strand; PAM type: YTN; PAM sequence: TTG
aactgtctcttcattttttc

SEQ ID NO: 19067 - DNA, 20 bp, Artificial Sequence
  Description of Artificial Sequence: Synthetic oligonucleotide
  Target: PCSK9; (-) strand; PAM type: YTN; PAM sequence: TTT
gaactgtctcttcatttttt

SEQ ID NO: 19068 - DNA, 20 bp, Artificial Sequence
  Description of Artificial Sequence: Synthetic oligonucleotide
  Target: PCSK9; (-) strand; PAM type: YTN; PAM sequence: CTT
tgaactgtctcttcattttt

SEQ ID NO: 19069 - DNA, 20 bp, Artificial Sequence
  Description of Artificial Sequence: Synthetic oligonucleotide
  Target: PCSK9; (-) strand; PAM type: YTN; PAM sequence: TTG
tctttgaactgtctcttcat

SEQ ID NO: 19070 - DNA, 20 bp, Artificial Sequence
  Description of Artificial Sequence: Synthetic oligonucleotide
  Target: PCSK9; (-) strand; PAM type: YTN; PAM sequence: TTT
gtctttgaactgtctcttca

SEQ ID NO: 19071 - DNA, 20 bp, Artificial Sequence
  Description of Artificial Sequence: Synthetic oligonucleotide
  Target: PCSK9; (-) strand; PAM type: YTN; PAM sequence: TTG
tttgtctttgaactgtctct

SEQ ID NO: 19072 - DNA, 20 bp, Artificial Sequence
  Description of Artificial Sequence: Synthetic oligonucleotide
  Target: PCSK9; (-) strand; PAM type: YTN; PAM sequence: TTT
gtttgtctttgaactgtctc

SEQ ID NO: 19073 - DNA, 20 bp, Artificial Sequence
  Description of Artificial Sequence: Synthetic oligonucleotide
  Target: PCSK9; (-) strand; PAM type: YTN; PAM sequence: CTA
catttgtttgtctttgaact

SEQ ID NO: 19074 - DNA, 20 bp, Artificial Sequence
  Description of Artificial Sequence: Synthetic oligonucleotide
  Target: PCSK9; (-) strand; PAM type: YTN; PAM sequence: TTA
tctacatttgtttgtctttg

SEQ ID NO: 19075 - DNA, 20 bp, Artificial Sequence
  Description of Artificial Sequence: Synthetic oligonucleotide
  Target: PCSK9; (-) strand; PAM type: YTN; PAM sequence: TTA
aacaattatctacatttgtt

SEQ ID NO: 19076 - DNA, 20 bp, Artificial Sequence
  Description of Artificial Sequence: Synthetic oligonucleotide
  Target: PCSK9; (-) strand; PAM type: YTN; PAM sequence: TTA
agttaaacaattatctacat

SEQ ID NO: 19077 - DNA, 20 bp, Artificial Sequence
  Description of Artificial Sequence: Synthetic oligonucleotide
  Target: PCSK9; (-) strand; PAM type: YTN; PAM sequence: CTT
aagttaaacaattatctaca

SEQ ID NO: 19078 - DNA, 20 bp, Artificial Sequence
  Description of Artificial Sequence: Synthetic oligonucleotide
  Target: PCSK9; (-) strand; PAM type: YTN; PAM sequence: TTC
cttaagttaaacaattatct

SEQ ID NO: 19079 - DNA, 20 bp, Artificial Sequence
  Description of Artificial Sequence: Synthetic oligonucleotide
  Target: PCSK9; (-) strand; PAM type: YTN; PAM sequence: TTT
ccttaagttaaacaattatc

SEQ ID NO: 19080 - DNA, 20 bp, Artificial Sequence
  Description of Artificial Sequence: Synthetic oligonucleotide
  Target: PCSK9; (-) strand; PAM type: YTN; PAM sequence: CTT
tccttaagttaaacaattat

SEQ ID NO: 19081 - DNA, 20 bp, Artificial Sequence
  Description of Artificial Sequence: Synthetic oligonucleotide
  Target: PCSK9; (-) strand; PAM type: YTN; PAM sequence: TTG
acctttccttaagttaaaca

SEQ ID NO: 19082 - DNA, 20 bp, Artificial Sequence
  Description of Artificial Sequence: Synthetic oligonucleotide
  Target: PCSK9; (-) strand; PAM type: YTN; PAM sequence: TTT
gacctttccttaagttaaac

SEQ ID NO: 19083 - DNA, 20 bp, Artificial Sequence
  Description of Artificial Sequence: Synthetic oligonucleotide
  Target: PCSK9; (-) strand; PAM type: YTN; PAM sequence: TTT
tgacctttccttaagttaaa

SEQ ID NO: 19084 - DNA, 20 bp, Artificial Sequence
  Description of Artificial Sequence: Synthetic oligonucleotide
  Target: PCSK9; (-) strand; PAM type: YTN; PAM sequence: TTG
ccaaatattttgacctttcc

SEQ ID NO: 19085 - DNA, 20 bp, Artificial Sequence
  Description of Artificial Sequence: Synthetic oligonucleotide
  Target: PCSK9; (-) strand; PAM type: YTN; PAM sequence: CTC
atggtcacacccaggccaac

SEQ ID NO: 19086 - DNA, 20 bp, Artificial Sequence
  Description of Artificial Sequence: Synthetic oligonucleotide
  Target: PCSK9; (-) strand; PAM type: YTN; PAM sequence: CTA
ccgctcatggtcacacccag

SEQ ID NO: 19087 - DNA, 20 bp, Artificial Sequence
  Description of Artificial Sequence: Synthetic oligonucleotide
  Target: PCSK9; (-) strand; PAM type: YTN; PAM sequence: CTG
gcaactaccgctcatggtca

SEQ ID NO: 19088 - DNA, 20 bp, Artificial Sequence
  Description of Artificial Sequence: Synthetic oligonucleotide
  Target: PCSK9; (-) strand; PAM type: YTN; PAM sequence: TTG
tgaataccactggcaactac

SEQ ID NO: 19089 - DNA, 20 bp, Artificial Sequence
  Description of Artificial Sequence: Synthetic oligonucleotide
  Target: PCSK9; (-) strand; PAM type: YTN; PAM sequence: TTT
gtgaataccactggcaacta

SEQ ID NO: 19090 - DNA, 20 bp, Artificial Sequence
  Description of Artificial Sequence: Synthetic oligonucleotide
  Target: PCSK9; (-) strand; PAM type: YTN; PAM sequence: CTG
caatcacaccaagtgcccag

SEQ ID NO: 19091 - DNA, 20 bp, Artificial Sequence
  Description of Artificial Sequence: Synthetic oligonucleotide
  Target: PCSK9; (-) strand; PAM type: YTN; PAM sequence: CTA
aggtcaaatgtaggaaactg

SEQ ID NO: 19092 - DNA, 20 bp, Artificial Sequence
  Description of Artificial Sequence: Synthetic oligonucleotide
  Target: PCSK9; (-) strand; PAM type: YTN; PAM sequence: CTA
agcgagacacatgaccacac

SEQ ID NO: 19093 - DNA, 20 bp, Artificial Sequence
  Description of Artificial Sequence: Synthetic oligonucleotide
  Target: PCSK9; (-) strand; PAM type: YTN; PAM sequence: CTC
ctaagcgagacacatgacca

SEQ ID NO: 19094 - DNA, 20 bp, Artificial Sequence
  Description of Artificial Sequence: Synthetic oligonucleotide
  Target: PCSK9; (-) strand; PAM type: YTN; PAM sequence: TTC
tcctaagcgagacacatgac

SEQ ID NO: 19095 - DNA, 20 bp, Artificial Sequence
  Description of Artificial Sequence: Synthetic oligonucleotide
  Target: PCSK9; (-) strand; PAM type: YTN; PAM sequence: CTT
ctcctaagcgagacacatga

SEQ ID NO: 19096 - DNA, 20 bp, Artificial Sequence
  Description of Artificial Sequence: Synthetic oligonucleotide
  Target: PCSK9; (-) strand; PAM type: YTN; PAM sequence: TTC
cttctcctaagcgagacaca

SEQ ID NO: 19097 - DNA, 20 bp, Artificial Sequence
  Description of Artificial Sequence: Synthetic oligonucleotide
  Target: PCSK9; (-) strand; PAM type: YTN; PAM sequence: TTT
ccttctcctaagcgagacac

SEQ ID NO: 19098 - DNA, 20 bp, Artificial Sequence
  Description of Artificial Sequence: Synthetic oligonucleotide
  Target: PCSK9; (-) strand; PAM type: YTN; PAM sequence: TTC
acatttccttctcctaagcg

SEQ ID NO: 19099 - DNA, 20 bp, Artificial Sequence
  Description of Artificial Sequence: Synthetic oligonucleotide
  Target: PCSK9; (-) strand; PAM type: YTN; PAM sequence: TTC
cgttcacatttccttctcct

SEQ ID NO: 19100 - DNA, 20 bp, Artificial Sequence
  Description of Artificial Sequence: Synthetic oligonucleotide
  Target: PCSK9; (-) strand; PAM type: YTN; PAM sequence: CTT
ccgttcacatttccttctcc

SEQ ID NO: 19101 - DNA, 20 bp, Artificial Sequence
  Description of Artificial Sequence: Synthetic oligonucleotide
  Target: PCSK9; (-) strand; PAM type: YTN; PAM sequence: TTC
cacacaaaagtgacccacaa

SEQ ID NO: 19102 - DNA, 20 bp, Artificial Sequence
  Description of Artificial Sequence: Synthetic oligonucleotide
  Target: PCSK9; (-) strand; PAM type: YTN; PAM sequence: CTT
ccacacaaaagtgacccaca

SEQ ID NO: 19103 - DNA, 20 bp, Artificial Sequence
  Description of Artificial Sequence: Synthetic oligonucleotide
  Target: PCSK9; (-) strand; PAM type: YTN; PAM sequence: CTC
catgcagcttccacacaaaa

SEQ ID NO: 19104 - DNA, 20 bp, Artificial Sequence
  Description of Artificial Sequence: Synthetic oligonucleotide
  Target: PCSK9; (-) strand; PAM type: YTN; PAM sequence: CTG
acggaaagcaaagaggtgac

SEQ ID NO: 19105 - DNA, 20 bp, Artificial Sequence
  Description of Artificial Sequence: Synthetic oligonucleotide
  Target: PCSK9; (-) strand; PAM type: YTN; PAM sequence: CTG
aggctgacggaaagcaaaga

SEQ ID NO: 19106 - DNA, 20 bp, Artificial Sequence
  Description of Artificial Sequence: Synthetic oligonucleotide
  Target: PCSK9; (-) strand; PAM type: YTN; PAM sequence: CTG
aacactgaggctgacggaaa

SEQ ID NO: 19107 - DNA, 20 bp, Artificial Sequence
  Description of Artificial Sequence: Synthetic oligonucleotide
  Target: PCSK9; (-) strand; PAM type: YTN; PAM sequence: TTG
ctgaacactgaggctgacgg

SEQ ID NO: 19108 - DNA, 20 bp, Artificial Sequence
  Description of Artificial Sequence: Synthetic oligonucleotide
  Target: PCSK9; (-) strand; PAM type: YTN; PAM sequence: TTC
agaacattgctgaacactga

SEQ ID NO: 19109 - DNA, 20 bp, Artificial Sequence
  Description of Artificial Sequence: Synthetic oligonucleotide
  Target: PCSK9; (-) strand; PAM type: YTN; PAM sequence: CTG
ataaagcaaccatcattcag

SEQ ID NO: 19110 - DNA, 20 bp, Artificial Sequence
  Description of Artificial Sequence: Synthetic oligonucleotide
  Target: PCSK9; (-) strand; PAM type: YTN; PAM sequence: CTC
accccagaaccagactgata

SEQ ID NO: 19111 - DNA, 20 bp, Artificial Sequence
  Description of Artificial Sequence: Synthetic oligonucleotide
  Target: PCSK9; (-) strand; PAM type: YTN; PAM sequence: TTA
ccctcaccccagaaccagac

SEQ ID NO: 19112 - DNA, 20 bp, Artificial Sequence
  Description of Artificial Sequence: Synthetic oligonucleotide
  Target: PCSK9; (-) strand; PAM type: YTN; PAM sequence: TTC
attaccctcaccccagaacc

SEQ ID NO: 19113 - DNA, 20 bp, Artificial Sequence
  Description of Artificial Sequence: Synthetic oligonucleotide
  Target: PCSK9; (-) strand; PAM type: YTN; PAM sequence: CTT
cattaccctcaccccagaac

SEQ ID NO: 19114 - DNA, 20 bp, Artificial Sequence
  Description of Artificial Sequence: Synthetic oligonucleotide
  Target: PCSK9; (-) strand; PAM type: YTN; PAM sequence: CTA
cttcattaccctcaccccag

SEQ ID NO: 19115 - DNA, 20 bp, Artificial Sequence
  Description of Artificial Sequence: Synthetic oligonucleotide
  Target: PCSK9; (-) strand; PAM type: YTN; PAM sequence: TTC
actacttcattaccctcacc

SEQ ID NO: 19116 - DNA, 20 bp, Artificial Sequence
  Description of Artificial Sequence: Synthetic oligonucleotide
  Target: PCSK9; (-) strand; PAM type: YTN; PAM sequence: CTT
cactacttcattaccctcac

SEQ ID NO: 19117 - DNA, 20 bp, Artificial Sequence
  Description of Artificial Sequence: Synthetic oligonucleotide
  Target: PCSK9; (-) strand; PAM type: YTN; PAM sequence: TTG
cttcactacttcattaccct

SEQ ID NO: 19118 - DNA, 20 bp, Artificial Sequence
  Description of Artificial Sequence: Synthetic oligonucleotide
  Target: PCSK9; (-) strand; PAM type: YTN; PAM sequence: TTT
gcttcactacttcattaccc

SEQ ID NO: 19119 - DNA, 20 bp, Artificial Sequence
  Description of Artificial Sequence: Synthetic oligonucleotide
  Target: PCSK9; (-) strand; PAM type: YTN; PAM sequence: CTT
tgcttcactacttcattacc

SEQ ID NO: 19120 - DNA, 20 bp, Artificial Sequence
  Description of Artificial Sequence: Synthetic oligonucleotide
  Target: PCSK9; (-) strand; PAM type: YTN; PAM sequence: CTC
acatgtccatcaaggacttt

SEQ ID NO: 19121 - DNA, 20 bp, Artificial Sequence
  Description of Artificial Sequence: Synthetic oligonucleotide
  Target: PCSK9; (-) strand; PAM type: YTN; PAM sequence: CTC
acctcacatgtccatcaagg

SEQ ID NO: 19122 - DNA, 20 bp, Artificial Sequence
  Description of Artificial Sequence: Synthetic oligonucleotide
  Target: PCSK9; (-) strand; PAM type: YTN; PAM sequence: CTG
tctcacctcacatgtccatc

SEQ ID NO: 19123 - DNA, 20 bp, Artificial Sequence
  Description of Artificial Sequence: Synthetic oligonucleotide
  Target: PCSK9; (-) strand; PAM type: YTN; PAM sequence: TTC
tgtctcacctcacatgtcca

SEQ ID NO: 19124 - DNA, 20 bp, Artificial Sequence
  Description of Artificial Sequence: Synthetic oligonucleotide
  Target: PCSK9; (-) strand; PAM type: YTN; PAM sequence: TTT
ctgtctcacctcacatgtcc

SEQ ID NO: 19125 - DNA, 20 bp, Artificial Sequence
  Description of Artificial Sequence: Synthetic oligonucleotide
  Target: PCSK9; (-) strand; PAM type: YTN; PAM sequence: TTA
tttctgtctcacctcacatg

SEQ ID NO: 19126 - DNA, 20 bp, Artificial Sequence
  Description of Artificial Sequence: Synthetic oligonucleotide
  Target: PCSK9; (-) strand; PAM type: YTN; PAM sequence: TTT
atttctgtctcacctcacat

SEQ ID NO: 19127 - DNA, 20 bp, Artificial Sequence
  Description of Artificial Sequence: Synthetic oligonucleotide
  Target: PCSK9; (-) strand; PAM type: YTN; PAM sequence: TTG
aaatgtcaaaggtttatttc

SEQ ID NO: 19128 - DNA, 20 bp, Artificial Sequence
  Description of Artificial Sequence: Synthetic oligonucleotide
  Target: PCSK9; (-) strand; PAM type: YTN; PAM sequence: CTT
gaaatgtcaaaggtttattt

SEQ ID NO: 19129 - DNA, 20 bp, Artificial Sequence
  Description of Artificial Sequence: Synthetic oligonucleotide
  Target: PCSK9; (-) strand; PAM type: YTN; PAM sequence: CTC
aggggcttgaaatgtcaaag

SEQ ID NO: 19130 - DNA, 20 bp, Artificial Sequence
  Description of Artificial Sequence: Synthetic oligonucleotide
  Target: PCSK9; (-) strand; PAM type: YTN; PAM sequence: TTC
cagcacatgcacgccccaaa

SEQ ID NO: 19131 - DNA, 20 bp, Artificial Sequence
  Description of Artificial Sequence: Synthetic oligonucleotide
  Target: PCSK9; (-) strand; PAM type: YTN; PAM sequence: CTT
ccagcacatgcacgccccaa

SEQ ID NO: 19132 - DNA, 20 bp, Artificial Sequence
  Description of Artificial Sequence: Synthetic oligonucleotide
  Target: PCSK9; (-) strand; PAM type: YTN; PAM sequence: CTG
cttccagcacatgcacgccc

SEQ ID NO: 19133 - DNA, 20 bp, Artificial Sequence
  Description of Artificial Sequence: Synthetic oligonucleotide
  Target: PCSK9; (-) strand; PAM type: YTN; PAM sequence: TTC
tgcttccagcacatgcacgc

SEQ ID NO: 19134 - DNA, 20 bp, Artificial Sequence
  Description of Artificial Sequence: Synthetic oligonucleotide
  Target: PCSK9; (-) strand; PAM type: YTN; PAM sequence: CTA
ggttctgcttccagcacatg

SEQ ID NO: 19135 - DNA, 20 bp, Artificial Sequence
  Description of Artificial Sequence: Synthetic oligonucleotide
  Target: PCSK9; (-) strand; PAM type: YTN; PAM sequence: CTG
gaggaatccatcagaatagg

SEQ ID NO: 19136 - DNA, 20 bp, Artificial Sequence
  Description of Artificial Sequence: Synthetic oligonucleotide
  Target: PCSK9; (-) strand; PAM type: YTN; PAM sequence: TTC
ccacgagcagtgctggagga

SEQ ID NO: 19137 - DNA, 20 bp, Artificial Sequence
  Description of Artificial Sequence: Synthetic oligonucleotide
  Target: PCSK9; (-) strand; PAM type: YTN; PAM sequence: CTT
cccacgagcagtgctggagg

SEQ ID NO: 19138 - DNA, 20 bp, Artificial Sequence
  Description of Artificial Sequence: Synthetic oligonucleotide
  Target: PCSK9; (-) strand; PAM type: YTN; PAM sequence: TTG
atgatgtcttcccacgagca

SEQ ID NO: 19139 - DNA, 20 bp, Artificial Sequence
  Description of Artificial Sequence: Synthetic oligonucleotide
  Target: PCSK9; (-) strand; PAM type: YTN; PAM sequence: CTA
tattgatgatgtcttcccac

SEQ ID NO: 19140 - DNA, 20 bp, Artificial Sequence
  Description of Artificial Sequence: Synthetic oligonucleotide
  Target: PCSK9; (-) strand; PAM type: YTN; PAM sequence: CTC
tatattgatgatgtcttccc

SEQ ID NO: 19141 - DNA, 20 bp, Artificial Sequence
  Description of Artificial Sequence: Synthetic oligonucleotide
  Target: PCSK9; (-) strand; PAM type: YTN; PAM sequence: TTC
gagataaagggcacatgaat

SEQ ID NO: 19142 - DNA, 20 bp, Artificial Sequence
  Description of Artificial Sequence: Synthetic oligonucleotide
  Target: PCSK9; (-) strand; PAM type: YTN; PAM sequence: TTT
cgagataaagggcacatgaa

SEQ ID NO: 19143 - DNA, 20 bp, Artificial Sequence
  Description of Artificial Sequence: Synthetic oligonucleotide
  Target: PCSK9; (-) strand; PAM type: YTN; PAM sequence: CTG
gaagtggaatttcgagataa

SEQ ID NO: 19144 - DNA, 20 bp, Artificial Sequence
  Description of Artificial Sequence: Synthetic oligonucleotide
  Target: PCSK9; (-) strand; PAM type: YTN; PAM sequence: TTC
ctggaagtggaatttcgaga

SEQ ID NO: 19145 - DNA, 20 bp, Artificial Sequence
  Description of Artificial Sequence: Synthetic oligonucleotide
  Target: PCSK9; (-) strand; PAM type: YTN; PAM sequence: TTC
ataaattcctggaagtggaa

SEQ ID NO: 19146 - DNA, 20 bp, Artificial Sequence
  Description of Artificial Sequence: Synthetic oligonucleotide
  Target: PCSK9; (-) strand; PAM type: YTN; PAM sequence: TTT
cataaattcctggaagtgga

SEQ ID NO: 19147 - DNA, 20 bp, Artificial Sequence
  Description of Artificial Sequence: Synthetic oligonucleotide
  Target: PCSK9; (-) strand; PAM type: YTN; PAM sequence: CTG
tttcataaattcctggaagt

SEQ ID NO: 19148 - DNA, 20 bp, Artificial Sequence
  Description of Artificial Sequence: Synthetic oligonucleotide
  Target: PCSK9; (-) strand; PAM type: YTN; PAM sequence: TTG
cacatgtgagagtatctgtt

SEQ ID NO: 19149 - DNA, 20 bp, Artificial Sequence
  Description of Artificial Sequence: Synthetic oligonucleotide
  Target: PCSK9; (-) strand; PAM type: YTN; PAM sequence: TTT
gcacatgtgagagtatctgt

SEQ ID NO: 19150 - DNA, 20 bp, Artificial Sequence
  Description of Artificial Sequence: Synthetic oligonucleotide
  Target: PCSK9; (-) strand; PAM type: YTN; PAM sequence: CTG
tttgcacatgtgagagtatc

SEQ ID NO: 19151 - DNA, 20 bp, Artificial Sequence
  Description of Artificial Sequence: Synthetic oligonucleotide
  Target: PCSK9; (-) strand; PAM type: YTN; PAM sequence: TTA
tccatagctgtttgcacatg

SEQ ID NO: 19152 - DNA, 20 bp, Artificial Sequence
  Description of Artificial Sequence: Synthetic oligonucleotide
  Target: PCSK9; (-) strand; PAM type: YTN; PAM sequence: CTT
atccatagctgtttgcacat

SEQ ID NO: 19153 - DNA, 20 bp, Artificial Sequence
  Description of Artificial Sequence: Synthetic oligonucleotide
  Target: PCSK9; (-) strand; PAM type: YTN; PAM sequence: CTG
tccttatccatagctgtttg

SEQ ID NO: 19154 - DNA, 20 bp, Artificial Sequence
  Description of Artificial Sequence: Synthetic oligonucleotide
  Target: PCSK9; (-) strand; PAM type: YTN; PAM sequence: TTG
ccatgtctgtccttatccat

SEQ ID NO: 19155 - DNA, 20 bp, Artificial Sequence
  Description of Artificial Sequence: Synthetic oligonucleotide
  Target: PCSK9; (-) strand; PAM type: YTN; PAM sequence: TTG
caatccaagttgccatgtct

SEQ ID NO: 19156 - DNA, 20 bp, Artificial Sequence
  Description of Artificial Sequence: Synthetic oligonucleotide
  Target: PCSK9; (-) strand; PAM type: YTN; PAM sequence: CTA
ttgcaatccaagttgccatg

SEQ ID NO: 19157 - DNA, 20 bp, Artificial Sequence
  Description of Artificial Sequence: Synthetic oligonucleotide
  Target: PCSK9; (-) strand; PAM type: YTN; PAM sequence: TTG
ctattgcaatccaagttgcc

SEQ ID NO: 19158 - DNA, 20 bp, Artificial Sequence
  Description of Artificial Sequence: Synthetic oligonucleotide
  Target: PCSK9; (-) strand; PAM type: YTN; PAM sequence: TTT
gctattgcaatccaagttgc

SEQ ID NO: 19159 - DNA, 20 bp, Artificial Sequence
  Description of Artificial Sequence: Synthetic oligonucleotide
  Target: PCSK9; (-) strand; PAM type: YTN; PAM sequence: TTT
tgctattgcaatccaagttg

SEQ ID NO: 19160 - DNA, 20 bp, Artificial Sequence
  Description of Artificial Sequence: Synthetic oligonucleotide
  Target: PCSK9; (-) strand; PAM type: YTN; PAM sequence: CTT
ttgctattgcaatccaagtt

SEQ ID NO: 19161 - DNA, 20 bp, Artificial Sequence
  Description of Artificial Sequence: Synthetic oligonucleotide
  Target: PCSK9; (-) strand; PAM type: YTN; PAM sequence: CTG
tcttttgctattgcaatcca

SEQ ID NO: 19162 - DNA, 20 bp, Artificial Sequence
  Description of Artificial Sequence: Synthetic oligonucleotide
  Target: PCSK9; (-) strand; PAM type: YTN; PAM sequence: TTC
tgtcttttgctattgcaatc

SEQ ID NO: 19163 - DNA, 20 bp, Artificial Sequence
  Description of Artificial Sequence: Synthetic oligonucleotide
  Target: PCSK9; (-) strand; PAM type: YTN; PAM sequence: TTT
ctgtcttttgctattgcaat

SEQ ID NO: 19164 - DNA, 20 bp, Artificial Sequence
  Description of Artificial Sequence: Synthetic oligonucleotide
  Target: PCSK9; (-) strand; PAM type: YTN; PAM sequence: TTG
tttctgtcttttgctattgc

SEQ ID NO: 19165 - DNA, 20 bp, Artificial Sequence
  Description of Artificial Sequence: Synthetic oligonucleotide
  Target: PCSK9; (-) strand; PAM type: YTN; PAM sequence: TTG
gttgtttctgtcttttgcta

SEQ ID NO: 19166 - DNA, 20 bp, Artificial Sequence
  Description of Artificial Sequence: Synthetic oligonucleotide
  Target: PCSK9; (-) strand; PAM type: YTN; PAM sequence: TTC
cgttggttgtttctgtcttt

SEQ ID NO: 19167 - DNA, 20 bp, Artificial Sequence
  Description of Artificial Sequence: Synthetic oligonucleotide
  Target: PCSK9; (-) strand; PAM type: YTN; PAM sequence: TTT
ccgttggttgtttctgtctt

SEQ ID NO: 19168 - DNA, 20 bp, Artificial Sequence
  Description of Artificial Sequence: Synthetic oligonucleotide
  Target: PCSK9; (-) strand; PAM type: YTN; PAM sequence: TTG
gtgtttccgttggttgtttc

SEQ ID NO: 19169 - DNA, 20 bp, Artificial Sequence
  Description of Artificial Sequence: Synthetic oligonucleotide
  Target: PCSK9; (-) strand; PAM type: YTN; PAM sequence: TTG
gttggtgtttccgttggttg

SEQ ID NO: 19170 - DNA, 20 bp, Artificial Sequence
  Description of Artificial Sequence: Synthetic oligonucleotide
  Target: PCSK9; (-) strand; PAM type: YTN; PAM sequence: CTA
ttggttggtgtttccgttgg

SEQ ID NO: 19171 - DNA, 20 bp, Artificial Sequence
  Description of Artificial Sequence: Synthetic oligonucleotide
  Target: PCSK9; (-) strand; PAM type: YTN; PAM sequence: TTC
ctattggttggtgtttccgt

SEQ ID NO: 19172 - DNA, 20 bp, Artificial Sequence
  Description of Artificial Sequence: Synthetic oligonucleotide
  Target: PCSK9; (-) strand; PAM type: YTN; PAM sequence: TTT
cctattggttggtgtttccg

SEQ ID NO: 19173 - DNA, 20 bp, Artificial Sequence
  Description of Artificial Sequence: Synthetic oligonucleotide
  Target: PCSK9; (-) strand; PAM type: YTN; PAM sequence: TTA
gccaatttcctattggttgg

SEQ ID NO: 19174 - DNA, 20 bp, Artificial Sequence
  Description of Artificial Sequence: Synthetic oligonucleotide
  Target: PCSK9; (-) strand; PAM type: YTN; PAM sequence: TTT
agccaatttcctattggttg

SEQ ID NO: 19175 - DNA, 20 bp, Artificial Sequence
  Description of Artificial Sequence: Synthetic oligonucleotide
  Target: PCSK9; (-) strand; PAM type: YTN; PAM sequence: CTT
tagccaatttcctattggtt

SEQ ID NO: 19176 - DNA, 20 bp, Artificial Sequence
  Description of Artificial Sequence: Synthetic oligonucleotide
  Target: PCSK9; (-) strand; PAM type: YTN; PAM sequence: TTC
acaatgtctttagccaattt

SEQ ID NO: 19177 - DNA, 20 bp, Artificial Sequence
  Description of Artificial Sequence: Synthetic oligonucleotide
  Target: PCSK9; (-) strand; PAM type: YTN; PAM sequence: TTT
cacaatgtctttagccaatt

SEQ ID NO: 19178 - DNA, 20 bp, Artificial Sequence
  Description of Artificial Sequence: Synthetic oligonucleotide
  Target: PCSK9; (-) strand; PAM type: YTN; PAM sequence: CTA
tgtatgtttcacaatgtctt

SEQ ID NO: 19179 - DNA, 20 bp, Artificial Sequence
  Description of Artificial Sequence: Synthetic oligonucleotide
  Target: PCSK9; (-) strand; PAM type: YTN; PAM sequence: TTC
tatgtatgtttcacaatgtc

SEQ ID NO: 19180 - DNA, 20 bp, Artificial Sequence
  Description of Artificial Sequence: Synthetic oligonucleotide
  Target: PCSK9; (-) strand; PAM type: YTN; PAM sequence: TTC
attctatgtatgtttcacaa

SEQ ID NO: 19181 - DNA, 20 bp, Artificial Sequence
  Description of Artificial Sequence: Synthetic oligonucleotide
  Target: PCSK9; (-) strand; PAM type: YTN; PAM sequence: TTT
cattctatgtatgtttcaca

SEQ ID NO: 19182 - DNA, 20 bp, Artificial Sequence
  Description of Artificial Sequence: Synthetic oligonucleotide
  Target: PCSK9; (-) strand; PAM type: YTN; PAM sequence: TTA
tttcattctatgtatgtttc

SEQ ID NO: 19183 - DNA, 20 bp, Artificial Sequence
  Description of Artificial Sequence: Synthetic oligonucleotide
  Target: PCSK9; (-) strand; PAM type: YTN; PAM sequence: TTG
cagattatttcattctatgt

SEQ ID NO: 19184 - DNA, 20 bp, Artificial Sequence
  Description of Artificial Sequence: Synthetic oligonucleotide
  Target: PCSK9; (-) strand; PAM type: YTN; PAM sequence: CTG
gttgcagattatttcattct

SEQ ID NO: 19185 - DNA, 20 bp, Artificial Sequence
  Description of Artificial Sequence: Synthetic oligonucleotide
  Target: PCSK9; (-) strand; PAM type: YTN; PAM sequence: TTC
tggttgcagattatttcatt

SEQ ID NO: 19186 - DNA, 20 bp, Artificial Sequence
  Description of Artificial Sequence: Synthetic oligonucleotide
  Target: PCSK9; (-) strand; PAM type: YTN; PAM sequence: TTT
ctggttgcagattatttcat

SEQ ID NO: 19187 - DNA, 20 bp, Artificial Sequence
  Description of Artificial Sequence: Synthetic oligonucleotide
  Target: PCSK9; (-) strand; PAM type: YTN; PAM sequence: TTT
tctggttgcagattatttca

SEQ ID NO: 19188 - DNA, 20 bp, Artificial Sequence
  Description of Artificial Sequence: Synthetic oligonucleotide
  Target: PCSK9; (-) strand; PAM type: YTN; PAM sequence: TTT
ttctggttgcagattatttc

SEQ ID NO: 19189 - DNA, 20 bp, Artificial Sequence
  Description of Artificial Sequence: Synthetic oligonucleotide
  Target: PCSK9; (-) strand; PAM type: YTN; PAM sequence: TTA
tttttctggttgcagattat

SEQ ID NO: 19190 - DNA, 20 bp, Artificial Sequence
  Description of Artificial Sequence: Synthetic oligonucleotide
  Target: PCSK9; (-) strand; PAM type: YTN; PAM sequence: CTT
atttttctggttgcagatta

SEQ ID NO: 19191 - DNA, 20 bp, Artificial Sequence
  Description of Artificial Sequence: Synthetic oligonucleotide
  Target: PCSK9; (-) strand; PAM type: YTN; PAM sequence: CTG
ccttatttttctggttgcag

SEQ ID NO: 19192 - DNA, 20 bp, Artificial Sequence
  Description of Artificial Sequence: Synthetic oligonucleotide
  Target: PCSK9; (-) strand; PAM type: YTN; PAM sequence: CTA
ctgccttatttttctggttg

SEQ ID NO: 19193 - DNA, 20 bp, Artificial Sequence
  Description of Artificial Sequence: Synthetic oligonucleotide
  Target: PCSK9; (-) strand; PAM type: YTN; PAM sequence: CTG
gtacacatacatctactgcc

SEQ ID NO: 19194 - DNA, 20 bp, Artificial Sequence
  Description of Artificial Sequence: Synthetic oligonucleotide
  Target: PCSK9; (-) strand; PAM type: YTN; PAM sequence: CTC
ggaataaaaaccacactggt

SEQ ID NO: 19195 - DNA, 20 bp, Artificial Sequence
  Description of Artificial Sequence: Synthetic oligonucleotide
  Target: PCSK9; (-) strand; PAM type: YTN; PAM sequence: CTA
atctcggaataaaaaccaca

SEQ ID NO: 19196 - DNA, 20 bp, Artificial Sequence
  Description of Artificial Sequence: Synthetic oligonucleotide
  Target: PCSK9; (-) strand; PAM type: YTN; PAM sequence: CTA
gccctaatctcggaataaaa

SEQ ID NO: 19197 - DNA, 20 bp, Artificial Sequence
  Description of Artificial Sequence: Synthetic oligonucleotide
  Target: PCSK9; (-) strand; PAM type: YTN; PAM sequence: TTA
acctagccctaatctcggaa

SEQ ID NO: 19198 - DNA, 20 bp, Artificial Sequence
  Description of Artificial Sequence: Synthetic oligonucleotide
  Target: PCSK9; (-) strand; PAM type: YTN; PAM sequence: CTT
aacctagccctaatctcgga

SEQ ID NO: 19199 - DNA, 20 bp, Artificial Sequence
  Description of Artificial Sequence: Synthetic oligonucleotide
  Target: PCSK9; (-) strand; PAM type: YTN; PAM sequence: CTG
acgtcttaacctagccctaa

SEQ ID NO: 19200 - DNA, 20 bp, Artificial Sequence
  Description of Artificial Sequence: Synthetic oligonucleotide
  Target: PCSK9; (-) strand; PAM type: YTN; PAM sequence: TTA
atctgacgtcttaacctagc

SEQ ID NO: 19201 - DNA, 20 bp, Artificial Sequence
  Description of Artificial Sequence: Synthetic oligonucleotide
  Target: PCSK9; (-) strand; PAM type: YTN; PAM sequence: CTT
aatctgacgtcttaacctag

SEQ ID NO: 19202 - DNA, 20 bp, Artificial Sequence
  Description of Artificial Sequence: Synthetic oligonucleotide
  Target: PCSK9; (-) strand; PAM type: YTN; PAM sequence: TTG
gtggggtggagagggacaac

SEQ ID NO: 19203 - DNA, 20 bp, Artificial Sequence
  Description of Artificial Sequence: Synthetic oligonucleotide
  Target: PCSK9; (-) strand; PAM type: YTN; PAM sequence: TTA
tattggtggggtggagaggg

SEQ ID NO: 19204 - DNA, 20 bp, Artificial Sequence
  Description of Artificial Sequence: Synthetic oligonucleotide
  Target: PCSK9; (-) strand; PAM type: YTN; PAM sequence: TTT
atattggtggggtggagagg

SEQ ID NO: 19205 - DNA, 20 bp, Artificial Sequence
  Description of Artificial Sequence: Synthetic oligonucleotide
  Target: PCSK9; (-) strand; PAM type: YTN; PAM sequence: TTA
tttatattggtggggtggag

SEQ ID NO: 19206 - DNA, 20 bp, Artificial Sequence
  Description of Artificial Sequence: Synthetic oligonucleotide
  Target: PCSK9; (-) strand; PAM type: YTN; PAM sequence: TTT
atttatattggtggggtgga

SEQ ID NO: 19207 - DNA, 20 bp, Artificial Sequence
  Description of Artificial Sequence: Synthetic oligonucleotide
  Target: PCSK9; (-) strand; PAM type: YTN; PAM sequence: TTT
tatttatattggtggggtgg

SEQ ID NO: 19208 - DNA, 20 bp, Artificial Sequence
  Description of Artificial Sequence: Synthetic oligonucleotide
  Target: PCSK9; (-) strand; PAM type: YTN; PAM sequence: TTT
ttatttatattggtggggtg

SEQ ID NO: 19209 - DNA, 20 bp, Artificial Sequence
  Description of Artificial Sequence: Synthetic oligonucleotide
  Target: PCSK9; (-) strand; PAM type: YTN; PAM sequence: CTT
tttatttatattggtggggt

SEQ ID NO: 19210 - DNA, 20 bp, Artificial Sequence
  Description of Artificial Sequence: Synthetic oligonucleotide
  Target: PCSK9; (-) strand; PAM type: YTN; PAM sequence: TTA
actttttatttatattggtg

SEQ ID NO: 19211 - DNA, 20 bp, Artificial Sequence
  Description of Artificial Sequence: Synthetic oligonucleotide
  Target: PCSK9; (-) strand; PAM type: YTN; PAM sequence: TTT
aactttttatttatattggt

SEQ ID NO: 19212 - DNA, 20 bp, Artificial Sequence
  Description of Artificial Sequence: Synthetic oligonucleotide
  Target: PCSK9; (-) strand; PAM type: YTN; PAM sequence: TTT
taactttttatttatattgg

SEQ ID NO: 19213 - DNA, 20 bp, Artificial Sequence
  Description of Artificial Sequence: Synthetic oligonucleotide
  Target: PCSK9; (-) strand; PAM type: YTN; PAM sequence: CTT
ttaactttttatttatattg

SEQ ID NO: 19214 - DNA, 20 bp, Artificial Sequence
  Description of Artificial Sequence: Synthetic oligonucleotide
  Target: PCSK9; (-) strand; PAM type: YTN; PAM sequence: TTA
cttttaactttttatttata

SEQ ID NO: 19215 - DNA, 20 bp, Artificial Sequence
  Description of Artificial Sequence: Synthetic oligonucleotide
  Target: PCSK9; (-) strand; PAM type: YTN; PAM sequence: TTT
acttttaactttttatttat

SEQ ID NO: 19216 - DNA, 20 bp, Artificial Sequence
  Description of Artificial Sequence: Synthetic oligonucleotide
  Target: PCSK9; (-) strand; PAM type: YTN; PAM sequence: TTA
tgatttacttttaacttttt

SEQ ID NO: 19217 - DNA, 20 bp, Artificial Sequence
  Description of Artificial Sequence: Synthetic oligonucleotide
  Target: PCSK9; (-) strand; PAM type: YTN; PAM sequence: TTT
atgatttacttttaactttt

SEQ ID NO: 19218 - DNA, 20 bp, Artificial Sequence
  Description of Artificial Sequence: Synthetic oligonucleotide
  Target: PCSK9; (-) strand; PAM type: YTN; PAM sequence: TTG
taaaaatagtttatgattta

SEQ ID NO: 19219 - DNA, 20 bp, Artificial Sequence
  Description of Artificial Sequence: Synthetic oligonucleotide
  Target: PCSK9; (-) strand; PAM type: YTN; PAM sequence: TTA
aaattgtaaaaatagtttat

SEQ ID NO: 19220 - DNA, 20 bp, Artificial Sequence
  Description of Artificial Sequence: Synthetic oligonucleotide
  Target: PCSK9; (-) strand; PAM type: YTN; PAM sequence: TTT
aaaattgtaaaaatagttta

SEQ ID NO: 19221 - DNA, 20 bp, Artificial Sequence
  Description of Artificial Sequence: Synthetic oligonucleotide
  Target: PCSK9; (-) strand; PAM type: YTN; PAM sequence: TTT
taaaattgtaaaaatagttt

SEQ ID NO: 19222 - DNA, 20 bp, Artificial Sequence
  Description of Artificial Sequence: Synthetic oligonucleotide
  Target: PCSK9; (-) strand; PAM type: YTN; PAM sequence: TTT
ttaaaattgtaaaaatagtt

SEQ ID NO: 19223 - DNA, 20 bp, Artificial Sequence
  Description of Artificial Sequence: Synthetic oligonucleotide
  Target: PCSK9; (-) strand; PAM type: YTN; PAM sequence: CTT
tttaaaattgtaaaaatagt

SEQ ID NO: 19224 - DNA, 20 bp, Artificial Sequence
  Description of Artificial Sequence: Synthetic oligonucleotide
  Target: PCSK9; (-) strand; PAM type: YTN; PAM sequence: TTA
acccactttttaaaattgta

SEQ ID NO: 19225 - DNA, 20 bp, Artificial Sequence
  Description of Artificial Sequence: Synthetic oligonucleotide
  Target: PCSK9; (-) strand; PAM type: YTN; PAM sequence: TTT
aacccactttttaaaattgt

SEQ ID NO: 19226 - DNA, 20 bp, Artificial Sequence
  Description of Artificial Sequence: Synthetic oligonucleotide
  Target: PCSK9; (-) strand; PAM type: YTN; PAM sequence: CTT
taacccactttttaaaattg

SEQ ID NO: 19227 - DNA, 20 bp, Artificial Sequence
  Description of Artificial Sequence: Synthetic oligonucleotide
  Target: PCSK9; (-) strand; PAM type: YTN; PAM sequence: CTC
tttaacccactttttaaaat

SEQ ID NO: 19228 - DNA, 20 bp, Artificial Sequence
  Description of Artificial Sequence: Synthetic oligonucleotide
  Target: PCSK9; (-) strand; PAM type: YTN; PAM sequence: TTG
gatgggctctttaacccact

SEQ ID NO: 19229 - DNA, 20 bp, Artificial Sequence
  Description of Artificial Sequence: Synthetic oligonucleotide
  Target: PCSK9; (-) strand; PAM type: YTN; PAM sequence: CTT
ggatgggctctttaacccac

SEQ ID NO: 19230 - DNA, 20 bp, Artificial Sequence
  Description of Artificial Sequence: Synthetic oligonucleotide
  Target: PCSK9; (-) strand; PAM type: YTN; PAM sequence: CTA
cttggatgggctctttaacc

SEQ ID NO: 19231 - DNA, 20 bp, Artificial Sequence
  Description of Artificial Sequence: Synthetic oligonucleotide
  Target: PCSK9; (-) strand; PAM type: YTN; PAM sequence: TTA
taaaactacttggatgggct

SEQ ID NO: 19232 - DNA, 20 bp, Artificial Sequence
  Description of Artificial Sequence: Synthetic oligonucleotide
  Target: PCSK9; (-) strand; PAM type: YTN; PAM sequence: TTT
ataaaactacttggatgggc

SEQ ID NO: 19233 - DNA, 20 bp, Artificial Sequence
  Description of Artificial Sequence: Synthetic oligonucleotide
  Target: PCSK9; (-) strand; PAM type: YTN; PAM sequence: TTT
tataaaactacttggatggg

SEQ ID NO: 19234 - DNA, 20 bp, Artificial Sequence
  Description of Artificial Sequence: Synthetic oligonucleotide
  Target: PCSK9; (-) strand; PAM type: YTN; PAM sequence: CTT
ttataaaactacttggatgg

SEQ ID NO: 19235 - DNA, 20 bp, Artificial Sequence
  Description of Artificial Sequence: Synthetic oligonucleotide
  Target: PCSK9; (-) strand; PAM type: YTN; PAM sequence: CTA
cttttataaaactacttgga

SEQ ID NO: 19236 - DNA, 20 bp, Artificial Sequence
  Description of Artificial Sequence: Synthetic oligonucleotide
  Target: PCSK9; (-) strand; PAM type: YTN; PAM sequence: TTC
ggagatagtctacttttata

SEQ ID NO: 19237 - DNA, 20 bp, Artificial Sequence
  Description of Artificial Sequence: Synthetic oligonucleotide
  Target: PCSK9; (-) strand; PAM type: YTN; PAM sequence: TTT
cggagatagtctacttttat

SEQ ID NO: 19238 - DNA, 20 bp, Artificial Sequence
  Description of Artificial Sequence: Synthetic oligonucleotide
  Target: PCSK9; (-) strand; PAM type: YTN; PAM sequence: TTT
tcggagatagtctactttta

SEQ ID NO: 19239 - DNA, 20 bp, Artificial Sequence
  Description of Artificial Sequence: Synthetic oligonucleotide
  Target: PCSK9; (-) strand; PAM type: YTN; PAM sequence: CTT
ttcggagatagtctactttt

SEQ ID NO: 19240 - DNA, 20 bp, Artificial Sequence
  Description of Artificial Sequence: Synthetic oligonucleotide
  Target: PCSK9; (-) strand; PAM type: YTN; PAM sequence: TTG
ggtatcttttcggagatagt

SEQ ID NO: 19241 - DNA, 20 bp, Artificial Sequence
  Description of Artificial Sequence: Synthetic oligonucleotide
  Target: PCSK9; (-) strand; PAM type: YTN; PAM sequence: TTA
ttgggtatcttttcggagat

SEQ ID NO: 19242 - DNA, 20 bp, Artificial Sequence
  Description of Artificial Sequence: Synthetic oligonucleotide
  Target: PCSK9; (-) strand; PAM type: YTN; PAM sequence: TTT
attgggtatcttttcggaga

SEQ ID NO: 19243 - DNA, 20 bp, Artificial Sequence
  Description of Artificial Sequence: Synthetic oligonucleotide
  Target: PCSK9; (-) strand; PAM type: YTN; PAM sequence: CTA
tttattgggtatcttttcgg

SEQ ID NO: 19244 - DNA, 20 bp, Artificial Sequence
  Description of Artificial Sequence: Synthetic oligonucleotide
  Target: PCSK9; (-) strand; PAM type: YTN; PAM sequence: TTA
taacagccccaggaaagtaa

SEQ ID NO: 19245 - DNA, 20 bp, Artificial Sequence
  Description of Artificial Sequence: Synthetic oligonucleotide
  Target: PCSK9; (-) strand; PAM type: YTN; PAM sequence: TTG
ttataacagccccaggaaag

SEQ ID NO: 19246 - DNA, 20 bp, Artificial Sequence
  Description of Artificial Sequence: Synthetic oligonucleotide
  Target: PCSK9; (-) strand; PAM type: YTN; PAM sequence: CTT
gttataacagccccaggaaa

SEQ ID NO: 19247 - DNA, 20 bp, Artificial Sequence
  Description of Artificial Sequence: Synthetic oligonucleotide
  Target: PCSK9; (-) strand; PAM type: YTN; PAM sequence: TTG
tagaaacttgttataacagc

SEQ ID NO: 19248 - DNA, 20 bp, Artificial Sequence
  Description of Artificial Sequence: Synthetic oligonucleotide
  Target: PCSK9; (-) strand; PAM type: YTN; PAM sequence: TTT
gtagaaacttgttataacag

SEQ ID NO: 19249 - DNA, 20 bp, Artificial Sequence
  Description of Artificial Sequence: Synthetic oligonucleotide
  Target: PCSK9; (-) strand; PAM type: YTN; PAM sequence: TTG
aagccagcaaatttgtagaa

SEQ ID NO: 19250 - DNA, 20 bp, Artificial Sequence
  Description of Artificial Sequence: Synthetic oligonucleotide
  Target: PCSK9; (-) strand; PAM type: YTN; PAM sequence: TTT
gaagccagcaaatttgtaga

SEQ ID NO: 19251 - DNA, 20 bp, Artificial Sequence
  Description of Artificial Sequence: Synthetic oligonucleotide
  Target: PCSK9; (-) strand; PAM type: YTN; PAM sequence: TTA
tttgaagccagcaaatttgt

SEQ ID NO: 19252 - DNA, 20 bp, Artificial Sequence
  Description of Artificial Sequence: Synthetic oligonucleotide
  Target: PCSK9; (-) strand; PAM type: YTN; PAM sequence: TTG
ttatttgaagccagcaaatt

SEQ ID NO: 19253 - DNA, 20 bp, Artificial Sequence
  Description of Artificial Sequence: Synthetic oligonucleotide
  Target: PCSK9; (-) strand; PAM type: YTN; PAM sequence: TTT
gttatttgaagccagcaaat

SEQ ID NO: 19254 - DNA, 20 bp, Artificial Sequence
  Description of Artificial Sequence: Synthetic oligonucleotide
  Target: PCSK9; (-) strand; PAM type: YTN; PAM sequence: TTT
tgttatttgaagccagcaaa

SEQ ID NO: 19255 - DNA, 20 bp, Artificial Sequence
  Description of Artificial Sequence: Synthetic oligonucleotide
  Target: PCSK9; (-) strand; PAM type: YTN; PAM sequence: TTT
ttgttatttgaagccagcaa

SEQ ID NO: 19256 - DNA, 20 bp, Artificial Sequence
  Description of Artificial Sequence: Synthetic oligonucleotide
  Target: PCSK9; (-) strand; PAM type: YTN; PAM sequence: CTG
caagagaatacgtttttgtt

SEQ ID NO: 19257 - DNA, 20 bp, Artificial Sequence
  Description of Artificial Sequence: Synthetic oligonucleotide
  Target: PCSK9; (-) strand; PAM type: YTN; PAM sequence: TTC
cataactgcaagagaatacg

SEQ ID NO: 19258 - DNA, 20 bp, Artificial Sequence
  Description of Artificial Sequence: Synthetic oligonucleotide
  Target: PCSK9; (-) strand; PAM type: YTN; PAM sequence: CTT
ccataactgcaagagaatac

SEQ ID NO: 19259 - DNA, 20 bp, Artificial Sequence
  Description of Artificial Sequence: Synthetic oligonucleotide
  Target: PCSK9; (-) strand; PAM type: YTN; PAM sequence: CTG
gcttccataactgcaagaga

SEQ ID NO: 19260 - DNA, 20 bp, Artificial Sequence
  Description of Artificial Sequence: Synthetic oligonucleotide
  Target: PCSK9; (-) strand; PAM type: YTN; PAM sequence: TTC
tggcttccataactgcaaga

SEQ ID NO: 19261 - DNA, 20 bp, Artificial Sequence
  Description of Artificial Sequence: Synthetic oligonucleotide
  Target: PCSK9; (-) strand; PAM type: YTN; PAM sequence: CTT
ctggcttccataactgcaag

SEQ ID NO: 19262 - DNA, 20 bp, Artificial Sequence
  Description of Artificial Sequence: Synthetic oligonucleotide
  Target: PCSK9; (-) strand; PAM type: YTN; PAM sequence: TTC
catacttctggcttccataa

SEQ ID NO: 19263 - DNA, 20 bp, Artificial Sequence
  Description of Artificial Sequence: Synthetic oligonucleotide
  Target: PCSK9; (-) strand; PAM type: YTN; PAM sequence: TTC
attccatacttctggcttcc

SEQ ID NO: 19264 - DNA, 20 bp, Artificial Sequence
  Description of Artificial Sequence: Synthetic oligonucleotide
  Target: PCSK9; (-) strand; PAM type: YTN; PAM sequence: CTT
cattccatacttctggcttc

SEQ ID NO: 19265 - DNA, 20 bp, Artificial Sequence
  Description of Artificial Sequence: Synthetic oligonucleotide
  Target: PCSK9; (-) strand; PAM type: YTN; PAM sequence: CTG
caacccttcattccatactt

SEQ ID NO: 19266 - DNA, 20 bp, Artificial Sequence
  Description of Artificial Sequence: Synthetic oligonucleotide
  Target: PCSK9; (-) strand; PAM type: YTN; PAM sequence: TTG
ggagagggcaccaccctgca

SEQ ID NO: 19267 - DNA, 20 bp, Artificial Sequence
  Description of Artificial Sequence: Synthetic oligonucleotide
  Target: PCSK9; (-) strand; PAM type: YTN; PAM sequence: TTT
gggagagggcaccaccctgc

SEQ ID NO: 19268 - DNA, 20 bp, Artificial Sequence
  Description of Artificial Sequence: Synthetic oligonucleotide
  Target: PCSK9; (-) strand; PAM type: YTN; PAM sequence: CTT
tgggagagggcaccaccctg

SEQ ID NO: 19269 - DNA, 20 bp, Artificial Sequence
  Description of Artificial Sequence: Synthetic oligonucleotide
  Target: PCSK9; (-) strand; PAM type: YTN; PAM sequence: CTA
gagctttgggagagggcacc

SEQ ID NO: 19270 - DNA, 20 bp, Artificial Sequence
  Description of Artificial Sequence: Synthetic oligonucleotide
  Target: PCSK9; (-) strand; PAM type: YTN; PAM sequence: CTC
ccctagagctttgggagagg

SEQ ID NO: 19271 - DNA, 20 bp, Artificial Sequence
  Description of Artificial Sequence: Synthetic oligonucleotide
  Target: PCSK9; (-) strand; PAM type: YTN; PAM sequence: TTC
ctcccctagagctttgggag

SEQ ID NO: 19272 - DNA, 20 bp, Artificial Sequence
  Description of Artificial Sequence: Synthetic oligonucleotide
  Target: PCSK9; (-) strand; PAM type: YTN; PAM sequence: CTG
gaagaagcaaggaatgttcc

SEQ ID NO: 19273 - DNA, 20 bp, Artificial Sequence
  Description of Artificial Sequence: Synthetic oligonucleotide
  Target: PCSK9; (-) strand; PAM type: YTN; PAM sequence: CTG
tgccgacataagccaaggaa

SEQ ID NO: 19274 - DNA, 20 bp, Artificial Sequence
  Description of Artificial Sequence: Synthetic oligonucleotide
  Target: PCSK9; (-) strand; PAM type: YTN; PAM sequence: TTA
gagctgtgccgacataagcc

SEQ ID NO: 19275 - DNA, 20 bp, Artificial Sequence
  Description of Artificial Sequence: Synthetic oligonucleotide
  Target: PCSK9; (-) strand; PAM type: YTN; PAM sequence: CTA
tgtaacaatggaggcgccga

SEQ ID NO: 19276 - DNA, 20 bp, Artificial Sequence
  Description of Artificial Sequence: Synthetic oligonucleotide
  Target: PCSK9; (-) strand; PAM type: YTN; PAM sequence: TTG
agacacagaaacacctatgt

SEQ ID NO: 19277 - DNA, 20 bp, Artificial Sequence
  Description of Artificial Sequence: Synthetic oligonucleotide
  Target: PCSK9; (-) strand; PAM type: YTN; PAM sequence: CTT
gagacacagaaacacctatg

SEQ ID NO: 19278 - DNA, 20 bp, Artificial Sequence
  Description of Artificial Sequence: Synthetic oligonucleotide
  Target: PCSK9; (-) strand; PAM type: YTN; PAM sequence: CTG
atatcagaagagaaagggga

SEQ ID NO: 19279 - DNA, 20 bp, Artificial Sequence
  Description of Artificial Sequence: Synthetic oligonucleotide
  Target: PCSK9; (-) strand; PAM type: YTN; PAM sequence: CTA
aatccaatgactgatatcag

SEQ ID NO: 19280 - DNA, 20 bp, Artificial Sequence
  Description of Artificial Sequence: Synthetic oligonucleotide
  Target: PCSK9; (-) strand; PAM type: YTN; PAM sequence: TTA
ggatggtccctaaatccaat

SEQ ID NO: 19281 - DNA, 20 bp, Artificial Sequence
  Description of Artificial Sequence: Synthetic oligonucleotide
  Target: PCSK9; (-) strand; PAM type: YTN; PAM sequence: TTT
aggatggtccctaaatccaa

SEQ ID NO: 19282 - DNA, 20 bp, Artificial Sequence
  Description of Artificial Sequence: Synthetic oligonucleotide
  Target: PCSK9; (-) strand; PAM type: YTN; PAM sequence: CTG
ggtttaggatggtccctaaa

SEQ ID NO: 19283 - DNA, 20 bp, Artificial Sequence
  Description of Artificial Sequence: Synthetic oligonucleotide
  Target: PCSK9; (-) strand; PAM type: YTN; PAM sequence: TTA
tcctgggtttaggatggtcc

SEQ ID NO: 19284 - DNA, 20 bp, Artificial Sequence
  Description of Artificial Sequence: Synthetic oligonucleotide
  Target: PCSK9; (-) strand; PAM type: YTN; PAM sequence: CTC
atgaggagattatcctgggt

SEQ ID NO: 19285 - DNA, 20 bp, Artificial Sequence
  Description of Artificial Sequence: Synthetic oligonucleotide
  Target: PCSK9; (-) strand; PAM type: YTN; PAM sequence: CTA
aggatctcatgaggagatta

SEQ ID NO: 19286 - DNA, 20 bp, Artificial Sequence
  Description of Artificial Sequence: Synthetic oligonucleotide
  Target: PCSK9; (-) strand; PAM type: YTN; PAM sequence: TTG
acctaaggatctcatgagga

SEQ ID NO: 19287 - DNA, 20 bp, Artificial Sequence
  Description of Artificial Sequence: Synthetic oligonucleotide
  Target: PCSK9; (-) strand; PAM type: YTN; PAM sequence: TTG
cagatgtaattgacctaagg

SEQ ID NO: 19288 - DNA, 20 bp, Artificial Sequence
  Description of Artificial Sequence: Synthetic oligonucleotide
  Target: PCSK9; (-) strand; PAM type: YTN; PAM sequence: TTT
gcagatgtaattgacctaag

SEQ ID NO: 19289 - DNA, 20 bp, Artificial Sequence
  Description of Artificial Sequence: Synthetic oligonucleotide
  Target: PCSK9; (-) strand; PAM type: YTN; PAM sequence: CTT
tgcagatgtaattgacctaa

SEQ ID NO: 19290 - DNA, 20 bp, Artificial Sequence
  Description of Artificial Sequence: Synthetic oligonucleotide
  Target: PCSK9; (-) strand; PAM type: YTN; PAM sequence: TTG
gaaatgagatctttgcagat

SEQ ID NO: 19291 - DNA, 20 bp, Artificial Sequence
  Description of Artificial Sequence: Synthetic oligonucleotide
  Target: PCSK9; (-) strand; PAM type: YTN; PAM sequence: TTT
ggaaatgagatctttgcaga

SEQ ID NO: 19292 - DNA, 20 bp, Artificial Sequence
  Description of Artificial Sequence: Synthetic oligonucleotide
  Target: PCSK9; (-) strand; PAM type: YTN; PAM sequence: TTA
tttggaaatgagatctttgc

SEQ ID NO: 19293 - DNA, 20 bp, Artificial Sequence
  Description of Artificial Sequence: Synthetic oligonucleotide
  Target: PCSK9; (-) strand; PAM type: YTN; PAM sequence: CTT
atttggaaatgagatctttg

SEQ ID NO: 19294 - DNA, 20 bp, Artificial Sequence
  Description of Artificial Sequence: Synthetic oligonucleotide
  Target: PCSK9; (-) strand; PAM type: YTN; PAM sequence: TTG
aatgtgaccttatttggaaa

SEQ ID NO: 19295 - DNA, 20 bp, Artificial Sequence
  Description of Artificial Sequence: Synthetic oligonucleotide
  Target: PCSK9; (-) strand; PAM type: YTN; PAM sequence: TTT
gaatgtgaccttatttggaa

SEQ ID NO: 19296 - DNA, 20 bp, Artificial Sequence
  Description of Artificial Sequence: Synthetic oligonucleotide
  Target: PCSK9; (-) strand; PAM type: YTN; PAM sequence: TTT
tgaatgtgaccttatttgga

SEQ ID NO: 19297 - DNA, 20 bp, Artificial Sequence
  Description of Artificial Sequence: Synthetic oligonucleotide
  Target: PCSK9; (-) strand; PAM type: YTN; PAM sequence: CTT
ttgaatgtgaccttatttgg

SEQ ID NO: 19298 - DNA, 20 bp, Artificial Sequence
  Description of Artificial Sequence: Synthetic oligonucleotide
  Target: PCSK9; (-) strand; PAM type: YTN; PAM sequence: CTG
gtacttttgaatgtgacctt

SEQ ID NO: 19299 - DNA, 20 bp, Artificial Sequence
  Description of Artificial Sequence: Synthetic oligonucleotide
  Target: PCSK9; (-) strand; PAM type: YTN; PAM sequence: CTA
acccctggtacttttgaatg

SEQ ID NO: 19300 - DNA, 20 bp, Artificial Sequence
  Description of Artificial Sequence: Synthetic oligonucleotide
  Target: PCSK9; (-) strand; PAM type: YTN; PAM sequence: CTA
agactaacccctggtacttt

SEQ ID NO: 19301 - DNA, 20 bp, Artificial Sequence
  Description of Artificial Sequence: Synthetic oligonucleotide
  Target: PCSK9; (-) strand; PAM type: YTN; PAM sequence: TTG
aatcgtgtcccccaaaaaga

SEQ ID NO: 19302 - DNA, 20 bp, Artificial Sequence
  Description of Artificial Sequence: Synthetic oligonucleotide
  Target: PCSK9; (-) strand; PAM type: YTN; PAM sequence: TTA
cccacggtagtgggttgaat

SEQ ID NO: 19303 - DNA, 20 bp, Artificial Sequence
  Description of Artificial Sequence: Synthetic oligonucleotide
  Target: PCSK9; (-) strand; PAM type: YTN; PAM sequence: CTG
ttacccacggtagtgggttg

SEQ ID NO: 19304 - DNA, 20 bp, Artificial Sequence
  Description of Artificial Sequence: Synthetic oligonucleotide
  Target: PCSK9; (-) strand; PAM type: YTN; PAM sequence: CTG
agggaaaaccactgttaccc

SEQ ID NO: 19305 - DNA, 20 bp, Artificial Sequence
  Description of Artificial Sequence: Synthetic oligonucleotide
  Target: PCSK9; (-) strand; PAM type: YTN; PAM sequence: TTC
tgagggaaaaccactgttac

SEQ ID NO: 19306 - DNA, 20 bp, Artificial Sequence
  Description of Artificial Sequence: Synthetic oligonucleotide
  Target: PCSK9; (-) strand; PAM type: YTN; PAM sequence: CTT
ctgagggaaaaccactgtta

SEQ ID NO: 19307 - DNA, 20 bp, Artificial Sequence
  Description of Artificial Sequence: Synthetic oligonucleotide
  Target: PCSK9; (-) strand; PAM type: YTN; PAM sequence: CTG
aaccaccaccttctgaggga

SEQ ID NO: 19308 - DNA, 20 bp, Artificial Sequence
  Description of Artificial Sequence: Synthetic oligonucleotide
  Target: PCSK9; (-) strand; PAM type: YTN; PAM sequence: CTC
ctgaaccaccaccttctgag

SEQ ID NO: 19309 - DNA, 20 bp, Artificial Sequence
  Description of Artificial Sequence: Synthetic oligonucleotide
  Target: PCSK9; (-) strand; PAM type: YTN; PAM sequence: CTC
ccactcctgaaccaccacct

SEQ ID NO: 19310 - DNA, 20 bp, Artificial Sequence
  Description of Artificial Sequence: Synthetic oligonucleotide
  Target: PCSK9; (-) strand; PAM type: YTN; PAM sequence: TTC
ctcccactcctgaaccacca

SEQ ID NO: 19311 - DNA, 20 bp, Artificial Sequence
  Description of Artificial Sequence: Synthetic oligonucleotide
  Target: PCSK9; (-) strand; PAM type: YTN; PAM sequence: CTT
cctcccactcctgaaccacc

SEQ ID NO: 19312 - DNA, 20 bp, Artificial Sequence
  Description of Artificial Sequence: Synthetic oligonucleotide
  Target: PCSK9; (-) strand; PAM type: YTN; PAM sequence: TTC
atcttcctcccactcctgaa

SEQ ID NO: 19313 - DNA, 20 bp, Artificial Sequence
  Description of Artificial Sequence: Synthetic oligonucleotide
  Target: PCSK9; (-) strand; PAM type: YTN; PAM sequence: TTG
aaaggatatacagtgaaaag

SEQ ID NO: 19314 - DNA, 20 bp, Artificial Sequence
  Description of Artificial Sequence: Synthetic oligonucleotide
  Target: PCSK9; (-) strand; PAM type: YTN; PAM sequence: TTT
gaaaggatatacagtgaaaa

SEQ ID NO: 19315 - DNA, 20 bp, Artificial Sequence
  Description of Artificial Sequence: Synthetic oligonucleotide
  Target: PCSK9; (-) strand; PAM type: YTN; PAM sequence: TTA
aaacgtgaatagtttgaaag

SEQ ID NO: 19316 - DNA, 20 bp, Artificial Sequence
  Description of Artificial Sequence: Synthetic oligonucleotide
  Target: PCSK9; (-) strand; PAM type: YTN; PAM sequence: TTT
aaaacgtgaatagtttgaaa

SEQ ID NO: 19317 - DNA, 20 bp, Artificial Sequence
  Description of Artificial Sequence: Synthetic oligonucleotide
  Target: PCSK9; (-) strand; PAM type: YTN; PAM sequence: TTT
taaaacgtgaatagtttgaa

SEQ ID NO: 19318 - DNA, 20 bp, Artificial Sequence
  Description of Artificial Sequence: Synthetic oligonucleotide
  Target: PCSK9; (-) strand; PAM type: YTN; PAM sequence: TTT
ttaaaacgtgaatagtttga

SEQ ID NO: 19319 - DNA, 20 bp, Artificial Sequence
  Description of Artificial Sequence: Synthetic oligonucleotide
  Target: PCSK9; (-) strand; PAM type: YTN; PAM sequence: TTT
tttaaaacgtgaatagtttg

SEQ ID NO: 19320 - DNA, 20 bp, Artificial Sequence
  Description of Artificial Sequence: Synthetic oligonucleotide
  Target: PCSK9; (-) strand; PAM type: YTN; PAM sequence: TTT
ttttaaaacgtgaatagttt

SEQ ID NO: 19321 - DNA, 20 bp, Artificial Sequence
  Description of Artificial Sequence: Synthetic oligonucleotide
  Target: PCSK9; (-) strand; PAM type: YTN; PAM sequence: TTT
tttttaaaacgtgaatagtt

SEQ ID NO: 19322 - DNA, 20 bp, Artificial Sequence
  Description of Artificial Sequence: Synthetic oligonucleotide
  Target: PCSK9; (-) strand; PAM type: YTN; PAM sequence: TTA
catgaaaatgttttttttaa

SEQ ID NO: 19323 - DNA, 20 bp, Artificial Sequence
  Description of Artificial Sequence: Synthetic oligonucleotide
  Target: PCSK9; (-) strand; PAM type: YTN; PAM sequence: TTT
acatgaaaatgtttttttta

SEQ ID NO: 19324 - DNA, 20 bp, Artificial Sequence
  Description of Artificial Sequence: Synthetic oligonucleotide
  Target: PCSK9; (-) strand; PAM type: YTN; PAM sequence: TTA
aatttacatgaaaatgtttt

SEQ ID NO: 19325 - DNA, 20 bp, Artificial Sequence
  Description of Artificial Sequence: Synthetic oligonucleotide
  Target: PCSK9; (-) strand; PAM type: YTN; PAM sequence: TTT
aaatttacatgaaaatgttt

SEQ ID NO: 19326 - DNA, 20 bp, Artificial Sequence
  Description of Artificial Sequence: Synthetic oligonucleotide
  Target: PCSK9; (-) strand; PAM type: YTN; PAM sequence: TTT
taaatttacatgaaaatgtt

SEQ ID NO: 19327 - DNA, 20 bp, Artificial Sequence
  Description of Artificial Sequence: Synthetic oligonucleotide
  Target: PCSK9; (-) strand; PAM type: YTN; PAM sequence: TTT
ttaaatttacatgaaaatgt

SEQ ID NO: 19328 - DNA, 20 bp, Artificial Sequence
  Description of Artificial Sequence: Synthetic oligonucleotide
  Target: PCSK9; (-) strand; PAM type: YTN; PAM sequence: TTT
tttaaatttacatgaaaatg

SEQ ID NO: 19329 - DNA, 20 bp, Artificial Sequence
  Description of Artificial Sequence: Synthetic oligonucleotide
  Target: PCSK9; (-) strand; PAM type: YTN; PAM sequence: TTT
ttttaaatttacatgaaaat

SEQ ID NO: 19330 - DNA, 20 bp, Artificial Sequence
  Description of Artificial Sequence: Synthetic oligonucleotide
  Target: PCSK9; (-) strand; PAM type: YTN; PAM sequence: TTC
aatttttttaaatttacatg

SEQ ID NO: 19331 - DNA, 20 bp, Artificial Sequence
  Description of Artificial Sequence: Synthetic oligonucleotide
  Target: PCSK9; (-) strand; PAM type: YTN; PAM sequence: TTG
tgtgaatgttcaattttttt

SEQ ID NO: 19332 - DNA, 20 bp, Artificial Sequence
  Description of Artificial Sequence: Synthetic oligonucleotide
  Target: PCSK9; (-) strand; PAM type: YTN; PAM sequence: TTT
gtgtgaatgttcaatttttt

SEQ ID NO: 19333 - DNA, 20 bp, Artificial Sequence
  Description of Artificial Sequence: Synthetic oligonucleotide
  Target: PCSK9; (-) strand; PAM type: YTN; PAM sequence: TTT
tgtgtgaatgttcaattttt

SEQ ID NO: 19334 - DNA, 20 bp, Artificial Sequence
  Description of Artificial Sequence: Synthetic oligonucleotide
  Target: PCSK9; (-) strand; PAM type: YTN; PAM sequence: TTT
ttgtgtgaatgttcaatttt

SEQ ID NO: 19335 - DNA, 20 bp, Artificial Sequence
  Description of Artificial Sequence: Synthetic oligonucleotide
  Target: PCSK9; (-) strand; PAM type: YTN; PAM sequence: CTT
tttgtgtgaatgttcaattt

SEQ ID NO: 19336 - DNA, 20 bp, Artificial Sequence
  Description of Artificial Sequence: Synthetic oligonucleotide
  Target: PCSK9; (-) strand; PAM type: YTN; PAM sequence: TTG
caagggagggggcatctttt

SEQ ID NO: 19337 - DNA, 20 bp, Artificial Sequence
  Description of Artificial Sequence: Synthetic oligonucleotide
  Target: PCSK9; (-) strand; PAM type: YTN; PAM sequence: TTT
gcaagggagggggcatcttt

SEQ ID NO: 19338 - DNA, 20 bp, Artificial Sequence
  Description of Artificial Sequence: Synthetic oligonucleotide
  Target: PCSK9; (-) strand; PAM type: YTN; PAM sequence: TTT
tgcaagggagggggcatctt

SEQ ID NO: 19339 - DNA, 20 bp, Artificial Sequence
  Description of Artificial Sequence: Synthetic oligonucleotide
  Target: PCSK9; (-) strand; PAM type: YTN; PAM sequence: TTT
ttgcaagggagggggcatct

SEQ ID NO: 19340 - DNA, 20 bp, Artificial Sequence
  Description of Artificial Sequence: Synthetic oligonucleotide
  Target: PCSK9; (-) strand; PAM type: YTN; PAM sequence: TTT
tttgcaagggagggggcatc

SEQ ID NO: 19341 - DNA, 20 bp, Artificial Sequence
  Description of Artificial Sequence: Synthetic oligonucleotide
  Target: PCSK9; (-) strand; PAM type: YTN; PAM sequence: CTT
ttttgcaagggagggggcat

SEQ ID NO: 19342 - DNA, 20 bp, Artificial Sequence
  Description of Artificial Sequence: Synthetic oligonucleotide
  Target: PCSK9; (-) strand; PAM type: YTN; PAM sequence: CTC
ttttttgcaagggagggggc

SEQ ID NO: 19343 - DNA, 20 bp, Artificial Sequence
  Description of Artificial Sequence: Synthetic oligonucleotide
  Target: PCSK9; (-) strand; PAM type: YTN; PAM sequence: TTG
aacgggcatactcttttttg

SEQ ID NO: 19344 - DNA, 20 bp, Artificial Sequence
  Description of Artificial Sequence: Synthetic oligonucleotide
  Target: PCSK9; (-) strand; PAM type: YTN; PAM sequence: TTT
gaacgggcatactctttttt

SEQ ID NO: 19345 - DNA, 20 bp, Artificial Sequence
  Description of Artificial Sequence: Synthetic oligonucleotide
  Target: PCSK9; (-) strand; PAM type: YTN; PAM sequence: TTT
tgaacgggcatactcttttt

SEQ ID NO: 19346 - DNA, 20 bp, Artificial Sequence
  Description of Artificial Sequence: Synthetic oligonucleotide
  Target: PCSK9; (-) strand; PAM type: YTN; PAM sequence: TTC
aacattttgaacgggcatac

SEQ ID NO: 19347 - DNA, 20 bp, Artificial Sequence
  Description of Artificial Sequence: Synthetic oligonucleotide
  Target: PCSK9; (-) strand; PAM type: YTN; PAM sequence: TTT
caacattttgaacgggcata

SEQ ID NO: 19348 - DNA, 20 bp, Artificial Sequence
  Description of Artificial Sequence: Synthetic oligonucleotide
  Target: PCSK9; (-) strand; PAM type: YTN; PAM sequence: CTG
tgagtgtacatttcaacatt

SEQ ID NO: 19349 - DNA, 20 bp, Artificial Sequence
  Description of Artificial Sequence: Synthetic oligonucleotide
  Target: PCSK9; (-) strand; PAM type: YTN; PAM sequence: TTG
ctgtgagtgtacatttcaac

SEQ ID NO: 19350 - DNA, 20 bp, Artificial Sequence
  Description of Artificial Sequence: Synthetic oligonucleotide
  Target: PCSK9; (-) strand; PAM type: YTN; PAM sequence: CTG
cagccaccattgctgtgagt

SEQ ID NO: 19351 - DNA, 20 bp, Artificial Sequence
  Description of Artificial Sequence: Synthetic oligonucleotide
  Target: PCSK9; (-) strand; PAM type: YTN; PAM sequence: TTG
gagtctgcagccaccattgc

SEQ ID NO: 19352 - DNA, 20 bp, Artificial Sequence
  Description of Artificial Sequence: Synthetic oligonucleotide
  Target: PCSK9; (-) strand; PAM type: YTN; PAM sequence: CTT
ggagtctgcagccaccattg

SEQ ID NO: 19353 - DNA, 20 bp, Artificial Sequence
  Description of Artificial Sequence: Synthetic oligonucleotide
  Target: PCSK9; (-) strand; PAM type: YTN; PAM sequence: CTC
agaaacttggagtctgcagc

SEQ ID NO: 19354 - DNA, 20 bp, Artificial Sequence
  Description of Artificial Sequence: Synthetic oligonucleotide
  Target: PCSK9; (-) strand; PAM type: YTN; PAM sequence: CTC
caacctcagaaacttggagt

SEQ ID NO: 19355 - DNA, 20 bp, Artificial Sequence
  Description of Artificial Sequence: Synthetic oligonucleotide
  Target: PCSK9; (-) strand; PAM type: YTN; PAM sequence: TTC
tccaacctcagaaacttgga

SEQ ID NO: 19356 - DNA, 20 bp, Artificial Sequence
  Description of Artificial Sequence: Synthetic oligonucleotide
  Target: PCSK9; (-) strand; PAM type: YTN; PAM sequence: CTT
ctccaacctcagaaacttgg

SEQ ID NO: 19357 - DNA, 20 bp, Artificial Sequence
  Description of Artificial Sequence: Synthetic oligonucleotide
  Target: PCSK9; (-) strand; PAM type: YTN; PAM sequence: CTA
ccttctccaacctcagaaac

SEQ ID NO: 19358 - DNA, 20 bp, Artificial Sequence
  Description of Artificial Sequence: Synthetic oligonucleotide
  Target: PCSK9; (-) strand; PAM type: YTN; PAM sequence: CTG
gctaccttctccaacctcag

SEQ ID NO: 19359 - DNA, 20 bp, Artificial Sequence
  Description of Artificial Sequence: Synthetic oligonucleotide
  Target: PCSK9; (-) strand; PAM type: YTN; PAM sequence: CTC
cctggctaccttctccaacc

SEQ ID NO: 19360 - DNA, 20 bp, Artificial Sequence
  Description of Artificial Sequence: Synthetic oligonucleotide
  Target: PCSK9; (-) strand; PAM type: YTN; PAM sequence: TTA
tgctccctggctaccttctc

SEQ ID NO: 19361 - DNA, 20 bp, Artificial Sequence
  Description of Artificial Sequence: Synthetic oligonucleotide
  Target: PCSK9; (-) strand; PAM type: YTN; PAM sequence: TTT
atgctccctggctaccttct

SEQ ID NO: 19362 - DNA, 20 bp, Artificial Sequence
  Description of Artificial Sequence: Synthetic oligonucleotide
  Target: PCSK9; (-) strand; PAM type: YTN; PAM sequence: TTT
tatgctccctggctaccttc

SEQ ID NO: 19363 - DNA, 20 bp, Artificial Sequence
  Description of Artificial Sequence: Synthetic oligonucleotide
  Target: PCSK9; (-) strand; PAM type: YTN; PAM sequence: CTT
ttatgctccctggctacctt

SEQ ID NO: 19364 - DNA, 20 bp, Artificial Sequence
  Description of Artificial Sequence: Synthetic oligonucleotide
  Target: PCSK9; (-) strand; PAM type: YTN; PAM sequence: CTC
acttttatgctccctggcta

SEQ ID NO: 19365 - DNA, 20 bp, Artificial Sequence
  Description of Artificial Sequence: Synthetic oligonucleotide
  Target: PCSK9; (-) strand; PAM type: YTN; PAM sequence: CTG
aatgagtagatagaactcac

SEQ ID NO: 19366 - DNA, 20 bp, Artificial Sequence
  Description of Artificial Sequence: Synthetic oligonucleotide
  Target: PCSK9; (-) strand; PAM type: YTN; PAM sequence: CTC
atagactgaatgagtagata

SEQ ID NO: 19367 - DNA, 20 bp, Artificial Sequence
  Description of Artificial Sequence: Synthetic oligonucleotide
  Target: PCSK9; (-) strand; PAM type: YTN; PAM sequence: TTC
ccctcatagactgaatgagt

SEQ ID NO: 19368 - DNA, 20 bp, Artificial Sequence
  Description of Artificial Sequence: Synthetic oligonucleotide
  Target: PCSK9; (-) strand; PAM type: YTN; PAM sequence: CTT
cccctcatagactgaatgag

SEQ ID NO: 19369 - DNA, 20 bp, Artificial Sequence
  Description of Artificial Sequence: Synthetic oligonucleotide
  Target: PCSK9; (-) strand; PAM type: YTN; PAM sequence: TTG
ccttcccctcatagactgaa

SEQ ID NO: 19370 - DNA, 20 bp, Artificial Sequence
  Description of Artificial Sequence: Synthetic oligonucleotide
  Target: PCSK9; (-) strand; PAM type: YTN; PAM sequence: CTA
gccattgccttcccctcata

SEQ ID NO: 19371 - DNA, 20 bp, Artificial Sequence
  Description of Artificial Sequence: Synthetic oligonucleotide
  Target: PCSK9; (-) strand; PAM type: YTN; PAM sequence: TTC
tagccattgccttcccctca

SEQ ID NO: 19372 - DNA, 20 bp, Artificial Sequence
  Description of Artificial Sequence: Synthetic oligonucleotide
  Target: PCSK9; (-) strand; PAM type: YTN; PAM sequence: TTT
ctagccattgccttcccctc

SEQ ID NO: 19373 - DNA, 20 bp, Artificial Sequence
  Description of Artificial Sequence: Synthetic oligonucleotide
  Target: PCSK9; (-) strand; PAM type: YTN; PAM sequence: TTT
tctagccattgccttcccct

SEQ ID NO: 19374 - DNA, 20 bp, Artificial Sequence
  Description of Artificial Sequence: Synthetic oligonucleotide
  Target: PCSK9; (-) strand; PAM type: YTN; PAM sequence: CTT
ttctagccattgccttcccc

SEQ ID NO: 19375 - DNA, 20 bp, Artificial Sequence
  Description of Artificial Sequence: Synthetic oligonucleotide
  Target: PCSK9; (-) strand; PAM type: YTN; PAM sequence: CTC
aaaatgcttttctagccatt

SEQ ID NO: 19376 - DNA, 20 bp, Artificial Sequence
  Description of Artificial Sequence: Synthetic oligonucleotide
  Target: PCSK9; (-) strand; PAM type: YTN; PAM sequence: CTG
tccctcaaaatgcttttcta

SEQ ID NO: 19377 - DNA, 20 bp, Artificial Sequence
  Description of Artificial Sequence: Synthetic oligonucleotide
  Target: PCSK9; (-) strand; PAM type: YTN; PAM sequence: TTA
ctgtccctcaaaatgctttt

SEQ ID NO: 19378 - DNA, 20 bp, Artificial Sequence
  Description of Artificial Sequence: Synthetic oligonucleotide
  Target: PCSK9; (-) strand; PAM type: YTN; PAM sequence: TTT
actgtccctcaaaatgcttt

SEQ ID NO: 19379 - DNA, 20 bp, Artificial Sequence
  Description of Artificial Sequence: Synthetic oligonucleotide
  Target: PCSK9; (-) strand; PAM type: YTN; PAM sequence: TTT
tactgtccctcaaaatgctt

SEQ ID NO: 19380 - DNA, 20 bp, Artificial Sequence
  Description of Artificial Sequence: Synthetic oligonucleotide
  Target: PCSK9; (-) strand; PAM type: YTN; PAM sequence: CTT
ttactgtccctcaaaatgct

SEQ ID NO: 19381 - DNA, 20 bp, Artificial Sequence
  Description of Artificial Sequence: Synthetic oligonucleotide
  Target: PCSK9; (-) strand; PAM type: YTN; PAM sequence: CTA
aaaatgccacttttactgtc

SEQ ID NO: 19382 - DNA, 20 bp, Artificial Sequence
  Description of Artificial Sequence: Synthetic oligonucleotide
  Target: PCSK9; (-) strand; PAM type: YTN; PAM sequence: CTC
taaaaatgccacttttactg

SEQ ID NO: 19383 - DNA, 20 bp, Artificial Sequence
  Description of Artificial Sequence: Synthetic oligonucleotide
  Target: PCSK9; (-) strand; PAM type: YTN; PAM sequence: CTC
cctctaaaaatgccactttt

SEQ ID NO: 19384 - DNA, 20 bp, Artificial Sequence
  Description of Artificial Sequence: Synthetic oligonucleotide
  Target: PCSK9; (-) strand; PAM type: YTN; PAM sequence: TTC
ctccctctaaaaatgccact

SEQ ID NO: 19385 - DNA, 20 bp, Artificial Sequence
  Description of Artificial Sequence: Synthetic oligonucleotide
  Target: PCSK9; (-) strand; PAM type: YTN; PAM sequence: CTT
cctccctctaaaaatgccac

SEQ ID NO: 19386 - DNA, 20 bp, Artificial Sequence
  Description of Artificial Sequence: Synthetic oligonucleotide
  Target: PCSK9; (-) strand; PAM type: YTN; PAM sequence: CTC
aaggcttcctccctctaaaa

SEQ ID NO: 19387 - DNA, 20 bp, Artificial Sequence
  Description of Artificial Sequence: Synthetic oligonucleotide
  Target: PCSK9; (-) strand; PAM type: YTN; PAM sequence: TTC
accccacaagcatcctcaag

SEQ ID NO: 19388 - DNA, 20 bp, Artificial Sequence
  Description of Artificial Sequence: Synthetic oligonucleotide
  Target: PCSK9; (-) strand; PAM type: YTN; PAM sequence: CTT
caccccacaagcatcctcaa

SEQ ID NO: 19389 - DNA, 20 bp, Artificial Sequence
  Description of Artificial Sequence: Synthetic oligonucleotide
  Target: PCSK9; (-) strand; PAM type: YTN; PAM sequence: TTC
ccttcaccccacaagcatcc

SEQ ID NO: 19390 - DNA, 20 bp, Artificial Sequence
  Description of Artificial Sequence: Synthetic oligonucleotide
  Target: PCSK9; (-) strand; PAM type: YTN; PAM sequence: TTT
cccttcaccccacaagcatc

SEQ ID NO: 19391 - DNA, 20 bp, Artificial Sequence
  Description of Artificial Sequence: Synthetic oligonucleotide
  Target: PCSK9; (-) strand; PAM type: YTN; PAM sequence: CTT
tcccttcaccccacaagcat

SEQ ID NO: 19392 - DNA, 20 bp, Artificial Sequence
  Description of Artificial Sequence: Synthetic oligonucleotide
  Target: PCSK9; (-) strand; PAM type: YTN; PAM sequence: TTC
tttcccttcaccccacaagc

SEQ ID NO: 19393 - DNA, 20 bp, Artificial Sequence
  Description of Artificial Sequence: Synthetic oligonucleotide
  Target: PCSK9; (-) strand; PAM type: YTN; PAM sequence: TTA
ttctttcccttcaccccaca

SEQ ID NO: 19394 - DNA, 20 bp, Artificial Sequence
  Description of Artificial Sequence: Synthetic oligonucleotide
  Target: PCSK9; (-) strand; PAM type: YTN; PAM sequence: CTG
agttattctttcccttcacc

SEQ ID NO: 19395 - DNA, 20 bp, Artificial Sequence
  Description of Artificial Sequence: Synthetic oligonucleotide
  Target: PCSK9; (-) strand; PAM type: YTN; PAM sequence: TTC
ctgagttattctttcccttc

SEQ ID NO: 19396 - DNA, 20 bp, Artificial Sequence
  Description of Artificial Sequence: Synthetic oligonucleotide
  Target: PCSK9; (-) strand; PAM type: YTN; PAM sequence: CTT
cctgagttattctttccctt

SEQ ID NO: 19397 - DNA, 20 bp, Artificial Sequence
  Description of Artificial Sequence: Synthetic oligonucleotide
  Target: PCSK9; (-) strand; PAM type: YTN; PAM sequence: CTC
ttcctgagttattctttccc

SEQ ID NO: 19398 - DNA, 20 bp, Artificial Sequence
  Description of Artificial Sequence: Synthetic oligonucleotide
  Target: PCSK9; (-) strand; PAM type: YTN; PAM sequence: CTA
aatgcctcttcctgagttat

SEQ ID NO: 19399 - DNA, 20 bp, Artificial Sequence
  Description of Artificial Sequence: Synthetic oligonucleotide
  Target: PCSK9; (-) strand; PAM type: YTN; PAM sequence: TTA
tccctaaatgcctcttcctg

SEQ ID NO: 19400 - DNA, 20 bp, Artificial Sequence
  Description of Artificial Sequence: Synthetic oligonucleotide
  Target: PCSK9; (-) strand; PAM type: YTN; PAM sequence: CTT
atccctaaatgcctcttcct

SEQ ID NO: 19401 - DNA, 20 bp, Artificial Sequence
  Description of Artificial Sequence: Synthetic oligonucleotide
  Target: PCSK9; (-) strand; PAM type: YTN; PAM sequence: CTC
ttatccctaaatgcctcttc

SEQ ID NO: 19402 - DNA, 20 bp, Artificial Sequence
  Description of Artificial Sequence: Synthetic oligonucleotide
  Target: PCSK9; (-) strand; PAM type: YTN; PAM sequence: CTC
ctcttatccctaaatgcctc

SEQ ID NO: 19403 - DNA, 20 bp, Artificial Sequence
  Description of Artificial Sequence: Synthetic oligonucleotide
  Target: PCSK9; (-) strand; PAM type: YTN; PAM sequence: CTC
ctcctcttatccctaaatgc

SEQ ID NO: 19404 - DNA, 20 bp, Artificial Sequence
  Description of Artificial Sequence: Synthetic oligonucleotide
  Target: PCSK9; (-) strand; PAM type: YTN; PAM sequence: CTC
tcctcctcttatccctaaat

SEQ ID NO: 19405 - DNA, 20 bp, Artificial Sequence
  Description of Artificial Sequence: Synthetic oligonucleotide
  Target: PCSK9; (-) strand; PAM type: YTN; PAM sequence: CTC
ctctcctcctcttatcccta

SEQ ID NO: 19406 - DNA, 20 bp, Artificial Sequence
  Description of Artificial Sequence: Synthetic oligonucleotide
  Target: PCSK9; (-) strand; PAM type: YTN; PAM sequence: CTA
tctcctctcctcctcttatc

SEQ ID NO: 19407 - DNA, 20 bp, Artificial Sequence
  Description of Artificial Sequence: Synthetic oligonucleotide
  Target: PCSK9; (-) strand; PAM type: YTN; PAM sequence: CTC
cactatctcctctcctcctc

SEQ ID NO: 19408 - DNA, 20 bp, Artificial Sequence
  Description of Artificial Sequence: Synthetic oligonucleotide
  Target: PCSK9; (-) strand; PAM type: YTN; PAM sequence: CTA
cctccactatctcctctcct

SEQ ID NO: 19409 - DNA, 20 bp, Artificial Sequence
  Description of Artificial Sequence: Synthetic oligonucleotide
  Target: PCSK9; (-) strand; PAM type: YTN; PAM sequence: CTC
cgcagggatcacctacctcc

SEQ ID NO: 19410 - DNA, 20 bp, Artificial Sequence
  Description of Artificial Sequence: Synthetic oligonucleotide
  Target: PCSK9; (-) strand; PAM type: YTN; PAM sequence: CTG
gcctccgcagggatcaccta

SEQ ID NO: 19411 - DNA, 20 bp, Artificial Sequence
  Description of Artificial Sequence: Synthetic oligonucleotide
  Target: PCSK9; (-) strand; PAM type: YTN; PAM sequence: CTG
ccccaatctggcctccgcag

SEQ ID NO: 19412 - DNA, 20 bp, Artificial Sequence
  Description of Artificial Sequence: Synthetic oligonucleotide
  Target: PCSK9; (-) strand; PAM type: YTN; PAM sequence: CTC
ccctgccccaatctggcctc

SEQ ID NO: 19413 - DNA, 20 bp, Artificial Sequence
  Description of Artificial Sequence: Synthetic oligonucleotide
  Target: PCSK9; (-) strand; PAM type: YTN; PAM sequence: CTG
acactcccctgccccaatct

SEQ ID NO: 19414 - DNA, 20 bp, Artificial Sequence
  Description of Artificial Sequence: Synthetic oligonucleotide
  Target: PCSK9; (-) strand; PAM type: YTN; PAM sequence: CTC
agctgacactcccctgcccc

SEQ ID NO: 19415 - DNA, 20 bp, Artificial Sequence
  Description of Artificial Sequence: Synthetic oligonucleotide
  Target: PCSK9; (-) strand; PAM type: YTN; PAM sequence: TTA
tactcagctgacactcccct

SEQ ID NO: 19416 - DNA, 20 bp, Artificial Sequence
  Description of Artificial Sequence: Synthetic oligonucleotide
  Target: PCSK9; (-) strand; PAM type: YTN; PAM sequence: CTT
atactcagctgacactcccc

SEQ ID NO: 19417 - DNA, 20 bp, Artificial Sequence
  Description of Artificial Sequence: Synthetic oligonucleotide
  Target: PCSK9; (-) strand; PAM type: YTN; PAM sequence: CTC
ttatactcagctgacactcc

SEQ ID NO: 19418 - DNA, 20 bp, Artificial Sequence
  Description of Artificial Sequence: Synthetic oligonucleotide
  Target: PCSK9; (-) strand; PAM type: YTN; PAM sequence: TTC
agggcagaggggaccatcct

SEQ ID NO: 19419 - DNA, 20 bp, Artificial Sequence
  Description of Artificial Sequence: Synthetic oligonucleotide
  Target: PCSK9; (-) strand; PAM type: YTN; PAM sequence: CTT
cagggcagaggggaccatcc

SEQ ID NO: 19420 - DNA, 20 bp, Artificial Sequence
  Description of Artificial Sequence: Synthetic oligonucleotide
  Target: PCSK9; (-) strand; PAM type: YTN; PAM sequence: CTC
cttcagggcagaggggacca

SEQ ID NO: 19421 - DNA, 20 bp, Artificial Sequence
  Description of Artificial Sequence: Synthetic oligonucleotide
  Target: PCSK9; (-) strand; PAM type: YTN; PAM sequence: TTC
ctccttcagggcagagggga

SEQ ID NO: 19422 - DNA, 20 bp, Artificial Sequence
  Description of Artificial Sequence: Synthetic oligonucleotide
  Target: PCSK9; (-) strand; PAM type: YTN; PAM sequence: CTT
cctccttcagggcagagggg

SEQ ID NO: 19423 - DNA, 20 bp, Artificial Sequence
  Description of Artificial Sequence: Synthetic oligonucleotide
  Target: PCSK9; (-) strand; PAM type: YTN; PAM sequence: CTG
ccttcctccttcagggcaga

SEQ ID NO: 19424 - DNA, 20 bp, Artificial Sequence
  Description of Artificial Sequence: Synthetic oligonucleotide
  Target: PCSK9; (-) strand; PAM type: YTN; PAM sequence: CTC
ctgccttcctccttcagggc

SEQ ID NO: 19425 - DNA, 20 bp, Artificial Sequence
  Description of Artificial Sequence: Synthetic oligonucleotide
  Target: PCSK9; (-) strand; PAM type: YTN; PAM sequence: TTC
ccctcctgccttcctccttc

SEQ ID NO: 19426 - DNA, 20 bp, Artificial Sequence
  Description of Artificial Sequence: Synthetic oligonucleotide
  Target: PCSK9; (-) strand; PAM type: YTN; PAM sequence: TTT
cccctcctgccttcctcctt

SEQ ID NO: 19427 - DNA, 20 bp, Artificial Sequence
  Description of Artificial Sequence: Synthetic oligonucleotide
  Target: PCSK9; (-) strand; PAM type: YTN; PAM sequence: TTT
tcccctcctgccttcctcct

SEQ ID NO: 19428 - DNA, 20 bp, Artificial Sequence
  Description of Artificial Sequence: Synthetic oligonucleotide
  Target: PCSK9; (-) strand; PAM type: YTN; PAM sequence: CTT
ttcccctcctgccttcctcc

SEQ ID NO: 19429 - DNA, 20 bp, Artificial Sequence
  Description of Artificial Sequence: Synthetic oligonucleotide
  Target: PCSK9; (-) strand; PAM type: YTN; PAM sequence: CTG
ggtcaacacccatccttttc

SEQ ID NO: 19430 - DNA, 20 bp, Artificial Sequence
  Description of Artificial Sequence: Synthetic oligonucleotide
  Target: PCSK9; (-) strand; PAM type: YTN; PAM sequence: TTC
tgggtcaacacccatccttt

SEQ ID NO: 19431 - DNA, 20 bp, Artificial Sequence
  Description of Artificial Sequence: Synthetic oligonucleotide
  Target: PCSK9; (-) strand; PAM type: YTN; PAM sequence: TTT
ctgggtcaacacccatcctt

SEQ ID NO: 19432 - DNA, 20 bp, Artificial Sequence
  Description of Artificial Sequence: Synthetic oligonucleotide
  Target: PCSK9; (-) strand; PAM type: YTN; PAM sequence: CTT
tctgggtcaacacccatcct

SEQ ID NO: 19433 - DNA, 20 bp, Artificial Sequence
  Description of Artificial Sequence: Synthetic oligonucleotide
  Target: PCSK9; (-) strand; PAM type: YTN; PAM sequence: CTC
caccacaagtgctttctggg

SEQ ID NO: 19434 - DNA, 20 bp, Artificial Sequence
  Description of Artificial Sequence: Synthetic oligonucleotide
  Target: PCSK9; (-) strand; PAM type: YTN; PAM sequence: CTC
ccctccaccacaagtgcttt

SEQ ID NO: 19435 - DNA, 20 bp, Artificial Sequence
  Description of Artificial Sequence: Synthetic oligonucleotide
  Target: PCSK9; (-) strand; PAM type: YTN; PAM sequence: CTG
gggcctcccctccaccacaa

SEQ ID NO: 19436 - DNA, 20 bp, Artificial Sequence
  Description of Artificial Sequence: Synthetic oligonucleotide
  Target: PCSK9; (-) strand; PAM type: YTN; PAM sequence: TTC
tggggcctcccctccaccac

SEQ ID NO: 19437 - DNA, 20 bp, Artificial Sequence
  Description of Artificial Sequence: Synthetic oligonucleotide
  Target: PCSK9; (-) strand; PAM type: YTN; PAM sequence: CTT
ctggggcctcccctccacca

SEQ ID NO: 19438 - DNA, 20 bp, Artificial Sequence
  Description of Artificial Sequence: Synthetic oligonucleotide
  Target: PCSK9; (-) strand; PAM type: YTN; PAM sequence: CTC
ttctggggcctcccctccac

SEQ ID NO: 19439 - DNA, 20 bp, Artificial Sequence
  Description of Artificial Sequence: Synthetic oligonucleotide
  Target: PCSK9; (-) strand; PAM type: YTN; PAM sequence: CTG
agaggtaccagcaatcaggg

SEQ ID NO: 19440 - DNA, 20 bp, Artificial Sequence
  Description of Artificial Sequence: Synthetic oligonucleotide
  Target: PCSK9; (-) strand; PAM type: YTN; PAM sequence: CTC
ccctgagaggtaccagcaat

SEQ ID NO: 19441 - DNA, 20 bp, Artificial Sequence
  Description of Artificial Sequence: Synthetic oligonucleotide
  Target: PCSK9; (-) strand; PAM type: YTN; PAM sequence: CTG
gccagcaaataagcagccag

SEQ ID NO: 19442 - DNA, 20 bp, Artificial Sequence
  Description of Artificial Sequence: Synthetic oligonucleotide
  Target: PCSK9; (-) strand; PAM type: YTN; PAM sequence: TTC
ccccacaccctggccagcaa

SEQ ID NO: 19443 - DNA, 20 bp, Artificial Sequence
  Description of Artificial Sequence: Synthetic oligonucleotide
  Target: PCSK9; (-) strand; PAM type: YTN; PAM sequence: CTC
aaatgggttcccccacaccc

SEQ ID NO: 19444 - DNA, 20 bp, Artificial Sequence
  Description of Artificial Sequence: Synthetic oligonucleotide
  Target: PCSK9; (-) strand; PAM type: YTN; PAM sequence: TTC
tcaaatgggttcccccacac

SEQ ID NO: 19445 - DNA, 20 bp, Artificial Sequence
  Description of Artificial Sequence: Synthetic oligonucleotide
  Target: PCSK9; (-) strand; PAM type: YTN; PAM sequence: CTT
ctcaaatgggttcccccaca

SEQ ID NO: 19446 - DNA, 20 bp, Artificial Sequence
  Description of Artificial Sequence: Synthetic oligonucleotide
  Target: PCSK9; (-) strand; PAM type: YTN; PAM sequence: CTC
ttctcaaatgggttccccca

SEQ ID NO: 19447 - DNA, 20 bp, Artificial Sequence
  Description of Artificial Sequence: Synthetic oligonucleotide
  Target: PCSK9; (-) strand; PAM type: YTN; PAM sequence: CTC
cctcttctcaaatgggttcc

SEQ ID NO: 19448 - DNA, 20 bp, Artificial Sequence
  Description of Artificial Sequence: Synthetic oligonucleotide
  Target: PCSK9; (-) strand; PAM type: YTN; PAM sequence: TTC
tccctcttctcaaatgggtt

SEQ ID NO: 19449 - DNA, 20 bp, Artificial Sequence
  Description of Artificial Sequence: Synthetic oligonucleotide
  Target: PCSK9; (-) strand; PAM type: YTN; PAM sequence: CTT
ctccctcttctcaaatgggt

SEQ ID NO: 19450 - DNA, 20 bp, Artificial Sequence
  Description of Artificial Sequence: Synthetic oligonucleotide
  Target: PCSK9; (-) strand; PAM type: YTN; PAM sequence: TTG
tgtcaccttctccctcttct

SEQ ID NO: 19451 - DNA, 20 bp, Artificial Sequence
  Description of Artificial Sequence: Synthetic oligonucleotide
  Target: PCSK9; (-) strand; PAM type: YTN; PAM sequence: TTG
cccaaaggaattgtgtcacc

SEQ ID NO: 19452 - DNA, 20 bp, Artificial Sequence
  Description of Artificial Sequence: Synthetic oligonucleotide
  Target: PCSK9; (-) strand; PAM type: YTN; PAM sequence: CTC
ccataagttgcccaaaggaa

SEQ ID NO: 19453 - DNA, 20 bp, Artificial Sequence
  Description of Artificial Sequence: Synthetic oligonucleotide
  Target: PCSK9; (-) strand; PAM type: YTN; PAM sequence: TTA
cccctcccataagttgccca

SEQ ID NO: 19454 - DNA, 20 bp, Artificial Sequence
  Description of Artificial Sequence: Synthetic oligonucleotide
  Target: PCSK9; (-) strand; PAM type: YTN; PAM sequence: CTC
accaattacccctcccataa

SEQ ID NO: 19455 - DNA, 20 bp, Artificial Sequence
  Description of Artificial Sequence: Synthetic oligonucleotide
  Target: PCSK9; (-) strand; PAM type: YTN; PAM sequence: TTC
atccctcaccaattacccct

SEQ ID NO: 19456 - DNA, 20 bp, Artificial Sequence
  Description of Artificial Sequence: Synthetic oligonucleotide
  Target: PCSK9; (-) strand; PAM type: YTN; PAM sequence: TTT
catccctcaccaattacccc

SEQ ID NO: 19457 - DNA, 20 bp, Artificial Sequence
  Description of Artificial Sequence: Synthetic oligonucleotide
  Target: PCSK9; (-) strand; PAM type: YTN; PAM sequence: CTT
tcatccctcaccaattaccc

SEQ ID NO: 19458 - DNA, 20 bp, Artificial Sequence
  Description of Artificial Sequence: Synthetic oligonucleotide
  Target: PCSK9; (-) strand; PAM type: YTN; PAM sequence: TTG
gcagggctttcatccctcac

SEQ ID NO: 19459 - DNA, 20 bp, Artificial Sequence
  Description of Artificial Sequence: Synthetic oligonucleotide
  Target: PCSK9; (-) strand; PAM type: YTN; PAM sequence: CTT
ggcagggctttcatccctca

SEQ ID NO: 19460 - DNA, 20 bp, Artificial Sequence
  Description of Artificial Sequence: Synthetic oligonucleotide
  Target: PCSK9; (-) strand; PAM type: YTN; PAM sequence: CTG
ccacttggcagggctttcat

SEQ ID NO: 19461 - DNA, 20 bp, Artificial Sequence
  Description of Artificial Sequence: Synthetic oligonucleotide
  Target: PCSK9; (-) strand; PAM type: YTN; PAM sequence: CTC
ctgccacttggcagggcttt

SEQ ID NO: 19462 - DNA, 20 bp, Artificial Sequence
  Description of Artificial Sequence: Synthetic oligonucleotide
  Target: PCSK9; (-) strand; PAM type: YTN; PAM sequence: CTG
ggcctcctgccacttggcag

SEQ ID NO: 19463 - DNA, 20 bp, Artificial Sequence
  Description of Artificial Sequence: Synthetic oligonucleotide
  Target: PCSK9; (-) strand; PAM type: YTN; PAM sequence: TTA
tgaggggcagccccagctgg

SEQ ID NO: 19464 - DNA, 20 bp, Artificial Sequence
  Description of Artificial Sequence: Synthetic oligonucleotide
  Target: PCSK9; (-) strand; PAM type: YTN; PAM sequence: CTT
atgaggggcagccccagctg

SEQ ID NO: 19465 - DNA, 20 bp, Artificial Sequence
  Description of Artificial Sequence: Synthetic oligonucleotide
  Target: PCSK9; (-) strand; PAM type: YTN; PAM sequence: CTC
ttatgaggggcagccccagc

SEQ ID NO: 19466 - DNA, 20 bp, Artificial Sequence
  Description of Artificial Sequence: Synthetic oligonucleotide
  Target: PCSK9; (-) strand; PAM type: YTN; PAM sequence: CTG
cactcttatgaggggcagcc

SEQ ID NO: 19467 - DNA, 20 bp, Artificial Sequence
  Description of Artificial Sequence: Synthetic oligonucleotide
  Target: PCSK9; (-) strand; PAM type: YTN; PAM sequence: CTC
cactgcactcttatgagggg

SEQ ID NO: 19468 - DNA, 20 bp, Artificial Sequence
  Description of Artificial Sequence: Synthetic oligonucleotide
  Target: PCSK9; (-) strand; PAM type: YTN; PAM sequence: CTC
atcccatatcctccactgca

SEQ ID NO: 19469 - DNA, 20 bp, Artificial Sequence
  Description of Artificial Sequence: Synthetic oligonucleotide
  Target: PCSK9; (-) strand; PAM type: YTN; PAM sequence: TTC
tcatcccatatcctccactg

SEQ ID NO: 19470 - DNA, 20 bp, Artificial Sequence
  Description of Artificial Sequence: Synthetic oligonucleotide
  Target: PCSK9; (-) strand; PAM type: YTN; PAM sequence: CTT
ctcatcccatatcctccact

SEQ ID NO: 19471 - DNA, 20 bp, Artificial Sequence
  Description of Artificial Sequence: Synthetic oligonucleotide
  Target: PCSK9; (-) strand; PAM type: YTN; PAM sequence: CTG
cgacagatggaaccagaggg

SEQ ID NO: 19472 - DNA, 20 bp, Artificial Sequence
  Description of Artificial Sequence: Synthetic oligonucleotide
  Target: PCSK9; (-) strand; PAM type: YTN; PAM sequence: CTC
tgcgacagatggaaccagag

SEQ ID NO: 19473 - DNA, 20 bp, Artificial Sequence
  Description of Artificial Sequence: Synthetic oligonucleotide
  Target: PCSK9; (-) strand; PAM type: YTN; PAM sequence: CTG
ggctctgcgacagatggaac

SEQ ID NO: 19474 - DNA, 20 bp, Artificial Sequence
  Description of Artificial Sequence: Synthetic oligonucleotide
  Target: PCSK9; (-) strand; PAM type: YTN; PAM sequence: CTG
agggaggtgggggaggaagg

SEQ ID NO: 19475 - DNA, 20 bp, Artificial Sequence
  Description of Artificial Sequence: Synthetic oligonucleotide
  Target: PCSK9; (-) strand; PAM type: YTN; PAM sequence: TTC
tgagggaggtgggggaggaa

SEQ ID NO: 19476 - DNA, 20 bp, Artificial Sequence
  Description of Artificial Sequence: Synthetic oligonucleotide
  Target: PCSK9; (-) strand; PAM type: YTN; PAM sequence: CTG
tccagcatgcagtgggtgtg

SEQ ID NO: 19477 - DNA, 20 bp, Artificial Sequence
  Description of Artificial Sequence: Synthetic oligonucleotide
  Target: PCSK9; (-) strand; PAM type: YTN; PAM sequence: CTG
ctgtccagcatgcagtgggt

SEQ ID NO: 19478 - DNA, 20 bp, Artificial Sequence
  Description of Artificial Sequence: Synthetic oligonucleotide
  Target: PCSK9; (-) strand; PAM type: YTN; PAM sequence: CTG
tgcacagagggacatggatg

SEQ ID NO: 19479 - DNA, 20 bp, Artificial Sequence
  Description of Artificial Sequence: Synthetic oligonucleotide
  Target: PCSK9; (-) strand; PAM type: YTN; PAM sequence: TTA
ccgtgcacccagagaatgat

SEQ ID NO: 19480 - DNA, 20 bp, Artificial Sequence
  Description of Artificial Sequence: Synthetic oligonucleotide
  Target: PCSK9; (-) strand; PAM type: YTN; PAM sequence: CTA
ccggggtcgttaccgtgcac

SEQ ID NO: 19481 - DNA, 20 bp, Artificial Sequence
  Description of Artificial Sequence: Synthetic oligonucleotide
  Target: PCSK9; (-) strand; PAM type: YTN; PAM sequence: CTC
acctaccggggtcgttaccg

SEQ ID NO: 19482 - DNA, 20 bp, Artificial Sequence
  Description of Artificial Sequence: Synthetic oligonucleotide
  Target: PCSK9; (-) strand; PAM type: YTN; PAM sequence: CTC
tcacctaccggggtcgttac

SEQ ID NO: 19483 - DNA, 20 bp, Artificial Sequence
  Description of Artificial Sequence: Synthetic oligonucleotide
  Target: PCSK9; (-) strand; PAM type: YTN; PAM sequence: TTG
gcctctcacctaccggggtc

SEQ ID NO: 19484 - DNA, 20 bp, Artificial Sequence
  Description of Artificial Sequence: Synthetic oligonucleotide
  Target: PCSK9; (-) strand; PAM type: YTN; PAM sequence: CTT
ggcctctcacctaccggggt

SEQ ID NO: 19485 - DNA, 20 bp, Artificial Sequence
  Description of Artificial Sequence: Synthetic oligonucleotide
  Target: PCSK9; (-) strand; PAM type: YTN; PAM sequence: TTG
ggaccttggcctctcaccta

SEQ ID NO: 19486 - DNA, 20 bp, Artificial Sequence
  Description of Artificial Sequence: Synthetic oligonucleotide
  Target: PCSK9; (-) strand; PAM type: YTN; PAM sequence: TTT
gggaccttggcctctcacct

SEQ ID NO: 19487 - DNA, 20 bp, Artificial Sequence
  Description of Artificial Sequence: Synthetic oligonucleotide
  Target: PCSK9; (-) strand; PAM type: YTN; PAM sequence: CTT
tgggaccttggcctctcacc

SEQ ID NO: 19488 - DNA, 20 bp, Artificial Sequence
  Description of Artificial Sequence: Synthetic oligonucleotide
  Target: PCSK9; (-) strand; PAM type: YTN; PAM sequence: CTC
ccctttgggaccttggcctc

SEQ ID NO: 19489 - DNA, 20 bp, Artificial Sequence
  Description of Artificial Sequence: Synthetic oligonucleotide
  Target: PCSK9; (-) strand; PAM type: YTN; PAM sequence: CTG
ctcccctttgggaccttggc

SEQ ID NO: 19490 - DNA, 20 bp, Artificial Sequence
  Description of Artificial Sequence: Synthetic oligonucleotide
  Target: PCSK9; (-) strand; PAM type: YTN; PAM sequence: CTG
ctgctcccctttgggacctt

SEQ ID NO: 19491 - DNA, 20 bp, Artificial Sequence
  Description of Artificial Sequence: Synthetic oligonucleotide
  Target: PCSK9; (-) strand; PAM type: YTN; PAM sequence: TTC
cctgctgctcccctttggga

SEQ ID NO: 19492 - DNA, 20 bp, Artificial Sequence
  Description of Artificial Sequence: Synthetic oligonucleotide
  Target: PCSK9; (-) strand; PAM type: YTN; PAM sequence: TTT
ccctgctgctcccctttggg

SEQ ID NO: 19493 - DNA, 20 bp, Artificial Sequence
  Description of Artificial Sequence: Synthetic oligonucleotide
  Target: PCSK9; (-) strand; PAM type: YTN; PAM sequence: CTT
tccctgctgctcccctttgg

SEQ ID NO: 19494 - DNA, 20 bp, Artificial Sequence
  Description of Artificial Sequence: Synthetic oligonucleotide
  Target: PCSK9; (-) strand; PAM type: YTN; PAM sequence: CTA
actttccctgctgctcccct

SEQ ID NO: 19495 - DNA, 20 bp, Artificial Sequence
  Description of Artificial Sequence: Synthetic oligonucleotide
  Target: PCSK9; (-) strand; PAM type: YTN; PAM sequence: CTG
gagcaagaatagatgggagc

SEQ ID NO: 19496 - DNA, 20 bp, Artificial Sequence
  Description of Artificial Sequence: Synthetic oligonucleotide
  Target: PCSK9; (-) strand; PAM type: YTN; PAM sequence: CTC
ccctggagcaagaatagatg

SEQ ID NO: 19497 - DNA, 20 bp, Artificial Sequence
  Description of Artificial Sequence: Synthetic oligonucleotide
  Target: PCSK9; (-) strand; PAM type: YTN; PAM sequence: CTC
atcaaaggcctcccctggag

SEQ ID NO: 19498 - DNA, 20 bp, Artificial Sequence
  Description of Artificial Sequence: Synthetic oligonucleotide
  Target: PCSK9; (-) strand; PAM type: YTN; PAM sequence: TTC
ctcatcaaaggcctcccctg

SEQ ID NO: 19499 - DNA, 20 bp, Artificial Sequence
  Description of Artificial Sequence: Synthetic oligonucleotide
  Target: PCSK9; (-) strand; PAM type: YTN; PAM sequence: CTT
cctcatcaaaggcctcccct

SEQ ID NO: 19500 - DNA, 20 bp, Artificial Sequence
  Description of Artificial Sequence: Synthetic oligonucleotide
  Target: PCSK9; (-) strand; PAM type: YTN; PAM sequence: TTG
gcagcttcctcatcaaaggc

SEQ ID NO: 19501 - DNA, 20 bp, Artificial Sequence
  Description of Artificial Sequence: Synthetic oligonucleotide
  Target: PCSK9; (-) strand; PAM type: YTN; PAM sequence: TTT
ggcagcttcctcatcaaagg

SEQ ID NO: 19502 - DNA, 20 bp, Artificial Sequence
  Description of Artificial Sequence: Synthetic oligonucleotide
  Target: PCSK9; (-) strand; PAM type: YTN; PAM sequence: TTT
tggcagcttcctcatcaaag

SEQ ID NO: 19503 - DNA, 20 bp, Artificial Sequence
  Description of Artificial Sequence: Synthetic oligonucleotide
  Target: PCSK9; (-) strand; PAM type: YTN; PAM sequence: CTT
ttggcagcttcctcatcaaa

SEQ ID NO: 19504 - DNA, 20 bp, Artificial Sequence
  Description of Artificial Sequence: Synthetic oligonucleotide
  Target: PCSK9; (-) strand; PAM type: YTN; PAM sequence: TTG
caatgtgcttttggcagctt

SEQ ID NO: 19505 - DNA, 20 bp, Artificial Sequence
  Description of Artificial Sequence: Synthetic oligonucleotide
  Target: PCSK9; (-) strand; PAM type: YTN; PAM sequence: TTT
gcaatgtgcttttggcagct

SEQ ID NO: 19506 - DNA, 20 bp, Artificial Sequence
  Description of Artificial Sequence: Synthetic oligonucleotide
  Target: PCSK9; (-) strand; PAM type: YTN; PAM sequence: TTG
tatttgcaatgtgcttttgg

SEQ ID NO: 19507 - DNA, 20 bp, Artificial Sequence
  Description of Artificial Sequence: Synthetic oligonucleotide
  Target: PCSK9; (-) strand; PAM type: YTN; PAM sequence: TTG
gaattgtatttgcaatgtgc

SEQ ID NO: 19508 - DNA, 20 bp, Artificial Sequence
  Description of Artificial Sequence: Synthetic oligonucleotide
  Target: PCSK9; (-) strand; PAM type: YTN; PAM sequence: CTG
taattggaattgtatttgca

SEQ ID NO: 19509 - DNA, 20 bp, Artificial Sequence
  Description of Artificial Sequence: Synthetic oligonucleotide
  Target: PCSK9; (-) strand; PAM type: YTN; PAM sequence: TTG
cctgtaattggaattgtatt

SEQ ID NO: 19510 - DNA, 20 bp, Artificial Sequence
  Description of Artificial Sequence: Synthetic oligonucleotide
  Target: PCSK9; (-) strand; PAM type: YTN; PAM sequence: CTG
ttgcctgtaattggaattgt

SEQ ID NO: 19511 - DNA, 20 bp, Artificial Sequence
  Description of Artificial Sequence: Synthetic oligonucleotide
  Target: PCSK9; (-) strand; PAM type: YTN; PAM sequence: TTC
ctgttgcctgtaattggaat

SEQ ID NO: 19512 - DNA, 20 bp, Artificial Sequence
  Description of Artificial Sequence: Synthetic oligonucleotide
  Target: PCSK9; (-) strand; PAM type: YTN; PAM sequence: CTT
cctgttgcctgtaattggaa

SEQ ID NO: 19513 - DNA, 20 bp, Artificial Sequence
  Description of Artificial Sequence: Synthetic oligonucleotide
  Target: PCSK9; (-) strand; PAM type: YTN; PAM sequence: CTC
cttcctgttgcctgtaattg

SEQ ID NO: 19514 - DNA, 20 bp, Artificial Sequence
  Description of Artificial Sequence: Synthetic oligonucleotide
  Target: PCSK9; (-) strand; PAM type: YTN; PAM sequence: TTC
tccttcctgttgcctgtaat

SEQ ID NO: 19515 - DNA, 20 bp, Artificial Sequence
  Description of Artificial Sequence: Synthetic oligonucleotide
  Target: PCSK9; (-) strand; PAM type: YTN; PAM sequence: CTG
acagaggtggcagaggtggt

SEQ ID NO: 19516 - DNA, 20 bp, Artificial Sequence
  Description of Artificial Sequence: Synthetic oligonucleotide
  Target: PCSK9; (-) strand; PAM type: YTN; PAM sequence: TTG
ctgacagaggtggcagaggt

SEQ ID NO: 19517 - DNA, 20 bp, Artificial Sequence
  Description of Artificial Sequence: Synthetic oligonucleotide
  Target: PCSK9; (-) strand; PAM type: YTN; PAM sequence: TTT
gctgacagaggtggcagagg

SEQ ID NO: 19518 - DNA, 20 bp, Artificial Sequence
  Description of Artificial Sequence: Synthetic oligonucleotide
  Target: PCSK9; (-) strand; PAM type: YTN; PAM sequence: CTC
atggtttgctgacagaggtg

SEQ ID NO: 19519 - DNA, 20 bp, Artificial Sequence
  Description of Artificial Sequence: Synthetic oligonucleotide
  Target: PCSK9; (-) strand; PAM type: YTN; PAM sequence: TTA
tccccatcgagcccgccatc

SEQ ID NO: 19520 - DNA, 20 bp, Artificial Sequence
  Description of Artificial Sequence: Synthetic oligonucleotide
  Target: PCSK9; (-) strand; PAM type: YTN; PAM sequence: CTC
catgaggtaaggtcagagtt

SEQ ID NO: 19521 - DNA, 20 bp, Artificial Sequence
  Description of Artificial Sequence: Synthetic oligonucleotide
  Target: PCSK9; (-) strand; PAM type: YTN; PAM sequence: TTG
acagtgactccatgaggtaa

SEQ ID NO: 19522 - DNA, 20 bp, Artificial Sequence
  Description of Artificial Sequence: Synthetic oligonucleotide
  Target: PCSK9; (-) strand; PAM type: YTN; PAM sequence: CTC
cagagagccagtgcacaaag

SEQ ID NO: 19523 - DNA, 20 bp, Artificial Sequence
  Description of Artificial Sequence: Synthetic oligonucleotide
  Target: PCSK9; (-) strand; PAM type: YTN; PAM sequence: CTC
actccagagagccagtgcac

SEQ ID NO: 19524 - DNA, 20 bp, Artificial Sequence
  Description of Artificial Sequence: Synthetic oligonucleotide
  Target: PCSK9; (-) strand; PAM type: YTN; PAM sequence: TTG
caaagacctcactccagaga

SEQ ID NO: 19525 - DNA, 20 bp, Artificial Sequence
  Description of Artificial Sequence: Synthetic oligonucleotide
  Target: PCSK9; (-) strand; PAM type: YTN; PAM sequence: TTT
gcaaagacctcactccagag

SEQ ID NO: 19526 - DNA, 20 bp, Artificial Sequence
  Description of Artificial Sequence: Synthetic oligonucleotide
  Target: PCSK9; (-) strand; PAM type: YTN; PAM sequence: TTG
tttgcaaagacctcactcca

SEQ ID NO: 19527 - DNA, 20 bp, Artificial Sequence
  Description of Artificial Sequence: Synthetic oligonucleotide
  Target: PCSK9; (-) strand; PAM type: YTN; PAM sequence: TTT
gtttgcaaagacctcactcc

SEQ ID NO: 19528 - DNA, 20 bp, Artificial Sequence
  Description of Artificial Sequence: Synthetic oligonucleotide
  Target: PCSK9; (-) strand; PAM type: YTN; PAM sequence: CTT
tgtttgcaaagacctcactc

SEQ ID NO: 19529 - DNA, 20 bp, Artificial Sequence
  Description of Artificial Sequence: Synthetic oligonucleotide
  Target: PCSK9; (-) strand; PAM type: YTN; PAM sequence: TTC
cactttgtttgcaaagacct

SEQ ID NO: 19530 - DNA, 20 bp, Artificial Sequence
  Description of Artificial Sequence: Synthetic oligonucleotide
  Target: PCSK9; (-) strand; PAM type: YTN; PAM sequence: TTT
ccactttgtttgcaaagacc

SEQ ID NO: 19531 - DNA, 20 bp, Artificial Sequence
  Description of Artificial Sequence: Synthetic oligonucleotide
  Target: PCSK9; (-) strand; PAM type: YTN; PAM sequence: CTT
tccactttgtttgcaaagac

SEQ ID NO: 19532 - DNA, 20 bp, Artificial Sequence
  Description of Artificial Sequence: Synthetic oligonucleotide
  Target: PCSK9; (-) strand; PAM type: YTN; PAM sequence: CTC
tttccactttgtttgcaaag

SEQ ID NO: 19533 - DNA, 20 bp, Artificial Sequence
  Description of Artificial Sequence: Synthetic oligonucleotide
  Target: PCSK9; (-) strand; PAM type: YTN; PAM sequence: TTG
atgctctttccactttgttt

SEQ ID NO: 19534 - DNA, 20 bp, Artificial Sequence
  Description of Artificial Sequence: Synthetic oligonucleotide
  Target: PCSK9; (-) strand; PAM type: YTN; PAM sequence: CTG
gagtccaaagttgatgctct

SEQ ID NO: 19535 - DNA, 20 bp, Artificial Sequence
  Description of Artificial Sequence: Synthetic oligonucleotide
  Target: PCSK9; (-) strand; PAM type: YTN; PAM sequence: CTA
ggtgctggagtccaaagttg

SEQ ID NO: 19536 - DNA, 20 bp, Artificial Sequence
  Description of Artificial Sequence: Synthetic oligonucleotide
  Target: PCSK9; (-) strand; PAM type: YTN; PAM sequence: CTG
aatctaggtgctggagtcca

SEQ ID NO: 19537 - DNA, 20 bp, Artificial Sequence
  Description of Artificial Sequence: Synthetic oligonucleotide
  Target: PCSK9; (-) strand; PAM type: YTN; PAM sequence: CTC
tgaatctaggtgctggagtc

SEQ ID NO: 19538 - DNA, 20 bp, Artificial Sequence
  Description of Artificial Sequence: Synthetic oligonucleotide
  Target: PCSK9; (-) strand; PAM type: YTN; PAM sequence: CTG
ctctgaatctaggtgctgga

SEQ ID NO: 19539 - DNA, 20 bp, Artificial Sequence
  Description of Artificial Sequence: Synthetic oligonucleotide
  Target: PCSK9; (-) strand; PAM type: YTN; PAM sequence: TTC
cgagtgaaatggcctgctct

SEQ ID NO: 19540 - DNA, 20 bp, Artificial Sequence
  Description of Artificial Sequence: Synthetic oligonucleotide
  Target: PCSK9; (-) strand; PAM type: YTN; PAM sequence: TTG
cagatgcacagcagattccg

SEQ ID NO: 19541 - DNA, 20 bp, Artificial Sequence
  Description of Artificial Sequence: Synthetic oligonucleotide
  Target: PCSK9; (-) strand; PAM type: YTN; PAM sequence: CTT
gcagatgcacagcagattcc

SEQ ID NO: 19542 - DNA, 20 bp, Artificial Sequence
  Description of Artificial Sequence: Synthetic oligonucleotide
  Target: PCSK9; (-) strand; PAM type: YTN; PAM sequence: CTC
ccttgcagatgcacagcaga

SEQ ID NO: 19543 - DNA, 20 bp, Artificial Sequence
  Description of Artificial Sequence: Synthetic oligonucleotide
  Target: PCSK9; (-) strand; PAM type: YTN; PAM sequence: TTA
tgatcctcccttgcagatgc

SEQ ID NO: 19544 - DNA, 20 bp, Artificial Sequence
  Description of Artificial Sequence: Synthetic oligonucleotide
  Target: PCSK9; (-) strand; PAM type: YTN; PAM sequence: TTT
atgatcctcccttgcagatg

SEQ ID NO: 19545 - DNA, 20 bp, Artificial Sequence
  Description of Artificial Sequence: Synthetic oligonucleotide
  Target: PCSK9; (-) strand; PAM type: YTN; PAM sequence: CTG
ggaagaaacaaaggcgaatt

SEQ ID NO: 19546 - DNA, 20 bp, Artificial Sequence
  Description of Artificial Sequence: Synthetic oligonucleotide
  Target: PCSK9; (-) strand; PAM type: YTN; PAM sequence: CTG
tcgatactgggaagaaacaa

SEQ ID NO: 19547 - DNA, 20 bp, Artificial Sequence
  Description of Artificial Sequence: Synthetic oligonucleotide
  Target: PCSK9; (-) strand; PAM type: YTN; PAM sequence: CTG
gaagggctgtcgatactggg

SEQ ID NO: 19548 - DNA, 20 bp, Artificial Sequence
  Description of Artificial Sequence: Synthetic oligonucleotide
  Target: PCSK9; (-) strand; PAM type: YTN; PAM sequence: TTC
tggaagggctgtcgatactg

SEQ ID NO: 19549 - DNA, 20 bp, Artificial Sequence
  Description of Artificial Sequence: Synthetic oligonucleotide
  Target: PCSK9; (-) strand; PAM type: YTN; PAM sequence: TTT
ctggaagggctgtcgatact

SEQ ID NO: 19550 - DNA, 20 bp, Artificial Sequence
  Description of Artificial Sequence: Synthetic oligonucleotide
  Target: PCSK9; (-) strand; PAM type: YTN; PAM sequence: CTT
tctggaagggctgtcgatac

SEQ ID NO: 19551 - DNA, 20 bp, Artificial Sequence
  Description of Artificial Sequence: Synthetic oligonucleotide
  Target: PCSK9; (-) strand; PAM type: YTN; PAM sequence: CTC
tttctggaagggctgtcgat

SEQ ID NO: 19552 - DNA, 20 bp, Artificial Sequence
  Description of Artificial Sequence: Synthetic oligonucleotide
  Target: PCSK9; (-) strand; PAM type: YTN; PAM sequence: TTG
ctctttctggaagggctgtc

SEQ ID NO: 19553 - DNA, 20 bp, Artificial Sequence
  Description of Artificial Sequence: Synthetic oligonucleotide
  Target: PCSK9; (-) strand; PAM type: YTN; PAM sequence: CTT
gctctttctggaagggctgt

SEQ ID NO: 19554 - DNA, 20 bp, Artificial Sequence
  Description of Artificial Sequence: Synthetic oligonucleotide
  Target: PCSK9; (-) strand; PAM type: YTN; PAM sequence: TTG
tacatgtggcatgacatgag

SEQ ID NO: 19555 - DNA, 20 bp, Artificial Sequence
  Description of Artificial Sequence: Synthetic oligonucleotide
  Target: PCSK9; (-) strand; PAM type: YTN; PAM sequence: CTC
agattgtacatgtggcatga

SEQ ID NO: 19556 - DNA, 20 bp, Artificial Sequence
  Description of Artificial Sequence: Synthetic oligonucleotide
  Target: PCSK9; (-) strand; PAM type: YTN; PAM sequence: CTG
gcctcagattgtacatgtgg

SEQ ID NO: 19557 - DNA, 20 bp, Artificial Sequence
  Description of Artificial Sequence: Synthetic oligonucleotide
  Target: PCSK9; (-) strand; PAM type: YTN; PAM sequence: CTC
ctggcctcagattgtacatg

SEQ ID NO: 19558 - DNA, 20 bp, Artificial Sequence
  Description of Artificial Sequence: Synthetic oligonucleotide
  Target: PCSK9; (-) strand; PAM type: YTN; PAM sequence: TTG
tgtaccaggcaggaggatga

SEQ ID NO: 19559 - DNA, 20 bp, Artificial Sequence
  Description of Artificial Sequence: Synthetic oligonucleotide
  Target: PCSK9; (-) strand; PAM type: YTN; PAM sequence: CTA
ttgtgtaccaggcaggagga

SEQ ID NO: 19560 - DNA, 20 bp, Artificial Sequence
  Description of Artificial Sequence: Synthetic oligonucleotide
  Target: PCSK9; (-) strand; PAM type: YTN; PAM sequence: CTG
gacaagcatccagtaaacac

SEQ ID NO: 19561 - DNA, 20 bp, Artificial Sequence
  Description of Artificial Sequence: Synthetic oligonucleotide
  Target: PCSK9; (-) strand; PAM type: YTN; PAM sequence: TTC
aagaaatcaactggacaagc

SEQ ID NO: 19562 - DNA, 20 bp, Artificial Sequence
  Description of Artificial Sequence: Synthetic oligonucleotide
  Target: PCSK9; (-) strand; PAM type: YTN; PAM sequence: TTA
cacaccatgttcaagaaatc

SEQ ID NO: 19563 - DNA, 20 bp, Artificial Sequence
  Description of Artificial Sequence: Synthetic oligonucleotide
  Target: PCSK9; (-) strand; PAM type: YTN; PAM sequence: TTT
acacaccatgttcaagaaat

SEQ ID NO: 19564 - DNA, 20 bp, Artificial Sequence
  Description of Artificial Sequence: Synthetic oligonucleotide
  Target: PCSK9; (-) strand; PAM type: YTN; PAM sequence: TTT
tacacaccatgttcaagaaa

SEQ ID NO: 19565 - DNA, 20 bp, Artificial Sequence
  Description of Artificial Sequence: Synthetic oligonucleotide
  Target: PCSK9; (-) strand; PAM type: YTN; PAM sequence: CTT
ttacacaccatgttcaagaa

SEQ ID NO: 19566 - DNA, 20 bp, Artificial Sequence
  Description of Artificial Sequence: Synthetic oligonucleotide
  Target: PCSK9; (-) strand; PAM type: YTN; PAM sequence: TTC
cttttacacaccatgttcaa

SEQ ID NO: 19567 - DNA, 20 bp, Artificial Sequence
  Description of Artificial Sequence: Synthetic oligonucleotide
  Target: PCSK9; (-) strand; PAM type: YTN; PAM sequence: TTG
caaagattccttttacacac

SEQ ID NO: 19568 - DNA, 20 bp, Artificial Sequence
  Description of Artificial Sequence: Synthetic oligonucleotide
  Target: PCSK9; (-) strand; PAM type: YTN; PAM sequence: TTT
gcaaagattccttttacaca

SEQ ID NO: 19569 - DNA, 20 bp, Artificial Sequence
  Description of Artificial Sequence: Synthetic oligonucleotide
  Target: PCSK9; (-) strand; PAM type: YTN; PAM sequence: TTC
aatttgcaaagattcctttt

SEQ ID NO: 19570 - DNA, 20 bp, Artificial Sequence
  Description of Artificial Sequence: Synthetic oligonucleotide
  Target: PCSK9; (-) strand; PAM type: YTN; PAM sequence: TTC
cagaagattcaatttgcaaa

SEQ ID NO: 19571 - DNA, 20 bp, Artificial Sequence
  Description of Artificial Sequence: Synthetic oligonucleotide
  Target: PCSK9; (-) strand; PAM type: YTN; PAM sequence: TTT
ccagaagattcaatttgcaa

SEQ ID NO: 19572 - DNA, 20 bp, Artificial Sequence
  Description of Artificial Sequence: Synthetic oligonucleotide
  Target: PCSK9; (-) strand; PAM type: YTN; PAM sequence: CTT
tccagaagattcaatttgca

SEQ ID NO: 19573 - DNA, 20 bp, Artificial Sequence
  Description of Artificial Sequence: Synthetic oligonucleotide
  Target: PCSK9; (-) strand; PAM type: YTN; PAM sequence: CTC
agctttccagaagattcaat

SEQ ID NO: 19574 - DNA, 20 bp, Artificial Sequence
  Description of Artificial Sequence: Synthetic oligonucleotide
  Target: PCSK9; (-) strand; PAM type: YTN; PAM sequence: CTA
tggtaggcacaagctcagct

SEQ ID NO: 19575 - DNA, 20 bp, Artificial Sequence
  Description of Artificial Sequence: Synthetic oligonucleotide
  Target: PCSK9; (-) strand; PAM type: YTN; PAM sequence: TTC
tatggtaggcacaagctcag

SEQ ID NO: 19576 - DNA, 20 bp, Artificial Sequence
  Description of Artificial Sequence: Synthetic oligonucleotide
  Target: PCSK9; (-) strand; PAM type: YTN; PAM sequence: TTC
agaattctatggtaggcaca

SEQ ID NO: 19577 - DNA, 20 bp, Artificial Sequence
  Description of Artificial Sequence: Synthetic oligonucleotide
  Target: PCSK9; (-) strand; PAM type: YTN; PAM sequence: TTG
caaagacgtcatataggtac

SEQ ID NO: 19578 - DNA, 20 bp, Artificial Sequence
  Description of Artificial Sequence: Synthetic oligonucleotide
  Target: PCSK9; (-) strand; PAM type: YTN; PAM sequence: TTT
gcaaagacgtcatataggta

SEQ ID NO: 19579 - DNA, 20 bp, Artificial Sequence
  Description of Artificial Sequence: Synthetic oligonucleotide
  Target: PCSK9; (-) strand; PAM type: YTN; PAM sequence: TTA
agtttgcaaagacgtcatat

SEQ ID NO: 19580 - DNA, 20 bp, Artificial Sequence
  Description of Artificial Sequence: Synthetic oligonucleotide
  Target: PCSK9; (-) strand; PAM type: YTN; PAM sequence: TTT
aagtttgcaaagacgtcata

SEQ ID NO: 19581 - DNA, 20 bp, Artificial Sequence
  Description of Artificial Sequence: Synthetic oligonucleotide
  Target: PCSK9; (-) strand; PAM type: YTN; PAM sequence: TTT
taagtttgcaaagacgtcat

SEQ ID NO: 19582 - DNA, 20 bp, Artificial Sequence
  Description of Artificial Sequence: Synthetic oligonucleotide
  Target: PCSK9; (-) strand; PAM type: YTN; PAM sequence: TTC
aggttttaagtttgcaaaga

SEQ ID NO: 19583 - DNA, 20 bp, Artificial Sequence
  Description of Artificial Sequence: Synthetic oligonucleotide
  Target: PCSK9; (-) strand; PAM type: YTN; PAM sequence: CTA
caaagattcaggttttaagt

SEQ ID NO: 19584 - DNA, 20 bp, Artificial Sequence
  Description of Artificial Sequence: Synthetic oligonucleotide
  Target: PCSK9; (-) strand; PAM type: YTN; PAM sequence: TTA
tactacaaagattcaggttt

SEQ ID NO: 19585 - DNA, 20 bp, Artificial Sequence
  Description of Artificial Sequence: Synthetic oligonucleotide
  Target: PCSK9; (-) strand; PAM type: YTN; PAM sequence: TTT
atactacaaagattcaggtt

SEQ ID NO: 19586 - DNA, 20 bp, Artificial Sequence
  Description of Artificial Sequence: Synthetic oligonucleotide
  Target: PCSK9; (-) strand; PAM type: YTN; PAM sequence: TTC
aagggatttatactacaaag

SEQ ID NO: 19587 - DNA, 20 bp, Artificial Sequence
  Description of Artificial Sequence: Synthetic oligonucleotide
  Target: PCSK9; (-) strand; PAM type: YTN; PAM sequence: TTT
caagggatttatactacaaa

SEQ ID NO: 19588 - DNA, 20 bp, Artificial Sequence
  Description of Artificial Sequence: Synthetic oligonucleotide
  Target: PCSK9; (-) strand; PAM type: YTN; PAM sequence: CTA
catgcatttcaagggattta

SEQ ID NO: 19589 - DNA, 20 bp, Artificial Sequence
  Description of Artificial Sequence: Synthetic oligonucleotide
  Target: PCSK9; (-) strand; PAM type: YTN; PAM sequence: TTG
atgtccagcctacatgcatt

SEQ ID NO: 19590 - DNA, 20 bp, Artificial Sequence
  Description of Artificial Sequence: Synthetic oligonucleotide
  Target: PCSK9; (-) strand; PAM type: YTN; PAM sequence: TTT
gatgtccagcctacatgcat

SEQ ID NO: 19591 - DNA, 20 bp, Artificial Sequence
  Description of Artificial Sequence: Synthetic oligonucleotide
  Target: PCSK9; (-) strand; PAM type: YTN; PAM sequence: TTT
tgatgtccagcctacatgca

SEQ ID NO: 19592 - DNA, 20 bp, Artificial Sequence
  Description of Artificial Sequence: Synthetic oligonucleotide
  Target: PCSK9; (-) strand; PAM type: YTN; PAM sequence: CTT
ttgatgtccagcctacatgc

SEQ ID NO: 19593 - DNA, 20 bp, Artificial Sequence
  Description of Artificial Sequence: Synthetic oligonucleotide
  Target: PCSK9; (-) strand; PAM type: YTN; PAM sequence: TTG
cttttgatgtccagcctaca

SEQ ID NO: 19594 - DNA, 20 bp, Artificial Sequence
  Description of Artificial Sequence: Synthetic oligonucleotide
  Target: PCSK9; (-) strand; PAM type: YTN; PAM sequence: CTT
gcttttgatgtccagcctac

SEQ ID NO: 19595 - DNA, 20 bp, Artificial Sequence
  Description of Artificial Sequence: Synthetic oligonucleotide
  Target: PCSK9; (-) strand; PAM type: YTN; PAM sequence: TTG
cttgcttttgatgtccagcc

SEQ ID NO: 19596 - DNA, 20 bp, Artificial Sequence
  Description of Artificial Sequence: Synthetic oligonucleotide
  Target: PCSK9; (-) strand; PAM type: YTN; PAM sequence: TTG
aagagattgcttgcttttga

SEQ ID NO: 19597 - DNA, 20 bp, Artificial Sequence
  Description of Artificial Sequence: Synthetic oligonucleotide
  Target: PCSK9; (-) strand; PAM type: YTN; PAM sequence: CTT
gaagagattgcttgcttttg

SEQ ID NO: 19598 - DNA, 20 bp, Artificial Sequence
  Description of Artificial Sequence: Synthetic oligonucleotide
  Target: PCSK9; (-) strand; PAM type: YTN; PAM sequence: CTC
cttgaagagattgcttgctt

SEQ ID NO: 19599 - DNA, 20 bp, Artificial Sequence
  Description of Artificial Sequence: Synthetic oligonucleotide
  Target: PCSK9; (-) strand; PAM type: YTN; PAM sequence: CTG
ctccttgaagagattgcttg

SEQ ID NO: 19600 - DNA, 20 bp, Artificial Sequence
  Description of Artificial Sequence: Synthetic oligonucleotide
  Target: PCSK9; (-) strand; PAM type: YTN; PAM sequence: CTA
gctgctccttgaagagattg

SEQ ID NO: 19601 - DNA, 20 bp, Artificial Sequence
  Description of Artificial Sequence: Synthetic oligonucleotide
  Target: PCSK9; (-) strand; PAM type: YTN; PAM sequence: TTA
ccaactagctgctccttgaa

SEQ ID NO: 19602 - DNA, 20 bp, Artificial Sequence
  Description of Artificial Sequence: Synthetic oligonucleotide
  Target: PCSK9; (-) strand; PAM type: YTN; PAM sequence: CTT
accaactagctgctccttga

SEQ ID NO: 19603 - DNA, 20 bp, Artificial Sequence
  Description of Artificial Sequence: Synthetic oligonucleotide
  Target: PCSK9; (-) strand; PAM type: YTN; PAM sequence: CTG
accttaccaactagctgctc

SEQ ID NO: 19604 - DNA, 20 bp, Artificial Sequence
  Description of Artificial Sequence: Synthetic oligonucleotide
  Target: PCSK9; (-) strand; PAM type: YTN; PAM sequence: CTG
cacactgaccttaccaacta

SEQ ID NO: 19605 - DNA, 20 bp, Artificial Sequence
  Description of Artificial Sequence: Synthetic oligonucleotide
  Target: PCSK9; (-) strand; PAM type: YTN; PAM sequence: TTA
tgcaccctgcacactgacct

SEQ ID NO: 19606 - DNA, 20 bp, Artificial Sequence
  Description of Artificial Sequence: Synthetic oligonucleotide
  Target: PCSK9; (-) strand; PAM type: YTN; PAM sequence: TTT
atgcaccctgcacactgacc

SEQ ID NO: 19607 - DNA, 20 bp, Artificial Sequence
  Description of Artificial Sequence: Synthetic oligonucleotide
  Target: PCSK9; (-) strand; PAM type: YTN; PAM sequence: CTT
tatgcaccctgcacactgac

SEQ ID NO: 19608 - DNA, 20 bp, Artificial Sequence
  Description of Artificial Sequence: Synthetic oligonucleotide
  Target: PCSK9; (-) strand; PAM type: YTN; PAM sequence: CTG
ccctttatgcaccctgcaca

SEQ ID NO: 19609 - DNA, 20 bp, Artificial Sequence
  Description of Artificial Sequence: Synthetic oligonucleotide
  Target: PCSK9; (-) strand; PAM type: YTN; PAM sequence: CTC
tgccctttatgcaccctgca

SEQ ID NO: 19610 - DNA, 20 bp, Artificial Sequence
  Description of Artificial Sequence: Synthetic oligonucleotide
  Target: PCSK9; (-) strand; PAM type: YTN; PAM sequence: CTC
cggcctctgccctttatgca

SEQ ID NO: 19611 - DNA, 20 bp, Artificial Sequence
  Description of Artificial Sequence: Synthetic oligonucleotide
  Target: PCSK9; (-) strand; PAM type: YTN; PAM sequence: CTG
gaccccctccggcctctgcc

SEQ ID NO: 19612 - DNA, 20 bp, Artificial Sequence
  Description of Artificial Sequence: Synthetic oligonucleotide
  Target: PCSK9; (-) strand; PAM type: YTN; PAM sequence: TTA
gcctggaccccctccggcct

SEQ ID NO: 19613 - DNA, 20 bp, Artificial Sequence
  Description of Artificial Sequence: Synthetic oligonucleotide
  Target: PCSK9; (-) strand; PAM type: YTN; PAM sequence: CTT
agcctggaccccctccggcc

SEQ ID NO: 19614 - DNA, 20 bp, Artificial Sequence
  Description of Artificial Sequence: Synthetic oligonucleotide
  Target: PCSK9; (-) strand; PAM type: YTN; PAM sequence: CTA
aacttagcctggaccccctc

SEQ ID NO: 19615 - DNA, 20 bp, Artificial Sequence
  Description of Artificial Sequence: Synthetic oligonucleotide
  Target: PCSK9; (-) strand; PAM type: YTN; PAM sequence: TTC
taaacttagcctggaccccc

SEQ ID NO: 19616 - DNA, 20 bp, Artificial Sequence
  Description of Artificial Sequence: Synthetic oligonucleotide
  Target: PCSK9; (-) strand; PAM type: YTN; PAM sequence: CTT
ctaaacttagcctggacccc

SEQ ID NO: 19617 - DNA, 20 bp, Artificial Sequence
  Description of Artificial Sequence: Synthetic oligonucleotide
  Target: PCSK9; (-) strand; PAM type: YTN; PAM sequence: CTG
gcagccttctaaacttagcc

SEQ ID NO: 19618 - DNA, 20 bp, Artificial Sequence
  Description of Artificial Sequence: Synthetic oligonucleotide
  Target: PCSK9; (-) strand; PAM type: YTN; PAM sequence: TTA
acctggcagccttctaaact

SEQ ID NO: 19619 - DNA, 20 bp, Artificial Sequence
  Description of Artificial Sequence: Synthetic oligonucleotide
  Target: PCSK9; (-) strand; PAM type: YTN; PAM sequence: CTT
aacctggcagccttctaaac

SEQ ID NO: 19620 - DNA, 20 bp, Artificial Sequence
  Description of Artificial Sequence: Synthetic oligonucleotide
  Target: PCSK9; (-) strand; PAM type: YTN; PAM sequence: CTG
gccttaacctggcagccttc

SEQ ID NO: 19621 - DNA, 20 bp, Artificial Sequence
  Description of Artificial Sequence: Synthetic oligonucleotide
  Target: PCSK9; (-) strand; PAM type: YTN; PAM sequence: TTC
cactggccttaacctggcag

SEQ ID NO: 19622 - DNA, 20 bp, Artificial Sequence
  Description of Artificial Sequence: Synthetic oligonucleotide
  Target: PCSK9; (-) strand; PAM type: YTN; PAM sequence: TTT
ccactggccttaacctggca

SEQ ID NO: 19623 - DNA, 20 bp, Artificial Sequence
  Description of Artificial Sequence: Synthetic oligonucleotide
  Target: PCSK9; (-) strand; PAM type: YTN; PAM sequence: CTT
tccactggccttaacctggc

SEQ ID NO: 19624 - DNA, 20 bp, Artificial Sequence
  Description of Artificial Sequence: Synthetic oligonucleotide
  Target: PCSK9; (-) strand; PAM type: YTN; PAM sequence: TTC
tttccactggccttaacctg

SEQ ID NO: 19625 - DNA, 20 bp, Artificial Sequence
  Description of Artificial Sequence: Synthetic oligonucleotide
  Target: PCSK9; (-) strand; PAM type: YTN; PAM sequence: CTG
cccaccgaattctttccact

SEQ ID NO: 19626 - DNA, 20 bp, Artificial Sequence
  Description of Artificial Sequence: Synthetic oligonucleotide
  Target: PCSK9; (-) strand; PAM type: YTN; PAM sequence: CTC
gctgcccaccgaattctttc

SEQ ID NO: 19627 - DNA, 20 bp, Artificial Sequence
  Description of Artificial Sequence: Synthetic oligonucleotide
  Target: PCSK9; (-) strand; PAM type: YTN; PAM sequence: CTC
ctcgctgcccaccgaattct

SEQ ID NO: 19628 - DNA, 20 bp, Artificial Sequence
  Description of Artificial Sequence: Synthetic oligonucleotide
  Target: PCSK9; (-) strand; PAM type: YTN; PAM sequence: CTG
tggactcctcgctgcccacc

SEQ ID NO: 19629 - DNA, 20 bp, Artificial Sequence
  Description of Artificial Sequence: Synthetic oligonucleotide
  Target: PCSK9; (-) strand; PAM type: YTN; PAM sequence: CTA
ctgtggactcctcgctgccc

SEQ ID NO: 19630 - DNA, 20 bp, Artificial Sequence
  Description of Artificial Sequence: Synthetic oligonucleotide
  Target: PCSK9; (-) strand; PAM type: YTN; PAM sequence: CTG
aatcaatcctactgtggact

SEQ ID NO: 19631 - DNA, 20 bp, Artificial Sequence
  Description of Artificial Sequence: Synthetic oligonucleotide
  Target: PCSK9; (-) strand; PAM type: YTN; PAM sequence: TTC
tgaatcaatcctactgtgga

SEQ ID NO: 19632 - DNA, 20 bp, Artificial Sequence
  Description of Artificial Sequence: Synthetic oligonucleotide
  Target: PCSK9; (-) strand; PAM type: YTN; PAM sequence: CTT
ctgaatcaatcctactgtgg

SEQ ID NO: 19633 - DNA, 20 bp, Artificial Sequence
  Description of Artificial Sequence: Synthetic oligonucleotide
  Target: PCSK9; (-) strand; PAM type: YTN; PAM sequence: CTG
accagtgagacttctgaatc

SEQ ID NO: 19634 - DNA, 20 bp, Artificial Sequence
  Description of Artificial Sequence: Synthetic oligonucleotide
  Target: PCSK9; (-) strand; PAM type: YTN; PAM sequence: CTG
ctgaccagtgagacttctga

SEQ ID NO: 19635 - DNA, 20 bp, Artificial Sequence
  Description of Artificial Sequence: Synthetic oligonucleotide
  Target: PCSK9; (-) strand; PAM type: YTN; PAM sequence: CTC
ctgctgaccagtgagacttc

SEQ ID NO: 19636 - DNA, 20 bp, Artificial Sequence
  Description of Artificial Sequence: Synthetic oligonucleotide
  Target: PCSK9; (-) strand; PAM type: YTN; PAM sequence: TTG
tctcctgctgaccagtgaga

SEQ ID NO: 19637 - DNA, 20 bp, Artificial Sequence
  Description of Artificial Sequence: Synthetic oligonucleotide
  Target: PCSK9; (-) strand; PAM type: YTN; PAM sequence: CTT
gtctcctgctgaccagtgag

SEQ ID NO: 19638 - DNA, 20 bp, Artificial Sequence
  Description of Artificial Sequence: Synthetic oligonucleotide
  Target: PCSK9; (-) strand; PAM type: YTN; PAM sequence: CTG
ggtccaccttgtctcctgct

SEQ ID NO: 19639 - DNA, 20 bp, Artificial Sequence
  Description of Artificial Sequence: Synthetic oligonucleotide
  Target: PCSK9; (-) strand; PAM type: YTN; PAM sequence: TTC
ctgggtccaccttgtctcct

SEQ ID NO: 19640 - DNA, 20 bp, Artificial Sequence
  Description of Artificial Sequence: Synthetic oligonucleotide
  Target: PCSK9; (-) strand; PAM type: YTN; PAM sequence: TTT
cctgggtccaccttgtctcc

SEQ ID NO: 19641 - DNA, 20 bp, Artificial Sequence
  Description of Artificial Sequence: Synthetic oligonucleotide
  Target: PCSK9; (-) strand; PAM type: YTN; PAM sequence: TTC
agtgtttcctgggtccacct

SEQ ID NO: 19642 - DNA, 20 bp, Artificial Sequence
  Description of Artificial Sequence: Synthetic oligonucleotide
  Target: PCSK9; (-) strand; PAM type: YTN; PAM sequence: TTT
cagtgtttcctgggtccacc

SEQ ID NO: 19643 - DNA, 20 bp, Artificial Sequence
  Description of Artificial Sequence: Synthetic oligonucleotide
  Target: PCSK9; (-) strand; PAM type: YTN; PAM sequence: TTT
tcagtgtttcctgggtccac

SEQ ID NO: 19644 - DNA, 20 bp, Artificial Sequence
  Description of Artificial Sequence: Synthetic oligonucleotide
  Target: PCSK9; (-) strand; PAM type: YTN; PAM sequence: CTT
ttcagtgtttcctgggtcca

SEQ ID NO: 19645 - DNA, 20 bp, Artificial Sequence
  Description of Artificial Sequence: Synthetic oligonucleotide
  Target: PCSK9; (-) strand; PAM type: YTN; PAM sequence: CTG
ccgggcccaccttttcagtg

SEQ ID NO: 19646 - DNA, 20 bp, Artificial Sequence
  Description of Artificial Sequence: Synthetic oligonucleotide
  Target: PCSK9; (-) strand; PAM type: YTN; PAM sequence: TTC
tgccgggcccaccttttcag

SEQ ID NO: 19647 - DNA, 20 bp, Artificial Sequence
  Description of Artificial Sequence: Synthetic oligonucleotide
  Target: PCSK9; (-) strand; PAM type: YTN; PAM sequence: CTC
caagttctgccgggcccacc

SEQ ID NO: 19648 - DNA, 20 bp, Artificial Sequence
  Description of Artificial Sequence: Synthetic oligonucleotide
  Target: PCSK9; (-) strand; PAM type: YTN; PAM sequence: CTG
cgtgggatgccagactccaa

SEQ ID NO: 19649 - DNA, 20 bp, Artificial Sequence
  Description of Artificial Sequence: Synthetic oligonucleotide
  Target: PCSK9; (-) strand; PAM type: YTN; PAM sequence: CTC
accctgcgtgggatgccaga

SEQ ID NO: 19650 - DNA, 20 bp, Artificial Sequence
  Description of Artificial Sequence: Synthetic oligonucleotide
  Target: PCSK9; (-) strand; PAM type: YTN; PAM sequence: CTC
tcaccctgcgtgggatgcca

SEQ ID NO: 19651 - DNA, 20 bp, Artificial Sequence
  Description of Artificial Sequence: Synthetic oligonucleotide
  Target: PCSK9; (-) strand; PAM type: YTN; PAM sequence: CTC
ccgcctctcaccctgcgtgg

SEQ ID NO: 19652 - DNA, 20 bp, Artificial Sequence
  Description of Artificial Sequence: Synthetic oligonucleotide
  Target: PCSK9; (-) strand; PAM type: YTN; PAM sequence: CTC
tcccgcctctcaccctgcgt

SEQ ID NO: 19653 - DNA, 20 bp, Artificial Sequence
  Description of Artificial Sequence: Synthetic oligonucleotide
  Target: PCSK9; (-) strand; PAM type: YTN; PAM sequence: CTC
ctctcccgcctctcaccctg

SEQ ID NO: 19654 - DNA, 20 bp, Artificial Sequence
  Description of Artificial Sequence: Synthetic oligonucleotide
  Target: PCSK9; (-) strand; PAM type: YTN; PAM sequence: CTC
ctcctctcccgcctctcacc

SEQ ID NO: 19655 - DNA, 20 bp, Artificial Sequence
  Description of Artificial Sequence: Synthetic oligonucleotide
  Target: PCSK9; (-) strand; PAM type: YTN; PAM sequence: CTA
ggggctcctcctctcccgcc

SEQ ID NO: 19656 - DNA, 20 bp, Artificial Sequence
  Description of Artificial Sequence: Synthetic oligonucleotide
  Target: PCSK9; (-) strand; PAM type: YTN; PAM sequence: CTG
gaaggcaggccggcgcccta

SEQ ID NO: 19657 - DNA, 20 bp, Artificial Sequence
  Description of Artificial Sequence: Synthetic oligonucleotide
  Target: PCSK9; (-) strand; PAM type: YTN; PAM sequence: CTG
ggctggaaggcaggccggcg

SEQ ID NO: 19658 - DNA, 20 bp, Artificial Sequence
  Description of Artificial Sequence: Synthetic oligonucleotide
  Target: PCSK9; (-) strand; PAM type: YTN; PAM sequence: CTA
actgggctggaaggcaggcc

SEQ ID NO: 19659 - DNA, 20 bp, Artificial Sequence
  Description of Artificial Sequence: Synthetic oligonucleotide
  Target: PCSK9; (-) strand; PAM type: YTN; PAM sequence: CTC
ccaaatcctaactgggctgg

SEQ ID NO: 19660 - DNA, 20 bp, Artificial Sequence
  Description of Artificial Sequence: Synthetic oligonucleotide
  Target: PCSK9; (-) strand; PAM type: YTN; PAM sequence: TTA
cgcgcagagggaagaaaaaa

SEQ ID NO: 19661 - DNA, 20 bp, Artificial Sequence
  Description of Artificial Sequence: Synthetic oligonucleotide
  Target: PCSK9; (-) strand; PAM type: YTN; PAM sequence: CTC
cccaaacagcgtcagattac

SEQ ID NO: 19662 - DNA, 20 bp, Artificial Sequence
  Description of Artificial Sequence: Synthetic oligonucleotide
  Target: PCSK9; (-) strand; PAM type: YTN; PAM sequence: CTC
gccctccccaaacagcgtca

SEQ ID NO: 19663 - DNA, 20 bp, Artificial Sequence
  Description of Artificial Sequence: Synthetic oligonucleotide
  Target: PCSK9; (-) strand; PAM type: YTN; PAM sequence: TTC
ggcctcgccctccccaaaca

SEQ ID NO: 19664 - DNA, 20 bp, Artificial Sequence
  Description of Artificial Sequence: Synthetic oligonucleotide
  Target: PCSK9; (-) strand; PAM type: YTN; PAM sequence: TTT
cggcctcgccctccccaaac

SEQ ID NO: 19665 - DNA, 20 bp, Artificial Sequence
  Description of Artificial Sequence: Synthetic oligonucleotide
  Target: PCSK9; (-) strand; PAM type: YTN; PAM sequence: CTG
gaggatcaggtttcggcctc

SEQ ID NO: 19666 - DNA, 20 bp, Artificial Sequence
  Description of Artificial Sequence: Synthetic oligonucleotide
  Target: PCSK9; (-) strand; PAM type: YTN; PAM sequence: TTA
acggaacccccggactggag

SEQ ID NO: 19667 - DNA, 20 bp, Artificial Sequence
  Description of Artificial Sequence: Synthetic oligonucleotide
  Target: PCSK9; (-) strand; PAM type: YTN; PAM sequence: TTA
aacattaacggaacccccgg

SEQ ID NO: 19668 - DNA, 20 bp, Artificial Sequence
  Description of Artificial Sequence: Synthetic oligonucleotide
  Target: PCSK9; (-) strand; PAM type: YTN; PAM sequence: CTG
attaaacattaacggaaccc

SEQ ID NO: 19669 - DNA, 20 bp, Artificial Sequence
  Description of Artificial Sequence: Synthetic oligonucleotide
  Target: PCSK9; (-) strand; PAM type: YTN; PAM sequence: CTA
tctgattaaacattaacgga

SEQ ID NO: 19670 - DNA, 20 bp, Artificial Sequence
  Description of Artificial Sequence: Synthetic oligonucleotide
  Target: PCSK9; (-) strand; PAM type: YTN; PAM sequence: CTG
gggcgcgcagatcacgccac

SEQ ID NO: 19671 - DNA, 20 bp, Artificial Sequence
  Description of Artificial Sequence: Synthetic oligonucleotide
  Target: PCSK9; (-) strand; PAM type: YTN; PAM sequence: TTG
acgcctggggcgcgcagatc

SEQ ID NO: 19672 - DNA, 20 bp, Artificial Sequence
  Description of Artificial Sequence: Synthetic oligonucleotide
  Target: PCSK9; (-) strand; PAM type: YTN; PAM sequence: CTT
gacgcctggggcgcgcagat

SEQ ID NO: 19673 - DNA, 20 bp, Artificial Sequence
  Description of Artificial Sequence: Synthetic oligonucleotide
  Target: PCSK9; (-) strand; PAM type: YTN; PAM sequence: CTA
gggtgtgggtgcttgacgcc

SEQ ID NO: 19674 - DNA, 20 bp, Artificial Sequence
  Description of Artificial Sequence: Synthetic oligonucleotide
  Target: PCSK9; (-) strand; PAM type: YTN; PAM sequence: TTC
tagggtgtgggtgcttgacg

SEQ ID NO: 19675 - DNA, 20 bp, Artificial Sequence
  Description of Artificial Sequence: Synthetic oligonucleotide
  Target: PCSK9; (-) strand; PAM type: YTN; PAM sequence: CTT
ctagggtgtgggtgcttgac

SEQ ID NO: 19676 - DNA, 20 bp, Artificial Sequence
  Description of Artificial Sequence: Synthetic oligonucleotide
  Target: PCSK9; (-) strand; PAM type: YTN; PAM sequence: CTG
cggaaaccttctagggtgtg

SEQ ID NO: 19677 - DNA, 20 bp, Artificial Sequence
  Description of Artificial Sequence: Synthetic oligonucleotide
  Target: PCSK9; (-) strand; PAM type: YTN; PAM sequence: CTC
gacgtcgctgcggaaacctt

SEQ ID NO: 19678 - DNA, 20 bp, Artificial Sequence
  Description of Artificial Sequence: Synthetic oligonucleotide
  Target: PCSK9; (-) strand; PAM type: YTN; PAM sequence: CTG
caaccatgagcgcctcgacg

SEQ ID NO: 19679 - DNA, 20 bp, Artificial Sequence
  Description of Artificial Sequence: Synthetic oligonucleotide
  Target: PCSK9; (-) strand; PAM type: YTN; PAM sequence: CTG
aacggcggcgcccgcctgca

SEQ ID NO: 19680 - DNA, 20 bp, Artificial Sequence
  Description of Artificial Sequence: Synthetic oligonucleotide
  Target: PCSK9; (-) strand; PAM type: YTN; PAM sequence: CTG
aactgaacggcggcgcccgc

SEQ ID NO: 19681 - DNA, 20 bp, Artificial Sequence
  Description of Artificial Sequence: Synthetic oligonucleotide
  Target: PCSK9; (-) strand; PAM type: YTN; PAM sequence: CTC
agaccctgaactgaacggcg

SEQ ID NO: 19682 - DNA, 20 bp, Artificial Sequence
  Description of Artificial Sequence: Synthetic oligonucleotide
  Target: PCSK9; (-) strand; PAM type: YTN; PAM sequence: CTC
caggctcagaccctgaactg

SEQ ID NO: 19683 - DNA, 20 bp, Artificial Sequence
  Description of Artificial Sequence: Synthetic oligonucleotide
  Target: PCSK9; (-) strand; PAM type: YTN; PAM sequence: CTC
ctccaggctcagaccctgaa

SEQ ID NO: 19684 - DNA, 20 bp, Artificial Sequence
  Description of Artificial Sequence: Synthetic oligonucleotide
  Target: PCSK9; (-) strand; PAM type: YTN; PAM sequence: CTC
actcctccaggctcagaccc

SEQ ID NO: 19685 - DNA, 20 bp, Artificial Sequence
  Description of Artificial Sequence: Synthetic oligonucleotide
  Target: PCSK9; (-) strand; PAM type: YTN; PAM sequence: CTG
gctcactcctccaggctcag

SEQ ID NO: 19686 - DNA, 20 bp, Artificial Sequence
  Description of Artificial Sequence: Synthetic oligonucleotide
  Target: PCSK9; (-) strand; PAM type: YTN; PAM sequence: CTG
cctggctcactcctccaggc

SEQ ID NO: 19687 - DNA, 20 bp, Artificial Sequence
  Description of Artificial Sequence: Synthetic oligonucleotide
  Target: PCSK9; (-) strand; PAM type: YTN; PAM sequence: CTC
actgcctggctcactcctcc

SEQ ID NO: 19688 - DNA, 20 bp, Artificial Sequence
  Description of Artificial Sequence: Synthetic oligonucleotide
  Target: PCSK9; (-) strand; PAM type: YTN; PAM sequence: CTG
caacgacgcgtcccggcccg

SEQ ID NO: 19689 - DNA, 20 bp, Artificial Sequence
  Description of Artificial Sequence: Synthetic oligonucleotide
  Target: PCSK9; (-) strand; PAM type: YTN; PAM sequence: CTG
ctgcaacgacgcgtcccggc

SEQ ID NO: 19690 - DNA, 20 bp, Artificial Sequence
  Description of Artificial Sequence: Synthetic oligonucleotide
  Target: PCSK9; (-) strand; PAM type: YTN; PAM sequence: CTG
ggagccgctgctgcaacgac

SEQ ID NO: 19691 - DNA, 20 bp, Artificial Sequence
  Description of Artificial Sequence: Synthetic oligonucleotide
  Target: PCSK9; (-) strand; PAM type: YTN; PAM sequence: CTG
ggagctgggagccgctgctg

SEQ ID NO: 19692 - DNA, 20 bp, Artificial Sequence
  Description of Artificial Sequence: Synthetic oligonucleotide
  Target: PCSK9; (-) strand; PAM type: YTN; PAM sequence: CTG
gctgggagctgggagccgct

SEQ ID NO: 19693 - DNA, 20 bp, Artificial Sequence
  Description of Artificial Sequence: Synthetic oligonucleotide
  Target: PCSK9; (-) strand; PAM type: YTN; PAM sequence: TTC
aggagcagggcgcgtgaagg

SEQ ID NO: 19694 - DNA, 20 bp, Artificial Sequence
  Description of Artificial Sequence: Synthetic oligonucleotide
  Target: PCSK9; (-) strand; PAM type: YTN; PAM sequence: CTG
aagttcaggagcagggcgcg

SEQ ID NO: 19695 - DNA, 20 bp, Artificial Sequence
  Description of Artificial Sequence: Synthetic oligonucleotide
  Target: PCSK9; (-) strand; PAM type: YTN; PAM sequence: CTG
tgcaggagctgaagttcagg

SEQ ID NO: 19696 - DNA, 20 bp, Artificial Sequence
  Description of Artificial Sequence: Synthetic oligonucleotide
  Target: PCSK9; (-) strand; PAM type: YTN; PAM sequence: TTG
cggtggggaggactgtgcag

SEQ ID NO: 19697 - DNA, 20 bp, Artificial Sequence
  Description of Artificial Sequence: Synthetic oligonucleotide
  Target: PCSK9; (-) strand; PAM type: YTN; PAM sequence: CTT
gcggtggggaggactgtgca

SEQ ID NO: 19698 - DNA, 20 bp, Artificial Sequence
  Description of Artificial Sequence: Synthetic oligonucleotide
  Target: PCSK9; (-) strand; PAM type: YTN; PAM sequence: TTG
agccttgcggtggggaggac

SEQ ID NO: 19699 - DNA, 20 bp, Artificial Sequence
  Description of Artificial Sequence: Synthetic oligonucleotide
  Target: PCSK9; (-) strand; PAM type: YTN; PAM sequence: CTT
gagccttgcggtggggagga

SEQ ID NO: 19700 - DNA, 20 bp, Artificial Sequence
  Description of Artificial Sequence: Synthetic oligonucleotide
  Target: PCSK9; (-) strand; PAM type: YTN; PAM sequence: CTA
gaggccgtgcgcggtccacg

SEQ ID NO: 19701 - DNA, 20 bp, Artificial Sequence
  Description of Artificial Sequence: Synthetic oligonucleotide
  Target: PCSK9; (-) strand; PAM type: YTN; PAM sequence: CTG
gcgaggagacctagaggccg

SEQ ID NO: 19702 - DNA, 20 bp, Artificial Sequence
  Description of Artificial Sequence: Synthetic oligonucleotide
  Target: PCSK9; (-) strand; PAM type: YTN; PAM sequence: CTG
tcctggcgaggagacctaga

SEQ ID NO: 19703 - DNA, 20 bp, Artificial Sequence
  Description of Artificial Sequence: Synthetic oligonucleotide
  Target: PCSK9; (-) strand; PAM type: YTN; PAM sequence: TTG
ctgtcctggcgaggagacct

SEQ ID NO: 19704 - DNA, 20 bp, Artificial Sequence
  Description of Artificial Sequence: Synthetic oligonucleotide
  Target: PCSK9; (-) strand; PAM type: YTN; PAM sequence: CTG
acggtgcccatgagggccag

SEQ ID NO: 19705 - DNA, 20 bp, Artificial Sequence
  Description of Artificial Sequence: Synthetic oligonucleotide
  Target: PCSK9; (-) strand; PAM type: YTN; PAM sequence: CTG
gagctgacggtgcccatgag

SEQ ID NO: 19706 - DNA, 20 bp, Artificial Sequence
  Description of Artificial Sequence: Synthetic oligonucleotide
  Target: PCSK9; (-) strand; PAM type: YTN; PAM sequence: CTG
cgcacgggcgcccgcgggac

SEQ ID NO: 19707 - DNA, 20 bp, Artificial Sequence
  Description of Artificial Sequence: Synthetic oligonucleotide
  Target: PCSK9; (-) strand; PAM type: YTN; PAM sequence: CTC
ctgcgcacgggcgcccgcgg

SEQ ID NO: 19708 - DNA, 20 bp, Artificial Sequence
  Description of Artificial Sequence: Synthetic oligonucleotide
  Target: PCSK9; (-) strand; PAM type: YTN; PAM sequence: CTC
gtcctcctgcgcacgggcgc

SEQ ID NO: 19709 - DNA, 20 bp, Artificial Sequence
  Description of Artificial Sequence: Synthetic oligonucleotide
  Target: PCSK9; (-) strand; PAM type: YTN; PAM sequence: CTC
gtagtcgccgtcctcgtcct

SEQ ID NO: 19710 - DNA, 20 bp, Artificial Sequence
  Description of Artificial Sequence: Synthetic oligonucleotide
  Target: PCSK9; (-) strand; PAM type: YTN; PAM sequence: CTC
ctcgtagtcgccgtcctcgt

SEQ ID NO: 19711 - DNA, 20 bp, Artificial Sequence
  Description of Artificial Sequence: Synthetic oligonucleotide
  Target: PCSK9; (-) strand; PAM type: YTN; PAM sequence: CTA
gcaccagctcctcgtagtcg

SEQ ID NO: 19712 - DNA, 20 bp, Artificial Sequence
  Description of Artificial Sequence: Synthetic oligonucleotide
  Target: PCSK9; (-) strand; PAM type: YTN; PAM sequence: CTC
ggaacgcaaggctagcacca

SEQ ID NO: 19713 - DNA, 20 bp, Artificial Sequence
  Description of Artificial Sequence: Synthetic oligonucleotide
  Target: PCSK9; (-) strand; PAM type: YTN; PAM sequence: CTC
ctcggaacgcaaggctagca

SEQ ID NO: 19714 - DNA, 20 bp, Artificial Sequence
  Description of Artificial Sequence: Synthetic oligonucleotide
  Target: PCSK9; (-) strand; PAM type: YTN; PAM sequence: TTC
ggccaggccgtcctcctcgg

SEQ ID NO: 19715 - DNA, 20 bp, Artificial Sequence
  Description of Artificial Sequence: Synthetic oligonucleotide
  Target: PCSK9; (-) strand; PAM type: YTN; PAM sequence: CTT
cggccaggccgtcctcctcg

SEQ ID NO: 19716 - DNA, 20 bp, Artificial Sequence
  Description of Artificial Sequence: Synthetic oligonucleotide
  Target: PCSK9; (-) strand; PAM type: YTN; PAM sequence: CTC
gggtgcttcggccaggccgt

SEQ ID NO: 19717 - DNA, 20 bp, Artificial Sequence
  Description of Artificial Sequence: Synthetic oligonucleotide
  Target: PCSK9; (-) strand; PAM type: YTN; PAM sequence: TTC
cgtgctcgggtgcttcggcc

SEQ ID NO: 19718 - DNA, 20 bp, Artificial Sequence
  Description of Artificial Sequence: Synthetic oligonucleotide
  Target: PCSK9; (-) strand; PAM type: YTN; PAM sequence: CTG
tggttccgtgctcgggtgct

SEQ ID NO: 19719 - DNA, 20 bp, Artificial Sequence
  Description of Artificial Sequence: Synthetic oligonucleotide
  Target: PCSK9; (-) strand; PAM type: YTN; PAM sequence: TTG
gcgcagcggtggaaggtggc

SEQ ID NO: 19720 - DNA, 20 bp, Artificial Sequence
  Description of Artificial Sequence: Synthetic oligonucleotide
  Target: PCSK9; (-) strand; PAM type: YTN; PAM sequence: CTT
ggcgcagcggtggaaggtgg

SEQ ID NO: 19721 - DNA, 20 bp, Artificial Sequence
  Description of Artificial Sequence: Synthetic oligonucleotide
  Target: PCSK9; (-) strand; PAM type: YTN; PAM sequence: CTA
cacccgcaccttggcgcagc

SEQ ID NO: 19722 - DNA, 20 bp, Artificial Sequence
  Description of Artificial Sequence: Synthetic oligonucleotide
  Target: PCSK9; (-) strand; PAM type: YTN; PAM sequence: CTC
ccatccctacacccgcacct

SEQ ID NO: 19723 - DNA, 20 bp, Artificial Sequence
  Description of Artificial Sequence: Synthetic oligonucleotide
  Target: PCSK9; (-) strand; PAM type: YTN; PAM sequence: TTC
gccccggcctcccatcccta

SEQ ID NO: 19724 - DNA, 20 bp, Artificial Sequence
  Description of Artificial Sequence: Synthetic oligonucleotide
  Target: PCSK9; (-) strand; PAM type: YTN; PAM sequence: CTG
cgggttcgccccggcctccc

SEQ ID NO: 19725 - DNA, 20 bp, Artificial Sequence
  Description of Artificial Sequence: Synthetic oligonucleotide
  Target: PCSK9; (-) strand; PAM type: YTN; PAM sequence: CTG
aggcccgagaggaaacagca

SEQ ID NO: 19726 - DNA, 20 bp, Artificial Sequence
  Description of Artificial Sequence: Synthetic oligonucleotide
  Target: PCSK9; (-) strand; PAM type: YTN; PAM sequence: TTA
catggggggaaactgaggcc

SEQ ID NO: 19727 - DNA, 20 bp, Artificial Sequence
  Description of Artificial Sequence: Synthetic oligonucleotide
  Target: PCSK9; (-) strand; PAM type: YTN; PAM sequence: CTT
acatggggggaaactgaggc

SEQ ID NO: 19728 - DNA, 20 bp, Artificial Sequence
  Description of Artificial Sequence: Synthetic oligonucleotide
  Target: PCSK9; (-) strand; PAM type: YTN; PAM sequence: CTC
ttacatggggggaaactgag

SEQ ID NO: 19729 - DNA, 20 bp, Artificial Sequence
  Description of Artificial Sequence: Synthetic oligonucleotide
  Target: PCSK9; (-) strand; PAM type: YTN; PAM sequence: CTC
tcttacatggggggaaactg

SEQ ID NO: 19730 - DNA, 20 bp, Artificial Sequence
  Description of Artificial Sequence: Synthetic oligonucleotide
  Target: PCSK9; (-) strand; PAM type: YTN; PAM sequence: TTC
ctctcttacatggggggaaa

SEQ ID NO: 19731 - DNA, 20 bp, Artificial Sequence
  Description of Artificial Sequence: Synthetic oligonucleotide
  Target: PCSK9; (-) strand; PAM type: YTN; PAM sequence: CTT
cctctcttacatggggggaa

SEQ ID NO: 19732 - DNA, 20 bp, Artificial Sequence
  Description of Artificial Sequence: Synthetic oligonucleotide
  Target: PCSK9; (-) strand; PAM type: YTN; PAM sequence: CTC
cacttcctctcttacatggg

SEQ ID NO: 19733 - DNA, 20 bp, Artificial Sequence
  Description of Artificial Sequence: Synthetic oligonucleotide
  Target: PCSK9; (-) strand; PAM type: YTN; PAM sequence: CTG
cactccacttcctctcttac

SEQ ID NO: 19734 - DNA, 20 bp, Artificial Sequence
  Description of Artificial Sequence: Synthetic oligonucleotide
  Target: PCSK9; (-) strand; PAM type: YTN; PAM sequence: CTC
ggcgacctgcactccacttc

SEQ ID NO: 19735 - DNA, 20 bp, Artificial Sequence
  Description of Artificial Sequence: Synthetic oligonucleotide
  Target: PCSK9; (-) strand; PAM type: YTN; PAM sequence: CTG
cagtccccaagatcgtgcca

SEQ ID NO: 19736 - DNA, 20 bp, Artificial Sequence
  Description of Artificial Sequence: Synthetic oligonucleotide
  Target: PCSK9; (-) strand; PAM type: YTN; PAM sequence: TTG
cctgcagtccccaagatcgt

SEQ ID NO: 19737 - DNA, 20 bp, Artificial Sequence
  Description of Artificial Sequence: Synthetic oligonucleotide
  Target: PCSK9; (-) strand; PAM type: YTN; PAM sequence: CTT
gcctgcagtccccaagatcg

SEQ ID NO: 19738 - DNA, 20 bp, Artificial Sequence
  Description of Artificial Sequence: Synthetic oligonucleotide
  Target: PCSK9; (-) strand; PAM type: YTN; PAM sequence: CTC
ccccgccgccttgcctgcag

SEQ ID NO: 19739 - DNA, 20 bp, Artificial Sequence
  Description of Artificial Sequence: Synthetic oligonucleotide
  Target: PCSK9; (-) strand; PAM type: YTN; PAM sequence: CTA
cccgtcctcccccgccgcct

SEQ ID NO: 19740 - DNA, 20 bp, Artificial Sequence
  Description of Artificial Sequence: Synthetic oligonucleotide
  Target: PCSK9; (-) strand; PAM type: YTN; PAM sequence: CTC
cccactacccgtcctccccc

SEQ ID NO: 19741 - DNA, 20 bp, Artificial Sequence
  Description of Artificial Sequence: Synthetic oligonucleotide
  Target: PCSK9; (-) strand; PAM type: YTN; PAM sequence: CTC
caccgtgctccccactaccc

SEQ ID NO: 19742 - DNA, 20 bp, Artificial Sequence
  Description of Artificial Sequence: Synthetic oligonucleotide
  Target: PCSK9; (-) strand; PAM type: YTN; PAM sequence: CTC
tccaccgtgctccccactac

SEQ ID NO: 19743 - DNA, 20 bp, Artificial Sequence
  Description of Artificial Sequence: Synthetic oligonucleotide
  Target: PCSK9; (-) strand; PAM type: YTN; PAM sequence: CTG
aatagcgcagccgcacgccc

SEQ ID NO: 19744 - DNA, 20 bp, Artificial Sequence
  Description of Artificial Sequence: Synthetic oligonucleotide
  Target: PCSK9; (-) strand; PAM type: YTN; PAM sequence: TTC
ccactgaatagcgcagccgc

SEQ ID NO: 19745 - DNA, 20 bp, Artificial Sequence
  Description of Artificial Sequence: Synthetic oligonucleotide
  Target: PCSK9; (-) strand; PAM type: YTN; PAM sequence: CTT
cccactgaatagcgcagccg

SEQ ID NO: 19746 - DNA, 20 bp, Artificial Sequence
  Description of Artificial Sequence: Synthetic oligonucleotide
  Target: PCSK9; (-) strand; PAM type: YTN; PAM sequence: CTC
ccaaccccgcgaaccttccc

SEQ ID NO: 19747 - DNA, 20 bp, Artificial Sequence
  Description of Artificial Sequence: Synthetic oligonucleotide
  Target: PCSK9; (-) strand; PAM type: YTN; PAM sequence: CTC
cgggtctcccaaccccgcga

SEQ ID NO: 19748 - DNA, 20 bp, Artificial Sequence
  Description of Artificial Sequence: Synthetic oligonucleotide
  Target: PCSK9; (-) strand; PAM type: YTN; PAM sequence: CTC
ggcctccgggtctcccaacc

SEQ ID NO: 19749 - DNA, 20 bp, Artificial Sequence
  Description of Artificial Sequence: Synthetic oligonucleotide
  Target: PCSK9; (-) strand; PAM type: YTN; PAM sequence: TTC
ctcggcctccgggtctccca

SEQ ID NO: 19750 - DNA, 20 bp, Artificial Sequence
  Description of Artificial Sequence: Synthetic oligonucleotide
  Target: PCSK9; (-) strand; PAM type: YTN; PAM sequence: CTT
cctcggcctccgggtctccc

SEQ ID NO: 19751 - DNA, 20 bp, Artificial Sequence
  Description of Artificial Sequence: Synthetic oligonucleotide
  Target: PCSK9; (-) strand; PAM type: YTN; PAM sequence: CTC
gcccttcctcggcctccggg

SEQ ID NO: 19752 - DNA, 20 bp, Artificial Sequence
  Description of Artificial Sequence: Synthetic oligonucleotide
  Target: PCSK9; (-) strand; PAM type: YTN; PAM sequence: CTG
ctcgcccttcctcggcctcc

SEQ ID NO: 19753 - DNA, 20 bp, Artificial Sequence
  Description of Artificial Sequence: Synthetic oligonucleotide
  Target: PCSK9; (-) strand; PAM type: YTN; PAM sequence: CTC
tgctcgcccttcctcggcct

SEQ ID NO: 19754 - DNA, 20 bp, Artificial Sequence
  Description of Artificial Sequence: Synthetic oligonucleotide
  Target: PCSK9; (-) strand; PAM type: YTN; PAM sequence: CTG
gcagtgctctgctcgccctt

SEQ ID NO: 19755 - DNA, 20 bp, Artificial Sequence
  Description of Artificial Sequence: Synthetic oligonucleotide
  Target: PCSK9; (-) strand; PAM type: YTN; PAM sequence: CTG
ggcaggatatcctggcagtg

SEQ ID NO: 19756 - DNA, 20 bp, Artificial Sequence
  Description of Artificial Sequence: Synthetic oligonucleotide
  Target: PCSK9; (-) strand; PAM type: YTN; PAM sequence: CTG
ggaaatctgggcaggatatc

SEQ ID NO: 19757 - DNA, 20 bp, Artificial Sequence
  Description of Artificial Sequence: Synthetic oligonucleotide
  Target: PCSK9; (-) strand; PAM type: YTN; PAM sequence: CTG
tgccgcggcgaggcagaaac

SEQ ID NO: 19758 - DNA, 20 bp, Artificial Sequence
  Description of Artificial Sequence: Synthetic oligonucleotide
  Target: PCSK9; (-) strand; PAM type: YTN; PAM sequence: TTC
acccacctgtgccgcggcga

SEQ ID NO: 19759 - DNA, 20 bp, Artificial Sequence
  Description of Artificial Sequence: Synthetic oligonucleotide
  Target: PCSK9; (-) strand; PAM type: YTN; PAM sequence: CTT
cacccacctgtgccgcggcg

SEQ ID NO: 19760 - DNA, 20 bp, Artificial Sequence
  Description of Artificial Sequence: Synthetic oligonucleotide
  Target: PCSK9; (-) strand; PAM type: YTN; PAM sequence: CTC
cttcacccacctgtgccgcg

SEQ ID NO: 19761 - DNA, 20 bp, Artificial Sequence
  Description of Artificial Sequence: Synthetic oligonucleotide
  Target: PCSK9; (-) strand; PAM type: YTN; PAM sequence: TTC
actccttcacccacctgtgc

SEQ ID NO: 19762 - DNA, 20 bp, Artificial Sequence
  Description of Artificial Sequence: Synthetic oligonucleotide
  Target: PCSK9; (-) strand; PAM type: YTN; PAM sequence: TTC
caggcattcactccttcacc

SEQ ID NO: 19763 - DNA, 20 bp, Artificial Sequence
  Description of Artificial Sequence: Synthetic oligonucleotide
  Target: PCSK9; (-) strand; PAM type: YTN; PAM sequence: TTC
ccagtacgttccaggcattc

SEQ ID NO: 19764 - DNA, 20 bp, Artificial Sequence
  Description of Artificial Sequence: Synthetic oligonucleotide
  Target: PCSK9; (-) strand; PAM type: YTN; PAM sequence: CTG
gtgcagttcccagtacgttc

SEQ ID NO: 19765 - DNA, 20 bp, Artificial Sequence
  Description of Artificial Sequence: Synthetic oligonucleotide
  Target: PCSK9; (-) strand; PAM type: YTN; PAM sequence: CTG
tgcctggtgcagttcccagt

SEQ ID NO: 19766 - DNA, 20 bp, Artificial Sequence
  Description of Artificial Sequence: Synthetic oligonucleotide
  Target: PCSK9; (-) strand; PAM type: YTN; PAM sequence: CTC
tgtgcctggtgcagttccca

SEQ ID NO: 19767 - DNA, 20 bp, Artificial Sequence
  Description of Artificial Sequence: Synthetic oligonucleotide
  Target: PCSK9; (-) strand; PAM type: YTN; PAM sequence: TTC
tctgtgcctggtgcagttcc

SEQ ID NO: 19768 - DNA, 20 bp, Artificial Sequence
  Description of Artificial Sequence: Synthetic oligonucleotide
  Target: PCSK9; (-) strand; PAM type: YTN; PAM sequence: TTT
ctctgtgcctggtgcagttc

SEQ ID NO: 19769 - DNA, 20 bp, Artificial Sequence
  Description of Artificial Sequence: Synthetic oligonucleotide
  Target: PCSK9; (-) strand; PAM type: YTN; PAM sequence: CTT
tctctgtgcctggtgcagtt

SEQ ID NO: 19770 - DNA, 20 bp, Artificial Sequence
  Description of Artificial Sequence: Synthetic oligonucleotide
  Target: PCSK9; (-) strand; PAM type: YTN; PAM sequence: CTA
taatggcaagcccgctttct

SEQ ID NO: 19771 - DNA, 20 bp, Artificial Sequence
  Description of Artificial Sequence: Synthetic oligonucleotide
  Target: PCSK9; (-) strand; PAM type: YTN; PAM sequence: TTC
caaaccaaatcggaacccac

SEQ ID NO: 19772 - DNA, 20 bp, Artificial Sequence
  Description of Artificial Sequence: Synthetic oligonucleotide
  Target: PCSK9; (-) strand; PAM type: YTN; PAM sequence: TTT
ccaaaccaaatcggaaccca

SEQ ID NO: 19773 - DNA, 20 bp, Artificial Sequence
  Description of Artificial Sequence: Synthetic oligonucleotide
  Target: PCSK9; (-) strand; PAM type: YTN; PAM sequence: TTT
tccaaaccaaatcggaaccc

SEQ ID NO: 19774 - DNA, 20 bp, Artificial Sequence
  Description of Artificial Sequence: Synthetic oligonucleotide
  Target: PCSK9; (-) strand; PAM type: YTN; PAM sequence: CTG
cccatgttttccaaaccaaa

SEQ ID NO: 19775 - DNA, 20 bp, Artificial Sequence
  Description of Artificial Sequence: Synthetic oligonucleotide
  Target: PCSK9; (-) strand; PAM type: YTN; PAM sequence: CTC
cgctgcccatgttttccaaa

SEQ ID NO: 19776 - DNA, 20 bp, Artificial Sequence
  Description of Artificial Sequence: Synthetic oligonucleotide
  Target: PCSK9; (-) strand; PAM type: YTN; PAM sequence: CTC
caccctccgctgcccatgtt

SEQ ID NO: 19777 - DNA, 20 bp, Artificial Sequence
  Description of Artificial Sequence: Synthetic oligonucleotide
  Target: PCSK9; (-) strand; PAM type: YTN; PAM sequence: CTC
caggccctccaccctccgct

SEQ ID NO: 19778 - DNA, 20 bp, Artificial Sequence
  Description of Artificial Sequence: Synthetic oligonucleotide
  Target: PCSK9; (-) strand; PAM type: YTN; PAM sequence: CTC
tccaggccctccaccctccg

SEQ ID NO: 19779 - DNA, 20 bp, Artificial Sequence
  Description of Artificial Sequence: Synthetic oligonucleotide
  Target: PCSK9; (-) strand; PAM type: YTN; PAM sequence: TTC
tctccaggccctccaccctc

SEQ ID NO: 19780 - DNA, 20 bp, Artificial Sequence
  Description of Artificial Sequence: Synthetic oligonucleotide
  Target: PCSK9; (-) strand; PAM type: YTN; PAM sequence: CTT
ctctccaggccctccaccct

SEQ ID NO: 19781 - DNA, 20 bp, Artificial Sequence
  Description of Artificial Sequence: Synthetic oligonucleotide
  Target: PCSK9; (-) strand; PAM type: YTN; PAM sequence: CTC
gggtagggccttctctccag

SEQ ID NO: 19782 - DNA, 20 bp, Artificial Sequence
  Description of Artificial Sequence: Synthetic oligonucleotide
  Target: PCSK9; (-) strand; PAM type: YTN; PAM sequence: CTG
tctcgggtagggccttctct

SEQ ID NO: 19783 - DNA, 20 bp, Artificial Sequence
  Description of Artificial Sequence: Synthetic oligonucleotide
  Target: PCSK9; (-) strand; PAM type: YTN; PAM sequence: TTC
ccaccccgcccctgtctcgg

SEQ ID NO: 19784 - DNA, 20 bp, Artificial Sequence
  Description of Artificial Sequence: Synthetic oligonucleotide
  Target: PCSK9; (-) strand; PAM type: YTN; PAM sequence: CTT
cccaccccgcccctgtctcg

SEQ ID NO: 19785 - DNA, 20 bp, Artificial Sequence
  Description of Artificial Sequence: Synthetic oligonucleotide
  Target: PCSK9; (-) strand; PAM type: YTN; PAM sequence: CTG
ccgtccttcccaccccgccc

SEQ ID NO: 19786 - DNA, 20 bp, Artificial Sequence
  Description of Artificial Sequence: Synthetic oligonucleotide
  Target: PCSK9; (-) strand; PAM type: YTN; PAM sequence: CTC
ccagcatctgccgtccttcc

SEQ ID NO: 19787 - DNA, 20 bp, Artificial Sequence
  Description of Artificial Sequence: Synthetic oligonucleotide
  Target: PCSK9; (-) strand; PAM type: YTN; PAM sequence: CTC
gtgctcccagcatctgccgt

SEQ ID NO: 19788 - DNA, 20 bp, Artificial Sequence
  Description of Artificial Sequence: Synthetic oligonucleotide
  Target: PCSK9; (-) strand; PAM type: YTN; PAM sequence: TTG
cctcgtgctcccagcatctg

SEQ ID NO: 19789 - DNA, 20 bp, Artificial Sequence
  Description of Artificial Sequence: Synthetic oligonucleotide
  Target: PCSK9; (-) strand; PAM type: YTN; PAM sequence: CTG
tgtcataaagaaattgcctc

SEQ ID NO: 19790 - DNA, 20 bp, Artificial Sequence
  Description of Artificial Sequence: Synthetic oligonucleotide
  Target: PCSK9; (-) strand; PAM type: YTN; PAM sequence: TTC
tgtgtcataaagaaattgcc

SEQ ID NO: 19791 - DNA, 20 bp, Artificial Sequence
  Description of Artificial Sequence: Synthetic oligonucleotide
  Target: PCSK9; (-) strand; PAM type: YTN; PAM sequence: CTA
gagcatgagttctgtgtcat

SEQ ID NO: 19792 - DNA, 20 bp, Artificial Sequence
  Description of Artificial Sequence: Synthetic oligonucleotide
  Target: PCSK9; (-) strand; PAM type: YTN; PAM sequence: CTG
aaacagatggaatactagag

SEQ ID NO: 19793 - DNA, 20 bp, Artificial Sequence
  Description of Artificial Sequence: Synthetic oligonucleotide
  Target: PCSK9; (-) strand; PAM type: YTN; PAM sequence: TTC
ggctgaaacagatggaatac

SEQ ID NO: 19794 - DNA, 20 bp, Artificial Sequence
  Description of Artificial Sequence: Synthetic oligonucleotide
  Target: PCSK9; (-) strand; PAM type: YTN; PAM sequence: CTT
cggctgaaacagatggaata

SEQ ID NO: 19795 - DNA, 20 bp, Artificial Sequence
  Description of Artificial Sequence: Synthetic oligonucleotide
  Target: PCSK9; (-) strand; PAM type: YTN; PAM sequence: TTC
ttcggctgaaacagatggaa

SEQ ID NO: 19796 - DNA, 20 bp, Artificial Sequence
  Description of Artificial Sequence: Synthetic oligonucleotide
  Target: PCSK9; (-) strand; PAM type: YTN; PAM sequence: TTT
cttcggctgaaacagatgga

SEQ ID NO: 19797 - DNA, 20 bp, Artificial Sequence
  Description of Artificial Sequence: Synthetic oligonucleotide
  Target: PCSK9; (-) strand; PAM type: YTN; PAM sequence: TTT
tcttcggctgaaacagatgg

SEQ ID NO: 19798 - DNA, 20 bp, Artificial Sequence
  Description of Artificial Sequence: Synthetic oligonucleotide
  Target: PCSK9; (-) strand; PAM type: YTN; PAM sequence: CTT
ttcttcggctgaaacagatg

SEQ ID NO: 19799 - DNA, 20 bp, Artificial Sequence
  Description of Artificial Sequence: Synthetic oligonucleotide
  Target: PCSK9; (-) strand; PAM type: YTN; PAM sequence: TTC
ttttcttcggctgaaacaga

SEQ ID NO: 19800 - DNA, 20 bp, Artificial Sequence
  Description of Artificial Sequence: Synthetic oligonucleotide
  Target: PCSK9; (-) strand; PAM type: YTN; PAM sequence: CTG
gttcttttcttcggctgaaa

SEQ ID NO: 19801 - DNA, 20 bp, Artificial Sequence
  Description of Artificial Sequence: Synthetic oligonucleotide
  Target: PCSK9; (-) strand; PAM type: YTN; PAM sequence: TTC
agctggttcttttcttcggc

SEQ ID NO: 19802 - DNA, 20 bp, Artificial Sequence
  Description of Artificial Sequence: Synthetic oligonucleotide
  Target: PCSK9; (-) strand; PAM type: YTN; PAM sequence: CTT
cagctggttcttttcttcgg

SEQ ID NO: 19803 - DNA, 20 bp, Artificial Sequence
  Description of Artificial Sequence: Synthetic oligonucleotide
  Target: PCSK9; (-) strand; PAM type: YTN; PAM sequence: CTG
ccccttcagctggttctttt

SEQ ID NO: 19804 - DNA, 20 bp, Artificial Sequence
  Description of Artificial Sequence: Synthetic oligonucleotide
  Target: PCSK9; (-) strand; PAM type: YTN; PAM sequence: CTC
ccctgccccttcagctggtt

SEQ ID NO: 19805 - DNA, 20 bp, Artificial Sequence
  Description of Artificial Sequence: Synthetic oligonucleotide
  Target: PCSK9; (-) strand; PAM type: YTN; PAM sequence: TTC
tcccctgccccttcagctgg

SEQ ID NO: 19806 - DNA, 20 bp, Artificial Sequence
  Description of Artificial Sequence: Synthetic oligonucleotide
  Target: PCSK9; (-) strand; PAM type: YTN; PAM sequence: CTT
ctcccctgccccttcagctg

SEQ ID NO: 19807 - DNA, 20 bp, Artificial Sequence
  Description of Artificial Sequence: Synthetic oligonucleotide
  Target: PCSK9; (-) strand; PAM type: YTN; PAM sequence: CTC
cgccccttctcccctgcccc

SEQ ID NO: 19808 - DNA, 20 bp, Artificial Sequence
  Description of Artificial Sequence: Synthetic oligonucleotide
  Target: PCSK9; (-) strand; PAM type: YTN; PAM sequence: CTC
gagaatacctccgccccttc

SEQ ID NO: 19809 - DNA, 20 bp, Artificial Sequence
  Description of Artificial Sequence: Synthetic oligonucleotide
  Target: PCSK9; (-) strand; PAM type: YTN; PAM sequence: CTA
aaggacgccaatgggcctcg

SEQ ID NO: 19810 - DNA, 20 bp, Artificial Sequence
  Description of Artificial Sequence: Synthetic oligonucleotide
  Target: PCSK9; (-) strand; PAM type: YTN; PAM sequence: CTG
agtcctaaaggacgccaatg

SEQ ID NO: 19811 - DNA, 20 bp, Artificial Sequence
  Description of Artificial Sequence: Synthetic oligonucleotide
  Target: PCSK9; (-) strand; PAM type: YTN; PAM sequence: CTG
cctgagtcctaaaggacgcc

SEQ ID NO: 19812 - DNA, 20 bp, Artificial Sequence
  Description of Artificial Sequence: Synthetic oligonucleotide
  Target: PCSK9; (-) strand; PAM type: YTN; PAM sequence: TTC
cctgcctgagtcctaaagga

SEQ ID NO: 19813 - DNA, 20 bp, Artificial Sequence
  Description of Artificial Sequence: Synthetic oligonucleotide
  Target: PCSK9; (-) strand; PAM type: YTN; PAM sequence: CTT
ccctgcctgagtcctaaagg

SEQ ID NO: 19814 - DNA, 20 bp, Artificial Sequence
  Description of Artificial Sequence: Synthetic oligonucleotide
  Target: PCSK9; (-) strand; PAM type: YTN; PAM sequence: CTC
cagagcaccaagggcccttc

SEQ ID NO: 19815 - DNA, 20 bp, Artificial Sequence
  Description of Artificial Sequence: Synthetic oligonucleotide
  Target: PCSK9; (-) strand; PAM type: YTN; PAM sequence: CTC
cggctccagagcaccaaggg

SEQ ID NO: 19816 - DNA, 20 bp, Artificial Sequence
  Description of Artificial Sequence: Synthetic oligonucleotide
  Target: PCSK9; (-) strand; PAM type: YTN; PAM sequence: CTC
cggggtcccagtaccaggcg

SEQ ID NO: 19817 - DNA, 20 bp, Artificial Sequence
  Description of Artificial Sequence: Synthetic oligonucleotide
  Target: PCSK9; (-) strand; PAM type: YTN; PAM sequence: CTC
agctccggggtcccagtacc

SEQ ID NO: 19818 - DNA, 20 bp, Artificial Sequence
  Description of Artificial Sequence: Synthetic oligonucleotide
  Target: PCSK9; (-) strand; PAM type: YTN; PAM sequence: CTG
aggcgccgggctcagctccg

SEQ ID NO: 19819 - DNA, 20 bp, Artificial Sequence
  Description of Artificial Sequence: Synthetic oligonucleotide
  Target: PCSK9; (-) strand; PAM type: YTN; PAM sequence: CTC
gccccgcacacggtcggcag

SEQ ID NO: 19820 - DNA, 20 bp, Artificial Sequence
  Description of Artificial Sequence: Synthetic oligonucleotide
  Target: PCSK9; (-) strand; PAM type: YTN; PAM sequence: TTG
agcaaactcgccccgcacac

SEQ ID NO: 19821 - DNA, 20 bp, Artificial Sequence
  Description of Artificial Sequence: Synthetic oligonucleotide
  Target: PCSK9; (-) strand; PAM type: YTN; PAM sequence: TTG
ttgagcaaactcgccccgca

SEQ ID NO: 19822 - DNA, 20 bp, Artificial Sequence
  Description of Artificial Sequence: Synthetic oligonucleotide
  Target: PCSK9; (-) strand; PAM type: YTN; PAM sequence: CTG
gcagagttgttgagcaaact

SEQ ID NO: 19823 - DNA, 20 bp, Artificial Sequence
  Description of Artificial Sequence: Synthetic oligonucleotide
  Target: PCSK9; (-) strand; PAM type: YTN; PAM sequence: CTG
agggccagaagctggcagag

SEQ ID NO: 19824 - DNA, 20 bp, Artificial Sequence
  Description of Artificial Sequence: Synthetic oligonucleotide
  Target: PCSK9; (-) strand; PAM type: YTN; PAM sequence: TTC
ccacagcctgagggccagaa

SEQ ID NO: 19825 - DNA, 20 bp, Artificial Sequence
  Description of Artificial Sequence: Synthetic oligonucleotide
  Target: PCSK9; (-) strand; PAM type: YTN; PAM sequence: CTT
cccacagcctgagggccaga

SEQ ID NO: 19826 - DNA, 20 bp, Artificial Sequence
  Description of Artificial Sequence: Synthetic oligonucleotide
  Target: PCSK9; (-) strand; PAM type: YTN; PAM sequence: CTC
gccccgggaagaagcttccc

SEQ ID NO: 19827 - DNA, 20 bp, Artificial Sequence
  Description of Artificial Sequence: Synthetic oligonucleotide
  Target: PCSK9; (-) strand; PAM type: YTN; PAM sequence: CTA
gtggtctcgccccgggaaga

SEQ ID NO: 19828 - DNA, 20 bp, Artificial Sequence
  Description of Artificial Sequence: Synthetic oligonucleotide
  Target: PCSK9; (-) strand; PAM type: YTN; PAM sequence: TTA
gaaaaagctagtggtctcgc

SEQ ID NO: 19829 - DNA, 20 bp, Artificial Sequence
  Description of Artificial Sequence: Synthetic oligonucleotide
  Target: PCSK9; (-) strand; PAM type: YTN; PAM sequence: CTT
agaaaaagctagtggtctcg

SEQ ID NO: 19830 - DNA, 20 bp, Artificial Sequence
  Description of Artificial Sequence: Synthetic oligonucleotide
  Target: PCSK9; (-) strand; PAM type: YTN; PAM sequence: CTG
gtaatacttagaaaaagcta

SEQ ID NO: 19831 - DNA, 20 bp, Artificial Sequence
  Description of Artificial Sequence: Synthetic oligonucleotide
  Target: PCSK9; (-) strand; PAM type: YTN; PAM sequence: CTG
ggctggtaatacttagaaaa

SEQ ID NO: 19832 - DNA, 20 bp, Artificial Sequence
  Description of Artificial Sequence: Synthetic oligonucleotide
  Target: PCSK9; (-) strand; PAM type: YTN; PAM sequence: CTC
agccaagtcctgggctggta

SEQ ID NO: 19833 - DNA, 20 bp, Artificial Sequence
  Description of Artificial Sequence: Synthetic oligonucleotide
  Target: PCSK9; (-) strand; PAM type: YTN; PAM sequence: CTG
ggggacacagaacctcagcc

SEQ ID NO: 19834 - DNA, 20 bp, Artificial Sequence
  Description of Artificial Sequence: Synthetic oligonucleotide
  Target: PCSK9; (-) strand; PAM type: YTN; PAM sequence: CTC
caagctgggggacacagaac

SEQ ID NO: 19835 - DNA, 20 bp, Artificial Sequence
  Description of Artificial Sequence: Synthetic oligonucleotide
  Target: PCSK9; (-) strand; PAM type: YTN; PAM sequence: CTG
actccaagctgggggacaca

SEQ ID NO: 19836 - DNA, 20 bp, Artificial Sequence
  Description of Artificial Sequence: Synthetic oligonucleotide
  Target: PCSK9; (-) strand; PAM type: YTN; PAM sequence: TTC
aaccccacatctgactccaa

SEQ ID NO: 19837 - DNA, 20 bp, Artificial Sequence
  Description of Artificial Sequence: Synthetic oligonucleotide
  Target: PCSK9; (-) strand; PAM type: YTN; PAM sequence: CTA
gtgagaggaagccaagattc

SEQ ID NO: 19838 - DNA, 20 bp, Artificial Sequence
  Description of Artificial Sequence: Synthetic oligonucleotide
  Target: PCSK9; (-) strand; PAM type: YTN; PAM sequence: TTG
tcaagcaccacagctagtga

SEQ ID NO: 19839 - DNA, 20 bp, Artificial Sequence
  Description of Artificial Sequence: Synthetic oligonucleotide
  Target: PCSK9; (-) strand; PAM type: YTN; PAM sequence: CTT
gtcaagcaccacagctagtg

SEQ ID NO: 19840 - DNA, 20 bp, Artificial Sequence
  Description of Artificial Sequence: Synthetic oligonucleotide
  Target: PCSK9; (-) strand; PAM type: YTN; PAM sequence: CTC
aaggataagtgacttgtcaa

SEQ ID NO: 19841 - DNA, 20 bp, Artificial Sequence
  Description of Artificial Sequence: Synthetic oligonucleotide
  Target: PCSK9; (-) strand; PAM type: YTN; PAM sequence: TTA
ggcaatggaggctcaaggat

SEQ ID NO: 19842 - DNA, 20 bp, Artificial Sequence
  Description of Artificial Sequence: Synthetic oligonucleotide
  Target: PCSK9; (-) strand; PAM type: YTN; PAM sequence: TTA
aagattaggcaatggaggct

SEQ ID NO: 19843 - DNA, 20 bp, Artificial Sequence
  Description of Artificial Sequence: Synthetic oligonucleotide
  Target: PCSK9; (-) strand; PAM type: YTN; PAM sequence: TTT
aaagattaggcaatggaggc

SEQ ID NO: 19844 - DNA, 20 bp, Artificial Sequence
  Description of Artificial Sequence: Synthetic oligonucleotide
  Target: PCSK9; (-) strand; PAM type: YTN; PAM sequence: TTT
taaagattaggcaatggagg

SEQ ID NO: 19845 - DNA, 20 bp, Artificial Sequence
  Description of Artificial Sequence: Synthetic oligonucleotide
  Target: PCSK9; (-) strand; PAM type: YTN; PAM sequence: CTT
ttaaagattaggcaatggag

SEQ ID NO: 19846 - DNA, 20 bp, Artificial Sequence
  Description of Artificial Sequence: Synthetic oligonucleotide
  Target: PCSK9; (-) strand; PAM type: YTN; PAM sequence: CTC
ccttttaaagattaggcaat

SEQ ID NO: 19847 - DNA, 20 bp, Artificial Sequence
  Description of Artificial Sequence: Synthetic oligonucleotide
  Target: PCSK9; (-) strand; PAM type: YTN; PAM sequence: TTG
tcacctcccttttaaagatt

SEQ ID NO: 19848 - DNA, 20 bp, Artificial Sequence
  Description of Artificial Sequence: Synthetic oligonucleotide
  Target: PCSK9; (-) strand; PAM type: YTN; PAM sequence: CTG
agccgtagggacgattgtca

SEQ ID NO: 19849 - DNA, 20 bp, Artificial Sequence
  Description of Artificial Sequence: Synthetic oligonucleotide
  Target: PCSK9; (-) strand; PAM type: YTN; PAM sequence: CTG
ccactgagccgtagggacga

SEQ ID NO: 19850 - DNA, 20 bp, Artificial Sequence
  Description of Artificial Sequence: Synthetic oligonucleotide
  Target: PCSK9; (-) strand; PAM type: YTN; PAM sequence: CTG
ctgccactgagccgtaggga

SEQ ID NO: 19851 - DNA, 20 bp, Artificial Sequence
  Description of Artificial Sequence: Synthetic oligonucleotide
  Target: PCSK9; (-) strand; PAM type: YTN; PAM sequence: CTC
cccatctgctgccactgagc

SEQ ID NO: 19852 - DNA, 20 bp, Artificial Sequence
  Description of Artificial Sequence: Synthetic oligonucleotide
  Target: PCSK9; (-) strand; PAM type: YTN; PAM sequence: TTC
atctccccatctgctgccac

SEQ ID NO: 19853 - DNA, 20 bp, Artificial Sequence
  Description of Artificial Sequence: Synthetic oligonucleotide
  Target: PCSK9; (-) strand; PAM type: YTN; PAM sequence: CTT
catctccccatctgctgcca

SEQ ID NO: 19854 - DNA, 20 bp, Artificial Sequence
  Description of Artificial Sequence: Synthetic oligonucleotide
  Target: PCSK9; (-) strand; PAM type: YTN; PAM sequence: TTC
ccttcatctccccatctgct

SEQ ID NO: 19855 - DNA, 20 bp, Artificial Sequence
  Description of Artificial Sequence: Synthetic oligonucleotide
  Target: PCSK9; (-) strand; PAM type: YTN; PAM sequence: TTT
cccttcatctccccatctgc

SEQ ID NO: 19856 - DNA, 20 bp, Artificial Sequence
  Description of Artificial Sequence: Synthetic oligonucleotide
  Target: PCSK9; (-) strand; PAM type: YTN; PAM sequence: CTT
tcccttcatctccccatctg

SEQ ID NO: 19857 - DNA, 20 bp, Artificial Sequence
  Description of Artificial Sequence: Synthetic oligonucleotide
  Target: PCSK9; (-) strand; PAM type: YTN; PAM sequence: CTC
atggtcaacagaactttccc

SEQ ID NO: 19858 - DNA, 20 bp, Artificial Sequence
  Description of Artificial Sequence: Synthetic oligonucleotide
  Target: PCSK9; (-) strand; PAM type: YTN; PAM sequence: TTC
actcatggtcaacagaactt

SEQ ID NO: 19859 - DNA, 20 bp, Artificial Sequence
  Description of Artificial Sequence: Synthetic oligonucleotide
  Target: PCSK9; (-) strand; PAM type: YTN; PAM sequence: TTG
taagttcactcatggtcaac

SEQ ID NO: 19860 - DNA, 20 bp, Artificial Sequence
  Description of Artificial Sequence: Synthetic oligonucleotide
  Target: PCSK9; (-) strand; PAM type: YTN; PAM sequence: TTG
cattgtaagttcactcatgg

SEQ ID NO: 19861 - DNA, 20 bp, Artificial Sequence
  Description of Artificial Sequence: Synthetic oligonucleotide
  Target: PCSK9; (-) strand; PAM type: YTN; PAM sequence: CTT
gcattgtaagttcactcatg

SEQ ID NO: 19862 - DNA, 20 bp, Artificial Sequence
  Description of Artificial Sequence: Synthetic oligonucleotide
  Target: PCSK9; (-) strand; PAM type: YTN; PAM sequence: CTG
caagtgatccccccggggct

SEQ ID NO: 19863 - DNA, 20 bp, Artificial Sequence
  Description of Artificial Sequence: Synthetic oligonucleotide
  Target: PCSK9; (-) strand; PAM type: YTN; PAM sequence: CTG
cagacagggacaaaactgca

SEQ ID NO: 19864 - DNA, 20 bp, Artificial Sequence
  Description of Artificial Sequence: Synthetic oligonucleotide
  Target: PCSK9; (-) strand; PAM type: YTN; PAM sequence: TTG
gagcaaagacaatgtcacca

SEQ ID NO: 19865 - DNA, 20 bp, Artificial Sequence
  Description of Artificial Sequence: Synthetic oligonucleotide
  Target: PCSK9; (-) strand; PAM type: YTN; PAM sequence: TTT
ggagcaaagacaatgtcacc

SEQ ID NO: 19866 - DNA, 20 bp, Artificial Sequence
  Description of Artificial Sequence: Synthetic oligonucleotide
  Target: PCSK9; (-) strand; PAM type: YTN; PAM sequence: CTG
tggtttggagcaaagacaat

SEQ ID NO: 19867 - DNA, 20 bp, Artificial Sequence
  Description of Artificial Sequence: Synthetic oligonucleotide
  Target: PCSK9; (-) strand; PAM type: YTN; PAM sequence: CTG
ccccaggagctgtggtttgg

SEQ ID NO: 19868 - DNA, 20 bp, Artificial Sequence
  Description of Artificial Sequence: Synthetic oligonucleotide
  Target: PCSK9; (-) strand; PAM type: YTN; PAM sequence: CTC
tgccccaggagctgtggttt

SEQ ID NO: 19869 - DNA, 20 bp, Artificial Sequence
  Description of Artificial Sequence: Synthetic oligonucleotide
  Target: PCSK9; (-) strand; PAM type: YTN; PAM sequence: TTC
ccctctgccccaggagctgt

SEQ ID NO: 19870 - DNA, 20 bp, Artificial Sequence
  Description of Artificial Sequence: Synthetic oligonucleotide
  Target: PCSK9; (-) strand; PAM type: YTN; PAM sequence: TTT
cccctctgccccaggagctg

SEQ ID NO: 19871 - DNA, 20 bp, Artificial Sequence
  Description of Artificial Sequence: Synthetic oligonucleotide
  Target: PCSK9; (-) strand; PAM type: YTN; PAM sequence: TTT
tcccctctgccccaggagct

SEQ ID NO: 19872 - DNA, 20 bp, Artificial Sequence
  Description of Artificial Sequence: Synthetic oligonucleotide
  Target: PCSK9; (-) strand; PAM type: YTN; PAM sequence: CTG
tgagtggcagaattttcccc

SEQ ID NO: 19873 - DNA, 20 bp, Artificial Sequence
  Description of Artificial Sequence: Synthetic oligonucleotide
  Target: PCSK9; (-) strand; PAM type: YTN; PAM sequence: CTC
agacagaagcgtgggcaggc

SEQ ID NO: 19874 - DNA, 20 bp, Artificial Sequence
  Description of Artificial Sequence: Synthetic oligonucleotide
  Target: PCSK9; (-) strand; PAM type: YTN; PAM sequence: CTG
ccacccagcacactcagaca

SEQ ID NO: 19875 - DNA, 20 bp, Artificial Sequence
  Description of Artificial Sequence: Synthetic oligonucleotide
  Target: PCSK9; (-) strand; PAM type: YTN; PAM sequence: TTG
ccatcctgccacccagcaca

SEQ ID NO: 19876 - DNA, 20 bp, Artificial Sequence
  Description of Artificial Sequence: Synthetic oligonucleotide
  Target: PCSK9; (-) strand; PAM type: YTN; PAM sequence: CTT
gccatcctgccacccagcac

SEQ ID NO: 19877 - DNA, 20 bp, Artificial Sequence
  Description of Artificial Sequence: Synthetic oligonucleotide
  Target: PCSK9; (-) strand; PAM type: YTN; PAM sequence: CTG
agtaaggacttgccatcctg

SEQ ID NO: 19878 - DNA, 20 bp, Artificial Sequence
  Description of Artificial Sequence: Synthetic oligonucleotide
  Target: PCSK9; (-) strand; PAM type: YTN; PAM sequence: CTG
agctgagtaaggacttgcca

SEQ ID NO: 19879 - DNA, 20 bp, Artificial Sequence
  Description of Artificial Sequence: Synthetic oligonucleotide
  Target: PCSK9; (-) strand; PAM type: YTN; PAM sequence: CTA
tactgagctgagtaaggact

SEQ ID NO: 19880 - DNA, 20 bp, Artificial Sequence
  Description of Artificial Sequence: Synthetic oligonucleotide
  Target: PCSK9; (-) strand; PAM type: YTN; PAM sequence: CTC
agggaacaaggaagagggct

SEQ ID NO: 19881 - DNA, 20 bp, Artificial Sequence
  Description of Artificial Sequence: Synthetic oligonucleotide
  Target: PCSK9; (-) strand; PAM type: YTN; PAM sequence: CTC
gagaaagtcaaaggctcagg

SEQ ID NO: 19882 - DNA, 20 bp, Artificial Sequence
  Description of Artificial Sequence: Synthetic oligonucleotide
  Target: PCSK9; (-) strand; PAM type: YTN; PAM sequence: CTG
gccacaaccccacaacatcc

SEQ ID NO: 19883 - DNA, 20 bp, Artificial Sequence
  Description of Artificial Sequence: Synthetic oligonucleotide
  Target: PCSK9; (-) strand; PAM type: YTN; PAM sequence: TTA
tcctggccacaaccccacaa

SEQ ID NO: 19884 - DNA, 20 bp, Artificial Sequence
  Description of Artificial Sequence: Synthetic oligonucleotide
  Target: PCSK9; (-) strand; PAM type: YTN; PAM sequence: CTT
atcctggccacaaccccaca

SEQ ID NO: 19885 - DNA, 20 bp, Artificial Sequence
  Description of Artificial Sequence: Synthetic oligonucleotide
  Target: PCSK9; (-) strand; PAM type: YTN; PAM sequence: TTC
ttatcctggccacaacccca

SEQ ID NO: 19886 - DNA, 20 bp, Artificial Sequence
  Description of Artificial Sequence: Synthetic oligonucleotide
  Target: PCSK9; (-) strand; PAM type: YTN; PAM sequence: TTT
cttatcctggccacaacccc

SEQ ID NO: 19887 - DNA, 20 bp, Artificial Sequence
  Description of Artificial Sequence: Synthetic oligonucleotide
  Target: PCSK9; (-) strand; PAM type: YTN; PAM sequence: CTT
tcttatcctggccacaaccc

SEQ ID NO: 19888 - DNA, 20 bp, Artificial Sequence
  Description of Artificial Sequence: Synthetic oligonucleotide
  Target: PCSK9; (-) strand; PAM type: YTN; PAM sequence: TTG
aaatgccctttcttatcctg

SEQ ID NO: 19889 - DNA, 20 bp, Artificial Sequence
  Description of Artificial Sequence: Synthetic oligonucleotide
  Target: PCSK9; (-) strand; PAM type: YTN; PAM sequence: CTT
gaaatgccctttcttatcct

SEQ ID NO: 19890 - DNA, 20 bp, Artificial Sequence
  Description of Artificial Sequence: Synthetic oligonucleotide
  Target: PCSK9; (-) strand; PAM type: YTN; PAM sequence: TTG
gagcagtggtaacttgaaat

SEQ ID NO: 19891 - DNA, 20 bp, Artificial Sequence
  Description of Artificial Sequence: Synthetic oligonucleotide
  Target: PCSK9; (-) strand; PAM type: YTN; PAM sequence: TTT
ggagcagtggtaacttgaaa

SEQ ID NO: 19892 - DNA, 20 bp, Artificial Sequence
  Description of Artificial Sequence: Synthetic oligonucleotide
  Target: PCSK9; (-) strand; PAM type: YTN; PAM sequence: TTT
tggagcagtggtaacttgaa

SEQ ID NO: 19893 - DNA, 20 bp, Artificial Sequence
  Description of Artificial Sequence: Synthetic oligonucleotide
  Target: PCSK9; (-) strand; PAM type: YTN; PAM sequence: TTG
ttttggagcagtggtaactt

SEQ ID NO: 19894 - DNA, 20 bp, Artificial Sequence
  Description of Artificial Sequence: Synthetic oligonucleotide
  Target: PCSK9; (-) strand; PAM type: YTN; PAM sequence: TTC
cagaacagttgttttggagc

SEQ ID NO: 19895 - DNA, 20 bp, Artificial Sequence
  Description of Artificial Sequence: Synthetic oligonucleotide
  Target: PCSK9; (-) strand; PAM type: YTN; PAM sequence: TTT
ccagaacagttgttttggag

SEQ ID NO: 19896 - DNA, 20 bp, Artificial Sequence
  Description of Artificial Sequence: Synthetic oligonucleotide
  Target: PCSK9; (-) strand; PAM type: YTN; PAM sequence: CTA
tttccagaacagttgttttg

SEQ ID NO: 19897 - DNA, 20 bp, Artificial Sequence
  Description of Artificial Sequence: Synthetic oligonucleotide
  Target: PCSK9; (-) strand; PAM type: YTN; PAM sequence: CTC
actatttccagaacagttgt

SEQ ID NO: 19898 - DNA, 20 bp, Artificial Sequence
  Description of Artificial Sequence: Synthetic oligonucleotide
  Target: PCSK9; (-) strand; PAM type: YTN; PAM sequence: CTC
aggatggggtactcactatt

SEQ ID NO: 19899 - DNA, 20 bp, Artificial Sequence
  Description of Artificial Sequence: Synthetic oligonucleotide
  Target: PCSK9; (-) strand; PAM type: YTN; PAM sequence: CTC
tcaggatggggtactcacta

SEQ ID NO: 19900 - DNA, 20 bp, Artificial Sequence
  Description of Artificial Sequence: Synthetic oligonucleotide
  Target: PCSK9; (-) strand; PAM type: YTN; PAM sequence: CTC
acctctcaggatggggtact

SEQ ID NO: 19901 - DNA, 20 bp, Artificial Sequence
  Description of Artificial Sequence: Synthetic oligonucleotide
  Target: PCSK9; (-) strand; PAM type: YTN; PAM sequence: TTA
ctcacctctcaggatggggt

SEQ ID NO: 19902 - DNA, 20 bp, Artificial Sequence
  Description of Artificial Sequence: Synthetic oligonucleotide
  Target: PCSK9; (-) strand; PAM type: YTN; PAM sequence: CTT
actcacctctcaggatgggg

SEQ ID NO: 19903 - DNA, 20 bp, Artificial Sequence
  Description of Artificial Sequence: Synthetic oligonucleotide
  Target: PCSK9; (-) strand; PAM type: YTN; PAM sequence: CTG
cttactcacctctcaggatg

SEQ ID NO: 19904 - DNA, 20 bp, Artificial Sequence
  Description of Artificial Sequence: Synthetic oligonucleotide
  Target: PCSK9; (-) strand; PAM type: YTN; PAM sequence: CTC
tgcttactcacctctcagga

SEQ ID NO: 19905 - DNA, 20 bp, Artificial Sequence
  Description of Artificial Sequence: Synthetic oligonucleotide
  Target: PCSK9; (-) strand; PAM type: YTN; PAM sequence: TTC
aggtggtcatacagcctctg

SEQ ID NO: 19906 - DNA, 20 bp, Artificial Sequence
  Description of Artificial Sequence: Synthetic oligonucleotide
  Target: PCSK9; (-) strand; PAM type: YTN; PAM sequence: TTG
gttcaggtggtcatacagcc

SEQ ID NO: 19907 - DNA, 20 bp, Artificial Sequence
  Description of Artificial Sequence: Synthetic oligonucleotide
  Target: PCSK9; (-) strand; PAM type: YTN; PAM sequence: CTT
ggttcaggtggtcatacagc

SEQ ID NO: 19908 - DNA, 20 bp, Artificial Sequence
  Description of Artificial Sequence: Synthetic oligonucleotide
  Target: PCSK9; (-) strand; PAM type: YTN; PAM sequence: CTC
aagggcttggttcaggtggt

SEQ ID NO: 19909 - DNA, 20 bp, Artificial Sequence
  Description of Artificial Sequence: Synthetic oligonucleotide
  Target: PCSK9; (-) strand; PAM type: YTN; PAM sequence: TTC
caccagagaagaaacatcct

SEQ ID NO: 19910 - DNA, 20 bp, Artificial Sequence
  Description of Artificial Sequence: Synthetic oligonucleotide
  Target: PCSK9; (-) strand; PAM type: YTN; PAM sequence: CTT
ccaccagagaagaaacatcc

SEQ ID NO: 19911 - DNA, 20 bp, Artificial Sequence
  Description of Artificial Sequence: Synthetic oligonucleotide
  Target: PCSK9; (-) strand; PAM type: YTN; PAM sequence: TTC
caaacttccaccagagaaga

SEQ ID NO: 19912 - DNA, 20 bp, Artificial Sequence
  Description of Artificial Sequence: Synthetic oligonucleotide
  Target: PCSK9; (-) strand; PAM type: YTN; PAM sequence: CTG
ttccaaacttccaccagaga

SEQ ID NO: 19913 - DNA, 20 bp, Artificial Sequence
  Description of Artificial Sequence: Synthetic oligonucleotide
  Target: PCSK9; (-) strand; PAM type: YTN; PAM sequence: CTC
ctgttccaaacttccaccag

SEQ ID NO: 19914 - DNA, 20 bp, Artificial Sequence
  Description of Artificial Sequence: Synthetic oligonucleotide
  Target: PCSK9; (-) strand; PAM type: YTN; PAM sequence: TTG
aggaggctcctgttccaaac

SEQ ID NO: 19915 - DNA, 20 bp, Artificial Sequence
  Description of Artificial Sequence: Synthetic oligonucleotide
  Target: PCSK9; (-) strand; PAM type: YTN; PAM sequence: CTT
gaggaggctcctgttccaaa

SEQ ID NO: 19916 - DNA, 20 bp, Artificial Sequence
  Description of Artificial Sequence: Synthetic oligonucleotide
  Target: PCSK9; (-) strand; PAM type: YTN; PAM sequence: TTG
aatgaatgaataaatgaact

SEQ ID NO: 19917 - DNA, 20 bp, Artificial Sequence
  Description of Artificial Sequence: Synthetic oligonucleotide
  Target: PCSK9; (-) strand; PAM type: YTN; PAM sequence: TTC
ccacaaaataaccattgaat

SEQ ID NO: 19918 - DNA, 20 bp, Artificial Sequence
  Description of Artificial Sequence: Synthetic oligonucleotide
  Target: PCSK9; (-) strand; PAM type: YTN; PAM sequence: TTC
gattcccacaaaataaccat

SEQ ID NO: 19919 - DNA, 20 bp, Artificial Sequence
  Description of Artificial Sequence: Synthetic oligonucleotide
  Target: PCSK9; (-) strand; PAM type: YTN; PAM sequence: CTA
aattcgattcccacaaaata

SEQ ID NO: 19920 - DNA, 20 bp, Artificial Sequence
  Description of Artificial Sequence: Synthetic oligonucleotide
  Target: PCSK9; (-) strand; PAM type: YTN; PAM sequence: TTC
taaattcgattcccacaaaa

SEQ ID NO: 19921 - DNA, 20 bp, Artificial Sequence
  Description of Artificial Sequence: Synthetic oligonucleotide
  Target: PCSK9; (-) strand; PAM type: YTN; PAM sequence: TTC
attctaaattcgattcccac

SEQ ID NO: 19922 - DNA, 20 bp, Artificial Sequence
  Description of Artificial Sequence: Synthetic oligonucleotide
  Target: PCSK9; (-) strand; PAM type: YTN; PAM sequence: TTT
cattctaaattcgattccca

SEQ ID NO: 19923 - DNA, 20 bp, Artificial Sequence
  Description of Artificial Sequence: Synthetic oligonucleotide
  Target: PCSK9; (-) strand; PAM type: YTN; PAM sequence: TTT
tcattctaaattcgattccc

SEQ ID NO: 19924 - DNA, 20 bp, Artificial Sequence
  Description of Artificial Sequence: Synthetic oligonucleotide
  Target: PCSK9; (-) strand; PAM type: YTN; PAM sequence: TTG
ccaaaaaatattttcattct

SEQ ID NO: 19925 - DNA, 20 bp, Artificial Sequence
  Description of Artificial Sequence: Synthetic oligonucleotide
  Target: PCSK9; (-) strand; PAM type: YTN; PAM sequence: CTT
gccaaaaaatattttcattc

SEQ ID NO: 19926 - DNA, 20 bp, Artificial Sequence
  Description of Artificial Sequence: Synthetic oligonucleotide
  Target: PCSK9; (-) strand; PAM type: YTN; PAM sequence: CTG
cttgccaaaaaatattttca

SEQ ID NO: 19927 - DNA, 20 bp, Artificial Sequence
  Description of Artificial Sequence: Synthetic oligonucleotide
  Target: PCSK9; (-) strand; PAM type: YTN; PAM sequence: TTC
tgcttgccaaaaaatatttt

SEQ ID NO: 19928 - DNA, 20 bp, Artificial Sequence
  Description of Artificial Sequence: Synthetic oligonucleotide
  Target: PCSK9; (-) strand; PAM type: YTN; PAM sequence: TTT
ctgcttgccaaaaaatattt

SEQ ID NO: 19929 - DNA, 20 bp, Artificial Sequence
  Description of Artificial Sequence: Synthetic oligonucleotide
  Target: PCSK9; (-) strand; PAM type: YTN; PAM sequence: TTT
tctgcttgccaaaaaatatt

SEQ ID NO: 19930 - DNA, 20 bp, Artificial Sequence
  Description of Artificial Sequence: Synthetic oligonucleotide
  Target: PCSK9; (-) strand; PAM type: YTN; PAM sequence: TTA
ttttctgcttgccaaaaaat

SEQ ID NO: 19931 - DNA, 20 bp, Artificial Sequence
  Description of Artificial Sequence: Synthetic oligonucleotide
  Target: PCSK9; (-) strand; PAM type: YTN; PAM sequence: CTA
aaaattattttctgcttgcc

SEQ ID NO: 19932 - DNA, 20 bp, Artificial Sequence
  Description of Artificial Sequence: Synthetic oligonucleotide
  Target: PCSK9; (-) strand; PAM type: YTN; PAM sequence: TTG
gtctaaaaattattttctgc

SEQ ID NO: 19933 - DNA, 20 bp, Artificial Sequence
  Description of Artificial Sequence: Synthetic oligonucleotide
  Target: PCSK9; (-) strand; PAM type: YTN; PAM sequence: CTA
aaagaaaaggattggtctaa

SEQ ID NO: 19934 - DNA, 20 bp, Artificial Sequence
  Description of Artificial Sequence: Synthetic oligonucleotide
  Target: PCSK9; (-) strand; PAM type: YTN; PAM sequence: CTC
atgactaaaagaaaaggatt

SEQ ID NO: 19935 - DNA, 20 bp, Artificial Sequence
  Description of Artificial Sequence: Synthetic oligonucleotide
  Target: PCSK9; (-) strand; PAM type: YTN; PAM sequence: TTC
tcatgactaaaagaaaagga

SEQ ID NO: 19936 - DNA, 20 bp, Artificial Sequence
  Description of Artificial Sequence: Synthetic oligonucleotide
  Target: PCSK9; (-) strand; PAM type: YTN; PAM sequence: TTT
ctcatgactaaaagaaaagg

SEQ ID NO: 19937 - DNA, 20 bp, Artificial Sequence
  Description of Artificial Sequence: Synthetic oligonucleotide
  Target: PCSK9; (-) strand; PAM type: YTN; PAM sequence: CTC
agtttctcatgactaaaaga

SEQ ID NO: 19938 - DNA, 20 bp, Artificial Sequence
  Description of Artificial Sequence: Synthetic oligonucleotide
  Target: PCSK9; (-) strand; PAM type: YTN; PAM sequence: CTG
ggcctcagtttctcatgact

SEQ ID NO: 19939 - DNA, 20 bp, Artificial Sequence
  Description of Artificial Sequence: Synthetic oligonucleotide
  Target: PCSK9; (-) strand; PAM type: YTN; PAM sequence: CTC
tgggcctcagtttctcatga

SEQ ID NO: 19940 - DNA, 20 bp, Artificial Sequence
  Description of Artificial Sequence: Synthetic oligonucleotide
  Target: PCSK9; (-) strand; PAM type: YTN; PAM sequence: CTC
tctgggcctcagtttctcat

SEQ ID NO: 19941 - DNA, 20 bp, Artificial Sequence
  Description of Artificial Sequence: Synthetic oligonucleotide
  Target: PCSK9; (-) strand; PAM type: YTN; PAM sequence: CTC
tctctgggcctcagtttctc

SEQ ID NO: 19942 - DNA, 20 bp, Artificial Sequence
  Description of Artificial Sequence: Synthetic oligonucleotide
  Target: PCSK9; (-) strand; PAM type: YTN; PAM sequence: CTC
ctctctctgggcctcagttt

SEQ ID NO: 19943 - DNA, 20 bp, Artificial Sequence
  Description of Artificial Sequence: Synthetic oligonucleotide
  Target: PCSK9; (-) strand; PAM type: YTN; PAM sequence: CTG
gggtgacctcctctctctgg

SEQ ID NO: 19944 - DNA, 20 bp, Artificial Sequence
  Description of Artificial Sequence: Synthetic oligonucleotide
  Target: PCSK9; (-) strand; PAM type: YTN; PAM sequence: CTA
atgcacctggggtgacctcc

SEQ ID NO: 19945 - DNA, 20 bp, Artificial Sequence
  Description of Artificial Sequence: Synthetic oligonucleotide
  Target: PCSK9; (-) strand; PAM type: YTN; PAM sequence: TTC
taatgcacctggggtgacct

SEQ ID NO: 19946 - DNA, 20 bp, Artificial Sequence
  Description of Artificial Sequence: Synthetic oligonucleotide
  Target: PCSK9; (-) strand; PAM type: YTN; PAM sequence: CTG
gaaacccagttctaatgcac

SEQ ID NO: 19947 - DNA, 20 bp, Artificial Sequence
  Description of Artificial Sequence: Synthetic oligonucleotide
  Target: PCSK9; (-) strand; PAM type: YTN; PAM sequence: TTC
tggaaacccagttctaatgc

SEQ ID NO: 19948 - DNA, 20 bp, Artificial Sequence
  Description of Artificial Sequence: Synthetic oligonucleotide
  Target: PCSK9; (-) strand; PAM type: YTN; PAM sequence: CTG
tgcagtggagtgtcagttct

SEQ ID NO: 19949 - DNA, 20 bp, Artificial Sequence
  Description of Artificial Sequence: Synthetic oligonucleotide
  Target: PCSK9; (-) strand; PAM type: YTN; PAM sequence: CTC
tgtgcagtggagtgtcagtt

SEQ ID NO: 19950 - DNA, 20 bp, Artificial Sequence
  Description of Artificial Sequence: Synthetic oligonucleotide
  Target: PCSK9; (-) strand; PAM type: YTN; PAM sequence: TTG
ggagagtactctgtgcagtg

SEQ ID NO: 19951 - DNA, 20 bp, Artificial Sequence
  Description of Artificial Sequence: Synthetic oligonucleotide
  Target: PCSK9; (-) strand; PAM type: YTN; PAM sequence: TTG
aatgaattgggagagtactc

SEQ ID NO: 19952 - DNA, 20 bp, Artificial Sequence
  Description of Artificial Sequence: Synthetic oligonucleotide
  Target: PCSK9; (-) strand; PAM type: YTN; PAM sequence: CTA
aataaaaattgaatgaattg

SEQ ID NO: 19953 - DNA, 20 bp, Artificial Sequence
  Description of Artificial Sequence: Synthetic oligonucleotide
  Target: PCSK9; (-) strand; PAM type: YTN; PAM sequence: TTC
cgctaaataaaaattgaatg

SEQ ID NO: 19954 - DNA, 20 bp, Artificial Sequence
  Description of Artificial Sequence: Synthetic oligonucleotide
  Target: PCSK9; (-) strand; PAM type: YTN; PAM sequence: CTT
ccgctaaataaaaattgaat

SEQ ID NO: 19955 - DNA, 20 bp, Artificial Sequence
  Description of Artificial Sequence: Synthetic oligonucleotide
  Target: PCSK9; (-) strand; PAM type: YTN; PAM sequence: CTG
aaaatgccttccgctaaata

SEQ ID NO: 19956 - DNA, 20 bp, Artificial Sequence
  Description of Artificial Sequence: Synthetic oligonucleotide
  Target: PCSK9; (-) strand; PAM type: YTN; PAM sequence: TTC
aaagacccatctgaaaatgc

SEQ ID NO: 19957 - DNA, 20 bp, Artificial Sequence
  Description of Artificial Sequence: Synthetic oligonucleotide
  Target: PCSK9; (-) strand; PAM type: YTN; PAM sequence: CTT
caaagacccatctgaaaatg

SEQ ID NO: 19958 - DNA, 20 bp, Artificial Sequence
  Description of Artificial Sequence: Synthetic oligonucleotide
  Target: PCSK9; (-) strand; PAM type: YTN; PAM sequence: CTA
atgcttcaaagacccatctg

SEQ ID NO: 19959 - DNA, 20 bp, Artificial Sequence
  Description of Artificial Sequence: Synthetic oligonucleotide
  Target: PCSK9; (-) strand; PAM type: YTN; PAM sequence: CTA
ctaatgcttcaaagacccat

SEQ ID NO: 19960 - DNA, 20 bp, Artificial Sequence
  Description of Artificial Sequence: Synthetic oligonucleotide
  Target: PCSK9; (-) strand; PAM type: YTN; PAM sequence: CTC
ctactaatgcttcaaagacc

SEQ ID NO: 19961 - DNA, 20 bp, Artificial Sequence
  Description of Artificial Sequence: Synthetic oligonucleotide
  Target: PCSK9; (-) strand; PAM type: YTN; PAM sequence: CTG
aactcctactaatgcttcaa

SEQ ID NO: 19962 - DNA, 20 bp, Artificial Sequence
  Description of Artificial Sequence: Synthetic oligonucleotide
  Target: PCSK9; (-) strand; PAM type: YTN; PAM sequence: CTC
atgacaccatcatcgctgaa

SEQ ID NO: 19963 - DNA, 20 bp, Artificial Sequence
  Description of Artificial Sequence: Synthetic oligonucleotide
  Target: PCSK9; (-) strand; PAM type: YTN; PAM sequence: TTC
tcatgacaccatcatcgctg

SEQ ID NO: 19964 - DNA, 20 bp, Artificial Sequence
  Description of Artificial Sequence: Synthetic oligonucleotide
  Target: PCSK9; (-) strand; PAM type: YTN; PAM sequence: CTA
gaataaaattctcatgacac

SEQ ID NO: 19965 - DNA, 20 bp, Artificial Sequence
  Description of Artificial Sequence: Synthetic oligonucleotide
  Target: PCSK9; (-) strand; PAM type: YTN; PAM sequence: CTA
atcctagaataaaattctca

SEQ ID NO: 19966 - DNA, 20 bp, Artificial Sequence
  Description of Artificial Sequence: Synthetic oligonucleotide
  Target: PCSK9; (-) strand; PAM type: YTN; PAM sequence: CTC
ctaatcctagaataaaattc

SEQ ID NO: 19967 - DNA, 20 bp, Artificial Sequence
  Description of Artificial Sequence: Synthetic oligonucleotide
  Target: PCSK9; (-) strand; PAM type: YTN; PAM sequence: TTC
atggtacctcctaatcctag

SEQ ID NO: 19968 - DNA, 20 bp, Artificial Sequence
  Description of Artificial Sequence: Synthetic oligonucleotide
  Target: PCSK9; (-) strand; PAM type: YTN; PAM sequence: TTG
ttcatggtacctcctaatcc

SEQ ID NO: 19969 - DNA, 20 bp, Artificial Sequence
  Description of Artificial Sequence: Synthetic oligonucleotide
  Target: PCSK9; (-) strand; PAM type: YTN; PAM sequence: TTT
gttcatggtacctcctaatc

SEQ ID NO: 19970 - DNA, 20 bp, Artificial Sequence
  Description of Artificial Sequence: Synthetic oligonucleotide
  Target: PCSK9; (-) strand; PAM type: YTN; PAM sequence: CTT
tgttcatggtacctcctaat

SEQ ID NO: 19971 - DNA, 20 bp, Artificial Sequence
  Description of Artificial Sequence: Synthetic oligonucleotide
  Target: PCSK9; (-) strand; PAM type: YTN; PAM sequence: CTG
tatctttgttcatggtacct

SEQ ID NO: 19972 - DNA, 20 bp, Artificial Sequence
  Description of Artificial Sequence: Synthetic oligonucleotide
  Target: PCSK9; (-) strand; PAM type: YTN; PAM sequence: CTC
tgtatctttgttcatggtac

SEQ ID NO: 19973 - DNA, 20 bp, Artificial Sequence
  Description of Artificial Sequence: Synthetic oligonucleotide
  Target: PCSK9; (-) strand; PAM type: YTN; PAM sequence: TTC
ccagctctgtatctttgttc

SEQ ID NO: 19974 - DNA, 20 bp, Artificial Sequence
  Description of Artificial Sequence: Synthetic oligonucleotide
  Target: PCSK9; (-) strand; PAM type: YTN; PAM sequence: TTT
cccagctctgtatctttgtt

SEQ ID NO: 19975 - DNA, 20 bp, Artificial Sequence
  Description of Artificial Sequence: Synthetic oligonucleotide
  Target: PCSK9; (-) strand; PAM type: YTN; PAM sequence: TTT
tcccagctctgtatctttgt

SEQ ID NO: 19976 - DNA, 20 bp, Artificial Sequence
  Description of Artificial Sequence: Synthetic oligonucleotide
  Target: PCSK9; (-) strand; PAM type: YTN; PAM sequence: CTG
gttttcccagctctgtatct

SEQ ID NO: 19977 - DNA, 20 bp, Artificial Sequence
  Description of Artificial Sequence: Synthetic oligonucleotide
  Target: PCSK9; (-) strand; PAM type: YTN; PAM sequence: CTC
tggttttcccagctctgtat

SEQ ID NO: 19978 - DNA, 20 bp, Artificial Sequence
  Description of Artificial Sequence: Synthetic oligonucleotide
  Target: PCSK9; (-) strand; PAM type: YTN; PAM sequence: TTC
cacctctggttttcccagct

SEQ ID NO: 19979 - DNA, 20 bp, Artificial Sequence
  Description of Artificial Sequence: Synthetic oligonucleotide
  Target: PCSK9; (-) strand; PAM type: YTN; PAM sequence: CTT
ccacctctggttttcccagc

SEQ ID NO: 19980 - DNA, 20 bp, Artificial Sequence
  Description of Artificial Sequence: Synthetic oligonucleotide
  Target: PCSK9; (-) strand; PAM type: YTN; PAM sequence: TTA
tcttccacctctggttttcc

SEQ ID NO: 19981 - DNA, 20 bp, Artificial Sequence
  Description of Artificial Sequence: Synthetic oligonucleotide
  Target: PCSK9; (-) strand; PAM type: YTN; PAM sequence: CTT
atcttccacctctggttttc

SEQ ID NO: 19982 - DNA, 20 bp, Artificial Sequence
  Description of Artificial Sequence: Synthetic oligonucleotide
  Target: PCSK9; (-) strand; PAM type: YTN; PAM sequence: CTC
cttatcttccacctctggtt

SEQ ID NO: 19983 - DNA, 20 bp, Artificial Sequence
  Description of Artificial Sequence: Synthetic oligonucleotide
  Target: PCSK9; (-) strand; PAM type: YTN; PAM sequence: CTG
tggacatgtgctccttatct

SEQ ID NO: 19984 - DNA, 20 bp, Artificial Sequence
  Description of Artificial Sequence: Synthetic oligonucleotide
  Target: PCSK9; (-) strand; PAM type: YTN; PAM sequence: CTC
aaaaaaaaaagaaaaagaac

SEQ ID NO: 19985 - DNA, 20 bp, Artificial Sequence
  Description of Artificial Sequence: Synthetic oligonucleotide
  Target: PCSK9; (-) strand; PAM type: YTN; PAM sequence: CTC
catctcaaaaaaaaaagaaa

SEQ ID NO: 19986 - DNA, 20 bp, Artificial Sequence
  Description of Artificial Sequence: Synthetic oligonucleotide
  Target: PCSK9; (-) strand; PAM type: YTN; PAM sequence: CTG
ggcaacaagagcgaaactcc

SEQ ID NO: 19987 - DNA, 20 bp, Artificial Sequence
  Description of Artificial Sequence: Synthetic oligonucleotide
  Target: PCSK9; (-) strand; PAM type: YTN; PAM sequence: CTC
cagcctgggcaacaagagcg

SEQ ID NO: 19988 - DNA, 20 bp, Artificial Sequence
  Description of Artificial Sequence: Synthetic oligonucleotide
  Target: PCSK9; (-) strand; PAM type: YTN; PAM sequence: TTG
cactccagcctgggcaacaa

SEQ ID NO: 19989 - DNA, 20 bp, Artificial Sequence
  Description of Artificial Sequence: Synthetic oligonucleotide
  Target: PCSK9; (-) strand; PAM type: YTN; PAM sequence: CTG
caccattgcactccagcctg

SEQ ID NO: 19990 - DNA, 20 bp, Artificial Sequence
  Description of Artificial Sequence: Synthetic oligonucleotide
  Target: PCSK9; (-) strand; PAM type: YTN; PAM sequence: CTG
agactgcaccattgcactcc

SEQ ID NO: 19991 - DNA, 20 bp, Artificial Sequence
  Description of Artificial Sequence: Synthetic oligonucleotide
  Target: PCSK9; (-) strand; PAM type: YTN; PAM sequence: TTG
cagtgagctgagactgcacc

SEQ ID NO: 19992 - DNA, 20 bp, Artificial Sequence
  Description of Artificial Sequence: Synthetic oligonucleotide
  Target: PCSK9; (-) strand; PAM type: YTN; PAM sequence: TTG
aacccgggagacagatgttg

SEQ ID NO: 19993 - DNA, 20 bp, Artificial Sequence
  Description of Artificial Sequence: Synthetic oligonucleotide
  Target: PCSK9; (-) strand; PAM type: YTN; PAM sequence: CTT
gaacccgggagacagatgtt

SEQ ID NO: 19994 - DNA, 20 bp, Artificial Sequence
  Description of Artificial Sequence: Synthetic oligonucleotide
  Target: PCSK9; (-) strand; PAM type: YTN; PAM sequence: CTG
aggcaggagaaccacttgaa

SEQ ID NO: 19995 - DNA, 20 bp, Artificial Sequence
  Description of Artificial Sequence: Synthetic oligonucleotide
  Target: PCSK9; (-) strand; PAM type: YTN; PAM sequence: TTG
ggaggctgaggcaggagaac

SEQ ID NO: 19996 - DNA, 20 bp, Artificial Sequence
  Description of Artificial Sequence: Synthetic oligonucleotide
  Target: PCSK9; (-) strand; PAM type: YTN; PAM sequence: CTT
gggaggctgaggcaggagaa

SEQ ID NO: 19997 - DNA, 20 bp, Artificial Sequence
  Description of Artificial Sequence: Synthetic oligonucleotide
  Target: PCSK9; (-) strand; PAM type: YTN; PAM sequence: TTC
ttgggaggctgaggcaggag

SEQ ID NO: 19998 - DNA, 20 bp, Artificial Sequence
  Description of Artificial Sequence: Synthetic oligonucleotide
  Target: PCSK9; (-) strand; PAM type: YTN; PAM sequence: CTT
cttgggaggctgaggcagga

SEQ ID NO: 19999 - DNA, 20 bp, Artificial Sequence
  Description of Artificial Sequence: Synthetic oligonucleotide
  Target: PCSK9; (-) strand; PAM type: YTN; PAM sequence: CTG
taatcccagcttcttgggag

SEQ ID NO: 20000 - DNA, 20 bp, Artificial Sequence
  Description of Artificial Sequence: Synthetic oligonucleotide
  Target: PCSK9; (-) strand; PAM type: YTN; PAM sequence: TTA
gccgggcgtggtggcaggta

SEQ ID NO: 20001 - DNA, 20 bp, Artificial Sequence
  Description of Artificial Sequence: Synthetic oligonucleotide
  Target: PCSK9; (-) strand; PAM type: YTN; PAM sequence: CTA
aaaatacaaaaattagccgg

SEQ ID NO: 20002 - DNA, 20 bp, Artificial Sequence
  Description of Artificial Sequence: Synthetic oligonucleotide
  Target: PCSK9; (-) strand; PAM type: YTN; PAM sequence: CTA
ctaaaaatacaaaaattagc

SEQ ID NO: 20003 - DNA, 20 bp, Artificial Sequence
  Description of Artificial Sequence: Synthetic oligonucleotide
  Target: PCSK9; (-) strand; PAM type: YTN; PAM sequence: CTC
tactaaaaatacaaaaatta

SEQ ID NO: 20004 - DNA, 20 bp, Artificial Sequence
  Description of Artificial Sequence: Synthetic oligonucleotide
  Target: PCSK9; (-) strand; PAM type: YTN; PAM sequence: TTC
tctactaaaaatacaaaaat

SEQ ID NO: 20005 - DNA, 20 bp, Artificial Sequence
  Description of Artificial Sequence: Synthetic oligonucleotide
  Target: PCSK9; (-) strand; PAM type: YTN; PAM sequence: CTT
ctctactaaaaatacaaaaa

SEQ ID NO: 20006 - DNA, 20 bp, Artificial Sequence
  Description of Artificial Sequence: Synthetic oligonucleotide
  Target: PCSK9; (-) strand; PAM type: YTN; PAM sequence: CTG
gccaacgtggtgaaacccct

SEQ ID NO: 20007 - DNA, 20 bp, Artificial Sequence
  Description of Artificial Sequence: Synthetic oligonucleotide
  Target: PCSK9; (-) strand; PAM type: YTN; PAM sequence: CTA
gcctggccaacgtggtgaaa

SEQ ID NO: 20008 - DNA, 20 bp, Artificial Sequence
  Description of Artificial Sequence: Synthetic oligonucleotide
  Target: PCSK9; (-) strand; PAM type: YTN; PAM sequence: TTG
cgactagcctggccaacgtg

SEQ ID NO: 20009 - DNA, 20 bp, Artificial Sequence
  Description of Artificial Sequence: Synthetic oligonucleotide
  Target: PCSK9; (-) strand; PAM type: YTN; PAM sequence: TTT
gcgactagcctggccaacgt

SEQ ID NO: 20010 - DNA, 20 bp, Artificial Sequence
  Description of Artificial Sequence: Synthetic oligonucleotide
  Target: PCSK9; (-) strand; PAM type: YTN; PAM sequence: CTG
aggaggtcaggagtttgcga

SEQ ID NO: 20011 - DNA, 20 bp, Artificial Sequence
  Description of Artificial Sequence: Synthetic oligonucleotide
  Target: PCSK9; (-) strand; PAM type: YTN; PAM sequence: CTC
ggatccactgaggaggtcag

SEQ ID NO: 20012 - DNA, 20 bp, Artificial Sequence
  Description of Artificial Sequence: Synthetic oligonucleotide
  Target: PCSK9; (-) strand; PAM type: YTN; PAM sequence: CTC
ctcggatccactgaggaggt

SEQ ID NO: 20013 - DNA, 20 bp, Artificial Sequence
  Description of Artificial Sequence: Synthetic oligonucleotide
  Target: PCSK9; (-) strand; PAM type: YTN; PAM sequence: CTG
aggcgggaggatcacctcct

SEQ ID NO: 20014 - DNA, 20 bp, Artificial Sequence
  Description of Artificial Sequence: Synthetic oligonucleotide
  Target: PCSK9; (-) strand; PAM type: YTN; PAM sequence: TTG
ggaggctgaggcgggaggat

SEQ ID NO: 20015 - DNA, 20 bp, Artificial Sequence
  Description of Artificial Sequence: Synthetic oligonucleotide
  Target: PCSK9; (-) strand; PAM type: YTN; PAM sequence: TTT
gggaggctgaggcgggagga

SEQ ID NO: 20016 - DNA, 20 bp, Artificial Sequence
  Description of Artificial Sequence: Synthetic oligonucleotide
  Target: PCSK9; (-) strand; PAM type: YTN; PAM sequence: CTT
tgggaggctgaggcgggagg

SEQ ID NO: 20017 - DNA, 20 bp, Artificial Sequence
  Description of Artificial Sequence: Synthetic oligonucleotide
  Target: PCSK9; (-) strand; PAM type: YTN; PAM sequence: TTC
gagcactttgggaggctgag

SEQ ID NO: 20018 - DNA, 20 bp, Artificial Sequence
  Description of Artificial Sequence: Synthetic oligonucleotide
  Target: PCSK9; (-) strand; PAM type: YTN; PAM sequence: CTG
taattcgagcactttgggag

SEQ ID NO: 20019 - DNA, 20 bp, Artificial Sequence
  Description of Artificial Sequence: Synthetic oligonucleotide
  Target: PCSK9; (-) strand; PAM type: YTN; PAM sequence: CTC
acacctgtaattcgagcact

SEQ ID NO: 20020 - DNA, 20 bp, Artificial Sequence
  Description of Artificial Sequence: Synthetic oligonucleotide
  Target: PCSK9; (-) strand; PAM type: YTN; PAM sequence: CTG
tggaggccaggcgtggtggc

SEQ ID NO: 20021 - DNA, 20 bp, Artificial Sequence
  Description of Artificial Sequence: Synthetic oligonucleotide
  Target: PCSK9; (-) strand; PAM type: YTN; PAM sequence: TTC
agacggtggataaagaactg

SEQ ID NO: 20022 - DNA, 20 bp, Artificial Sequence
  Description of Artificial Sequence: Synthetic oligonucleotide
  Target: PCSK9; (-) strand; PAM type: YTN; PAM sequence: TTT
cagacggtggataaagaact

SEQ ID NO: 20023 - DNA, 20 bp, Artificial Sequence
  Description of Artificial Sequence: Synthetic oligonucleotide
  Target: PCSK9; (-) strand; PAM type: YTN; PAM sequence: TTA
catttcagacggtggataaa

SEQ ID NO: 20024 - DNA, 20 bp, Artificial Sequence
  Description of Artificial Sequence: Synthetic oligonucleotide
  Target: PCSK9; (-) strand; PAM type: YTN; PAM sequence: TTT
acatttcagacggtggataa

SEQ ID NO: 20025 - DNA, 20 bp, Artificial Sequence
  Description of Artificial Sequence: Synthetic oligonucleotide
  Target: PCSK9; (-) strand; PAM type: YTN; PAM sequence: TTT
tacatttcagacggtggata

SEQ ID NO: 20026 - DNA, 20 bp, Artificial Sequence
  Description of Artificial Sequence: Synthetic oligonucleotide
  Target: PCSK9; (-) strand; PAM type: YTN; PAM sequence: TTC
gtaacattttacatttcaga

SEQ ID NO: 20027 - DNA, 20 bp, Artificial Sequence
  Description of Artificial Sequence: Synthetic oligonucleotide
  Target: PCSK9; (-) strand; PAM type: YTN; PAM sequence: TTT
cgtaacattttacatttcag

SEQ ID NO: 20028 - DNA, 20 bp, Artificial Sequence
  Description of Artificial Sequence: Synthetic oligonucleotide
  Target: PCSK9; (-) strand; PAM type: YTN; PAM sequence: TTT
tcgtaacattttacatttca

SEQ ID NO: 20029 - DNA, 20 bp, Artificial Sequence
  Description of Artificial Sequence: Synthetic oligonucleotide
  Target: PCSK9; (-) strand; PAM type: YTN; PAM sequence: TTG
gttttcgtaacattttacat

SEQ ID NO: 20030 - DNA, 20 bp, Artificial Sequence
  Description of Artificial Sequence: Synthetic oligonucleotide
  Target: PCSK9; (-) strand; PAM type: YTN; PAM sequence: TTT
ggttttcgtaacattttaca

SEQ ID NO: 20031 - DNA, 20 bp, Artificial Sequence
  Description of Artificial Sequence: Synthetic oligonucleotide
  Target: PCSK9; (-) strand; PAM type: YTN; PAM sequence: TTT
tggttttcgtaacattttac

SEQ ID NO: 20032 - DNA, 20 bp, Artificial Sequence
  Description of Artificial Sequence: Synthetic oligonucleotide
  Target: PCSK9; (-) strand; PAM type: YTN; PAM sequence: CTT
ttggttttcgtaacatttta

SEQ ID NO: 20033 - DNA, 20 bp, Artificial Sequence
  Description of Artificial Sequence: Synthetic oligonucleotide
  Target: PCSK9; (-) strand; PAM type: YTN; PAM sequence: CTA
ccatcaaataaatcacaaaa

SEQ ID NO: 20034 - DNA, 20 bp, Artificial Sequence
  Description of Artificial Sequence: Synthetic oligonucleotide
  Target: PCSK9; (-) strand; PAM type: YTN; PAM sequence: TTC
acgtcaggtgctaccatcaa

SEQ ID NO: 20035 - DNA, 20 bp, Artificial Sequence
  Description of Artificial Sequence: Synthetic oligonucleotide
  Target: PCSK9; (-) strand; PAM type: YTN; PAM sequence: CTC
atgtcagttcacgtcaggtg

SEQ ID NO: 20036 - DNA, 20 bp, Artificial Sequence
  Description of Artificial Sequence: Synthetic oligonucleotide
  Target: PCSK9; (-) strand; PAM type: YTN; PAM sequence: TTA
aaaataatctcatgtcagtt

SEQ ID NO: 20037 - DNA, 20 bp, Artificial Sequence
  Description of Artificial Sequence: Synthetic oligonucleotide
  Target: PCSK9; (-) strand; PAM type: YTN; PAM sequence: CTA
aattaaaaataatctcatgt

SEQ ID NO: 20038 - DNA, 20 bp, Artificial Sequence
  Description of Artificial Sequence: Synthetic oligonucleotide
  Target: PCSK9; (-) strand; PAM type: YTN; PAM sequence: TTC
acacaactaaattaaaaata

SEQ ID NO: 20039 - DNA, 20 bp, Artificial Sequence
  Description of Artificial Sequence: Synthetic oligonucleotide
  Target: PCSK9; (-) strand; PAM type: YTN; PAM sequence: CTA
tgcagcaaaatatatgaata

SEQ ID NO: 20040 - DNA, 20 bp, Artificial Sequence
  Description of Artificial Sequence: Synthetic oligonucleotide
  Target: PCSK9; (-) strand; PAM type: YTN; PAM sequence: CTG
taatctatgcagcaaaatat

SEQ ID NO: 20041 - DNA, 20 bp, Artificial Sequence
  Description of Artificial Sequence: Synthetic oligonucleotide
  Target: PCSK9; (-) strand; PAM type: YTN; PAM sequence: CTG
catactgtaatctatgcagc

SEQ ID NO: 20042 - DNA, 20 bp, Artificial Sequence
  Description of Artificial Sequence: Synthetic oligonucleotide
  Target: PCSK9; (-) strand; PAM type: YTN; PAM sequence: CTG
gagctgcatactgtaatcta

SEQ ID NO: 20043 - DNA, 20 bp, Artificial Sequence
  Description of Artificial Sequence: Synthetic oligonucleotide
  Target: PCSK9; (-) strand; PAM type: YTN; PAM sequence: TTG
gaagaatctggagctgcata

SEQ ID NO: 20044 - DNA, 20 bp, Artificial Sequence
  Description of Artificial Sequence: Synthetic oligonucleotide
  Target: PCSK9; (-) strand; PAM type: YTN; PAM sequence: CTT
ggaagaatctggagctgcat

SEQ ID NO: 20045 - DNA, 20 bp, Artificial Sequence
  Description of Artificial Sequence: Synthetic oligonucleotide
  Target: PCSK9; (-) strand; PAM type: YTN; PAM sequence: CTG
cttggaagaatctggagctg

SEQ ID NO: 20046 - DNA, 20 bp, Artificial Sequence
  Description of Artificial Sequence: Synthetic oligonucleotide
  Target: PCSK9; (-) strand; PAM type: YTN; PAM sequence: TTA
gaaaggcagtaatgggcaat

SEQ ID NO: 20047 - DNA, 20 bp, Artificial Sequence
  Description of Artificial Sequence: Synthetic oligonucleotide
  Target: PCSK9; (-) strand; PAM type: YTN; PAM sequence: TTT
agaaaggcagtaatgggcaa

SEQ ID NO: 20048 - DNA, 20 bp, Artificial Sequence
  Description of Artificial Sequence: Synthetic oligonucleotide
  Target: PCSK9; (-) strand; PAM type: YTN; PAM sequence: TTT
tagaaaggcagtaatgggca

SEQ ID NO: 20049 - DNA, 20 bp, Artificial Sequence
  Description of Artificial Sequence: Synthetic oligonucleotide
  Target: PCSK9; (-) strand; PAM type: YTN; PAM sequence: TTG
gattttagaaaggcagtaat

SEQ ID NO: 20050 - DNA, 20 bp, Artificial Sequence
  Description of Artificial Sequence: Synthetic oligonucleotide
  Target: PCSK9; (-) strand; PAM type: YTN; PAM sequence: TTT
ggattttagaaaggcagtaa

SEQ ID NO: 20051 - DNA, 20 bp, Artificial Sequence
  Description of Artificial Sequence: Synthetic oligonucleotide
  Target: PCSK9; (-) strand; PAM type: YTN; PAM sequence: TTG
tttggattttagaaaggcag

SEQ ID NO: 20052 - DNA, 20 bp, Artificial Sequence
  Description of Artificial Sequence: Synthetic oligonucleotide
  Target: PCSK9; (-) strand; PAM type: YTN; PAM sequence: CTT
gtttggattttagaaaggca

SEQ ID NO: 20053 - DNA, 20 bp, Artificial Sequence
  Description of Artificial Sequence: Synthetic oligonucleotide
  Target: PCSK9; (-) strand; PAM type: YTN; PAM sequence: CTC
agaacttgtttggattttag

SEQ ID NO: 20054 - DNA, 20 bp, Artificial Sequence
  Description of Artificial Sequence: Synthetic oligonucleotide
  Target: PCSK9; (-) strand; PAM type: YTN; PAM sequence: TTG
aacctcagaacttgtttgga

SEQ ID NO: 20055 - DNA, 20 bp, Artificial Sequence
  Description of Artificial Sequence: Synthetic oligonucleotide
  Target: PCSK9; (-) strand; PAM type: YTN; PAM sequence: TTT
gaacctcagaacttgtttgg

SEQ ID NO: 20056 - DNA, 20 bp, Artificial Sequence
  Description of Artificial Sequence: Synthetic oligonucleotide
  Target: PCSK9; (-) strand; PAM type: YTN; PAM sequence: TTT
tgaacctcagaacttgtttg

SEQ ID NO: 20057 - DNA, 20 bp, Artificial Sequence
  Description of Artificial Sequence: Synthetic oligonucleotide
  Target: PCSK9; (-) strand; PAM type: YTN; PAM sequence: TTA
gggccaaaacggttttgaac

SEQ ID NO: 20058 - DNA, 20 bp, Artificial Sequence
  Description of Artificial Sequence: Synthetic oligonucleotide
  Target: PCSK9; (-) strand; PAM type: YTN; PAM sequence: CTT
agggccaaaacggttttgaa

SEQ ID NO: 20059 - DNA, 20 bp, Artificial Sequence
  Description of Artificial Sequence: Synthetic oligonucleotide
  Target: PCSK9; (-) strand; PAM type: YTN; PAM sequence: TTA
cccaaagccttagggccaaa

SEQ ID NO: 20060 - DNA, 20 bp, Artificial Sequence
  Description of Artificial Sequence: Synthetic oligonucleotide
  Target: PCSK9; (-) strand; PAM type: YTN; PAM sequence: TTT
acccaaagccttagggccaa

SEQ ID NO: 20061 - DNA, 20 bp, Artificial Sequence
  Description of Artificial Sequence: Synthetic oligonucleotide
  Target: PCSK9; (-) strand; PAM type: YTN; PAM sequence: CTT
tacccaaagccttagggcca

SEQ ID NO: 20062 - DNA, 20 bp, Artificial Sequence
  Description of Artificial Sequence: Synthetic oligonucleotide
  Target: PCSK9; (-) strand; PAM type: YTN; PAM sequence: CTC
cagtcagagtagaacagagt

SEQ ID NO: 20063 - DNA, 20 bp, Artificial Sequence
  Description of Artificial Sequence: Synthetic oligonucleotide
  Target: PCSK9; (-) strand; PAM type: YTN; PAM sequence: TTG
gactccagtcagagtagaac

SEQ ID NO: 20064 - DNA, 20 bp, Artificial Sequence
  Description of Artificial Sequence: Synthetic oligonucleotide
  Target: PCSK9; (-) strand; PAM type: YTN; PAM sequence: CTT
ggactccagtcagagtagaa

SEQ ID NO: 20065 - DNA, 20 bp, Artificial Sequence
  Description of Artificial Sequence: Synthetic oligonucleotide
  Target: PCSK9; (-) strand; PAM type: YTN; PAM sequence: CTG
tatatatgcatcttggactc

SEQ ID NO: 20066 - DNA, 20 bp, Artificial Sequence
  Description of Artificial Sequence: Synthetic oligonucleotide
  Target: PCSK9; (-) strand; PAM type: YTN; PAM sequence: CTC
tgtatatatgcatcttggac

SEQ ID NO: 20067 - DNA, 20 bp, Artificial Sequence
  Description of Artificial Sequence: Synthetic oligonucleotide
  Target: PCSK9; (-) strand; PAM type: YTN; PAM sequence: TTG
cagccccatcacccatatct

SEQ ID NO: 20068 - DNA, 20 bp, Artificial Sequence
  Description of Artificial Sequence: Synthetic oligonucleotide
  Target: PCSK9; (-) strand; PAM type: YTN; PAM sequence: CTT
gcagccccatcacccatatc

SEQ ID NO: 20069 - DNA, 20 bp, Artificial Sequence
  Description of Artificial Sequence: Synthetic oligonucleotide
  Target: PCSK9; (-) strand; PAM type: YTN; PAM sequence: CTA
ccttgcagccccatcaccca

SEQ ID NO: 20070 - DNA, 20 bp, Artificial Sequence
  Description of Artificial Sequence: Synthetic oligonucleotide
  Target: PCSK9; (-) strand; PAM type: YTN; PAM sequence: CTC
aacctaccttgcagccccat

SEQ ID NO: 20071 - DNA, 20 bp, Artificial Sequence
  Description of Artificial Sequence: Synthetic oligonucleotide
  Target: PCSK9; (-) strand; PAM type: YTN; PAM sequence: CTA
cctcaacctaccttgcagcc

SEQ ID NO: 20072 - DNA, 20 bp, Artificial Sequence
  Description of Artificial Sequence: Synthetic oligonucleotide
  Target: PCSK9; (-) strand; PAM type: YTN; PAM sequence: TTG
gcccctacctcaacctacct

SEQ ID NO: 20073 - DNA, 20 bp, Artificial Sequence
  Description of Artificial Sequence: Synthetic oligonucleotide
  Target: PCSK9; (-) strand; PAM type: YTN; PAM sequence: CTT
ggcccctacctcaacctacc

SEQ ID NO: 20074 - DNA, 20 bp, Artificial Sequence
  Description of Artificial Sequence: Synthetic oligonucleotide
  Target: PCSK9; (-) strand; PAM type: YTN; PAM sequence: CTC
cttggcccctacctcaacct

SEQ ID NO: 20075 - DNA, 20 bp, Artificial Sequence
  Description of Artificial Sequence: Synthetic oligonucleotide
  Target: PCSK9; (-) strand; PAM type: YTN; PAM sequence: CTC
ctccttggcccctacctcaa

SEQ ID NO: 20076 - DNA, 20 bp, Artificial Sequence
  Description of Artificial Sequence: Synthetic oligonucleotide
  Target: PCSK9; (-) strand; PAM type: YTN; PAM sequence: CTC
catgctcctccttggcccct

SEQ ID NO: 20077 - DNA, 20 bp, Artificial Sequence
  Description of Artificial Sequence: Synthetic oligonucleotide
  Target: PCSK9; (-) strand; PAM type: YTN; PAM sequence: CTC
atgaatcaagtccaaactcc

SEQ ID NO: 20078 - DNA, 20 bp, Artificial Sequence
  Description of Artificial Sequence: Synthetic oligonucleotide
  Target: PCSK9; (-) strand; PAM type: YTN; PAM sequence: CTC
cccacagcctcatgaatcaa

SEQ ID NO: 20079 - DNA, 20 bp, Artificial Sequence
  Description of Artificial Sequence: Synthetic oligonucleotide
  Target: PCSK9; (-) strand; PAM type: YTN; PAM sequence: CTG
gctccccacagcctcatgaa

SEQ ID NO: 20080 - DNA, 20 bp, Artificial Sequence
  Description of Artificial Sequence: Synthetic oligonucleotide
  Target: PCSK9; (-) strand; PAM type: YTN; PAM sequence: TTC
actggctccccacagcctca

SEQ ID NO: 20081 - DNA, 20 bp, Artificial Sequence
  Description of Artificial Sequence: Synthetic oligonucleotide
  Target: PCSK9; (-) strand; PAM type: YTN; PAM sequence: CTT
cactggctccccacagcctc

SEQ ID NO: 20082 - DNA, 20 bp, Artificial Sequence
  Description of Artificial Sequence: Synthetic oligonucleotide
  Target: PCSK9; (-) strand; PAM type: YTN; PAM sequence: TTA
agaaccttcactggctcccc

SEQ ID NO: 20083 - DNA, 20 bp, Artificial Sequence
  Description of Artificial Sequence: Synthetic oligonucleotide
  Target: PCSK9; (-) strand; PAM type: YTN; PAM sequence: CTT
aagaaccttcactggctccc

SEQ ID NO: 20084 - DNA, 20 bp, Artificial Sequence
  Description of Artificial Sequence: Synthetic oligonucleotide
  Target: PCSK9; (-) strand; PAM type: YTN; PAM sequence: CTG
cttaagaaccttcactggct

SEQ ID NO: 20085 - DNA, 20 bp, Artificial Sequence
  Description of Artificial Sequence: Synthetic oligonucleotide
  Target: PCSK9; (-) strand; PAM type: YTN; PAM sequence: CTC
aggcagacatacctgcttaa

SEQ ID NO: 20086 - DNA, 20 bp, Artificial Sequence
  Description of Artificial Sequence: Synthetic oligonucleotide
  Target: PCSK9; (-) strand; PAM type: YTN; PAM sequence: CTC
tcaggcagacatacctgctt

SEQ ID NO: 20087 - DNA, 20 bp, Artificial Sequence
  Description of Artificial Sequence: Synthetic oligonucleotide
  Target: PCSK9; (-) strand; PAM type: YTN; PAM sequence: CTG
ctctcaggcagacatacctg

SEQ ID NO: 20088 - DNA, 20 bp, Artificial Sequence
  Description of Artificial Sequence: Synthetic oligonucleotide
  Target: PCSK9; (-) strand; PAM type: YTN; PAM sequence: CTC
caactgctctcaggcagaca

SEQ ID NO: 20089 - DNA, 20 bp, Artificial Sequence
  Description of Artificial Sequence: Synthetic oligonucleotide
  Target: PCSK9; (-) strand; PAM type: YTN; PAM sequence: CTG
ctccaactgctctcaggcag

SEQ ID NO: 20090 - DNA, 20 bp, Artificial Sequence
  Description of Artificial Sequence: Synthetic oligonucleotide
  Target: PCSK9; (-) strand; PAM type: YTN; PAM sequence: TTG
tctgctccaactgctctcag

SEQ ID NO: 20091 - DNA, 20 bp, Artificial Sequence
  Description of Artificial Sequence: Synthetic oligonucleotide
  Target: PCSK9; (-) strand; PAM type: YTN; PAM sequence: CTT
gtctgctccaactgctctca

SEQ ID NO: 20092 - DNA, 20 bp, Artificial Sequence
  Description of Artificial Sequence: Synthetic oligonucleotide
  Target: PCSK9; (-) strand; PAM type: YTN; PAM sequence: CTC
ttgtctgctccaactgctct

SEQ ID NO: 20093 - DNA, 20 bp, Artificial Sequence
  Description of Artificial Sequence: Synthetic oligonucleotide
  Target: PCSK9; (-) strand; PAM type: YTN; PAM sequence: TTA
gctcttgtctgctccaactg

SEQ ID NO: 20094 - DNA, 20 bp, Artificial Sequence
  Description of Artificial Sequence: Synthetic oligonucleotide
  Target: PCSK9; (-) strand; PAM type: YTN; PAM sequence: TTT
agctcttgtctgctccaact

SEQ ID NO: 20095 - DNA, 20 bp, Artificial Sequence
  Description of Artificial Sequence: Synthetic oligonucleotide
  Target: PCSK9; (-) strand; PAM type: YTN; PAM sequence: TTT
tagctcttgtctgctccaac

SEQ ID NO: 20096 - DNA, 20 bp, Artificial Sequence
  Description of Artificial Sequence: Synthetic oligonucleotide
  Target: PCSK9; (-) strand; PAM type: YTN; PAM sequence: TTT
ttagctcttgtctgctccaa

SEQ ID NO: 20097 - DNA, 20 bp, Artificial Sequence
  Description of Artificial Sequence: Synthetic oligonucleotide
  Target: PCSK9; (-) strand; PAM type: YTN; PAM sequence: TTG
gtttttagctcttgtctgct

SEQ ID NO: 20098 - DNA, 20 bp, Artificial Sequence
  Description of Artificial Sequence: Synthetic oligonucleotide
  Target: PCSK9; (-) strand; PAM type: YTN; PAM sequence: TTT
ggtttttagctcttgtctgc

SEQ ID NO: 20099 - DNA, 20 bp, Artificial Sequence
  Description of Artificial Sequence: Synthetic oligonucleotide
  Target: PCSK9; (-) strand; PAM type: YTN; PAM sequence: TTG
tttggtttttagctcttgtc

SEQ ID NO: 20100 - DNA, 20 bp, Artificial Sequence
  Description of Artificial Sequence: Synthetic oligonucleotide
  Target: PCSK9; (-) strand; PAM type: YTN; PAM sequence: TTT
gtttggtttttagctcttgt

SEQ ID NO: 20101 - DNA, 20 bp, Artificial Sequence
  Description of Artificial Sequence: Synthetic oligonucleotide
  Target: PCSK9; (-) strand; PAM type: YTN; PAM sequence: CTA
tggtgatttgtttggttttt

SEQ ID NO: 20102 - DNA, 20 bp, Artificial Sequence
  Description of Artificial Sequence: Synthetic oligonucleotide
  Target: PCSK9; (-) strand; PAM type: YTN; PAM sequence: CTA
tctatggtgatttgtttggt

SEQ ID NO: 20103 - DNA, 20 bp, Artificial Sequence
  Description of Artificial Sequence: Synthetic oligonucleotide
  Target: PCSK9; (-) strand; PAM type: YTN; PAM sequence: TTA
tagcagccactatctatggt

SEQ ID NO: 20104 - DNA, 20 bp, Artificial Sequence
  Description of Artificial Sequence: Synthetic oligonucleotide
  Target: PCSK9; (-) strand; PAM type: YTN; PAM sequence: TTG
gaggggacaaacaaattata

SEQ ID NO: 20105 - DNA, 20 bp, Artificial Sequence
  Description of Artificial Sequence: Synthetic oligonucleotide
  Target: PCSK9; (-) strand; PAM type: YTN; PAM sequence: TTT
ggaggggacaaacaaattat

SEQ ID NO: 20106 - DNA, 20 bp, Artificial Sequence
  Description of Artificial Sequence: Synthetic oligonucleotide
  Target: PCSK9; (-) strand; PAM type: YTN; PAM sequence: TTC
cacatgagatttggagggga

SEQ ID NO: 20107 - DNA, 20 bp, Artificial Sequence
  Description of Artificial Sequence: Synthetic oligonucleotide
  Target: PCSK9; (-) strand; PAM type: YTN; PAM sequence: TTT
ccacatgagatttggagggg

SEQ ID NO: 20108 - DNA, 20 bp, Artificial Sequence
  Description of Artificial Sequence: Synthetic oligonucleotide
  Target: PCSK9; (-) strand; PAM type: YTN; PAM sequence: CTG
aggaccaaatttccacatga

SEQ ID NO: 20109 - DNA, 20 bp, Artificial Sequence
  Description of Artificial Sequence: Synthetic oligonucleotide
  Target: PCSK9; (-) strand; PAM type: YTN; PAM sequence: TTC
caacactgaggaccaaattt

SEQ ID NO: 20110 - DNA, 20 bp, Artificial Sequence
  Description of Artificial Sequence: Synthetic oligonucleotide
  Target: PCSK9; (-) strand; PAM type: YTN; PAM sequence: CTT
ccaacactgaggaccaaatt

SEQ ID NO: 20111 - DNA, 20 bp, Artificial Sequence
  Description of Artificial Sequence: Synthetic oligonucleotide
  Target: PCSK9; (-) strand; PAM type: YTN; PAM sequence: TTA
ggccccacttccaacactga

SEQ ID NO: 20112 - DNA, 20 bp, Artificial Sequence
  Description of Artificial Sequence: Synthetic oligonucleotide
  Target: PCSK9; (-) strand; PAM type: YTN; PAM sequence: CTC
ccattaggccccacttccaa

SEQ ID NO: 20113 - DNA, 20 bp, Artificial Sequence
  Description of Artificial Sequence: Synthetic oligonucleotide
  Target: PCSK9; (-) strand; PAM type: YTN; PAM sequence: CTC
ccccatgacccaaacacctc

SEQ ID NO: 20114 - DNA, 20 bp, Artificial Sequence
  Description of Artificial Sequence: Synthetic oligonucleotide
  Target: PCSK9; (-) strand; PAM type: YTN; PAM sequence: TTC
ctcccccatgacccaaacac

SEQ ID NO: 20115 - DNA, 20 bp, Artificial Sequence
  Description of Artificial Sequence: Synthetic oligonucleotide
  Target: PCSK9; (-) strand; PAM type: YTN; PAM sequence: TTC
acaggggttcctcccccatg

SEQ ID NO: 20116 - DNA, 20 bp, Artificial Sequence
  Description of Artificial Sequence: Synthetic oligonucleotide
  Target: PCSK9; (-) strand; PAM type: YTN; PAM sequence: TTT
cacaggggttcctcccccat

SEQ ID NO: 20117 - DNA, 20 bp, Artificial Sequence
  Description of Artificial Sequence: Synthetic oligonucleotide
  Target: PCSK9; (-) strand; PAM type: YTN; PAM sequence: CTT
tcacaggggttcctccccca

SEQ ID NO: 20118 - DNA, 20 bp, Artificial Sequence
  Description of Artificial Sequence: Synthetic oligonucleotide
  Target: PCSK9; (-) strand; PAM type: YTN; PAM sequence: TTA
tcacaaggacggcaccaagc

SEQ ID NO: 20119 - DNA, 20 bp, Artificial Sequence
  Description of Artificial Sequence: Synthetic oligonucleotide
  Target: PCSK9; (-) strand; PAM type: YTN; PAM sequence: CTC
attatcacaaggacggcacc

SEQ ID NO: 20120 - DNA, 20 bp, Artificial Sequence
  Description of Artificial Sequence: Synthetic oligonucleotide
  Target: PCSK9; (-) strand; PAM type: YTN; PAM sequence: TTA
ctcattatcacaaggacggc

SEQ ID NO: 20121 - DNA, 20 bp, Artificial Sequence
  Description of Artificial Sequence: Synthetic oligonucleotide
  Target: PCSK9; (-) strand; PAM type: YTN; PAM sequence: CTT
actcattatcacaaggacgg

SEQ ID NO: 20122 - DNA, 20 bp, Artificial Sequence
  Description of Artificial Sequence: Synthetic oligonucleotide
  Target: PCSK9; (-) strand; PAM type: YTN; PAM sequence: TTC
aagggaaatcatagcgggag

SEQ ID NO: 20123 - DNA, 20 bp, Artificial Sequence
  Description of Artificial Sequence: Synthetic oligonucleotide
  Target: PCSK9; (-) strand; PAM type: YTN; PAM sequence: CTT
caagggaaatcatagcggga

SEQ ID NO: 20124 - DNA, 20 bp, Artificial Sequence
  Description of Artificial Sequence: Synthetic oligonucleotide
  Target: PCSK9; (-) strand; PAM type: YTN; PAM sequence: TTA
ataatcagccttcaagggaa

SEQ ID NO: 20125 - DNA, 20 bp, Artificial Sequence
  Description of Artificial Sequence: Synthetic oligonucleotide
  Target: PCSK9; (-) strand; PAM type: YTN; PAM sequence: TTT
aataatcagccttcaaggga

SEQ ID NO: 20126 - DNA, 20 bp, Artificial Sequence
  Description of Artificial Sequence: Synthetic oligonucleotide
  Target: PCSK9; (-) strand; PAM type: YTN; PAM sequence: TTT
taataatcagccttcaaggg

SEQ ID NO: 20127 - DNA, 20 bp, Artificial Sequence
  Description of Artificial Sequence: Synthetic oligonucleotide
  Target: PCSK9; (-) strand; PAM type: YTN; PAM sequence: TTT
ttaataatcagccttcaagg

SEQ ID NO: 20128 - DNA, 20 bp, Artificial Sequence
  Description of Artificial Sequence: Synthetic oligonucleotide
  Target: PCSK9; (-) strand; PAM type: YTN; PAM sequence: CTT
tttaataatcagccttcaag

SEQ ID NO: 20129 - DNA, 20 bp, Artificial Sequence
  Description of Artificial Sequence: Synthetic oligonucleotide
  Target: PCSK9; (-) strand; PAM type: YTN; PAM sequence: CTC
tttttaataatcagccttca

SEQ ID NO: 20130 - DNA, 20 bp, Artificial Sequence
  Description of Artificial Sequence: Synthetic oligonucleotide
  Target: PCSK9; (-) strand; PAM type: YTN; PAM sequence: CTA
catgtgcagagatcaatcac

SEQ ID NO: 20131 - DNA, 20 bp, Artificial Sequence
  Description of Artificial Sequence: Synthetic oligonucleotide
  Target: PCSK9; (-) strand; PAM type: YTN; PAM sequence: CTG
atggcagaaggtgaagggga

SEQ ID NO: 20132 - DNA, 20 bp, Artificial Sequence
  Description of Artificial Sequence: Synthetic oligonucleotide
  Target: PCSK9; (-) strand; PAM type: YTN; PAM sequence: TTC
actgatggcagaaggtgaag

SEQ ID NO: 20133 - DNA, 20 bp, Artificial Sequence
  Description of Artificial Sequence: Synthetic oligonucleotide
  Target: PCSK9; (-) strand; PAM type: YTN; PAM sequence: TTT
cactgatggcagaaggtgaa

SEQ ID NO: 20134 - DNA, 20 bp, Artificial Sequence
  Description of Artificial Sequence: Synthetic oligonucleotide
  Target: PCSK9; (-) strand; PAM type: YTN; PAM sequence: CTT
tcactgatggcagaaggtga

SEQ ID NO: 20135 - DNA, 20 bp, Artificial Sequence
  Description of Artificial Sequence: Synthetic oligonucleotide
  Target: PCSK9; (-) strand; PAM type: YTN; PAM sequence: CTG
ctttcactgatggcagaagg

SEQ ID NO: 20136 - DNA, 20 bp, Artificial Sequence
  Description of Artificial Sequence: Synthetic oligonucleotide
  Target: PCSK9; (-) strand; PAM type: YTN; PAM sequence: TTA
agctgctttcactgatggca

SEQ ID NO: 20137 - DNA, 20 bp, Artificial Sequence
  Description of Artificial Sequence: Synthetic oligonucleotide
  Target: PCSK9; (-) strand; PAM type: YTN; PAM sequence: CTT
aagctgctttcactgatggc

SEQ ID NO: 20138 - DNA, 20 bp, Artificial Sequence
  Description of Artificial Sequence: Synthetic oligonucleotide
  Target: PCSK9; (-) strand; PAM type: YTN; PAM sequence: CTG
gtgagggccttaagctgctt

SEQ ID NO: 20139 - DNA, 20 bp, Artificial Sequence
  Description of Artificial Sequence: Synthetic oligonucleotide
  Target: PCSK9; (-) strand; PAM type: YTN; PAM sequence: TTC
tggtgagggccttaagctgc

SEQ ID NO: 20140 - DNA, 20 bp, Artificial Sequence
  Description of Artificial Sequence: Synthetic oligonucleotide
  Target: PCSK9; (-) strand; PAM type: YTN; PAM sequence: CTT
ctggtgagggccttaagctg

SEQ ID NO: 20141 - DNA, 20 bp, Artificial Sequence
  Description of Artificial Sequence: Synthetic oligonucleotide
  Target: PCSK9; (-) strand; PAM type: YTN; PAM sequence: CTG
cttctggtgagggccttaag

SEQ ID NO: 20142 - DNA, 20 bp, Artificial Sequence
  Description of Artificial Sequence: Synthetic oligonucleotide
  Target: PCSK9; (-) strand; PAM type: YTN; PAM sequence: CTC
caggaagcatggcaccagca

SEQ ID NO: 20143 - DNA, 20 bp, Artificial Sequence
  Description of Artificial Sequence: Synthetic oligonucleotide
  Target: PCSK9; (-) strand; PAM type: YTN; PAM sequence: CTC
tccaggaagcatggcaccag

SEQ ID NO: 20144 - DNA, 20 bp, Artificial Sequence
  Description of Artificial Sequence: Synthetic oligonucleotide
  Target: PCSK9; (-) strand; PAM type: YTN; PAM sequence: CTG
caagctctccaggaagcatg

SEQ ID NO: 20145 - DNA, 20 bp, Artificial Sequence
  Description of Artificial Sequence: Synthetic oligonucleotide
  Target: PCSK9; (-) strand; PAM type: YTN; PAM sequence: TTC
tgcaagctctccaggaagca

SEQ ID NO: 20146 - DNA, 20 bp, Artificial Sequence
  Description of Artificial Sequence: Synthetic oligonucleotide
  Target: PCSK9; (-) strand; PAM type: YTN; PAM sequence: CTC
atgattctgcaagctctcca

SEQ ID NO: 20147 - DNA, 20 bp, Artificial Sequence
  Description of Artificial Sequence: Synthetic oligonucleotide
  Target: PCSK9; (-) strand; PAM type: YTN; PAM sequence: TTC
agctcatgattctgcaagct

SEQ ID NO: 20148 - DNA, 20 bp, Artificial Sequence
  Description of Artificial Sequence: Synthetic oligonucleotide
  Target: PCSK9; (-) strand; PAM type: YTN; PAM sequence: TTA
ttcagctcatgattctgcaa

SEQ ID NO: 20149 - DNA, 20 bp, Artificial Sequence
  Description of Artificial Sequence: Synthetic oligonucleotide
  Target: PCSK9; (-) strand; PAM type: YTN; PAM sequence: TTT
attcagctcatgattctgca

SEQ ID NO: 20150 - DNA, 20 bp, Artificial Sequence
  Description of Artificial Sequence: Synthetic oligonucleotide
  Target: PCSK9; (-) strand; PAM type: YTN; PAM sequence: TTA
caaggaaaagggatttattc

SEQ ID NO: 20151 - DNA, 20 bp, Artificial Sequence
  Description of Artificial Sequence: Synthetic oligonucleotide
  Target: PCSK9; (-) strand; PAM type: YTN; PAM sequence: TTT
acaaggaaaagggatttatt

SEQ ID NO: 20152 - DNA, 20 bp, Artificial Sequence
  Description of Artificial Sequence: Synthetic oligonucleotide
  Target: PCSK9; (-) strand; PAM type: YTN; PAM sequence: CTG
aaggtgagtaatttacaagg

SEQ ID NO: 20153 - DNA, 20 bp, Artificial Sequence
  Description of Artificial Sequence: Synthetic oligonucleotide
  Target: PCSK9; (-) strand; PAM type: YTN; PAM sequence: CTA
tataaaggaatacctgaagg

SEQ ID NO: 20154 - DNA, 20 bp, Artificial Sequence
  Description of Artificial Sequence: Synthetic oligonucleotide
  Target: PCSK9; (-) strand; PAM type: YTN; PAM sequence: TTG
ctatataaaggaatacctga

SEQ ID NO: 20155 - DNA, 20 bp, Artificial Sequence
  Description of Artificial Sequence: Synthetic oligonucleotide
  Target: PCSK9; (-) strand; PAM type: YTN; PAM sequence: TTG
tgttgctatataaaggaata

SEQ ID NO: 20156 - DNA, 20 bp, Artificial Sequence
  Description of Artificial Sequence: Synthetic oligonucleotide
  Target: PCSK9; (-) strand; PAM type: YTN; PAM sequence: TTT
gtgttgctatataaaggaat

SEQ ID NO: 20157 - DNA, 20 bp, Artificial Sequence
  Description of Artificial Sequence: Synthetic oligonucleotide
  Target: PCSK9; (-) strand; PAM type: YTN; PAM sequence: TTT
tgtgttgctatataaaggaa

SEQ ID NO: 20158 - DNA, 20 bp, Artificial Sequence
  Description of Artificial Sequence: Synthetic oligonucleotide
  Target: PCSK9; (-) strand; PAM type: YTN; PAM sequence: CTT
ttgtgttgctatataaagga

SEQ ID NO: 20159 - DNA, 20 bp, Artificial Sequence
  Description of Artificial Sequence: Synthetic oligonucleotide
  Target: PCSK9; (-) strand; PAM type: YTN; PAM sequence: TTA
gtccttttgtgttgctatat

SEQ ID NO: 20160 - DNA, 20 bp, Artificial Sequence
  Description of Artificial Sequence: Synthetic oligonucleotide
  Target: PCSK9; (-) strand; PAM type: YTN; PAM sequence: CTT
agtccttttgtgttgctata

SEQ ID NO: 20161 - DNA, 20 bp, Artificial Sequence
  Description of Artificial Sequence: Synthetic oligonucleotide
  Target: PCSK9; (-) strand; PAM type: YTN; PAM sequence: CTG
tcttagtccttttgtgttgc

SEQ ID NO: 20162 - DNA, 20 bp, Artificial Sequence
  Description of Artificial Sequence: Synthetic oligonucleotide
  Target: PCSK9; (-) strand; PAM type: YTN; PAM sequence: TTA
aagagagagaaaagtcaagg

SEQ ID NO: 20163 - DNA, 20 bp, Artificial Sequence
  Description of Artificial Sequence: Synthetic oligonucleotide
  Target: PCSK9; (-) strand; PAM type: YTN; PAM sequence: CTT
aaagagagagaaaagtcaag

SEQ ID NO: 20164 - DNA, 20 bp, Artificial Sequence
  Description of Artificial Sequence: Synthetic oligonucleotide
  Target: PCSK9; (-) strand; PAM type: YTN; PAM sequence: TTC
ttaaagagagagaaaagtca

SEQ ID NO: 20165 - DNA, 20 bp, Artificial Sequence
  Description of Artificial Sequence: Synthetic oligonucleotide
  Target: PCSK9; (-) strand; PAM type: YTN; PAM sequence: CTT
cttaaagagagagaaaagtc

SEQ ID NO: 20166 - DNA, 20 bp, Artificial Sequence
  Description of Artificial Sequence: Synthetic oligonucleotide
  Target: PCSK9; (-) strand; PAM type: YTN; PAM sequence: CTA
agtgagcaaaggcaacactt

SEQ ID NO: 20167 - DNA, 20 bp, Artificial Sequence
  Description of Artificial Sequence: Synthetic oligonucleotide
  Target: PCSK9; (-) strand; PAM type: YTN; PAM sequence: CTA
caaatgcaggcagaagggat

SEQ ID NO: 20168 - DNA, 20 bp, Artificial Sequence
  Description of Artificial Sequence: Synthetic oligonucleotide
  Target: PCSK9; (-) strand; PAM type: YTN; PAM sequence: CTC
tacaaatgcaggcagaaggg

SEQ ID NO: 20169 - DNA, 20 bp, Artificial Sequence
  Description of Artificial Sequence: Synthetic oligonucleotide
  Target: PCSK9; (-) strand; PAM type: YTN; PAM sequence: CTC
ccatccagatgctctacaaa

SEQ ID NO: 20170 - DNA, 20 bp, Artificial Sequence
  Description of Artificial Sequence: Synthetic oligonucleotide
  Target: PCSK9; (-) strand; PAM type: YTN; PAM sequence: TTA
tataaatctcccatccagat

SEQ ID NO: 20171 - DNA, 20 bp, Artificial Sequence
  Description of Artificial Sequence: Synthetic oligonucleotide
  Target: PCSK9; (-) strand; PAM type: YTN; PAM sequence: CTG
ggaaagtcaagagtgacggt

SEQ ID NO: 20172 - DNA, 20 bp, Artificial Sequence
  Description of Artificial Sequence: Synthetic oligonucleotide
  Target: PCSK9; (-) strand; PAM type: YTN; PAM sequence: CTG
ctgggaaagtcaagagtgac

SEQ ID NO: 20173 - DNA, 20 bp, Artificial Sequence
  Description of Artificial Sequence: Synthetic oligonucleotide
  Target: PCSK9; (-) strand; PAM type: YTN; PAM sequence: CTA
tgacataggcctgctgggaa

SEQ ID NO: 20174 - DNA, 20 bp, Artificial Sequence
  Description of Artificial Sequence: Synthetic oligonucleotide
  Target: PCSK9; (-) strand; PAM type: YTN; PAM sequence: TTG
tagagaccacagtacctatg

SEQ ID NO: 20175 - DNA, 20 bp, Artificial Sequence
  Description of Artificial Sequence: Synthetic oligonucleotide
  Target: PCSK9; (-) strand; PAM type: YTN; PAM sequence: CTG
tattgtagagaccacagtac

SEQ ID NO: 20176 - DNA, 20 bp, Artificial Sequence
  Description of Artificial Sequence: Synthetic oligonucleotide
  Target: PCSK9; (-) strand; PAM type: YTN; PAM sequence: CTG
ctgtattgtagagaccacag

SEQ ID NO: 20177 - DNA, 20 bp, Artificial Sequence
  Description of Artificial Sequence: Synthetic oligonucleotide
  Target: PCSK9; (-) strand; PAM type: YTN; PAM sequence: CTC
tgctgtattgtagagaccac

SEQ ID NO: 20178 - DNA, 20 bp, Artificial Sequence
  Description of Artificial Sequence: Synthetic oligonucleotide
  Target: PCSK9; (-) strand; PAM type: YTN; PAM sequence: CTC
agatacctctgctgtattgt

SEQ ID NO: 20179 - DNA, 20 bp, Artificial Sequence
  Description of Artificial Sequence: Synthetic oligonucleotide
  Target: PCSK9; (-) strand; PAM type: YTN; PAM sequence: CTC
ggagcctcagatacctctgc

SEQ ID NO: 20180 - DNA, 20 bp, Artificial Sequence
  Description of Artificial Sequence: Synthetic oligonucleotide
  Target: PCSK9; (-) strand; PAM type: YTN; PAM sequence: CTC
tcggagcctcagatacctct

SEQ ID NO: 20181 - DNA, 20 bp, Artificial Sequence
  Description of Artificial Sequence: Synthetic oligonucleotide
  Target: PCSK9; (-) strand; PAM type: YTN; PAM sequence: CTC
aacctctcggagcctcagat

SEQ ID NO: 20182 - DNA, 20 bp, Artificial Sequence
  Description of Artificial Sequence: Synthetic oligonucleotide
  Target: PCSK9; (-) strand; PAM type: YTN; PAM sequence: TTG
tgcagccatgagcaagtcac

SEQ ID NO: 20183 - DNA, 20 bp, Artificial Sequence
  Description of Artificial Sequence: Synthetic oligonucleotide
  Target: PCSK9; (-) strand; PAM type: YTN; PAM sequence: CTG
gttgtgcagccatgagcaag

SEQ ID NO: 20184 - DNA, 20 bp, Artificial Sequence
  Description of Artificial Sequence: Synthetic oligonucleotide
  Target: PCSK9; (-) strand; PAM type: YTN; PAM sequence: TTA
ctggttgtgcagccatgagc

SEQ ID NO: 20185 - DNA, 20 bp, Artificial Sequence
  Description of Artificial Sequence: Synthetic oligonucleotide
  Target: PCSK9; (-) strand; PAM type: YTN; PAM sequence: TTT
actggttgtgcagccatgag

SEQ ID NO: 20186 - DNA, 20 bp, Artificial Sequence
  Description of Artificial Sequence: Synthetic oligonucleotide
  Target: PCSK9; (-) strand; PAM type: YTN; PAM sequence: CTC
caatatttactggttgtgca

SEQ ID NO: 20187 - DNA, 20 bp, Artificial Sequence
  Description of Artificial Sequence: Synthetic oligonucleotide
  Target: PCSK9; (-) strand; PAM type: YTN; PAM sequence: TTC
cagctccaatatttactggt

SEQ ID NO: 20188 - DNA, 20 bp, Artificial Sequence
  Description of Artificial Sequence: Synthetic oligonucleotide
  Target: PCSK9; (-) strand; PAM type: YTN; PAM sequence: CTG
aattccagctccaatattta

SEQ ID NO: 20189 - DNA, 20 bp, Artificial Sequence
  Description of Artificial Sequence: Synthetic oligonucleotide
  Target: PCSK9; (-) strand; PAM type: YTN; PAM sequence: TTG
gagccaggaaaccgtggacc

SEQ ID NO: 20190 - DNA, 20 bp, Artificial Sequence
  Description of Artificial Sequence: Synthetic oligonucleotide
  Target: PCSK9; (-) strand; PAM type: YTN; PAM sequence: TTT
ggagccaggaaaccgtggac

SEQ ID NO: 20191 - DNA, 20 bp, Artificial Sequence
  Description of Artificial Sequence: Synthetic oligonucleotide
  Target: PCSK9; (-) strand; PAM type: YTN; PAM sequence: CTT
tggagccaggaaaccgtgga

SEQ ID NO: 20192 - DNA, 20 bp, Artificial Sequence
  Description of Artificial Sequence: Synthetic oligonucleotide
  Target: PCSK9; (-) strand; PAM type: YTN; PAM sequence: TTG
agggaaaaaatcatgggctt

SEQ ID NO: 20193 - DNA, 20 bp, Artificial Sequence
  Description of Artificial Sequence: Synthetic oligonucleotide
  Target: PCSK9; (-) strand; PAM type: YTN; PAM sequence: CTC
ccccatgccccagtcagaat

SEQ ID NO: 20194 - DNA, 20 bp, Artificial Sequence
  Description of Artificial Sequence: Synthetic oligonucleotide
  Target: PCSK9; (-) strand; PAM type: YTN; PAM sequence: CTG
cccaaaggccaccccctccc

SEQ ID NO: 20195 - DNA, 20 bp, Artificial Sequence
  Description of Artificial Sequence: Synthetic oligonucleotide
  Target: PCSK9; (-) strand; PAM type: YTN; PAM sequence: CTG
gtggccctgcccaaaggcca

SEQ ID NO: 20196 - DNA, 20 bp, Artificial Sequence
  Description of Artificial Sequence: Synthetic oligonucleotide
  Target: PCSK9; (-) strand; PAM type: YTN; PAM sequence: CTC
ctggtggccctgcccaaagg

SEQ ID NO: 20197 - DNA, 20 bp, Artificial Sequence
  Description of Artificial Sequence: Synthetic oligonucleotide
  Target: PCSK9; (-) strand; PAM type: YTN; PAM sequence: CTG
gtcgctcctggtggccctgc

SEQ ID NO: 20198 - DNA, 20 bp, Artificial Sequence
  Description of Artificial Sequence: Synthetic oligonucleotide
  Target: PCSK9; (-) strand; PAM type: YTN; PAM sequence: CTA
cgggcctggtcgctcctggt

SEQ ID NO: 20199 - DNA, 20 bp, Artificial Sequence
  Description of Artificial Sequence: Synthetic oligonucleotide
  Target: PCSK9; (-) strand; PAM type: YTN; PAM sequence: CTC
tacgggcctggtcgctcctg

SEQ ID NO: 20200 - DNA, 20 bp, Artificial Sequence
  Description of Artificial Sequence: Synthetic oligonucleotide
  Target: PCSK9; (-) strand; PAM type: YTN; PAM sequence: CTC
tctacgggcctggtcgctcc

SEQ ID NO: 20201 - DNA, 20 bp, Artificial Sequence
  Description of Artificial Sequence: Synthetic oligonucleotide
  Target: PCSK9; (-) strand; PAM type: YTN; PAM sequence: CTG
cacccagctctctacgggcc

SEQ ID NO: 20202 - DNA, 20 bp, Artificial Sequence
  Description of Artificial Sequence: Synthetic oligonucleotide
  Target: PCSK9; (-) strand; PAM type: YTN; PAM sequence: CTG
tacctgcacccagctctcta

SEQ ID NO: 20203 - DNA, 20 bp, Artificial Sequence
  Description of Artificial Sequence: Synthetic oligonucleotide
  Target: PCSK9; (-) strand; PAM type: YTN; PAM sequence: CTC
tgtacctgcacccagctctc

SEQ ID NO: 20204 - DNA, 20 bp, Artificial Sequence
  Description of Artificial Sequence: Synthetic oligonucleotide
  Target: PCSK9; (-) strand; PAM type: YTN; PAM sequence: TTC
ctctgtacctgcacccagct

SEQ ID NO: 20205 - DNA, 20 bp, Artificial Sequence
  Description of Artificial Sequence: Synthetic oligonucleotide
  Target: PCSK9; (-) strand; PAM type: YTN; PAM sequence: TTT
cctctgtacctgcacccagc

SEQ ID NO: 20206 - DNA, 20 bp, Artificial Sequence
  Description of Artificial Sequence: Synthetic oligonucleotide
  Target: PCSK9; (-) strand; PAM type: YTN; PAM sequence: TTT
tcctctgtacctgcacccag

SEQ ID NO: 20207 - DNA, 20 bp, Artificial Sequence
  Description of Artificial Sequence: Synthetic oligonucleotide
  Target: PCSK9; (-) strand; PAM type: YTN; PAM sequence: CTC
gacaacaggttttcctctgt

SEQ ID NO: 20208 - DNA, 20 bp, Artificial Sequence
  Description of Artificial Sequence: Synthetic oligonucleotide
  Target: PCSK9; (-) strand; PAM type: YTN; PAM sequence: CTA
cgggccacactcgacaacag

SEQ ID NO: 20209 - DNA, 20 bp, Artificial Sequence
  Description of Artificial Sequence: Synthetic oligonucleotide
  Target: PCSK9; (-) strand; PAM type: YTN; PAM sequence: TTC
aggcaaaaatgggaactacg

SEQ ID NO: 20210 - DNA, 20 bp, Artificial Sequence
  Description of Artificial Sequence: Synthetic oligonucleotide
  Target: PCSK9; (-) strand; PAM type: YTN; PAM sequence: TTC
aaatgtgccattcaggcaaa

SEQ ID NO: 20211 - DNA, 20 bp, Artificial Sequence
  Description of Artificial Sequence: Synthetic oligonucleotide
  Target: PCSK9; (-) strand; PAM type: YTN; PAM sequence: TTT
caaatgtgccattcaggcaa

SEQ ID NO: 20212 - DNA, 20 bp, Artificial Sequence
  Description of Artificial Sequence: Synthetic oligonucleotide
  Target: PCSK9; (-) strand; PAM type: YTN; PAM sequence: CTT
tcaaatgtgccattcaggca

SEQ ID NO: 20213 - DNA, 20 bp, Artificial Sequence
  Description of Artificial Sequence: Synthetic oligonucleotide
  Target: PCSK9; (-) strand; PAM type: YTN; PAM sequence: TTA
tataacactttcaaatgtgc

SEQ ID NO: 20214 - DNA, 20 bp, Artificial Sequence
  Description of Artificial Sequence: Synthetic oligonucleotide
  Target: PCSK9; (-) strand; PAM type: YTN; PAM sequence: TTC
acatggttatataacacttt

SEQ ID NO: 20215 - DNA, 20 bp, Artificial Sequence
  Description of Artificial Sequence: Synthetic oligonucleotide
  Target: PCSK9; (-) strand; PAM type: YTN; PAM sequence: TTA
ttcacatggttatataacac

SEQ ID NO: 20216 - DNA, 20 bp, Artificial Sequence
  Description of Artificial Sequence: Synthetic oligonucleotide
  Target: PCSK9; (-) strand; PAM type: YTN; PAM sequence: TTA
ttattcacatggttatataa

SEQ ID NO: 20217 - DNA, 20 bp, Artificial Sequence
  Description of Artificial Sequence: Synthetic oligonucleotide
  Target: PCSK9; (-) strand; PAM type: YTN; PAM sequence: CTA
ttattattcacatggttata

SEQ ID NO: 20218 - DNA, 20 bp, Artificial Sequence
  Description of Artificial Sequence: Synthetic oligonucleotide
  Target: PCSK9; (-) strand; PAM type: YTN; PAM sequence: CTC
atataggccaactattatta

SEQ ID NO: 20219 - DNA, 20 bp, Artificial Sequence
  Description of Artificial Sequence: Synthetic oligonucleotide
  Target: PCSK9; (-) strand; PAM type: YTN; PAM sequence: TTA
aagaactcatataggccaac

SEQ ID NO: 20220 - DNA, 20 bp, Artificial Sequence
  Description of Artificial Sequence: Synthetic oligonucleotide
  Target: PCSK9; (-) strand; PAM type: YTN; PAM sequence: TTA
ccaaatgcggaccaaaaagc

SEQ ID NO: 20221 - DNA, 20 bp, Artificial Sequence
  Description of Artificial Sequence: Synthetic oligonucleotide
  Target: PCSK9; (-) strand; PAM type: YTN; PAM sequence: TTA
caacaaaagagacacaacag

SEQ ID NO: 20222 - DNA, 20 bp, Artificial Sequence
  Description of Artificial Sequence: Synthetic oligonucleotide
  Target: PCSK9; (-) strand; PAM type: YTN; PAM sequence: TTA
caaattacaacaaaagagac

SEQ ID NO: 20223 - DNA, 20 bp, Artificial Sequence
  Description of Artificial Sequence: Synthetic oligonucleotide
  Target: PCSK9; (-) strand; PAM type: YTN; PAM sequence: CTT
acaaattacaacaaaagaga

SEQ ID NO: 20224 - DNA, 20 bp, Artificial Sequence
  Description of Artificial Sequence: Synthetic oligonucleotide
  Target: PCSK9; (-) strand; PAM type: YTN; PAM sequence: CTA
cttacaaattacaacaaaag

SEQ ID NO: 20225 - DNA, 20 bp, Artificial Sequence
  Description of Artificial Sequence: Synthetic oligonucleotide
  Target: PCSK9; (-) strand; PAM type: YTN; PAM sequence: CTC
acccctacttacaaattaca

SEQ ID NO: 20226 - DNA, 20 bp, Artificial Sequence
  Description of Artificial Sequence: Synthetic oligonucleotide
  Target: PCSK9; (-) strand; PAM type: YTN; PAM sequence: TTA
tctcacccctacttacaaat

SEQ ID NO: 20227 - DNA, 20 bp, Artificial Sequence
  Description of Artificial Sequence: Synthetic oligonucleotide
  Target: PCSK9; (-) strand; PAM type: YTN; PAM sequence: TTT
atctcacccctacttacaaa

SEQ ID NO: 20228 - DNA, 20 bp, Artificial Sequence
  Description of Artificial Sequence: Synthetic oligonucleotide
  Target: PCSK9; (-) strand; PAM type: YTN; PAM sequence: CTT
tatctcacccctacttacaa

SEQ ID NO: 20229 - DNA, 20 bp, Artificial Sequence
  Description of Artificial Sequence: Synthetic oligonucleotide
  Target: PCSK9; (-) strand; PAM type: YTN; PAM sequence: CTA
ggtgtactttatctcacccc

SEQ ID NO: 20230 - DNA, 20 bp, Artificial Sequence
  Description of Artificial Sequence: Synthetic oligonucleotide
  Target: PCSK9; (-) strand; PAM type: YTN; PAM sequence: CTG
gccccatgcaaggaggaaca

SEQ ID NO: 20231 - DNA, 20 bp, Artificial Sequence
  Description of Artificial Sequence: Synthetic oligonucleotide
  Target: PCSK9; (-) strand; PAM type: YTN; PAM sequence: CTC
cacggatcctggccccatgc

SEQ ID NO: 20232 - DNA, 20 bp, Artificial Sequence
  Description of Artificial Sequence: Synthetic oligonucleotide
  Target: PCSK9; (-) strand; PAM type: YTN; PAM sequence: TTC
agcaccaccacgtaggtgcc

SEQ ID NO: 20233 - DNA, 20 bp, Artificial Sequence
  Description of Artificial Sequence: Synthetic oligonucleotide
  Target: PCSK9; (-) strand; PAM type: YTN; PAM sequence: CTT
cagcaccaccacgtaggtgc

SEQ ID NO: 20234 - DNA, 20 bp, Artificial Sequence
  Description of Artificial Sequence: Synthetic oligonucleotide
  Target: PCSK9; (-) strand; PAM type: YTN; PAM sequence: CTC
cttcagcaccaccacgtagg

SEQ ID NO: 20235 - DNA, 20 bp, Artificial Sequence
  Description of Artificial Sequence: Synthetic oligonucleotide
  Target: PCSK9; (-) strand; PAM type: YTN; PAM sequence: CTC
ctccttcagcaccaccacgt

SEQ ID NO: 20236 - DNA, 20 bp, Artificial Sequence
  Description of Artificial Sequence: Synthetic oligonucleotide
  Target: PCSK9; (-) strand; PAM type: YTN; PAM sequence: CTG
cgagaggtgggtctcctcct

SEQ ID NO: 20237 - DNA, 20 bp, Artificial Sequence
  Description of Artificial Sequence: Synthetic oligonucleotide
  Target: PCSK9; (-) strand; PAM type: YTN; PAM sequence: CTG
actgcgagaggtgggtctcc

SEQ ID NO: 20238 - DNA, 20 bp, Artificial Sequence
  Description of Artificial Sequence: Synthetic oligonucleotide
  Target: PCSK9; (-) strand; PAM type: YTN; PAM sequence: CTC
tgactgcgagaggtgggtct

SEQ ID NO: 20239 - DNA, 20 bp, Artificial Sequence
  Description of Artificial Sequence: Synthetic oligonucleotide
  Target: PCSK9; (-) strand; PAM type: YTN; PAM sequence: CTG
caggcggcgggcagtgcgct

SEQ ID NO: 20240 - DNA, 20 bp, Artificial Sequence
  Description of Artificial Sequence: Synthetic oligonucleotide
  Target: PCSK9; (-) strand; PAM type: YTN; PAM sequence: CTG
ggcctgcaggcggcgggcag

SEQ ID NO: 20241 - DNA, 20 bp, Artificial Sequence
  Description of Artificial Sequence: Synthetic oligonucleotide
  Target: PCSK9; (-) strand; PAM type: YTN; PAM sequence: TTG
gtgaggtatccccggcgggc

SEQ ID NO: 20242 - DNA, 20 bp, Artificial Sequence
  Description of Artificial Sequence: Synthetic oligonucleotide
  Target: PCSK9; (-) strand; PAM type: YTN; PAM sequence: CTT
ggtgaggtatccccggcggg

SEQ ID NO: 20243 - DNA, 20 bp, Artificial Sequence
  Description of Artificial Sequence: Synthetic oligonucleotide
  Target: PCSK9; (-) strand; PAM type: YTN; PAM sequence: TTC
accaggaagccaggaagaag

SEQ ID NO: 20244 - DNA, 20 bp, Artificial Sequence
  Description of Artificial Sequence: Synthetic oligonucleotide
  Target: PCSK9; (-) strand; PAM type: YTN; PAM sequence: CTT
caccaggaagccaggaagaa

SEQ ID NO: 20245 - DNA, 20 bp, Artificial Sequence
  Description of Artificial Sequence: Synthetic oligonucleotide
  Target: PCSK9; (-) strand; PAM type: YTN; PAM sequence: CTC
atcttcaccaggaagccagg

SEQ ID NO: 20246 - DNA, 20 bp, Artificial Sequence
  Description of Artificial Sequence: Synthetic oligonucleotide
  Target: PCSK9; (-) strand; PAM type: YTN; PAM sequence: CTC
cagcaggtcgccactcatct

SEQ ID NO: 20247 - DNA, 20 bp, Artificial Sequence
  Description of Artificial Sequence: Synthetic oligonucleotide
  Target: PCSK9; (-) strand; PAM type: YTN; PAM sequence: CTC
accagctccagcaggtcgcc

SEQ ID NO: 20248 - DNA, 20 bp, Artificial Sequence
  Description of Artificial Sequence: Synthetic oligonucleotide
  Target: PCSK9; (-) strand; PAM type: YTN; PAM sequence: TTC
ccaaaaagggtggctcacca

SEQ ID NO: 20249 - DNA, 20 bp, Artificial Sequence
  Description of Artificial Sequence: Synthetic oligonucleotide
  Target: PCSK9; (-) strand; PAM type: YTN; PAM sequence: CTA
tcaggaagtgccattcccaa

SEQ ID NO: 20250 - DNA, 20 bp, Artificial Sequence
  Description of Artificial Sequence: Synthetic oligonucleotide
  Target: PCSK9; (-) strand; PAM type: YTN; PAM sequence: CTA
agcacagtccccagtgtata

SEQ ID NO: 20251 - DNA, 20 bp, Artificial Sequence
  Description of Artificial Sequence: Synthetic oligonucleotide
  Target: PCSK9; (-) strand; PAM type: YTN; PAM sequence: CTA
ctaagcacagtccccagtgt

SEQ ID NO: 20252 - DNA, 20 bp, Artificial Sequence
  Description of Artificial Sequence: Synthetic oligonucleotide
  Target: PCSK9; (-) strand; PAM type: YTN; PAM sequence: TTC
agcaatgggcctactaagca

SEQ ID NO: 20253 - DNA, 20 bp, Artificial Sequence
  Description of Artificial Sequence: Synthetic oligonucleotide
  Target: PCSK9; (-) strand; PAM type: YTN; PAM sequence: TTT
cagcaatgggcctactaagc

SEQ ID NO: 20254 - DNA, 20 bp, Artificial Sequence
  Description of Artificial Sequence: Synthetic oligonucleotide
  Target: PCSK9; (-) strand; PAM type: YTN; PAM sequence: TTT
tcagcaatgggcctactaag

SEQ ID NO: 20255 - DNA, 20 bp, Artificial Sequence
  Description of Artificial Sequence: Synthetic oligonucleotide
  Target: PCSK9; (-) strand; PAM type: YTN; PAM sequence: CTG
attttcagcaatgggcctac

SEQ ID NO: 20256 - DNA, 20 bp, Artificial Sequence
  Description of Artificial Sequence: Synthetic oligonucleotide
  Target: PCSK9; (-) strand; PAM type: YTN; PAM sequence: TTC
tgattttcagcaatgggcct

SEQ ID NO: 20257 - DNA, 20 bp, Artificial Sequence
  Description of Artificial Sequence: Synthetic oligonucleotide
  Target: PCSK9; (-) strand; PAM type: YTN; PAM sequence: CTT
ctgattttcagcaatgggcc

SEQ ID NO: 20258 - DNA, 20 bp, Artificial Sequence
  Description of Artificial Sequence: Synthetic oligonucleotide
  Target: PCSK9; (-) strand; PAM type: YTN; PAM sequence: CTG
tccccttctgattttcagca

SEQ ID NO: 20259 - DNA, 20 bp, Artificial Sequence
  Description of Artificial Sequence: Synthetic oligonucleotide
  Target: PCSK9; (-) strand; PAM type: YTN; PAM sequence: TTG
ctgtccccttctgattttca

SEQ ID NO: 20260 - DNA, 20 bp, Artificial Sequence
  Description of Artificial Sequence: Synthetic oligonucleotide
  Target: PCSK9; (-) strand; PAM type: YTN; PAM sequence: CTT
gctgtccccttctgattttc

SEQ ID NO: 20261 - DNA, 20 bp, Artificial Sequence
  Description of Artificial Sequence: Synthetic oligonucleotide
  Target: PCSK9; (-) strand; PAM type: YTN; PAM sequence: CTC
aatacatacttgctgtcccc

SEQ ID NO: 20262 - DNA, 20 bp, Artificial Sequence
  Description of Artificial Sequence: Synthetic oligonucleotide
  Target: PCSK9; (-) strand; PAM type: YTN; PAM sequence: TTG
gtacccgataagtgctcaat

SEQ ID NO: 20263 - DNA, 20 bp, Artificial Sequence
  Description of Artificial Sequence: Synthetic oligonucleotide
  Target: PCSK9; (-) strand; PAM type: YTN; PAM sequence: CTT
ggtacccgataagtgctcaa

SEQ ID NO: 20264 - DNA, 20 bp, Artificial Sequence
  Description of Artificial Sequence: Synthetic oligonucleotide
  Target: PCSK9; (-) strand; PAM type: YTN; PAM sequence: CTG
tgcttggtacccgataagtg

SEQ ID NO: 20265 - DNA, 20 bp, Artificial Sequence
  Description of Artificial Sequence: Synthetic oligonucleotide
  Target: PCSK9; (-) strand; PAM type: YTN; PAM sequence: TTA
ctgtgcttggtacccgataa

SEQ ID NO: 20266 - DNA, 20 bp, Artificial Sequence
  Description of Artificial Sequence: Synthetic oligonucleotide
  Target: PCSK9; (-) strand; PAM type: YTN; PAM sequence: CTA
tacagaaagccagtagttac

SEQ ID NO: 20267 - DNA, 20 bp, Artificial Sequence
  Description of Artificial Sequence: Synthetic oligonucleotide
  Target: PCSK9; (-) strand; PAM type: YTN; PAM sequence: TTC
tatacagaaagccagtagtt

SEQ ID NO: 20268 - DNA, 20 bp, Artificial Sequence
  Description of Artificial Sequence: Synthetic oligonucleotide
  Target: PCSK9; (-) strand; PAM type: YTN; PAM sequence: TTA
aagggaattctatacagaaa

SEQ ID NO: 20269 - DNA, 20 bp, Artificial Sequence
  Description of Artificial Sequence: Synthetic oligonucleotide
  Target: PCSK9; (-) strand; PAM type: YTN; PAM sequence: CTT
aaagggaattctatacagaa

SEQ ID NO: 20270 - DNA, 20 bp, Artificial Sequence
  Description of Artificial Sequence: Synthetic oligonucleotide
  Target: PCSK9; (-) strand; PAM type: YTN; PAM sequence: CTG
gggcatggccaggcttaaag

SEQ ID NO: 20271 - DNA, 20 bp, Artificial Sequence
  Description of Artificial Sequence: Synthetic oligonucleotide
  Target: PCSK9; (-) strand; PAM type: YTN; PAM sequence: TTC
aaatgaagatagacgtacca

SEQ ID NO: 20272 - DNA, 20 bp, Artificial Sequence
  Description of Artificial Sequence: Synthetic oligonucleotide
  Target: PCSK9; (-) strand; PAM type: YTN; PAM sequence: TTT
caaatgaagatagacgtacc

SEQ ID NO: 20273 - DNA, 20 bp, Artificial Sequence
  Description of Artificial Sequence: Synthetic oligonucleotide
  Target: PCSK9; (-) strand; PAM type: YTN; PAM sequence: CTT
tcaaatgaagatagacgtac

SEQ ID NO: 20274 - DNA, 20 bp, Artificial Sequence
  Description of Artificial Sequence: Synthetic oligonucleotide
  Target: PCSK9; (-) strand; PAM type: YTN; PAM sequence: CTC
gtctttcaaatgaagataga

SEQ ID NO: 20275 - DNA, 20 bp, Artificial Sequence
  Description of Artificial Sequence: Synthetic oligonucleotide
  Target: PCSK9; (-) strand; PAM type: YTN; PAM sequence: CTC
ctcgtctttcaaatgaagat

SEQ ID NO: 20276 - DNA, 20 bp, Artificial Sequence
  Description of Artificial Sequence: Synthetic oligonucleotide
  Target: PCSK9; (-) strand; PAM type: YTN; PAM sequence: TTC
agtctcctcgtctttcaaat

SEQ ID NO: 20277 - DNA, 20 bp, Artificial Sequence
  Description of Artificial Sequence: Synthetic oligonucleotide
  Target: PCSK9; (-) strand; PAM type: YTN; PAM sequence: CTT
cagtctcctcgtctttcaaa

SEQ ID NO: 20278 - DNA, 20 bp, Artificial Sequence
  Description of Artificial Sequence: Synthetic oligonucleotide
  Target: PCSK9; (-) strand; PAM type: YTN; PAM sequence: CTG
aacttcagtctcctcgtctt

SEQ ID NO: 20279 - DNA, 20 bp, Artificial Sequence
  Description of Artificial Sequence: Synthetic oligonucleotide
  Target: PCSK9; (-) strand; PAM type: YTN; PAM sequence: CTC
tgaacttcagtctcctcgtc

SEQ ID NO: 20280 - DNA, 20 bp, Artificial Sequence
  Description of Artificial Sequence: Synthetic oligonucleotide
  Target: PCSK9; (-) strand; PAM type: YTN; PAM sequence: CTG
tgtggtcccctctgaacttc

SEQ ID NO: 20281 - DNA, 20 bp, Artificial Sequence
  Description of Artificial Sequence: Synthetic oligonucleotide
  Target: PCSK9; (-) strand; PAM type: YTN; PAM sequence: CTG
tctgtgtggtcccctctgaa

SEQ ID NO: 20282 - DNA, 20 bp, Artificial Sequence
  Description of Artificial Sequence: Synthetic oligonucleotide
  Target: PCSK9; (-) strand; PAM type: YTN; PAM sequence: CTA
gctgtctgtgtggtcccctc

SEQ ID NO: 20283 - DNA, 20 bp, Artificial Sequence
  Description of Artificial Sequence: Synthetic oligonucleotide
  Target: PCSK9; (-) strand; PAM type: YTN; PAM sequence: CTA
cccctagctgtctgtgtggt

SEQ ID NO: 20284 - DNA, 20 bp, Artificial Sequence
  Description of Artificial Sequence: Synthetic oligonucleotide
  Target: PCSK9; (-) strand; PAM type: YTN; PAM sequence: CTC
tacccctagctgtctgtgtg

SEQ ID NO: 20285 - DNA, 20 bp, Artificial Sequence
  Description of Artificial Sequence: Synthetic oligonucleotide
  Target: PCSK9; (-) strand; PAM type: YTN; PAM sequence: TTG
atccaggctctacccctagc

SEQ ID NO: 20286 - DNA, 20 bp, Artificial Sequence
  Description of Artificial Sequence: Synthetic oligonucleotide
  Target: PCSK9; (-) strand; PAM type: YTN; PAM sequence: TTT
gatccaggctctacccctag

SEQ ID NO: 20287 - DNA, 20 bp, Artificial Sequence
  Description of Artificial Sequence: Synthetic oligonucleotide
  Target: PCSK9; (-) strand; PAM type: YTN; PAM sequence: CTG
gcaggcagaccaatgggttt

SEQ ID NO: 20288 - DNA, 20 bp, Artificial Sequence
  Description of Artificial Sequence: Synthetic oligonucleotide
  Target: PCSK9; (-) strand; PAM type: YTN; PAM sequence: TTG
gcacaagaatggctggcagg

SEQ ID NO: 20289 - DNA, 20 bp, Artificial Sequence
  Description of Artificial Sequence: Synthetic oligonucleotide
  Target: PCSK9; (-) strand; PAM type: YTN; PAM sequence: TTC
cgtaggcagcagatgcattg

SEQ ID NO: 20290 - DNA, 20 bp, Artificial Sequence
  Description of Artificial Sequence: Synthetic oligonucleotide
  Target: PCSK9; (-) strand; PAM type: YTN; PAM sequence: TTT
ccgtaggcagcagatgcatt

SEQ ID NO: 20291 - DNA, 20 bp, Artificial Sequence
  Description of Artificial Sequence: Synthetic oligonucleotide
  Target: PCSK9; (-) strand; PAM type: YTN; PAM sequence: CTA
caggtttccgtaggcagcag

SEQ ID NO: 20292 - DNA, 20 bp, Artificial Sequence
  Description of Artificial Sequence: Synthetic oligonucleotide
  Target: PCSK9; (-) strand; PAM type: YTN; PAM sequence: TTG
tccctacaggtttccgtagg

SEQ ID NO: 20293 - DNA, 20 bp, Artificial Sequence
  Description of Artificial Sequence: Synthetic oligonucleotide
  Target: PCSK9; (-) strand; PAM type: YTN; PAM sequence: CTT
gtccctacaggtttccgtag

SEQ ID NO: 20294 - DNA, 20 bp, Artificial Sequence
  Description of Artificial Sequence: Synthetic oligonucleotide
  Target: PCSK9; (-) strand; PAM type: YTN; PAM sequence: CTG
aacatcccagggccttgtcc

SEQ ID NO: 20295 - DNA, 20 bp, Artificial Sequence
  Description of Artificial Sequence: Synthetic oligonucleotide
  Target: PCSK9; (-) strand; PAM type: YTN; PAM sequence: CTC
cactgaacatcccagggcct

SEQ ID NO: 20296 - DNA, 20 bp, Artificial Sequence
  Description of Artificial Sequence: Synthetic oligonucleotide
  Target: PCSK9; (-) strand; PAM type: YTN; PAM sequence: CTC
aggctccactgaacatccca

SEQ ID NO: 20297 - DNA, 20 bp, Artificial Sequence
  Description of Artificial Sequence: Synthetic oligonucleotide
  Target: PCSK9; (-) strand; PAM type: YTN; PAM sequence: TTA
taaaatgactcaggctccac

SEQ ID NO: 20298 - DNA, 20 bp, Artificial Sequence
  Description of Artificial Sequence: Synthetic oligonucleotide
  Target: PCSK9; (-) strand; PAM type: YTN; PAM sequence: TTT
ataaaatgactcaggctcca

SEQ ID NO: 20299 - DNA, 20 bp, Artificial Sequence
  Description of Artificial Sequence: Synthetic oligonucleotide
  Target: PCSK9; (-) strand; PAM type: YTN; PAM sequence: TTT
tataaaatgactcaggctcc

SEQ ID NO: 20300 - DNA, 20 bp, Artificial Sequence
  Description of Artificial Sequence: Synthetic oligonucleotide
  Target: PCSK9; (-) strand; PAM type: YTN; PAM sequence: TTT
ttataaaatgactcaggctc

SEQ ID NO: 20301 - DNA, 20 bp, Artificial Sequence
  Description of Artificial Sequence: Synthetic oligonucleotide
  Target: PCSK9; (-) strand; PAM type: YTN; PAM sequence: TTT
tttataaaatgactcaggct

SEQ ID NO: 20302 - DNA, 20 bp, Artificial Sequence
  Description of Artificial Sequence: Synthetic oligonucleotide
  Target: PCSK9; (-) strand; PAM type: YTN; PAM sequence: CTT
ttttataaaatgactcaggc

SEQ ID NO: 20303 - DNA, 20 bp, Artificial Sequence
  Description of Artificial Sequence: Synthetic oligonucleotide
  Target: PCSK9; (-) strand; PAM type: YTN; PAM sequence: CTA
gagtcatgcttttttataaa

SEQ ID NO: 20304 - DNA, 20 bp, Artificial Sequence
  Description of Artificial Sequence: Synthetic oligonucleotide
  Target: PCSK9; (-) strand; PAM type: YTN; PAM sequence: TTG
gaccctagagtcatgctttt

SEQ ID NO: 20305 - DNA, 20 bp, Artificial Sequence
  Description of Artificial Sequence: Synthetic oligonucleotide
  Target: PCSK9; (-) strand; PAM type: YTN; PAM sequence: TTT
ggaccctagagtcatgcttt

SEQ ID NO: 20306 - DNA, 20 bp, Artificial Sequence
  Description of Artificial Sequence: Synthetic oligonucleotide
  Target: PCSK9; (-) strand; PAM type: YTN; PAM sequence: TTT
tggaccctagagtcatgctt

SEQ ID NO: 20307 - DNA, 20 bp, Artificial Sequence
  Description of Artificial Sequence: Synthetic oligonucleotide
  Target: PCSK9; (-) strand; PAM type: YTN; PAM sequence: TTC
aaaggaattttggaccctag

SEQ ID NO: 20308 - DNA, 20 bp, Artificial Sequence
  Description of Artificial Sequence: Synthetic oligonucleotide
  Target: PCSK9; (-) strand; PAM type: YTN; PAM sequence: CTT
caaaggaattttggacccta

SEQ ID NO: 20309 - DNA, 20 bp, Artificial Sequence
  Description of Artificial Sequence: Synthetic oligonucleotide
  Target: PCSK9; (-) strand; PAM type: YTN; PAM sequence: CTG
gatagcaacagcttcaaagg

SEQ ID NO: 20310 - DNA, 20 bp, Artificial Sequence
  Description of Artificial Sequence: Synthetic oligonucleotide
  Target: PCSK9; (-) strand; PAM type: YTN; PAM sequence: CTC
tggatagcaacagcttcaaa

SEQ ID NO: 20311 - DNA, 20 bp, Artificial Sequence
  Description of Artificial Sequence: Synthetic oligonucleotide
  Target: PCSK9; (-) strand; PAM type: YTN; PAM sequence: TTC
actctggatagcaacagctt

SEQ ID NO: 20312 - DNA, 20 bp, Artificial Sequence
  Description of Artificial Sequence: Synthetic oligonucleotide
  Target: PCSK9; (-) strand; PAM type: YTN; PAM sequence: CTT
cactctggatagcaacagct

SEQ ID NO: 20313 - DNA, 20 bp, Artificial Sequence
  Description of Artificial Sequence: Synthetic oligonucleotide
  Target: PCSK9; (-) strand; PAM type: YTN; PAM sequence: CTA
aagaagggacttcactctgg

SEQ ID NO: 20314 - DNA, 20 bp, Artificial Sequence
  Description of Artificial Sequence: Synthetic oligonucleotide
  Target: PCSK9; (-) strand; PAM type: YTN; PAM sequence: CTG
tcctaaagaagggacttcac

SEQ ID NO: 20315 - DNA, 20 bp, Artificial Sequence
  Description of Artificial Sequence: Synthetic oligonucleotide
  Target: PCSK9; (-) strand; PAM type: YTN; PAM sequence: CTC
caccgaagatgtgacatcca

SEQ ID NO: 20316 - DNA, 20 bp, Artificial Sequence
  Description of Artificial Sequence: Synthetic oligonucleotide
  Target: PCSK9; (-) strand; PAM type: YTN; PAM sequence: CTG
cccctccaccgaagatgtga

SEQ ID NO: 20317 - DNA, 20 bp, Artificial Sequence
  Description of Artificial Sequence: Synthetic oligonucleotide
  Target: PCSK9; (-) strand; PAM type: YTN; PAM sequence: TTC
tgcccctccaccgaagatgt

SEQ ID NO: 20318 - DNA, 20 bp, Artificial Sequence
  Description of Artificial Sequence: Synthetic oligonucleotide
  Target: PCSK9; (-) strand; PAM type: YTN; PAM sequence: TTT
ctgcccctccaccgaagatg

SEQ ID NO: 20319 - DNA, 20 bp, Artificial Sequence
  Description of Artificial Sequence: Synthetic oligonucleotide
  Target: PCSK9; (-) strand; PAM type: YTN; PAM sequence: CTT
tctgcccctccaccgaagat

SEQ ID NO: 20320 - DNA, 20 bp, Artificial Sequence
  Description of Artificial Sequence: Synthetic oligonucleotide
  Target: PCSK9; (-) strand; PAM type: YTN; PAM sequence: CTA
gggccagggtgaggagaata

SEQ ID NO: 20321 - DNA, 20 bp, Artificial Sequence
  Description of Artificial Sequence: Synthetic oligonucleotide
  Target: PCSK9; (-) strand; PAM type: YTN; PAM sequence: TTG
aagcactagggccagggtga

SEQ ID NO: 20322 - DNA, 20 bp, Artificial Sequence
  Description of Artificial Sequence: Synthetic oligonucleotide
  Target: PCSK9; (-) strand; PAM type: YTN; PAM sequence: TTT
gaagcactagggccagggtg

SEQ ID NO: 20323 - DNA, 20 bp, Artificial Sequence
  Description of Artificial Sequence: Synthetic oligonucleotide
  Target: PCSK9; (-) strand; PAM type: YTN; PAM sequence: TTA
agatttgaagcactagggcc

SEQ ID NO: 20324 - DNA, 20 bp, Artificial Sequence
  Description of Artificial Sequence: Synthetic oligonucleotide
  Target: PCSK9; (-) strand; PAM type: YTN; PAM sequence: TTT
aagatttgaagcactagggc

SEQ ID NO: 20325 - DNA, 20 bp, Artificial Sequence
  Description of Artificial Sequence: Synthetic oligonucleotide
  Target: PCSK9; (-) strand; PAM type: YTN; PAM sequence: TTT
taagatttgaagcactaggg

SEQ ID NO: 20326 - DNA, 20 bp, Artificial Sequence
  Description of Artificial Sequence: Synthetic oligonucleotide
  Target: PCSK9; (-) strand; PAM type: YTN; PAM sequence: TTT
ttaagatttgaagcactagg

SEQ ID NO: 20327 - DNA, 20 bp, Artificial Sequence
  Description of Artificial Sequence: Synthetic oligonucleotide
  Target: PCSK9; (-) strand; PAM type: YTN; PAM sequence: TTT
tttaagatttgaagcactag

SEQ ID NO: 20328 - DNA, 20 bp, Artificial Sequence
  Description of Artificial Sequence: Synthetic oligonucleotide
  Target: PCSK9; (-) strand; PAM type: YTN; PAM sequence: TTT
ttttaagatttgaagcacta

SEQ ID NO: 20329 - DNA, 20 bp, Artificial Sequence
  Description of Artificial Sequence: Synthetic oligonucleotide
  Target: PCSK9; (-) strand; PAM type: YTN; PAM sequence: CTA
gaaggtggtgcagaagcaca

SEQ ID NO: 20330 - DNA, 20 bp, Artificial Sequence
  Description of Artificial Sequence: Synthetic oligonucleotide
  Target: PCSK9; (-) strand; PAM type: YTN; PAM sequence: TTA
gaggccaggaaacgaggtgg

SEQ ID NO: 20331 - DNA, 20 bp, Artificial Sequence
  Description of Artificial Sequence: Synthetic oligonucleotide
  Target: PCSK9; (-) strand; PAM type: YTN; PAM sequence: CTC
atcaagttagaggccaggaa

SEQ ID NO: 20332 - DNA, 20 bp, Artificial Sequence
  Description of Artificial Sequence: Synthetic oligonucleotide
  Target: PCSK9; (-) strand; PAM type: YTN; PAM sequence: CTC
tcatcaagttagaggccagg

SEQ ID NO: 20333 - DNA, 20 bp, Artificial Sequence
  Description of Artificial Sequence: Synthetic oligonucleotide
  Target: PCSK9; (-) strand; PAM type: YTN; PAM sequence: CTG
ccatgtggagaatcagtgtg

SEQ ID NO: 20334 - DNA, 20 bp, Artificial Sequence
  Description of Artificial Sequence: Synthetic oligonucleotide
  Target: PCSK9; (-) strand; PAM type: YTN; PAM sequence: CTA
agaagcaccgcctgccatgt

SEQ ID NO: 20335 - DNA, 20 bp, Artificial Sequence
  Description of Artificial Sequence: Synthetic oligonucleotide
  Target: PCSK9; (-) strand; PAM type: YTN; PAM sequence: CTG
caggaggctaagaagcaccg

SEQ ID NO: 20336 - DNA, 20 bp, Artificial Sequence
  Description of Artificial Sequence: Synthetic oligonucleotide
  Target: PCSK9; (-) strand; PAM type: YTN; PAM sequence: CTG
tctgcaggaggctaagaagc

SEQ ID NO: 20337 - DNA, 20 bp, Artificial Sequence
  Description of Artificial Sequence: Synthetic oligonucleotide
  Target: PCSK9; (-) strand; PAM type: YTN; PAM sequence: CTC
actgtctgcaggaggctaag

SEQ ID NO: 20338 - DNA, 20 bp, Artificial Sequence
  Description of Artificial Sequence: Synthetic oligonucleotide
  Target: PCSK9; (-) strand; PAM type: YTN; PAM sequence: TTG
gacaagaccgtggggcctca

SEQ ID NO: 20339 - DNA, 20 bp, Artificial Sequence
  Description of Artificial Sequence: Synthetic oligonucleotide
  Target: PCSK9; (-) strand; PAM type: YTN; PAM sequence: CTT
ggacaagaccgtggggcctc

SEQ ID NO: 20340 - DNA, 20 bp, Artificial Sequence
  Description of Artificial Sequence: Synthetic oligonucleotide
  Target: PCSK9; (-) strand; PAM type: YTN; PAM sequence: CTG
tgtgaccttggacaagaccg

SEQ ID NO: 20341 - DNA, 20 bp, Artificial Sequence
  Description of Artificial Sequence: Synthetic oligonucleotide
  Target: PCSK9; (-) strand; PAM type: YTN; PAM sequence: TTA
cacgctgtgtgaccttggac

SEQ ID NO: 20342 - DNA, 20 bp, Artificial Sequence
  Description of Artificial Sequence: Synthetic oligonucleotide
  Target: PCSK9; (-) strand; PAM type: YTN; PAM sequence: CTG
cccattacacgctgtgtgac

SEQ ID NO: 20343 - DNA, 20 bp, Artificial Sequence
  Description of Artificial Sequence: Synthetic oligonucleotide
  Target: PCSK9; (-) strand; PAM type: YTN; PAM sequence: CTG
accctgcccattacacgctg

SEQ ID NO: 20344 - DNA, 20 bp, Artificial Sequence
  Description of Artificial Sequence: Synthetic oligonucleotide
  Target: PCSK9; (-) strand; PAM type: YTN; PAM sequence: CTC
tgaccctgcccattacacgc

SEQ ID NO: 20345 - DNA, 20 bp, Artificial Sequence
  Description of Artificial Sequence: Synthetic oligonucleotide
  Target: PCSK9; (-) strand; PAM type: YTN; PAM sequence: CTC
cagactctgaccctgcccat

SEQ ID NO: 20346 - DNA, 20 bp, Artificial Sequence
  Description of Artificial Sequence: Synthetic oligonucleotide
  Target: PCSK9; (-) strand; PAM type: YTN; PAM sequence: CTA
ggagacccaggtccagactc

SEQ ID NO: 20347 - DNA, 20 bp, Artificial Sequence
  Description of Artificial Sequence: Synthetic oligonucleotide
  Target: PCSK9; (-) strand; PAM type: YTN; PAM sequence: TTA
acccatggggcagcagtgca

SEQ ID NO: 20348 - DNA, 20 bp, Artificial Sequence
  Description of Artificial Sequence: Synthetic oligonucleotide
  Target: PCSK9; (-) strand; PAM type: YTN; PAM sequence: CTG
attaacccatggggcagcag

SEQ ID NO: 20349 - DNA, 20 bp, Artificial Sequence
  Description of Artificial Sequence: Synthetic oligonucleotide
  Target: PCSK9; (-) strand; PAM type: YTN; PAM sequence: CTG
agctgattaacccatggggc

SEQ ID NO: 20350 - DNA, 20 bp, Artificial Sequence
  Description of Artificial Sequence: Synthetic oligonucleotide
  Target: PCSK9; (-) strand; PAM type: YTN; PAM sequence: TTC
agccacggtatgctgagctg

SEQ ID NO: 20351 - DNA, 20 bp, Artificial Sequence
  Description of Artificial Sequence: Synthetic oligonucleotide
  Target: PCSK9; (-) strand; PAM type: YTN; PAM sequence: CTG
ttcagccacggtatgctgag

SEQ ID NO: 20352 - DNA, 20 bp, Artificial Sequence
  Description of Artificial Sequence: Synthetic oligonucleotide
  Target: PCSK9; (-) strand; PAM type: YTN; PAM sequence: TTG
gtatgaggtagctgttcagc

SEQ ID NO: 20353 - DNA, 20 bp, Artificial Sequence
  Description of Artificial Sequence: Synthetic oligonucleotide
  Target: PCSK9; (-) strand; PAM type: YTN; PAM sequence: CTT
ggtatgaggtagctgttcag

SEQ ID NO: 20354 - DNA, 20 bp, Artificial Sequence
  Description of Artificial Sequence: Synthetic oligonucleotide
  Target: PCSK9; (-) strand; PAM type: YTN; PAM sequence: CTG
tcatggcgccacaggccttg

SEQ ID NO: 20355 - DNA, 20 bp, Artificial Sequence
  Description of Artificial Sequence: Synthetic oligonucleotide
  Target: PCSK9; (-) strand; PAM type: YTN; PAM sequence: CTG
tcaatccctgtcatggcgcc

SEQ ID NO: 20356 - DNA, 20 bp, Artificial Sequence
  Description of Artificial Sequence: Synthetic oligonucleotide
  Target: PCSK9; (-) strand; PAM type: YTN; PAM sequence: TTC
caaggcagggaccctgtcaa

SEQ ID NO: 20357 - DNA, 20 bp, Artificial Sequence
  Description of Artificial Sequence: Synthetic oligonucleotide
  Target: PCSK9; (-) strand; PAM type: YTN; PAM sequence: TTT
ccaaggcagggaccctgtca

SEQ ID NO: 20358 - DNA, 20 bp, Artificial Sequence
  Description of Artificial Sequence: Synthetic oligonucleotide
  Target: PCSK9; (-) strand; PAM type: YTN; PAM sequence: CTA
cgggtttccaaggcagggac

SEQ ID NO: 20359 - DNA, 20 bp, Artificial Sequence
  Description of Artificial Sequence: Synthetic oligonucleotide
  Target: PCSK9; (-) strand; PAM type: YTN; PAM sequence: TTA
gactacgggtttccaaggca

SEQ ID NO: 20360 - DNA, 20 bp, Artificial Sequence
  Description of Artificial Sequence: Synthetic oligonucleotide
  Target: PCSK9; (-) strand; PAM type: YTN; PAM sequence: CTT
agactacgggtttccaaggc

SEQ ID NO: 20361 - DNA, 20 bp, Artificial Sequence
  Description of Artificial Sequence: Synthetic oligonucleotide
  Target: PCSK9; (-) strand; PAM type: YTN; PAM sequence: CTA
cttagactacgggtttccaa

SEQ ID NO: 20362 - DNA, 20 bp, Artificial Sequence
  Description of Artificial Sequence: Synthetic oligonucleotide
  Target: PCSK9; (-) strand; PAM type: YTN; PAM sequence: CTC
tacttagactacgggtttcc

SEQ ID NO: 20363 - DNA, 20 bp, Artificial Sequence
  Description of Artificial Sequence: Synthetic oligonucleotide
  Target: PCSK9; (-) strand; PAM type: YTN; PAM sequence: CTC
ctctacttagactacgggtt

SEQ ID NO: 20364 - DNA, 20 bp, Artificial Sequence
  Description of Artificial Sequence: Synthetic oligonucleotide
  Target: PCSK9; (-) strand; PAM type: YTN; PAM sequence: TTG
tcagtctcctctacttagac

SEQ ID NO: 20365 - DNA, 20 bp, Artificial Sequence
  Description of Artificial Sequence: Synthetic oligonucleotide
  Target: PCSK9; (-) strand; PAM type: YTN; PAM sequence: CTT
gtcagtctcctctacttaga

SEQ ID NO: 20366 - DNA, 20 bp, Artificial Sequence
  Description of Artificial Sequence: Synthetic oligonucleotide
  Target: PCSK9; (-) strand; PAM type: YTN; PAM sequence: TTG
acttgtcagtctcctctact

SEQ ID NO: 20367 - DNA, 20 bp, Artificial Sequence
  Description of Artificial Sequence: Synthetic oligonucleotide
  Target: PCSK9; (-) strand; PAM type: YTN; PAM sequence: CTG
atggaaggcattgacttgtc

SEQ ID NO: 20368 - DNA, 20 bp, Artificial Sequence
  Description of Artificial Sequence: Synthetic oligonucleotide
  Target: PCSK9; (-) strand; PAM type: YTN; PAM sequence: TTG
agcagactgatggaaggcat

SEQ ID NO: 20369 - DNA, 20 bp, Artificial Sequence
  Description of Artificial Sequence: Synthetic oligonucleotide
  Target: PCSK9; (-) strand; PAM type: YTN; PAM sequence: TTG
gtaaacgtgtgttgagcaga

SEQ ID NO: 20370 - DNA, 20 bp, Artificial Sequence
  Description of Artificial Sequence: Synthetic oligonucleotide
  Target: PCSK9; (-) strand; PAM type: YTN; PAM sequence: CTT
ggtaaacgtgtgttgagcag

SEQ ID NO: 20371 - DNA, 20 bp, Artificial Sequence
  Description of Artificial Sequence: Synthetic oligonucleotide
  Target: PCSK9; (-) strand; PAM type: YTN; PAM sequence: CTG
cagcacacagtaggcacttg

SEQ ID NO: 20372 - DNA, 20 bp, Artificial Sequence
  Description of Artificial Sequence: Synthetic oligonucleotide
  Target: PCSK9; (-) strand; PAM type: YTN; PAM sequence: CTC
tgcagcacacagtaggcact

SEQ ID NO: 20373 - DNA, 20 bp, Artificial Sequence
  Description of Artificial Sequence: Synthetic oligonucleotide
  Target: PCSK9; (-) strand; PAM type: YTN; PAM sequence: TTC
gcctctgcagcacacagtag

SEQ ID NO: 20374 - DNA, 20 bp, Artificial Sequence
  Description of Artificial Sequence: Synthetic oligonucleotide
  Target: PCSK9; (-) strand; PAM type: YTN; PAM sequence: CTT
cgcctctgcagcacacagta

SEQ ID NO: 20375 - DNA, 20 bp, Artificial Sequence
  Description of Artificial Sequence: Synthetic oligonucleotide
  Target: PCSK9; (-) strand; PAM type: YTN; PAM sequence: CTG
tgtcatcttcgcctctgcag

SEQ ID NO: 20376 - DNA, 20 bp, Artificial Sequence
  Description of Artificial Sequence: Synthetic oligonucleotide
  Target: PCSK9; (-) strand; PAM type: YTN; PAM sequence: CTG
agctgtgtcatcttcgcctc

SEQ ID NO: 20377 - DNA, 20 bp, Artificial Sequence
  Description of Artificial Sequence: Synthetic oligonucleotide
  Target: PCSK9; (-) strand; PAM type: YTN; PAM sequence: CTC
aagggaaaggcctgagctgt

SEQ ID NO: 20378 - DNA, 20 bp, Artificial Sequence
  Description of Artificial Sequence: Synthetic oligonucleotide
  Target: PCSK9; (-) strand; PAM type: YTN; PAM sequence: CTG
taagctcaagggaaaggcct

SEQ ID NO: 20379 - DNA, 20 bp, Artificial Sequence
  Description of Artificial Sequence: Synthetic oligonucleotide
  Target: PCSK9; (-) strand; PAM type: YTN; PAM sequence: CTG
aactgtaagctcaagggaaa

SEQ ID NO: 20380 - DNA, 20 bp, Artificial Sequence
  Description of Artificial Sequence: Synthetic oligonucleotide
  Target: PCSK9; (-) strand; PAM type: YTN; PAM sequence: CTC
ctgaactgtaagctcaaggg

SEQ ID NO: 20381 - DNA, 20 bp, Artificial Sequence
  Description of Artificial Sequence: Synthetic oligonucleotide
  Target: PCSK9; (-) strand; PAM type: YTN; PAM sequence: CTC
ctcctgaactgtaagctcaa

SEQ ID NO: 20382 - DNA, 20 bp, Artificial Sequence
  Description of Artificial Sequence: Synthetic oligonucleotide
  Target: PCSK9; (-) strand; PAM type: YTN; PAM sequence: CTC
tcctcctgaactgtaagctc

SEQ ID NO: 20383 - DNA, 20 bp, Artificial Sequence
  Description of Artificial Sequence: Synthetic oligonucleotide
  Target: PCSK9; (-) strand; PAM type: YTN; PAM sequence: CTG
gtcagtctctcctcctgaac

SEQ ID NO: 20384 - DNA, 20 bp, Artificial Sequence
  Description of Artificial Sequence: Synthetic oligonucleotide
  Target: PCSK9; (-) strand; PAM type: YTN; PAM sequence: CTG
gcagtcactggtcagtctct

SEQ ID NO: 20385 - DNA, 20 bp, Artificial Sequence
  Description of Artificial Sequence: Synthetic oligonucleotide
  Target: PCSK9; (-) strand; PAM type: YTN; PAM sequence: CTG
tactggcagtcactggtcag

SEQ ID NO: 20386 - DNA, 20 bp, Artificial Sequence
  Description of Artificial Sequence: Synthetic oligonucleotide
  Target: PCSK9; (-) strand; PAM type: YTN; PAM sequence: TTG
tcccatagtcaactgtactg

SEQ ID NO: 20387 - DNA, 20 bp, Artificial Sequence
  Description of Artificial Sequence: Synthetic oligonucleotide
  Target: PCSK9; (-) strand; PAM type: YTN; PAM sequence: CTG
agcacattgtcccatagtca

SEQ ID NO: 20388 - DNA, 20 bp, Artificial Sequence
  Description of Artificial Sequence: Synthetic oligonucleotide
  Target: PCSK9; (-) strand; PAM type: YTN; PAM sequence: CTC
cccaaggctgagcacattgt

SEQ ID NO: 20389 - DNA, 20 bp, Artificial Sequence
  Description of Artificial Sequence: Synthetic oligonucleotide
  Target: PCSK9; (-) strand; PAM type: YTN; PAM sequence: CTC
tccccaaggctgagcacatt

SEQ ID NO: 20390 - DNA, 20 bp, Artificial Sequence
  Description of Artificial Sequence: Synthetic oligonucleotide
  Target: PCSK9; (-) strand; PAM type: YTN; PAM sequence: TTC
gtctctccccaaggctgagc

SEQ ID NO: 20391 - DNA, 20 bp, Artificial Sequence
  Description of Artificial Sequence: Synthetic oligonucleotide
  Target: PCSK9; (-) strand; PAM type: YTN; PAM sequence: CTT
cgtctctccccaaggctgag

SEQ ID NO: 20392 - DNA, 20 bp, Artificial Sequence
  Description of Artificial Sequence: Synthetic oligonucleotide
  Target: PCSK9; (-) strand; PAM type: YTN; PAM sequence: TTC
ttcgtctctccccaaggctg

SEQ ID NO: 20393 - DNA, 20 bp, Artificial Sequence
  Description of Artificial Sequence: Synthetic oligonucleotide
  Target: PCSK9; (-) strand; PAM type: YTN; PAM sequence: CTT
cttcgtctctccccaaggct

SEQ ID NO: 20394 - DNA, 20 bp, Artificial Sequence
  Description of Artificial Sequence: Synthetic oligonucleotide
  Target: PCSK9; (-) strand; PAM type: YTN; PAM sequence: CTA
tacgggtaccttcttcgtct

SEQ ID NO: 20395 - DNA, 20 bp, Artificial Sequence
  Description of Artificial Sequence: Synthetic oligonucleotide
  Target: PCSK9; (-) strand; PAM type: YTN; PAM sequence: CTG
gtgctatacgggtaccttct

SEQ ID NO: 20396 - DNA, 20 bp, Artificial Sequence
  Description of Artificial Sequence: Synthetic oligonucleotide
  Target: PCSK9; (-) strand; PAM type: YTN; PAM sequence: CTG
tcatctggtgctatacgggt

SEQ ID NO: 20397 - DNA, 20 bp, Artificial Sequence
  Description of Artificial Sequence: Synthetic oligonucleotide
  Target: PCSK9; (-) strand; PAM type: YTN; PAM sequence: CTC
gtgcctgtcatctggtgcta

SEQ ID NO: 20398 - DNA, 20 bp, Artificial Sequence
  Description of Artificial Sequence: Synthetic oligonucleotide
  Target: PCSK9; (-) strand; PAM type: YTN; PAM sequence: CTG
tggggctcgtgcctgtcatc

SEQ ID NO: 20399 - DNA, 20 bp, Artificial Sequence
  Description of Artificial Sequence: Synthetic oligonucleotide
  Target: PCSK9; (-) strand; PAM type: YTN; PAM sequence: CTG
gcctgtggggctcgtgcctg

SEQ ID NO: 20400 - DNA, 20 bp, Artificial Sequence
  Description of Artificial Sequence: Synthetic oligonucleotide
  Target: PCSK9; (-) strand; PAM type: YTN; PAM sequence: CTG
ccctggcctgtggggctcgt

SEQ ID NO: 20401 - DNA, 20 bp, Artificial Sequence
  Description of Artificial Sequence: Synthetic oligonucleotide
  Target: PCSK9; (-) strand; PAM type: YTN; PAM sequence: CTG
agcagctgccctggcctgtg

SEQ ID NO: 20402 - DNA, 20 bp, Artificial Sequence
  Description of Artificial Sequence: Synthetic oligonucleotide
  Target: PCSK9; (-) strand; PAM type: YTN; PAM sequence: CTC
tgagcagctgccctggcctg

SEQ ID NO: 20403 - DNA, 20 bp, Artificial Sequence
  Description of Artificial Sequence: Synthetic oligonucleotide
  Target: PCSK9; (-) strand; PAM type: YTN; PAM sequence: CTC
ctctgagcagctgccctggc

SEQ ID NO: 20404 - DNA, 20 bp, Artificial Sequence
  Description of Artificial Sequence: Synthetic oligonucleotide
  Target: PCSK9; (-) strand; PAM type: YTN; PAM sequence: CTC
tcctctgagcagctgccctg

SEQ ID NO: 20405 - DNA, 20 bp, Artificial Sequence
  Description of Artificial Sequence: Synthetic oligonucleotide
  Target: PCSK9; (-) strand; PAM type: YTN; PAM sequence: CTA
ctctcctctgagcagctgcc

SEQ ID NO: 20406 - DNA, 20 bp, Artificial Sequence
  Description of Artificial Sequence: Synthetic oligonucleotide
  Target: PCSK9; (-) strand; PAM type: YTN; PAM sequence: TTG
gcctactctcctctgagcag

SEQ ID NO: 20407 - DNA, 20 bp, Artificial Sequence
  Description of Artificial Sequence: Synthetic oligonucleotide
  Target: PCSK9; (-) strand; PAM type: YTN; PAM sequence: CTT
ggcctactctcctctgagca

SEQ ID NO: 20408 - DNA, 20 bp, Artificial Sequence
  Description of Artificial Sequence: Synthetic oligonucleotide
  Target: PCSK9; (-) strand; PAM type: YTN; PAM sequence: CTG
cttggcctactctcctctga

SEQ ID NO: 20409 - DNA, 20 bp, Artificial Sequence
  Description of Artificial Sequence: Synthetic oligonucleotide
  Target: PCSK9; (-) strand; PAM type: YTN; PAM sequence: TTC
tgcttggcctactctcctct

SEQ ID NO: 20410 - DNA, 20 bp, Artificial Sequence
  Description of Artificial Sequence: Synthetic oligonucleotide
  Target: PCSK9; (-) strand; PAM type: YTN; PAM sequence: CTT
ctgcttggcctactctcctc

SEQ ID NO: 20411 - DNA, 20 bp, Artificial Sequence
  Description of Artificial Sequence: Synthetic oligonucleotide
  Target: PCSK9; (-) strand; PAM type: YTN; PAM sequence: TTG
ccttctgcttggcctactct

SEQ ID NO: 20412 - DNA, 20 bp, Artificial Sequence
  Description of Artificial Sequence: Synthetic oligonucleotide
  Target: PCSK9; (-) strand; PAM type: YTN; PAM sequence: TTT
gccttctgcttggcctactc

SEQ ID NO: 20413 - DNA, 20 bp, Artificial Sequence
  Description of Artificial Sequence: Synthetic oligonucleotide
  Target: PCSK9; (-) strand; PAM type: YTN; PAM sequence: CTG
tttgccttctgcttggccta

SEQ ID NO: 20414 - DNA, 20 bp, Artificial Sequence
  Description of Artificial Sequence: Synthetic oligonucleotide
  Target: PCSK9; (-) strand; PAM type: YTN; PAM sequence: TTC
tgtttgccttctgcttggcc

SEQ ID NO: 20415 - DNA, 20 bp, Artificial Sequence
  Description of Artificial Sequence: Synthetic oligonucleotide
  Target: PCSK9; (-) strand; PAM type: YTN; PAM sequence: CTT
ctgtttgccttctgcttggc

SEQ ID NO: 20416 - DNA, 20 bp, Artificial Sequence
  Description of Artificial Sequence: Synthetic oligonucleotide
  Target: PCSK9; (-) strand; PAM type: YTN; PAM sequence: CTG
cagccttctgtttgccttct

SEQ ID NO: 20417 - DNA, 20 bp, Artificial Sequence
  Description of Artificial Sequence: Synthetic oligonucleotide
  Target: PCSK9; (-) strand; PAM type: YTN; PAM sequence: CTC
gatggcaaatgcctgcagcc

SEQ ID NO: 20418 - DNA, 20 bp, Artificial Sequence
  Description of Artificial Sequence: Synthetic oligonucleotide
  Target: PCSK9; (-) strand; PAM type: YTN; PAM sequence: CTC
tcgatggcaaatgcctgcag

SEQ ID NO: 20419 - DNA, 20 bp, Artificial Sequence
  Description of Artificial Sequence: Synthetic oligonucleotide
  Target: PCSK9; (-) strand; PAM type: YTN; PAM sequence: TTG
aagtccagctctcgatggca

SEQ ID NO: 20420 - DNA, 20 bp, Artificial Sequence
  Description of Artificial Sequence: Synthetic oligonucleotide
  Target: PCSK9; (-) strand; PAM type: YTN; PAM sequence: TTT
gaagtccagctctcgatggc

SEQ ID NO: 20421 - DNA, 20 bp, Artificial Sequence
  Description of Artificial Sequence: Synthetic oligonucleotide
  Target: PCSK9; (-) strand; PAM type: YTN; PAM sequence: CTG
gtatgatgcccagtttgaag

SEQ ID NO: 20422 - DNA, 20 bp, Artificial Sequence
  Description of Artificial Sequence: Synthetic oligonucleotide
  Target: PCSK9; (-) strand; PAM type: YTN; PAM sequence: CTC
gaacccaggctggtatgatg

SEQ ID NO: 20423 - DNA, 20 bp, Artificial Sequence
  Description of Artificial Sequence: Synthetic oligonucleotide
  Target: PCSK9; (-) strand; PAM type: YTN; PAM sequence: CTG
ggcaggactcgaacccaggc

SEQ ID NO: 20424 - DNA, 20 bp, Artificial Sequence
  Description of Artificial Sequence: Synthetic oligonucleotide
  Target: PCSK9; (-) strand; PAM type: YTN; PAM sequence: TTA
gacagccaataaggggctgg

SEQ ID NO: 20425 - DNA, 20 bp, Artificial Sequence
  Description of Artificial Sequence: Synthetic oligonucleotide
  Target: PCSK9; (-) strand; PAM type: YTN; PAM sequence: CTC
agggttagacagccaataag

SEQ ID NO: 20426 - DNA, 20 bp, Artificial Sequence
  Description of Artificial Sequence: Synthetic oligonucleotide
  Target: PCSK9; (-) strand; PAM type: YTN; PAM sequence: TTG
ctcagggttagacagccaat

SEQ ID NO: 20427 - DNA, 20 bp, Artificial Sequence
  Description of Artificial Sequence: Synthetic oligonucleotide
  Target: PCSK9; (-) strand; PAM type: YTN; PAM sequence: TTT
gctcagggttagacagccaa

SEQ ID NO: 20428 - DNA, 20 bp, Artificial Sequence
  Description of Artificial Sequence: Synthetic oligonucleotide
  Target: PCSK9; (-) strand; PAM type: YTN; PAM sequence: CTC
agagaggtgaagggatttgc

SEQ ID NO: 20429 - DNA, 20 bp, Artificial Sequence
  Description of Artificial Sequence: Synthetic oligonucleotide
  Target: PCSK9; (-) strand; PAM type: YTN; PAM sequence: TTA
cagatagaggaatgaggctc

SEQ ID NO: 20430 - DNA, 20 bp, Artificial Sequence
  Description of Artificial Sequence: Synthetic oligonucleotide
  Target: PCSK9; (-) strand; PAM type: YTN; PAM sequence: TTT
acagatagaggaatgaggct

SEQ ID NO: 20431 - DNA, 20 bp, Artificial Sequence
  Description of Artificial Sequence: Synthetic oligonucleotide
  Target: PCSK9; (-) strand; PAM type: YTN; PAM sequence: CTG
gtttacagatagaggaatga

SEQ ID NO: 20432 - DNA, 20 bp, Artificial Sequence
  Description of Artificial Sequence: Synthetic oligonucleotide
  Target: PCSK9; (-) strand; PAM type: YTN; PAM sequence: TTA
taactggtttacagatagag

SEQ ID NO: 20433 - DNA, 20 bp, Artificial Sequence
  Description of Artificial Sequence: Synthetic oligonucleotide
  Target: PCSK9; (-) strand; PAM type: YTN; PAM sequence: TTA
ttataactggtttacagata

SEQ ID NO: 20434 - DNA, 20 bp, Artificial Sequence
  Description of Artificial Sequence: Synthetic oligonucleotide
  Target: PCSK9; (-) strand; PAM type: YTN; PAM sequence: TTC
caattattataactggttta

SEQ ID NO: 20435 - DNA, 20 bp, Artificial Sequence
  Description of Artificial Sequence: Synthetic oligonucleotide
  Target: PCSK9; (-) strand; PAM type: YTN; PAM sequence: TTA
aatgaatgttccaattatta

SEQ ID NO: 20436 - DNA, 20 bp, Artificial Sequence
  Description of Artificial Sequence: Synthetic oligonucleotide
  Target: PCSK9; (-) strand; PAM type: YTN; PAM sequence: CTT
aaatgaatgttccaattatt

SEQ ID NO: 20437 - DNA, 20 bp, Artificial Sequence
  Description of Artificial Sequence: Synthetic oligonucleotide
  Target: PCSK9; (-) strand; PAM type: YTN; PAM sequence: TTA
gtccttaaatgaatgttcca

SEQ ID NO: 20438 - DNA, 20 bp, Artificial Sequence
  Description of Artificial Sequence: Synthetic oligonucleotide
  Target: PCSK9; (-) strand; PAM type: YTN; PAM sequence: TTT
agtccttaaatgaatgttcc

SEQ ID NO: 20439 - DNA, 20 bp, Artificial Sequence
  Description of Artificial Sequence: Synthetic oligonucleotide
  Target: PCSK9; (-) strand; PAM type: YTN; PAM sequence: CTC
atttagtccttaaatgaatg

SEQ ID NO: 20440 - DNA, 20 bp, Artificial Sequence
  Description of Artificial Sequence: Synthetic oligonucleotide
  Target: PCSK9; (-) strand; PAM type: YTN; PAM sequence: TTC
acgacctcatttagtcctta

SEQ ID NO: 20441 - DNA, 20 bp, Artificial Sequence
  Description of Artificial Sequence: Synthetic oligonucleotide
  Target: PCSK9; (-) strand; PAM type: YTN; PAM sequence: CTT
cacgacctcatttagtcctt

SEQ ID NO: 20442 - DNA, 20 bp, Artificial Sequence
  Description of Artificial Sequence: Synthetic oligonucleotide
  Target: PCSK9; (-) strand; PAM type: YTN; PAM sequence: CTG
aatgcttcacgacctcattt

SEQ ID NO: 20443 - DNA, 20 bp, Artificial Sequence
  Description of Artificial Sequence: Synthetic oligonucleotide
  Target: PCSK9; (-) strand; PAM type: YTN; PAM sequence: CTG
ctgaatgcttcacgacctca

SEQ ID NO: 20444 - DNA, 20 bp, Artificial Sequence
  Description of Artificial Sequence: Synthetic oligonucleotide
  Target: PCSK9; (-) strand; PAM type: YTN; PAM sequence: CTA
gcatctgctgaatgcttcac

SEQ ID NO: 20445 - DNA, 20 bp, Artificial Sequence
  Description of Artificial Sequence: Synthetic oligonucleotide
  Target: PCSK9; (-) strand; PAM type: YTN; PAM sequence: TTC
cgtacctagcatctgctgaa

SEQ ID NO: 20446 - DNA, 20 bp, Artificial Sequence
  Description of Artificial Sequence: Synthetic oligonucleotide
  Target: PCSK9; (-) strand; PAM type: YTN; PAM sequence: TTT
ccgtacctagcatctgctga

SEQ ID NO: 20447 - DNA, 20 bp, Artificial Sequence
  Description of Artificial Sequence: Synthetic oligonucleotide
  Target: PCSK9; (-) strand; PAM type: YTN; PAM sequence: TTC
agcgagtttccgtacctagc

SEQ ID NO: 20448 - DNA, 20 bp, Artificial Sequence
  Description of Artificial Sequence: Synthetic oligonucleotide
  Target: PCSK9; (-) strand; PAM type: YTN; PAM sequence: CTT
cagcgagtttccgtacctag

SEQ ID NO: 20449 - DNA, 20 bp, Artificial Sequence
  Description of Artificial Sequence: Synthetic oligonucleotide
  Target: PCSK9; (-) strand; PAM type: YTN; PAM sequence: CTG
cccccacttcagcgagtttc

SEQ ID NO: 20450 - DNA, 20 bp, Artificial Sequence
  Description of Artificial Sequence: Synthetic oligonucleotide
  Target: PCSK9; (-) strand; PAM type: YTN; PAM sequence: TTA
acctgcccccacttcagcga

SEQ ID NO: 20451 - DNA, 20 bp, Artificial Sequence
  Description of Artificial Sequence: Synthetic oligonucleotide
  Target: PCSK9; (-) strand; PAM type: YTN; PAM sequence: CTT
aacctgcccccacttcagcg

SEQ ID NO: 20452 - DNA, 20 bp, Artificial Sequence
  Description of Artificial Sequence: Synthetic oligonucleotide
  Target: PCSK9; (-) strand; PAM type: YTN; PAM sequence: TTC
ttaacctgcccccacttcag

SEQ ID NO: 20453 - DNA, 20 bp, Artificial Sequence
  Description of Artificial Sequence: Synthetic oligonucleotide
  Target: PCSK9; (-) strand; PAM type: YTN; PAM sequence: CTT
cttaacctgcccccacttca

SEQ ID NO: 20454 - DNA, 20 bp, Artificial Sequence
  Description of Artificial Sequence: Synthetic oligonucleotide
  Target: PCSK9; (-) strand; PAM type: YTN; PAM sequence: TTC
gtatccccagaggcttctta

SEQ ID NO: 20455 - DNA, 20 bp, Artificial Sequence
  Description of Artificial Sequence: Synthetic oligonucleotide
  Target: PCSK9; (-) strand; PAM type: YTN; PAM sequence: CTT
cgtatccccagaggcttctt

SEQ ID NO: 20456 - DNA, 20 bp, Artificial Sequence
  Description of Artificial Sequence: Synthetic oligonucleotide
  Target: PCSK9; (-) strand; PAM type: YTN; PAM sequence: CTG
gatgccttcgtatccccaga

SEQ ID NO: 20457 - DNA, 20 bp, Artificial Sequence
  Description of Artificial Sequence: Synthetic oligonucleotide
  Target: PCSK9; (-) strand; PAM type: YTN; PAM sequence: CTA
gtccctggatgccttcgtat

SEQ ID NO: 20458 - DNA, 20 bp, Artificial Sequence
  Description of Artificial Sequence: Synthetic oligonucleotide
  Target: PCSK9; (-) strand; PAM type: YTN; PAM sequence: CTG
ccacaactagtccctggatg

SEQ ID NO: 20459 - DNA, 20 bp, Artificial Sequence
  Description of Artificial Sequence: Synthetic oligonucleotide
  Target: PCSK9; (-) strand; PAM type: YTN; PAM sequence: CTC
ctgccacaactagtccctgg

SEQ ID NO: 20460 - DNA, 20 bp, Artificial Sequence
  Description of Artificial Sequence: Synthetic oligonucleotide
  Target: PCSK9; (-) strand; PAM type: YTN; PAM sequence: CTA
agtggtaacagcctcctgcc

SEQ ID NO: 20461 - DNA, 20 bp, Artificial Sequence
  Description of Artificial Sequence: Synthetic oligonucleotide
  Target: PCSK9; (-) strand; PAM type: YTN; PAM sequence: TTC
agacctaagtggtaacagcc

SEQ ID NO: 20462 - DNA, 20 bp, Artificial Sequence
  Description of Artificial Sequence: Synthetic oligonucleotide
  Target: PCSK9; (-) strand; PAM type: YTN; PAM sequence: CTT
cagacctaagtggtaacagc

SEQ ID NO: 20463 - DNA, 20 bp, Artificial Sequence
  Description of Artificial Sequence: Synthetic oligonucleotide
  Target: PCSK9; (-) strand; PAM type: YTN; PAM sequence: TTA
cccttcagacctaagtggta

SEQ ID NO: 20464 - DNA, 20 bp, Artificial Sequence
  Description of Artificial Sequence: Synthetic oligonucleotide
  Target: PCSK9; (-) strand; PAM type: YTN; PAM sequence: CTT
acccttcagacctaagtggt

SEQ ID NO: 20465 - DNA, 20 bp, Artificial Sequence
  Description of Artificial Sequence: Synthetic oligonucleotide
  Target: PCSK9; (-) strand; PAM type: YTN; PAM sequence: CTC
cttacccttcagacctaagt

SEQ ID NO: 20466 - DNA, 20 bp, Artificial Sequence
  Description of Artificial Sequence: Synthetic oligonucleotide
  Target: PCSK9; (-) strand; PAM type: YTN; PAM sequence: CTC
tccttacccttcagacctaa

SEQ ID NO: 20467 - DNA, 20 bp, Artificial Sequence
  Description of Artificial Sequence: Synthetic oligonucleotide
  Target: PCSK9; (-) strand; PAM type: YTN; PAM sequence: TTC
cctctccttacccttcagac

SEQ ID NO: 20468 - DNA, 20 bp, Artificial Sequence
  Description of Artificial Sequence: Synthetic oligonucleotide
  Target: PCSK9; (-) strand; PAM type: YTN; PAM sequence: CTA
ttccctctccttacccttca

SEQ ID NO: 20469 - DNA, 20 bp, Artificial Sequence
  Description of Artificial Sequence: Synthetic oligonucleotide
  Target: PCSK9; (-) strand; PAM type: YTN; PAM sequence: CTG
ggcagagggaaagctattcc

SEQ ID NO: 20470 - DNA, 20 bp, Artificial Sequence
  Description of Artificial Sequence: Synthetic oligonucleotide
  Target: PCSK9; (-) strand; PAM type: YTN; PAM sequence: CTC
caactgggcagagggaaagc

SEQ ID NO: 20471 - DNA, 20 bp, Artificial Sequence
  Description of Artificial Sequence: Synthetic oligonucleotide
  Target: PCSK9; (-) strand; PAM type: YTN; PAM sequence: CTC
catgccaccggctccaactg

SEQ ID NO: 20472 - DNA, 20 bp, Artificial Sequence
  Description of Artificial Sequence: Synthetic oligonucleotide
  Target: PCSK9; (-) strand; PAM type: YTN; PAM sequence: CTC
ctccatgccaccggctccaa

SEQ ID NO: 20473 - DNA, 20 bp, Artificial Sequence
  Description of Artificial Sequence: Synthetic oligonucleotide
  Target: PCSK9; (-) strand; PAM type: YTN; PAM sequence: CTC
tcctccatgccaccggctcc

SEQ ID NO: 20474 - DNA, 20 bp, Artificial Sequence
  Description of Artificial Sequence: Synthetic oligonucleotide
  Target: PCSK9; (-) strand; PAM type: YTN; PAM sequence: TTC
cccacaggcagcctctcctc

SEQ ID NO: 20475 - DNA, 20 bp, Artificial Sequence
  Description of Artificial Sequence: Synthetic oligonucleotide
  Target: PCSK9; (-) strand; PAM type: YTN; PAM sequence: CTC
gggtgattccccacaggcag

SEQ ID NO: 20476 - DNA, 20 bp, Artificial Sequence
  Description of Artificial Sequence: Synthetic oligonucleotide
  Target: PCSK9; (-) strand; PAM type: YTN; PAM sequence: CTG
cgcatggcagcggtgaaccc

SEQ ID NO: 20477 - DNA, 20 bp, Artificial Sequence
  Description of Artificial Sequence: Synthetic oligonucleotide
  Target: PCSK9; (-) strand; PAM type: YTN; PAM sequence: CTC
cctgcgcatggcagcggtga

SEQ ID NO: 20478 - DNA, 20 bp, Artificial Sequence
  Description of Artificial Sequence: Synthetic oligonucleotide
  Target: PCSK9; (-) strand; PAM type: YTN; PAM sequence: CTG
actccctgcgcatggcagcg

SEQ ID NO: 20479 - DNA, 20 bp, Artificial Sequence
  Description of Artificial Sequence: Synthetic oligonucleotide
  Target: PCSK9; (-) strand; PAM type: YTN; PAM sequence: CTC
ctgactccctgcgcatggca

SEQ ID NO: 20480 - DNA, 20 bp, Artificial Sequence
  Description of Artificial Sequence: Synthetic oligonucleotide
  Target: PCSK9; (-) strand; PAM type: YTN; PAM sequence: CTA
cctcctgactccctgcgcat

SEQ ID NO: 20481 - DNA, 20 bp, Artificial Sequence
  Description of Artificial Sequence: Synthetic oligonucleotide
  Target: PCSK9; (-) strand; PAM type: YTN; PAM sequence: CTC
cctacctcctgactccctgc

SEQ ID NO: 20482 - DNA, 20 bp, Artificial Sequence
  Description of Artificial Sequence: Synthetic oligonucleotide
  Target: PCSK9; (-) strand; PAM type: YTN; PAM sequence: CTC
cctccctacctcctgactcc

SEQ ID NO: 20483 - DNA, 20 bp, Artificial Sequence
  Description of Artificial Sequence: Synthetic oligonucleotide
  Target: PCSK9; (-) strand; PAM type: YTN; PAM sequence: CTG
ccccactccctccctacctc

SEQ ID NO: 20484 - DNA, 20 bp, Artificial Sequence
  Description of Artificial Sequence: Synthetic oligonucleotide
  Target: PCSK9; (-) strand; PAM type: YTN; PAM sequence: CTC
aaaaaaaaaaaaaaatggtg

SEQ ID NO: 20485 - DNA, 20 bp, Artificial Sequence
  Description of Artificial Sequence: Synthetic oligonucleotide
  Target: PCSK9; (-) strand; PAM type: YTN; PAM sequence: CTG
ggcaacagagtctcaaaaaa

SEQ ID NO: 20486 - DNA, 20 bp, Artificial Sequence
  Description of Artificial Sequence: Synthetic oligonucleotide
  Target: PCSK9; (-) strand; PAM type: YTN; PAM sequence: CTC
cagtctgggcaacagagtct

SEQ ID NO: 20487 - DNA, 20 bp, Artificial Sequence
  Description of Artificial Sequence: Synthetic oligonucleotide
  Target: PCSK9; (-) strand; PAM type: YTN; PAM sequence: CTG
cactccagtctgggcaacag

SEQ ID NO: 20488 - DNA, 20 bp, Artificial Sequence
  Description of Artificial Sequence: Synthetic oligonucleotide
  Target: PCSK9; (-) strand; PAM type: YTN; PAM sequence: TTG
aacccgggaggcagaggtgc

SEQ ID NO: 20489 - DNA, 20 bp, Artificial Sequence
  Description of Artificial Sequence: Synthetic oligonucleotide
  Target: PCSK9; (-) strand; PAM type: YTN; PAM sequence: CTT
gaacccgggaggcagaggtg

SEQ ID NO: 20490 - DNA, 20 bp, Artificial Sequence
  Description of Artificial Sequence: Synthetic oligonucleotide
  Target: PCSK9; (-) strand; PAM type: YTN; PAM sequence: TTG
cagtgagcttgaacccggga

SEQ ID NO: 20491 - DNA, 20 bp, Artificial Sequence
  Description of Artificial Sequence: Synthetic oligonucleotide
  Target: PCSK9; (-) strand; PAM type: YTN; PAM sequence: TTG
aacccgggaggcagaggttg

SEQ ID NO: 20492 - DNA, 20 bp, Artificial Sequence
  Description of Artificial Sequence: Synthetic oligonucleotide
  Target: PCSK9; (-) strand; PAM type: YTN; PAM sequence: CTT
gaacccgggaggcagaggtt

SEQ ID NO: 20493 - DNA, 20 bp, Artificial Sequence
  Description of Artificial Sequence: Synthetic oligonucleotide
  Target: PCSK9; (-) strand; PAM type: YTN; PAM sequence: CTG
aggcaggagaatcgcttgaa

SEQ ID NO: 20494 - DNA, 20 bp, Artificial Sequence
  Description of Artificial Sequence: Synthetic oligonucleotide
  Target: PCSK9; (-) strand; PAM type: YTN; PAM sequence: CTC
gggaggctgaggcaggagaa

SEQ ID NO: 20495 - DNA, 20 bp, Artificial Sequence
  Description of Artificial Sequence: Synthetic oligonucleotide
  Target: PCSK9; (-) strand; PAM type: YTN; PAM sequence: CTA
ctcgggaggctgaggcagga

SEQ ID NO: 20496 - DNA, 20 bp, Artificial Sequence
  Description of Artificial Sequence: Synthetic oligonucleotide
  Target: PCSK9; (-) strand; PAM type: YTN; PAM sequence: CTG
tagtcccagctactcgggag

SEQ ID NO: 20497 - DNA, 20 bp, Artificial Sequence
  Description of Artificial Sequence: Synthetic oligonucleotide
  Target: PCSK9; (-) strand; PAM type: YTN; PAM sequence: TTA
gccaggcatggtggcacaca

SEQ ID NO: 20498 - DNA, 20 bp, Artificial Sequence
  Description of Artificial Sequence: Synthetic oligonucleotide
  Target: PCSK9; (-) strand; PAM type: YTN; PAM sequence: TTA
aaaatacaaaaattagccag

SEQ ID NO: 20499 - DNA, 20 bp, Artificial Sequence
  Description of Artificial Sequence: Synthetic oligonucleotide
  Target: PCSK9; (-) strand; PAM type: YTN; PAM sequence: CTA
ttaaaaatacaaaaattagc

SEQ ID NO: 20500 - DNA, 20 bp, Artificial Sequence
  Description of Artificial Sequence: Synthetic oligonucleotide
  Target: PCSK9; (-) strand; PAM type: YTN; PAM sequence: CTC
tattaaaaatacaaaaatta

SEQ ID NO: 20501 - DNA, 20 bp, Artificial Sequence
  Description of Artificial Sequence: Synthetic oligonucleotide
  Target: PCSK9; (-) strand; PAM type: YTN; PAM sequence: CTG
gccaacatggtgaaacccca

SEQ ID NO: 20502 - DNA, 20 bp, Artificial Sequence
  Description of Artificial Sequence: Synthetic oligonucleotide
  Target: PCSK9; (-) strand; PAM type: YTN; PAM sequence: TTC
gagaccagcctggccaacat

SEQ ID NO: 20503 - DNA, 20 bp, Artificial Sequence
  Description of Artificial Sequence: Synthetic oligonucleotide
  Target: PCSK9; (-) strand; PAM type: YTN; PAM sequence: CTG
aggtcgagagttcgagacca

SEQ ID NO: 20504 - DNA, 20 bp, Artificial Sequence
  Description of Artificial Sequence: Synthetic oligonucleotide
  Target: PCSK9; (-) strand; PAM type: YTN; PAM sequence: TTG
ggaggccgaggtgggggatc

SEQ ID NO: 20505 - DNA, 20 bp, Artificial Sequence
  Description of Artificial Sequence: Synthetic oligonucleotide
  Target: PCSK9; (-) strand; PAM type: YTN; PAM sequence: TTT
gggaggccgaggtgggggat

SEQ ID NO: 20506 - DNA, 20 bp, Artificial Sequence
  Description of Artificial Sequence: Synthetic oligonucleotide
  Target: PCSK9; (-) strand; PAM type: YTN; PAM sequence: CTT
tgggaggccgaggtggggga

SEQ ID NO: 20507 - DNA, 20 bp, Artificial Sequence
  Description of Artificial Sequence: Synthetic oligonucleotide
  Target: PCSK9; (-) strand; PAM type: YTN; PAM sequence: CTG
taatcccagcactttgggag

SEQ ID NO: 20508 - DNA, 20 bp, Artificial Sequence
  Description of Artificial Sequence: Synthetic oligonucleotide
  Target: PCSK9; (-) strand; PAM type: YTN; PAM sequence: CTC
acgcctgtaatcccagcact

SEQ ID NO: 20509 - DNA, 20 bp, Artificial Sequence
  Description of Artificial Sequence: Synthetic oligonucleotide
  Target: PCSK9; (-) strand; PAM type: YTN; PAM sequence: CTG
ggagcggtgactcacgcctg

SEQ ID NO: 20510 - DNA, 20 bp, Artificial Sequence
  Description of Artificial Sequence: Synthetic oligonucleotide
  Target: PCSK9; (-) strand; PAM type: YTN; PAM sequence: TTA
gaaggacaagagtgcatcag

SEQ ID NO: 20511 - DNA, 20 bp, Artificial Sequence
  Description of Artificial Sequence: Synthetic oligonucleotide
  Target: PCSK9; (-) strand; PAM type: YTN; PAM sequence: CTA
gcaggagttagaaggacaag

SEQ ID NO: 20512 - DNA, 20 bp, Artificial Sequence
  Description of Artificial Sequence: Synthetic oligonucleotide
  Target: PCSK9; (-) strand; PAM type: YTN; PAM sequence: CTC
agccaatgggaggcactagc

SEQ ID NO: 20513 - DNA, 20 bp, Artificial Sequence
  Description of Artificial Sequence: Synthetic oligonucleotide
  Target: PCSK9; (-) strand; PAM type: YTN; PAM sequence: TTG
ggctcagccaatgggaggca

SEQ ID NO: 20514 - DNA, 20 bp, Artificial Sequence
  Description of Artificial Sequence: Synthetic oligonucleotide
  Target: PCSK9; (-) strand; PAM type: YTN; PAM sequence: TTC
cagttgggctcagccaatgg

SEQ ID NO: 20515 - DNA, 20 bp, Artificial Sequence
  Description of Artificial Sequence: Synthetic oligonucleotide
  Target: PCSK9; (-) strand; PAM type: YTN; PAM sequence: CTT
ccagttgggctcagccaatg

SEQ ID NO: 20516 - DNA, 20 bp, Artificial Sequence
  Description of Artificial Sequence: Synthetic oligonucleotide
  Target: PCSK9; (-) strand; PAM type: YTN; PAM sequence: TTG
caaagcttccagttgggctc

SEQ ID NO: 20517 - DNA, 20 bp, Artificial Sequence
  Description of Artificial Sequence: Synthetic oligonucleotide
  Target: PCSK9; (-) strand; PAM type: YTN; PAM sequence: CTT
gcaaagcttccagttgggct

SEQ ID NO: 20518 - DNA, 20 bp, Artificial Sequence
  Description of Artificial Sequence: Synthetic oligonucleotide
  Target: PCSK9; (-) strand; PAM type: YTN; PAM sequence: CTC
ccttgcaaagcttccagttg

SEQ ID NO: 20519 - DNA, 20 bp, Artificial Sequence
  Description of Artificial Sequence: Synthetic oligonucleotide
  Target: PCSK9; (-) strand; PAM type: YTN; PAM sequence: CTG
cagcaccagctcccttgcaa

SEQ ID NO: 20520 - DNA, 20 bp, Artificial Sequence
  Description of Artificial Sequence: Synthetic oligonucleotide
  Target: PCSK9; (-) strand; PAM type: YTN; PAM sequence: CTC
agtgcaaactgcagcaccag

SEQ ID NO: 20521 - DNA, 20 bp, Artificial Sequence
  Description of Artificial Sequence: Synthetic oligonucleotide
  Target: PCSK9; (-) strand; PAM type: YTN; PAM sequence: CTG
ctcagtgcaaactgcagcac

SEQ ID NO: 20522 - DNA, 20 bp, Artificial Sequence
  Description of Artificial Sequence: Synthetic oligonucleotide
  Target: PCSK9; (-) strand; PAM type: YTN; PAM sequence: CTC
cagcctgctcagtgcaaact

SEQ ID NO: 20523 - DNA, 20 bp, Artificial Sequence
  Description of Artificial Sequence: Synthetic oligonucleotide
  Target: PCSK9; (-) strand; PAM type: YTN; PAM sequence: TTC
tccagcctgctcagtgcaaa

SEQ ID NO: 20524 - DNA, 20 bp, Artificial Sequence
  Description of Artificial Sequence: Synthetic oligonucleotide
  Target: PCSK9; (-) strand; PAM type: YTN; PAM sequence: CTT
ctccagcctgctcagtgcaa

SEQ ID NO: 20525 - DNA, 20 bp, Artificial Sequence
  Description of Artificial Sequence: Synthetic oligonucleotide
  Target: PCSK9; (-) strand; PAM type: YTN; PAM sequence: CTC
cagccttctccagcctgctc

SEQ ID NO: 20526 - DNA, 20 bp, Artificial Sequence
  Description of Artificial Sequence: Synthetic oligonucleotide
  Target: PCSK9; (-) strand; PAM type: YTN; PAM sequence: TTC
tccagccttctccagcctgc

SEQ ID NO: 20527 - DNA, 20 bp, Artificial Sequence
  Description of Artificial Sequence: Synthetic oligonucleotide
  Target: PCSK9; (-) strand; PAM type: YTN; PAM sequence: CTA
ttctccagccttctccagcc

SEQ ID NO: 20528 - DNA, 20 bp, Artificial Sequence
  Description of Artificial Sequence: Synthetic oligonucleotide
  Target: PCSK9; (-) strand; PAM type: YTN; PAM sequence: CTA
gtctattctccagccttctc

SEQ ID NO: 20529 - DNA, 20 bp, Artificial Sequence
  Description of Artificial Sequence: Synthetic oligonucleotide
  Target: PCSK9; (-) strand; PAM type: YTN; PAM sequence: TTG
tcccctagtctattctccag

SEQ ID NO: 20530 - DNA, 20 bp, Artificial Sequence
  Description of Artificial Sequence: Synthetic oligonucleotide
  Target: PCSK9; (-) strand; PAM type: YTN; PAM sequence: TTT
gtcccctagtctattctcca

SEQ ID NO: 20531 - DNA, 20 bp, Artificial Sequence
  Description of Artificial Sequence: Synthetic oligonucleotide
  Target: PCSK9; (-) strand; PAM type: YTN; PAM sequence: TTC
ggtttgtcccctagtctatt

SEQ ID NO: 20532 - DNA, 20 bp, Artificial Sequence
  Description of Artificial Sequence: Synthetic oligonucleotide
  Target: PCSK9; (-) strand; PAM type: YTN; PAM sequence: CTG
gcaattcggtttgtccccta

SEQ ID NO: 20533 - DNA, 20 bp, Artificial Sequence
  Description of Artificial Sequence: Synthetic oligonucleotide
  Target: PCSK9; (-) strand; PAM type: YTN; PAM sequence: CTA
aatcatgacataacagcact

SEQ ID NO: 20534 - DNA, 20 bp, Artificial Sequence
  Description of Artificial Sequence: Synthetic oligonucleotide
  Target: PCSK9; (-) strand; PAM type: YTN; PAM sequence: CTC
catgcctaaatcatgacata

SEQ ID NO: 20535 - DNA, 20 bp, Artificial Sequence
  Description of Artificial Sequence: Synthetic oligonucleotide
  Target: PCSK9; (-) strand; PAM type: YTN; PAM sequence: CTG
gactccatgcctaaatcatg

SEQ ID NO: 20536 - DNA, 20 bp, Artificial Sequence
  Description of Artificial Sequence: Synthetic oligonucleotide
  Target: PCSK9; (-) strand; PAM type: YTN; PAM sequence: CTC
aggccctggactccatgcct

SEQ ID NO: 20537 - DNA, 20 bp, Artificial Sequence
  Description of Artificial Sequence: Synthetic oligonucleotide
  Target: PCSK9; (-) strand; PAM type: YTN; PAM sequence: CTG
ggcaggatggacatggagtg

SEQ ID NO: 20538 - DNA, 20 bp, Artificial Sequence
  Description of Artificial Sequence: Synthetic oligonucleotide
  Target: PCSK9; (-) strand; PAM type: YTN; PAM sequence: CTC
tgggcaggatggacatggag

SEQ ID NO: 20539 - DNA, 20 bp, Artificial Sequence
  Description of Artificial Sequence: Synthetic oligonucleotide
  Target: PCSK9; (-) strand; PAM type: YTN; PAM sequence: CTG
tgccaaggctctgggcagga

SEQ ID NO: 20540 - DNA, 20 bp, Artificial Sequence
  Description of Artificial Sequence: Synthetic oligonucleotide
  Target: PCSK9; (-) strand; PAM type: YTN; PAM sequence: CTG
ggagccaggctgtgccaagg

SEQ ID NO: 20541 - DNA, 20 bp, Artificial Sequence
  Description of Artificial Sequence: Synthetic oligonucleotide
  Target: PCSK9; (-) strand; PAM type: YTN; PAM sequence: TTG
tctgggagccaggctgtgcc

SEQ ID NO: 20542 - DNA, 20 bp, Artificial Sequence
  Description of Artificial Sequence: Synthetic oligonucleotide
  Target: PCSK9; (-) strand; PAM type: YTN; PAM sequence: CTT
gtctgggagccaggctgtgc

SEQ ID NO: 20543 - DNA, 20 bp, Artificial Sequence
  Description of Artificial Sequence: Synthetic oligonucleotide
  Target: PCSK9; (-) strand; PAM type: YTN; PAM sequence: TTG
acatcttgtctgggagccag

SEQ ID NO: 20544 - DNA, 20 bp, Artificial Sequence
  Description of Artificial Sequence: Synthetic oligonucleotide
  Target: PCSK9; (-) strand; PAM type: YTN; PAM sequence: CTT
gacatcttgtctgggagcca

SEQ ID NO: 20545 - DNA, 20 bp, Artificial Sequence
  Description of Artificial Sequence: Synthetic oligonucleotide
  Target: PCSK9; (-) strand; PAM type: YTN; PAM sequence: CTG
aacttgacatcttgtctggg

SEQ ID NO: 20546 - DNA, 20 bp, Artificial Sequence
  Description of Artificial Sequence: Synthetic oligonucleotide
  Target: PCSK9; (-) strand; PAM type: YTN; PAM sequence: TTC
tgaacttgacatcttgtctg

SEQ ID NO: 20547 - DNA, 20 bp, Artificial Sequence
  Description of Artificial Sequence: Synthetic oligonucleotide
  Target: PCSK9; (-) strand; PAM type: YTN; PAM sequence: TTA
ggaaggattctgaacttgac

SEQ ID NO: 20548 - DNA, 20 bp, Artificial Sequence
  Description of Artificial Sequence: Synthetic oligonucleotide
  Target: PCSK9; (-) strand; PAM type: YTN; PAM sequence: TTT
aggaaggattctgaacttga

SEQ ID NO: 20549 - DNA, 20 bp, Artificial Sequence
  Description of Artificial Sequence: Synthetic oligonucleotide
  Target: PCSK9; (-) strand; PAM type: YTN; PAM sequence: TTT
taggaaggattctgaacttg

SEQ ID NO: 20550 - DNA, 20 bp, Artificial Sequence
  Description of Artificial Sequence: Synthetic oligonucleotide
  Target: PCSK9; (-) strand; PAM type: YTN; PAM sequence: CTT
ttaggaaggattctgaactt

SEQ ID NO: 20551 - DNA, 20 bp, Artificial Sequence
  Description of Artificial Sequence: Synthetic oligonucleotide
  Target: PCSK9; (-) strand; PAM type: YTN; PAM sequence: TTC
cttttaggaaggattctgaa

SEQ ID NO: 20552 - DNA, 20 bp, Artificial Sequence
  Description of Artificial Sequence: Synthetic oligonucleotide
  Target: PCSK9; (-) strand; PAM type: YTN; PAM sequence: CTG
gcatagaggattccttttag

SEQ ID NO: 20553 - DNA, 20 bp, Artificial Sequence
  Description of Artificial Sequence: Synthetic oligonucleotide
  Target: PCSK9; (-) strand; PAM type: YTN; PAM sequence: CTG
caacacggtctggcatagag

SEQ ID NO: 20554 - DNA, 20 bp, Artificial Sequence
  Description of Artificial Sequence: Synthetic oligonucleotide
  Target: PCSK9; (-) strand; PAM type: YTN; PAM sequence: CTC
ccatatccctgcaacacggt

SEQ ID NO: 20555 - DNA, 20 bp, Artificial Sequence
  Description of Artificial Sequence: Synthetic oligonucleotide
  Target: PCSK9; (-) strand; PAM type: YTN; PAM sequence: CTG
ggagcccagcactcccatat

SEQ ID NO: 20556 - DNA, 20 bp, Artificial Sequence
  Description of Artificial Sequence: Synthetic oligonucleotide
  Target: PCSK9; (-) strand; PAM type: YTN; PAM sequence: TTG
atcaggctgggagcccagca

SEQ ID NO: 20557 - DNA, 20 bp, Artificial Sequence
  Description of Artificial Sequence: Synthetic oligonucleotide
  Target: PCSK9; (-) strand; PAM type: YTN; PAM sequence: CTT
gatcaggctgggagcccagc

SEQ ID NO: 20558 - DNA, 20 bp, Artificial Sequence
  Description of Artificial Sequence: Synthetic oligonucleotide
  Target: PCSK9; (-) strand; PAM type: YTN; PAM sequence: CTC
cttgatcaggctgggagccc

SEQ ID NO: 20559 - DNA, 20 bp, Artificial Sequence
  Description of Artificial Sequence: Synthetic oligonucleotide
  Target: PCSK9; (-) strand; PAM type: YTN; PAM sequence: CTC
gctccttgatcaggctggga

SEQ ID NO: 20560 - DNA, 20 bp, Artificial Sequence
  Description of Artificial Sequence: Synthetic oligonucleotide
  Target: PCSK9; (-) strand; PAM type: YTN; PAM sequence: TTC
tcgctccttgatcaggctgg

SEQ ID NO: 20561 - DNA, 20 bp, Artificial Sequence
  Description of Artificial Sequence: Synthetic oligonucleotide
  Target: PCSK9; (-) strand; PAM type: YTN; PAM sequence: TTT
ctcgctccttgatcaggctg

SEQ ID NO: 20562 - DNA, 20 bp, Artificial Sequence
  Description of Artificial Sequence: Synthetic oligonucleotide
  Target: PCSK9; (-) strand; PAM type: YTN; PAM sequence: TTT
tctcgctccttgatcaggct

SEQ ID NO: 20563 - DNA, 20 bp, Artificial Sequence
  Description of Artificial Sequence: Synthetic oligonucleotide
  Target: PCSK9; (-) strand; PAM type: YTN; PAM sequence: CTG
agttttctcgctccttgatc

SEQ ID NO: 20564 - DNA, 20 bp, Artificial Sequence
  Description of Artificial Sequence: Synthetic oligonucleotide
  Target: PCSK9; (-) strand; PAM type: YTN; PAM sequence: CTA
ggagcctgagttttctcgct

SEQ ID NO: 20565 - DNA, 20 bp, Artificial Sequence
  Description of Artificial Sequence: Synthetic oligonucleotide
  Target: PCSK9; (-) strand; PAM type: YTN; PAM sequence: CTA
gtgccccggaggacagacta

SEQ ID NO: 20566 - DNA, 20 bp, Artificial Sequence
  Description of Artificial Sequence: Synthetic oligonucleotide
  Target: PCSK9; (-) strand; PAM type: YTN; PAM sequence: CTG
ctagtgccccggaggacaga

SEQ ID NO: 20567 - DNA, 20 bp, Artificial Sequence
  Description of Artificial Sequence: Synthetic oligonucleotide
  Target: PCSK9; (-) strand; PAM type: YTN; PAM sequence: TTG
tccctgctagtgccccggag

SEQ ID NO: 20568 - DNA, 20 bp, Artificial Sequence
  Description of Artificial Sequence: Synthetic oligonucleotide
  Target: PCSK9; (-) strand; PAM type: YTN; PAM sequence: CTT
gtccctgctagtgccccgga

SEQ ID NO: 20569 - DNA, 20 bp, Artificial Sequence
  Description of Artificial Sequence: Synthetic oligonucleotide
  Target: PCSK9; (-) strand; PAM type: YTN; PAM sequence: CTC
ccaccttgtccctgctagtg

SEQ ID NO: 20570 - DNA, 20 bp, Artificial Sequence
  Description of Artificial Sequence: Synthetic oligonucleotide
  Target: PCSK9; (-) strand; PAM type: YTN; PAM sequence: CTG
tccccacatcccagcccagc

SEQ ID NO: 20571 - DNA, 20 bp, Artificial Sequence
  Description of Artificial Sequence: Synthetic oligonucleotide
  Target: PCSK9; (-) strand; PAM type: YTN; PAM sequence: CTG
atcaaacctgtccccacatc

SEQ ID NO: 20572 - DNA, 20 bp, Artificial Sequence
  Description of Artificial Sequence: Synthetic oligonucleotide
  Target: PCSK9; (-) strand; PAM type: YTN; PAM sequence: TTA
cctgatcaaacctgtcccca

SEQ ID NO: 20573 - DNA, 20 bp, Artificial Sequence
  Description of Artificial Sequence: Synthetic oligonucleotide
  Target: PCSK9; (-) strand; PAM type: YTN; PAM sequence: CTT
acctgatcaaacctgtcccc

SEQ ID NO: 20574 - DNA, 20 bp, Artificial Sequence
  Description of Artificial Sequence: Synthetic oligonucleotide
  Target: PCSK9; (-) strand; PAM type: YTN; PAM sequence: CTG
gccttacctgatcaaacctg

SEQ ID NO: 20575 - DNA, 20 bp, Artificial Sequence
  Description of Artificial Sequence: Synthetic oligonucleotide
  Target: PCSK9; (-) strand; PAM type: YTN; PAM sequence: TTG
gacagcagcaaacacagcca

SEQ ID NO: 20576 - DNA, 20 bp, Artificial Sequence
  Description of Artificial Sequence: Synthetic oligonucleotide
  Target: PCSK9; (-) strand; PAM type: YTN; PAM sequence: TTT
ggacagcagcaaacacagcc

SEQ ID NO: 20577 - DNA, 20 bp, Artificial Sequence
  Description of Artificial Sequence: Synthetic oligonucleotide
  Target: PCSK9; (-) strand; PAM type: YTN; PAM sequence: TTA
agccatttggacagcagcaa

SEQ ID NO: 20578 - DNA, 20 bp, Artificial Sequence
  Description of Artificial Sequence: Synthetic oligonucleotide
  Target: PCSK9; (-) strand; PAM type: YTN; PAM sequence: CTT
aagccatttggacagcagca

SEQ ID NO: 20579 - DNA, 20 bp, Artificial Sequence
  Description of Artificial Sequence: Synthetic oligonucleotide
  Target: PCSK9; (-) strand; PAM type: YTN; PAM sequence: CTG
cttaagccatttggacagca

SEQ ID NO: 20580 - DNA, 20 bp, Artificial Sequence
  Description of Artificial Sequence: Synthetic oligonucleotide
  Target: PCSK9; (-) strand; PAM type: YTN; PAM sequence: CTC
tgcttaagccatttggacag

SEQ ID NO: 20581 - DNA, 20 bp, Artificial Sequence
  Description of Artificial Sequence: Synthetic oligonucleotide
  Target: PCSK9; (-) strand; PAM type: YTN; PAM sequence: CTG
cagaagccagagaggccggg

SEQ ID NO: 20582 - DNA, 20 bp, Artificial Sequence
  Description of Artificial Sequence: Synthetic oligonucleotide
  Target: PCSK9; (-) strand; PAM type: YTN; PAM sequence: TTC
aaggcctgcagaagccagag

SEQ ID NO: 20583 - DNA, 20 bp, Artificial Sequence
  Description of Artificial Sequence: Synthetic oligonucleotide
  Target: PCSK9; (-) strand; PAM type: YTN; PAM sequence: CTT
caaggcctgcagaagccaga

SEQ ID NO: 20584 - DNA, 20 bp, Artificial Sequence
  Description of Artificial Sequence: Synthetic oligonucleotide
  Target: PCSK9; (-) strand; PAM type: YTN; PAM sequence: CTC
gatgtagtcgacatggggca

SEQ ID NO: 20585 - DNA, 20 bp, Artificial Sequence
  Description of Artificial Sequence: Synthetic oligonucleotide
  Target: PCSK9; (-) strand; PAM type: YTN; PAM sequence: CTC
ctcgatgtagtcgacatggg

SEQ ID NO: 20586 - DNA, 20 bp, Artificial Sequence
  Description of Artificial Sequence: Synthetic oligonucleotide
  Target: PCSK9; (-) strand; PAM type: YTN; PAM sequence: CTG
ggcaaagacagaggagtcct

SEQ ID NO: 20587 - DNA, 20 bp, Artificial Sequence
  Description of Artificial Sequence: Synthetic oligonucleotide
  Target: PCSK9; (-) strand; PAM type: YTN; PAM sequence: CTC
tgggcaaagacagaggagtc

SEQ ID NO: 20588 - DNA, 20 bp, Artificial Sequence
  Description of Artificial Sequence: Synthetic oligonucleotide
  Target: PCSK9; (-) strand; PAM type: YTN; PAM sequence: TTC
cacgggatgctctgggcaaa

SEQ ID NO: 20589 - DNA, 20 bp, Artificial Sequence
  Description of Artificial Sequence: Synthetic oligonucleotide
  Target: PCSK9; (-) strand; PAM type: YTN; PAM sequence: CTC
caggttccacgggatgctct

SEQ ID NO: 20590 - DNA, 20 bp, Artificial Sequence
  Description of Artificial Sequence: Synthetic oligonucleotide
  Target: PCSK9; (-) strand; PAM type: YTN; PAM sequence: TTC
atccgcccggtaccgtggag

SEQ ID NO: 20591 - DNA, 20 bp, Artificial Sequence
  Description of Artificial Sequence: Synthetic oligonucleotide
  Target: PCSK9; (-) strand; PAM type: YTN; PAM sequence: CTG
gtattcatccgcccggtacc

SEQ ID NO: 20592 - DNA, 20 bp, Artificial Sequence
  Description of Artificial Sequence: Synthetic oligonucleotide
  Target: PCSK9; (-) strand; PAM type: YTN; PAM sequence: TTA
ccggggggctggtattcatc

SEQ ID NO: 20593 - DNA, 20 bp, Artificial Sequence
  Description of Artificial Sequence: Synthetic oligonucleotide
  Target: PCSK9; (-) strand; PAM type: YTN; PAM sequence: CTT
accggggggctggtattcat

SEQ ID NO: 20594 - DNA, 20 bp, Artificial Sequence
  Description of Artificial Sequence: Synthetic oligonucleotide
  Target: PCSK9; (-) strand; PAM type: YTN; PAM sequence: CTC
agatggggtggggcagggca

SEQ ID NO: 20595 - DNA, 20 bp, Artificial Sequence
  Description of Artificial Sequence: Synthetic oligonucleotide
  Target: PCSK9; (-) strand; PAM type: YTN; PAM sequence: TTC
agctcagatggggtggggca

SEQ ID NO: 20596 - DNA, 20 bp, Artificial Sequence
  Description of Artificial Sequence: Synthetic oligonucleotide
  Target: PCSK9; (-) strand; PAM type: YTN; PAM sequence: CTG
agtcccaaagccccccgaga

SEQ ID NO: 20597 - DNA, 20 bp, Artificial Sequence
  Description of Artificial Sequence: Synthetic oligonucleotide
  Target: PCSK9; (-) strand; PAM type: YTN; PAM sequence: CTG
caggggatggggatgggaca

SEQ ID NO: 20598 - DNA, 20 bp, Artificial Sequence
  Description of Artificial Sequence: Synthetic oligonucleotide
  Target: PCSK9; (-) strand; PAM type: YTN; PAM sequence: TTG
tggggcaacaggaaggcagg

SEQ ID NO: 20599 - DNA, 20 bp, Artificial Sequence
  Description of Artificial Sequence: Synthetic oligonucleotide
  Target: PCSK9; (-) strand; PAM type: YTN; PAM sequence: TTT
gtggggcaacaggaaggcag

SEQ ID NO: 20600 - DNA, 20 bp, Artificial Sequence
  Description of Artificial Sequence: Synthetic oligonucleotide
  Target: PCSK9; (-) strand; PAM type: YTN; PAM sequence: TTG
catttgtggggcaacaggaa

SEQ ID NO: 20601 - DNA, 20 bp, Artificial Sequence
  Description of Artificial Sequence: Synthetic oligonucleotide
  Target: PCSK9; (-) strand; PAM type: YTN; PAM sequence: TTT
gcatttgtggggcaacagga

SEQ ID NO: 20602 - DNA, 20 bp, Artificial Sequence
  Description of Artificial Sequence: Synthetic oligonucleotide
  Target: PCSK9; (-) strand; PAM type: YTN; PAM sequence: TTT
tgcatttgtggggcaacagg

SEQ ID NO: 20603 - DNA, 20 bp, Artificial Sequence
  Description of Artificial Sequence: Synthetic oligonucleotide
  Target: PCSK9; (-) strand; PAM type: YTN; PAM sequence: CTT
ttgcatttgtggggcaacag

SEQ ID NO: 20604 - DNA, 20 bp, Artificial Sequence
  Description of Artificial Sequence: Synthetic oligonucleotide
  Target: PCSK9; (-) strand; PAM type: YTN; PAM sequence: TTA
aggcaagacttttgcatttg

SEQ ID NO: 20605 - DNA, 20 bp, Artificial Sequence
  Description of Artificial Sequence: Synthetic oligonucleotide
  Target: PCSK9; (-) strand; PAM type: YTN; PAM sequence: TTT
aaggcaagacttttgcattt

SEQ ID NO: 20606 - DNA, 20 bp, Artificial Sequence
  Description of Artificial Sequence: Synthetic oligonucleotide
  Target: PCSK9; (-) strand; PAM type: YTN; PAM sequence: TTC
caaatggtgagaaaaggaaa

SEQ ID NO: 20607 - DNA, 20 bp, Artificial Sequence
  Description of Artificial Sequence: Synthetic oligonucleotide
  Target: PCSK9; (-) strand; PAM type: YTN; PAM sequence: CTG
ggccattccaaatggtgaga

SEQ ID NO: 20608 - DNA, 20 bp, Artificial Sequence
  Description of Artificial Sequence: Synthetic oligonucleotide
  Target: PCSK9; (-) strand; PAM type: YTN; PAM sequence: CTG
ctgggccattccaaatggtg

SEQ ID NO: 20609 - DNA, 20 bp, Artificial Sequence
  Description of Artificial Sequence: Synthetic oligonucleotide
  Target: PCSK9; (-) strand; PAM type: YTN; PAM sequence: TTC
caaggtaagtgcagcctgct

SEQ ID NO: 20610 - DNA, 20 bp, Artificial Sequence
  Description of Artificial Sequence: Synthetic oligonucleotide
  Target: PCSK9; (-) strand; PAM type: YTN; PAM sequence: CTT
ccaaggtaagtgcagcctgc

SEQ ID NO: 20611 - DNA, 20 bp, Artificial Sequence
  Description of Artificial Sequence: Synthetic oligonucleotide
  Target: PCSK9; (-) strand; PAM type: YTN; PAM sequence: CTC
cttccaaggtaagtgcagcc

SEQ ID NO: 20612 - DNA, 20 bp, Artificial Sequence
  Description of Artificial Sequence: Synthetic oligonucleotide
  Target: PCSK9; (-) strand; PAM type: YTN; PAM sequence: CTA
ggtagagtcaccatcagatg

SEQ ID NO: 20613 - DNA, 20 bp, Artificial Sequence
  Description of Artificial Sequence: Synthetic oligonucleotide
  Target: PCSK9; (-) strand; PAM type: YTN; PAM sequence: CTG
ggggccctaggtagagtcac

SEQ ID NO: 20614 - DNA, 20 bp, Artificial Sequence
  Description of Artificial Sequence: Synthetic oligonucleotide
  Target: PCSK9; (-) strand; PAM type: YTN; PAM sequence: TTA
tagaggcctgggggccctag

SEQ ID NO: 20615 - DNA, 20 bp, Artificial Sequence
  Description of Artificial Sequence: Synthetic oligonucleotide
  Target: PCSK9; (-) strand; PAM type: YTN; PAM sequence: CTG
ggagttatagaggcctgggg

SEQ ID NO: 20616 - DNA, 20 bp, Artificial Sequence
  Description of Artificial Sequence: Synthetic oligonucleotide
  Target: PCSK9; (-) strand; PAM type: YTN; PAM sequence: CTG
cagggcactgggagttatag

SEQ ID NO: 20617 - DNA, 20 bp, Artificial Sequence
  Description of Artificial Sequence: Synthetic oligonucleotide
  Target: PCSK9; (-) strand; PAM type: YTN; PAM sequence: CTG
gtccagtctgcagggcactg

SEQ ID NO: 20618 - DNA, 20 bp, Artificial Sequence
  Description of Artificial Sequence: Synthetic oligonucleotide
  Target: PCSK9; (-) strand; PAM type: YTN; PAM sequence: TTA
aaggatctggtccagtctgc

SEQ ID NO: 20619 - DNA, 20 bp, Artificial Sequence
  Description of Artificial Sequence: Synthetic oligonucleotide
  Target: PCSK9; (-) strand; PAM type: YTN; PAM sequence: CTA
tcccattaaaggatctggtc

SEQ ID NO: 20620 - DNA, 20 bp, Artificial Sequence
  Description of Artificial Sequence: Synthetic oligonucleotide
  Target: PCSK9; (-) strand; PAM type: YTN; PAM sequence: TTG
tgtctatcccattaaaggat

SEQ ID NO: 20621 - DNA, 20 bp, Artificial Sequence
  Description of Artificial Sequence: Synthetic oligonucleotide
  Target: PCSK9; (-) strand; PAM type: YTN; PAM sequence: CTG
gaggcaggtggagcagcaaa

SEQ ID NO: 20622 - DNA, 20 bp, Artificial Sequence
  Description of Artificial Sequence: Synthetic oligonucleotide
  Target: PCSK9; (-) strand; PAM type: YTN; PAM sequence: CTA
gagggaagacacaaagtggc

SEQ ID NO: 20623 - DNA, 20 bp, Artificial Sequence
  Description of Artificial Sequence: Synthetic oligonucleotide
  Target: PCSK9; (-) strand; PAM type: YTN; PAM sequence: TTC
catagccaggccacaccagg

SEQ ID NO: 20624 - DNA, 20 bp, Artificial Sequence
  Description of Artificial Sequence: Synthetic oligonucleotide
  Target: PCSK9; (-) strand; PAM type: YTN; PAM sequence: CTT
ccatagccaggccacaccag

SEQ ID NO: 20625 - DNA, 20 bp, Artificial Sequence
  Description of Artificial Sequence: Synthetic oligonucleotide
  Target: PCSK9; (-) strand; PAM type: YTN; PAM sequence: CTC
ccttccatagccaggccaca

SEQ ID NO: 20626 - DNA, 20 bp, Artificial Sequence
  Description of Artificial Sequence: Synthetic oligonucleotide
  Target: PCSK9; (-) strand; PAM type: YTN; PAM sequence: CTC
cctcccttccatagccaggc

SEQ ID NO: 20627 - DNA, 20 bp, Artificial Sequence
  Description of Artificial Sequence: Synthetic oligonucleotide
  Target: PCSK9; (-) strand; PAM type: YTN; PAM sequence: CTC
ctccctcccttccatagcca

SEQ ID NO: 20628 - DNA, 20 bp, Artificial Sequence
  Description of Artificial Sequence: Synthetic oligonucleotide
  Target: PCSK9; (-) strand; PAM type: YTN; PAM sequence: CTC
ctcctccctcccttccatag

SEQ ID NO: 20629 - DNA, 20 bp, Artificial Sequence
  Description of Artificial Sequence: Synthetic oligonucleotide
  Target: PCSK9; (-) strand; PAM type: YTN; PAM sequence: TTC
catggccgctcctcctccct

SEQ ID NO: 20630 - DNA, 20 bp, Artificial Sequence
  Description of Artificial Sequence: Synthetic oligonucleotide
  Target: PCSK9; (-) strand; PAM type: YTN; PAM sequence: TTT
ccatggccgctcctcctccc

SEQ ID NO: 20631 - DNA, 20 bp, Artificial Sequence
  Description of Artificial Sequence: Synthetic oligonucleotide
  Target: PCSK9; (-) strand; PAM type: YTN; PAM sequence: TTT
tccatggccgctcctcctcc

SEQ ID NO: 20632 - DNA, 20 bp, Artificial Sequence
  Description of Artificial Sequence: Synthetic oligonucleotide
  Target: PCSK9; (-) strand; PAM type: YTN; PAM sequence: CTA
gaatgcagaccgttttccat

SEQ ID NO: 20633 - DNA, 20 bp, Artificial Sequence
  Description of Artificial Sequence: Synthetic oligonucleotide
  Target: PCSK9; (-) strand; PAM type: YTN; PAM sequence: CTG
ctagaatgcagaccgttttc

SEQ ID NO: 20634 - DNA, 20 bp, Artificial Sequence
  Description of Artificial Sequence: Synthetic oligonucleotide
  Target: PCSK9; (-) strand; PAM type: YTN; PAM sequence: CTG
caagtccctgctagaatgca

SEQ ID NO: 20635 - DNA, 20 bp, Artificial Sequence
  Description of Artificial Sequence: Synthetic oligonucleotide
  Target: PCSK9; (-) strand; PAM type: YTN; PAM sequence: TTG
ccacctgcaagtccctgcta

SEQ ID NO: 20636 - DNA, 20 bp, Artificial Sequence
  Description of Artificial Sequence: Synthetic oligonucleotide
  Target: PCSK9; (-) strand; PAM type: YTN; PAM sequence: CTG
aattgccacctgcaagtccc

SEQ ID NO: 20637 - DNA, 20 bp, Artificial Sequence
  Description of Artificial Sequence: Synthetic oligonucleotide
  Target: PCSK9; (-) strand; PAM type: YTN; PAM sequence: TTC
cccgactgaattgccacctg

SEQ ID NO: 20638 - DNA, 20 bp, Artificial Sequence
  Description of Artificial Sequence: Synthetic oligonucleotide
  Target: PCSK9; (-) strand; PAM type: YTN; PAM sequence: CTT
ccccgactgaattgccacct

SEQ ID NO: 20639 - DNA, 20 bp, Artificial Sequence
  Description of Artificial Sequence: Synthetic oligonucleotide
  Target: PCSK9; (-) strand; PAM type: YTN; PAM sequence: CTA
gagtcttccccgactgaatt

SEQ ID NO: 20640 - DNA, 20 bp, Artificial Sequence
  Description of Artificial Sequence: Synthetic oligonucleotide
  Target: PCSK9; (-) strand; PAM type: YTN; PAM sequence: CTC
aggccaggtgcatctagagt

SEQ ID NO: 20641 - DNA, 20 bp, Artificial Sequence
  Description of Artificial Sequence: Synthetic oligonucleotide
  Target: PCSK9; (-) strand; PAM type: YTN; PAM sequence: CTC
ctcaggccaggtgcatctag

SEQ ID NO: 20642 - DNA, 20 bp, Artificial Sequence
  Description of Artificial Sequence: Synthetic oligonucleotide
  Target: PCSK9; (-) strand; PAM type: YTN; PAM sequence: CTC
tcctcaggccaggtgcatct

SEQ ID NO: 20643 - DNA, 20 bp, Artificial Sequence
  Description of Artificial Sequence: Synthetic oligonucleotide
  Target: PCSK9; (-) strand; PAM type: YTN; PAM sequence: TTC
tctcctcaggccaggtgcat

SEQ ID NO: 20644 - DNA, 20 bp, Artificial Sequence
  Description of Artificial Sequence: Synthetic oligonucleotide
  Target: PCSK9; (-) strand; PAM type: YTN; PAM sequence: TTC
attctctcctcaggccaggt

SEQ ID NO: 20645 - DNA, 20 bp, Artificial Sequence
  Description of Artificial Sequence: Synthetic oligonucleotide
  Target: PCSK9; (-) strand; PAM type: YTN; PAM sequence: CTT
cattctctcctcaggccagg

SEQ ID NO: 20646 - DNA, 20 bp, Artificial Sequence
  Description of Artificial Sequence: Synthetic oligonucleotide
  Target: PCSK9; (-) strand; PAM type: YTN; PAM sequence: CTA
gaacccttcattctctcctc

SEQ ID NO: 20647 - DNA, 20 bp, Artificial Sequence
  Description of Artificial Sequence: Synthetic oligonucleotide
  Target: PCSK9; (-) strand; PAM type: YTN; PAM sequence: TTA
acacagtccaactagaaccc

SEQ ID NO: 20648 - DNA, 20 bp, Artificial Sequence
  Description of Artificial Sequence: Synthetic oligonucleotide
  Target: PCSK9; (-) strand; PAM type: YTN; PAM sequence: CTT
aacacagtccaactagaacc

SEQ ID NO: 20649 - DNA, 20 bp, Artificial Sequence
  Description of Artificial Sequence: Synthetic oligonucleotide
  Target: PCSK9; (-) strand; PAM type: YTN; PAM sequence: CTC
aaacttaacacagtccaact

SEQ ID NO: 20650 - DNA, 20 bp, Artificial Sequence
  Description of Artificial Sequence: Synthetic oligonucleotide
  Target: PCSK9; (-) strand; PAM type: YTN; PAM sequence: CTC
acaccatgggcacctcaaac

SEQ ID NO: 20651 - DNA, 20 bp, Artificial Sequence
  Description of Artificial Sequence: Synthetic oligonucleotide
  Target: PCSK9; (-) strand; PAM type: YTN; PAM sequence: CTC
cagacctcacaccatgggca

SEQ ID NO: 20652 - DNA, 20 bp, Artificial Sequence
  Description of Artificial Sequence: Synthetic oligonucleotide
  Target: PCSK9; (-) strand; PAM type: YTN; PAM sequence: CTG
agctccagacctcacaccat

SEQ ID NO: 20653 - DNA, 20 bp, Artificial Sequence
  Description of Artificial Sequence: Synthetic oligonucleotide
  Target: PCSK9; (-) strand; PAM type: YTN; PAM sequence: CTG
cgctgagctccagacctcac

SEQ ID NO: 20654 - DNA, 20 bp, Artificial Sequence
  Description of Artificial Sequence: Synthetic oligonucleotide
  Target: PCSK9; (-) strand; PAM type: YTN; PAM sequence: CTC
tgcgctgagctccagacctc

SEQ ID NO: 20655 - DNA, 20 bp, Artificial Sequence
  Description of Artificial Sequence: Synthetic oligonucleotide
  Target: PCSK9; (-) strand; PAM type: YTN; PAM sequence: TTG
catcatctctgcgctgagct

SEQ ID NO: 20656 - DNA, 20 bp, Artificial Sequence
  Description of Artificial Sequence: Synthetic oligonucleotide
  Target: PCSK9; (-) strand; PAM type: YTN; PAM sequence: TTG
catggacccaccacattgca

SEQ ID NO: 20657 - DNA, 20 bp, Artificial Sequence
  Description of Artificial Sequence: Synthetic oligonucleotide
  Target: PCSK9; (-) strand; PAM type: YTN; PAM sequence: CTG
gcaccatgttgcatggaccc

SEQ ID NO: 20658 - DNA, 20 bp, Artificial Sequence
  Description of Artificial Sequence: Synthetic oligonucleotide
  Target: PCSK9; (-) strand; PAM type: YTN; PAM sequence: CTG
cgtcctggcaccatgttgca

SEQ ID NO: 20659 - DNA, 20 bp, Artificial Sequence
  Description of Artificial Sequence: Synthetic oligonucleotide
  Target: PCSK9; (-) strand; PAM type: YTN; PAM sequence: CTC
tgcgtcctggcaccatgttg

SEQ ID NO: 20660 - DNA, 20 bp, Artificial Sequence
  Description of Artificial Sequence: Synthetic oligonucleotide
  Target: PCSK9; (-) strand; PAM type: YTN; PAM sequence: TTC
accccaagctctgcgtcctg

SEQ ID NO: 20661 - DNA, 20 bp, Artificial Sequence
  Description of Artificial Sequence: Synthetic oligonucleotide
  Target: PCSK9; (-) strand; PAM type: YTN; PAM sequence: CTG
agttcaccccaagctctgcg

SEQ ID NO: 20662 - DNA, 20 bp, Artificial Sequence
  Description of Artificial Sequence: Synthetic oligonucleotide
  Target: PCSK9; (-) strand; PAM type: YTN; PAM sequence: TTC
ccaagatcccacgagaaccg

SEQ ID NO: 20663 - DNA, 20 bp, Artificial Sequence
  Description of Artificial Sequence: Synthetic oligonucleotide
  Target: PCSK9; (-) strand; PAM type: YTN; PAM sequence: CTT
cccaagatcccacgagaacc

SEQ ID NO: 20664 - DNA, 20 bp, Artificial Sequence
  Description of Artificial Sequence: Synthetic oligonucleotide
  Target: PCSK9; (-) strand; PAM type: YTN; PAM sequence: CTC
atagaagaaagtggcttccc

SEQ ID NO: 20665 - DNA, 20 bp, Artificial Sequence
  Description of Artificial Sequence: Synthetic oligonucleotide
  Target: PCSK9; (-) strand; PAM type: YTN; PAM sequence: TTA
cagacaagaacgacaaagct

SEQ ID NO: 20666 - DNA, 20 bp, Artificial Sequence
  Description of Artificial Sequence: Synthetic oligonucleotide
  Target: PCSK9; (-) strand; PAM type: YTN; PAM sequence: TTT
acagacaagaacgacaaagc

SEQ ID NO: 20667 - DNA, 20 bp, Artificial Sequence
  Description of Artificial Sequence: Synthetic oligonucleotide
  Target: PCSK9; (-) strand; PAM type: YTN; PAM sequence: TTT
tacagacaagaacgacaaag

SEQ ID NO: 20668 - DNA, 20 bp, Artificial Sequence
  Description of Artificial Sequence: Synthetic oligonucleotide
  Target: PCSK9; (-) strand; PAM type: YTN; PAM sequence: TTA
tgtgcccattttacagacaa

SEQ ID NO: 20669 - DNA, 20 bp, Artificial Sequence
  Description of Artificial Sequence: Synthetic oligonucleotide
  Target: PCSK9; (-) strand; PAM type: YTN; PAM sequence: CTG
tgagaaggacagggacaggg

SEQ ID NO: 20670 - DNA, 20 bp, Artificial Sequence
  Description of Artificial Sequence: Synthetic oligonucleotide
  Target: PCSK9; (-) strand; PAM type: YTN; PAM sequence: CTC
acagcaacctgtgagaagga

SEQ ID NO: 20671 - DNA, 20 bp, Artificial Sequence
  Description of Artificial Sequence: Synthetic oligonucleotide
  Target: PCSK9; (-) strand; PAM type: YTN; PAM sequence: TTG
gagtctcacagcaacctgtg

SEQ ID NO: 20672 - DNA, 20 bp, Artificial Sequence
  Description of Artificial Sequence: Synthetic oligonucleotide
  Target: PCSK9; (-) strand; PAM type: YTN; PAM sequence: CTC
attggagtctcacagcaacc

SEQ ID NO: 20673 - DNA, 20 bp, Artificial Sequence
  Description of Artificial Sequence: Synthetic oligonucleotide
  Target: PCSK9; (-) strand; PAM type: YTN; PAM sequence: TTC
aactcattggagtctcacag

SEQ ID NO: 20674 - DNA, 20 bp, Artificial Sequence
  Description of Artificial Sequence: Synthetic oligonucleotide
  Target: PCSK9; (-) strand; PAM type: YTN; PAM sequence: CTT
caactcattggagtctcaca

SEQ ID NO: 20675 - DNA, 20 bp, Artificial Sequence
  Description of Artificial Sequence: Synthetic oligonucleotide
  Target: PCSK9; (-) strand; PAM type: YTN; PAM sequence: CTG
cacatccttcaactcattgg

SEQ ID NO: 20676 - DNA, 20 bp, Artificial Sequence
  Description of Artificial Sequence: Synthetic oligonucleotide
  Target: PCSK9; (-) strand; PAM type: YTN; PAM sequence: TTC
caaaagcatctgcacatcct

SEQ ID NO: 20677 - DNA, 20 bp, Artificial Sequence
  Description of Artificial Sequence: Synthetic oligonucleotide
  Target: PCSK9; (-) strand; PAM type: YTN; PAM sequence: CTT
ccaaaagcatctgcacatcc

SEQ ID NO: 20678 - DNA, 20 bp, Artificial Sequence
  Description of Artificial Sequence: Synthetic oligonucleotide
  Target: PCSK9; (-) strand; PAM type: YTN; PAM sequence: TTC
acttccaaaagcatctgcac

SEQ ID NO: 20679 - DNA, 20 bp, Artificial Sequence
  Description of Artificial Sequence: Synthetic oligonucleotide
  Target: PCSK9; (-) strand; PAM type: YTN; PAM sequence: TTT
cacttccaaaagcatctgca

SEQ ID NO: 20680 - DNA, 20 bp, Artificial Sequence
  Description of Artificial Sequence: Synthetic oligonucleotide
  Target: PCSK9; (-) strand; PAM type: YTN; PAM sequence: TTT
tcacttccaaaagcatctgc

SEQ ID NO: 20681 - DNA, 20 bp, Artificial Sequence
  Description of Artificial Sequence: Synthetic oligonucleotide
  Target: PCSK9; (-) strand; PAM type: YTN; PAM sequence: CTT
ttcacttccaaaagcatctg

SEQ ID NO: 20682 - DNA, 20 bp, Artificial Sequence
  Description of Artificial Sequence: Synthetic oligonucleotide
  Target: PCSK9; (-) strand; PAM type: YTN; PAM sequence: TTG
ggtgtatgcaaagtcacaca

SEQ ID NO: 20683 - DNA, 20 bp, Artificial Sequence
  Description of Artificial Sequence: Synthetic oligonucleotide
  Target: PCSK9; (-) strand; PAM type: YTN; PAM sequence: TTT
gggtgtatgcaaagtcacac

SEQ ID NO: 20684 - DNA, 20 bp, Artificial Sequence
  Description of Artificial Sequence: Synthetic oligonucleotide
  Target: PCSK9; (-) strand; PAM type: YTN; PAM sequence: CTC
agacatatgcaaggtcacac

SEQ ID NO: 20685 - DNA, 20 bp, Artificial Sequence
  Description of Artificial Sequence: Synthetic oligonucleotide
  Target: PCSK9; (-) strand; PAM type: YTN; PAM sequence: TTG
caatggcagcaactcagaca

SEQ ID NO: 20686 - DNA, 20 bp, Artificial Sequence
  Description of Artificial Sequence: Synthetic oligonucleotide
  Target: PCSK9; (-) strand; PAM type: YTN; PAM sequence: CTG
ttgcaatggcagcaactcag

SEQ ID NO: 20687 - DNA, 20 bp, Artificial Sequence
  Description of Artificial Sequence: Synthetic oligonucleotide
  Target: PCSK9; (-) strand; PAM type: YTN; PAM sequence: CTG
atctgttgcaatggcagcaa

SEQ ID NO: 20688 - DNA, 20 bp, Artificial Sequence
  Description of Artificial Sequence: Synthetic oligonucleotide
  Target: PCSK9; (-) strand; PAM type: YTN; PAM sequence: CTC
tgatctgttgcaatggcagc

SEQ ID NO: 20689 - DNA, 20 bp, Artificial Sequence
  Description of Artificial Sequence: Synthetic oligonucleotide
  Target: PCSK9; (-) strand; PAM type: YTN; PAM sequence: CTC
cacacccagcccaccagctc

SEQ ID NO: 20690 - DNA, 20 bp, Artificial Sequence
  Description of Artificial Sequence: Synthetic oligonucleotide
  Target: PCSK9; (-) strand; PAM type: YTN; PAM sequence: TTC
tccacacccagcccaccagc

SEQ ID NO: 20691 - DNA, 20 bp, Artificial Sequence
  Description of Artificial Sequence: Synthetic oligonucleotide
  Target: PCSK9; (-) strand; PAM type: YTN; PAM sequence: TTT
ctccacacccagcccaccag

SEQ ID NO: 20692 - DNA, 20 bp, Artificial Sequence
  Description of Artificial Sequence: Synthetic oligonucleotide
  Target: PCSK9; (-) strand; PAM type: YTN; PAM sequence: CTT
tctccacacccagcccacca

SEQ ID NO: 20693 - DNA, 20 bp, Artificial Sequence
  Description of Artificial Sequence: Synthetic oligonucleotide
  Target: PCSK9; (-) strand; PAM type: YTN; PAM sequence: TTG
ccagaggatgtcccccacac

SEQ ID NO: 20694 - DNA, 20 bp, Artificial Sequence
  Description of Artificial Sequence: Synthetic oligonucleotide
  Target: PCSK9; (-) strand; PAM type: YTN; PAM sequence: CTT
gccagaggatgtcccccaca

SEQ ID NO: 20695 - DNA, 20 bp, Artificial Sequence
  Description of Artificial Sequence: Synthetic oligonucleotide
  Target: PCSK9; (-) strand; PAM type: YTN; PAM sequence: CTG
ccacccttgccagaggatgt

SEQ ID NO: 20696 - DNA, 20 bp, Artificial Sequence
  Description of Artificial Sequence: Synthetic oligonucleotide
  Target: PCSK9; (-) strand; PAM type: YTN; PAM sequence: CTG
ctgccacccttgccagagga

SEQ ID NO: 20697 - DNA, 20 bp, Artificial Sequence
  Description of Artificial Sequence: Synthetic oligonucleotide
  Target: PCSK9; (-) strand; PAM type: YTN; PAM sequence: CTG
ctgctgccacccttgccaga

SEQ ID NO: 20698 - DNA, 20 bp, Artificial Sequence
  Description of Artificial Sequence: Synthetic oligonucleotide
  Target: PCSK9; (-) strand; PAM type: YTN; PAM sequence: TTC
tgctgctgccacccttgcca

SEQ ID NO: 20699 - DNA, 20 bp, Artificial Sequence
  Description of Artificial Sequence: Synthetic oligonucleotide
  Target: PCSK9; (-) strand; PAM type: YTN; PAM sequence: CTT
ctgctgctgccacccttgcc

SEQ ID NO: 20700 - DNA, 20 bp, Artificial Sequence
  Description of Artificial Sequence: Synthetic oligonucleotide
  Target: PCSK9; (-) strand; PAM type: YTN; PAM sequence: CTC
acttctgctgctgccaccct

SEQ ID NO: 20701 - DNA, 20 bp, Artificial Sequence
  Description of Artificial Sequence: Synthetic oligonucleotide
  Target: PCSK9; (-) strand; PAM type: YTN; PAM sequence: CTG
cccaggccgggtcagcacac

SEQ ID NO: 20702 - DNA, 20 bp, Artificial Sequence
  Description of Artificial Sequence: Synthetic oligonucleotide
  Target: PCSK9; (-) strand; PAM type: YTN; PAM sequence: CTG
gccacaggctgcccaggccg

SEQ ID NO: 20703 - DNA, 20 bp, Artificial Sequence
  Description of Artificial Sequence: Synthetic oligonucleotide
  Target: PCSK9; (-) strand; PAM type: YTN; PAM sequence: CTC
cctggccacaggctgcccag

SEQ ID NO: 20704 - DNA, 20 bp, Artificial Sequence
  Description of Artificial Sequence: Synthetic oligonucleotide
  Target: PCSK9; (-) strand; PAM type: YTN; PAM sequence: CTC
tccctggccacaggctgccc

SEQ ID NO: 20705 - DNA, 20 bp, Artificial Sequence
  Description of Artificial Sequence: Synthetic oligonucleotide
  Target: PCSK9; (-) strand; PAM type: YTN; PAM sequence: CTG
tcctctccctggccacaggc

SEQ ID NO: 20706 - DNA, 20 bp, Artificial Sequence
  Description of Artificial Sequence: Synthetic oligonucleotide
  Target: PCSK9; (-) strand; PAM type: YTN; PAM sequence: CTA
cagaggagctgtcctctccc

SEQ ID NO: 20707 - DNA, 20 bp, Artificial Sequence
  Description of Artificial Sequence: Synthetic oligonucleotide
  Target: PCSK9; (-) strand; PAM type: YTN; PAM sequence: TTC
ctacagaggagctgtcctct

SEQ ID NO: 20708 - DNA, 20 bp, Artificial Sequence
  Description of Artificial Sequence: Synthetic oligonucleotide
  Target: PCSK9; (-) strand; PAM type: YTN; PAM sequence: CTT
cctacagaggagctgtcctc

SEQ ID NO: 20709 - DNA, 20 bp, Artificial Sequence
  Description of Artificial Sequence: Synthetic oligonucleotide
  Target: PCSK9; (-) strand; PAM type: YTN; PAM sequence: CTC
ttcctacagaggagctgtcc

SEQ ID NO: 20710 - DNA, 20 bp, Artificial Sequence
  Description of Artificial Sequence: Synthetic oligonucleotide
  Target: PCSK9; (-) strand; PAM type: YTN; PAM sequence: TTG
gaaaggaacaggctcttcct

SEQ ID NO: 20711 - DNA, 20 bp, Artificial Sequence
  Description of Artificial Sequence: Synthetic oligonucleotide
  Target: PCSK9; (-) strand; PAM type: YTN; PAM sequence: CTG
gttggaaaggaacaggctct

SEQ ID NO: 20712 - DNA, 20 bp, Artificial Sequence
  Description of Artificial Sequence: Synthetic oligonucleotide
  Target: PCSK9; (-) strand; PAM type: YTN; PAM sequence: CTC
acctggttggaaaggaacag

SEQ ID NO: 20713 - DNA, 20 bp, Artificial Sequence
  Description of Artificial Sequence: Synthetic oligonucleotide
  Target: PCSK9; (-) strand; PAM type: YTN; PAM sequence: CTG
aagaggtctcacctggttgg

SEQ ID NO: 20714 - DNA, 20 bp, Artificial Sequence
  Description of Artificial Sequence: Synthetic oligonucleotide
  Target: PCSK9; (-) strand; PAM type: YTN; PAM sequence: CTC
cactgaagaggtctcacctg

SEQ ID NO: 20715 - DNA, 20 bp, Artificial Sequence
  Description of Artificial Sequence: Synthetic oligonucleotide
  Target: PCSK9; (-) strand; PAM type: YTN; PAM sequence: CTC
cagggctccactgaagaggt

SEQ ID NO: 20716 - DNA, 20 bp, Artificial Sequence
  Description of Artificial Sequence: Synthetic oligonucleotide
  Target: PCSK9; (-) strand; PAM type: YTN; PAM sequence: CTG
atgtggagtacagggggctc

SEQ ID NO: 20717 - DNA, 20 bp, Artificial Sequence
  Description of Artificial Sequence: Synthetic oligonucleotide
  Target: PCSK9; (-) strand; PAM type: YTN; PAM sequence: CTG
aggcactgatgtggagtaca

SEQ ID NO: 20718 - DNA, 20 bp, Artificial Sequence
  Description of Artificial Sequence: Synthetic oligonucleotide
  Target: PCSK9; (-) strand; PAM type: YTN; PAM sequence: CTC
cgggaggtccctgaggcact

SEQ ID NO: 20719 - DNA, 20 bp, Artificial Sequence
  Description of Artificial Sequence: Synthetic oligonucleotide
  Target: PCSK9; (-) strand; PAM type: YTN; PAM sequence: CTG
ctccgggaggtccctgaggc

SEQ ID NO: 20720 - DNA, 20 bp, Artificial Sequence
  Description of Artificial Sequence: Synthetic oligonucleotide
  Target: PCSK9; (-) strand; PAM type: YTN; PAM sequence: TTA
gcctgctccgggaggtccct

SEQ ID NO: 20721 - DNA, 20 bp, Artificial Sequence
  Description of Artificial Sequence: Synthetic oligonucleotide
  Target: PCSK9; (-) strand; PAM type: YTN; PAM sequence: CTG
atattagcctgctccgggag

SEQ ID NO: 20722 - DNA, 20 bp, Artificial Sequence
  Description of Artificial Sequence: Synthetic oligonucleotide
  Target: PCSK9; (-) strand; PAM type: YTN; PAM sequence: CTC
tgatattagcctgctccggg

SEQ ID NO: 20723 - DNA, 20 bp, Artificial Sequence
  Description of Artificial Sequence: Synthetic oligonucleotide
  Target: PCSK9; (-) strand; PAM type: YTN; PAM sequence: TTG
gtctctgatattagcctgct

SEQ ID NO: 20724 - DNA, 20 bp, Artificial Sequence
  Description of Artificial Sequence: Synthetic oligonucleotide
  Target: PCSK9; (-) strand; PAM type: YTN; PAM sequence: CTT
ggtctctgatattagcctgc

SEQ ID NO: 20725 - DNA, 20 bp, Artificial Sequence
  Description of Artificial Sequence: Synthetic oligonucleotide
  Target: PCSK9; (-) strand; PAM type: YTN; PAM sequence: CTC
ttggtctctgatattagcct

SEQ ID NO: 20726 - DNA, 20 bp, Artificial Sequence
  Description of Artificial Sequence: Synthetic oligonucleotide
  Target: PCSK9; (-) strand; PAM type: YTN; PAM sequence: CTG
ccagtgtccctcttggtctc

SEQ ID NO: 20727 - DNA, 20 bp, Artificial Sequence
  Description of Artificial Sequence: Synthetic oligonucleotide
  Target: PCSK9; (-) strand; PAM type: YTN; PAM sequence: CTC
tgccagtgtccctcttggtc

SEQ ID NO: 20728 - DNA, 20 bp, Artificial Sequence
  Description of Artificial Sequence: Synthetic oligonucleotide
  Target: PCSK9; (-) strand; PAM type: YTN; PAM sequence: CTG
tgatcctctgccagtgtccc

SEQ ID NO: 20729 - DNA, 20 bp, Artificial Sequence
  Description of Artificial Sequence: Synthetic oligonucleotide
  Target: PCSK9; (-) strand; PAM type: YTN; PAM sequence: CTC
tgtgatcctctgccagtgtc

SEQ ID NO: 20730 - DNA, 20 bp, Artificial Sequence
  Description of Artificial Sequence: Synthetic oligonucleotide
  Target: PCSK9; (-) strand; PAM type: YTN; PAM sequence: CTG
gggtctctgtgatcctctgc

SEQ ID NO: 20731 - DNA, 20 bp, Artificial Sequence
  Description of Artificial Sequence: Synthetic oligonucleotide
  Target: PCSK9; (-) strand; PAM type: YTN; PAM sequence: CTG
gactggggtctctgtgatcc

SEQ ID NO: 20732 - DNA, 20 bp, Artificial Sequence
  Description of Artificial Sequence: Synthetic oligonucleotide
  Target: PCSK9; (-) strand; PAM type: YTN; PAM sequence: CTG
cctggactggggtctctgtg

SEQ ID NO: 20733 - DNA, 20 bp, Artificial Sequence
  Description of Artificial Sequence: Synthetic oligonucleotide
  Target: PCSK9; (-) strand; PAM type: YTN; PAM sequence: CTC
agtccctgcctggactgggg

SEQ ID NO: 20734 - DNA, 20 bp, Artificial Sequence
  Description of Artificial Sequence: Synthetic oligonucleotide
  Target: PCSK9; (-) strand; PAM type: YTN; PAM sequence: TTC
tcagtccctgcctggactgg

SEQ ID NO: 20735 - DNA, 20 bp, Artificial Sequence
  Description of Artificial Sequence: Synthetic oligonucleotide
  Target: PCSK9; (-) strand; PAM type: YTN; PAM sequence: CTT
ctcagtccctgcctggactg

SEQ ID NO: 20736 - DNA, 20 bp, Artificial Sequence
  Description of Artificial Sequence: Synthetic oligonucleotide
  Target: PCSK9; (-) strand; PAM type: YTN; PAM sequence: TTA
gggggcaagatcttctcagt

SEQ ID NO: 20737 - DNA, 20 bp, Artificial Sequence
  Description of Artificial Sequence: Synthetic oligonucleotide
  Target: PCSK9; (-) strand; PAM type: YTN; PAM sequence: CTT
agggggcaagatcttctcag

SEQ ID NO: 20738 - DNA, 20 bp, Artificial Sequence
  Description of Artificial Sequence: Synthetic oligonucleotide
  Target: PCSK9; (-) strand; PAM type: YTN; PAM sequence: CTA
acttagggggcaagatcttc

SEQ ID NO: 20739 - DNA, 20 bp, Artificial Sequence
  Description of Artificial Sequence: Synthetic oligonucleotide
  Target: PCSK9; (-) strand; PAM type: YTN; PAM sequence: CTA
ggaaactaacttagggggca

SEQ ID NO: 20740 - DNA, 20 bp, Artificial Sequence
  Description of Artificial Sequence: Synthetic oligonucleotide
  Target: PCSK9; (-) strand; PAM type: YTN; PAM sequence: TTG
tcacagcagtgctaggaaac

SEQ ID NO: 20741 - DNA, 20 bp, Artificial Sequence
  Description of Artificial Sequence: Synthetic oligonucleotide
  Target: PCSK9; (-) strand; PAM type: YTN; PAM sequence: TTT
gtcacagcagtgctaggaaa

SEQ ID NO: 20742 - DNA, 20 bp, Artificial Sequence
  Description of Artificial Sequence: Synthetic oligonucleotide
  Target: PCSK9; (-) strand; PAM type: YTN; PAM sequence: TTC
caaccgagggggtggtaatt

SEQ ID NO: 20743 - DNA, 20 bp, Artificial Sequence
  Description of Artificial Sequence: Synthetic oligonucleotide
  Target: PCSK9; (-) strand; PAM type: YTN; PAM sequence: TTG
ttccaaccgagggggtggta

SEQ ID NO: 20744 - DNA, 20 bp, Artificial Sequence
  Description of Artificial Sequence: Synthetic oligonucleotide
  Target: PCSK9; (-) strand; PAM type: YTN; PAM sequence: CTT
gttccaaccgagggggtggt

SEQ ID NO: 20745 - DNA, 20 bp, Artificial Sequence
  Description of Artificial Sequence: Synthetic oligonucleotide
  Target: PCSK9; (-) strand; PAM type: YTN; PAM sequence: CTG
cagagaatcaacttgttcca

SEQ ID NO: 20746 - DNA, 20 bp, Artificial Sequence
  Description of Artificial Sequence: Synthetic oligonucleotide
  Target: PCSK9; (-) strand; PAM type: YTN; PAM sequence: CTC
caggactgcagagaatcaac

SEQ ID NO: 20747 - DNA, 20 bp, Artificial Sequence
  Description of Artificial Sequence: Synthetic oligonucleotide
  Target: PCSK9; (-) strand; PAM type: YTN; PAM sequence: CTG
gcctccaggactgcagagaa

SEQ ID NO: 20748 - DNA, 20 bp, Artificial Sequence
  Description of Artificial Sequence: Synthetic oligonucleotide
  Target: PCSK9; (-) strand; PAM type: YTN; PAM sequence: TTC
tggcctccaggactgcagag

SEQ ID NO: 20749 - DNA, 20 bp, Artificial Sequence
  Description of Artificial Sequence: Synthetic oligonucleotide
  Target: PCSK9; (-) strand; PAM type: YTN; PAM sequence: CTT
ctggcctccaggactgcaga

SEQ ID NO: 20750 - DNA, 20 bp, Artificial Sequence
  Description of Artificial Sequence: Synthetic oligonucleotide
  Target: PCSK9; (-) strand; PAM type: YTN; PAM sequence: TTC
aggcttctggcctccaggac

SEQ ID NO: 20751 - DNA, 20 bp, Artificial Sequence
  Description of Artificial Sequence: Synthetic oligonucleotide
  Target: PCSK9; (-) strand; PAM type: YTN; PAM sequence: CTG
attcaggcttctggcctcca

SEQ ID NO: 20752 - DNA, 20 bp, Artificial Sequence
  Description of Artificial Sequence: Synthetic oligonucleotide
  Target: PCSK9; (-) strand; PAM type: YTN; PAM sequence: CTG
ccgacactgattcaggcttc

SEQ ID NO: 20753 - DNA, 20 bp, Artificial Sequence
  Description of Artificial Sequence: Synthetic oligonucleotide
  Target: PCSK9; (-) strand; PAM type: YTN; PAM sequence: CTG
gagccccccgggagaaagtg

SEQ ID NO: 20754 - DNA, 20 bp, Artificial Sequence
  Description of Artificial Sequence: Synthetic oligonucleotide
  Target: PCSK9; (-) strand; PAM type: YTN; PAM sequence: CTC
cctggagccccccgggagaa

SEQ ID NO: 20755 - DNA, 20 bp, Artificial Sequence
  Description of Artificial Sequence: Synthetic oligonucleotide
  Target: PCSK9; (-) strand; PAM type: YTN; PAM sequence: TTC
tccctggagccccccgggag

SEQ ID NO: 20756 - DNA, 20 bp, Artificial Sequence
  Description of Artificial Sequence: Synthetic oligonucleotide
  Target: PCSK9; (-) strand; PAM type: YTN; PAM sequence: CTT
ctccctggagccccccggga

SEQ ID NO: 20757 - DNA, 20 bp, Artificial Sequence
  Description of Artificial Sequence: Synthetic oligonucleotide
  Target: PCSK9; (-) strand; PAM type: YTN; PAM sequence: TTG
ggacacggaagaggcaagag

SEQ ID NO: 20758 - DNA, 20 bp, Artificial Sequence
  Description of Artificial Sequence: Synthetic oligonucleotide
  Target: PCSK9; (-) strand; PAM type: YTN; PAM sequence: CTG
ttgggacacggaagaggcaa

SEQ ID NO: 20759 - DNA, 20 bp, Artificial Sequence
  Description of Artificial Sequence: Synthetic oligonucleotide
  Target: PCSK9; (-) strand; PAM type: YTN; PAM sequence: CTG
ccgctgttgggacacggaag

SEQ ID NO: 20760 - DNA, 20 bp, Artificial Sequence
  Description of Artificial Sequence: Synthetic oligonucleotide
  Target: PCSK9; (-) strand; PAM type: YTN; PAM sequence: TTG
gtgtgctgccgctgttggga

SEQ ID NO: 20761 - DNA, 20 bp, Artificial Sequence
  Description of Artificial Sequence: Synthetic oligonucleotide
  Target: PCSK9; (-) strand; PAM type: YTN; PAM sequence: CTG
ggattggtgtgctgccgctg

SEQ ID NO: 20762 - DNA, 20 bp, Artificial Sequence
  Description of Artificial Sequence: Synthetic oligonucleotide
  Target: PCSK9; (-) strand; PAM type: YTN; PAM sequence: CTG
tgtgaagacagaggctggga

SEQ ID NO: 20763 - DNA, 20 bp, Artificial Sequence
  Description of Artificial Sequence: Synthetic oligonucleotide
  Target: PCSK9; (-) strand; PAM type: YTN; PAM sequence: TTA
tgagacaatgaagaggagag

SEQ ID NO: 20764 - DNA, 20 bp, Artificial Sequence
  Description of Artificial Sequence: Synthetic oligonucleotide
  Target: PCSK9; (-) strand; PAM type: YTN; PAM sequence: CTT
atgagacaatgaagaggaga

SEQ ID NO: 20765 - DNA, 20 bp, Artificial Sequence
  Description of Artificial Sequence: Synthetic oligonucleotide
  Target: PCSK9; (-) strand; PAM type: YTN; PAM sequence: CTA
aatccaatgacaagtgtcct

SEQ ID NO: 20766 - DNA, 20 bp, Artificial Sequence
  Description of Artificial Sequence: Synthetic oligonucleotide
  Target: PCSK9; (-) strand; PAM type: YTN; PAM sequence: CTG
gaggatccagtgggccctaa

SEQ ID NO: 20767 - DNA, 20 bp, Artificial Sequence
  Description of Artificial Sequence: Synthetic oligonucleotide
  Target: PCSK9; (-) strand; PAM type: YTN; PAM sequence: TTC
cccacatgagatcatcctgg

SEQ ID NO: 20768 - DNA, 20 bp, Artificial Sequence
  Description of Artificial Sequence: Synthetic oligonucleotide
  Target: PCSK9; (-) strand; PAM type: YTN; PAM sequence: TTA
aggttccccacatgagatca

SEQ ID NO: 20769 - DNA, 20 bp, Artificial Sequence
  Description of Artificial Sequence: Synthetic oligonucleotide
  Target: PCSK9; (-) strand; PAM type: YTN; PAM sequence: TTG
cagatgtggttaaggttccc

SEQ ID NO: 20770 - DNA, 20 bp, Artificial Sequence
  Description of Artificial Sequence: Synthetic oligonucleotide
  Target: PCSK9; (-) strand; PAM type: YTN; PAM sequence: CTT
gcagatgtggttaaggttcc

SEQ ID NO: 20771 - DNA, 20 bp, Artificial Sequence
  Description of Artificial Sequence: Synthetic oligonucleotide
  Target: PCSK9; (-) strand; PAM type: YTN; PAM sequence: TTG
gaaaaagggtccttgcagat

SEQ ID NO: 20772 - DNA, 20 bp, Artificial Sequence
  Description of Artificial Sequence: Synthetic oligonucleotide
  Target: PCSK9; (-) strand; PAM type: YTN; PAM sequence: TTT
ggaaaaagggtccttgcaga

SEQ ID NO: 20773 - DNA, 20 bp, Artificial Sequence
  Description of Artificial Sequence: Synthetic oligonucleotide
  Target: PCSK9; (-) strand; PAM type: YTN; PAM sequence: TTA
tttggaaaaagggtccttgc

SEQ ID NO: 20774 - DNA, 20 bp, Artificial Sequence
  Description of Artificial Sequence: Synthetic oligonucleotide
  Target: PCSK9; (-) strand; PAM type: YTN; PAM sequence: CTT
atttggaaaaagggtccttg

SEQ ID NO: 20775 - DNA, 20 bp, Artificial Sequence
  Description of Artificial Sequence: Synthetic oligonucleotide
  Target: PCSK9; (-) strand; PAM type: YTN; PAM sequence: CTG
tgaccttatttggaaaaagg

SEQ ID NO: 20776 - DNA, 20 bp, Artificial Sequence
  Description of Artificial Sequence: Synthetic oligonucleotide
  Target: PCSK9; (-) strand; PAM type: YTN; PAM sequence: CTG
tggctgtgaccttatttgga

SEQ ID NO: 20777 - DNA, 20 bp, Artificial Sequence
  Description of Artificial Sequence: Synthetic oligonucleotide
  Target: PCSK9; (-) strand; PAM type: YTN; PAM sequence: CTA
acccccacaacctgtggctg

SEQ ID NO: 20778 - DNA, 20 bp, Artificial Sequence
  Description of Artificial Sequence: Synthetic oligonucleotide
  Target: PCSK9; (-) strand; PAM type: YTN; PAM sequence: CTC
acatcctaacccccacaacc

SEQ ID NO: 20779 - DNA, 20 bp, Artificial Sequence
  Description of Artificial Sequence: Synthetic oligonucleotide
  Target: PCSK9; (-) strand; PAM type: YTN; PAM sequence: CTG
ccaaagagatacactcacat

SEQ ID NO: 20780 - DNA, 20 bp, Artificial Sequence
  Description of Artificial Sequence: Synthetic oligonucleotide
  Target: PCSK9; (-) strand; PAM type: YTN; PAM sequence: CTG
gcccaagggagaggagggaa

SEQ ID NO: 20781 - DNA, 20 bp, Artificial Sequence
  Description of Artificial Sequence: Synthetic oligonucleotide
  Target: PCSK9; (-) strand; PAM type: YTN; PAM sequence: TTC
tggcccaagggagaggaggg

SEQ ID NO: 20782 - DNA, 20 bp, Artificial Sequence
  Description of Artificial Sequence: Synthetic oligonucleotide
  Target: PCSK9; (-) strand; PAM type: YTN; PAM sequence: CTT
ctggcccaagggagaggagg

SEQ ID NO: 20783 - DNA, 20 bp, Artificial Sequence
  Description of Artificial Sequence: Synthetic oligonucleotide
  Target: PCSK9; (-) strand; PAM type: YTN; PAM sequence: CTG
cttctggcccaagggagagg

SEQ ID NO: 20784 - DNA, 20 bp, Artificial Sequence
  Description of Artificial Sequence: Synthetic oligonucleotide
  Target: PCSK9; (-) strand; PAM type: YTN; PAM sequence: CTA
tggggaagaaagggccccac

SEQ ID NO: 20785 - DNA, 20 bp, Artificial Sequence
  Description of Artificial Sequence: Synthetic oligonucleotide
  Target: PCSK9; (-) strand; PAM type: YTN; PAM sequence: CTC
gggggaagcgggaagggggg

SEQ ID NO: 20786 - DNA, 20 bp, Artificial Sequence
  Description of Artificial Sequence: Synthetic oligonucleotide
  Target: PCSK9; (-) strand; PAM type: YTN; PAM sequence: CTC
ccacagacactcgggggaag

SEQ ID NO: 20787 - DNA, 20 bp, Artificial Sequence
  Description of Artificial Sequence: Synthetic oligonucleotide
  Target: PCSK9; (-) strand; PAM type: YTN; PAM sequence: CTG
ccacctcccacagacactcg

SEQ ID NO: 20788 - DNA, 20 bp, Artificial Sequence
  Description of Artificial Sequence: Synthetic oligonucleotide
  Target: PCSK9; (-) strand; PAM type: YTN; PAM sequence: TTC
ctgccacctcccacagacac

SEQ ID NO: 20789 - DNA, 20 bp, Artificial Sequence
  Description of Artificial Sequence: Synthetic oligonucleotide
  Target: PCSK9; (-) strand; PAM type: YTN; PAM sequence: CTG
ccattcctgccacctcccac

SEQ ID NO: 20790 - DNA, 20 bp, Artificial Sequence
  Description of Artificial Sequence: Synthetic oligonucleotide
  Target: PCSK9; (-) strand; PAM type: YTN; PAM sequence: CTG
cctgccattcctgccacctc

SEQ ID NO: 20791 - DNA, 20 bp, Artificial Sequence
  Description of Artificial Sequence: Synthetic oligonucleotide
  Target: PCSK9; (-) strand; PAM type: YTN; PAM sequence: TTC
cacacccctgcctgccattc

SEQ ID NO: 20792 - DNA, 20 bp, Artificial Sequence
  Description of Artificial Sequence: Synthetic oligonucleotide
  Target: PCSK9; (-) strand; PAM type: YTN; PAM sequence: CTC
cagaaggggttccacacccc

SEQ ID NO: 20793 - DNA, 20 bp, Artificial Sequence
  Description of Artificial Sequence: Synthetic oligonucleotide
  Target: PCSK9; (-) strand; PAM type: YTN; PAM sequence: TTG
atatgactccagaaggggtt

SEQ ID NO: 20794 - DNA, 20 bp, Artificial Sequence
  Description of Artificial Sequence: Synthetic oligonucleotide
  Target: PCSK9; (-) strand; PAM type: YTN; PAM sequence: CTT
gatatgactccagaaggggt

SEQ ID NO: 20795 - DNA, 20 bp, Artificial Sequence
  Description of Artificial Sequence: Synthetic oligonucleotide
  Target: PCSK9; (-) strand; PAM type: YTN; PAM sequence: CTC
cagccaagcccttgatatga

SEQ ID NO: 20796 - DNA, 20 bp, Artificial Sequence
  Description of Artificial Sequence: Synthetic oligonucleotide
  Target: PCSK9; (-) strand; PAM type: YTN; PAM sequence: TTC
ctccagccaagcccttgata

SEQ ID NO: 20797 - DNA, 20 bp, Artificial Sequence
  Description of Artificial Sequence: Synthetic oligonucleotide
  Target: PCSK9; (-) strand; PAM type: YTN; PAM sequence: CTT
cctccagccaagcccttgat

SEQ ID NO: 20798 - DNA, 20 bp, Artificial Sequence
  Description of Artificial Sequence: Synthetic oligonucleotide
  Target: PCSK9; (-) strand; PAM type: YTN; PAM sequence: CTC
caggaggacttcctccagcc

SEQ ID NO: 20799 - DNA, 20 bp, Artificial Sequence
  Description of Artificial Sequence: Synthetic oligonucleotide
  Target: PCSK9; (-) strand; PAM type: YTN; PAM sequence: CTG
ccccatgccagcccaacagc

SEQ ID NO: 20800 - DNA, 20 bp, Artificial Sequence
  Description of Artificial Sequence: Synthetic oligonucleotide
  Target: PCSK9; (-) strand; PAM type: YTN; PAM sequence: CTG
ggcccagccagcctgcccca

SEQ ID NO: 20801 - DNA, 20 bp, Artificial Sequence
  Description of Artificial Sequence: Synthetic oligonucleotide
  Target: PCSK9; (-) strand; PAM type: YTN; PAM sequence: CTG
ctgggcccagccagcctgcc

SEQ ID NO: 20802 - DNA, 20 bp, Artificial Sequence
  Description of Artificial Sequence: Synthetic oligonucleotide
  Target: PCSK9; (-) strand; PAM type: YTN; PAM sequence: CTG
ctgctgggcccagccagcct

SEQ ID NO: 20803 - DNA, 20 bp, Artificial Sequence
  Description of Artificial Sequence: Synthetic oligonucleotide
  Target: PCSK9; (-) strand; PAM type: YTN; PAM sequence: CTC
cccatgaatgaagaagctgc

SEQ ID NO: 20804 - DNA, 20 bp, Artificial Sequence
  Description of Artificial Sequence: Synthetic oligonucleotide
  Target: PCSK9; (-) strand; PAM type: YTN; PAM sequence: TTG
tggcctccccatgaatgaag

SEQ ID NO: 20805 - DNA, 20 bp, Artificial Sequence
  Description of Artificial Sequence: Synthetic oligonucleotide
  Target: PCSK9; (-) strand; PAM type: YTN; PAM sequence: CTT
gtggcctccccatgaatgaa

SEQ ID NO: 20806 - DNA, 20 bp, Artificial Sequence
  Description of Artificial Sequence: Synthetic oligonucleotide
  Target: PCSK9; (-) strand; PAM type: YTN; PAM sequence: CTA
gggcccatgcttgtggcctc

SEQ ID NO: 20807 - DNA, 20 bp, Artificial Sequence
  Description of Artificial Sequence: Synthetic oligonucleotide
  Target: PCSK9; (-) strand; PAM type: YTN; PAM sequence: CTC
tagggcccatgcttgtggcc

SEQ ID NO: 20808 - DNA, 20 bp, Artificial Sequence
  Description of Artificial Sequence: Synthetic oligonucleotide
  Target: PCSK9; (-) strand; PAM type: YTN; PAM sequence: TTG
agggcggcagccagctctag

SEQ ID NO: 20809 - DNA, 20 bp, Artificial Sequence
  Description of Artificial Sequence: Synthetic oligonucleotide
  Target: PCSK9; (-) strand; PAM type: YTN; PAM sequence: TTT
gagggcggcagccagctcta

SEQ ID NO: 20810 - DNA, 20 bp, Artificial Sequence
  Description of Artificial Sequence: Synthetic oligonucleotide
  Target: PCSK9; (-) strand; PAM type: YTN; PAM sequence: CTG
ggtttgagggcggcagccag

SEQ ID NO: 20811 - DNA, 20 bp, Artificial Sequence
  Description of Artificial Sequence: Synthetic oligonucleotide
  Target: PCSK9; (-) strand; PAM type: YTN; PAM sequence: TTA
agagtgcagggtctgggttt

SEQ ID NO: 20812 - DNA, 20 bp, Artificial Sequence
  Description of Artificial Sequence: Synthetic oligonucleotide
  Target: PCSK9; (-) strand; PAM type: YTN; PAM sequence: CTG
aagatcagagagggtgagtg

SEQ ID NO: 20813 - DNA, 20 bp, Artificial Sequence
  Description of Artificial Sequence: Synthetic oligonucleotide
  Target: PCSK9; (-) strand; PAM type: YTN; PAM sequence: TTG
cagaggaacctgaagatcag

SEQ ID NO: 20814 - DNA, 20 bp, Artificial Sequence
  Description of Artificial Sequence: Synthetic oligonucleotide
  Target: PCSK9; (-) strand; PAM type: YTN; PAM sequence: TTT
gcagaggaacctgaagatca

SEQ ID NO: 20815 - DNA, 20 bp, Artificial Sequence
  Description of Artificial Sequence: Synthetic oligonucleotide
  Target: PCSK9; (-) strand; PAM type: YTN; PAM sequence: TTT
tgcagaggaacctgaagatc

SEQ ID NO: 20816 - DNA, 20 bp, Artificial Sequence
  Description of Artificial Sequence: Synthetic oligonucleotide
  Target: PCSK9; (-) strand; PAM type: YTN; PAM sequence: CTT
ttgcagaggaacctgaagat

SEQ ID NO: 20817 - DNA, 20 bp, Artificial Sequence
  Description of Artificial Sequence: Synthetic oligonucleotide
  Target: PCSK9; (-) strand; PAM type: YTN; PAM sequence: CTC
ccttttgcagaggaacctga

SEQ ID NO: 20818 - DNA, 20 bp, Artificial Sequence
  Description of Artificial Sequence: Synthetic oligonucleotide
  Target: PCSK9; (-) strand; PAM type: YTN; PAM sequence: TTA
cctcccttttgcagaggaac

SEQ ID NO: 20819 - DNA, 20 bp, Artificial Sequence
  Description of Artificial Sequence: Synthetic oligonucleotide
  Target: PCSK9; (-) strand; PAM type: YTN; PAM sequence: TTA
tcattacctcccttttgcag

SEQ ID NO: 20820 - DNA, 20 bp, Artificial Sequence
  Description of Artificial Sequence: Synthetic oligonucleotide
  Target: PCSK9; (-) strand; PAM type: YTN; PAM sequence: CTC
caaacagccccccagagtga

SEQ ID NO: 20821 - DNA, 20 bp, Artificial Sequence
  Description of Artificial Sequence: Synthetic oligonucleotide
  Target: PCSK9; (-) strand; PAM type: YTN; PAM sequence: TTA
accctccaaacagcccccca

SEQ ID NO: 20822 - DNA, 20 bp, Artificial Sequence
  Description of Artificial Sequence: Synthetic oligonucleotide
  Target: PCSK9; (-) strand; PAM type: YTN; PAM sequence: TTT
aaccctccaaacagcccccc

SEQ ID NO: 20823 - DNA, 20 bp, Artificial Sequence
  Description of Artificial Sequence: Synthetic oligonucleotide
  Target: PCSK9; (-) strand; PAM type: YTN; PAM sequence: CTG
atttaaccctccaaacagcc

SEQ ID NO: 20824 - DNA, 20 bp, Artificial Sequence
  Description of Artificial Sequence: Synthetic oligonucleotide
  Target: PCSK9; (-) strand; PAM type: YTN; PAM sequence: CTA
cagcaataactgatttaacc

SEQ ID NO: 20825 - DNA, 20 bp, Artificial Sequence
  Description of Artificial Sequence: Synthetic oligonucleotide
  Target: PCSK9; (-) strand; PAM type: YTN; PAM sequence: CTG
acagagaaatgcatgctaca

SEQ ID NO: 20826 - DNA, 20 bp, Artificial Sequence
  Description of Artificial Sequence: Synthetic oligonucleotide
  Target: PCSK9; (-) strand; PAM type: YTN; PAM sequence: CTC
aatacctgacagagaaatgc

SEQ ID NO: 20827 - DNA, 20 bp, Artificial Sequence
  Description of Artificial Sequence: Synthetic oligonucleotide
  Target: PCSK9; (-) strand; PAM type: YTN; PAM sequence: CTC
actcaatacctgacagagaa

SEQ ID NO: 20828 - DNA, 20 bp, Artificial Sequence
  Description of Artificial Sequence: Synthetic oligonucleotide
  Target: PCSK9; (-) strand; PAM type: YTN; PAM sequence: CTA
aaatcacagcacctcactca

SEQ ID NO: 20829 - DNA, 20 bp, Artificial Sequence
  Description of Artificial Sequence: Synthetic oligonucleotide
  Target: PCSK9; (-) strand; PAM type: YTN; PAM sequence: TTG
aatggtaagaaaagaaaaat

SEQ ID NO: 20830 - DNA, 20 bp, Artificial Sequence
  Description of Artificial Sequence: Synthetic oligonucleotide
  Target: PCSK9; (-) strand; PAM type: YTN; PAM sequence: TTA
ttgaatggtaagaaaagaaa

SEQ ID NO: 20831 - DNA, 20 bp, Artificial Sequence
  Description of Artificial Sequence: Synthetic oligonucleotide
  Target: PCSK9; (-) strand; PAM type: YTN; PAM sequence: TTA
ttattgaatggtaagaaaag

SEQ ID NO: 20832 - DNA, 20 bp, Artificial Sequence
  Description of Artificial Sequence: Synthetic oligonucleotide
  Target: PCSK9; (-) strand; PAM type: YTN; PAM sequence: CTC
aaaacgttattattgaatgg

SEQ ID NO: 20833 - DNA, 20 bp, Artificial Sequence
  Description of Artificial Sequence: Synthetic oligonucleotide
  Target: PCSK9; (-) strand; PAM type: YTN; PAM sequence: CTG
gcgcacagtgggtgctcaaa

SEQ ID NO: 20834 - DNA, 20 bp, Artificial Sequence
  Description of Artificial Sequence: Synthetic oligonucleotide
  Target: PCSK9; (-) strand; PAM type: YTN; PAM sequence: CTA
atatggtgcctggcgcacag

SEQ ID NO: 20835 - DNA, 20 bp, Artificial Sequence
  Description of Artificial Sequence: Synthetic oligonucleotide
  Target: PCSK9; (-) strand; PAM type: YTN; PAM sequence: TTG
tatccccagcacctaatatg

SEQ ID NO: 20836 - DNA, 20 bp, Artificial Sequence
  Description of Artificial Sequence: Synthetic oligonucleotide
  Target: PCSK9; (-) strand; PAM type: YTN; PAM sequence: TTT
gtatccccagcacctaatat

SEQ ID NO: 20837 - DNA, 20 bp, Artificial Sequence
  Description of Artificial Sequence: Synthetic oligonucleotide
  Target: PCSK9; (-) strand; PAM type: YTN; PAM sequence: TTC
acatttgtatccccagcacc

SEQ ID NO: 20838 - DNA, 20 bp, Artificial Sequence
  Description of Artificial Sequence: Synthetic oligonucleotide
  Target: PCSK9; (-) strand; PAM type: YTN; PAM sequence: TTC
attcacatttgtatccccag

SEQ ID NO: 20839 - DNA, 20 bp, Artificial Sequence
  Description of Artificial Sequence: Synthetic oligonucleotide
  Target: PCSK9; (-) strand; PAM type: YTN; PAM sequence: TTT
cattcacatttgtatcccca

SEQ ID NO: 20840 - DNA, 20 bp, Artificial Sequence
  Description of Artificial Sequence: Synthetic oligonucleotide
  Target: PCSK9; (-) strand; PAM type: YTN; PAM sequence: TTC
atttcattcacatttgtatc

SEQ ID NO: 20841 - DNA, 20 bp, Artificial Sequence
  Description of Artificial Sequence: Synthetic oligonucleotide
  Target: PCSK9; (-) strand; PAM type: YTN; PAM sequence: TTG
ggggaagagaccacattcat

SEQ ID NO: 20842 - DNA, 20 bp, Artificial Sequence
  Description of Artificial Sequence: Synthetic oligonucleotide
  Target: PCSK9; (-) strand; PAM type: YTN; PAM sequence: CTG
ttgggggaagagaccacatt

SEQ ID NO: 20843 - DNA, 20 bp, Artificial Sequence
  Description of Artificial Sequence: Synthetic oligonucleotide
  Target: PCSK9; (-) strand; PAM type: YTN; PAM sequence: CTG
gatacactgttgggggaaga

SEQ ID NO: 20844 - DNA, 20 bp, Artificial Sequence
  Description of Artificial Sequence: Synthetic oligonucleotide
  Target: PCSK9; (-) strand; PAM type: YTN; PAM sequence: TTC
tggatacactgttgggggaa

SEQ ID NO: 20845 - DNA, 20 bp, Artificial Sequence
  Description of Artificial Sequence: Synthetic oligonucleotide
  Target: PCSK9; (-) strand; PAM type: YTN; PAM sequence: CTT
ctggatacactgttggggga

SEQ ID NO: 20846 - DNA, 20 bp, Artificial Sequence
  Description of Artificial Sequence: Synthetic oligonucleotide
  Target: PCSK9; (-) strand; PAM type: YTN; PAM sequence: TTA
atcttctggatacactgttg

SEQ ID NO: 20847 - DNA, 20 bp, Artificial Sequence
  Description of Artificial Sequence: Synthetic oligonucleotide
  Target: PCSK9; (-) strand; PAM type: YTN; PAM sequence: TTA
aggaatggattaatcttctg

SEQ ID NO: 20848 - DNA, 20 bp, Artificial Sequence
  Description of Artificial Sequence: Synthetic oligonucleotide
  Target: PCSK9; (-) strand; PAM type: YTN; PAM sequence: TTT
aaggaatggattaatcttct

SEQ ID NO: 20849 - DNA, 20 bp, Artificial Sequence
  Description of Artificial Sequence: Synthetic oligonucleotide
  Target: PCSK9; (-) strand; PAM type: YTN; PAM sequence: TTG
tttaaggaatggattaatct

SEQ ID NO: 20850 - DNA, 20 bp, Artificial Sequence
  Description of Artificial Sequence: Synthetic oligonucleotide
  Target: PCSK9; (-) strand; PAM type: YTN; PAM sequence: TTT
gtttaaggaatggattaatc

SEQ ID NO: 20851 - DNA, 20 bp, Artificial Sequence
  Description of Artificial Sequence: Synthetic oligonucleotide
  Target: PCSK9; (-) strand; PAM type: YTN; PAM sequence: CTG
tgtcaagtagcatttgttta

SEQ ID NO: 20852 - DNA, 20 bp, Artificial Sequence
  Description of Artificial Sequence: Synthetic oligonucleotide
  Target: PCSK9; (-) strand; PAM type: YTN; PAM sequence: CTA
atctgtgtcaagtagcattt

SEQ ID NO: 20853 - DNA, 20 bp, Artificial Sequence
  Description of Artificial Sequence: Synthetic oligonucleotide
  Target: PCSK9; (-) strand; PAM type: YTN; PAM sequence: CTA
tccagaactaatctgtgtca

SEQ ID NO: 20854 - DNA, 20 bp, Artificial Sequence
  Description of Artificial Sequence: Synthetic oligonucleotide
  Target: PCSK9; (-) strand; PAM type: YTN; PAM sequence: CTC
agcctatccagaactaatct

SEQ ID NO: 20855 - DNA, 20 bp, Artificial Sequence
  Description of Artificial Sequence: Synthetic oligonucleotide
  Target: PCSK9; (-) strand; PAM type: YTN; PAM sequence: CTC
tcagcctatccagaactaat

SEQ ID NO: 20856 - DNA, 20 bp, Artificial Sequence
  Description of Artificial Sequence: Synthetic oligonucleotide
  Target: PCSK9; (-) strand; PAM type: YTN; PAM sequence: TTC
agagctctcagcctatccag

SEQ ID NO: 20857 - DNA, 20 bp, Artificial Sequence
  Description of Artificial Sequence: Synthetic oligonucleotide
  Target: PCSK9; (-) strand; PAM type: YTN; PAM sequence: CTT
cagagctctcagcctatcca

SEQ ID NO: 20858 - DNA, 20 bp, Artificial Sequence
  Description of Artificial Sequence: Synthetic oligonucleotide
  Target: PCSK9; (-) strand; PAM type: YTN; PAM sequence: CTC
cttcagagctctcagcctat

SEQ ID NO: 20859 - DNA, 20 bp, Artificial Sequence
  Description of Artificial Sequence: Synthetic oligonucleotide
  Target: PCSK9; (-) strand; PAM type: YTN; PAM sequence: CTG
cactccttcagagctctcag

SEQ ID NO: 20860 - DNA, 20 bp, Artificial Sequence
  Description of Artificial Sequence: Synthetic oligonucleotide
  Target: PCSK9; (-) strand; PAM type: YTN; PAM sequence: CTG
cctgcactccttcagagctc

SEQ ID NO: 20861 - DNA, 20 bp, Artificial Sequence
  Description of Artificial Sequence: Synthetic oligonucleotide
  Target: PCSK9; (-) strand; PAM type: YTN; PAM sequence: CTC
gcagctgcctgcactccttc

SEQ ID NO: 20862 - DNA, 20 bp, Artificial Sequence
  Description of Artificial Sequence: Synthetic oligonucleotide
  Target: PCSK9; (-) strand; PAM type: YTN; PAM sequence: CTG
gatacacaggctcgcagctg

SEQ ID NO: 20863 - DNA, 20 bp, Artificial Sequence
  Description of Artificial Sequence: Synthetic oligonucleotide
  Target: PCSK9; (-) strand; PAM type: YTN; PAM sequence: CTG
ctggatacacaggctcgcag

SEQ ID NO: 20864 - DNA, 20 bp, Artificial Sequence
  Description of Artificial Sequence: Synthetic oligonucleotide
  Target: PCSK9; (-) strand; PAM type: YTN; PAM sequence: TTC
tgctggatacacaggctcgc

SEQ ID NO: 20865 - DNA, 20 bp, Artificial Sequence
  Description of Artificial Sequence: Synthetic oligonucleotide
  Target: PCSK9; (-) strand; PAM type: YTN; PAM sequence: CTT
ctgctggatacacaggctcg

SEQ ID NO: 20866 - DNA, 20 bp, Artificial Sequence
  Description of Artificial Sequence: Synthetic oligonucleotide
  Target: PCSK9; (-) strand; PAM type: YTN; PAM sequence: CTG
atccttctgctggatacaca

SEQ ID NO: 20867 - DNA, 20 bp, Artificial Sequence
  Description of Artificial Sequence: Synthetic oligonucleotide
  Target: PCSK9; (-) strand; PAM type: YTN; PAM sequence: TTC
ctgatccttctgctggatac

SEQ ID NO: 20868 - DNA, 20 bp, Artificial Sequence
  Description of Artificial Sequence: Synthetic oligonucleotide
  Target: PCSK9; (-) strand; PAM type: YTN; PAM sequence: TTT
cctgatccttctgctggata

SEQ ID NO: 20869 - DNA, 20 bp, Artificial Sequence
  Description of Artificial Sequence: Synthetic oligonucleotide
  Target: PCSK9; (-) strand; PAM type: YTN; PAM sequence: CTT
tcctgatccttctgctggat

SEQ ID NO: 20870 - DNA, 20 bp, Artificial Sequence
  Description of Artificial Sequence: Synthetic oligonucleotide
  Target: PCSK9; (-) strand; PAM type: YTN; PAM sequence: CTC
caggaatcctttcctgatcc

SEQ ID NO: 20871 - DNA, 20 bp, Artificial Sequence
  Description of Artificial Sequence: Synthetic oligonucleotide
  Target: PCSK9; (-) strand; PAM type: YTN; PAM sequence: TTC
ctccaggaatcctttcctga

SEQ ID NO: 20872 - DNA, 20 bp, Artificial Sequence
  Description of Artificial Sequence: Synthetic oligonucleotide
  Target: PCSK9; (-) strand; PAM type: YTN; PAM sequence: CTT
cctccaggaatcctttcctg

SEQ ID NO: 20873 - DNA, 20 bp, Artificial Sequence
  Description of Artificial Sequence: Synthetic oligonucleotide
  Target: PCSK9; (-) strand; PAM type: YTN; PAM sequence: CTA
gaacagcgcttcctccagga

SEQ ID NO: 20874 - DNA, 20 bp, Artificial Sequence
  Description of Artificial Sequence: Synthetic oligonucleotide
  Target: PCSK9; (-) strand; PAM type: YTN; PAM sequence: TTG
gctagaacagcgcttcctcc

SEQ ID NO: 20875 - DNA, 20 bp, Artificial Sequence
  Description of Artificial Sequence: Synthetic oligonucleotide
  Target: PCSK9; (-) strand; PAM type: YTN; PAM sequence: CTT
ggctagaacagcgcttcctc

SEQ ID NO: 20876 - DNA, 20 bp, Artificial Sequence
  Description of Artificial Sequence: Synthetic oligonucleotide
  Target: PCSK9; (-) strand; PAM type: YTN; PAM sequence: TTA
ataatgcccccgtaggtctt

SEQ ID NO: 20877 - DNA, 20 bp, Artificial Sequence
  Description of Artificial Sequence: Synthetic oligonucleotide
  Target: PCSK9; (-) strand; PAM type: YTN; PAM sequence: CTG
gttaataatgcccccgtagg

SEQ ID NO: 20878 - DNA, 20 bp, Artificial Sequence
  Description of Artificial Sequence: Synthetic oligonucleotide
  Target: PCSK9; (-) strand; PAM type: YTN; PAM sequence: TTG
cctggttaataatgcccccg

SEQ ID NO: 20879 - DNA, 20 bp, Artificial Sequence
  Description of Artificial Sequence: Synthetic oligonucleotide
  Target: PCSK9; (-) strand; PAM type: YTN; PAM sequence: TTT
gcctggttaataatgccccc

SEQ ID NO: 20880 - DNA, 20 bp, Artificial Sequence
  Description of Artificial Sequence: Synthetic oligonucleotide
  Target: PCSK9; (-) strand; PAM type: YTN; PAM sequence: CTT
tgcctggttaataatgcccc

SEQ ID NO: 20881 - DNA, 20 bp, Artificial Sequence
  Description of Artificial Sequence: Synthetic oligonucleotide
  Target: PCSK9; (-) strand; PAM type: YTN; PAM sequence: TTG
gacaccgtcccctttgcctg

SEQ ID NO: 20882 - DNA, 20 bp, Artificial Sequence
  Description of Artificial Sequence: Synthetic oligonucleotide
  Target: PCSK9; (-) strand; PAM type: YTN; PAM sequence: CTT
ggacaccgtcccctttgcct

SEQ ID NO: 20883 - DNA, 20 bp, Artificial Sequence
  Description of Artificial Sequence: Synthetic oligonucleotide
  Target: PCSK9; (-) strand; PAM type: YTN; PAM sequence: CTG
cttggacaccgtcccctttg

SEQ ID NO: 20884 - DNA, 20 bp, Artificial Sequence
  Description of Artificial Sequence: Synthetic oligonucleotide
  Target: PCSK9; (-) strand; PAM type: YTN; PAM sequence: TTC
cactgcttggacaccgtccc

SEQ ID NO: 20885 - DNA, 20 bp, Artificial Sequence
  Description of Artificial Sequence: Synthetic oligonucleotide
  Target: PCSK9; (-) strand; PAM type: YTN; PAM sequence: TTC
attccactgcttggacaccg

SEQ ID NO: 20886 - DNA, 20 bp, Artificial Sequence
  Description of Artificial Sequence: Synthetic oligonucleotide
  Target: PCSK9; (-) strand; PAM type: YTN; PAM sequence: TTC
aatccacgttcattccactg

SEQ ID NO: 20887 - DNA, 20 bp, Artificial Sequence
  Description of Artificial Sequence: Synthetic oligonucleotide
  Target: PCSK9; (-) strand; PAM type: YTN; PAM sequence: CTT
caatccacgttcattccact

SEQ ID NO: 20888 - DNA, 20 bp, Artificial Sequence
  Description of Artificial Sequence: Synthetic oligonucleotide
  Target: PCSK9; (-) strand; PAM type: YTN; PAM sequence: CTC
acagcttcaatccacgttca

SEQ ID NO: 20889 - DNA, 20 bp, Artificial Sequence
  Description of Artificial Sequence: Synthetic oligonucleotide
  Target: PCSK9; (-) strand; PAM type: YTN; PAM sequence: CTG
cctcacagcttcaatccacg

SEQ ID NO: 20890 - DNA, 20 bp, Artificial Sequence
  Description of Artificial Sequence: Synthetic oligonucleotide
  Target: PCSK9; (-) strand; PAM type: YTN; PAM sequence: CTC
ctgcctcacagcttcaatcc

SEQ ID NO: 20891 - DNA, 20 bp, Artificial Sequence
  Description of Artificial Sequence: Synthetic oligonucleotide
  Target: PCSK9; (-) strand; PAM type: YTN; PAM sequence: CTC
cctcctgcctcacagcttca

SEQ ID NO: 20892 - DNA, 20 bp, Artificial Sequence
  Description of Artificial Sequence: Synthetic oligonucleotide
  Target: PCSK9; (-) strand; PAM type: YTN; PAM sequence: CTG
cacaggccacactccctcct

SEQ ID NO: 20893 - DNA, 20 bp, Artificial Sequence
  Description of Artificial Sequence: Synthetic oligonucleotide
  Target: PCSK9; (-) strand; PAM type: YTN; PAM sequence: TTC
tgcacaggccacactccctc

SEQ ID NO: 20894 - DNA, 20 bp, Artificial Sequence
  Description of Artificial Sequence: Synthetic oligonucleotide
  Target: PCSK9; (-) strand; PAM type: YTN; PAM sequence: CTT
ctgcacaggccacactccct

SEQ ID NO: 20895 - DNA, 20 bp, Artificial Sequence
  Description of Artificial Sequence: Synthetic oligonucleotide
  Target: PCSK9; (-) strand; PAM type: YTN; PAM sequence: CTC
ggtcccttctgcacaggcca

SEQ ID NO: 20896 - DNA, 20 bp, Artificial Sequence
  Description of Artificial Sequence: Synthetic oligonucleotide
  Target: PCSK9; (-) strand; PAM type: YTN; PAM sequence: CTC
accagcctcggtcccttctg

SEQ ID NO: 20897 - DNA, 20 bp, Artificial Sequence
  Description of Artificial Sequence: Synthetic oligonucleotide
  Target: PCSK9; (-) strand; PAM type: YTN; PAM sequence: CTG
gtctcaccagcctcggtccc

SEQ ID NO: 20898 - DNA, 20 bp, Artificial Sequence
  Description of Artificial Sequence: Synthetic oligonucleotide
  Target: PCSK9; (-) strand; PAM type: YTN; PAM sequence: CTC
ctggtctcaccagcctcggt

SEQ ID NO: 20899 - DNA, 20 bp, Artificial Sequence
  Description of Artificial Sequence: Synthetic oligonucleotide
  Target: PCSK9; (-) strand; PAM type: YTN; PAM sequence: CTG
gaggccacccaggccctcct

SEQ ID NO: 20900 - DNA, 20 bp, Artificial Sequence
  Description of Artificial Sequence: Synthetic oligonucleotide
  Target: PCSK9; (-) strand; PAM type: YTN; PAM sequence: CTG
acctggaggccacccaggcc

SEQ ID NO: 20901 - DNA, 20 bp, Artificial Sequence
  Description of Artificial Sequence: Synthetic oligonucleotide
  Target: PCSK9; (-) strand; PAM type: YTN; PAM sequence: TTC
acatctgacctggaggccac

SEQ ID NO: 20902 - DNA, 20 bp, Artificial Sequence
  Description of Artificial Sequence: Synthetic oligonucleotide
  Target: PCSK9; (-) strand; PAM type: YTN; PAM sequence: TTT
cacatctgacctggaggcca

SEQ ID NO: 20903 - DNA, 20 bp, Artificial Sequence
  Description of Artificial Sequence: Synthetic oligonucleotide
  Target: PCSK9; (-) strand; PAM type: YTN; PAM sequence: CTT
tcacatctgacctggaggcc

SEQ ID NO: 20904 - DNA, 20 bp, Artificial Sequence
  Description of Artificial Sequence: Synthetic oligonucleotide
  Target: PCSK9; (-) strand; PAM type: YTN; PAM sequence: TTC
ctttcacatctgacctggag

SEQ ID NO: 20905 - DNA, 20 bp, Artificial Sequence
  Description of Artificial Sequence: Synthetic oligonucleotide
  Target: PCSK9; (-) strand; PAM type: YTN; PAM sequence: CTT
cctttcacatctgacctgga

SEQ ID NO: 20906 - DNA, 20 bp, Artificial Sequence
  Description of Artificial Sequence: Synthetic oligonucleotide
  Target: PCSK9; (-) strand; PAM type: YTN; PAM sequence: TTC
ttcctttcacatctgacctg

SEQ ID NO: 20907 - DNA, 20 bp, Artificial Sequence
  Description of Artificial Sequence: Synthetic oligonucleotide
  Target: PCSK9; (-) strand; PAM type: YTN; PAM sequence: CTG
tggccaagttcttcctttca

SEQ ID NO: 20908 - DNA, 20 bp, Artificial Sequence
  Description of Artificial Sequence: Synthetic oligonucleotide
  Target: PCSK9; (-) strand; PAM type: YTN; PAM sequence: CTC
agactgtggccaagttcttc

SEQ ID NO: 20909 - DNA, 20 bp, Artificial Sequence
  Description of Artificial Sequence: Synthetic oligonucleotide
  Target: PCSK9; (-) strand; PAM type: YTN; PAM sequence: CTG
agaagctcagactgtggcca

SEQ ID NO: 20910 - DNA, 20 bp, Artificial Sequence
  Description of Artificial Sequence: Synthetic oligonucleotide
  Target: PCSK9; (-) strand; PAM type: YTN; PAM sequence: CTG
ccatacgcctgagaagctca

SEQ ID NO: 20911 - DNA, 20 bp, Artificial Sequence
  Description of Artificial Sequence: Synthetic oligonucleotide
  Target: PCSK9; (-) strand; PAM type: YTN; PAM sequence: CTC
accaggcagccctgccatac

SEQ ID NO: 20912 - DNA, 20 bp, Artificial Sequence
  Description of Artificial Sequence: Synthetic oligonucleotide
  Target: PCSK9; (-) strand; PAM type: YTN; PAM sequence: CTC
tcaccaggcagccctgccat

SEQ ID NO: 20913 - DNA, 20 bp, Artificial Sequence
  Description of Artificial Sequence: Synthetic oligonucleotide
  Target: PCSK9; (-) strand; PAM type: YTN; PAM sequence: TTC
cctctcaccaggcagccctg

SEQ ID NO: 20914 - DNA, 20 bp, Artificial Sequence
  Description of Artificial Sequence: Synthetic oligonucleotide
  Target: PCSK9; (-) strand; PAM type: YTN; PAM sequence: CTC
attccctctcaccaggcagc

SEQ ID NO: 20915 - DNA, 20 bp, Artificial Sequence
  Description of Artificial Sequence: Synthetic oligonucleotide
  Target: PCSK9; (-) strand; PAM type: YTN; PAM sequence: CTC
cagagcagggagctcattcc

SEQ ID NO: 20916 - DNA, 20 bp, Artificial Sequence
  Description of Artificial Sequence: Synthetic oligonucleotide
  Target: PCSK9; (-) strand; PAM type: YTN; PAM sequence: TTG
catacctccagagcagggag

SEQ ID NO: 20917 - DNA, 20 bp, Artificial Sequence
  Description of Artificial Sequence: Synthetic oligonucleotide
  Target: PCSK9; (-) strand; PAM type: YTN; PAM sequence: CTT
gcatacctccagagcaggga

SEQ ID NO: 20918 - DNA, 20 bp, Artificial Sequence
  Description of Artificial Sequence: Synthetic oligonucleotide
  Target: PCSK9; (-) strand; PAM type: YTN; PAM sequence: CTG
cttgcatacctccagagcag

SEQ ID NO: 20919 - DNA, 20 bp, Artificial Sequence
  Description of Artificial Sequence: Synthetic oligonucleotide
  Target: PCSK9; (-) strand; PAM type: YTN; PAM sequence: CTG
gcaggtgagagcccagtcct

SEQ ID NO: 20920 - DNA, 20 bp, Artificial Sequence
  Description of Artificial Sequence: Synthetic oligonucleotide
  Target: PCSK9; (-) strand; PAM type: YTN; PAM sequence: CTC
tggcaggtgagagcccagtc

SEQ ID NO: 20921 - DNA, 20 bp, Artificial Sequence
  Description of Artificial Sequence: Synthetic oligonucleotide
  Target: PCSK9; (-) strand; PAM type: YTN; PAM sequence: CTG
tggcctctggcaggtgagag

SEQ ID NO: 20922 - DNA, 20 bp, Artificial Sequence
  Description of Artificial Sequence: Synthetic oligonucleotide
  Target: PCSK9; (-) strand; PAM type: YTN; PAM sequence: CTC
tgtggcctctggcaggtgag

SEQ ID NO: 20923 - DNA, 20 bp, Artificial Sequence
  Description of Artificial Sequence: Synthetic oligonucleotide
  Target: PCSK9; (-) strand; PAM type: YTN; PAM sequence: CTG
gaaagctctgtggcctctgg

SEQ ID NO: 20924 - DNA, 20 bp, Artificial Sequence
  Description of Artificial Sequence: Synthetic oligonucleotide
  Target: PCSK9; (-) strand; PAM type: YTN; PAM sequence: CTC
tggaaagctctgtggcctct

SEQ ID NO: 20925 - DNA, 20 bp, Artificial Sequence
  Description of Artificial Sequence: Synthetic oligonucleotide
  Target: PCSK9; (-) strand; PAM type: YTN; PAM sequence: TTC
cagcctctggaaagctctgt

SEQ ID NO: 20926 - DNA, 20 bp, Artificial Sequence
  Description of Artificial Sequence: Synthetic oligonucleotide
  Target: PCSK9; (-) strand; PAM type: YTN; PAM sequence: CTT
ccagcctctggaaagctctg

SEQ ID NO: 20927 - DNA, 20 bp, Artificial Sequence
  Description of Artificial Sequence: Synthetic oligonucleotide
  Target: PCSK9; (-) strand; PAM type: YTN; PAM sequence: CTC
ttccagcctctggaaagctc

SEQ ID NO: 20928 - DNA, 20 bp, Artificial Sequence
  Description of Artificial Sequence: Synthetic oligonucleotide
  Target: PCSK9; (-) strand; PAM type: YTN; PAM sequence: TTG
gagtggcctcttccagcctc

SEQ ID NO: 20929 - DNA, 20 bp, Artificial Sequence
  Description of Artificial Sequence: Synthetic oligonucleotide
  Target: PCSK9; (-) strand; PAM type: YTN; PAM sequence: CTT
ggagtggcctcttccagcct

SEQ ID NO: 20930 - DNA, 20 bp, Artificial Sequence
  Description of Artificial Sequence: Synthetic oligonucleotide
  Target: PCSK9; (-) strand; PAM type: YTN; PAM sequence: CTC
aggggcaaagaggccttgga

SEQ ID NO: 20931 - DNA, 20 bp, Artificial Sequence
  Description of Artificial Sequence: Synthetic oligonucleotide
  Target: PCSK9; (-) strand; PAM type: YTN; PAM sequence: CTC
tcaggggcaaagaggccttg

SEQ ID NO: 20932 - DNA, 20 bp, Artificial Sequence
  Description of Artificial Sequence: Synthetic oligonucleotide
  Target: PCSK9; (-) strand; PAM type: YTN; PAM sequence: CTC
aagaagagccaccactctca

SEQ ID NO: 20933 - DNA, 20 bp, Artificial Sequence
  Description of Artificial Sequence: Synthetic oligonucleotide
  Target: PCSK9; (-) strand; PAM type: YTN; PAM sequence: CTG
tgacagcgtggcaaggtggc

SEQ ID NO: 20934 - DNA, 20 bp, Artificial Sequence
  Description of Artificial Sequence: Synthetic oligonucleotide
  Target: PCSK9; (-) strand; PAM type: YTN; PAM sequence: TTC
cctgtgacagcgtggcaagg

SEQ ID NO: 20935 - DNA, 20 bp, Artificial Sequence
  Description of Artificial Sequence: Synthetic oligonucleotide
  Target: PCSK9; (-) strand; PAM type: YTN; PAM sequence: CTA
gttccctgtgacagcgtggc

SEQ ID NO: 20936 - DNA, 20 bp, Artificial Sequence
  Description of Artificial Sequence: Synthetic oligonucleotide
  Target: PCSK9; (-) strand; PAM type: YTN; PAM sequence: CTG
ctagttccctgtgacagcgt

SEQ ID NO: 20937 - DNA, 20 bp, Artificial Sequence
  Description of Artificial Sequence: Synthetic oligonucleotide
  Target: PCSK9; (-) strand; PAM type: YTN; PAM sequence: TTC
caaacccccgggtgaggcag

SEQ ID NO: 20938 - DNA, 20 bp, Artificial Sequence
  Description of Artificial Sequence: Synthetic oligonucleotide
  Target: PCSK9; (-) strand; PAM type: YTN; PAM sequence: CTT
ccaaacccccgggtgaggca

SEQ ID NO: 20939 - DNA, 20 bp, Artificial Sequence
  Description of Artificial Sequence: Synthetic oligonucleotide
  Target: PCSK9; (-) strand; PAM type: YTN; PAM sequence: CTA
tcttccaaacccccgggtga

SEQ ID NO: 20940 - DNA, 20 bp, Artificial Sequence
  Description of Artificial Sequence: Synthetic oligonucleotide
  Target: PCSK9; (-) strand; PAM type: YTN; PAM sequence: CTC
tatcttccaaacccccgggt

SEQ ID NO: 20941 - DNA, 20 bp, Artificial Sequence
  Description of Artificial Sequence: Synthetic oligonucleotide
  Target: PCSK9; (-) strand; PAM type: YTN; PAM sequence: CTC
cctctatcttccaaaccccc

SEQ ID NO: 20942 - DNA, 20 bp, Artificial Sequence
  Description of Artificial Sequence: Synthetic oligonucleotide
  Target: PCSK9; (-) strand; PAM type: YTN; PAM sequence: CTA
ggcctccctctatcttccaa

SEQ ID NO: 20943 - DNA, 20 bp, Artificial Sequence
  Description of Artificial Sequence: Synthetic oligonucleotide
  Target: PCSK9; (-) strand; PAM type: YTN; PAM sequence: TTC
ctaggcctccctctatcttc

SEQ ID NO: 20944 - DNA, 20 bp, Artificial Sequence
  Description of Artificial Sequence: Synthetic oligonucleotide
  Target: PCSK9; (-) strand; PAM type: YTN; PAM sequence: CTT
cctaggcctccctctatctt

SEQ ID NO: 20945 - DNA, 20 bp, Artificial Sequence
  Description of Artificial Sequence: Synthetic oligonucleotide
  Target: PCSK9; (-) strand; PAM type: YTN; PAM sequence: CTC
ggatgagacacagggccctt

SEQ ID NO: 20946 - DNA, 20 bp, Artificial Sequence
  Description of Artificial Sequence: Synthetic oligonucleotide
  Target: PCSK9; (-) strand; PAM type: YTN; PAM sequence: CTG
gaaaggggcccagctcggat

SEQ ID NO: 20947 - DNA, 20 bp, Artificial Sequence
  Description of Artificial Sequence: Synthetic oligonucleotide
  Target: PCSK9; (-) strand; PAM type: YTN; PAM sequence: TTC
cagtgagaggctggaaaggg

SEQ ID NO: 20948 - DNA, 20 bp, Artificial Sequence
  Description of Artificial Sequence: Synthetic oligonucleotide
  Target: PCSK9; (-) strand; PAM type: YTN; PAM sequence: CTT
ccagtgagaggctggaaagg

SEQ ID NO: 20949 - DNA, 20 bp, Artificial Sequence
  Description of Artificial Sequence: Synthetic oligonucleotide
  Target: PCSK9; (-) strand; PAM type: YTN; PAM sequence: TTC
cttccagtgagaggctggaa

SEQ ID NO: 20950 - DNA, 20 bp, Artificial Sequence
  Description of Artificial Sequence: Synthetic oligonucleotide
  Target: PCSK9; (-) strand; PAM type: YTN; PAM sequence: CTT
ccttccagtgagaggctgga

SEQ ID NO: 20951 - DNA, 20 bp, Artificial Sequence
  Description of Artificial Sequence: Synthetic oligonucleotide
  Target: PCSK9; (-) strand; PAM type: YTN; PAM sequence: TTG
ggcttccttccagtgagagg

SEQ ID NO: 20952 - DNA, 20 bp, Artificial Sequence
  Description of Artificial Sequence: Synthetic oligonucleotide
  Target: PCSK9; (-) strand; PAM type: YTN; PAM sequence: CTT
gggcttccttccagtgagag

SEQ ID NO: 20953 - DNA, 20 bp, Artificial Sequence
  Description of Artificial Sequence: Synthetic oligonucleotide
  Target: PCSK9; (-) strand; PAM type: YTN; PAM sequence: CTG
gtaaaagcccccacaggaac

SEQ ID NO: 20954 - DNA, 20 bp, Artificial Sequence
  Description of Artificial Sequence: Synthetic oligonucleotide
  Target: PCSK9; (-) strand; PAM type: YTN; PAM sequence: CTG
caagcatggccagcagaggg

SEQ ID NO: 20955 - DNA, 20 bp, Artificial Sequence
  Description of Artificial Sequence: Synthetic oligonucleotide
  Target: PCSK9; (-) strand; PAM type: YTN; PAM sequence: CTG
ggacagggtcaggaggctgc

SEQ ID NO: 20956 - DNA, 20 bp, Artificial Sequence
  Description of Artificial Sequence: Synthetic oligonucleotide
  Target: PCSK9; (-) strand; PAM type: YTN; PAM sequence: CTG
ctgggacagggtcaggaggc

SEQ ID NO: 20957 - DNA, 20 bp, Artificial Sequence
  Description of Artificial Sequence: Synthetic oligonucleotide
  Target: PCSK9; (-) strand; PAM type: YTN; PAM sequence: CTG
tcctgctgggacagggtcag

SEQ ID NO: 20958 - DNA, 20 bp, Artificial Sequence
  Description of Artificial Sequence: Synthetic oligonucleotide
  Target: PCSK9; (-) strand; PAM type: YTN; PAM sequence: CTC
acaccagcccactgtcctgc

SEQ ID NO: 20959 - DNA, 20 bp, Artificial Sequence
  Description of Artificial Sequence: Synthetic oligonucleotide
  Target: PCSK9; (-) strand; PAM type: YTN; PAM sequence: CTG
cccgctcacaccagcccact

SEQ ID NO: 20960 - DNA, 20 bp, Artificial Sequence
  Description of Artificial Sequence: Synthetic oligonucleotide
  Target: PCSK9; (-) strand; PAM type: YTN; PAM sequence: TTC
ctgcccgctcacaccagccc

SEQ ID NO: 20961 - DNA, 20 bp, Artificial Sequence
  Description of Artificial Sequence: Synthetic oligonucleotide
  Target: PCSK9; (-) strand; PAM type: YTN; PAM sequence: CTA
agtgcaggcggttcctgccc

SEQ ID NO: 20962 - DNA, 20 bp, Artificial Sequence
  Description of Artificial Sequence: Synthetic oligonucleotide
  Target: PCSK9; (-) strand; PAM type: YTN; PAM sequence: TTC
taagtgcaggcggttcctgc

SEQ ID NO: 20963 - DNA, 20 bp, Artificial Sequence
  Description of Artificial Sequence: Synthetic oligonucleotide
  Target: PCSK9; (-) strand; PAM type: YTN; PAM sequence: CTT
ctaagtgcaggcggttcctg

SEQ ID NO: 20964 - DNA, 20 bp, Artificial Sequence
  Description of Artificial Sequence: Synthetic oligonucleotide
  Target: PCSK9; (-) strand; PAM type: YTN; PAM sequence: CTC
ggggaggcagccccacacct

SEQ ID NO: 20965 - DNA, 20 bp, Artificial Sequence
  Description of Artificial Sequence: Synthetic oligonucleotide
  Target: PCSK9; (-) strand; PAM type: YTN; PAM sequence: CTG
gggtgtggccccagcggcag

SEQ ID NO: 20966 - DNA, 20 bp, Artificial Sequence
  Description of Artificial Sequence: Synthetic oligonucleotide
  Target: PCSK9; (-) strand; PAM type: YTN; PAM sequence: CTG
ggcctggggtgtggccccag

SEQ ID NO: 20967 - DNA, 20 bp, Artificial Sequence
  Description of Artificial Sequence: Synthetic oligonucleotide
  Target: PCSK9; (-) strand; PAM type: YTN; PAM sequence: CTG
tggggtcccatccctgggcc

SEQ ID NO: 20968 - DNA, 20 bp, Artificial Sequence
  Description of Artificial Sequence: Synthetic oligonucleotide
  Target: PCSK9; (-) strand; PAM type: YTN; PAM sequence: CTG
caagatgatgtgaccactgt

SEQ ID NO: 20969 - DNA, 20 bp, Artificial Sequence
  Description of Artificial Sequence: Synthetic oligonucleotide
  Target: PCSK9; (-) strand; PAM type: YTN; PAM sequence: CTG
ctgcaagatgatgtgaccac

SEQ ID NO: 20970 - DNA, 20 bp, Artificial Sequence
  Description of Artificial Sequence: Synthetic oligonucleotide
  Target: PCSK9; (-) strand; PAM type: YTN; PAM sequence: TTC
tgctgcaagatgatgtgacc

SEQ ID NO: 20971 - DNA, 20 bp, Artificial Sequence
  Description of Artificial Sequence: Synthetic oligonucleotide
  Target: PCSK9; (-) strand; PAM type: YTN; PAM sequence: CTG
ggttctgctgcaagatgatg

SEQ ID NO: 20972 - DNA, 20 bp, Artificial Sequence
  Description of Artificial Sequence: Synthetic oligonucleotide
  Target: PCSK9; (-) strand; PAM type: YTN; PAM sequence: CTG
tacctgggttctgctgcaag

SEQ ID NO: 20973 - DNA, 20 bp, Artificial Sequence
  Description of Artificial Sequence: Synthetic oligonucleotide
  Target: PCSK9; (-) strand; PAM type: YTN; PAM sequence: CTC
caggagctgtacctgggttc

SEQ ID NO: 20974 - DNA, 20 bp, Artificial Sequence
  Description of Artificial Sequence: Synthetic oligonucleotide
  Target: PCSK9; (-) strand; PAM type: YTN; PAM sequence: CTG
ctccaggagctgtacctggg

SEQ ID NO: 20975 - DNA, 20 bp, Artificial Sequence
  Description of Artificial Sequence: Synthetic oligonucleotide
  Target: PCSK9; (-) strand; PAM type: YTN; PAM sequence: TTG
ggaccaccatctgctccagg

SEQ ID NO: 20976 - DNA, 20 bp, Artificial Sequence
  Description of Artificial Sequence: Synthetic oligonucleotide
  Target: PCSK9; (-) strand; PAM type: YTN; PAM sequence: CTT
gggaccaccatctgctccag

SEQ ID NO: 20977 - DNA, 20 bp, Artificial Sequence
  Description of Artificial Sequence: Synthetic oligonucleotide
  Target: PCSK9; (-) strand; PAM type: YTN; PAM sequence: CTG
gtcccacccgtgcttgggac

SEQ ID NO: 20978 - DNA, 20 bp, Artificial Sequence
  Description of Artificial Sequence: Synthetic oligonucleotide
  Target: PCSK9; (-) strand; PAM type: YTN; PAM sequence: TTC
tggtcccacccgtgcttggg

SEQ ID NO: 20979 - DNA, 20 bp, Artificial Sequence
  Description of Artificial Sequence: Synthetic oligonucleotide
  Target: PCSK9; (-) strand; PAM type: YTN; PAM sequence: TTT
ctggtcccacccgtgcttgg

SEQ ID NO: 20980 - DNA, 20 bp, Artificial Sequence
  Description of Artificial Sequence: Synthetic oligonucleotide
  Target: PCSK9; (-) strand; PAM type: YTN; PAM sequence: CTT
tctggtcccacccgtgcttg

SEQ ID NO: 20981 - DNA, 20 bp, Artificial Sequence
  Description of Artificial Sequence: Synthetic oligonucleotide
  Target: PCSK9; (-) strand; PAM type: YTN; PAM sequence: TTA
gcccaggtgagagtcctttc

SEQ ID NO: 20982 - DNA, 20 bp, Artificial Sequence
  Description of Artificial Sequence: Synthetic oligonucleotide
  Target: PCSK9; (-) strand; PAM type: YTN; PAM sequence: CTG
agttagcccaggtgagagtc

SEQ ID NO: 20983 - DNA, 20 bp, Artificial Sequence
  Description of Artificial Sequence: Synthetic oligonucleotide
  Target: PCSK9; (-) strand; PAM type: YTN; PAM sequence: CTG
cagctgagttagcccaggtg

SEQ ID NO: 20984 - DNA, 20 bp, Artificial Sequence
  Description of Artificial Sequence: Synthetic oligonucleotide
  Target: PCSK9; (-) strand; PAM type: YTN; PAM sequence: CTG
aggctgcagctgagttagcc

SEQ ID NO: 20985 - DNA, 20 bp, Artificial Sequence
  Description of Artificial Sequence: Synthetic oligonucleotide
  Target: PCSK9; (-) strand; PAM type: YTN; PAM sequence: CTC
gtcgtgtgtgaggagggaac

SEQ ID NO: 20986 - DNA, 20 bp, Artificial Sequence
  Description of Artificial Sequence: Synthetic oligonucleotide
  Target: PCSK9; (-) strand; PAM type: YTN; PAM sequence: TTC
ctcgtcgtgtgtgaggaggg

SEQ ID NO: 20987 - DNA, 20 bp, Artificial Sequence
  Description of Artificial Sequence: Synthetic oligonucleotide
  Target: PCSK9; (-) strand; PAM type: YTN; PAM sequence: TTC
cagtccatgttcctcgtcgt

SEQ ID NO: 20988 - DNA, 20 bp, Artificial Sequence
  Description of Artificial Sequence: Synthetic oligonucleotide
  Target: PCSK9; (-) strand; PAM type: YTN; PAM sequence: CTT
ccagtccatgttcctcgtcg

SEQ ID NO: 20989 - DNA, 20 bp, Artificial Sequence
  Description of Artificial Sequence: Synthetic oligonucleotide
  Target: PCSK9; (-) strand; PAM type: YTN; PAM sequence: CTG
ggcaggcttccagtccatgt

SEQ ID NO: 20990 - DNA, 20 bp, Artificial Sequence
  Description of Artificial Sequence: Synthetic oligonucleotide
  Target: PCSK9; (-) strand; PAM type: YTN; PAM sequence: CTG
ctgggcaggcttccagtcca

SEQ ID NO: 20991 - DNA, 20 bp, Artificial Sequence
  Description of Artificial Sequence: Synthetic oligonucleotide
  Target: PCSK9; (-) strand; PAM type: YTN; PAM sequence: CTG
gacgtaagccacacaacgca

SEQ ID NO: 20992 - DNA, 20 bp, Artificial Sequence
  Description of Artificial Sequence: Synthetic oligonucleotide
  Target: PCSK9; (-) strand; PAM type: YTN; PAM sequence: CTC
cctggacgtaagccacacaa

SEQ ID NO: 20993 - DNA, 20 bp, Artificial Sequence
  Description of Artificial Sequence: Synthetic oligonucleotide
  Target: PCSK9; (-) strand; PAM type: YTN; PAM sequence: TTC
cctccctggacgtaagccac

SEQ ID NO: 20994 - DNA, 20 bp, Artificial Sequence
  Description of Artificial Sequence: Synthetic oligonucleotide
  Target: PCSK9; (-) strand; PAM type: YTN; PAM sequence: CTT
ccctccctggacgtaagcca

SEQ ID NO: 20995 - DNA, 20 bp, Artificial Sequence
  Description of Artificial Sequence: Synthetic oligonucleotide
  Target: PCSK9; (-) strand; PAM type: YTN; PAM sequence: CTG
cttccctccctggacgtaag

SEQ ID NO: 20996 - DNA, 20 bp, Artificial Sequence
  Description of Artificial Sequence: Synthetic oligonucleotide
  Target: PCSK9; (-) strand; PAM type: YTN; PAM sequence: CTA
gaagacagcacagaggctgc

SEQ ID NO: 20997 - DNA, 20 bp, Artificial Sequence
  Description of Artificial Sequence: Synthetic oligonucleotide
  Target: PCSK9; (-) strand; PAM type: YTN; PAM sequence: TTA
tctagaagacagcacagagg

SEQ ID NO: 20998 - DNA, 20 bp, Artificial Sequence
  Description of Artificial Sequence: Synthetic oligonucleotide
  Target: PCSK9; (-) strand; PAM type: YTN; PAM sequence: CTT
atctagaagacagcacagag

SEQ ID NO: 20999 - DNA, 20 bp, Artificial Sequence
  Description of Artificial Sequence: Synthetic oligonucleotide
  Target: PCSK9; (-) strand; PAM type: YTN; PAM sequence: TTG
gcagacagcccggggaatac

SEQ ID NO: 21000 - DNA, 20 bp, Artificial Sequence
  Description of Artificial Sequence: Synthetic oligonucleotide
  Target: PCSK9; (-) strand; PAM type: YTN; PAM sequence: CTG
gatacattggcagacagccc

SEQ ID NO: 21001 - DNA, 20 bp, Artificial Sequence
  Description of Artificial Sequence: Synthetic oligonucleotide
  Target: PCSK9; (-) strand; PAM type: YTN; PAM sequence: CTG
acgggacaactggatacatt

SEQ ID NO: 21002 - DNA, 20 bp, Artificial Sequence
  Description of Artificial Sequence: Synthetic oligonucleotide
  Target: PCSK9; (-) strand; PAM type: YTN; PAM sequence: TTC
caggctgacgggacaactgg

SEQ ID NO: 21003 - DNA, 20 bp, Artificial Sequence
  Description of Artificial Sequence: Synthetic oligonucleotide
  Target: PCSK9; (-) strand; PAM type: YTN; PAM sequence: CTT
ccaggctgacgggacaactg

SEQ ID NO: 21004 - DNA, 20 bp, Artificial Sequence
  Description of Artificial Sequence: Synthetic oligonucleotide
  Target: PCSK9; (-) strand; PAM type: YTN; PAM sequence: CTC
agagcttccaggctgacggg

SEQ ID NO: 21005 - DNA, 20 bp, Artificial Sequence
  Description of Artificial Sequence: Synthetic oligonucleotide
  Target: PCSK9; (-) strand; PAM type: YTN; PAM sequence: TTC
cctcagagcttccaggctga

SEQ ID NO: 21006 - DNA, 20 bp, Artificial Sequence
  Description of Artificial Sequence: Synthetic oligonucleotide
  Target: PCSK9; (-) strand; PAM type: YTN; PAM sequence: TTT
ccctcagagcttccaggctg

SEQ ID NO: 21007 - DNA, 20 bp, Artificial Sequence
  Description of Artificial Sequence: Synthetic oligonucleotide
  Target: PCSK9; (-) strand; PAM type: YTN; PAM sequence: TTT
tccctcagagcttccaggct

SEQ ID NO: 21008 - DNA, 20 bp, Artificial Sequence
  Description of Artificial Sequence: Synthetic oligonucleotide
  Target: PCSK9; (-) strand; PAM type: YTN; PAM sequence: CTC
aggaagcagcccaaggtttt

SEQ ID NO: 21009 - DNA, 20 bp, Artificial Sequence
  Description of Artificial Sequence: Synthetic oligonucleotide
  Target: PCSK9; (-) strand; PAM type: YTN; PAM sequence: CTG
caggggatacaggtgctcag

SEQ ID NO: 21010 - DNA, 20 bp, Artificial Sequence
  Description of Artificial Sequence: Synthetic oligonucleotide
  Target: PCSK9; (-) strand; PAM type: YTN; PAM sequence: CTG
gctgcaggggatacaggtgc

SEQ ID NO: 21011 - DNA, 20 bp, Artificial Sequence
  Description of Artificial Sequence: Synthetic oligonucleotide
  Target: PCSK9; (-) strand; PAM type: YTN; PAM sequence: CTA
gcagaggccccgggctggct

SEQ ID NO: 21012 - DNA, 20 bp, Artificial Sequence
  Description of Artificial Sequence: Synthetic oligonucleotide
  Target: PCSK9; (-) strand; PAM type: YTN; PAM sequence: CTC
ctagcagaggccccgggctg

SEQ ID NO: 21013 - DNA, 20 bp, Artificial Sequence
  Description of Artificial Sequence: Synthetic oligonucleotide
  Target: PCSK9; (-) strand; PAM type: YTN; PAM sequence: CTG
ctcctagcagaggccccggg

SEQ ID NO: 21014 - DNA, 20 bp, Artificial Sequence
  Description of Artificial Sequence: Synthetic oligonucleotide
  Target: PCSK9; (-) strand; PAM type: YTN; PAM sequence: CTC
agtctgctcctagcagaggc

SEQ ID NO: 21015 - DNA, 20 bp, Artificial Sequence
  Description of Artificial Sequence: Synthetic oligonucleotide
  Target: PCSK9; (-) strand; PAM type: YTN; PAM sequence: CTA
tggaatgtcgaaggggcaga

SEQ ID NO: 21016 - DNA, 20 bp, Artificial Sequence
  Description of Artificial Sequence: Synthetic oligonucleotide
  Target: PCSK9; (-) strand; PAM type: YTN; PAM sequence: CTG
ggctatggaatgtcgaaggg

SEQ ID NO: 21017 - DNA, 20 bp, Artificial Sequence
  Description of Artificial Sequence: Synthetic oligonucleotide
  Target: PCSK9; (-) strand; PAM type: YTN; PAM sequence: TTG
agctgggctatggaatgtcg

SEQ ID NO: 21018 - DNA, 20 bp, Artificial Sequence
  Description of Artificial Sequence: Synthetic oligonucleotide
  Target: PCSK9; (-) strand; PAM type: YTN; PAM sequence: CTA
gatattgagctgggctatgg

SEQ ID NO: 21019 - DNA, 20 bp, Artificial Sequence
  Description of Artificial Sequence: Synthetic oligonucleotide
  Target: PCSK9; (-) strand; PAM type: YTN; PAM sequence: CTA
gaggaaccactagatattga

SEQ ID NO: 21020 - DNA, 20 bp, Artificial Sequence
  Description of Artificial Sequence: Synthetic oligonucleotide
  Target: PCSK9; (-) strand; PAM type: YTN; PAM sequence: CTC
gccaccctagaggaaccact

SEQ ID NO: 21021 - DNA, 20 bp, Artificial Sequence
  Description of Artificial Sequence: Synthetic oligonucleotide
  Target: PCSK9; (-) strand; PAM type: YTN; PAM sequence: CTG
gagaccaaacagtgctcgcc

SEQ ID NO: 21022 - DNA, 20 bp, Artificial Sequence
  Description of Artificial Sequence: Synthetic oligonucleotide
  Target: PCSK9; (-) strand; PAM type: YTN; PAM sequence: CTG
aagacatctggagaccaaac

SEQ ID NO: 21023 - DNA, 20 bp, Artificial Sequence
  Description of Artificial Sequence: Synthetic oligonucleotide
  Target: PCSK9; (-) strand; PAM type: YTN; PAM sequence: CTC
cgacctgaagacatctggag

SEQ ID NO: 21024 - DNA, 20 bp, Artificial Sequence
  Description of Artificial Sequence: Synthetic oligonucleotide
  Target: PCSK9; (-) strand; PAM type: YTN; PAM sequence: CTG
tgagctccgacctgaagaca

SEQ ID NO: 21025 - DNA, 20 bp, Artificial Sequence
  Description of Artificial Sequence: Synthetic oligonucleotide
  Target: PCSK9; (-) strand; PAM type: YTN; PAM sequence: CTG
agagcgctgtgagctccgac

SEQ ID NO: 21026 - DNA, 20 bp, Artificial Sequence
  Description of Artificial Sequence: Synthetic oligonucleotide
  Target: PCSK9; (-) strand; PAM type: YTN; PAM sequence: CTG
ggaaggggtggctgagagcg

SEQ ID NO: 21027 - DNA, 20 bp, Artificial Sequence
  Description of Artificial Sequence: Synthetic oligonucleotide
  Target: PCSK9; (-) strand; PAM type: YTN; PAM sequence: CTA
cactgggaaggggtggctga

SEQ ID NO: 21028 - DNA, 20 bp, Artificial Sequence
  Description of Artificial Sequence: Synthetic oligonucleotide
  Target: PCSK9; (-) strand; PAM type: YTN; PAM sequence: CTA
ccatgtgcccggtgctacac

SEQ ID NO: 21029 - DNA, 20 bp, Artificial Sequence
  Description of Artificial Sequence: Synthetic oligonucleotide
  Target: PCSK9; (-) strand; PAM type: YTN; PAM sequence: CTC
atcaataggcatctaccatg

SEQ ID NO: 21030 - DNA, 20 bp, Artificial Sequence
  Description of Artificial Sequence: Synthetic oligonucleotide
  Target: PCSK9; (-) strand; PAM type: YTN; PAM sequence: TTC
actcatcaataggcatctac

SEQ ID NO: 21031 - DNA, 20 bp, Artificial Sequence
  Description of Artificial Sequence: Synthetic oligonucleotide
  Target: PCSK9; (-) strand; PAM type: YTN; PAM sequence: TTT
cactcatcaataggcatcta

SEQ ID NO: 21032 - DNA, 20 bp, Artificial Sequence
  Description of Artificial Sequence: Synthetic oligonucleotide
  Target: PCSK9; (-) strand; PAM type: YTN; PAM sequence: CTT
tcactcatcaataggcatct

SEQ ID NO: 21033 - DNA, 20 bp, Artificial Sequence
  Description of Artificial Sequence: Synthetic oligonucleotide
  Target: PCSK9; (-) strand; PAM type: YTN; PAM sequence: TTA
ggagctttcactcatcaata

SEQ ID NO: 21034 - DNA, 20 bp, Artificial Sequence
  Description of Artificial Sequence: Synthetic oligonucleotide
  Target: PCSK9; (-) strand; PAM type: YTN; PAM sequence: CTG
agtgtgttaggagctttcac

SEQ ID NO: 21035 - DNA, 20 bp, Artificial Sequence
  Description of Artificial Sequence: Synthetic oligonucleotide
  Target: PCSK9; (-) strand; PAM type: YTN; PAM sequence: CTC
tgagtgtgttaggagctttc

SEQ ID NO: 21036 - DNA, 20 bp, Artificial Sequence
  Description of Artificial Sequence: Synthetic oligonucleotide
  Target: PCSK9; (-) strand; PAM type: YTN; PAM sequence: CTC
tctgagtgtgttaggagctt

SEQ ID NO: 21037 - DNA, 20 bp, Artificial Sequence
  Description of Artificial Sequence: Synthetic oligonucleotide
  Target: PCSK9; (-) strand; PAM type: YTN; PAM sequence: TTG
ctctctgagtgtgttaggag

SEQ ID NO: 21038 - DNA, 20 bp, Artificial Sequence
  Description of Artificial Sequence: Synthetic oligonucleotide
  Target: PCSK9; (-) strand; PAM type: YTN; PAM sequence: CTT
gctctctgagtgtgttagga

SEQ ID NO: 21039 - DNA, 20 bp, Artificial Sequence
  Description of Artificial Sequence: Synthetic oligonucleotide
  Target: PCSK9; (-) strand; PAM type: YTN; PAM sequence: CTG
tgggatgaggcggagtcctt

SEQ ID NO: 21040 - DNA, 20 bp, Artificial Sequence
  Description of Artificial Sequence: Synthetic oligonucleotide
  Target: PCSK9; (-) strand; PAM type: YTN; PAM sequence: CTC
ccaggctgtgggatgaggcg

SEQ ID NO: 21041 - DNA, 20 bp, Artificial Sequence
  Description of Artificial Sequence: Synthetic oligonucleotide
  Target: PCSK9; (-) strand; PAM type: YTN; PAM sequence: CTC
ctcccaggctgtgggatgag

SEQ ID NO: 21042 - DNA, 20 bp, Artificial Sequence
  Description of Artificial Sequence: Synthetic oligonucleotide
  Target: PCSK9; (-) strand; PAM type: YTN; PAM sequence: CTC
tcctcccaggctgtgggatg

SEQ ID NO: 21043 - DNA, 20 bp, Artificial Sequence
  Description of Artificial Sequence: Synthetic oligonucleotide
  Target: PCSK9; (-) strand; PAM type: YTN; PAM sequence: CTG
cctctcctcccaggctgtgg

SEQ ID NO: 21044 - DNA, 20 bp, Artificial Sequence
  Description of Artificial Sequence: Synthetic oligonucleotide
  Target: PCSK9; (-) strand; PAM type: YTN; PAM sequence: TTG
gcagtctgcctctcctccca

SEQ ID NO: 21045 - DNA, 20 bp, Artificial Sequence
  Description of Artificial Sequence: Synthetic oligonucleotide
  Target: PCSK9; (-) strand; PAM type: YTN; PAM sequence: CTT
ggcagtctgcctctcctccc

SEQ ID NO: 21046 - DNA, 20 bp, Artificial Sequence
  Description of Artificial Sequence: Synthetic oligonucleotide
  Target: PCSK9; (-) strand; PAM type: YTN; PAM sequence: CTG
agcaggtccttggcagtctg

SEQ ID NO: 21047 - DNA, 20 bp, Artificial Sequence
  Description of Artificial Sequence: Synthetic oligonucleotide
  Target: PCSK9; (-) strand; PAM type: YTN; PAM sequence: CTG
tagcatgctgagcaggtcct

SEQ ID NO: 21048 - DNA, 20 bp, Artificial Sequence
  Description of Artificial Sequence: Synthetic oligonucleotide
  Target: PCSK9; (-) strand; PAM type: YTN; PAM sequence: TTC
tgtagcatgctgagcaggtc

SEQ ID NO: 21049 - DNA, 20 bp, Artificial Sequence
  Description of Artificial Sequence: Synthetic oligonucleotide
  Target: PCSK9; (-) strand; PAM type: YTN; PAM sequence: CTT
ctgtagcatgctgagcaggt

SEQ ID NO: 21050 - DNA, 20 bp, Artificial Sequence
  Description of Artificial Sequence: Synthetic oligonucleotide
  Target: PCSK9; (-) strand; PAM type: YTN; PAM sequence: TTC
ttctgtagcatgctgagcag

SEQ ID NO: 21051 - DNA, 20 bp, Artificial Sequence
  Description of Artificial Sequence: Synthetic oligonucleotide
  Target: PCSK9; (-) strand; PAM type: YTN; PAM sequence: TTT
cttctgtagcatgctgagca

SEQ ID NO: 21052 - DNA, 20 bp, Artificial Sequence
  Description of Artificial Sequence: Synthetic oligonucleotide
  Target: PCSK9; (-) strand; PAM type: YTN; PAM sequence: TTG
gtttcttctgtagcatgctg

SEQ ID NO: 21053 - DNA, 20 bp, Artificial Sequence
  Description of Artificial Sequence: Synthetic oligonucleotide
  Target: PCSK9; (-) strand; PAM type: YTN; PAM sequence: TTT
ggtttcttctgtagcatgct

SEQ ID NO: 21054 - DNA, 20 bp, Artificial Sequence
  Description of Artificial Sequence: Synthetic oligonucleotide
  Target: PCSK9; (-) strand; PAM type: YTN; PAM sequence: CTT
tggtttcttctgtagcatgc

SEQ ID NO: 21055 - DNA, 20 bp, Artificial Sequence
  Description of Artificial Sequence: Synthetic oligonucleotide
  Target: PCSK9; (-) strand; PAM type: YTN; PAM sequence: CTG
atcagtcccgtgggcacttt

SEQ ID NO: 21056 - DNA, 20 bp, Artificial Sequence
  Description of Artificial Sequence: Synthetic oligonucleotide
  Target: PCSK9; (-) strand; PAM type: YTN; PAM sequence: CTC
cactgatcagtcccgtgggc

SEQ ID NO: 21057 - DNA, 20 bp, Artificial Sequence
  Description of Artificial Sequence: Synthetic oligonucleotide
  Target: PCSK9; (-) strand; PAM type: YTN; PAM sequence: CTC
ggcaggaagctccactgatc

SEQ ID NO: 21058 - DNA, 20 bp, Artificial Sequence
  Description of Artificial Sequence: Synthetic oligonucleotide
  Target: PCSK9; (-) strand; PAM type: YTN; PAM sequence: CTC
cagtctcggcaggaagctcc

SEQ ID NO: 21059 - DNA, 20 bp, Artificial Sequence
  Description of Artificial Sequence: Synthetic oligonucleotide
  Target: PCSK9; (-) strand; PAM type: YTN; PAM sequence: CTA
aggcctccagtctcggcagg

SEQ ID NO: 21060 - DNA, 20 bp, Artificial Sequence
  Description of Artificial Sequence: Synthetic oligonucleotide
  Target: PCSK9; (-) strand; PAM type: YTN; PAM sequence: CTG
ccctaaggcctccagtctcg

SEQ ID NO: 21061 - DNA, 20 bp, Artificial Sequence
  Description of Artificial Sequence: Synthetic oligonucleotide
  Target: PCSK9; (-) strand; PAM type: YTN; PAM sequence: CTA
ccctgccctaaggcctccag

SEQ ID NO: 21062 - DNA, 20 bp, Artificial Sequence
  Description of Artificial Sequence: Synthetic oligonucleotide
  Target: PCSK9; (-) strand; PAM type: YTN; PAM sequence: CTG
tctaccctgccctaaggcct

SEQ ID NO: 21063 - DNA, 20 bp, Artificial Sequence
  Description of Artificial Sequence: Synthetic oligonucleotide
  Target: PCSK9; (-) strand; PAM type: YTN; PAM sequence: CTG
cacacacactgtctaccctg

SEQ ID NO: 21064 - DNA, 20 bp, Artificial Sequence
  Description of Artificial Sequence: Synthetic oligonucleotide
  Target: PCSK9; (-) strand; PAM type: YTN; PAM sequence: CTG
tgagtccccagcctgcacac

SEQ ID NO: 21065 - DNA, 20 bp, Artificial Sequence
  Description of Artificial Sequence: Synthetic oligonucleotide
  Target: PCSK9; (-) strand; PAM type: YTN; PAM sequence: CTG
ggcacagtccgaactgtgag

SEQ ID NO: 21066 - DNA, 20 bp, Artificial Sequence
  Description of Artificial Sequence: Synthetic oligonucleotide
  Target: PCSK9; (-) strand; PAM type: YTN; PAM sequence: CTA
gtaggtctgggcacagtccg

SEQ ID NO: 21067 - DNA, 20 bp, Artificial Sequence
  Description of Artificial Sequence: Synthetic oligonucleotide
  Target: PCSK9; (-) strand; PAM type: YTN; PAM sequence: CTA
tgctagtaggtctgggcaca

SEQ ID NO: 21068 - DNA, 20 bp, Artificial Sequence
  Description of Artificial Sequence: Synthetic oligonucleotide
  Target: PCSK9; (-) strand; PAM type: YTN; PAM sequence: CTC
ccacccacccactatgctag

SEQ ID NO: 21069 - DNA, 20 bp, Artificial Sequence
  Description of Artificial Sequence: Synthetic oligonucleotide
  Target: PCSK9; (-) strand; PAM type: YTN; PAM sequence: TTC
aggcaaggtcggcccccagt

SEQ ID NO: 21070 - DNA, 20 bp, Artificial Sequence
  Description of Artificial Sequence: Synthetic oligonucleotide
  Target: PCSK9; (-) strand; PAM type: YTN; PAM sequence: TTT
caggcaaggtcggcccccag

SEQ ID NO: 21071 - DNA, 20 bp, Artificial Sequence
  Description of Artificial Sequence: Synthetic oligonucleotide
  Target: PCSK9; (-) strand; PAM type: YTN; PAM sequence: CTG
agatcccacatgaatttcag

SEQ ID NO: 21072 - DNA, 20 bp, Artificial Sequence
  Description of Artificial Sequence: Synthetic oligonucleotide
  Target: PCSK9; (-) strand; PAM type: YTN; PAM sequence: CTC
tgagatcccacatgaatttc

SEQ ID NO: 21073 - DNA, 20 bp, Artificial Sequence
  Description of Artificial Sequence: Synthetic oligonucleotide
  Target: PCSK9; (-) strand; PAM type: YTN; PAM sequence: CTG
ctctgagatcccacatgaat

SEQ ID NO: 21074 - DNA, 20 bp, Artificial Sequence
  Description of Artificial Sequence: Synthetic oligonucleotide
  Target: PCSK9; (-) strand; PAM type: YTN; PAM sequence: TTC
agtggctgctctgagatccc

SEQ ID NO: 21075 - DNA, 20 bp, Artificial Sequence
  Description of Artificial Sequence: Synthetic oligonucleotide
  Target: PCSK9; (-) strand; PAM type: YTN; PAM sequence: CTA
cagagcaattcagtggctgc

SEQ ID NO: 21076 - DNA, 20 bp, Artificial Sequence
  Description of Artificial Sequence: Synthetic oligonucleotide
  Target: PCSK9; (-) strand; PAM type: YTN; PAM sequence: TTA
gccccctacagagcaattca

SEQ ID NO: 21077 - DNA, 20 bp, Artificial Sequence
  Description of Artificial Sequence: Synthetic oligonucleotide
  Target: PCSK9; (-) strand; PAM type: YTN; PAM sequence: TTT
agccccctacagagcaattc

SEQ ID NO: 21078 - DNA, 20 bp, Artificial Sequence
  Description of Artificial Sequence: Synthetic oligonucleotide
  Target: PCSK9; (-) strand; PAM type: YTN; PAM sequence: CTA
tttagccccctacagagcaa

SEQ ID NO: 21079 - DNA, 20 bp, Artificial Sequence
  Description of Artificial Sequence: Synthetic oligonucleotide
  Target: PCSK9; (-) strand; PAM type: YTN; PAM sequence: CTG
tgggggccactatttagccc

SEQ ID NO: 21080 - DNA, 20 bp, Artificial Sequence
  Description of Artificial Sequence: Synthetic oligonucleotide
  Target: PCSK9; (-) strand; PAM type: YTN; PAM sequence: CTG
ggtgtgtgtatctgtggggg

SEQ ID NO: 21081 - DNA, 20 bp, Artificial Sequence
  Description of Artificial Sequence: Synthetic oligonucleotide
  Target: PCSK9; (-) strand; PAM type: YTN; PAM sequence: CTG
tctgggtgtgtgtatctgtg

SEQ ID NO: 21082 - DNA, 20 bp, Artificial Sequence
  Description of Artificial Sequence: Synthetic oligonucleotide
  Target: PCSK9; (-) strand; PAM type: YTN; PAM sequence: CTC
tgtctgggtgtgtgtatctg

SEQ ID NO: 21083 - DNA, 20 bp, Artificial Sequence
  Description of Artificial Sequence: Synthetic oligonucleotide
  Target: PCSK9; (-) strand; PAM type: YTN; PAM sequence: CTC
acaggctctgtctgggtgtg

SEQ ID NO: 21084 - DNA, 20 bp, Artificial Sequence
  Description of Artificial Sequence: Synthetic oligonucleotide
  Target: PCSK9; (-) strand; PAM type: YTN; PAM sequence: CTG
gctcacaggctctgtctggg

SEQ ID NO: 21085 - DNA, 20 bp, Artificial Sequence
  Description of Artificial Sequence: Synthetic oligonucleotide
  Target: PCSK9; (-) strand; PAM type: YTN; PAM sequence: CTC
caaataaggtctggctcaca

SEQ ID NO: 21086 - DNA, 20 bp, Artificial Sequence
  Description of Artificial Sequence: Synthetic oligonucleotide
  Target: PCSK9; (-) strand; PAM type: YTN; PAM sequence: TTC
tccaaataaggtctggctca

SEQ ID NO: 21087 - DNA, 20 bp, Artificial Sequence
  Description of Artificial Sequence: Synthetic oligonucleotide
  Target: PCSK9; (-) strand; PAM type: YTN; PAM sequence: TTT
ctccaaataaggtctggctc

SEQ ID NO: 21088 - DNA, 20 bp, Artificial Sequence
  Description of Artificial Sequence: Synthetic oligonucleotide
  Target: PCSK9; (-) strand; PAM type: YTN; PAM sequence: TTT
tctccaaataaggtctggct

SEQ ID NO: 21089 - DNA, 20 bp, Artificial Sequence
  Description of Artificial Sequence: Synthetic oligonucleotide
  Target: PCSK9; (-) strand; PAM type: YTN; PAM sequence: CTT
ttctccaaataaggtctggc

SEQ ID NO: 21090 - DNA, 20 bp, Artificial Sequence
  Description of Artificial Sequence: Synthetic oligonucleotide
  Target: PCSK9; (-) strand; PAM type: YTN; PAM sequence: CTA
caaagaccttttctccaaat

SEQ ID NO: 21091 - DNA, 20 bp, Artificial Sequence
  Description of Artificial Sequence: Synthetic oligonucleotide
  Target: PCSK9; (-) strand; PAM type: YTN; PAM sequence: TTA
catctacaaagaccttttct

SEQ ID NO: 21092 - DNA, 20 bp, Artificial Sequence
  Description of Artificial Sequence: Synthetic oligonucleotide
  Target: PCSK9; (-) strand; PAM type: YTN; PAM sequence: TTA
attacatctacaaagacctt

SEQ ID NO: 21093 - DNA, 20 bp, Artificial Sequence
  Description of Artificial Sequence: Synthetic oligonucleotide
  Target: PCSK9; (-) strand; PAM type: YTN; PAM sequence: CTT
aattacatctacaaagacct

SEQ ID NO: 21094 - DNA, 20 bp, Artificial Sequence
  Description of Artificial Sequence: Synthetic oligonucleotide
  Target: PCSK9; (-) strand; PAM type: YTN; PAM sequence: TTG
agatgcttaattacatctac

SEQ ID NO: 21095 - DNA, 20 bp, Artificial Sequence
  Description of Artificial Sequence: Synthetic oligonucleotide
  Target: PCSK9; (-) strand; PAM type: YTN; PAM sequence: CTT
gagatgcttaattacatcta

SEQ ID NO: 21096 - DNA, 20 bp, Artificial Sequence
  Description of Artificial Sequence: Synthetic oligonucleotide
  Target: PCSK9; (-) strand; PAM type: YTN; PAM sequence: TTA
cagcccaccgcataatccag

SEQ ID NO: 21097 - DNA, 20 bp, Artificial Sequence
  Description of Artificial Sequence: Synthetic oligonucleotide
  Target: PCSK9; (-) strand; PAM type: YTN; PAM sequence: CTT
acagcccaccgcataatcca

SEQ ID NO: 21098 - DNA, 20 bp, Artificial Sequence
  Description of Artificial Sequence: Synthetic oligonucleotide
  Target: PCSK9; (-) strand; PAM type: YTN; PAM sequence: CTC
ataaagacacatcacaggac

SEQ ID NO: 21099 - DNA, 20 bp, Artificial Sequence
  Description of Artificial Sequence: Synthetic oligonucleotide
  Target: PCSK9; (-) strand; PAM type: YTN; PAM sequence: CTC
tcataaagacacatcacagg

SEQ ID NO: 21100 - DNA, 20 bp, Artificial Sequence
  Description of Artificial Sequence: Synthetic oligonucleotide
  Target: PCSK9; (-) strand; PAM type: YTN; PAM sequence: TTC
tctcataaagacacatcaca

SEQ ID NO: 21101 - DNA, 20 bp, Artificial Sequence
  Description of Artificial Sequence: Synthetic oligonucleotide
  Target: PCSK9; (-) strand; PAM type: YTN; PAM sequence: TTT
ctctcataaagacacatcac

SEQ ID NO: 21102 - DNA, 20 bp, Artificial Sequence
  Description of Artificial Sequence: Synthetic oligonucleotide
  Target: PCSK9; (-) strand; PAM type: YTN; PAM sequence: CTT
tctctcataaagacacatca

SEQ ID NO: 21103 - DNA, 20 bp, Artificial Sequence
  Description of Artificial Sequence: Synthetic oligonucleotide
  Target: PCSK9; (-) strand; PAM type: YTN; PAM sequence: CTG
cctttctctcataaagacac

SEQ ID NO: 21104 - DNA, 20 bp, Artificial Sequence
  Description of Artificial Sequence: Synthetic oligonucleotide
  Target: PCSK9; (-) strand; PAM type: YTN; PAM sequence: CTC
tgcctttctctcataaagac

SEQ ID NO: 21105 - DNA, 20 bp, Artificial Sequence
  Description of Artificial Sequence: Synthetic oligonucleotide
  Target: PCSK9; (-) strand; PAM type: YTN; PAM sequence: CTC
cctctgcctttctctcataa

SEQ ID NO: 21106 - DNA, 20 bp, Artificial Sequence
  Description of Artificial Sequence: Synthetic oligonucleotide
  Target: PCSK9; (-) strand; PAM type: YTN; PAM sequence: CTG
tgtgtgtcaaatctccctct

SEQ ID NO: 21107 - DNA, 20 bp, Artificial Sequence
  Description of Artificial Sequence: Synthetic oligonucleotide
  Target: PCSK9; (-) strand; PAM type: YTN; PAM sequence: CTC
ctgtgtgtgtcaaatctccc

SEQ ID NO: 21108 - DNA, 20 bp, Artificial Sequence
  Description of Artificial Sequence: Synthetic oligonucleotide
  Target: PCSK9; (-) strand; PAM type: YTN; PAM sequence: CTC
cacgtggcccctcctgtgtg

SEQ ID NO: 21109 - DNA, 20 bp, Artificial Sequence
  Description of Artificial Sequence: Synthetic oligonucleotide
  Target: PCSK9; (-) strand; PAM type: YTN; PAM sequence: CTG
tctccacgtggcccctcctg

SEQ ID NO: 21110 - DNA, 20 bp, Artificial Sequence
  Description of Artificial Sequence: Synthetic oligonucleotide
  Target: PCSK9; (-) strand; PAM type: YTN; PAM sequence: CTC
tgtctccacgtggcccctcc

SEQ ID NO: 21111 - DNA, 20 bp, Artificial Sequence
  Description of Artificial Sequence: Synthetic oligonucleotide
  Target: PCSK9; (-) strand; PAM type: YTN; PAM sequence: CTC
cacctctgtctccacgtggc

SEQ ID NO: 21112 - DNA, 20 bp, Artificial Sequence
  Description of Artificial Sequence: Synthetic oligonucleotide
  Target: PCSK9; (-) strand; PAM type: YTN; PAM sequence: CTC
caatctccacctctgtctcc

SEQ ID NO: 21113 - DNA, 20 bp, Artificial Sequence
  Description of Artificial Sequence: Synthetic oligonucleotide
  Target: PCSK9; (-) strand; PAM type: YTN; PAM sequence: TTC
tccaatctccacctctgtct

SEQ ID NO: 21114 - DNA, 20 bp, Artificial Sequence
  Description of Artificial Sequence: Synthetic oligonucleotide
  Target: PCSK9; (-) strand; PAM type: YTN; PAM sequence: TTT
ctccaatctccacctctgtc

SEQ ID NO: 21115 - DNA, 20 bp, Artificial Sequence
  Description of Artificial Sequence: Synthetic oligonucleotide
  Target: PCSK9; (-) strand; PAM type: YTN; PAM sequence: TTG
tggccacatttctccaatct

SEQ ID NO: 21116 - DNA, 20 bp, Artificial Sequence
  Description of Artificial Sequence: Synthetic oligonucleotide
  Target: PCSK9; (-) strand; PAM type: YTN; PAM sequence: CTT
gtggccacatttctccaatc

SEQ ID NO: 21117 - DNA, 20 bp, Artificial Sequence
  Description of Artificial Sequence: Synthetic oligonucleotide
  Target: PCSK9; (-) strand; PAM type: YTN; PAM sequence: CTG
gcttgtggccacatttctcc

SEQ ID NO: 21118 - DNA, 20 bp, Artificial Sequence
  Description of Artificial Sequence: Synthetic oligonucleotide
  Target: PCSK9; (-) strand; PAM type: YTN; PAM sequence: TTC
cctggcttgtggccacattt

SEQ ID NO: 21119 - DNA, 20 bp, Artificial Sequence
  Description of Artificial Sequence: Synthetic oligonucleotide
  Target: PCSK9; (-) strand; PAM type: YTN; PAM sequence: CTG
gtgttccctggcttgtggcc

SEQ ID NO: 21120 - DNA, 20 bp, Artificial Sequence
  Description of Artificial Sequence: Synthetic oligonucleotide
  Target: PCSK9; (-) strand; PAM type: YTN; PAM sequence: CTG
ctggtgttccctggcttgtg

SEQ ID NO: 21121 - DNA, 20 bp, Artificial Sequence
  Description of Artificial Sequence: Synthetic oligonucleotide
  Target: PCSK9; (-) strand; PAM type: YTN; PAM sequence: CTG
gtggctgctggtgttccctg

SEQ ID NO: 21122 - DNA, 20 bp, Artificial Sequence
  Description of Artificial Sequence: Synthetic oligonucleotide
  Target: PCSK9; (-) strand; PAM type: YTN; PAM sequence: TTC
tggtggctgctggtgttccc

SEQ ID NO: 21123 - DNA, 20 bp, Artificial Sequence
  Description of Artificial Sequence: Synthetic oligonucleotide
  Target: PCSK9; (-) strand; PAM type: YTN; PAM sequence: CTT
ctggtggctgctggtgttcc

SEQ ID NO: 21124 - DNA, 20 bp, Artificial Sequence
  Description of Artificial Sequence: Synthetic oligonucleotide
  Target: PCSK9; (-) strand; PAM type: YTN; PAM sequence: TTC
cggcttctggtggctgctgg

SEQ ID NO: 21125 - DNA, 20 bp, Artificial Sequence
  Description of Artificial Sequence: Synthetic oligonucleotide
  Target: PCSK9; (-) strand; PAM type: YTN; PAM sequence: CTT
ccggcttctggtggctgctg

SEQ ID NO: 21126 - DNA, 20 bp, Artificial Sequence
  Description of Artificial Sequence: Synthetic oligonucleotide
  Target: PCSK9; (-) strand; PAM type: YTN; PAM sequence: CTC
acgtcttccggcttctggtg

SEQ ID NO: 21127 - DNA, 20 bp, Artificial Sequence
  Description of Artificial Sequence: Synthetic oligonucleotide
  Target: PCSK9; (-) strand; PAM type: YTN; PAM sequence: CTG
cctcacgtcttccggcttct

SEQ ID NO: 21128 - DNA, 20 bp, Artificial Sequence
  Description of Artificial Sequence: Synthetic oligonucleotide
  Target: PCSK9; (-) strand; PAM type: YTN; PAM sequence: CTG
ggaagaaccctgcctcacgt

SEQ ID NO: 21129 - DNA, 20 bp, Artificial Sequence
  Description of Artificial Sequence: Synthetic oligonucleotide
  Target: PCSK9; (-) strand; PAM type: YTN; PAM sequence: CTC
tgggaagaaccctgcctcac

SEQ ID NO: 21130 - DNA, 20 bp, Artificial Sequence
  Description of Artificial Sequence: Synthetic oligonucleotide
  Target: PCSK9; (-) strand; PAM type: YTN; PAM sequence: CTC
agcagcgaaggctctgggaa

SEQ ID NO: 21131 - DNA, 20 bp, Artificial Sequence
  Description of Artificial Sequence: Synthetic oligonucleotide
  Target: PCSK9; (-) strand; PAM type: YTN; PAM sequence: TTC
ccagactcagcagcgaaggc

SEQ ID NO: 21132 - DNA, 20 bp, Artificial Sequence
  Description of Artificial Sequence: Synthetic oligonucleotide
  Target: PCSK9; (-) strand; PAM type: YTN; PAM sequence: TTC
ggtcacaaattcccagactc

SEQ ID NO: 21133 - DNA, 20 bp, Artificial Sequence
  Description of Artificial Sequence: Synthetic oligonucleotide
  Target: PCSK9; (-) strand; PAM type: YTN; PAM sequence: CTT
cggtcacaaattcccagact

SEQ ID NO: 21134 - DNA, 20 bp, Artificial Sequence
  Description of Artificial Sequence: Synthetic oligonucleotide
  Target: PCSK9; (-) strand; PAM type: YTN; PAM sequence: TTA
tggcttcggtcacaaattcc

SEQ ID NO: 21135 - DNA, 20 bp, Artificial Sequence
  Description of Artificial Sequence: Synthetic oligonucleotide
  Target: PCSK9; (-) strand; PAM type: YTN; PAM sequence: CTT
atggcttcggtcacaaattc

SEQ ID NO: 21136 - DNA, 20 bp, Artificial Sequence
  Description of Artificial Sequence: Synthetic oligonucleotide
  Target: PCSK9; (-) strand; PAM type: YTN; PAM sequence: TTC
ttatggcttcggtcacaaat

SEQ ID NO: 21137 - DNA, 20 bp, Artificial Sequence
  Description of Artificial Sequence: Synthetic oligonucleotide
  Target: PCSK9; (-) strand; PAM type: YTN; PAM sequence: CTT
cttatggcttcggtcacaaa

SEQ ID NO: 21138 - DNA, 20 bp, Artificial Sequence
  Description of Artificial Sequence: Synthetic oligonucleotide
  Target: PCSK9; (-) strand; PAM type: YTN; PAM sequence: CTC
agggcgtgtacccacttctt

SEQ ID NO: 21139 - DNA, 20 bp, Artificial Sequence
  Description of Artificial Sequence: Synthetic oligonucleotide
  Target: PCSK9; (-) strand; PAM type: YTN; PAM sequence: CTC
aggacaggtgagcaagtgtg

SEQ ID NO: 21140 - DNA, 20 bp, Artificial Sequence
  Description of Artificial Sequence: Synthetic oligonucleotide
  Target: PCSK9; (-) strand; PAM type: YTN; PAM sequence: CTC
atctcaggacaggtgagcaa

SEQ ID NO: 21141 - DNA, 20 bp, Artificial Sequence
  Description of Artificial Sequence: Synthetic oligonucleotide
  Target: PCSK9; (-) strand; PAM type: YTN; PAM sequence: TTC
tcatctcaggacaggtgagc

SEQ ID NO: 21142 - DNA, 20 bp, Artificial Sequence
  Description of Artificial Sequence: Synthetic oligonucleotide
  Target: PCSK9; (-) strand; PAM type: YTN; PAM sequence: CTG
cagagtagagattctcatct

SEQ ID NO: 21143 - DNA, 20 bp, Artificial Sequence
  Description of Artificial Sequence: Synthetic oligonucleotide
  Target: PCSK9; (-) strand; PAM type: YTN; PAM sequence: CTC
caaatatgctgcagagtaga

SEQ ID NO: 21144 - DNA, 20 bp, Artificial Sequence
  Description of Artificial Sequence: Synthetic oligonucleotide
  Target: PCSK9; (-) strand; PAM type: YTN; PAM sequence: CTG
tggcccccgcagtgatcctc

SEQ ID NO: 21145 - DNA, 20 bp, Artificial Sequence
  Description of Artificial Sequence: Synthetic oligonucleotide
  Target: PCSK9; (-) strand; PAM type: YTN; PAM sequence: CTC
tgtggcccccgcagtgatcc

SEQ ID NO: 21146 - DNA, 20 bp, Artificial Sequence
  Description of Artificial Sequence: Synthetic oligonucleotide
  Target: PCSK9; (-) strand; PAM type: YTN; PAM sequence: CTG
aacagcacctctgtggcccc

SEQ ID NO: 21147 - DNA, 20 bp, Artificial Sequence
  Description of Artificial Sequence: Synthetic oligonucleotide
  Target: PCSK9; (-) strand; PAM type: YTN; PAM sequence: CTG
aagtgccatctgaacagcac

SEQ ID NO: 21148 - DNA, 20 bp, Artificial Sequence
  Description of Artificial Sequence: Synthetic oligonucleotide
  Target: PCSK9; (-) strand; PAM type: YTN; PAM sequence: TTC
tgaagtgccatctgaacagc

SEQ ID NO: 21149 - DNA, 20 bp, Artificial Sequence
  Description of Artificial Sequence: Synthetic oligonucleotide
  Target: PCSK9; (-) strand; PAM type: YTN; PAM sequence: CTT
ctgaagtgccatctgaacag

SEQ ID NO: 21150 - DNA, 20 bp, Artificial Sequence
  Description of Artificial Sequence: Synthetic oligonucleotide
  Target: PCSK9; (-) strand; PAM type: YTN; PAM sequence: CTG
agtcttctgaagtgccatct

SEQ ID NO: 21151 - DNA, 20 bp, Artificial Sequence
  Description of Artificial Sequence: Synthetic oligonucleotide
  Target: PCSK9; (-) strand; PAM type: YTN; PAM sequence: CTC
ctgagtcttctgaagtgcca

SEQ ID NO: 21152 - DNA, 20 bp, Artificial Sequence
  Description of Artificial Sequence: Synthetic oligonucleotide
  Target: PCSK9; (-) strand; PAM type: YTN; PAM sequence: CTG
ccccagggtctcctgagtct

SEQ ID NO: 21153 - DNA, 20 bp, Artificial Sequence
  Description of Artificial Sequence: Synthetic oligonucleotide
  Target: PCSK9; (-) strand; PAM type: YTN; PAM sequence: CTC
ctgccccagggtctcctgag

SEQ ID NO: 21154 - DNA, 20 bp, Artificial Sequence
  Description of Artificial Sequence: Synthetic oligonucleotide
  Target: PCSK9; (-) strand; PAM type: YTN; PAM sequence: CTG
ctcctgccccagggtctcct

SEQ ID NO: 21155 - DNA, 20 bp, Artificial Sequence
  Description of Artificial Sequence: Synthetic oligonucleotide
  Target: PCSK9; (-) strand; PAM type: YTN; PAM sequence: CTG
tcagtcaaactgctcctgcc

SEQ ID NO: 21156 - DNA, 20 bp, Artificial Sequence
  Description of Artificial Sequence: Synthetic oligonucleotide
  Target: PCSK9; (-) strand; PAM type: YTN; PAM sequence: CTG
ggctgtcagtcaaactgctc

SEQ ID NO: 21157 - DNA, 20 bp, Artificial Sequence
  Description of Artificial Sequence: Synthetic oligonucleotide
  Target: PCSK9; (-) strand; PAM type: YTN; PAM sequence: CTC
tgggctgtcagtcaaactgc

SEQ ID NO: 21158 - DNA, 20 bp, Artificial Sequence
  Description of Artificial Sequence: Synthetic oligonucleotide
  Target: PCSK9; (-) strand; PAM type: YTN; PAM sequence: CTC
aggtggaatcagagggcagc

SEQ ID NO: 21159 - DNA, 20 bp, Artificial Sequence
  Description of Artificial Sequence: Synthetic oligonucleotide
  Target: PCSK9; (-) strand; PAM type: YTN; PAM sequence: CTG
cagccaggaaaagcagggcc

SEQ ID NO: 21160 - DNA, 20 bp, Artificial Sequence
  Description of Artificial Sequence: Synthetic oligonucleotide
  Target: PCSK9; (-) strand; PAM type: YTN; PAM sequence: CTG
gaacccctgcagccaggaaa

SEQ ID NO: 21161 - DNA, 20 bp, Artificial Sequence
  Description of Artificial Sequence: Synthetic oligonucleotide
  Target: PCSK9; (-) strand; PAM type: YTN; PAM sequence: CTG
gccctggaacccctgcagcc

SEQ ID NO: 21162 - DNA, 20 bp, Artificial Sequence
  Description of Artificial Sequence: Synthetic oligonucleotide
  Target: PCSK9; (-) strand; PAM type: YTN; PAM sequence: CTG
cgccagcggaaatggcctgg

SEQ ID NO: 21163 - DNA, 20 bp, Artificial Sequence
  Description of Artificial Sequence: Synthetic oligonucleotide
  Target: PCSK9; (-) strand; PAM type: YTN; PAM sequence: CTA
gcagagtcctgcgccagcgg

SEQ ID NO: 21164 - DNA, 20 bp, Artificial Sequence
  Description of Artificial Sequence: Synthetic oligonucleotide
  Target: PCSK9; (-) strand; PAM type: YTN; PAM sequence: CTG
ctagcagagtcctgcgccag

SEQ ID NO: 21165 - DNA, 20 bp, Artificial Sequence
  Description of Artificial Sequence: Synthetic oligonucleotide
  Target: PCSK9; (-) strand; PAM type: YTN; PAM sequence: TTG
ctgctagcagagtcctgcgc

SEQ ID NO: 21166 - DNA, 20 bp, Artificial Sequence
  Description of Artificial Sequence: Synthetic oligonucleotide
  Target: PCSK9; (-) strand; PAM type: YTN; PAM sequence: TTC
aggcaggttgctgctagcag

SEQ ID NO: 21167 - DNA, 20 bp, Artificial Sequence
  Description of Artificial Sequence: Synthetic oligonucleotide
  Target: PCSK9; (-) strand; PAM type: YTN; PAM sequence: CTT
caggcaggttgctgctagca

SEQ ID NO: 21168 - DNA, 20 bp, Artificial Sequence
  Description of Artificial Sequence: Synthetic oligonucleotide
  Target: PCSK9; (-) strand; PAM type: YTN; PAM sequence: CTC
agccaggccaaaggaagact

SEQ ID NO: 21169 - DNA, 20 bp, Artificial Sequence
  Description of Artificial Sequence: Synthetic oligonucleotide
  Target: PCSK9; (-) strand; PAM type: YTN; PAM sequence: CTC
tcagccaggccaaaggaaga

SEQ ID NO: 21170 - DNA, 20 bp, Artificial Sequence
  Description of Artificial Sequence: Synthetic oligonucleotide
  Target: PCSK9; (-) strand; PAM type: YTN; PAM sequence: CTC
agaaactctcagccaggcca

SEQ ID NO: 21171 - DNA, 20 bp, Artificial Sequence
  Description of Artificial Sequence: Synthetic oligonucleotide
  Target: PCSK9; (-) strand; PAM type: YTN; PAM sequence: CTC
cagcgcaggtctcagaaact

SEQ ID NO: 21172 - DNA, 20 bp, Artificial Sequence
  Description of Artificial Sequence: Synthetic oligonucleotide
  Target: PCSK9; (-) strand; PAM type: YTN; PAM sequence: CTC
cgctccagcgcaggtctcag

SEQ ID NO: 21173 - DNA, 20 bp, Artificial Sequence
  Description of Artificial Sequence: Synthetic oligonucleotide
  Target: PCSK9; (-) strand; PAM type: YTN; PAM sequence: CTG
gatggagaagggagagagga

SEQ ID NO: 21174 - DNA, 20 bp, Artificial Sequence
  Description of Artificial Sequence: Synthetic oligonucleotide
  Target: PCSK9; (-) strand; PAM type: YTN; PAM sequence: CTG
ctggatggagaagggagaga

SEQ ID NO: 21175 - DNA, 20 bp, Artificial Sequence
  Description of Artificial Sequence: Synthetic oligonucleotide
  Target: PCSK9; (-) strand; PAM type: YTN; PAM sequence: CTC
acagatgccaggcaggtcca

SEQ ID NO: 21176 - DNA, 20 bp, Artificial Sequence
  Description of Artificial Sequence: Synthetic oligonucleotide
  Target: PCSK9; (-) strand; PAM type: YTN; PAM sequence: TTA
gggtataggagaaagtaggg

SEQ ID NO: 21177 - DNA, 20 bp, Artificial Sequence
  Description of Artificial Sequence: Synthetic oligonucleotide
  Target: PCSK9; (-) strand; PAM type: YTN; PAM sequence: CTG
ggggagtcgcccatgcagga

SEQ ID NO: 21178 - DNA, 20 bp, Artificial Sequence
  Description of Artificial Sequence: Synthetic oligonucleotide
  Target: PCSK9; (-) strand; PAM type: YTN; PAM sequence: CTC
actgggggagtcgcccatgc

SEQ ID NO: 21179 - DNA, 20 bp, Artificial Sequence
  Description of Artificial Sequence: Synthetic oligonucleotide
  Target: PCSK9; (-) strand; PAM type: YTN; PAM sequence: CTG
caagagactcactgggggag

SEQ ID NO: 21180 - DNA, 20 bp, Artificial Sequence
  Description of Artificial Sequence: Synthetic oligonucleotide
  Target: PCSK9; (-) strand; PAM type: YTN; PAM sequence: CTG
gggtaaaagctgcaagagac

SEQ ID NO: 21181 - DNA, 20 bp, Artificial Sequence
  Description of Artificial Sequence: Synthetic oligonucleotide
  Target: PCSK9; (-) strand; PAM type: YTN; PAM sequence: CTC
caagaagcaggcactggggt

SEQ ID NO: 21182 - DNA, 20 bp, Artificial Sequence
  Description of Artificial Sequence: Synthetic oligonucleotide
  Target: PCSK9; (-) strand; PAM type: YTN; PAM sequence: TTC
tccaagaagcaggcactggg

SEQ ID NO: 21183 - DNA, 20 bp, Artificial Sequence
  Description of Artificial Sequence: Synthetic oligonucleotide
  Target: PCSK9; (-) strand; PAM type: YTN; PAM sequence: TTG
gattctccaagaagcaggca

SEQ ID NO: 21184 - DNA, 20 bp, Artificial Sequence
  Description of Artificial Sequence: Synthetic oligonucleotide
  Target: PCSK9; (-) strand; PAM type: YTN; PAM sequence: TTT
ggattctccaagaagcaggc

SEQ ID NO: 21185 - DNA, 20 bp, Artificial Sequence
  Description of Artificial Sequence: Synthetic oligonucleotide
  Target: PCSK9; (-) strand; PAM type: YTN; PAM sequence: CTG
gatcagtttggattctccaa

SEQ ID NO: 21186 - DNA, 20 bp, Artificial Sequence
  Description of Artificial Sequence: Synthetic oligonucleotide
  Target: PCSK9; (-) strand; PAM type: YTN; PAM sequence: CTA
actggatcagtttggattct

SEQ ID NO: 21187 - DNA, 20 bp, Artificial Sequence
  Description of Artificial Sequence: Synthetic oligonucleotide
  Target: PCSK9; (-) strand; PAM type: YTN; PAM sequence: TTA
tcatccctaactggatcagt

SEQ ID NO: 21188 - DNA, 20 bp, Artificial Sequence
  Description of Artificial Sequence: Synthetic oligonucleotide
  Target: PCSK9; (-) strand; PAM type: YTN; PAM sequence: TTT
atcatccctaactggatcag

SEQ ID NO: 21189 - DNA, 20 bp, Artificial Sequence
  Description of Artificial Sequence: Synthetic oligonucleotide
  Target: PCSK9; (-) strand; PAM type: YTN; PAM sequence: CTT
tatcatccctaactggatca

SEQ ID NO: 21190 - DNA, 20 bp, Artificial Sequence
  Description of Artificial Sequence: Synthetic oligonucleotide
  Target: PCSK9; (-) strand; PAM type: YTN; PAM sequence: CTA
cactttatcatccctaactg

SEQ ID NO: 21191 - DNA, 20 bp, Artificial Sequence
  Description of Artificial Sequence: Synthetic oligonucleotide
  Target: PCSK9; (-) strand; PAM type: YTN; PAM sequence: CTA
ccctacactttatcatccct

SEQ ID NO: 21192 - DNA, 20 bp, Artificial Sequence
  Description of Artificial Sequence: Synthetic oligonucleotide
  Target: PCSK9; (-) strand; PAM type: YTN; PAM sequence: CTC
agagaaaacagtcaccgagc

SEQ ID NO: 21193 - DNA, 20 bp, Artificial Sequence
  Description of Artificial Sequence: Synthetic oligonucleotide
  Target: PCSK9; (-) strand; PAM type: YTN; PAM sequence: CTC
acacgagtcacaacctcaga

SEQ ID NO: 21194 - DNA, 20 bp, Artificial Sequence
  Description of Artificial Sequence: Synthetic oligonucleotide
  Target: PCSK9; (-) strand; PAM type: YTN; PAM sequence: CTG
cctcacacgagtcacaacct

SEQ ID NO: 21195 - DNA, 20 bp, Artificial Sequence
  Description of Artificial Sequence: Synthetic oligonucleotide
  Target: PCSK9; (-) strand; PAM type: YTN; PAM sequence: TTC
tgcctcacacgagtcacaac

SEQ ID NO: 21196 - DNA, 20 bp, Artificial Sequence
  Description of Artificial Sequence: Synthetic oligonucleotide
  Target: PCSK9; (-) strand; PAM type: YTN; PAM sequence: CTT
ctgcctcacacgagtcacaa

SEQ ID NO: 21197 - DNA, 20 bp, Artificial Sequence
  Description of Artificial Sequence: Synthetic oligonucleotide
  Target: PCSK9; (-) strand; PAM type: YTN; PAM sequence: CTG
cttctgcctcacacgagtca

SEQ ID NO: 21198 - DNA, 20 bp, Artificial Sequence
  Description of Artificial Sequence: Synthetic oligonucleotide
  Target: PCSK9; (-) strand; PAM type: YTN; PAM sequence: CTC
acggggactgcttctgcctc

SEQ ID NO: 21199 - DNA, 20 bp, Artificial Sequence
  Description of Artificial Sequence: Synthetic oligonucleotide
  Target: PCSK9; (-) strand; PAM type: YTN; PAM sequence: CTC
cacaagataccaggagggct

SEQ ID NO: 21200 - DNA, 20 bp, Artificial Sequence
  Description of Artificial Sequence: Synthetic oligonucleotide
  Target: PCSK9; (-) strand; PAM type: YTN; PAM sequence: CTC
cactccacaagataccagga

SEQ ID NO: 21201 - DNA, 20 bp, Artificial Sequence
  Description of Artificial Sequence: Synthetic oligonucleotide
  Target: PCSK9; (-) strand; PAM type: YTN; PAM sequence: TTC
tccactccacaagataccag

SEQ ID NO: 21202 - DNA, 20 bp, Artificial Sequence
  Description of Artificial Sequence: Synthetic oligonucleotide
  Target: PCSK9; (-) strand; PAM type: YTN; PAM sequence: CTC
caggtccaagcgttctccac

SEQ ID NO: 21203 - DNA, 20 bp, Artificial Sequence
  Description of Artificial Sequence: Synthetic oligonucleotide
  Target: PCSK9; (-) strand; PAM type: YTN; PAM sequence: CTG
gctccaggtccaagcgttct

SEQ ID NO: 21204 - DNA, 20 bp, Artificial Sequence
  Description of Artificial Sequence: Synthetic oligonucleotide
  Target: PCSK9; (-) strand; PAM type: YTN; PAM sequence: CTC
ctggctccaggtccaagcgt

SEQ ID NO: 21205 - DNA, 20 bp, Artificial Sequence
  Description of Artificial Sequence: Synthetic oligonucleotide
  Target: PCSK9; (-) strand; PAM type: YTN; PAM sequence: CTG
ggcctcctggctccaggtcc

SEQ ID NO: 21206 - DNA, 20 bp, Artificial Sequence
  Description of Artificial Sequence: Synthetic oligonucleotide
  Target: PCSK9; (-) strand; PAM type: YTN; PAM sequence: CTC
ggacaggatgtatgtctggg

SEQ ID NO: 21207 - DNA, 20 bp, Artificial Sequence
  Description of Artificial Sequence: Synthetic oligonucleotide
  Target: PCSK9; (-) strand; PAM type: YTN; PAM sequence: CTG
cagctcggacaggatgtatg

SEQ ID NO: 21208 - DNA, 20 bp, Artificial Sequence
  Description of Artificial Sequence: Synthetic oligonucleotide
  Target: PCSK9; (-) strand; PAM type: YTN; PAM sequence: TTA
gagacaggaagctgcagctc

SEQ ID NO: 21209 - DNA, 20 bp, Artificial Sequence
  Description of Artificial Sequence: Synthetic oligonucleotide
  Target: PCSK9; (-) strand; PAM type: YTN; PAM sequence: TTT
agagacaggaagctgcagct

SEQ ID NO: 21210 - DNA, 20 bp, Artificial Sequence
  Description of Artificial Sequence: Synthetic oligonucleotide
  Target: PCSK9; (-) strand; PAM type: YTN; PAM sequence: TTT
tagagacaggaagctgcagc

SEQ ID NO: 21211 - DNA, 20 bp, Artificial Sequence
  Description of Artificial Sequence: Synthetic oligonucleotide
  Target: PCSK9; (-) strand; PAM type: YTN; PAM sequence: CTC
attttagagacaggaagctg

SEQ ID NO: 21212 - DNA, 20 bp, Artificial Sequence
  Description of Artificial Sequence: Synthetic oligonucleotide
  Target: PCSK9; (-) strand; PAM type: YTN; PAM sequence: CTG
gccggctcattttagagaca

SEQ ID NO: 21213 - DNA, 20 bp, Artificial Sequence
  Description of Artificial Sequence: Synthetic oligonucleotide
  Target: PCSK9; (-) strand; PAM type: YTN; PAM sequence: CTG
cgctggccggctcattttag

SEQ ID NO: 21214 - DNA, 20 bp, Artificial Sequence
  Description of Artificial Sequence: Synthetic oligonucleotide
  Target: PCSK9; (-) strand; PAM type: YTN; PAM sequence: CTG
gccacctgcgctggccggct

SEQ ID NO: 21215 - DNA, 20 bp, Artificial Sequence
  Description of Artificial Sequence: Synthetic oligonucleotide
  Target: PCSK9; (-) strand; PAM type: YTN; PAM sequence: CTC
aaaggagaataacagtgatg

SEQ ID NO: 21216 - DNA, 20 bp, Artificial Sequence
  Description of Artificial Sequence: Synthetic oligonucleotide
  Target: PCSK9; (-) strand; PAM type: YTN; PAM sequence: TTA
aagactcaaaggagaataac

SEQ ID NO: 21217 - DNA, 20 bp, Artificial Sequence
  Description of Artificial Sequence: Synthetic oligonucleotide
  Target: PCSK9; (-) strand; PAM type: YTN; PAM sequence: TTT
aaagactcaaaggagaataa

SEQ ID NO: 21218 - DNA, 20 bp, Artificial Sequence
  Description of Artificial Sequence: Synthetic oligonucleotide
  Target: PCSK9; (-) strand; PAM type: YTN; PAM sequence: CTG
caagaaagacaacaagattt

SEQ ID NO: 21219 - DNA, 20 bp, Artificial Sequence
  Description of Artificial Sequence: Synthetic oligonucleotide
  Target: PCSK9; (-) strand; PAM type: YTN; PAM sequence: CTC
accgagtctgcaagaaagac

SEQ ID NO: 21220 - DNA, 20 bp, Artificial Sequence
  Description of Artificial Sequence: Synthetic oligonucleotide
  Target: PCSK9; (-) strand; PAM type: YTN; PAM sequence: TTC
acagctcaccgagtctgcaa

SEQ ID NO: 21221 - DNA, 20 bp, Artificial Sequence
  Description of Artificial Sequence: Synthetic oligonucleotide
  Target: PCSK9; (-) strand; PAM type: YTN; PAM sequence: TTT
cacagctcaccgagtctgca

SEQ ID NO: 21222 - DNA, 20 bp, Artificial Sequence
  Description of Artificial Sequence: Synthetic oligonucleotide
  Target: PCSK9; (-) strand; PAM type: YTN; PAM sequence: CTT
tcacagctcaccgagtctgc

SEQ ID NO: 21223 - DNA, 20 bp, Artificial Sequence
  Description of Artificial Sequence: Synthetic oligonucleotide
  Target: PCSK9; (-) strand; PAM type: YTN; PAM sequence: TTA
tagcctttcacagctcaccg

SEQ ID NO: 21224 - DNA, 20 bp, Artificial Sequence
  Description of Artificial Sequence: Synthetic oligonucleotide
  Target: PCSK9; (-) strand; PAM type: YTN; PAM sequence: CTA
ttatagcctttcacagctca

SEQ ID NO: 21225 - DNA, 20 bp, Artificial Sequence
  Description of Artificial Sequence: Synthetic oligonucleotide
  Target: PCSK9; (-) strand; PAM type: YTN; PAM sequence: TTC
aaaaaatagtatcaaagtgt

SEQ ID NO: 21226 - DNA, 20 bp, Artificial Sequence
  Description of Artificial Sequence: Synthetic oligonucleotide
  Target: PCSK9; (-) strand; PAM type: YTN; PAM sequence: CTA
acaataatatgaatgttcaa

SEQ ID NO: 21227 - DNA, 20 bp, Artificial Sequence
  Description of Artificial Sequence: Synthetic oligonucleotide
  Target: PCSK9; (-) strand; PAM type: YTN; PAM sequence: TTC
atatgaatatcaatatctaa

SEQ ID NO: 21228 - DNA, 20 bp, Artificial Sequence
  Description of Artificial Sequence: Synthetic oligonucleotide
  Target: PCSK9; (-) strand; PAM type: YTN; PAM sequence: CTT
catatgaatatcaatatcta

SEQ ID NO: 21229 - DNA, 20 bp, Artificial Sequence
  Description of Artificial Sequence: Synthetic oligonucleotide
  Target: PCSK9; (-) strand; PAM type: YTN; PAM sequence: CTC
cttcatatgaatatcaatat

SEQ ID NO: 21230 - DNA, 20 bp, Artificial Sequence
  Description of Artificial Sequence: Synthetic oligonucleotide
  Target: PCSK9; (-) strand; PAM type: YTN; PAM sequence: CTG
ctccttcatatgaatatcaa

SEQ ID NO: 21231 - DNA, 20 bp, Artificial Sequence
  Description of Artificial Sequence: Synthetic oligonucleotide
  Target: PCSK9; (-) strand; PAM type: YTN; PAM sequence: CTG
ccaagaaggacccaagtcat

SEQ ID NO: 21232 - DNA, 20 bp, Artificial Sequence
  Description of Artificial Sequence: Synthetic oligonucleotide
  Target: PCSK9; (-) strand; PAM type: YTN; PAM sequence: CTA
ctgccaagaaggacccaagt

SEQ ID NO: 21233 - DNA, 20 bp, Artificial Sequence
  Description of Artificial Sequence: Synthetic oligonucleotide
  Target: PCSK9; (-) strand; PAM type: YTN; PAM sequence: CTG
gcaatgctactgccaagaag

SEQ ID NO: 21234 - DNA, 20 bp, Artificial Sequence
  Description of Artificial Sequence: Synthetic oligonucleotide
  Target: PCSK9; (-) strand; PAM type: YTN; PAM sequence: CTG
tccaaggccatcagctggca

SEQ ID NO: 21235 - DNA, 20 bp, Artificial Sequence
  Description of Artificial Sequence: Synthetic oligonucleotide
  Target: PCSK9; (-) strand; PAM type: YTN; PAM sequence: CTA
gagagggcaggtaactgtcc

SEQ ID NO: 21236 - DNA, 20 bp, Artificial Sequence
  Description of Artificial Sequence: Synthetic oligonucleotide
  Target: PCSK9; (-) strand; PAM type: YTN; PAM sequence: TTC
atagacaaggaaagggaggc

SEQ ID NO: 21237 - DNA, 20 bp, Artificial Sequence
  Description of Artificial Sequence: Synthetic oligonucleotide
  Target: PCSK9; (-) strand; PAM type: YTN; PAM sequence: TTT
catagacaaggaaagggagg

SEQ ID NO: 21238 - DNA, 20 bp, Artificial Sequence
  Description of Artificial Sequence: Synthetic oligonucleotide
  Target: PCSK9; (-) strand; PAM type: YTN; PAM sequence: CTA
taatgtatttcatagacaag

SEQ ID NO: 21239 - DNA, 20 bp, Artificial Sequence
  Description of Artificial Sequence: Synthetic oligonucleotide
  Target: PCSK9; (-) strand; PAM type: YTN; PAM sequence: TTC
tataatgtatttcatagaca

SEQ ID NO: 21240 - DNA, 20 bp, Artificial Sequence
  Description of Artificial Sequence: Synthetic oligonucleotide
  Target: PCSK9; (-) strand; PAM type: YTN; PAM sequence: CTA
ttctataatgtatttcatag

SEQ ID NO: 21241 - DNA, 20 bp, Artificial Sequence
  Description of Artificial Sequence: Synthetic oligonucleotide
  Target: PCSK9; (-) strand; PAM type: YTN; PAM sequence: CTA
catcctattctataatgtat

SEQ ID NO: 21242 - DNA, 20 bp, Artificial Sequence
  Description of Artificial Sequence: Synthetic oligonucleotide
  Target: PCSK9; (-) strand; PAM type: YTN; PAM sequence: CTC
acacactacatcctattcta

SEQ ID NO: 21243 - DNA, 20 bp, Artificial Sequence
  Description of Artificial Sequence: Synthetic oligonucleotide
  Target: PCSK9; (-) strand; PAM type: YTN; PAM sequence: CTC
caaaaaatcctcacacacta

SEQ ID NO: 21244 - DNA, 20 bp, Artificial Sequence
  Description of Artificial Sequence: Synthetic oligonucleotide
  Target: PCSK9; (-) strand; PAM type: YTN; PAM sequence: TTA
acctccaaaaaatcctcaca

SEQ ID NO: 21245 - DNA, 20 bp, Artificial Sequence
  Description of Artificial Sequence: Synthetic oligonucleotide
  Target: PCSK9; (-) strand; PAM type: YTN; PAM sequence: TTT
aacctccaaaaaatcctcac

SEQ ID NO: 21246 - DNA, 20 bp, Artificial Sequence
  Description of Artificial Sequence: Synthetic oligonucleotide
  Target: PCSK9; (-) strand; PAM type: YTN; PAM sequence: CTC
gtttaacctccaaaaaatcc

SEQ ID NO: 21247 - DNA, 20 bp, Artificial Sequence
  Description of Artificial Sequence: Synthetic oligonucleotide
  Target: PCSK9; (-) strand; PAM type: YTN; PAM sequence: TTC
actcgtttaacctccaaaaa

SEQ ID NO: 21248 - DNA, 20 bp, Artificial Sequence
  Description of Artificial Sequence: Synthetic oligonucleotide
  Target: PCSK9; (-) strand; PAM type: YTN; PAM sequence: TTA
aatatattcactcgtttaac

SEQ ID NO: 21249 - DNA, 20 bp, Artificial Sequence
  Description of Artificial Sequence: Synthetic oligonucleotide
  Target: PCSK9; (-) strand; PAM type: YTN; PAM sequence: CTT
aaatatattcactcgtttaa

SEQ ID NO: 21250 - DNA, 20 bp, Artificial Sequence
  Description of Artificial Sequence: Synthetic oligonucleotide
  Target: PCSK9; (-) strand; PAM type: YTN; PAM sequence: CTG
gtgaaagcgccttaaatata

SEQ ID NO: 21251 - DNA, 20 bp, Artificial Sequence
  Description of Artificial Sequence: Synthetic oligonucleotide
  Target: PCSK9; (-) strand; PAM type: YTN; PAM sequence: CTA
cagagcacatcccaggcact

SEQ ID NO: 21252 - DNA, 20 bp, Artificial Sequence
  Description of Artificial Sequence: Synthetic oligonucleotide
  Target: PCSK9; (-) strand; PAM type: YTN; PAM sequence: TTA
acacacagaaactacagagc

SEQ ID NO: 21253 - DNA, 20 bp, Artificial Sequence
  Description of Artificial Sequence: Synthetic oligonucleotide
  Target: PCSK9; (-) strand; PAM type: YTN; PAM sequence: TTA
tagttaacacacagaaacta

SEQ ID NO: 21254 - DNA, 20 bp, Artificial Sequence
  Description of Artificial Sequence: Synthetic oligonucleotide
  Target: PCSK9; (-) strand; PAM type: YTN; PAM sequence: CTT
atagttaacacacagaaact

SEQ ID NO: 21255 - DNA, 20 bp, Artificial Sequence
  Description of Artificial Sequence: Synthetic oligonucleotide
  Target: PCSK9; (-) strand; PAM type: YTN; PAM sequence: TTG
tgggagaggagggaatgagc

SEQ ID NO: 21256 - DNA, 20 bp, Artificial Sequence
  Description of Artificial Sequence: Synthetic oligonucleotide
  Target: PCSK9; (-) strand; PAM type: YTN; PAM sequence: TTT
gtgggagaggagggaatgag

SEQ ID NO: 21257 - DNA, 20 bp, Artificial Sequence
  Description of Artificial Sequence: Synthetic oligonucleotide
  Target: PCSK9; (-) strand; PAM type: YTN; PAM sequence: TTC
caaggcgacatttgtgggag

SEQ ID NO: 21258 - DNA, 20 bp, Artificial Sequence
  Description of Artificial Sequence: Synthetic oligonucleotide
  Target: PCSK9; (-) strand; PAM type: YTN; PAM sequence: TTT
ccaaggcgacatttgtggga

SEQ ID NO: 21259 - DNA, 20 bp, Artificial Sequence
  Description of Artificial Sequence: Synthetic oligonucleotide
  Target: PCSK9; (-) strand; PAM type: YTN; PAM sequence: CTT
tccaaggcgacatttgtggg

SEQ ID NO: 21260 - DNA, 20 bp, Artificial Sequence
  Description of Artificial Sequence: Synthetic oligonucleotide
  Target: PCSK9; (-) strand; PAM type: YTN; PAM sequence: CTC
cgtctttccaaggcgacatt

SEQ ID NO: 21261 - DNA, 20 bp, Artificial Sequence
  Description of Artificial Sequence: Synthetic oligonucleotide
  Target: PCSK9; (-) strand; PAM type: YTN; PAM sequence: CTG
cctccgtctttccaaggcga

SEQ ID NO: 21262 - DNA, 20 bp, Artificial Sequence
  Description of Artificial Sequence: Synthetic oligonucleotide
  Target: PCSK9; (-) strand; PAM type: YTN; PAM sequence: CTC
caccaggctgcctccgtctt

SEQ ID NO: 21263 - DNA, 20 bp, Artificial Sequence
  Description of Artificial Sequence: Synthetic oligonucleotide
  Target: PCSK9; (-) strand; PAM type: YTN; PAM sequence: CTA
ggagatacacctccaccagg

SEQ ID NO: 21264 - DNA, 20 bp, Artificial Sequence
  Description of Artificial Sequence: Synthetic oligonucleotide
  Target: PCSK9; (-) strand; PAM type: YTN; PAM sequence: CTG
gtgtctaggagatacacctc

SEQ ID NO: 21265 - DNA, 20 bp, Artificial Sequence
  Description of Artificial Sequence: Synthetic oligonucleotide
  Target: PCSK9; (-) strand; PAM type: YTN; PAM sequence: CTG
tatgctggtgtctaggagat

SEQ ID NO: 21266 - DNA, 20 bp, Artificial Sequence
  Description of Artificial Sequence: Synthetic oligonucleotide
  Target: PCSK9; (-) strand; PAM type: YTN; PAM sequence: CTC
tgtatgctggtgtctaggag

SEQ ID NO: 21267 - DNA, 20 bp, Artificial Sequence
  Description of Artificial Sequence: Synthetic oligonucleotide
  Target: PCSK9; (-) strand; PAM type: YTN; PAM sequence: TTC
ccggtggtcactctgtatgc

SEQ ID NO: 21268 - DNA, 20 bp, Artificial Sequence
  Description of Artificial Sequence: Synthetic oligonucleotide
  Target: PCSK9; (-) strand; PAM type: YTN; PAM sequence: TTT
cccggtggtcactctgtatg

SEQ ID NO: 21269 - DNA, 20 bp, Artificial Sequence
  Description of Artificial Sequence: Synthetic oligonucleotide
  Target: PCSK9; (-) strand; PAM type: YTN; PAM sequence: CTC
gatttcccggtggtcactct

SEQ ID NO: 21270 - DNA, 20 bp, Artificial Sequence
  Description of Artificial Sequence: Synthetic oligonucleotide
  Target: PCSK9; (-) strand; PAM type: YTN; PAM sequence: CTG
ccctcgatttcccggtggtc

SEQ ID NO: 21271 - DNA, 20 bp, Artificial Sequence
  Description of Artificial Sequence: Synthetic oligonucleotide
  Target: PCSK9; (-) strand; PAM type: YTN; PAM sequence: CTC
gaagtcggtgaccatgaccc

SEQ ID NO: 21272 - DNA, 20 bp, Artificial Sequence
  Description of Artificial Sequence: Synthetic oligonucleotide
  Target: PCSK9; (-) strand; PAM type: YTN; PAM sequence: TTC
tcgaagtcggtgaccatgac

SEQ ID NO: 21273 - DNA, 20 bp, Artificial Sequence
  Description of Artificial Sequence: Synthetic oligonucleotide
  Target: PCSK9; (-) strand; PAM type: YTN; PAM sequence: CTC
gggcacattctcgaagtcgg

SEQ ID NO: 21274 - DNA, 20 bp, Artificial Sequence
  Description of Artificial Sequence: Synthetic oligonucleotide
  Target: PCSK9; (-) strand; PAM type: YTN; PAM sequence: CTC
ctcgggcacattctcgaagt

SEQ ID NO: 21275 - DNA, 20 bp, Artificial Sequence
  Description of Artificial Sequence: Synthetic oligonucleotide
  Target: PCSK9; (-) strand; PAM type: YTN; PAM sequence: CTG
tggaagcgggtcccgtcctc

SEQ ID NO: 21276 - DNA, 20 bp, Artificial Sequence
  Description of Artificial Sequence: Synthetic oligonucleotide
  Target: PCSK9; (-) strand; PAM type: YTN; PAM sequence: CTG
tctgtggaagcgggtcccgt

SEQ ID NO: 21277 - DNA, 20 bp, Artificial Sequence
  Description of Artificial Sequence: Synthetic oligonucleotide
  Target: PCSK9; (-) strand; PAM type: YTN; PAM sequence: TTA
cctgtctgtggaagcgggtc

SEQ ID NO: 21278 - DNA, 20 bp, Artificial Sequence
  Description of Artificial Sequence: Synthetic oligonucleotide
  Target: PCSK9; (-) strand; PAM type: YTN; PAM sequence: CTT
acctgtctgtggaagcgggt

SEQ ID NO: 21279 - DNA, 20 bp, Artificial Sequence
  Description of Artificial Sequence: Synthetic oligonucleotide
  Target: PCSK9; (-) strand; PAM type: YTN; PAM sequence: CTC
ccatcagacggccgtgctta

SEQ ID NO: 21280 - DNA, 20 bp, Artificial Sequence
  Description of Artificial Sequence: Synthetic oligonucleotide
  Target: PCSK9; (-) strand; PAM type: YTN; PAM sequence: CTC
caggatggggatatgggcag

SEQ ID NO: 21281 - DNA, 20 bp, Artificial Sequence
  Description of Artificial Sequence: Synthetic oligonucleotide
  Target: PCSK9; (-) strand; PAM type: YTN; PAM sequence: CTG
gggtggcagtccccacccac

SEQ ID NO: 21282 - DNA, 20 bp, Artificial Sequence
  Description of Artificial Sequence: Synthetic oligonucleotide
  Target: PCSK9; (-) strand; PAM type: YTN; PAM sequence: CTC
tggggtggcagtccccaccc

SEQ ID NO: 21283 - DNA, 20 bp, Artificial Sequence
  Description of Artificial Sequence: Synthetic oligonucleotide
  Target: PCSK9; (-) strand; PAM type: YTN; PAM sequence: CTG
caacgctctggggtggcagt

SEQ ID NO: 21284 - DNA, 20 bp, Artificial Sequence
  Description of Artificial Sequence: Synthetic oligonucleotide
  Target: PCSK9; (-) strand; PAM type: YTN; PAM sequence: CTG
gggggggtgcaacccaggag

SEQ ID NO: 21285 - DNA, 20 bp, Artificial Sequence
  Description of Artificial Sequence: Synthetic oligonucleotide
  Target: PCSK9; (-) strand; PAM type: YTN; PAM sequence: CTG
atggcagggaggggacagtg

SEQ ID NO: 21286 - DNA, 20 bp, Artificial Sequence
  Description of Artificial Sequence: Synthetic oligonucleotide
  Target: PCSK9; (-) strand; PAM type: YTN; PAM sequence: TTC
ccacaactgatggcagggag

SEQ ID NO: 21287 - DNA, 20 bp, Artificial Sequence
  Description of Artificial Sequence: Synthetic oligonucleotide
  Target: PCSK9; (-) strand; PAM type: YTN; PAM sequence: CTT
cccacaactgatggcaggga

SEQ ID NO: 21288 - DNA, 20 bp, Artificial Sequence
  Description of Artificial Sequence: Synthetic oligonucleotide
  Target: PCSK9; (-) strand; PAM type: YTN; PAM sequence: CTG
gatggatgaacgcccttccc

SEQ ID NO: 21289 - DNA, 20 bp, Artificial Sequence
  Description of Artificial Sequence: Synthetic oligonucleotide
  Target: PCSK9; (-) strand; PAM type: YTN; PAM sequence: CTA
taacaaatcagcaggtggct

SEQ ID NO: 21290 - DNA, 20 bp, Artificial Sequence
  Description of Artificial Sequence: Synthetic oligonucleotide
  Target: PCSK9; (-) strand; PAM type: YTN; PAM sequence: CTC
caccctataacaaatcagca

SEQ ID NO: 21291 - DNA, 20 bp, Artificial Sequence
  Description of Artificial Sequence: Synthetic oligonucleotide
  Target: PCSK9; (-) strand; PAM type: YTN; PAM sequence: CTC
gacgaacacaaggaccacat

SEQ ID NO: 21292 - DNA, 20 bp, Artificial Sequence
  Description of Artificial Sequence: Synthetic oligonucleotide
  Target: PCSK9; (-) strand; PAM type: YTN; PAM sequence: CTG
ctcgacgaacacaaggacca

SEQ ID NO: 21293 - DNA, 20 bp, Artificial Sequence
  Description of Artificial Sequence: Synthetic oligonucleotide
  Target: PCSK9; (-) strand; PAM type: YTN; PAM sequence: CTG
gcctgctcgacgaacacaag

SEQ ID NO: 21294 - DNA, 20 bp, Artificial Sequence
  Description of Artificial Sequence: Synthetic oligonucleotide
  Target: PCSK9; (-) strand; PAM type: YTN; PAM sequence: TTG
ctggcctgctcgacgaacac

SEQ ID NO: 21295 - DNA, 20 bp, Artificial Sequence
  Description of Artificial Sequence: Synthetic oligonucleotide
  Target: PCSK9; (-) strand; PAM type: YTN; PAM sequence: CTT
gctggcctgctcgacgaaca

SEQ ID NO: 21296 - DNA, 20 bp, Artificial Sequence
  Description of Artificial Sequence: Synthetic oligonucleotide
  Target: PCSK9; (-) strand; PAM type: YTN; PAM sequence: CTG
tcacacttgctggcctgctc

SEQ ID NO: 21297 - DNA, 20 bp, Artificial Sequence
  Description of Artificial Sequence: Synthetic oligonucleotide
  Target: PCSK9; (-) strand; PAM type: YTN; PAM sequence: CTG
ccaggtgggtgccatgactg

SEQ ID NO: 21298 - DNA, 20 bp, Artificial Sequence
  Description of Artificial Sequence: Synthetic oligonucleotide
  Target: PCSK9; (-) strand; PAM type: YTN; PAM sequence: CTG
accacccctgccaggtgggt

SEQ ID NO: 21299 - DNA, 20 bp, Artificial Sequence
  Description of Artificial Sequence: Synthetic oligonucleotide
  Target: PCSK9; (-) strand; PAM type: YTN; PAM sequence: TTG
gccacgccggcatcccggcc

SEQ ID NO: 21300 - DNA, 20 bp, Artificial Sequence
  Description of Artificial Sequence: Synthetic oligonucleotide
  Target: PCSK9; (-) strand; PAM type: YTN; PAM sequence: CTT
ggccacgccggcatcccggc

SEQ ID NO: 21301 - DNA, 20 bp, Artificial Sequence
  Description of Artificial Sequence: Synthetic oligonucleotide
  Target: PCSK9; (-) strand; PAM type: YTN; PAM sequence: CTG
gcacccttggccacgccggc

SEQ ID NO: 21302 - DNA, 20 bp, Artificial Sequence
  Description of Artificial Sequence: Synthetic oligonucleotide
  Target: PCSK9; (-) strand; PAM type: YTN; PAM sequence: CTG
cgcatgctggcacccttggc

SEQ ID NO: 21303 - DNA, 20 bp, Artificial Sequence
  Description of Artificial Sequence: Synthetic oligonucleotide
  Target: PCSK9; (-) strand; PAM type: YTN; PAM sequence: TTG
agcacgcgcaggctgcgcat

SEQ ID NO: 21304 - DNA, 20 bp, Artificial Sequence
  Description of Artificial Sequence: Synthetic oligonucleotide
  Target: PCSK9; (-) strand; PAM type: YTN; PAM sequence: TTG
gcagttgagcacgcgcaggc

SEQ ID NO: 21305 - DNA, 20 bp, Artificial Sequence
  Description of Artificial Sequence: Synthetic oligonucleotide
  Target: PCSK9; (-) strand; PAM type: YTN; PAM sequence: CTT
ggcagttgagcacgcgcagg

SEQ ID NO: 21306 - DNA, 20 bp, Artificial Sequence
  Description of Artificial Sequence: Synthetic oligonucleotide
  Target: PCSK9; (-) strand; PAM type: YTN; PAM sequence: TTC
ccttggcagttgagcacgcg

SEQ ID NO: 21307 - DNA, 20 bp, Artificial Sequence
  Description of Artificial Sequence: Synthetic oligonucleotide
  Target: PCSK9; (-) strand; PAM type: YTN; PAM sequence: CTT
cccttggcagttgagcacgc

SEQ ID NO: 21308 - DNA, 20 bp, Artificial Sequence
  Description of Artificial Sequence: Synthetic oligonucleotide
  Target: PCSK9; (-) strand; PAM type: YTN; PAM sequence: CTA
accgtgcccttcccttggca

SEQ ID NO: 21309 - DNA, 20 bp, Artificial Sequence
  Description of Artificial Sequence: Synthetic oligonucleotide
  Target: PCSK9; (-) strand; PAM type: YTN; PAM sequence: CTA
tgagggtgccgctaaccgtg

SEQ ID NO: 21310 - DNA, 20 bp, Artificial Sequence
  Description of Artificial Sequence: Synthetic oligonucleotide
  Target: PCSK9; (-) strand; PAM type: YTN; PAM sequence: TTA
cctatgagggtgccgctaac

SEQ ID NO: 21311 - DNA, 20 bp, Artificial Sequence
  Description of Artificial Sequence: Synthetic oligonucleotide
  Target: PCSK9; (-) strand; PAM type: YTN; PAM sequence: CTT
acctatgagggtgccgctaa

SEQ ID NO: 21312 - DNA, 20 bp, Artificial Sequence
  Description of Artificial Sequence: Synthetic oligonucleotide
  Target: PCSK9; (-) strand; PAM type: YTN; PAM sequence: CTG
gggccatcacttacctatga

SEQ ID NO: 21313 - DNA, 20 bp, Artificial Sequence
  Description of Artificial Sequence: Synthetic oligonucleotide
  Target: PCSK9; (-) strand; PAM type: YTN; PAM sequence: CTC
ccaggccaggtccagatgga

SEQ ID NO: 21314 - DNA, 20 bp, Artificial Sequence
  Description of Artificial Sequence: Synthetic oligonucleotide
  Target: PCSK9; (-) strand; PAM type: YTN; PAM sequence: CTG
ggcccagcccaagccacctc

SEQ ID NO: 21315 - DNA, 20 bp, Artificial Sequence
  Description of Artificial Sequence: Synthetic oligonucleotide
  Target: PCSK9; (-) strand; PAM type: YTN; PAM sequence: CTC
cctgggcccagcccaagcca

SEQ ID NO: 21316 - DNA, 20 bp, Artificial Sequence
  Description of Artificial Sequence: Synthetic oligonucleotide
  Target: PCSK9; (-) strand; PAM type: YTN; PAM sequence: CTC
tccctgggcccagcccaagc

SEQ ID NO: 21317 - DNA, 20 bp, Artificial Sequence
  Description of Artificial Sequence: Synthetic oligonucleotide
  Target: PCSK9; (-) strand; PAM type: YTN; PAM sequence: TTA
gctctccctgggcccagccc

SEQ ID NO: 21318 - DNA, 20 bp, Artificial Sequence
  Description of Artificial Sequence: Synthetic oligonucleotide
  Target: PCSK9; (-) strand; PAM type: YTN; PAM sequence: TTA
ggagacattagctctccctg

SEQ ID NO: 21319 - DNA, 20 bp, Artificial Sequence
  Description of Artificial Sequence: Synthetic oligonucleotide
  Target: PCSK9; (-) strand; PAM type: YTN; PAM sequence: TTG
gttaggagacattagctctc

SEQ ID NO: 21320 - DNA, 20 bp, Artificial Sequence
  Description of Artificial Sequence: Synthetic oligonucleotide
  Target: PCSK9; (-) strand; PAM type: YTN; PAM sequence: CTT
ggttaggagacattagctct

SEQ ID NO: 21321 - DNA, 20 bp, Artificial Sequence
  Description of Artificial Sequence: Synthetic oligonucleotide
  Target: PCSK9; (-) strand; PAM type: YTN; PAM sequence: TTC
ttggttaggagacattagct

SEQ ID NO: 21322 - DNA, 20 bp, Artificial Sequence
  Description of Artificial Sequence: Synthetic oligonucleotide
  Target: PCSK9; (-) strand; PAM type: YTN; PAM sequence: CTG
ccacagcattcttggttagg

SEQ ID NO: 21323 - DNA, 20 bp, Artificial Sequence
  Description of Artificial Sequence: Synthetic oligonucleotide
  Target: PCSK9; (-) strand; PAM type: YTN; PAM sequence: CTG
cggcagaggctgccacagca

SEQ ID NO: 21324 - DNA, 20 bp, Artificial Sequence
  Description of Artificial Sequence: Synthetic oligonucleotide
  Target: PCSK9; (-) strand; PAM type: YTN; PAM sequence: CTC
tgcggcagaggctgccacag

SEQ ID NO: 21325 - DNA, 20 bp, Artificial Sequence
  Description of Artificial Sequence: Synthetic oligonucleotide
  Target: PCSK9; (-) strand; PAM type: YTN; PAM sequence: CTG
gctctgcggcagaggctgcc

SEQ ID NO: 21326 - DNA, 20 bp, Artificial Sequence
  Description of Artificial Sequence: Synthetic oligonucleotide
  Target: PCSK9; (-) strand; PAM type: YTN; PAM sequence: CTC
tggctctgcggcagaggctg

SEQ ID NO: 21327 - DNA, 20 bp, Artificial Sequence
  Description of Artificial Sequence: Synthetic oligonucleotide
  Target: PCSK9; (-) strand; PAM type: YTN; PAM sequence: TTC
tctggctctgcggcagaggc

SEQ ID NO: 21328 - DNA, 20 bp, Artificial Sequence
  Description of Artificial Sequence: Synthetic oligonucleotide
  Target: PCSK9; (-) strand; PAM type: YTN; PAM sequence: CTG
gttctctggctctgcggcag

SEQ ID NO: 21329 - DNA, 20 bp, Artificial Sequence
  Description of Artificial Sequence: Synthetic oligonucleotide
  Target: PCSK9; (-) strand; PAM type: YTN; PAM sequence: CTC
tggttctctggctctgcggc

SEQ ID NO: 21330 - DNA, 20 bp, Artificial Sequence
  Description of Artificial Sequence: Synthetic oligonucleotide
  Target: PCSK9; (-) strand; PAM type: YTN; PAM sequence: TTG
gcactctggttctctggctc

SEQ ID NO: 21331 - DNA, 20 bp, Artificial Sequence
  Description of Artificial Sequence: Synthetic oligonucleotide
  Target: PCSK9; (-) strand; PAM type: YTN; PAM sequence: CTT
ggcactctggttctctggct

SEQ ID NO: 21332 - DNA, 20 bp, Artificial Sequence
  Description of Artificial Sequence: Synthetic oligonucleotide
  Target: PCSK9; (-) strand; PAM type: YTN; PAM sequence: CTG
ccagccttggcactctggtt

SEQ ID NO: 21333 - DNA, 20 bp, Artificial Sequence
  Description of Artificial Sequence: Synthetic oligonucleotide
  Target: PCSK9; (-) strand; PAM type: YTN; PAM sequence: CTG
ggaaccctgccagccttggc

SEQ ID NO: 21334 - DNA, 20 bp, Artificial Sequence
  Description of Artificial Sequence: Synthetic oligonucleotide
  Target: PCSK9; (-) strand; PAM type: YTN; PAM sequence: CTC
gtggccactgggaaccctgc

SEQ ID NO: 21335 - DNA, 20 bp, Artificial Sequence
  Description of Artificial Sequence: Synthetic oligonucleotide
  Target: PCSK9; (-) strand; PAM type: YTN; PAM sequence: CTG
cactcgtggccactgggaac

SEQ ID NO: 21336 - DNA, 20 bp, Artificial Sequence
  Description of Artificial Sequence: Synthetic oligonucleotide
  Target: PCSK9; (-) strand; PAM type: YTN; PAM sequence: TTC
atctgcactcgtggccactg

SEQ ID NO: 21337 - DNA, 20 bp, Artificial Sequence
  Description of Artificial Sequence: Synthetic oligonucleotide
  Target: PCSK9; (-) strand; PAM type: YTN; PAM sequence: CTT
catctgcactcgtggccact

SEQ ID NO: 21338 - DNA, 20 bp, Artificial Sequence
  Description of Artificial Sequence: Synthetic oligonucleotide
  Target: PCSK9; (-) strand; PAM type: YTN; PAM sequence: TTC
ttcatctgcactcgtggcca

SEQ ID NO: 21339 - DNA, 20 bp, Artificial Sequence
  Description of Artificial Sequence: Synthetic oligonucleotide
  Target: PCSK9; (-) strand; PAM type: YTN; PAM sequence: TTT
cttcatctgcactcgtggcc

SEQ ID NO: 21340 - DNA, 20 bp, Artificial Sequence
  Description of Artificial Sequence: Synthetic oligonucleotide
  Target: PCSK9; (-) strand; PAM type: YTN; PAM sequence: CTG
ggtttcttcatctgcactcg

SEQ ID NO: 21341 - DNA, 20 bp, Artificial Sequence
  Description of Artificial Sequence: Synthetic oligonucleotide
  Target: PCSK9; (-) strand; PAM type: YTN; PAM sequence: TTG
gggcctgggtttcttcatct

SEQ ID NO: 21342 - DNA, 20 bp, Artificial Sequence
  Description of Artificial Sequence: Synthetic oligonucleotide
  Target: PCSK9; (-) strand; PAM type: YTN; PAM sequence: CTT
ggggcctgggtttcttcatc

SEQ ID NO: 21343 - DNA, 20 bp, Artificial Sequence
  Description of Artificial Sequence: Synthetic oligonucleotide
  Target: PCSK9; (-) strand; PAM type: YTN; PAM sequence: CTC
ttggggcctgggtttcttca

SEQ ID NO: 21344 - DNA, 20 bp, Artificial Sequence
  Description of Artificial Sequence: Synthetic oligonucleotide
  Target: PCSK9; (-) strand; PAM type: YTN; PAM sequence: CTG
catgaccctcttggggcctg

SEQ ID NO: 21345 - DNA, 20 bp, Artificial Sequence
  Description of Artificial Sequence: Synthetic oligonucleotide
  Target: PCSK9; (-) strand; PAM type: YTN; PAM sequence: CTA
cctgcatgaccctcttgggg

SEQ ID NO: 21346 - DNA, 20 bp, Artificial Sequence
  Description of Artificial Sequence: Synthetic oligonucleotide
  Target: PCSK9; (-) strand; PAM type: YTN; PAM sequence: CTG
ggctacctgcatgaccctct

SEQ ID NO: 21347 - DNA, 20 bp, Artificial Sequence
  Description of Artificial Sequence: Synthetic oligonucleotide
  Target: PCSK9; (-) strand; PAM type: YTN; PAM sequence: CTC
cctgggctacctgcatgacc

SEQ ID NO: 21348 - DNA, 20 bp, Artificial Sequence
  Description of Artificial Sequence: Synthetic oligonucleotide
  Target: PCSK9; (-) strand; PAM type: YTN; PAM sequence: CTG
aactccctgggctacctgca

SEQ ID NO: 21349 - DNA, 20 bp, Artificial Sequence
  Description of Artificial Sequence: Synthetic oligonucleotide
  Target: PCSK9; (-) strand; PAM type: YTN; PAM sequence: TTG
acccagggtcaaggctgaac

SEQ ID NO: 21350 - DNA, 20 bp, Artificial Sequence
  Description of Artificial Sequence: Synthetic oligonucleotide
  Target: PCSK9; (-) strand; PAM type: YTN; PAM sequence: CTG
tggaaaggtcattgacccag

SEQ ID NO: 21351 - DNA, 20 bp, Artificial Sequence
  Description of Artificial Sequence: Synthetic oligonucleotide
  Target: PCSK9; (-) strand; PAM type: YTN; PAM sequence: TTA
aaaggggagcagtgtggaac

SEQ ID NO: 21352 - DNA, 20 bp, Artificial Sequence
  Description of Artificial Sequence: Synthetic oligonucleotide
  Target: PCSK9; (-) strand; PAM type: YTN; PAM sequence: TTT
aaaaggggagcagtgtggaa

SEQ ID NO: 21353 - DNA, 20 bp, Artificial Sequence
  Description of Artificial Sequence: Synthetic oligonucleotide
  Target: PCSK9; (-) strand; PAM type: YTN; PAM sequence: TTT
taaaaggggagcagtgtgga

SEQ ID NO: 21354 - DNA, 20 bp, Artificial Sequence
  Description of Artificial Sequence: Synthetic oligonucleotide
  Target: PCSK9; (-) strand; PAM type: YTN; PAM sequence: TTG
aagataacataacaaaagac

SEQ ID NO: 21355 - DNA, 20 bp, Artificial Sequence
  Description of Artificial Sequence: Synthetic oligonucleotide
  Target: PCSK9; (-) strand; PAM type: YTN; PAM sequence: CTC
cacattgaagataacataac

SEQ ID NO: 21356 - DNA, 20 bp, Artificial Sequence
  Description of Artificial Sequence: Synthetic oligonucleotide
  Target: PCSK9; (-) strand; PAM type: YTN; PAM sequence: CTC
gagtccctccacattgaaga

SEQ ID NO: 21357 - DNA, 20 bp, Artificial Sequence
  Description of Artificial Sequence: Synthetic oligonucleotide
  Target: PCSK9; (-) strand; PAM type: YTN; PAM sequence: TTA
gatcacctcgagtccctcca

SEQ ID NO: 21358 - DNA, 20 bp, Artificial Sequence
  Description of Artificial Sequence: Synthetic oligonucleotide
  Target: PCSK9; (-) strand; PAM type: YTN; PAM sequence: CTT
agatcacctcgagtccctcc

SEQ ID NO: 21359 - DNA, 20 bp, Artificial Sequence
  Description of Artificial Sequence: Synthetic oligonucleotide
  Target: PCSK9; (-) strand; PAM type: YTN; PAM sequence: TTG
cttagatcacctcgagtccc

SEQ ID NO: 21360 - DNA, 20 bp, Artificial Sequence
  Description of Artificial Sequence: Synthetic oligonucleotide
  Target: PCSK9; (-) strand; PAM type: YTN; PAM sequence: TTT
gcttagatcacctcgagtcc

SEQ ID NO: 21361 - DNA, 20 bp, Artificial Sequence
  Description of Artificial Sequence: Synthetic oligonucleotide
  Target: PCSK9; (-) strand; PAM type: YTN; PAM sequence: CTC
agaggtatgcaagcagaaga

SEQ ID NO: 21362 - DNA, 20 bp, Artificial Sequence
  Description of Artificial Sequence: Synthetic oligonucleotide
  Target: PCSK9; (-) strand; PAM type: YTN; PAM sequence: CTG
gtctcagaggtatgcaagca

SEQ ID NO: 21363 - DNA, 20 bp, Artificial Sequence
  Description of Artificial Sequence: Synthetic oligonucleotide
  Target: PCSK9; (-) strand; PAM type: YTN; PAM sequence: CTG
cagggcccagtcatgcaagt

SEQ ID NO: 21364 - DNA, 20 bp, Artificial Sequence
  Description of Artificial Sequence: Synthetic oligonucleotide
  Target: PCSK9; (-) strand; PAM type: YTN; PAM sequence: CTG
gccagtgtgacctgcagggc

SEQ ID NO: 21365 - DNA, 20 bp, Artificial Sequence
  Description of Artificial Sequence: Synthetic oligonucleotide
  Target: PCSK9; (-) strand; PAM type: YTN; PAM sequence: CTG
cctggccagtgtgacctgca

SEQ ID NO: 21366 - DNA, 20 bp, Artificial Sequence
  Description of Artificial Sequence: Synthetic oligonucleotide
  Target: PCSK9; (-) strand; PAM type: YTN; PAM sequence: CTC
caccacatctgcctggccag

SEQ ID NO: 21367 - DNA, 20 bp, Artificial Sequence
  Description of Artificial Sequence: Synthetic oligonucleotide
  Target: PCSK9; (-) strand; PAM type: YTN; PAM sequence: TTC
ctccaccacatctgcctggc

SEQ ID NO: 21368 - DNA, 20 bp, Artificial Sequence
  Description of Artificial Sequence: Synthetic oligonucleotide
  Target: PCSK9; (-) strand; PAM type: YTN; PAM sequence: CTG
ccagttcctccaccacatct

SEQ ID NO: 21369 - DNA, 20 bp, Artificial Sequence
  Description of Artificial Sequence: Synthetic oligonucleotide
  Target: PCSK9; (-) strand; PAM type: YTN; PAM sequence: CTC
tgccagttcctccaccacat

SEQ ID NO: 21370 - DNA, 20 bp, Artificial Sequence
  Description of Artificial Sequence: Synthetic oligonucleotide
  Target: PCSK9; (-) strand; PAM type: YTN; PAM sequence: CTA
gaaaaagtcctctgccagtt

SEQ ID NO: 21371 - DNA, 20 bp, Artificial Sequence
  Description of Artificial Sequence: Synthetic oligonucleotide
  Target: PCSK9; (-) strand; PAM type: YTN; PAM sequence: CTA
aatgtagtcacagtctagaa

SEQ ID NO: 21372 - DNA, 20 bp, Artificial Sequence
  Description of Artificial Sequence: Synthetic oligonucleotide
  Target: PCSK9; (-) strand; PAM type: YTN; PAM sequence: CTG
ggtggactaaatgtagtcac

SEQ ID NO: 21373 - DNA, 20 bp, Artificial Sequence
  Description of Artificial Sequence: Synthetic oligonucleotide
  Target: PCSK9; (-) strand; PAM type: YTN; PAM sequence: TTC
ataggggggccgctgggtgg

SEQ ID NO: 21374 - DNA, 20 bp, Artificial Sequence
  Description of Artificial Sequence: Synthetic oligonucleotide
  Target: PCSK9; (-) strand; PAM type: YTN; PAM sequence: CTT
cataggggggccgctgggtg

SEQ ID NO: 21375 - DNA, 20 bp, Artificial Sequence
  Description of Artificial Sequence: Synthetic oligonucleotide
  Target: PCSK9; (-) strand; PAM type: YTN; PAM sequence: CTG
gacttcataggggggccgct

SEQ ID NO: 21376 - DNA, 20 bp, Artificial Sequence
  Description of Artificial Sequence: Synthetic oligonucleotide
  Target: PCSK9; (-) strand; PAM type: YTN; PAM sequence: CTC
aactggacttcatagggggg

SEQ ID NO: 21377 - DNA, 20 bp, Artificial Sequence
  Description of Artificial Sequence: Synthetic oligonucleotide
  Target: PCSK9; (-) strand; PAM type: YTN; PAM sequence: TTC
tcaactggacttcatagggg

SEQ ID NO: 21378 - DNA, 20 bp, Artificial Sequence
  Description of Artificial Sequence: Synthetic oligonucleotide
  Target: PCSK9; (-) strand; PAM type: YTN; PAM sequence: CTA
gttctcaactggacttcata

SEQ ID NO: 21379 - DNA, 20 bp, Artificial Sequence
  Description of Artificial Sequence: Synthetic oligonucleotide
  Target: PCSK9; (-) strand; PAM type: YTN; PAM sequence: CTG
tccaccggcccccagagtcc

SEQ ID NO: 21380 - DNA, 20 bp, Artificial Sequence
  Description of Artificial Sequence: Synthetic oligonucleotide
  Target: PCSK9; (-) strand; PAM type: YTN; PAM sequence: CTC
tgtccaccggcccccagagt

SEQ ID NO: 21381 - DNA, 20 bp, Artificial Sequence
  Description of Artificial Sequence: Synthetic oligonucleotide
  Target: PCSK9; (-) strand; PAM type: YTN; PAM sequence: TTC
tctgtccaccggcccccaga

SEQ ID NO: 21382 - DNA, 20 bp, Artificial Sequence
  Description of Artificial Sequence: Synthetic oligonucleotide
  Target: PCSK9; (-) strand; PAM type: YTN; PAM sequence: CTT
ctctgtccaccggcccccag

SEQ ID NO: 21383 - DNA, 20 bp, Artificial Sequence
  Description of Artificial Sequence: Synthetic oligonucleotide
  Target: PCSK9; (-) strand; PAM type: YTN; PAM sequence: CTC
ttctctgtccaccggccccc

SEQ ID NO: 21384 - DNA, 20 bp, Artificial Sequence
  Description of Artificial Sequence: Synthetic oligonucleotide
  Target: PCSK9; (-) strand; PAM type: YTN; PAM sequence: CTC
cctcttctctgtccaccggc

SEQ ID NO: 21385 - DNA, 20 bp, Artificial Sequence
  Description of Artificial Sequence: Synthetic oligonucleotide
  Target: PCSK9; (-) strand; PAM type: YTN; PAM sequence: CTG
gccacagaaggaagtcagta

SEQ ID NO: 21386 - DNA, 20 bp, Artificial Sequence
  Description of Artificial Sequence: Synthetic oligonucleotide
  Target: PCSK9; (-) strand; PAM type: YTN; PAM sequence: CTC
aatgtctggccacagaagga

SEQ ID NO: 21387 - DNA, 20 bp, Artificial Sequence
  Description of Artificial Sequence: Synthetic oligonucleotide
  Target: PCSK9; (-) strand; PAM type: YTN; PAM sequence: TTG
ctcaatgtctggccacagaa

SEQ ID NO: 21388 - DNA, 20 bp, Artificial Sequence
  Description of Artificial Sequence: Synthetic oligonucleotide
  Target: PCSK9; (-) strand; PAM type: YTN; PAM sequence: CTT
gctcaatgtctggccacaga

SEQ ID NO: 21389 - DNA, 20 bp, Artificial Sequence
  Description of Artificial Sequence: Synthetic oligonucleotide
  Target: PCSK9; (-) strand; PAM type: YTN; PAM sequence: CTG
tacagaggccttgctcaatg

SEQ ID NO: 21390 - DNA, 20 bp, Artificial Sequence
  Description of Artificial Sequence: Synthetic oligonucleotide
  Target: PCSK9; (-) strand; PAM type: YTN; PAM sequence: CTA
cggcaaggccagccccagga

SEQ ID NO: 21391 - DNA, 20 bp, Artificial Sequence
  Description of Artificial Sequence: Synthetic oligonucleotide
  Target: PCSK9; (-) strand; PAM type: YTN; PAM sequence: TTA
gcagctacggcaaggccagc

SEQ ID NO: 21392 - DNA, 20 bp, Artificial Sequence
  Description of Artificial Sequence: Synthetic oligonucleotide
  Target: PCSK9; (-) strand; PAM type: YTN; PAM sequence: TTT
agcagctacggcaaggccag

SEQ ID NO: 21393 - DNA, 20 bp, Artificial Sequence
  Description of Artificial Sequence: Synthetic oligonucleotide
  Target: PCSK9; (-) strand; PAM type: YTN; PAM sequence: CTA
tttagcagctacggcaaggc

SEQ ID NO: 21394 - DNA, 20 bp, Artificial Sequence
  Description of Artificial Sequence: Synthetic oligonucleotide
  Target: PCSK9; (-) strand; PAM type: YTN; PAM sequence: TTC
gtcaactatttagcagctac

SEQ ID NO: 21395 - DNA, 20 bp, Artificial Sequence
  Description of Artificial Sequence: Synthetic oligonucleotide
  Target: PCSK9; (-) strand; PAM type: YTN; PAM sequence: TTT
cgtcaactatttagcagcta

SEQ ID NO: 21396 - DNA, 20 bp, Artificial Sequence
  Description of Artificial Sequence: Synthetic oligonucleotide
  Target: PCSK9; (-) strand; PAM type: YTN; PAM sequence: CTG
gtttcgtcaactatttagca

SEQ ID NO: 21397 - DNA, 20 bp, Artificial Sequence
  Description of Artificial Sequence: Synthetic oligonucleotide
  Target: PCSK9; (-) strand; PAM type: YTN; PAM sequence: CTG
gactggtttcgtcaactatt

SEQ ID NO: 21398 - DNA, 20 bp, Artificial Sequence
  Description of Artificial Sequence: Synthetic oligonucleotide
  Target: PCSK9; (-) strand; PAM type: YTN; PAM sequence: CTC
tggactggtttcgtcaacta

SEQ ID NO: 21399 - DNA, 20 bp, Artificial Sequence
  Description of Artificial Sequence: Synthetic oligonucleotide
  Target: PCSK9; (-) strand; PAM type: YTN; PAM sequence: CTC
tctggactggtttcgtcaac

SEQ ID NO: 21400 - DNA, 20 bp, Artificial Sequence
  Description of Artificial Sequence: Synthetic oligonucleotide
  Target: PCSK9; (-) strand; PAM type: YTN; PAM sequence: CTC
ccctctctggactggtttcg

SEQ ID NO: 21401 - DNA, 20 bp, Artificial Sequence
  Description of Artificial Sequence: Synthetic oligonucleotide
  Target: PCSK9; (-) strand; PAM type: YTN; PAM sequence: CTG
gcagtcacctcccctctctg

SEQ ID NO: 21402 - DNA, 20 bp, Artificial Sequence
  Description of Artificial Sequence: Synthetic oligonucleotide
  Target: PCSK9; (-) strand; PAM type: YTN; PAM sequence: CTG
tgcgaccctggcagtcacct

SEQ ID NO: 21403 - DNA, 20 bp, Artificial Sequence
  Description of Artificial Sequence: Synthetic oligonucleotide
  Target: PCSK9; (-) strand; PAM type: YTN; PAM sequence: TTG
agctgtgcgaccctggcagt

SEQ ID NO: 21404 - DNA, 20 bp, Artificial Sequence
  Description of Artificial Sequence: Synthetic oligonucleotide
  Target: PCSK9; (-) strand; PAM type: YTN; PAM sequence: CTT
gagctgtgcgaccctggcag

SEQ ID NO: 21405 - DNA, 20 bp, Artificial Sequence
  Description of Artificial Sequence: Synthetic oligonucleotide
  Target: PCSK9; (-) strand; PAM type: YTN; PAM sequence: TTC
cccagcttgagctgtgcgac

SEQ ID NO: 21406 - DNA, 20 bp, Artificial Sequence
  Description of Artificial Sequence: Synthetic oligonucleotide
  Target: PCSK9; (-) strand; PAM type: YTN; PAM sequence: TTC
ccagcgagttccccagcttg

SEQ ID NO: 21407 - DNA, 20 bp, Artificial Sequence
  Description of Artificial Sequence: Synthetic oligonucleotide
  Target: PCSK9; (-) strand; PAM type: YTN; PAM sequence: TTT
cccagcgagttccccagctt

SEQ ID NO: 21408 - DNA, 20 bp, Artificial Sequence
  Description of Artificial Sequence: Synthetic oligonucleotide
  Target: PCSK9; (-) strand; PAM type: YTN; PAM sequence: TTT
tcccagcgagttccccagct

SEQ ID NO: 21409 - DNA, 20 bp, Artificial Sequence
  Description of Artificial Sequence: Synthetic oligonucleotide
  Target: PCSK9; (-) strand; PAM type: YTN; PAM sequence: CTG
acagttttcccagcgagttc

SEQ ID NO: 21410 - DNA, 20 bp, Artificial Sequence
  Description of Artificial Sequence: Synthetic oligonucleotide
  Target: PCSK9; (-) strand; PAM type: YTN; PAM sequence: CTG
cccagagctgacagttttcc

SEQ ID NO: 21411 - DNA, 20 bp, Artificial Sequence
  Description of Artificial Sequence: Synthetic oligonucleotide
  Target: PCSK9; (-) strand; PAM type: YTN; PAM sequence: CTG
ctgcccagagctgacagttt

SEQ ID NO: 21412 - DNA, 20 bp, Artificial Sequence
  Description of Artificial Sequence: Synthetic oligonucleotide
  Target: PCSK9; (-) strand; PAM type: YTN; PAM sequence: TTA
cagtggaagtcaagctgctg

SEQ ID NO: 21413 - DNA, 20 bp, Artificial Sequence
  Description of Artificial Sequence: Synthetic oligonucleotide
  Target: PCSK9; (-) strand; PAM type: YTN; PAM sequence: CTT
acagtggaagtcaagctgct

SEQ ID NO: 21414 - DNA, 20 bp, Artificial Sequence
  Description of Artificial Sequence: Synthetic oligonucleotide
  Target: PCSK9; (-) strand; PAM type: YTN; PAM sequence: CTG
gggcttacagtggaagtcaa

SEQ ID NO: 21415 - DNA, 20 bp, Artificial Sequence
  Description of Artificial Sequence: Synthetic oligonucleotide
  Target: PCSK9; (-) strand; PAM type: YTN; PAM sequence: CTG
ggggctggggcttacagtgg

SEQ ID NO: 21416 - DNA, 20 bp, Artificial Sequence
  Description of Artificial Sequence: Synthetic oligonucleotide
  Target: PCSK9; (-) strand; PAM type: YTN; PAM sequence: TTG
accctgggggctggggctta

SEQ ID NO: 21417 - DNA, 20 bp, Artificial Sequence
  Description of Artificial Sequence: Synthetic oligonucleotide
  Target: PCSK9; (-) strand; PAM type: YTN; PAM sequence: TTT
gaccctgggggctggggctt

SEQ ID NO: 21418 - DNA, 20 bp, Artificial Sequence
  Description of Artificial Sequence: Synthetic oligonucleotide
  Target: PCSK9; (-) strand; PAM type: YTN; PAM sequence: CTG
ccagcaccagagccagtgtt

SEQ ID NO: 21419 - DNA, 20 bp, Artificial Sequence
  Description of Artificial Sequence: Synthetic oligonucleotide
  Target: PCSK9; (-) strand; PAM type: YTN; PAM sequence: CTC
tgccagcaccagagccagtg

SEQ ID NO: 21420 - DNA, 20 bp, Artificial Sequence
  Description of Artificial Sequence: Synthetic oligonucleotide
  Target: PCSK9; (-) strand; PAM type: YTN; PAM sequence: CTG
cctctgccagcaccagagcc

SEQ ID NO: 21421 - DNA, 20 bp, Artificial Sequence
  Description of Artificial Sequence: Synthetic oligonucleotide
  Target: PCSK9; (-) strand; PAM type: YTN; PAM sequence: CTA
gtgggctgcctctgccagca

SEQ ID NO: 21422 - DNA, 20 bp, Artificial Sequence
  Description of Artificial Sequence: Synthetic oligonucleotide
  Target: PCSK9; (-) strand; PAM type: YTN; PAM sequence: TTG
aaacaggctagtgggctgcc

SEQ ID NO: 21423 - DNA, 20 bp, Artificial Sequence
  Description of Artificial Sequence: Synthetic oligonucleotide
  Target: PCSK9; (-) strand; PAM type: YTN; PAM sequence: TTT
gaaacaggctagtgggctgc

SEQ ID NO: 21424 - DNA, 20 bp, Artificial Sequence
  Description of Artificial Sequence: Synthetic oligonucleotide
  Target: PCSK9; (-) strand; PAM type: YTN; PAM sequence: CTT
tgaaacaggctagtgggctg

SEQ ID NO: 21425 - DNA, 20 bp, Artificial Sequence
  Description of Artificial Sequence: Synthetic oligonucleotide
  Target: PCSK9; (-) strand; PAM type: YTN; PAM sequence: CTC
agcctttgaaacaggctagt

SEQ ID NO: 21426 - DNA, 20 bp, Artificial Sequence
  Description of Artificial Sequence: Synthetic oligonucleotide
  Target: PCSK9; (-) strand; PAM type: YTN; PAM sequence: TTC
tcagcctttgaaacaggcta

SEQ ID NO: 21427 - DNA, 20 bp, Artificial Sequence
  Description of Artificial Sequence: Synthetic oligonucleotide
  Target: PCSK9; (-) strand; PAM type: YTN; PAM sequence: CTT
ctcagcctttgaaacaggct

SEQ ID NO: 21428 - DNA, 20 bp, Artificial Sequence
  Description of Artificial Sequence: Synthetic oligonucleotide
  Target: PCSK9; (-) strand; PAM type: YTN; PAM sequence: CTG
ggccttctcagcctttgaaa

SEQ ID NO: 21429 - DNA, 20 bp, Artificial Sequence
  Description of Artificial Sequence: Synthetic oligonucleotide
  Target: PCSK9; (-) strand; PAM type: YTN; PAM sequence: CTC
ctgggccttctcagcctttg

SEQ ID NO: 21430 - DNA, 20 bp, Artificial Sequence
  Description of Artificial Sequence: Synthetic oligonucleotide
  Target: PCSK9; (-) strand; PAM type: YTN; PAM sequence: CTG
gtggagcacagggcagactc

SEQ ID NO: 21431 - DNA, 20 bp, Artificial Sequence
  Description of Artificial Sequence: Synthetic oligonucleotide
  Target: PCSK9; (-) strand; PAM type: YTN; PAM sequence: CTC
agggcagaactggtggagca

SEQ ID NO: 21432 - DNA, 20 bp, Artificial Sequence
  Description of Artificial Sequence: Synthetic oligonucleotide
  Target: PCSK9; (-) strand; PAM type: YTN; PAM sequence: CTG
taggaaagtctcagggcaga

SEQ ID NO: 21433 - DNA, 20 bp, Artificial Sequence
  Description of Artificial Sequence: Synthetic oligonucleotide
  Target: PCSK9; (-) strand; PAM type: YTN; PAM sequence: CTC
tgtaggaaagtctcagggca

SEQ ID NO: 21434 - DNA, 20 bp, Artificial Sequence
  Description of Artificial Sequence: Synthetic oligonucleotide
  Target: PCSK9; (-) strand; PAM type: YTN; PAM sequence: CTG
tactctgtaggaaagtctca

SEQ ID NO: 21435 - DNA, 20 bp, Artificial Sequence
  Description of Artificial Sequence: Synthetic oligonucleotide
  Target: PCSK9; (-) strand; PAM type: YTN; PAM sequence: CTG
aacatcaaaacctgtactct

SEQ ID NO: 21436 - DNA, 20 bp, Artificial Sequence
  Description of Artificial Sequence: Synthetic oligonucleotide
  Target: PCSK9; (-) strand; PAM type: YTN; PAM sequence: TTA
aaactgaacatcaaaacctg

SEQ ID NO: 21437 - DNA, 20 bp, Artificial Sequence
  Description of Artificial Sequence: Synthetic oligonucleotide
  Target: PCSK9; (-) strand; PAM type: YTN; PAM sequence: TTT
aaaactgaacatcaaaacct

SEQ ID NO: 21438 - DNA, 20 bp, Artificial Sequence
  Description of Artificial Sequence: Synthetic oligonucleotide
  Target: PCSK9; (-) strand; PAM type: YTN; PAM sequence: CTT
taaaactgaacatcaaaacc

SEQ ID NO: 21439 - DNA, 20 bp, Artificial Sequence
  Description of Artificial Sequence: Synthetic oligonucleotide
  Target: PCSK9; (-) strand; PAM type: YTN; PAM sequence: TTG
cctttaaaactgaacatcaa

SEQ ID NO: 21440 - DNA, 20 bp, Artificial Sequence
  Description of Artificial Sequence: Synthetic oligonucleotide
  Target: PCSK9; (-) strand; PAM type: YTN; PAM sequence: CTT
gcctttaaaactgaacatca

SEQ ID NO: 21441 - DNA, 20 bp, Artificial Sequence
  Description of Artificial Sequence: Synthetic oligonucleotide
  Target: PCSK9; (-) strand; PAM type: YTN; PAM sequence: TTC
ttgcctttaaaactgaacat

SEQ ID NO: 21442 - DNA, 20 bp, Artificial Sequence
  Description of Artificial Sequence: Synthetic oligonucleotide
  Target: PCSK9; (-) strand; PAM type: YTN; PAM sequence: TTG
attcttgcctttaaaactga

SEQ ID NO: 21443 - DNA, 20 bp, Artificial Sequence
  Description of Artificial Sequence: Synthetic oligonucleotide
  Target: PCSK9; (-) strand; PAM type: YTN; PAM sequence: TTA
ttgattcttgcctttaaaac

SEQ ID NO: 21444 - DNA, 20 bp, Artificial Sequence
  Description of Artificial Sequence: Synthetic oligonucleotide
  Target: PCSK9; (-) strand; PAM type: YTN; PAM sequence: CTG
atggggcagaaggttattga

SEQ ID NO: 21445 - DNA, 20 bp, Artificial Sequence
  Description of Artificial Sequence: Synthetic oligonucleotide
  Target: PCSK9; (-) strand; PAM type: YTN; PAM sequence: CTG
agccgaggtcagtcaataaa

SEQ ID NO: 21446 - DNA, 20 bp, Artificial Sequence
  Description of Artificial Sequence: Synthetic oligonucleotide
  Target: PCSK9; (-) strand; PAM type: YTN; PAM sequence: CTG
actgagccgaggtcagtcaa

SEQ ID NO: 21447 - DNA, 20 bp, Artificial Sequence
  Description of Artificial Sequence: Synthetic oligonucleotide
  Target: PCSK9; (-) strand; PAM type: YTN; PAM sequence: CTG
acctgactgagccgaggtca

SEQ ID NO: 21448 - DNA, 20 bp, Artificial Sequence
  Description of Artificial Sequence: Synthetic oligonucleotide
  Target: PCSK9; (-) strand; PAM type: YTN; PAM sequence: TTC
aggaactgacctgactgagc

SEQ ID NO: 21449 - DNA, 20 bp, Artificial Sequence
  Description of Artificial Sequence: Synthetic oligonucleotide
  Target: PCSK9; (-) strand; PAM type: YTN; PAM sequence: CTT
caggaactgacctgactgag

SEQ ID NO: 21450 - DNA, 20 bp, Artificial Sequence
  Description of Artificial Sequence: Synthetic oligonucleotide
  Target: PCSK9; (-) strand; PAM type: YTN; PAM sequence: CTG
accttcaggaactgacctga

SEQ ID NO: 21451 - DNA, 20 bp, Artificial Sequence
  Description of Artificial Sequence: Synthetic oligonucleotide
  Target: PCSK9; (-) strand; PAM type: YTN; PAM sequence: CTC
cacacactgaccttcaggaa

SEQ ID NO: 21452 - DNA, 20 bp, Artificial Sequence
  Description of Artificial Sequence: Synthetic oligonucleotide
  Target: PCSK9; (-) strand; PAM type: YTN; PAM sequence: CTC
ccctccacacactgaccttc

SEQ ID NO: 21453 - DNA, 20 bp, Artificial Sequence
  Description of Artificial Sequence: Synthetic oligonucleotide
  Target: PCSK9; (-) strand; PAM type: YTN; PAM sequence: CTG
ggaaagaacagcctcccctc

SEQ ID NO: 21454 - DNA, 20 bp, Artificial Sequence
  Description of Artificial Sequence: Synthetic oligonucleotide
  Target: PCSK9; (-) strand; PAM type: YTN; PAM sequence: TTC
tgggaaagaacagcctcccc

SEQ ID NO: 21455 - DNA, 20 bp, Artificial Sequence
  Description of Artificial Sequence: Synthetic oligonucleotide
  Target: PCSK9; (-) strand; PAM type: YTN; PAM sequence: TTT
ctgggaaagaacagcctccc

SEQ ID NO: 21456 - DNA, 20 bp, Artificial Sequence
  Description of Artificial Sequence: Synthetic oligonucleotide
  Target: PCSK9; (-) strand; PAM type: YTN; PAM sequence: CTT
tctgggaaagaacagcctcc

SEQ ID NO: 21457 - DNA, 20 bp, Artificial Sequence
  Description of Artificial Sequence: Synthetic oligonucleotide
  Target: PCSK9; (-) strand; PAM type: YTN; PAM sequence: CTG
gggaaggcctttctgggaaa

SEQ ID NO: 21458 - DNA, 20 bp, Artificial Sequence
  Description of Artificial Sequence: Synthetic oligonucleotide
  Target: PCSK9; (-) strand; PAM type: YTN; PAM sequence: CTC
cagaggccagagcaccaggc

SEQ ID NO: 21459 - DNA, 20 bp, Artificial Sequence
  Description of Artificial Sequence: Synthetic oligonucleotide
  Target: PCSK9; (-) strand; PAM type: YTN; PAM sequence: CTC
caggaagtcctccagaggcc

SEQ ID NO: 21460 - DNA, 20 bp, Artificial Sequence
  Description of Artificial Sequence: Synthetic oligonucleotide
  Target: PCSK9; (-) strand; PAM type: YTN; PAM sequence: TTC
tccaggaagtcctccagagg

SEQ ID NO: 21461 - DNA, 20 bp, Artificial Sequence
  Description of Artificial Sequence: Synthetic oligonucleotide
  Target: PCSK9; (-) strand; PAM type: YTN; PAM sequence: CTT
ctccaggaagtcctccagag

SEQ ID NO: 21462 - DNA, 20 bp, Artificial Sequence
  Description of Artificial Sequence: Synthetic oligonucleotide
  Target: PCSK9; (-) strand; PAM type: YTN; PAM sequence: CTG
ggaccccaaagaagggactt

SEQ ID NO: 21463 - DNA, 20 bp, Artificial Sequence
  Description of Artificial Sequence: Synthetic oligonucleotide
  Target: PCSK9; (-) strand; PAM type: YTN; PAM sequence: CTG
actgggaccccaaagaaggg

SEQ ID NO: 21464 - DNA, 20 bp, Artificial Sequence
  Description of Artificial Sequence: Synthetic oligonucleotide
  Target: PCSK9; (-) strand; PAM type: YTN; PAM sequence: TTC
ccatacactgactgggaccc

SEQ ID NO: 21465 - DNA, 20 bp, Artificial Sequence
  Description of Artificial Sequence: Synthetic oligonucleotide
  Target: PCSK9; (-) strand; PAM type: YTN; PAM sequence: CTT
cccatacactgactgggacc

SEQ ID NO: 21466 - DNA, 20 bp, Artificial Sequence
  Description of Artificial Sequence: Synthetic oligonucleotide
  Target: PCSK9; (-) strand; PAM type: YTN; PAM sequence: CTG
ccccgtgccaggtcatgcaa

SEQ ID NO: 21467 - DNA, 20 bp, Artificial Sequence
  Description of Artificial Sequence: Synthetic oligonucleotide
  Target: PCSK9; (-) strand; PAM type: YTN; PAM sequence: TTG
agcccctgccccgtgccagg

SEQ ID NO: 21468 - DNA, 20 bp, Artificial Sequence
  Description of Artificial Sequence: Synthetic oligonucleotide
  Target: PCSK9; (-) strand; PAM type: YTN; PAM sequence: CTG
ttgagcccctgccccgtgcc

SEQ ID NO: 21469 - DNA, 20 bp, Artificial Sequence
  Description of Artificial Sequence: Synthetic oligonucleotide
  Target: PCSK9; (-) strand; PAM type: YTN; PAM sequence: TTA
cagaggaggaaatggcagtg

SEQ ID NO: 21470 - DNA, 20 bp, Artificial Sequence
  Description of Artificial Sequence: Synthetic oligonucleotide
  Target: PCSK9; (-) strand; PAM type: YTN; PAM sequence: CTT
acagaggaggaaatggcagt

SEQ ID NO: 21471 - DNA, 20 bp, Artificial Sequence
  Description of Artificial Sequence: Synthetic oligonucleotide
  Target: PCSK9; (-) strand; PAM type: YTN; PAM sequence: CTG
cttacagaggaggaaatggc

SEQ ID NO: 21472 - DNA, 20 bp, Artificial Sequence
  Description of Artificial Sequence: Synthetic oligonucleotide
  Target: PCSK9; (-) strand; PAM type: YTN; PAM sequence: CTG
gacacacaatcacctgctta

SEQ ID NO: 21473 - DNA, 20 bp, Artificial Sequence
  Description of Artificial Sequence: Synthetic oligonucleotide
  Target: PCSK9; (-) strand; PAM type: YTN; PAM sequence: CTC
agactggacacacaatcacc

SEQ ID NO: 21474 - DNA, 20 bp, Artificial Sequence
  Description of Artificial Sequence: Synthetic oligonucleotide
  Target: PCSK9; (-) strand; PAM type: YTN; PAM sequence: CTG
tgctcagactggacacacaa

SEQ ID NO: 21475 - DNA, 20 bp, Artificial Sequence
  Description of Artificial Sequence: Synthetic oligonucleotide
  Target: PCSK9; (-) strand; PAM type: YTN; PAM sequence: CTC
tgtgctcagactggacacac

SEQ ID NO: 21476 - DNA, 20 bp, Artificial Sequence
  Description of Artificial Sequence: Synthetic oligonucleotide
  Target: PCSK9; (-) strand; PAM type: YTN; PAM sequence: TTA
tctctgtgctcagactggac

SEQ ID NO: 21477 - DNA, 20 bp, Artificial Sequence
  Description of Artificial Sequence: Synthetic oligonucleotide
  Target: PCSK9; (-) strand; PAM type: YTN; PAM sequence: CTT
atctctgtgctcagactgga

SEQ ID NO: 21478 - DNA, 20 bp, Artificial Sequence
  Description of Artificial Sequence: Synthetic oligonucleotide
  Target: PCSK9; (-) strand; PAM type: YTN; PAM sequence: CTG
tgtgcttatctctgtgctca

SEQ ID NO: 21479 - DNA, 20 bp, Artificial Sequence
  Description of Artificial Sequence: Synthetic oligonucleotide
  Target: PCSK9; (-) strand; PAM type: YTN; PAM sequence: CTG
ctgtgtgcttatctctgtgc

SEQ ID NO: 21480 - DNA, 20 bp, Artificial Sequence
  Description of Artificial Sequence: Synthetic oligonucleotide
  Target: PCSK9; (-) strand; PAM type: YTN; PAM sequence: TTA
agcacctgctgtgtgcttat

SEQ ID NO: 21481 - DNA, 20 bp, Artificial Sequence
  Description of Artificial Sequence: Synthetic oligonucleotide
  Target: PCSK9; (-) strand; PAM type: YTN; PAM sequence: TTA
ttaagcacctgctgtgtgct

SEQ ID NO: 21482 - DNA, 20 bp, Artificial Sequence
  Description of Artificial Sequence: Synthetic oligonucleotide
  Target: PCSK9; (-) strand; PAM type: YTN; PAM sequence: CTA
gttattaagcacctgctgtg

SEQ ID NO: 21483 - DNA, 20 bp, Artificial Sequence
  Description of Artificial Sequence: Synthetic oligonucleotide
  Target: PCSK9; (-) strand; PAM type: YTN; PAM sequence: CTG
ctagttattaagcacctgct

SEQ ID NO: 21484 - DNA, 20 bp, Artificial Sequence
  Description of Artificial Sequence: Synthetic oligonucleotide
  Target: PCSK9; (-) strand; PAM type: YTN; PAM sequence: CTA
cagctgctagttattaagca

SEQ ID NO: 21485 - DNA, 20 bp, Artificial Sequence
  Description of Artificial Sequence: Synthetic oligonucleotide
  Target: PCSK9; (-) strand; PAM type: YTN; PAM sequence: TTA
caggcatgagccaccgcgcc

SEQ ID NO: 21486 - DNA, 20 bp, Artificial Sequence
  Description of Artificial Sequence: Synthetic oligonucleotide
  Target: PCSK9; (-) strand; PAM type: YTN; PAM sequence: CTG
ggattacaggcatgagccac

SEQ ID NO: 21487 - DNA, 20 bp, Artificial Sequence
  Description of Artificial Sequence: Synthetic oligonucleotide
  Target: PCSK9; (-) strand; PAM type: YTN; PAM sequence: CTC
ccaaagtgctgggattacag

SEQ ID NO: 21488 - DNA, 20 bp, Artificial Sequence
  Description of Artificial Sequence: Synthetic oligonucleotide
  Target: PCSK9; (-) strand; PAM type: YTN; PAM sequence: CTC
ggcctcccaaagtgctggga

SEQ ID NO: 21489 - DNA, 20 bp, Artificial Sequence
  Description of Artificial Sequence: Synthetic oligonucleotide
  Target: PCSK9; (-) strand; PAM type: YTN; PAM sequence: CTG
cccacctcggcctcccaaag

SEQ ID NO: 21490 - DNA, 20 bp, Artificial Sequence
  Description of Artificial Sequence: Synthetic oligonucleotide
  Target: PCSK9; (-) strand; PAM type: YTN; PAM sequence: CTC
aggtgatctgcccacctcgg

SEQ ID NO: 21491 - DNA, 20 bp, Artificial Sequence
  Description of Artificial Sequence: Synthetic oligonucleotide
  Target: PCSK9; (-) strand; PAM type: YTN; PAM sequence: CTG
acctcaggtgatctgcccac

SEQ ID NO: 21492 - DNA, 20 bp, Artificial Sequence
  Description of Artificial Sequence: Synthetic oligonucleotide
  Target: PCSK9; (-) strand; PAM type: YTN; PAM sequence: CTC
ctgacctcaggtgatctgcc

SEQ ID NO: 21493 - DNA, 20 bp, Artificial Sequence
  Description of Artificial Sequence: Synthetic oligonucleotide
  Target: PCSK9; (-) strand; PAM type: YTN; PAM sequence: CTC
gaactcctgacctcaggtga

SEQ ID NO: 21494 - DNA, 20 bp, Artificial Sequence
  Description of Artificial Sequence: Synthetic oligonucleotide
  Target: PCSK9; (-) strand; PAM type: YTN; PAM sequence: CTG
gtctcgaactcctgacctca

SEQ ID NO: 21495 - DNA, 20 bp, Artificial Sequence
  Description of Artificial Sequence: Synthetic oligonucleotide
  Target: PCSK9; (-) strand; PAM type: YTN; PAM sequence: TTG
aacaggctggtctcgaactc

SEQ ID NO: 21496 - DNA, 20 bp, Artificial Sequence
  Description of Artificial Sequence: Synthetic oligonucleotide
  Target: PCSK9; (-) strand; PAM type: YTN; PAM sequence: TTC
accatgttgaacaggctggt

SEQ ID NO: 21497 - DNA, 20 bp, Artificial Sequence
  Description of Artificial Sequence: Synthetic oligonucleotide
  Target: PCSK9; (-) strand; PAM type: YTN; PAM sequence: TTT
caccatgttgaacaggctgg

SEQ ID NO: 21498 - DNA, 20 bp, Artificial Sequence
  Description of Artificial Sequence: Synthetic oligonucleotide
  Target: PCSK9; (-) strand; PAM type: YTN; PAM sequence: TTA
gtagagacggggtttcacca

SEQ ID NO: 21499 - DNA, 20 bp, Artificial Sequence
  Description of Artificial Sequence: Synthetic oligonucleotide
  Target: PCSK9; (-) strand; PAM type: YTN; PAM sequence: TTT
agtagagacggggtttcacc

SEQ ID NO: 21500 - DNA, 20 bp, Artificial Sequence
  Description of Artificial Sequence: Synthetic oligonucleotide
  Target: PCSK9; (-) strand; PAM type: YTN; PAM sequence: TTT
tagtagagacggggtttcac

SEQ ID NO: 21501 - DNA, 20 bp, Artificial Sequence
  Description of Artificial Sequence: Synthetic oligonucleotide
  Target: PCSK9; (-) strand; PAM type: YTN; PAM sequence: TTT
ttagtagagacggggtttca

SEQ ID NO: 21502 - DNA, 20 bp, Artificial Sequence
  Description of Artificial Sequence: Synthetic oligonucleotide
  Target: PCSK9; (-) strand; PAM type: YTN; PAM sequence: TTG
tatttttagtagagacgggg

SEQ ID NO: 21503 - DNA, 20 bp, Artificial Sequence
  Description of Artificial Sequence: Synthetic oligonucleotide
  Target: PCSK9; (-) strand; PAM type: YTN; PAM sequence: TTT
gtatttttagtagagacggg

SEQ ID NO: 21504 - DNA, 20 bp, Artificial Sequence
  Description of Artificial Sequence: Synthetic oligonucleotide
  Target: PCSK9; (-) strand; PAM type: YTN; PAM sequence: TTT
tgtatttttagtagagacgg

SEQ ID NO: 21505 - DNA, 20 bp, Artificial Sequence
  Description of Artificial Sequence: Synthetic oligonucleotide
  Target: PCSK9; (-) strand; PAM type: YTN; PAM sequence: TTT
ttgtatttttagtagagacg

SEQ ID NO: 21506 - DNA, 20 bp, Artificial Sequence
  Description of Artificial Sequence: Synthetic oligonucleotide
  Target: PCSK9; (-) strand; PAM type: YTN; PAM sequence: CTA
atttttgtatttttagtaga

SEQ ID NO: 21507 - DNA, 20 bp, Artificial Sequence
  Description of Artificial Sequence: Synthetic oligonucleotide
  Target: PCSK9; (-) strand; PAM type: YTN; PAM sequence: CTG
gctaatttttgtatttttag

SEQ ID NO: 21508 - DNA, 20 bp, Artificial Sequence
  Description of Artificial Sequence: Synthetic oligonucleotide
  Target: PCSK9; (-) strand; PAM type: YTN; PAM sequence: CTG
ggatacagacacccaccacc

SEQ ID NO: 21509 - DNA, 20 bp, Artificial Sequence
  Description of Artificial Sequence: Synthetic oligonucleotide
  Target: PCSK9; (-) strand; PAM type: YTN; PAM sequence: CTC
ccaagtagctgggatacaga

SEQ ID NO: 21510 - DNA, 20 bp, Artificial Sequence
  Description of Artificial Sequence: Synthetic oligonucleotide
  Target: PCSK9; (-) strand; PAM type: YTN; PAM sequence: TTA
gcctcccaagtagctgggat

SEQ ID NO: 21511 - DNA, 20 bp, Artificial Sequence
  Description of Artificial Sequence: Synthetic oligonucleotide
  Target: PCSK9; (-) strand; PAM type: YTN; PAM sequence: CTT
agcctcccaagtagctggga

SEQ ID NO: 21512 - DNA, 20 bp, Artificial Sequence
  Description of Artificial Sequence: Synthetic oligonucleotide
  Target: PCSK9; (-) strand; PAM type: YTN; PAM sequence: CTG
ccttagcctcccaagtagct

SEQ ID NO: 21513 - DNA, 20 bp, Artificial Sequence
  Description of Artificial Sequence: Synthetic oligonucleotide
  Target: PCSK9; (-) strand; PAM type: YTN; PAM sequence: CTC
ctgccttagcctcccaagta

SEQ ID NO: 21514 - DNA, 20 bp, Artificial Sequence
  Description of Artificial Sequence: Synthetic oligonucleotide
  Target: PCSK9; (-) strand; PAM type: YTN; PAM sequence: TTC
tcctgccttagcctcccaag

SEQ ID NO: 21515 - DNA, 20 bp, Artificial Sequence
  Description of Artificial Sequence: Synthetic oligonucleotide
  Target: PCSK9; (-) strand; PAM type: YTN; PAM sequence: TTC
aagcgattctcctgccttag

SEQ ID NO: 21516 - DNA, 20 bp, Artificial Sequence
  Description of Artificial Sequence: Synthetic oligonucleotide
  Target: PCSK9; (-) strand; PAM type: YTN; PAM sequence: CTG
ggttcaagcgattctcctgc

SEQ ID NO: 21517 - DNA, 20 bp, Artificial Sequence
  Description of Artificial Sequence: Synthetic oligonucleotide
  Target: PCSK9; (-) strand; PAM type: YTN; PAM sequence: CTC
ctgggttcaagcgattctcc

SEQ ID NO: 21518 - DNA, 20 bp, Artificial Sequence
  Description of Artificial Sequence: Synthetic oligonucleotide
  Target: PCSK9; (-) strand; PAM type: YTN; PAM sequence: CTC
cacctcctgggttcaagcga

SEQ ID NO: 21519 - DNA, 20 bp, Artificial Sequence
  Description of Artificial Sequence: Synthetic oligonucleotide
  Target: PCSK9; (-) strand; PAM type: YTN; PAM sequence: CTG
caacctccacctcctgggtt

SEQ ID NO: 21520 - DNA, 20 bp, Artificial Sequence
  Description of Artificial Sequence: Synthetic oligonucleotide
  Target: PCSK9; (-) strand; PAM type: YTN; PAM sequence: CTC
actgcaacctccacctcctg

SEQ ID NO: 21521 - DNA, 20 bp, Artificial Sequence
  Description of Artificial Sequence: Synthetic oligonucleotide
  Target: PCSK9; (-) strand; PAM type: YTN; PAM sequence: CTC
agctcactgcaacctccacc

SEQ ID NO: 21522 - DNA, 20 bp, Artificial Sequence
  Description of Artificial Sequence: Synthetic oligonucleotide
  Target: PCSK9; (-) strand; PAM type: YTN; PAM sequence: TTG
cagtggcacgatctcagctc

SEQ ID NO: 21523 - DNA, 20 bp, Artificial Sequence
  Description of Artificial Sequence: Synthetic oligonucleotide
  Target: PCSK9; (-) strand; PAM type: YTN; PAM sequence: CTG
gattgcagtggcacgatctc

SEQ ID NO: 21524 - DNA, 20 bp, Artificial Sequence
  Description of Artificial Sequence: Synthetic oligonucleotide
  Target: PCSK9; (-) strand; PAM type: YTN; PAM sequence: CTC
aggctggattgcagtggcac

SEQ ID NO: 21525 - DNA, 20 bp, Artificial Sequence
  Description of Artificial Sequence: Synthetic oligonucleotide
  Target: PCSK9; (-) strand; PAM type: YTN; PAM sequence: CTA
tcactcaggctggattgcag

SEQ ID NO: 21526 - DNA, 20 bp, Artificial Sequence
  Description of Artificial Sequence: Synthetic oligonucleotide
  Target: PCSK9; (-) strand; PAM type: YTN; PAM sequence: CTC
tatcactcaggctggattgc

SEQ ID NO: 21527 - DNA, 20 bp, Artificial Sequence
  Description of Artificial Sequence: Synthetic oligonucleotide
  Target: PCSK9; (-) strand; PAM type: YTN; PAM sequence: CTC
gctctatcactcaggctgga

SEQ ID NO: 21528 - DNA, 20 bp, Artificial Sequence
  Description of Artificial Sequence: Synthetic oligonucleotide
  Target: PCSK9; (-) strand; PAM type: YTN; PAM sequence: TTG
agatggaatctcgctctatc

SEQ ID NO: 21529 - DNA, 20 bp, Artificial Sequence
  Description of Artificial Sequence: Synthetic oligonucleotide
  Target: PCSK9; (-) strand; PAM type: YTN; PAM sequence: TTT
gagatggaatctcgctctat

SEQ ID NO: 21530 - DNA, 20 bp, Artificial Sequence
  Description of Artificial Sequence: Synthetic oligonucleotide
  Target: PCSK9; (-) strand; PAM type: YTN; PAM sequence: TTT
tgagatggaatctcgctcta

SEQ ID NO: 21531 - DNA, 20 bp, Artificial Sequence
  Description of Artificial Sequence: Synthetic oligonucleotide
  Target: PCSK9; (-) strand; PAM type: YTN; PAM sequence: TTT
ttgagatggaatctcgctct

SEQ ID NO: 21532 - DNA, 20 bp, Artificial Sequence
  Description of Artificial Sequence: Synthetic oligonucleotide
  Target: PCSK9; (-) strand; PAM type: YTN; PAM sequence: TTA
tttttgagatggaatctcgc

SEQ ID NO: 21533 - DNA, 20 bp, Artificial Sequence
  Description of Artificial Sequence: Synthetic oligonucleotide
  Target: PCSK9; (-) strand; PAM type: YTN; PAM sequence: TTT
atttttgagatggaatctcg

SEQ ID NO: 21534 - DNA, 20 bp, Artificial Sequence
  Description of Artificial Sequence: Synthetic oligonucleotide
  Target: PCSK9; (-) strand; PAM type: YTN; PAM sequence: TTA
tttatttttgagatggaatc

SEQ ID NO: 21535 - DNA, 20 bp, Artificial Sequence
  Description of Artificial Sequence: Synthetic oligonucleotide
  Target: PCSK9; (-) strand; PAM type: YTN; PAM sequence: CTT
atttatttttgagatggaat

SEQ ID NO: 21536 - DNA, 20 bp, Artificial Sequence
  Description of Artificial Sequence: Synthetic oligonucleotide
  Target: PCSK9; (-) strand; PAM type: YTN; PAM sequence: TTA
cttatttatttttgagatgg

SEQ ID NO: 21537 - DNA, 20 bp, Artificial Sequence
  Description of Artificial Sequence: Synthetic oligonucleotide
  Target: PCSK9; (-) strand; PAM type: YTN; PAM sequence: TTT
acttatttatttttgagatg

SEQ ID NO: 21538 - DNA, 20 bp, Artificial Sequence
  Description of Artificial Sequence: Synthetic oligonucleotide
  Target: PCSK9; (-) strand; PAM type: YTN; PAM sequence: TTA
tttacttatttatttttgag

SEQ ID NO: 21539 - DNA, 20 bp, Artificial Sequence
  Description of Artificial Sequence: Synthetic oligonucleotide
  Target: PCSK9; (-) strand; PAM type: YTN; PAM sequence: CTA
gttatttacttatttatttt

SEQ ID NO: 21540 - DNA, 20 bp, Artificial Sequence
  Description of Artificial Sequence: Synthetic oligonucleotide
  Target: PCSK9; (-) strand; PAM type: YTN; PAM sequence: CTG
ctagttatttacttatttat

SEQ ID NO: 21541 - DNA, 20 bp, Artificial Sequence
  Description of Artificial Sequence: Synthetic oligonucleotide
  Target: PCSK9; (-) strand; PAM type: YTN; PAM sequence: TTA
cagctgctagttatttactt

SEQ ID NO: 21542 - DNA, 20 bp, Artificial Sequence
  Description of Artificial Sequence: Synthetic oligonucleotide
  Target: PCSK9; (-) strand; PAM type: YTN; PAM sequence: TTT
acagctgctagttatttact

SEQ ID NO: 21543 - DNA, 20 bp, Artificial Sequence
  Description of Artificial Sequence: Synthetic oligonucleotide
  Target: PCSK9; (-) strand; PAM type: YTN; PAM sequence: CTG
agtgtggaggtgaagaacaa

SEQ ID NO: 21544 - DNA, 20 bp, Artificial Sequence
  Description of Artificial Sequence: Synthetic oligonucleotide
  Target: PCSK9; (-) strand; PAM type: YTN; PAM sequence: CTC
acaccacggagggagggagt

SEQ ID NO: 21545 - DNA, 20 bp, Artificial Sequence
  Description of Artificial Sequence: Synthetic oligonucleotide
  Target: PCSK9; (-) strand; PAM type: YTN; PAM sequence: CTA
gtgaggcccctcacaccacg

SEQ ID NO: 21546 - DNA, 20 bp, Artificial Sequence
  Description of Artificial Sequence: Synthetic oligonucleotide
  Target: PCSK9; (-) strand; PAM type: YTN; PAM sequence: CTA
ggagacagctagtgaggccc

SEQ ID NO: 21547 - DNA, 20 bp, Artificial Sequence
  Description of Artificial Sequence: Synthetic oligonucleotide
  Target: PCSK9; (-) strand; PAM type: YTN; PAM sequence: CTC
ctaggagacagctagtgagg

SEQ ID NO: 21548 - DNA, 20 bp, Artificial Sequence
  Description of Artificial Sequence: Synthetic oligonucleotide
  Target: PCSK9; (-) strand; PAM type: YTN; PAM sequence: CTC
ctcctaggagacagctagtg

SEQ ID NO: 21549 - DNA, 20 bp, Artificial Sequence
  Description of Artificial Sequence: Synthetic oligonucleotide
  Target: PCSK9; (-) strand; PAM type: YTN; PAM sequence: CTC
acagccatgctcctcctagg

SEQ ID NO: 21550 - DNA, 20 bp, Artificial Sequence
  Description of Artificial Sequence: Synthetic oligonucleotide
  Target: PCSK9; (-) strand; PAM type: YTN; PAM sequence: CTG
gaatctcacagccatgctcc

SEQ ID NO: 21551 - DNA, 20 bp, Artificial Sequence
  Description of Artificial Sequence: Synthetic oligonucleotide
  Target: PCSK9; (-) strand; PAM type: YTN; PAM sequence: CTC
caggagccgtggccaaggat

SEQ ID NO: 21552 - DNA, 20 bp, Artificial Sequence
  Description of Artificial Sequence: Synthetic oligonucleotide
  Target: PCSK9; (-) strand; PAM type: YTN; PAM sequence: CTA
agatgtctccaggagccgtg

SEQ ID NO: 21553 - DNA, 20 bp, Artificial Sequence
  Description of Artificial Sequence: Synthetic oligonucleotide
  Target: PCSK9; (-) strand; PAM type: YTN; PAM sequence: CTC
taagatgtctccaggagccg

SEQ ID NO: 21554 - DNA, 20 bp, Artificial Sequence
  Description of Artificial Sequence: Synthetic oligonucleotide
  Target: PCSK9; (-) strand; PAM type: YTN; PAM sequence: CTG
gcctctaagatgtctccagg

SEQ ID NO: 21555 - DNA, 20 bp, Artificial Sequence
  Description of Artificial Sequence: Synthetic oligonucleotide
  Target: PCSK9; (-) strand; PAM type: YTN; PAM sequence: CTG
gatcctggcctctaagatgt

SEQ ID NO: 21556 - DNA, 20 bp, Artificial Sequence
  Description of Artificial Sequence: Synthetic oligonucleotide
  Target: PCSK9; (-) strand; PAM type: YTN; PAM sequence: TTC
tggatcctggcctctaagat

SEQ ID NO: 21557 - DNA, 20 bp, Artificial Sequence
  Description of Artificial Sequence: Synthetic oligonucleotide
  Target: PCSK9; (-) strand; PAM type: YTN; PAM sequence: CTT
ctggatcctggcctctaaga

SEQ ID NO: 21558 - DNA, 20 bp, Artificial Sequence
  Description of Artificial Sequence: Synthetic oligonucleotide
  Target: PCSK9; (-) strand; PAM type: YTN; PAM sequence: CTG
tcaaatgaggtgtgggagcc

SEQ ID NO: 21559 - DNA, 20 bp, Artificial Sequence
  Description of Artificial Sequence: Synthetic oligonucleotide
  Target: PCSK9; (-) strand; PAM type: YTN; PAM sequence: CTC
ccctgtcaaatgaggtgtgg

SEQ ID NO: 21560 - DNA, 20 bp, Artificial Sequence
  Description of Artificial Sequence: Synthetic oligonucleotide
  Target: PCSK9; (-) strand; PAM type: YTN; PAM sequence: TTC
tcccctgtcaaatgaggtgt

SEQ ID NO: 21561 - DNA, 20 bp, Artificial Sequence
  Description of Artificial Sequence: Synthetic oligonucleotide
  Target: PCSK9; (-) strand; PAM type: YTN; PAM sequence: CTT
ctcccctgtcaaatgaggtg

SEQ ID NO: 21562 - DNA, 20 bp, Artificial Sequence
  Description of Artificial Sequence: Synthetic oligonucleotide
  Target: PCSK9; (-) strand; PAM type: YTN; PAM sequence: CTG
acagcttctcccctgtcaaa

SEQ ID NO: 21563 - DNA, 20 bp, Artificial Sequence
  Description of Artificial Sequence: Synthetic oligonucleotide
  Target: PCSK9; (-) strand; PAM type: YTN; PAM sequence: CTG
gaactgacagcttctcccct

SEQ ID NO: 21564 - DNA, 20 bp, Artificial Sequence
  Description of Artificial Sequence: Synthetic oligonucleotide
  Target: PCSK9; (-) strand; PAM type: YTN; PAM sequence: CTG
atgtgcaaggggacctggaa

SEQ ID NO: 21565 - DNA, 20 bp, Artificial Sequence
  Description of Artificial Sequence: Synthetic oligonucleotide
  Target: PCSK9; (-) strand; PAM type: YTN; PAM sequence: CTG
gccctgatgtgcaaggggac

SEQ ID NO: 21566 - DNA, 20 bp, Artificial Sequence
  Description of Artificial Sequence: Synthetic oligonucleotide
  Target: PCSK9; (-) strand; PAM type: YTN; PAM sequence: CTC
tggccctgatgtgcaagggg

SEQ ID NO: 21567 - DNA, 20 bp, Artificial Sequence
  Description of Artificial Sequence: Synthetic oligonucleotide
  Target: PCSK9; (-) strand; PAM type: YTN; PAM sequence: CTA
acgcagctctggccctgatg

SEQ ID NO: 21568 - DNA, 20 bp, Artificial Sequence
  Description of Artificial Sequence: Synthetic oligonucleotide
  Target: PCSK9; (-) strand; PAM type: YTN; PAM sequence: CTG
gaggcctaacgcagctctgg

SEQ ID NO: 21569 - DNA, 20 bp, Artificial Sequence
  Description of Artificial Sequence: Synthetic oligonucleotide
  Target: PCSK9; (-) strand; PAM type: YTN; PAM sequence: CTG
gagactggaggcctaacgca

SEQ ID NO: 21570 - DNA, 20 bp, Artificial Sequence
  Description of Artificial Sequence: Synthetic oligonucleotide
  Target: PCSK9; (-) strand; PAM type: YTN; PAM sequence: CTG
gcccagtggcctggagactg

SEQ ID NO: 21571 - DNA, 20 bp, Artificial Sequence
  Description of Artificial Sequence: Synthetic oligonucleotide
  Target: PCSK9; (-) strand; PAM type: YTN; PAM sequence: CTC
tggcccagtggcctggagac

SEQ ID NO: 21572 - DNA, 20 bp, Artificial Sequence
  Description of Artificial Sequence: Synthetic oligonucleotide
  Target: PCSK9; (-) strand; PAM type: YTN; PAM sequence: CTG
tgagctctggcccagtggcc

SEQ ID NO: 21573 - DNA, 20 bp, Artificial Sequence
  Description of Artificial Sequence: Synthetic oligonucleotide
  Target: PCSK9; (-) strand; PAM type: YTN; PAM sequence: CTG
ccagcctgtgagctctggcc

SEQ ID NO: 21574 - DNA, 20 bp, Artificial Sequence
  Description of Artificial Sequence: Synthetic oligonucleotide
  Target: PCSK9; (-) strand; PAM type: YTN; PAM sequence: CTC
tgccagcctgtgagctctgg

SEQ ID NO: 21575 - DNA, 20 bp, Artificial Sequence
  Description of Artificial Sequence: Synthetic oligonucleotide
  Target: PCSK9; (-) strand; PAM type: YTN; PAM sequence: CTA
accctctgccagcctgtgag

SEQ ID NO: 21576 - DNA, 20 bp, Artificial Sequence
  Description of Artificial Sequence: Synthetic oligonucleotide
  Target: PCSK9; (-) strand; PAM type: YTN; PAM sequence: TTC
taaccctctgccagcctgtg

SEQ ID NO: 21577 - DNA, 20 bp, Artificial Sequence
  Description of Artificial Sequence: Synthetic oligonucleotide
  Target: PCSK9; (-) strand; PAM type: YTN; PAM sequence: CTG
cacccagccaccagtaacag

SEQ ID NO: 21578 - DNA, 20 bp, Artificial Sequence
  Description of Artificial Sequence: Synthetic oligonucleotide
  Target: PCSK9; (-) strand; PAM type: YTN; PAM sequence: TTA
caggcgtgagccactgcacc

SEQ ID NO: 21579 - DNA, 20 bp, Artificial Sequence
  Description of Artificial Sequence: Synthetic oligonucleotide
  Target: PCSK9; (-) strand; PAM type: YTN; PAM sequence: CTA
agattacaggcgtgagccac

SEQ ID NO: 21580 - DNA, 20 bp, Artificial Sequence
  Description of Artificial Sequence: Synthetic oligonucleotide
  Target: PCSK9; (-) strand; PAM type: YTN; PAM sequence: CTC
ccaaagtgctaagattacag

SEQ ID NO: 21581 - DNA, 20 bp, Artificial Sequence
  Description of Artificial Sequence: Synthetic oligonucleotide
  Target: PCSK9; (-) strand; PAM type: YTN; PAM sequence: TTG
ccctcccaaagtgctaagat

SEQ ID NO: 21582 - DNA, 20 bp, Artificial Sequence
  Description of Artificial Sequence: Synthetic oligonucleotide
  Target: PCSK9; (-) strand; PAM type: YTN; PAM sequence: CTT
gccctcccaaagtgctaaga

SEQ ID NO: 21583 - DNA, 20 bp, Artificial Sequence
  Description of Artificial Sequence: Synthetic oligonucleotide
  Target: PCSK9; (-) strand; PAM type: YTN; PAM sequence: CTC
ccgccttgccctcccaaagt

SEQ ID NO: 21584 - DNA, 20 bp, Artificial Sequence
  Description of Artificial Sequence: Synthetic oligonucleotide
  Target: PCSK9; (-) strand; PAM type: YTN; PAM sequence: CTC
atgatcctcccgccttgccc

SEQ ID NO: 21585 - DNA, 20 bp, Artificial Sequence
  Description of Artificial Sequence: Synthetic oligonucleotide
  Target: PCSK9; (-) strand; PAM type: YTN; PAM sequence: CTG
acctcatgatcctcccgcct

SEQ ID NO: 21586 - DNA, 20 bp, Artificial Sequence
  Description of Artificial Sequence: Synthetic oligonucleotide
  Target: PCSK9; (-) strand; PAM type: YTN; PAM sequence: CTC
gatgtcctgacctcatgatc

SEQ ID NO: 21587 - DNA, 20 bp, Artificial Sequence
  Description of Artificial Sequence: Synthetic oligonucleotide
  Target: PCSK9; (-) strand; PAM type: YTN; PAM sequence: TTA
gcaaggatggtctcgatgtc

SEQ ID NO: 21588 - DNA, 20 bp, Artificial Sequence
  Description of Artificial Sequence: Synthetic oligonucleotide
  Target: PCSK9; (-) strand; PAM type: YTN; PAM sequence: TTC
accgtgttagcaaggatggt

SEQ ID NO: 21589 - DNA, 20 bp, Artificial Sequence
  Description of Artificial Sequence: Synthetic oligonucleotide
  Target: PCSK9; (-) strand; PAM type: YTN; PAM sequence: CTT
caccgtgttagcaaggatgg

SEQ ID NO: 21590 - DNA, 20 bp, Artificial Sequence
  Description of Artificial Sequence: Synthetic oligonucleotide
  Target: PCSK9; (-) strand; PAM type: YTN; PAM sequence: TTA
gtagagacggggcttcaccg

SEQ ID NO: 21591 - DNA, 20 bp, Artificial Sequence
  Description of Artificial Sequence: Synthetic oligonucleotide
  Target: PCSK9; (-) strand; PAM type: YTN; PAM sequence: TTT
agtagagacggggcttcacc

SEQ ID NO: 21592 - DNA, 20 bp, Artificial Sequence
  Description of Artificial Sequence: Synthetic oligonucleotide
  Target: PCSK9; (-) strand; PAM type: YTN; PAM sequence: TTT
tagtagagacggggcttcac

SEQ ID NO: 21593 - DNA, 20 bp, Artificial Sequence
  Description of Artificial Sequence: Synthetic oligonucleotide
  Target: PCSK9; (-) strand; PAM type: YTN; PAM sequence: TTG
tagttttagtagagacgggg

SEQ ID NO: 21594 - DNA, 20 bp, Artificial Sequence
  Description of Artificial Sequence: Synthetic oligonucleotide
  Target: PCSK9; (-) strand; PAM type: YTN; PAM sequence: TTT
gtagttttagtagagacggg

SEQ ID NO: 21595 - DNA, 20 bp, Artificial Sequence
  Description of Artificial Sequence: Synthetic oligonucleotide
  Target: PCSK9; (-) strand; PAM type: YTN; PAM sequence: TTT
tgtagttttagtagagacgg

SEQ ID NO: 21596 - DNA, 20 bp, Artificial Sequence
  Description of Artificial Sequence: Synthetic oligonucleotide
  Target: PCSK9; (-) strand; PAM type: YTN; PAM sequence: TTT
ttgtagttttagtagagacg

SEQ ID NO: 21597 - DNA, 20 bp, Artificial Sequence
  Description of Artificial Sequence: Synthetic oligonucleotide
  Target: PCSK9; (-) strand; PAM type: YTN; PAM sequence: TTT
tttgtagttttagtagagac

SEQ ID NO: 21598 - DNA, 20 bp, Artificial Sequence
  Description of Artificial Sequence: Synthetic oligonucleotide
  Target: PCSK9; (-) strand; PAM type: YTN; PAM sequence: CTA
attttttgtagttttagtag

SEQ ID NO: 21599 - DNA, 20 bp, Artificial Sequence
  Description of Artificial Sequence: Synthetic oligonucleotide
  Target: PCSK9; (-) strand; PAM type: YTN; PAM sequence: CTG
ccaccacgcccggctaattt

SEQ ID NO: 21600 - DNA, 20 bp, Artificial Sequence
  Description of Artificial Sequence: Synthetic oligonucleotide
  Target: PCSK9; (-) strand; PAM type: YTN; PAM sequence: CTA
caggcgcctgccaccacgcc

SEQ ID NO: 21601 - DNA, 20 bp, Artificial Sequence
  Description of Artificial Sequence: Synthetic oligonucleotide
  Target: PCSK9; (-) strand; PAM type: YTN; PAM sequence: CTG
ggactacaggcgcctgccac

SEQ ID NO: 21602 - DNA, 20 bp, Artificial Sequence
  Description of Artificial Sequence: Synthetic oligonucleotide
  Target: PCSK9; (-) strand; PAM type: YTN; PAM sequence: CTG
agtagctgggactacaggcg

SEQ ID NO: 21603 - DNA, 20 bp, Artificial Sequence
  Description of Artificial Sequence: Synthetic oligonucleotide
  Target: PCSK9; (-) strand; PAM type: YTN; PAM sequence: CTC
ctgagtagctgggactacag

SEQ ID NO: 21604 - DNA, 20 bp, Artificial Sequence
  Description of Artificial Sequence: Synthetic oligonucleotide
  Target: PCSK9; (-) strand; PAM type: YTN; PAM sequence: CTC
agcctcctgagtagctggga

SEQ ID NO: 21605 - DNA, 20 bp, Artificial Sequence
  Description of Artificial Sequence: Synthetic oligonucleotide
  Target: PCSK9; (-) strand; PAM type: YTN; PAM sequence: CTG
cctcagcctcctgagtagct

SEQ ID NO: 21606 - DNA, 20 bp, Artificial Sequence
  Description of Artificial Sequence: Synthetic oligonucleotide
  Target: PCSK9; (-) strand; PAM type: YTN; PAM sequence: CTC
ctgcctcagcctcctgagta

SEQ ID NO: 21607 - DNA, 20 bp, Artificial Sequence
  Description of Artificial Sequence: Synthetic oligonucleotide
  Target: PCSK9; (-) strand; PAM type: YTN; PAM sequence: TTC
tcctgcctcagcctcctgag

SEQ ID NO: 21608 - DNA, 20 bp, Artificial Sequence
  Description of Artificial Sequence: Synthetic oligonucleotide
  Target: PCSK9; (-) strand; PAM type: YTN; PAM sequence: TTC
acgccattctcctgcctcag

SEQ ID NO: 21609 - DNA, 20 bp, Artificial Sequence
  Description of Artificial Sequence: Synthetic oligonucleotide
  Target: PCSK9; (-) strand; PAM type: YTN; PAM sequence: CTC
ccgggttcacgccattctcc

SEQ ID NO: 21610 - DNA, 20 bp, Artificial Sequence
  Description of Artificial Sequence: Synthetic oligonucleotide
  Target: PCSK9; (-) strand; PAM type: YTN; PAM sequence: CTC
cgcctcccgggttcacgcca

SEQ ID NO: 21611 - DNA, 20 bp, Artificial Sequence
  Description of Artificial Sequence: Synthetic oligonucleotide
  Target: PCSK9; (-) strand; PAM type: YTN; PAM sequence: CTG
caagctccgcctcccgggtt

SEQ ID NO: 21612 - DNA, 20 bp, Artificial Sequence
  Description of Artificial Sequence: Synthetic oligonucleotide
  Target: PCSK9; (-) strand; PAM type: YTN; PAM sequence: CTC
actgcaagctccgcctcccg

SEQ ID NO: 21613 - DNA, 20 bp, Artificial Sequence
  Description of Artificial Sequence: Synthetic oligonucleotide
  Target: PCSK9; (-) strand; PAM type: YTN; PAM sequence: CTC
ggctcactgcaagctccgcc

SEQ ID NO: 21614 - DNA, 20 bp, Artificial Sequence
  Description of Artificial Sequence: Synthetic oligonucleotide
  Target: PCSK9; (-) strand; PAM type: YTN; PAM sequence: CTG
gagtgcagtggcgcaatctc

SEQ ID NO: 21615 - DNA, 20 bp, Artificial Sequence
  Description of Artificial Sequence: Synthetic oligonucleotide
  Target: PCSK9; (-) strand; PAM type: YTN; PAM sequence: TTG
cccaggctggagtgcagtgg

SEQ ID NO: 21616 - DNA, 20 bp, Artificial Sequence
  Description of Artificial Sequence: Synthetic oligonucleotide
  Target: PCSK9; (-) strand; PAM type: YTN; PAM sequence: CTA
ttgcccaggctggagtgcag

SEQ ID NO: 21617 - DNA, 20 bp, Artificial Sequence
  Description of Artificial Sequence: Synthetic oligonucleotide
  Target: PCSK9; (-) strand; PAM type: YTN; PAM sequence: CTC
tattgcccaggctggagtgc

SEQ ID NO: 21618 - DNA, 20 bp, Artificial Sequence
  Description of Artificial Sequence: Synthetic oligonucleotide
  Target: PCSK9; (-) strand; PAM type: YTN; PAM sequence: CTC
gctctattgcccaggctgga

SEQ ID NO: 21619 - DNA, 20 bp, Artificial Sequence
  Description of Artificial Sequence: Synthetic oligonucleotide
  Target: PCSK9; (-) strand; PAM type: YTN; PAM sequence: TTC
cagacggagtctcgctctat

SEQ ID NO: 21620 - DNA, 20 bp, Artificial Sequence
  Description of Artificial Sequence: Synthetic oligonucleotide
  Target: PCSK9; (-) strand; PAM type: YTN; PAM sequence: TTT
ccagacggagtctcgctcta

SEQ ID NO: 21621 - DNA, 20 bp, Artificial Sequence
  Description of Artificial Sequence: Synthetic oligonucleotide
  Target: PCSK9; (-) strand; PAM type: YTN; PAM sequence: CTT
tccagacggagtctcgctct

SEQ ID NO: 21622 - DNA, 20 bp, Artificial Sequence
  Description of Artificial Sequence: Synthetic oligonucleotide
  Target: PCSK9; (-) strand; PAM type: YTN; PAM sequence: TTC
tttccagacggagtctcgct

SEQ ID NO: 21623 - DNA, 20 bp, Artificial Sequence
  Description of Artificial Sequence: Synthetic oligonucleotide
  Target: PCSK9; (-) strand; PAM type: YTN; PAM sequence: TTT
ctttccagacggagtctcgc

SEQ ID NO: 21624 - DNA, 20 bp, Artificial Sequence
  Description of Artificial Sequence: Synthetic oligonucleotide
  Target: PCSK9; (-) strand; PAM type: YTN; PAM sequence: TTT
tctttccagacggagtctcg

SEQ ID NO: 21625 - DNA, 20 bp, Artificial Sequence
  Description of Artificial Sequence: Synthetic oligonucleotide
  Target: PCSK9; (-) strand; PAM type: YTN; PAM sequence: TTT
ttctttccagacggagtctc

SEQ ID NO: 21626 - DNA, 20 bp, Artificial Sequence
  Description of Artificial Sequence: Synthetic oligonucleotide
  Target: PCSK9; (-) strand; PAM type: YTN; PAM sequence: TTT
tttctttccagacggagtct

SEQ ID NO: 21627 - DNA, 20 bp, Artificial Sequence
  Description of Artificial Sequence: Synthetic oligonucleotide
  Target: PCSK9; (-) strand; PAM type: YTN; PAM sequence: TTT
ttttctttccagacggagtc

SEQ ID NO: 21628 - DNA, 20 bp, Artificial Sequence
  Description of Artificial Sequence: Synthetic oligonucleotide
  Target: PCSK9; (-) strand; PAM type: YTN; PAM sequence: TTT
tttttctttccagacggagt

SEQ ID NO: 21629 - DNA, 20 bp, Artificial Sequence
  Description of Artificial Sequence: Synthetic oligonucleotide
  Target: PCSK9; (-) strand; PAM type: YTN; PAM sequence: TTT
ttttttctttccagacggag

SEQ ID NO: 21630 - DNA, 20 bp, Artificial Sequence
  Description of Artificial Sequence: Synthetic oligonucleotide
  Target: PCSK9; (-) strand; PAM type: YTN; PAM sequence: TTT
tttttttctttccagacgga

SEQ ID NO: 21631 - DNA, 20 bp, Artificial Sequence
  Description of Artificial Sequence: Synthetic oligonucleotide
  Target: PCSK9; (-) strand; PAM type: YTN; PAM sequence: TTT
ttttttttctttccagacgg

SEQ ID NO: 21632 - DNA, 20 bp, Artificial Sequence
  Description of Artificial Sequence: Synthetic oligonucleotide
  Target: PCSK9; (-) strand; PAM type: YTN; PAM sequence: TTT
tttttttttctttccagacg

SEQ ID NO: 21633 - DNA, 20 bp, Artificial Sequence
  Description of Artificial Sequence: Synthetic oligonucleotide
  Target: PCSK9; (-) strand; PAM type: YTN; PAM sequence: TTT
ttttttttttctttccagac

SEQ ID NO: 21634 - DNA, 20 bp, Artificial Sequence
  Description of Artificial Sequence: Synthetic oligonucleotide
  Target: PCSK9; (-) strand; PAM type: YTN; PAM sequence: TTT
tttttttttttctttccaga

SEQ ID NO: 21635 - DNA, 20 bp, Artificial Sequence
  Description of Artificial Sequence: Synthetic oligonucleotide
  Target: PCSK9; (-) strand; PAM type: YTN; PAM sequence: CTT
ttttttttttttctttccag

SEQ ID NO: 21636 - DNA, 20 bp, Artificial Sequence
  Description of Artificial Sequence: Synthetic oligonucleotide
  Target: PCSK9; (-) strand; PAM type: YTN; PAM sequence: CTC
ttttttttttttttctttcc

SEQ ID NO: 21637 - DNA, 20 bp, Artificial Sequence
  Description of Artificial Sequence: Synthetic oligonucleotide
  Target: PCSK9; (-) strand; PAM type: YTN; PAM sequence: CTG
tcaacagtaacagctctttt

SEQ ID NO: 21638 - DNA, 20 bp, Artificial Sequence
  Description of Artificial Sequence: Synthetic oligonucleotide
  Target: PCSK9; (-) strand; PAM type: YTN; PAM sequence: CTA
ctgtcaacagtaacagctct

SEQ ID NO: 21639 - DNA, 20 bp, Artificial Sequence
  Description of Artificial Sequence: Synthetic oligonucleotide
  Target: PCSK9; (-) strand; PAM type: YTN; PAM sequence: CTC
atgctactgtcaacagtaac

SEQ ID NO: 21640 - DNA, 20 bp, Artificial Sequence
  Description of Artificial Sequence: Synthetic oligonucleotide
  Target: PCSK9; (-) strand; PAM type: YTN; PAM sequence: CTA
cctcatgctactgtcaacag

SEQ ID NO: 21641 - DNA, 20 bp, Artificial Sequence
  Description of Artificial Sequence: Synthetic oligonucleotide
  Target: PCSK9; (-) strand; PAM type: YTN; PAM sequence: TTG
gtgcaggccatggtctacct

SEQ ID NO: 21642 - DNA, 20 bp, Artificial Sequence
  Description of Artificial Sequence: Synthetic oligonucleotide
  Target: PCSK9; (-) strand; PAM type: YTN; PAM sequence: TTT
ggtgcaggccatggtctacc

SEQ ID NO: 21643 - DNA, 20 bp, Artificial Sequence
  Description of Artificial Sequence: Synthetic oligonucleotide
  Target: PCSK9; (-) strand; PAM type: YTN; PAM sequence: TTT
tggtgcaggccatggtctac

SEQ ID NO: 21644 - DNA, 20 bp, Artificial Sequence
  Description of Artificial Sequence: Synthetic oligonucleotide
  Target: PCSK9; (-) strand; PAM type: YTN; PAM sequence: CTC
ccccattttggtgcaggcca

SEQ ID NO: 21645 - DNA, 20 bp, Artificial Sequence
  Description of Artificial Sequence: Synthetic oligonucleotide
  Target: PCSK9; (-) strand; PAM type: YTN; PAM sequence: CTC
cactcccccattttggtgca

SEQ ID NO: 21646 - DNA, 20 bp, Artificial Sequence
  Description of Artificial Sequence: Synthetic oligonucleotide
  Target: PCSK9; (-) strand; PAM type: YTN; PAM sequence: CTC
agtggcactccactccccca

SEQ ID NO: 21647 - DNA, 20 bp, Artificial Sequence
  Description of Artificial Sequence: Synthetic oligonucleotide
  Target: PCSK9; (-) strand; PAM type: YTN; PAM sequence: CTG
gcctcagtggcactccactc

SEQ ID NO: 21648 - DNA, 20 bp, Artificial Sequence
  Description of Artificial Sequence: Synthetic oligonucleotide
  Target: PCSK9; (-) strand; PAM type: YTN; PAM sequence: TTC
tggcctcagtggcactccac

SEQ ID NO: 21649 - DNA, 20 bp, Artificial Sequence
  Description of Artificial Sequence: Synthetic oligonucleotide
  Target: PCSK9; (-) strand; PAM type: YTN; PAM sequence: CTT
ctggcctcagtggcactcca

SEQ ID NO: 21650 - DNA, 20 bp, Artificial Sequence
  Description of Artificial Sequence: Synthetic oligonucleotide
  Target: PCSK9; (-) strand; PAM type: YTN; PAM sequence: TTC
cttctggcctcagtggcact

SEQ ID NO: 21651 - DNA, 20 bp, Artificial Sequence
  Description of Artificial Sequence: Synthetic oligonucleotide
  Target: PCSK9; (-) strand; PAM type: YTN; PAM sequence: TTG
agggtgtggttccttctggc

SEQ ID NO: 21652 - DNA, 20 bp, Artificial Sequence
  Description of Artificial Sequence: Synthetic oligonucleotide
  Target: PCSK9; (-) strand; PAM type: YTN; PAM sequence: CTT
gagggtgtggttccttctgg

SEQ ID NO: 21653 - DNA, 20 bp, Artificial Sequence
  Description of Artificial Sequence: Synthetic oligonucleotide
  Target: PCSK9; (-) strand; PAM type: YTN; PAM sequence: CTC
cccacccttgagggtgtggt

SEQ ID NO: 21654 - DNA, 20 bp, Artificial Sequence
  Description of Artificial Sequence: Synthetic oligonucleotide
  Target: PCSK9; (-) strand; PAM type: YTN; PAM sequence: CTA
ggaccccccataccataact

SEQ ID NO: 21655 - DNA, 20 bp, Artificial Sequence
  Description of Artificial Sequence: Synthetic oligonucleotide
  Target: PCSK9; (-) strand; PAM type: YTN; PAM sequence: CTC
catgcctaggaccccccata

SEQ ID NO: 21656 - DNA, 20 bp, Artificial Sequence
  Description of Artificial Sequence: Synthetic oligonucleotide
  Target: PCSK9; (-) strand; PAM type: YTN; PAM sequence: TTA
aaagactccatgcctaggac

SEQ ID NO: 21657 - DNA, 20 bp, Artificial Sequence
  Description of Artificial Sequence: Synthetic oligonucleotide
  Target: PCSK9; (-) strand; PAM type: YTN; PAM sequence: CTA
aagaattaaaagactccatg

SEQ ID NO: 21658 - DNA, 20 bp, Artificial Sequence
  Description of Artificial Sequence: Synthetic oligonucleotide
  Target: PCSK9; (-) strand; PAM type: YTN; PAM sequence: TTG
tctaaagaattaaaagactc

SEQ ID NO: 21659 - DNA, 20 bp, Artificial Sequence
  Description of Artificial Sequence: Synthetic oligonucleotide
  Target: PCSK9; (-) strand; PAM type: YTN; PAM sequence: CTC
ccaggattgtctaaagaatt

SEQ ID NO: 21660 - DNA, 20 bp, Artificial Sequence
  Description of Artificial Sequence: Synthetic oligonucleotide
  Target: PCSK9; (-) strand; PAM type: YTN; PAM sequence: TTG
ctcccaggattgtctaaaga

SEQ ID NO: 21661 - DNA, 20 bp, Artificial Sequence
  Description of Artificial Sequence: Synthetic oligonucleotide
  Target: PCSK9; (-) strand; PAM type: YTN; PAM sequence: CTG
tgaaacagggacagttgctc

SEQ ID NO: 21662 - DNA, 20 bp, Artificial Sequence
  Description of Artificial Sequence: Synthetic oligonucleotide
  Target: PCSK9; (-) strand; PAM type: YTN; PAM sequence: CTC
tgtgaaacagggacagttgc

SEQ ID NO: 21663 - DNA, 20 bp, Artificial Sequence
  Description of Artificial Sequence: Synthetic oligonucleotide
  Target: PCSK9; (-) strand; PAM type: YTN; PAM sequence: CTG
tgtggccccgccctctgtga

SEQ ID NO: 21664 - DNA, 20 bp, Artificial Sequence
  Description of Artificial Sequence: Synthetic oligonucleotide
  Target: PCSK9; (-) strand; PAM type: YTN; PAM sequence: CTC
accagctgtgtggccccgcc

SEQ ID NO: 21665 - DNA, 20 bp, Artificial Sequence
  Description of Artificial Sequence: Synthetic oligonucleotide
  Target: PCSK9; (-) strand; PAM type: YTN; PAM sequence: CTG
cccactcaccagctgtgtgg

SEQ ID NO: 21666 - DNA, 20 bp, Artificial Sequence
  Description of Artificial Sequence: Synthetic oligonucleotide
  Target: PCSK9; (-) strand; PAM type: YTN; PAM sequence: TTG
gctgcccactcaccagctgt

SEQ ID NO: 21667 - DNA, 20 bp, Artificial Sequence
  Description of Artificial Sequence: Synthetic oligonucleotide
  Target: PCSK9; (-) strand; PAM type: YTN; PAM sequence: CTT
ggctgcccactcaccagctg

SEQ ID NO: 21668 - DNA, 20 bp, Artificial Sequence
  Description of Artificial Sequence: Synthetic oligonucleotide
  Target: PCSK9; (-) strand; PAM type: YTN; PAM sequence: TTG
aacagagtcttggctgccca

SEQ ID NO: 21669 - DNA, 20 bp, Artificial Sequence
  Description of Artificial Sequence: Synthetic oligonucleotide
  Target: PCSK9; (-) strand; PAM type: YTN; PAM sequence: CTT
gaacagagtcttggctgccc

SEQ ID NO: 21670 - DNA, 20 bp, Artificial Sequence
  Description of Artificial Sequence: Synthetic oligonucleotide
  Target: PCSK9; (-) strand; PAM type: YTN; PAM sequence: TTG
gacccacacaaacttgaaca

SEQ ID NO: 21671 - DNA, 20 bp, Artificial Sequence
  Description of Artificial Sequence: Synthetic oligonucleotide
  Target: PCSK9; (-) strand; PAM type: YTN; PAM sequence: CTC
caccgtggccgcaagtgttg

SEQ ID NO: 21672 - DNA, 20 bp, Artificial Sequence
  Description of Artificial Sequence: Synthetic oligonucleotide
  Target: PCSK9; (-) strand; PAM type: YTN; PAM sequence: CTC
agatgcccctccaccgtggc

SEQ ID NO: 21673 - DNA, 20 bp, Artificial Sequence
  Description of Artificial Sequence: Synthetic oligonucleotide
  Target: PCSK9; (-) strand; PAM type: YTN; PAM sequence: CTG
gctcagatgcccctccaccg

SEQ ID NO: 21674 - DNA, 20 bp, Artificial Sequence
  Description of Artificial Sequence: Synthetic oligonucleotide
  Target: PCSK9; (-) strand; PAM type: YTN; PAM sequence: CTG
aggcctggctcagatgcccc

SEQ ID NO: 21675 - DNA, 20 bp, Artificial Sequence
  Description of Artificial Sequence: Synthetic oligonucleotide
  Target: PCSK9; (-) strand; PAM type: YTN; PAM sequence: CTC
tgaggcctggctcagatgcc

SEQ ID NO: 21676 - DNA, 20 bp, Artificial Sequence
  Description of Artificial Sequence: Synthetic oligonucleotide
  Target: PCSK9; (-) strand; PAM type: YTN; PAM sequence: CTC
tctgaggcctggctcagatg

SEQ ID NO: 21677 - DNA, 20 bp, Artificial Sequence
  Description of Artificial Sequence: Synthetic oligonucleotide
  Target: PCSK9; (-) strand; PAM type: YTN; PAM sequence: TTC
ccccgccactctctgaggcc

SEQ ID NO: 21678 - DNA, 20 bp, Artificial Sequence
  Description of Artificial Sequence: Synthetic oligonucleotide
  Target: PCSK9; (-) strand; PAM type: YTN; PAM sequence: CTT
cccccgccactctctgaggc

SEQ ID NO: 21679 - DNA, 20 bp, Artificial Sequence
  Description of Artificial Sequence: Synthetic oligonucleotide
  Target: PCSK9; (-) strand; PAM type: YTN; PAM sequence: TTC
cccacccaacttcccccgcc

SEQ ID NO: 21680 - DNA, 20 bp, Artificial Sequence
  Description of Artificial Sequence: Synthetic oligonucleotide
  Target: PCSK9; (-) strand; PAM type: YTN; PAM sequence: CTT
ccccacccaacttcccccgc

SEQ ID NO: 21681 - DNA, 20 bp, Artificial Sequence
  Description of Artificial Sequence: Synthetic oligonucleotide
  Target: PCSK9; (-) strand; PAM type: YTN; PAM sequence: CTC
agaggaatgagaagggcaca

SEQ ID NO: 21682 - DNA, 20 bp, Artificial Sequence
  Description of Artificial Sequence: Synthetic oligonucleotide
  Target: PCSK9; (-) strand; PAM type: YTN; PAM sequence: TTC
catgaaagagaggcaccaag

SEQ ID NO: 21683 - DNA, 20 bp, Artificial Sequence
  Description of Artificial Sequence: Synthetic oligonucleotide
  Target: PCSK9; (-) strand; PAM type: YTN; PAM sequence: TTT
ccatgaaagagaggcaccaa

SEQ ID NO: 21684 - DNA, 20 bp, Artificial Sequence
  Description of Artificial Sequence: Synthetic oligonucleotide
  Target: PCSK9; (-) strand; PAM type: YTN; PAM sequence: CTT
tccatgaaagagaggcacca

SEQ ID NO: 21685 - DNA, 20 bp, Artificial Sequence
  Description of Artificial Sequence: Synthetic oligonucleotide
  Target: PCSK9; (-) strand; PAM type: YTN; PAM sequence: TTA
tccctttccatgaaagagag

SEQ ID NO: 21686 - DNA, 20 bp, Artificial Sequence
  Description of Artificial Sequence: Synthetic oligonucleotide
  Target: PCSK9; (-) strand; PAM type: YTN; PAM sequence: TTA
ttatccctttccatgaaaga

SEQ ID NO: 21687 - DNA, 20 bp, Artificial Sequence
  Description of Artificial Sequence: Synthetic oligonucleotide
  Target: PCSK9; (-) strand; PAM type: YTN; PAM sequence: CTT
attatccctttccatgaaag

SEQ ID NO: 21688 - DNA, 20 bp, Artificial Sequence
  Description of Artificial Sequence: Synthetic oligonucleotide
  Target: PCSK9; (-) strand; PAM type: YTN; PAM sequence: CTC
acaataaccttattatccct

SEQ ID NO: 21689 - DNA, 20 bp, Artificial Sequence
  Description of Artificial Sequence: Synthetic oligonucleotide
  Target: PCSK9; (-) strand; PAM type: YTN; PAM sequence: CTC
aggggatcctcacaataacc

SEQ ID NO: 21690 - DNA, 20 bp, Artificial Sequence
  Description of Artificial Sequence: Synthetic oligonucleotide
  Target: PCSK9; (-) strand; PAM type: YTN; PAM sequence: CTG
aatatacgaactcaggggat

SEQ ID NO: 21691 - DNA, 20 bp, Artificial Sequence
  Description of Artificial Sequence: Synthetic oligonucleotide
  Target: PCSK9; (-) strand; PAM type: YTN; PAM sequence: CTA
agcgtctgaatatacgaact

SEQ ID NO: 21692 - DNA, 20 bp, Artificial Sequence
  Description of Artificial Sequence: Synthetic oligonucleotide
  Target: PCSK9; (-) strand; PAM type: YTN; PAM sequence: CTG
tctaagcgtctgaatatacg

SEQ ID NO: 21693 - DNA, 20 bp, Artificial Sequence
  Description of Artificial Sequence: Synthetic oligonucleotide
  Target: PCSK9; (-) strand; PAM type: YTN; PAM sequence: CTC
tgtctaagcgtctgaatata

SEQ ID NO: 21694 - DNA, 20 bp, Artificial Sequence
  Description of Artificial Sequence: Synthetic oligonucleotide
  Target: PCSK9; (-) strand; PAM type: YTN; PAM sequence: CTG
gctctgtctaagcgtctgaa

SEQ ID NO: 21695 - DNA, 20 bp, Artificial Sequence
  Description of Artificial Sequence: Synthetic oligonucleotide
  Target: PCSK9; (-) strand; PAM type: YTN; PAM sequence: CTG
tgcctggctctgtctaagcg

SEQ ID NO: 21696 - DNA, 20 bp, Artificial Sequence
  Description of Artificial Sequence: Synthetic oligonucleotide
  Target: PCSK9; (-) strand; PAM type: YTN; PAM sequence: CTC
tgtgcctggctctgtctaag

SEQ ID NO: 21697 - DNA, 20 bp, Artificial Sequence
  Description of Artificial Sequence: Synthetic oligonucleotide
  Target: PCSK9; (-) strand; PAM type: YTN; PAM sequence: TTC
tctgtgcctggctctgtcta

SEQ ID NO: 21698 - DNA, 20 bp, Artificial Sequence
  Description of Artificial Sequence: Synthetic oligonucleotide
  Target: PCSK9; (-) strand; PAM type: YTN; PAM sequence: CTT
ctctgtgcctggctctgtct

SEQ ID NO: 21699 - DNA, 20 bp, Artificial Sequence
  Description of Artificial Sequence: Synthetic oligonucleotide
  Target: PCSK9; (-) strand; PAM type: YTN; PAM sequence: CTA
gccaaccccgggcccttctc

SEQ ID NO: 21700 - DNA, 20 bp, Artificial Sequence
  Description of Artificial Sequence: Synthetic oligonucleotide
  Target: PCSK9; (-) strand; PAM type: YTN; PAM sequence: TTA
caccagcaatcaaactagcc

SEQ ID NO: 21701 - DNA, 20 bp, Artificial Sequence
  Description of Artificial Sequence: Synthetic oligonucleotide
  Target: PCSK9; (-) strand; PAM type: YTN; PAM sequence: TTA
gcaattacaccagcaatcaa

SEQ ID NO: 21702 - DNA, 20 bp, Artificial Sequence
  Description of Artificial Sequence: Synthetic oligonucleotide
  Target: PCSK9; (-) strand; PAM type: YTN; PAM sequence: CTG
gaagatattagcaattacac

SEQ ID NO: 21703 - DNA, 20 bp, Artificial Sequence
  Description of Artificial Sequence: Synthetic oligonucleotide
  Target: PCSK9; (-) strand; PAM type: YTN; PAM sequence: TTG
accaatacaaactggaagat

SEQ ID NO: 21704 - DNA, 20 bp, Artificial Sequence
  Description of Artificial Sequence: Synthetic oligonucleotide
  Target: PCSK9; (-) strand; PAM type: YTN; PAM sequence: CTT
gaccaatacaaactggaaga

SEQ ID NO: 21705 - DNA, 20 bp, Artificial Sequence
  Description of Artificial Sequence: Synthetic oligonucleotide
  Target: PCSK9; (-) strand; PAM type: YTN; PAM sequence: CTG
cagaaccttgaccaatacaa

SEQ ID NO: 21706 - DNA, 20 bp, Artificial Sequence
  Description of Artificial Sequence: Synthetic oligonucleotide
  Target: PCSK9; (-) strand; PAM type: YTN; PAM sequence: CTC
tgcagaaccttgaccaatac

SEQ ID NO: 21707 - DNA, 20 bp, Artificial Sequence
  Description of Artificial Sequence: Synthetic oligonucleotide
  Target: PCSK9; (-) strand; PAM type: YTN; PAM sequence: TTC
tctgcagaaccttgaccaat

SEQ ID NO: 21708 - DNA, 20 bp, Artificial Sequence
  Description of Artificial Sequence: Synthetic oligonucleotide
  Target: PCSK9; (-) strand; PAM type: YTN; PAM sequence: CTT
ctctgcagaaccttgaccaa

SEQ ID NO: 21709 - DNA, 20 bp, Artificial Sequence
  Description of Artificial Sequence: Synthetic oligonucleotide
  Target: PCSK9; (-) strand; PAM type: YTN; PAM sequence: CTG
cttctctgcagaaccttgac

SEQ ID NO: 21710 - DNA, 20 bp, Artificial Sequence
  Description of Artificial Sequence: Synthetic oligonucleotide
  Target: PCSK9; (-) strand; PAM type: YTN; PAM sequence: TTC
tgcttctctgcagaaccttg

SEQ ID NO: 21711 - DNA, 20 bp, Artificial Sequence
  Description of Artificial Sequence: Synthetic oligonucleotide
  Target: PCSK9; (-) strand; PAM type: YTN; PAM sequence: CTG
gttctgcttctctgcagaac

SEQ ID NO: 21712 - DNA, 20 bp, Artificial Sequence
  Description of Artificial Sequence: Synthetic oligonucleotide
  Target: PCSK9; (-) strand; PAM type: YTN; PAM sequence: CTA
ctggttctgcttctctgcag

SEQ ID NO: 21713 - DNA, 20 bp, Artificial Sequence
  Description of Artificial Sequence: Synthetic oligonucleotide
  Target: PCSK9; (-) strand; PAM type: YTN; PAM sequence: TTA
atatatacatcctactggtt

SEQ ID NO: 21714 - DNA, 20 bp, Artificial Sequence
  Description of Artificial Sequence: Synthetic oligonucleotide
  Target: PCSK9; (-) strand; PAM type: YTN; PAM sequence: CTT
aatatatacatcctactggt

SEQ ID NO: 21715 - DNA, 20 bp, Artificial Sequence
  Description of Artificial Sequence: Synthetic oligonucleotide
  Target: PCSK9; (-) strand; PAM type: YTN; PAM sequence: CTC
ttaatatatacatcctactg

SEQ ID NO: 21716 - DNA, 20 bp, Artificial Sequence
  Description of Artificial Sequence: Synthetic oligonucleotide
  Target: PCSK9; (-) strand; PAM type: YTN; PAM sequence: TTG
aaactcttaatatatacatc

SEQ ID NO: 21717 - DNA, 20 bp, Artificial Sequence
  Description of Artificial Sequence: Synthetic oligonucleotide
  Target: PCSK9; (-) strand; PAM type: YTN; PAM sequence: CTT
gaaactcttaatatatacat

SEQ ID NO: 21718 - DNA, 20 bp, Artificial Sequence
  Description of Artificial Sequence: Synthetic oligonucleotide
  Target: PCSK9; (-) strand; PAM type: YTN; PAM sequence: TTG
ccagcccgcacggtcacatg

SEQ ID NO: 21719 - DNA, 20 bp, Artificial Sequence
  Description of Artificial Sequence: Synthetic oligonucleotide
  Target: PCSK9; (-) strand; PAM type: YTN; PAM sequence: CTT
gccagcccgcacggtcacat

SEQ ID NO: 21720 - DNA, 20 bp, Artificial Sequence
  Description of Artificial Sequence: Synthetic oligonucleotide
  Target: PCSK9; (-) strand; PAM type: YTN; PAM sequence: TTC
agacttgccagcccgcacgg

SEQ ID NO: 21721 - DNA, 20 bp, Artificial Sequence
  Description of Artificial Sequence: Synthetic oligonucleotide
  Target: PCSK9; (-) strand; PAM type: YTN; PAM sequence: TTT
cagacttgccagcccgcacg

SEQ ID NO: 21722 - DNA, 20 bp, Artificial Sequence
  Description of Artificial Sequence: Synthetic oligonucleotide
  Target: PCSK9; (-) strand; PAM type: YTN; PAM sequence: CTG
cggatttcagacttgccagc

SEQ ID NO: 21723 - DNA, 20 bp, Artificial Sequence
  Description of Artificial Sequence: Synthetic oligonucleotide
  Target: PCSK9; (-) strand; PAM type: YTN; PAM sequence: CTG
ccctgcggatttcagacttg

SEQ ID NO: 21724 - DNA, 20 bp, Artificial Sequence
  Description of Artificial Sequence: Synthetic oligonucleotide
  Target: PCSK9; (-) strand; PAM type: YTN; PAM sequence: CTG
gcctgccctgcggatttcag

SEQ ID NO: 21725 - DNA, 20 bp, Artificial Sequence
  Description of Artificial Sequence: Synthetic oligonucleotide
  Target: PCSK9; (-) strand; PAM type: YTN; PAM sequence: CTG
cctggcctgccctgcggatt

SEQ ID NO: 21726 - DNA, 20 bp, Artificial Sequence
  Description of Artificial Sequence: Synthetic oligonucleotide
  Target: PCSK9; (-) strand; PAM type: YTN; PAM sequence: TTG
ccagcctgcctggcctgccc

SEQ ID NO: 21727 - DNA, 20 bp, Artificial Sequence
  Description of Artificial Sequence: Synthetic oligonucleotide
  Target: PCSK9; (-) strand; PAM type: YTN; PAM sequence: CTG
caggaattgccagcctgcct

SEQ ID NO: 21728 - DNA, 20 bp, Artificial Sequence
  Description of Artificial Sequence: Synthetic oligonucleotide
  Target: PCSK9; (-) strand; PAM type: YTN; PAM sequence: TTC
tgcaggaattgccagcctgc

SEQ ID NO: 21729 - DNA, 20 bp, Artificial Sequence
  Description of Artificial Sequence: Synthetic oligonucleotide
  Target: PCSK9; (-) strand; PAM type: YTN; PAM sequence: TTG
caacatcaaattctgcagga

SEQ ID NO: 21730 - DNA, 20 bp, Artificial Sequence
  Description of Artificial Sequence: Synthetic oligonucleotide
  Target: PCSK9; (-) strand; PAM type: YTN; PAM sequence: CTC
agtattgcaacatcaaattc

SEQ ID NO: 21731 - DNA, 20 bp, Artificial Sequence
  Description of Artificial Sequence: Synthetic oligonucleotide
  Target: PCSK9; (-) strand; PAM type: YTN; PAM sequence: TTA
ggactcagtattgcaacatc

SEQ ID NO: 21732 - DNA, 20 bp, Artificial Sequence
  Description of Artificial Sequence: Synthetic oligonucleotide
  Target: PCSK9; (-) strand; PAM type: YTN; PAM sequence: CTT
aggactcagtattgcaacat

SEQ ID NO: 21733 - DNA, 20 bp, Artificial Sequence
  Description of Artificial Sequence: Synthetic oligonucleotide
  Target: PCSK9; (-) strand; PAM type: YTN; PAM sequence: CTG
ccttaggactcagtattgca

SEQ ID NO: 21734 - DNA, 20 bp, Artificial Sequence
  Description of Artificial Sequence: Synthetic oligonucleotide
  Target: PCSK9; (-) strand; PAM type: YTN; PAM sequence: CTG
ccccaggactgccttaggac

SEQ ID NO: 21735 - DNA, 20 bp, Artificial Sequence
  Description of Artificial Sequence: Synthetic oligonucleotide
  Target: PCSK9; (-) strand; PAM type: YTN; PAM sequence: TTC
tgccccaggactgccttagg

SEQ ID NO: 21736 - DNA, 20 bp, Artificial Sequence
  Description of Artificial Sequence: Synthetic oligonucleotide
  Target: PCSK9; (-) strand; PAM type: YTN; PAM sequence: CTC
ccagggaagaaggaattctg

SEQ ID NO: 21737 - DNA, 20 bp, Artificial Sequence
  Description of Artificial Sequence: Synthetic oligonucleotide
  Target: PCSK9; (-) strand; PAM type: YTN; PAM sequence: CTG
aggcctcccagggaagaagg

SEQ ID NO: 21738 - DNA, 20 bp, Artificial Sequence
  Description of Artificial Sequence: Synthetic oligonucleotide
  Target: PCSK9; (-) strand; PAM type: YTN; PAM sequence: TTA
agagaacagactgaggcctc

SEQ ID NO: 21739 - DNA, 20 bp, Artificial Sequence
  Description of Artificial Sequence: Synthetic oligonucleotide
  Target: PCSK9; (-) strand; PAM type: YTN; PAM sequence: CTT
aagagaacagactgaggcct

SEQ ID NO: 21740 - DNA, 20 bp, Artificial Sequence
  Description of Artificial Sequence: Synthetic oligonucleotide
  Target: PCSK9; (-) strand; PAM type: YTN; PAM sequence: TTG
aaggccttaagagaacagac

SEQ ID NO: 21741 - DNA, 20 bp, Artificial Sequence
  Description of Artificial Sequence: Synthetic oligonucleotide
  Target: PCSK9; (-) strand; PAM type: YTN; PAM sequence: TTA
atcagttgaaggccttaaga

SEQ ID NO: 21742 - DNA, 20 bp, Artificial Sequence
  Description of Artificial Sequence: Synthetic oligonucleotide
  Target: PCSK9; (-) strand; PAM type: YTN; PAM sequence: TTT
aatcagttgaaggccttaag

SEQ ID NO: 21743 - DNA, 20 bp, Artificial Sequence
  Description of Artificial Sequence: Synthetic oligonucleotide
  Target: PCSK9; (-) strand; PAM type: YTN; PAM sequence: CTC
atttaatcagttgaaggcct

SEQ ID NO: 21744 - DNA, 20 bp, Artificial Sequence
  Description of Artificial Sequence: Synthetic oligonucleotide
  Target: PCSK9; (-) strand; PAM type: YTN; PAM sequence: TTG
ggcaggcctcatttaatcag

SEQ ID NO: 21745 - DNA, 20 bp, Artificial Sequence
  Description of Artificial Sequence: Synthetic oligonucleotide
  Target: PCSK9; (-) strand; PAM type: YTN; PAM sequence: CTT
gggcaggcctcatttaatca

SEQ ID NO: 21746 - DNA, 20 bp, Artificial Sequence
  Description of Artificial Sequence: Synthetic oligonucleotide
  Target: PCSK9; (-) strand; PAM type: YTN; PAM sequence: CTA
taacttgggcaggcctcatt

SEQ ID NO: 21747 - DNA, 20 bp, Artificial Sequence
  Description of Artificial Sequence: Synthetic oligonucleotide
  Target: PCSK9; (-) strand; PAM type: YTN; PAM sequence: CTC
tataacttgggcaggcctca

SEQ ID NO: 21748 - DNA, 20 bp, Artificial Sequence
  Description of Artificial Sequence: Synthetic oligonucleotide
  Target: PCSK9; (-) strand; PAM type: YTN; PAM sequence: CTC
tctataacttgggcaggcct

SEQ ID NO: 21749 - DNA, 20 bp, Artificial Sequence
  Description of Artificial Sequence: Synthetic oligonucleotide
  Target: PCSK9; (-) strand; PAM type: YTN; PAM sequence: TTA
ctctctataacttgggcagg

SEQ ID NO: 21750 - DNA, 20 bp, Artificial Sequence
  Description of Artificial Sequence: Synthetic oligonucleotide
  Target: PCSK9; (-) strand; PAM type: YTN; PAM sequence: TTA
aatcagaagacggagtaagg

SEQ ID NO: 21751 - DNA, 20 bp, Artificial Sequence
  Description of Artificial Sequence: Synthetic oligonucleotide
  Target: PCSK9; (-) strand; PAM type: YTN; PAM sequence: TTT
aaatcagaagacggagtaag

SEQ ID NO: 21752 - DNA, 20 bp, Artificial Sequence
  Description of Artificial Sequence: Synthetic oligonucleotide
  Target: PCSK9; (-) strand; PAM type: YTN; PAM sequence: CTA
acatttaaatcagaagacgg

SEQ ID NO: 21753 - DNA, 20 bp, Artificial Sequence
  Description of Artificial Sequence: Synthetic oligonucleotide
  Target: PCSK9; (-) strand; PAM type: YTN; PAM sequence: TTA
gatgtgactaacatttaaat

SEQ ID NO: 21754 - DNA, 20 bp, Artificial Sequence
  Description of Artificial Sequence: Synthetic oligonucleotide
  Target: PCSK9; (-) strand; PAM type: YTN; PAM sequence: TTT
agatgtgactaacatttaaa

SEQ ID NO: 21755 - DNA, 20 bp, Artificial Sequence
  Description of Artificial Sequence: Synthetic oligonucleotide
  Target: PCSK9; (-) strand; PAM type: YTN; PAM sequence: TTT
tagatgtgactaacatttaa

SEQ ID NO: 21756 - DNA, 20 bp, Artificial Sequence
  Description of Artificial Sequence: Synthetic oligonucleotide
  Target: PCSK9; (-) strand; PAM type: YTN; PAM sequence: TTT
ttagatgtgactaacattta

SEQ ID NO: 21757 - DNA, 20 bp, Artificial Sequence
  Description of Artificial Sequence: Synthetic oligonucleotide
  Target: PCSK9; (-) strand; PAM type: YTN; PAM sequence: TTT
tttagatgtgactaacattt

SEQ ID NO: 21758 - DNA, 20 bp, Artificial Sequence
  Description of Artificial Sequence: Synthetic oligonucleotide
  Target: PCSK9; (-) strand; PAM type: YTN; PAM sequence: CTG
cgaaaatattttttagatgt

SEQ ID NO: 21759 - DNA, 20 bp, Artificial Sequence
  Description of Artificial Sequence: Synthetic oligonucleotide
  Target: PCSK9; (-) strand; PAM type: YTN; PAM sequence: CTG
ctgcgaaaatattttttaga

SEQ ID NO: 21760 - DNA, 20 bp, Artificial Sequence
  Description of Artificial Sequence: Synthetic oligonucleotide
  Target: PCSK9; (-) strand; PAM type: YTN; PAM sequence: TTG
gtcaaaagccagtggaaatg

SEQ ID NO: 21761 - DNA, 20 bp, Artificial Sequence
  Description of Artificial Sequence: Synthetic oligonucleotide
  Target: PCSK9; (-) strand; PAM type: YTN; PAM sequence: TTT
ggtcaaaagccagtggaaat

SEQ ID NO: 21762 - DNA, 20 bp, Artificial Sequence
  Description of Artificial Sequence: Synthetic oligonucleotide
  Target: PCSK9; (-) strand; PAM type: YTN; PAM sequence: CTG
atgtttggtcaaaagccagt

SEQ ID NO: 21763 - DNA, 20 bp, Artificial Sequence
  Description of Artificial Sequence: Synthetic oligonucleotide
  Target: PCSK9; (-) strand; PAM type: YTN; PAM sequence: TTG
tggcctgatgtttggtcaaa

SEQ ID NO: 21764 - DNA, 20 bp, Artificial Sequence
  Description of Artificial Sequence: Synthetic oligonucleotide
  Target: PCSK9; (-) strand; PAM type: YTN; PAM sequence: TTT
gtggcctgatgtttggtcaa

SEQ ID NO: 21765 - DNA, 20 bp, Artificial Sequence
  Description of Artificial Sequence: Synthetic oligonucleotide
  Target: PCSK9; (-) strand; PAM type: YTN; PAM sequence: CTT
tgtggcctgatgtttggtca

SEQ ID NO: 21766 - DNA, 20 bp, Artificial Sequence
  Description of Artificial Sequence: Synthetic oligonucleotide
  Target: PCSK9; (-) strand; PAM type: YTN; PAM sequence: TTG
gggatcaactttgtggcctg

SEQ ID NO: 21767 - DNA, 20 bp, Artificial Sequence
  Description of Artificial Sequence: Synthetic oligonucleotide
  Target: PCSK9; (-) strand; PAM type: YTN; PAM sequence: TTT
ggggatcaactttgtggcct

SEQ ID NO: 21768 - DNA, 20 bp, Artificial Sequence
  Description of Artificial Sequence: Synthetic oligonucleotide
  Target: PCSK9; (-) strand; PAM type: YTN; PAM sequence: TTT
tggggatcaactttgtggcc

SEQ ID NO: 21769 - DNA, 20 bp, Artificial Sequence
  Description of Artificial Sequence: Synthetic oligonucleotide
  Target: PCSK9; (-) strand; PAM type: YTN; PAM sequence: TTA
attttggggatcaactttgt

SEQ ID NO: 21770 - DNA, 20 bp, Artificial Sequence
  Description of Artificial Sequence: Synthetic oligonucleotide
  Target: PCSK9; (-) strand; PAM type: YTN; PAM sequence: TTA
caggcacagagtgatggtta

SEQ ID NO: 21771 - DNA, 20 bp, Artificial Sequence
  Description of Artificial Sequence: Synthetic oligonucleotide
  Target: PCSK9; (-) strand; PAM type: YTN; PAM sequence: CTT
acaggcacagagtgatggtt

SEQ ID NO: 21772 - DNA, 20 bp, Artificial Sequence
  Description of Artificial Sequence: Synthetic oligonucleotide
  Target: PCSK9; (-) strand; PAM type: YTN; PAM sequence: CTC
ccttacaggcacagagtgat

SEQ ID NO: 21773 - DNA, 20 bp, Artificial Sequence
  Description of Artificial Sequence: Synthetic oligonucleotide
  Target: PCSK9; (-) strand; PAM type: YTN; PAM sequence: TTC
ccagcccctcccttacaggc

SEQ ID NO: 21774 - DNA, 20 bp, Artificial Sequence
  Description of Artificial Sequence: Synthetic oligonucleotide
  Target: PCSK9; (-) strand; PAM type: YTN; PAM sequence: TTT
cccagcccctcccttacagg

SEQ ID NO: 21775 - DNA, 20 bp, Artificial Sequence
  Description of Artificial Sequence: Synthetic oligonucleotide
  Target: PCSK9; (-) strand; PAM type: YTN; PAM sequence: CTT
tcccagcccctcccttacag

SEQ ID NO: 21776 - DNA, 20 bp, Artificial Sequence
  Description of Artificial Sequence: Synthetic oligonucleotide
  Target: PCSK9; (-) strand; PAM type: YTN; PAM sequence: CTC
ccctttcccagcccctccct

SEQ ID NO: 21777 - DNA, 20 bp, Artificial Sequence
  Description of Artificial Sequence: Synthetic oligonucleotide
  Target: PCSK9; (-) strand; PAM type: YTN; PAM sequence: CTG
ctcccctttcccagcccctc

SEQ ID NO: 21778 - DNA, 20 bp, Artificial Sequence
  Description of Artificial Sequence: Synthetic oligonucleotide
  Target: PCSK9; (-) strand; PAM type: YTN; PAM sequence: TTG
gggagacctgctcccctttc

SEQ ID NO: 21779 - DNA, 20 bp, Artificial Sequence
  Description of Artificial Sequence: Synthetic oligonucleotide
  Target: PCSK9; (-) strand; PAM type: YTN; PAM sequence: CTT
ggggagacctgctccccttt

SEQ ID NO: 21780 - DNA, 20 bp, Artificial Sequence
  Description of Artificial Sequence: Synthetic oligonucleotide
  Target: PCSK9; (-) strand; PAM type: YTN; PAM sequence: CTG
ggaggaacaaagccaaggtc

SEQ ID NO: 21781 - DNA, 20 bp, Artificial Sequence
  Description of Artificial Sequence: Synthetic oligonucleotide
  Target: PCSK9; (-) strand; PAM type: YTN; PAM sequence: CTC
caggcctgggaggaacaaag

SEQ ID NO: 21782 - DNA, 20 bp, Artificial Sequence
  Description of Artificial Sequence: Synthetic oligonucleotide
  Target: PCSK9; (-) strand; PAM type: YTN; PAM sequence: TTC
cgaataaactccaggcctgg

SEQ ID NO: 21783 - DNA, 20 bp, Artificial Sequence
  Description of Artificial Sequence: Synthetic oligonucleotide
  Target: PCSK9; (-) strand; PAM type: YTN; PAM sequence: TTT
ccgaataaactccaggcctg

SEQ ID NO: 21784 - DNA, 20 bp, Artificial Sequence
  Description of Artificial Sequence: Synthetic oligonucleotide
  Target: PCSK9; (-) strand; PAM type: YTN; PAM sequence: TTT
tccgaataaactccaggcct

SEQ ID NO: 21785 - DNA, 20 bp, Artificial Sequence
  Description of Artificial Sequence: Synthetic oligonucleotide
  Target: PCSK9; (-) strand; PAM type: YTN; PAM sequence: CTT
ttccgaataaactccaggcc

SEQ ID NO: 21786 - DNA, 20 bp, Artificial Sequence
  Description of Artificial Sequence: Synthetic oligonucleotide
  Target: PCSK9; (-) strand; PAM type: YTN; PAM sequence: CTG
gcttttccgaataaactcca

SEQ ID NO: 21787 - DNA, 20 bp, Artificial Sequence
  Description of Artificial Sequence: Synthetic oligonucleotide
  Target: PCSK9; (-) strand; PAM type: YTN; PAM sequence: CTG
gaccagctggcttttccgaa

SEQ ID NO: 21788 - DNA, 20 bp, Artificial Sequence
  Description of Artificial Sequence: Synthetic oligonucleotide
  Target: PCSK9; (-) strand; PAM type: YTN; PAM sequence: CTG
tacccacccgccaggggcag

SEQ ID NO: 21789 - DNA, 20 bp, Artificial Sequence
  Description of Artificial Sequence: Synthetic oligonucleotide
  Target: PCSK9; (-) strand; PAM type: YTN; PAM sequence: TTG
aggacgcggctgtacccacc

SEQ ID NO: 21790 - DNA, 20 bp, Artificial Sequence
  Description of Artificial Sequence: Synthetic oligonucleotide
  Target: PCSK9; (-) strand; PAM type: YTN; PAM sequence: CTG
gcaggcggcgttgaggacgc

SEQ ID NO: 21791 - DNA, 20 bp, Artificial Sequence
  Description of Artificial Sequence: Synthetic oligonucleotide
  Target: PCSK9; (-) strand; PAM type: YTN; PAM sequence: CTC
gccaggcgctggcaggcggc

SEQ ID NO: 21792 - DNA, 20 bp, Artificial Sequence
  Description of Artificial Sequence: Synthetic oligonucleotide
  Target: PCSK9; (-) strand; PAM type: YTN; PAM sequence: TTG
ccggcagcggtgaccagcac

SEQ ID NO: 21793 - DNA, 20 bp, Artificial Sequence
  Description of Artificial Sequence: Synthetic oligonucleotide
  Target: PCSK9; (-) strand; PAM type: YTN; PAM sequence: CTG
gggagtagaggcaggcatcg

SEQ ID NO: 21794 - DNA, 20 bp, Artificial Sequence
  Description of Artificial Sequence: Synthetic oligonucleotide
  Target: PCSK9; (-) strand; PAM type: YTN; PAM sequence: CTG
aggctggggagtagaggcag

SEQ ID NO: 21795 - DNA, 20 bp, Artificial Sequence
  Description of Artificial Sequence: Synthetic oligonucleotide
  Target: PCSK9; (-) strand; PAM type: YTN; PAM sequence: CTC
gggagctgaggctggggagt

SEQ ID NO: 21796 - DNA, 20 bp, Artificial Sequence
  Description of Artificial Sequence: Synthetic oligonucleotide
  Target: PCSK9; (-) strand; PAM type: YTN; PAM sequence: CTA
cctcgggagctgaggctggg

SEQ ID NO: 21797 - DNA, 20 bp, Artificial Sequence
  Description of Artificial Sequence: Synthetic oligonucleotide
  Target: PCSK9; (-) strand; PAM type: YTN; PAM sequence: TTG
gggcagcagccccagcacct

SEQ ID NO: 21798 - DNA, 20 bp, Artificial Sequence
  Description of Artificial Sequence: Synthetic oligonucleotide
  Target: PCSK9; (-) strand; PAM type: YTN; PAM sequence: CTT
ggggcagcagccccagcacc

SEQ ID NO: 21799 - DNA, 20 bp, Artificial Sequence
  Description of Artificial Sequence: Synthetic oligonucleotide
  Target: PCSK9; (-) strand; PAM type: YTN; PAM sequence: CTA
cccgcgccttggggcagcag

SEQ ID NO: 21800 - DNA, 20 bp, Artificial Sequence
  Description of Artificial Sequence: Synthetic oligonucleotide
  Target: PCSK9; (-) strand; PAM type: YTN; PAM sequence: CTC
cgccccctacccgcgccttg

SEQ ID NO: 21801 - DNA, 20 bp, Artificial Sequence
  Description of Artificial Sequence: Synthetic oligonucleotide
  Target: PCSK9; (-) strand; PAM type: YTN; PAM sequence: CTC
cgccctccgccccctacccg

SEQ ID NO: 21802 - DNA, 20 bp, Artificial Sequence
  Description of Artificial Sequence: Synthetic oligonucleotide
  Target: PCSK9; (-) strand; PAM type: YTN; PAM sequence: CTC
cgccctccgccctccgcccc

SEQ ID NO: 21803 - DNA, 20 bp, Artificial Sequence
  Description of Artificial Sequence: Synthetic oligonucleotide
  Target: PCSK9; (-) strand; PAM type: YTN; PAM sequence: CTC
cctccgccctccgccctccg

SEQ ID NO: 21804 - DNA, 20 bp, Artificial Sequence
  Description of Artificial Sequence: Synthetic oligonucleotide
  Target: PCSK9; (-) strand; PAM type: YTN; PAM sequence: CTG
cccgcccgccctccctccgc

SEQ ID NO: 21805 - DNA, 20 bp, Artificial Sequence
  Description of Artificial Sequence: Synthetic oligonucleotide
  Target: PCSK9; (-) strand; PAM type: YTN; PAM sequence: CTC
caggaacgtgccacaagaag

SEQ ID NO: 21806 - DNA, 20 bp, Artificial Sequence
  Description of Artificial Sequence: Synthetic oligonucleotide
  Target: PCSK9; (-) strand; PAM type: YTN; PAM sequence: TTC
ggcctccaggaacgtgccac

SEQ ID NO: 21807 - DNA, 20 bp, Artificial Sequence
  Description of Artificial Sequence: Synthetic oligonucleotide
  Target: PCSK9; (-) strand; PAM type: YTN; PAM sequence: TTC
caaagccagaagggttcggc

SEQ ID NO: 21808 - DNA, 20 bp, Artificial Sequence
  Description of Artificial Sequence: Synthetic oligonucleotide
  Target: PCSK9; (-) strand; PAM type: YTN; PAM sequence: CTT
ccaaagccagaagggttcgg

SEQ ID NO: 21809 - DNA, 20 bp, Artificial Sequence
  Description of Artificial Sequence: Synthetic oligonucleotide
  Target: PCSK9; (-) strand; PAM type: YTN; PAM sequence: CTC
cttccaaagccagaagggtt

SEQ ID NO: 21810 - DNA, 20 bp, Artificial Sequence
  Description of Artificial Sequence: Synthetic oligonucleotide
  Target: PCSK9; (-) strand; PAM type: YTN; PAM sequence: CTG
acgactccttccaaagccag

SEQ ID NO: 21811 - DNA, 20 bp, Artificial Sequence
  Description of Artificial Sequence: Synthetic oligonucleotide
  Target: PCSK9; (-) strand; PAM type: YTN; PAM sequence: CTC
tgacgactccttccaaagcc

SEQ ID NO: 21812 - DNA, 20 bp, Artificial Sequence
  Description of Artificial Sequence: Synthetic oligonucleotide
  Target: PCSK9; (-) strand; PAM type: YTN; PAM sequence: CTC
ccgcatggcgggggtctctg

SEQ ID NO: 21813 - DNA, 20 bp, Artificial Sequence
  Description of Artificial Sequence: Synthetic oligonucleotide
  Target: PCSK9; (-) strand; PAM type: YTN; PAM sequence: CTC
cccagcctcccgcatggcgg

SEQ ID NO: 21814 - DNA, 20 bp, Artificial Sequence
  Description of Artificial Sequence: Synthetic oligonucleotide
  Target: PCSK9; (-) strand; PAM type: YTN; PAM sequence: TTC
ctccccagcctcccgcatgg

SEQ ID NO: 21815 - DNA, 20 bp, Artificial Sequence
  Description of Artificial Sequence: Synthetic oligonucleotide
  Target: PCSK9; (-) strand; PAM type: YTN; PAM sequence: CTT
cctccccagcctcccgcatg

SEQ ID NO: 21816 - DNA, 20 bp, Artificial Sequence
  Description of Artificial Sequence: Synthetic oligonucleotide
  Target: PCSK9; (-) strand; PAM type: YTN; PAM sequence: TTC
gagccccttcctccccagcc

SEQ ID NO: 21817 - DNA, 20 bp, Artificial Sequence
  Description of Artificial Sequence: Synthetic oligonucleotide
  Target: PCSK9; (-) strand; PAM type: YTN; PAM sequence: TTT
cgagccccttcctccccagc

SEQ ID NO: 21818 - DNA, 20 bp, Artificial Sequence
  Description of Artificial Sequence: Synthetic oligonucleotide
  Target: PCSK9; (-) strand; PAM type: YTN; PAM sequence: CTG
cgatgatggaggtttcgagc

SEQ ID NO: 21819 - DNA, 20 bp, Artificial Sequence
  Description of Artificial Sequence: Synthetic oligonucleotide
  Target: PCSK9; (-) strand; PAM type: YTN; PAM sequence: CTC
tgcgatgatggaggtttcga

SEQ ID NO: 21820 - DNA, 20 bp, Artificial Sequence
  Description of Artificial Sequence: Synthetic oligonucleotide
  Target: PCSK9; (-) strand; PAM type: YTN; PAM sequence: TTC
agactctgcgatgatggagg

SEQ ID NO: 21821 - DNA, 20 bp, Artificial Sequence
  Description of Artificial Sequence: Synthetic oligonucleotide
  Target: PCSK9; (-) strand; PAM type: YTN; PAM sequence: CTA
ttcagactctgcgatgatgg

SEQ ID NO: 21822 - DNA, 20 bp, Artificial Sequence
  Description of Artificial Sequence: Synthetic oligonucleotide
  Target: PCSK9; (-) strand; PAM type: YTN; PAM sequence: CTG
ctattcagactctgcgatga

SEQ ID NO: 21823 - DNA, 20 bp, Artificial Sequence
  Description of Artificial Sequence: Synthetic oligonucleotide
  Target: PCSK9; (-) strand; PAM type: YTN; PAM sequence: CTA
cgtgggcgcatggcggggcc

SEQ ID NO: 21824 - DNA, 20 bp, Artificial Sequence
  Description of Artificial Sequence: Synthetic oligonucleotide
  Target: PCSK9; (-) strand; PAM type: YTN; PAM sequence: CTA
cgtaggcgccgctacgtggg

SEQ ID NO: 21825 - DNA, 20 bp, Artificial Sequence
  Description of Artificial Sequence: Synthetic oligonucleotide
  Target: PCSK9; (-) strand; PAM type: YTN; PAM sequence: TTC
aggagggagagtggccagga

SEQ ID NO: 21826 - DNA, 20 bp, Artificial Sequence
  Description of Artificial Sequence: Synthetic oligonucleotide
  Target: PCSK9; (-) strand; PAM type: YTN; PAM sequence: CTT
caggagggagagtggccagg

SEQ ID NO: 21827 - DNA, 20 bp, Artificial Sequence
  Description of Artificial Sequence: Synthetic oligonucleotide
  Target: PCSK9; (-) strand; PAM type: YTN; PAM sequence: CTG
gggatggagatggggagggg

SEQ ID NO: 21828 - DNA, 20 bp, Artificial Sequence
  Description of Artificial Sequence: Synthetic oligonucleotide
  Target: PCSK9; (-) strand; PAM type: YTN; PAM sequence: TTG
ggcagaggacgcagggcctg

SEQ ID NO: 21829 - DNA, 20 bp, Artificial Sequence
  Description of Artificial Sequence: Synthetic oligonucleotide
  Target: PCSK9; (-) strand; PAM type: YTN; PAM sequence: CTG
gacaacagggaggcccaaag

SEQ ID NO: 21830 - DNA, 20 bp, Artificial Sequence
  Description of Artificial Sequence: Synthetic oligonucleotide
  Target: PCSK9; (-) strand; PAM type: YTN; PAM sequence: TTG
tcagtcatggagccgcggag

SEQ ID NO: 21831 - DNA, 20 bp, Artificial Sequence
  Description of Artificial Sequence: Synthetic oligonucleotide
  Target: PCSK9; (-) strand; PAM type: YTN; PAM sequence: CTC
aagttgtcagtcatggagcc

SEQ ID NO: 21832 - DNA, 20 bp, Artificial Sequence
  Description of Artificial Sequence: Synthetic oligonucleotide
  Target: PCSK9; (-) strand; PAM type: YTN; PAM sequence: TTG
ctcaagttgtcagtcatgga

SEQ ID NO: 21833 - DNA, 20 bp, Artificial Sequence
  Description of Artificial Sequence: Synthetic oligonucleotide
  Target: PCSK9; (-) strand; PAM type: YTN; PAM sequence: CTT
gctcaagttgtcagtcatgg

SEQ ID NO: 21834 - DNA, 20 bp, Artificial Sequence
  Description of Artificial Sequence: Synthetic oligonucleotide
  Target: PCSK9; (-) strand; PAM type: YTN; PAM sequence: TTA
gccttgctcaagttgtcagt

SEQ ID NO: 21835 - DNA, 20 bp, Artificial Sequence
  Description of Artificial Sequence: Synthetic oligonucleotide
  Target: PCSK9; (-) strand; PAM type: YTN; PAM sequence: TTC
acattagccttgctcaagtt

SEQ ID NO: 21836 - DNA, 20 bp, Artificial Sequence
  Description of Artificial Sequence: Synthetic oligonucleotide
  Target: PCSK9; (-) strand; PAM type: YTN; PAM sequence: CTC
ccattcacattagccttgct

SEQ ID NO: 21837 - DNA, 20 bp, Artificial Sequence
  Description of Artificial Sequence: Synthetic oligonucleotide
  Target: PCSK9; (-) strand; PAM type: YTN; PAM sequence: CTC
aaccgctcccattcacatta

SEQ ID NO: 21838 - DNA, 20 bp, Artificial Sequence
  Description of Artificial Sequence: Synthetic oligonucleotide
  Target: PCSK9; (-) strand; PAM type: YTN; PAM sequence: CTG
agccctcaaccgctcccatt

SEQ ID NO: 21839 - DNA, 20 bp, Artificial Sequence
  Description of Artificial Sequence: Synthetic oligonucleotide
  Target: PCSK9; (-) strand; PAM type: YTN; PAM sequence: CTC
gggtgagaggtctgagccct

SEQ ID NO: 21840 - DNA, 20 bp, Artificial Sequence
  Description of Artificial Sequence: Synthetic oligonucleotide
  Target: PCSK9; (-) strand; PAM type: YTN; PAM sequence: TTC
ctcgggtgagaggtctgagc

SEQ ID NO: 21841 - DNA, 20 bp, Artificial Sequence
  Description of Artificial Sequence: Synthetic oligonucleotide
  Target: PCSK9; (-) strand; PAM type: YTN; PAM sequence: CTG
tggatgttcctcgggtgaga

SEQ ID NO: 21842 - DNA, 20 bp, Artificial Sequence
  Description of Artificial Sequence: Synthetic oligonucleotide
  Target: PCSK9; (-) strand; PAM type: YTN; PAM sequence: CTC
tgtggatgttcctcgggtga

SEQ ID NO: 21843 - DNA, 20 bp, Artificial Sequence
  Description of Artificial Sequence: Synthetic oligonucleotide
  Target: PCSK9; (-) strand; PAM type: YTN; PAM sequence: CTG
caccgggcatgcggcacact

SEQ ID NO: 21844 - DNA, 20 bp, Artificial Sequence
  Description of Artificial Sequence: Synthetic oligonucleotide
  Target: PCSK9; (-) strand; PAM type: YTN; PAM sequence: CTG
tgtccccgcagccacactgc

SEQ ID NO: 21845 - DNA, 20 bp, Artificial Sequence
  Description of Artificial Sequence: Synthetic oligonucleotide
  Target: PCSK9; (-) strand; PAM type: YTN; PAM sequence: CTC
cgtgtctgtgtccccgcagc

SEQ ID NO: 21846 - DNA, 20 bp, Artificial Sequence
  Description of Artificial Sequence: Synthetic oligonucleotide
  Target: PCSK9; (-) strand; PAM type: YTN; PAM sequence: CTC
agggccgaggctccgtgtct

SEQ ID NO: 21847 - DNA, 20 bp, Artificial Sequence
  Description of Artificial Sequence: Synthetic oligonucleotide
  Target: PCSK9; (-) strand; PAM type: YTN; PAM sequence: CTC
ctcagggccgaggctccgtg

SEQ ID NO: 21848 - DNA, 20 bp, Artificial Sequence
  Description of Artificial Sequence: Synthetic oligonucleotide
  Target: PCSK9; (-) strand; PAM type: YTN; PAM sequence: CTG
ccccccagctcctcagggcc

SEQ ID NO: 21849 - DNA, 20 bp, Artificial Sequence
  Description of Artificial Sequence: Synthetic oligonucleotide
  Target: PCSK9; (-) strand; PAM type: YTN; PAM sequence: CTG
gaggagtggtgggtcagagg

SEQ ID NO: 21850 - DNA, 20 bp, Artificial Sequence
  Description of Artificial Sequence: Synthetic oligonucleotide
  Target: PCSK9; (-) strand; PAM type: YTN; PAM sequence: CTG
acactggaggagtggtgggt

SEQ ID NO: 21851 - DNA, 20 bp, Artificial Sequence
  Description of Artificial Sequence: Synthetic oligonucleotide
  Target: PCSK9; (-) strand; PAM type: YTN; PAM sequence: CTA
gatacccgcagtgtcctgac

SEQ ID NO: 21852 - DNA, 20 bp, Artificial Sequence
  Description of Artificial Sequence: Synthetic oligonucleotide
  Target: PCSK9; (-) strand; PAM type: YTN; PAM sequence: TTC
ccctagatacccgcagtgtc

SEQ ID NO: 21853 - DNA, 20 bp, Artificial Sequence
  Description of Artificial Sequence: Synthetic oligonucleotide
  Target: PCSK9; (-) strand; PAM type: YTN; PAM sequence: CTT
cccctagatacccgcagtgt

SEQ ID NO: 21854 - DNA, 20 bp, Artificial Sequence
  Description of Artificial Sequence: Synthetic oligonucleotide
  Target: PCSK9; (-) strand; PAM type: YTN; PAM sequence: TTC
cttcccctagatacccgcag

SEQ ID NO: 21855 - DNA, 20 bp, Artificial Sequence
  Description of Artificial Sequence: Synthetic oligonucleotide
  Target: PCSK9; (-) strand; PAM type: YTN; PAM sequence: TTG
aagtggaacaagattccttc

SEQ ID NO: 21856 - DNA, 20 bp, Artificial Sequence
  Description of Artificial Sequence: Synthetic oligonucleotide
  Target: PCSK9; (-) strand; PAM type: YTN; PAM sequence: CTT
gaagtggaacaagattcctt

SEQ ID NO: 21857 - DNA, 20 bp, Artificial Sequence
  Description of Artificial Sequence: Synthetic oligonucleotide
  Target: PCSK9; (-) strand; PAM type: YTN; PAM sequence: TTC
cagacttgaagtggaacaag

SEQ ID NO: 21858 - DNA, 20 bp, Artificial Sequence
  Description of Artificial Sequence: Synthetic oligonucleotide
  Target: PCSK9; (-) strand; PAM type: YTN; PAM sequence: TTG
aagttccagacttgaagtgg

SEQ ID NO: 21859 - DNA, 20 bp, Artificial Sequence
  Description of Artificial Sequence: Synthetic oligonucleotide
  Target: PCSK9; (-) strand; PAM type: YTN; PAM sequence: CTT
gaagttccagacttgaagtg

SEQ ID NO: 21860 - DNA, 20 bp, Artificial Sequence
  Description of Artificial Sequence: Synthetic oligonucleotide
  Target: PCSK9; (-) strand; PAM type: YTN; PAM sequence: CTG
caacccccacccccaacgcg

SEQ ID NO: 21861 - DNA, 20 bp, Artificial Sequence
  Description of Artificial Sequence: Synthetic oligonucleotide
  Target: PCSK9; (-) strand; PAM type: YTN; PAM sequence: CTC
tgcaacccccacccccaacg

SEQ ID NO: 21862 - DNA, 20 bp, Artificial Sequence
  Description of Artificial Sequence: Synthetic oligonucleotide
  Target: PCSK9; (-) strand; PAM type: YTN; PAM sequence: CTG
ctctgcaacccccaccccca

SEQ ID NO: 21863 - DNA, 20 bp, Artificial Sequence
  Description of Artificial Sequence: Synthetic oligonucleotide
  Target: PCSK9; (-) strand; PAM type: YTN; PAM sequence: CTG
tcaggtacgcatctgctctg

SEQ ID NO: 21864 - DNA, 20 bp, Artificial Sequence
  Description of Artificial Sequence: Synthetic oligonucleotide
  Target: PCSK9; (-) strand; PAM type: YTN; PAM sequence: TTA
ccgctgtcaggtacgcatct

SEQ ID NO: 21865 - DNA, 20 bp, Artificial Sequence
  Description of Artificial Sequence: Synthetic oligonucleotide
  Target: PCSK9; (-) strand; PAM type: YTN; PAM sequence: CTA
ggttaccgctgtcaggtacg

SEQ ID NO: 21866 - DNA, 20 bp, Artificial Sequence
  Description of Artificial Sequence: Synthetic oligonucleotide
  Target: PCSK9; (-) strand; PAM type: YTN; PAM sequence: TTG
ataggccaggggggacctag

SEQ ID NO: 21867 - DNA, 20 bp, Artificial Sequence
  Description of Artificial Sequence: Synthetic oligonucleotide
  Target: PCSK9; (-) strand; PAM type: YTN; PAM sequence: CTT
gataggccaggggggaccta

SEQ ID NO: 21868 - DNA, 20 bp, Artificial Sequence
  Description of Artificial Sequence: Synthetic oligonucleotide
  Target: PCSK9; (-) strand; PAM type: YTN; PAM sequence: TTC
ggccgccagggaagccttga

SEQ ID NO: 21869 - DNA, 20 bp, Artificial Sequence
  Description of Artificial Sequence: Synthetic oligonucleotide
  Target: PCSK9; (-) strand; PAM type: YTN; PAM sequence: TTA
aattcggccgccagggaagc

SEQ ID NO: 21870 - DNA, 20 bp, Artificial Sequence
  Description of Artificial Sequence: Synthetic oligonucleotide
  Target: PCSK9; (-) strand; PAM type: YTN; PAM sequence: TTT
aaattcggccgccagggaag

SEQ ID NO: 21871 - DNA, 20 bp, Artificial Sequence
  Description of Artificial Sequence: Synthetic oligonucleotide
  Target: PCSK9; (-) strand; PAM type: YTN; PAM sequence: CTT
taaattcggccgccagggaa

SEQ ID NO: 21872 - DNA, 20 bp, Artificial Sequence
  Description of Artificial Sequence: Synthetic oligonucleotide
  Target: PCSK9; (-) strand; PAM type: YTN; PAM sequence: TTG
atgcctttaaattcggccgc

SEQ ID NO: 21873 - DNA, 20 bp, Artificial Sequence
  Description of Artificial Sequence: Synthetic oligonucleotide
  Target: PCSK9; (-) strand; PAM type: YTN; PAM sequence: CTT
gatgcctttaaattcggccg

SEQ ID NO: 21874 - DNA, 20 bp, Artificial Sequence
  Description of Artificial Sequence: Synthetic oligonucleotide
  Target: PCSK9; (-) strand; PAM type: YTN; PAM sequence: TTG
cttgatgcctttaaattcgg

SEQ ID NO: 21875 - DNA, 20 bp, Artificial Sequence
  Description of Artificial Sequence: Synthetic oligonucleotide
  Target: PCSK9; (-) strand; PAM type: YTN; PAM sequence: TTT
gcttgatgcctttaaattcg

SEQ ID NO: 21876 - DNA, 20 bp, Artificial Sequence
  Description of Artificial Sequence: Synthetic oligonucleotide
  Target: PCSK9; (-) strand; PAM type: YTN; PAM sequence: TTG
tttgcttgatgcctttaaat

SEQ ID NO: 21877 - DNA, 20 bp, Artificial Sequence
  Description of Artificial Sequence: Synthetic oligonucleotide
  Target: PCSK9; (-) strand; PAM type: YTN; PAM sequence: TTT
gtttgcttgatgcctttaaa

SEQ ID NO: 21878 - DNA, 20 bp, Artificial Sequence
  Description of Artificial Sequence: Synthetic oligonucleotide
  Target: PCSK9; (-) strand; PAM type: YTN; PAM sequence: CTT
tgtttgcttgatgcctttaa

SEQ ID NO: 21879 - DNA, 20 bp, Artificial Sequence
  Description of Artificial Sequence: Synthetic oligonucleotide
  Target: PCSK9; (-) strand; PAM type: YTN; PAM sequence: TTG
ggctttgtttgcttgatgcc

SEQ ID NO: 21880 - DNA, 20 bp, Artificial Sequence
  Description of Artificial Sequence: Synthetic oligonucleotide
  Target: PCSK9; (-) strand; PAM type: YTN; PAM sequence: CTG
agaggacaaggcagagatgt

SEQ ID NO: 21881 - DNA, 20 bp, Artificial Sequence
  Description of Artificial Sequence: Synthetic oligonucleotide
  Target: PCSK9; (-) strand; PAM type: YTN; PAM sequence: CTA
agtgccacggggggaaactg

SEQ ID NO: 21882 - DNA, 20 bp, Artificial Sequence
  Description of Artificial Sequence: Synthetic oligonucleotide
  Target: PCSK9; (-) strand; PAM type: YTN; PAM sequence: TTC
taagtgccacggggggaaac

SEQ ID NO: 21883 - DNA, 20 bp, Artificial Sequence
  Description of Artificial Sequence: Synthetic oligonucleotide
  Target: PCSK9; (-) strand; PAM type: YTN; PAM sequence: TTC
ggtgtatcaagtggttctaa

SEQ ID NO: 21884 - DNA, 20 bp, Artificial Sequence
  Description of Artificial Sequence: Synthetic oligonucleotide
  Target: PCSK9; (-) strand; PAM type: YTN; PAM sequence: CTA
ttcggtgtatcaagtggttc

SEQ ID NO: 21885 - DNA, 20 bp, Artificial Sequence
  Description of Artificial Sequence: Synthetic oligonucleotide
  Target: PCSK9; (-) strand; PAM type: YTN; PAM sequence: CTA
gtgggggagataggaaacta

SEQ ID NO: 21886 - DNA, 20 bp, Artificial Sequence
  Description of Artificial Sequence: Synthetic oligonucleotide
  Target: PCSK9; (-) strand; PAM type: YTN; PAM sequence: TTA
catcctagtgggggagatag

SEQ ID NO: 21887 - DNA, 20 bp, Artificial Sequence
  Description of Artificial Sequence: Synthetic oligonucleotide
  Target: PCSK9; (-) strand; PAM type: YTN; PAM sequence: TTT
acatcctagtgggggagata

SEQ ID NO: 21888 - DNA, 20 bp, Artificial Sequence
  Description of Artificial Sequence: Synthetic oligonucleotide
  Target: PCSK9; (-) strand; PAM type: YTN; PAM sequence: CTG
tggagtttacatcctagtgg

SEQ ID NO: 21889 - DNA, 20 bp, Artificial Sequence
  Description of Artificial Sequence: Synthetic oligonucleotide
  Target: PCSK9; (-) strand; PAM type: YTN; PAM sequence: TTC
ccaatgcccctgtggagttt

SEQ ID NO: 21890 - DNA, 20 bp, Artificial Sequence
  Description of Artificial Sequence: Synthetic oligonucleotide
  Target: PCSK9; (-) strand; PAM type: YTN; PAM sequence: CTA
ccatagccaggcagcattcc

SEQ ID NO: 21891 - DNA, 20 bp, Artificial Sequence
  Description of Artificial Sequence: Synthetic oligonucleotide
  Target: PCSK9; (-) strand; PAM type: YTN; PAM sequence: CTG
tccctaccatagccaggcag

SEQ ID NO: 21892 - DNA, 20 bp, Artificial Sequence
  Description of Artificial Sequence: Synthetic oligonucleotide
  Target: PCSK9; (-) strand; PAM type: YTN; PAM sequence: CTC
tgtccctaccatagccaggc

SEQ ID NO: 21893 - DNA, 20 bp, Artificial Sequence
  Description of Artificial Sequence: Synthetic oligonucleotide
  Target: PCSK9; (-) strand; PAM type: YTN; PAM sequence: CTC
ccctctgtccctaccatagc

SEQ ID NO: 21894 - DNA, 20 bp, Artificial Sequence
  Description of Artificial Sequence: Synthetic oligonucleotide
  Target: PCSK9; (-) strand; PAM type: YTN; PAM sequence: CTG
gtgctcccctctgtccctac

SEQ ID NO: 21895 - DNA, 20 bp, Artificial Sequence
  Description of Artificial Sequence: Synthetic oligonucleotide
  Target: PCSK9; (-) strand; PAM type: YTN; PAM sequence: CTG
ccccgccctggtgctcccct

SEQ ID NO: 21896 - DNA, 20 bp, Artificial Sequence
  Description of Artificial Sequence: Synthetic oligonucleotide
  Target: PCSK9; (-) strand; PAM type: YTN; PAM sequence: CTG
gcacccctgccccgccctgg

SEQ ID NO: 21897 - DNA, 20 bp, Artificial Sequence
  Description of Artificial Sequence: Synthetic oligonucleotide
  Target: PCSK9; (-) strand; PAM type: YTN; PAM sequence: CTC
tggcacccctgccccgccct

SEQ ID NO: 21898 - DNA, 20 bp, Artificial Sequence
  Description of Artificial Sequence: Synthetic oligonucleotide
  Target: PCSK9; (-) strand; PAM type: YTN; PAM sequence: CTG
cccaggcagaactctggcac

SEQ ID NO: 21899 - DNA, 20 bp, Artificial Sequence
  Description of Artificial Sequence: Synthetic oligonucleotide
  Target: PCSK9; (-) strand; PAM type: YTN; PAM sequence: CTG
actgcccaggcagaactctg

SEQ ID NO: 21900 - DNA, 20 bp, Artificial Sequence
  Description of Artificial Sequence: Synthetic oligonucleotide
  Target: PCSK9; (-) strand; PAM type: YTN; PAM sequence: CTA
aggaaaatctgactgcccag

SEQ ID NO: 21901 - DNA, 20 bp, Artificial Sequence
  Description of Artificial Sequence: Synthetic oligonucleotide
  Target: PCSK9; (-) strand; PAM type: YTN; PAM sequence: CTC
ctaaggaaaatctgactgcc

SEQ ID NO: 21902 - DNA, 20 bp, Artificial Sequence
  Description of Artificial Sequence: Synthetic oligonucleotide
  Target: PCSK9; (-) strand; PAM type: YTN; PAM sequence: CTC
aaatgtcccctcctaaggaa

SEQ ID NO: 21903 - DNA, 20 bp, Artificial Sequence
  Description of Artificial Sequence: Synthetic oligonucleotide
  Target: PCSK9; (-) strand; PAM type: YTN; PAM sequence: TTG
ggtcccactcaaatgtcccc

SEQ ID NO: 21904 - DNA, 20 bp, Artificial Sequence
  Description of Artificial Sequence: Synthetic oligonucleotide
  Target: PCSK9; (-) strand; PAM type: YTN; PAM sequence: TTT
gggtcccactcaaatgtccc

SEQ ID NO: 21905 - DNA, 20 bp, Artificial Sequence
  Description of Artificial Sequence: Synthetic oligonucleotide
  Target: PCSK9; (-) strand; PAM type: YTN; PAM sequence: CTG
tttgggtcccactcaaatgt

SEQ ID NO: 21906 - DNA, 20 bp, Artificial Sequence
  Description of Artificial Sequence: Synthetic oligonucleotide
  Target: PCSK9; (-) strand; PAM type: YTN; PAM sequence: CTA
tacacctgtttgggtcccac

SEQ ID NO: 21907 - DNA, 20 bp, Artificial Sequence
  Description of Artificial Sequence: Synthetic oligonucleotide
  Target: PCSK9; (-) strand; PAM type: YTN; PAM sequence: CTG
ctatacacctgtttgggtcc

SEQ ID NO: 21908 - DNA, 20 bp, Artificial Sequence
  Description of Artificial Sequence: Synthetic oligonucleotide
  Target: PCSK9; (-) strand; PAM type: YTN; PAM sequence: CTG
gacaactgctatacacctgt

SEQ ID NO: 21909 - DNA, 20 bp, Artificial Sequence
  Description of Artificial Sequence: Synthetic oligonucleotide
  Target: PCSK9; (-) strand; PAM type: YTN; PAM sequence: CTG
ggctggacaactgctataca

SEQ ID NO: 21910 - DNA, 20 bp, Artificial Sequence
  Description of Artificial Sequence: Synthetic oligonucleotide
  Target: PCSK9; (-) strand; PAM type: YTN; PAM sequence: TTG
ccagctgggctggacaactg

SEQ ID NO: 21911 - DNA, 20 bp, Artificial Sequence
  Description of Artificial Sequence: Synthetic oligonucleotide
  Target: PCSK9; (-) strand; PAM type: YTN; PAM sequence: CTT
gccagctgggctggacaact

SEQ ID NO: 21912 - DNA, 20 bp, Artificial Sequence
  Description of Artificial Sequence: Synthetic oligonucleotide
  Target: PCSK9; (-) strand; PAM type: YTN; PAM sequence: CTC
aggccttgccagctgggctg

SEQ ID NO: 21913 - DNA, 20 bp, Artificial Sequence
  Description of Artificial Sequence: Synthetic oligonucleotide
  Target: PCSK9; (-) strand; PAM type: YTN; PAM sequence: TTG
cagaggcagactcaggcctt

SEQ ID NO: 21914 - DNA, 20 bp, Artificial Sequence
  Description of Artificial Sequence: Synthetic oligonucleotide
  Target: PCSK9; (-) strand; PAM type: YTN; PAM sequence: CTG
gaaaggtgaggaggtgggtg

SEQ ID NO: 21915 - DNA, 20 bp, Artificial Sequence
  Description of Artificial Sequence: Synthetic oligonucleotide
  Target: PCSK9; (-) strand; PAM type: YTN; PAM sequence: CTG
tgatgacctggaaaggtgag

SEQ ID NO: 21916 - DNA, 20 bp, Artificial Sequence
  Description of Artificial Sequence: Synthetic oligonucleotide
  Target: PCSK9; (-) strand; PAM type: YTN; PAM sequence: TTG
gtggccccaactgtgatgac

SEQ ID NO: 21917 - DNA, 20 bp, Artificial Sequence
  Description of Artificial Sequence: Synthetic oligonucleotide
  Target: PCSK9; (-) strand; PAM type: YTN; PAM sequence: TTG
ggcattggtggccccaactg

SEQ ID NO: 21918 - DNA, 20 bp, Artificial Sequence
  Description of Artificial Sequence: Synthetic oligonucleotide
  Target: PCSK9; (-) strand; PAM type: YTN; PAM sequence: CTT
gggcattggtggccccaact

SEQ ID NO: 21919 - DNA, 20 bp, Artificial Sequence
  Description of Artificial Sequence: Synthetic oligonucleotide
  Target: PCSK9; (-) strand; PAM type: YTN; PAM sequence: CTG
gtcttgggcattggtggccc

SEQ ID NO: 21920 - DNA, 20 bp, Artificial Sequence
  Description of Artificial Sequence: Synthetic oligonucleotide
  Target: PCSK9; (-) strand; PAM type: YTN; PAM sequence: TTG
gtccccaaagtccccagggt

SEQ ID NO: 21921 - DNA, 20 bp, Artificial Sequence
  Description of Artificial Sequence: Synthetic oligonucleotide
  Target: PCSK9; (-) strand; PAM type: YTN; PAM sequence: CTG
gggcaaagaggtccacacag

SEQ ID NO: 21922 - DNA, 20 bp, Artificial Sequence
  Description of Artificial Sequence: Synthetic oligonucleotide
  Target: PCSK9; (-) strand; PAM type: YTN; PAM sequence: CTC
ccctggggcaaagaggtcca

SEQ ID NO: 21923 - DNA, 20 bp, Artificial Sequence
  Description of Artificial Sequence: Synthetic oligonucleotide
  Target: PCSK9; (-) strand; PAM type: YTN; PAM sequence: CTG
gaggcaccaatgatgtcctc

SEQ ID NO: 21924 - DNA, 20 bp, Artificial Sequence
  Description of Artificial Sequence: Synthetic oligonucleotide
  Target: PCSK9; (-) strand; PAM type: YTN; PAM sequence: CTG
cagtcgctggaggcaccaat

SEQ ID NO: 21925 - DNA, 20 bp, Artificial Sequence
  Description of Artificial Sequence: Synthetic oligonucleotide
  Target: PCSK9; (-) strand; PAM type: YTN; PAM sequence: CTG
tgacacaaagcaggtgctgc

SEQ ID NO: 21926 - DNA, 20 bp, Artificial Sequence
  Description of Artificial Sequence: Synthetic oligonucleotide
  Target: PCSK9; (-) strand; PAM type: YTN; PAM sequence: CTC
tgtgacacaaagcaggtgct

SEQ ID NO: 21927 - DNA, 20 bp, Artificial Sequence
  Description of Artificial Sequence: Synthetic oligonucleotide
  Target: PCSK9; (-) strand; PAM type: YTN; PAM sequence: CTG
tgatgtcccactctgtgaca

SEQ ID NO: 21928 - DNA, 20 bp, Artificial Sequence
  Description of Artificial Sequence: Synthetic oligonucleotide
  Target: PCSK9; (-) strand; PAM type: YTN; PAM sequence: TTA
ccagccacgtgggcagcagc

SEQ ID NO: 21929 - DNA, 20 bp, Artificial Sequence
  Description of Artificial Sequence: Synthetic oligonucleotide
  Target: PCSK9; (-) strand; PAM type: YTN; PAM sequence: CTT
accagccacgtgggcagcag

SEQ ID NO: 21930 - DNA, 20 bp, Artificial Sequence
  Description of Artificial Sequence: Synthetic oligonucleotide
  Target: PCSK9; (-) strand; PAM type: YTN; PAM sequence: TTA
gcatcacggtggccgaggca

SEQ ID NO: 21931 - DNA, 20 bp, Artificial Sequence
  Description of Artificial Sequence: Synthetic oligonucleotide
  Target: PCSK9; (-) strand; PAM type: YTN; PAM sequence: CTG
ttagcatcacggtggccgag

SEQ ID NO: 21932 - DNA, 20 bp, Artificial Sequence
  Description of Artificial Sequence: Synthetic oligonucleotide
  Target: PCSK9; (-) strand; PAM type: YTN; PAM sequence: CTG
ccaaaggggctgttagcatc

SEQ ID NO: 21933 - DNA, 20 bp, Artificial Sequence
  Description of Artificial Sequence: Synthetic oligonucleotide
  Target: PCSK9; (-) strand; PAM type: YTN; PAM sequence: CTG
actgccaaaggggctgttag

SEQ ID NO: 21934 - DNA, 20 bp, Artificial Sequence
  Description of Artificial Sequence: Synthetic oligonucleotide
  Target: PCSK9; (-) strand; PAM type: YTN; PAM sequence: CTG
gaggtcccggcacagaccct

SEQ ID NO: 21935 - DNA, 20 bp, Artificial Sequence
  Description of Artificial Sequence: Synthetic oligonucleotide
  Target: PCSK9; (-) strand; PAM type: YTN; PAM sequence: CTG
gcactggaggtcccggcaca

SEQ ID NO: 21936 - DNA, 20 bp, Artificial Sequence
  Description of Artificial Sequence: Synthetic oligonucleotide
  Target: PCSK9; (-) strand; PAM type: YTN; PAM sequence: CTG
cacagagcctggcactggag

SEQ ID NO: 21937 - DNA, 20 bp, Artificial Sequence
  Description of Artificial Sequence: Synthetic oligonucleotide
  Target: PCSK9; (-) strand; PAM type: YTN; PAM sequence: CTG
gtccccctgcacagagcctg

SEQ ID NO: 21938 - DNA, 20 bp, Artificial Sequence
  Description of Artificial Sequence: Synthetic oligonucleotide
  Target: PCSK9; (-) strand; PAM type: YTN; PAM sequence: CTC
tggtccccctgcacagagcc

SEQ ID NO: 21939 - DNA, 20 bp, Artificial Sequence
  Description of Artificial Sequence: Synthetic oligonucleotide
  Target: PCSK9; (-) strand; PAM type: YTN; PAM sequence: TTC
atctctggtccccctgcaca

SEQ ID NO: 21940 - DNA, 20 bp, Artificial Sequence
  Description of Artificial Sequence: Synthetic oligonucleotide
  Target: PCSK9; (-) strand; PAM type: YTN; PAM sequence: CTT
catctctggtccccctgcac

SEQ ID NO: 21941 - DNA, 20 bp, Artificial Sequence
  Description of Artificial Sequence: Synthetic oligonucleotide
  Target: PCSK9; (-) strand; PAM type: YTN; PAM sequence: CTA
cttcatctctggtccccctg

SEQ ID NO: 21942 - DNA, 20 bp, Artificial Sequence
  Description of Artificial Sequence: Synthetic oligonucleotide
  Target: PCSK9; (-) strand; PAM type: YTN; PAM sequence: TTG
aaggcaccatcaggcctact

SEQ ID NO: 21943 - DNA, 20 bp, Artificial Sequence
  Description of Artificial Sequence: Synthetic oligonucleotide
  Target: PCSK9; (-) strand; PAM type: YTN; PAM sequence: CTT
gaaggcaccatcaggcctac

SEQ ID NO: 21944 - DNA, 20 bp, Artificial Sequence
  Description of Artificial Sequence: Synthetic oligonucleotide
  Target: PCSK9; (-) strand; PAM type: YTN; PAM sequence: CTG
agtgtccttgaaggcaccat

SEQ ID NO: 21945 - DNA, 20 bp, Artificial Sequence
  Description of Artificial Sequence: Synthetic oligonucleotide
  Target: PCSK9; (-) strand; PAM type: YTN; PAM sequence: CTC
atcagactgagtgtccttga

SEQ ID NO: 21946 - DNA, 20 bp, Artificial Sequence
  Description of Artificial Sequence: Synthetic oligonucleotide
  Target: PCSK9; (-) strand; PAM type: YTN; PAM sequence: CTC
cctcatcagactgagtgtcc

SEQ ID NO: 21947 - DNA, 20 bp, Artificial Sequence
  Description of Artificial Sequence: Synthetic oligonucleotide
  Target: PCSK9; (-) strand; PAM type: YTN; PAM sequence: CTC
gcctccctcatcagactgag

SEQ ID NO: 21948 - DNA, 20 bp, Artificial Sequence
  Description of Artificial Sequence: Synthetic oligonucleotide
  Target: PCSK9; (-) strand; PAM type: YTN; PAM sequence: CTG
tgcactcgcctccctcatca

SEQ ID NO: 21949 - DNA, 20 bp, Artificial Sequence
  Description of Artificial Sequence: Synthetic oligonucleotide
  Target: PCSK9; (-) strand; PAM type: YTN; PAM sequence: CTC
tgtgcactcgcctccctcat

SEQ ID NO: 21950 - DNA, 20 bp, Artificial Sequence
  Description of Artificial Sequence: Synthetic oligonucleotide
  Target: PCSK9; (-) strand; PAM type: YTN; PAM sequence: TTC
ctctgtgcactcgcctccct

SEQ ID NO: 21951 - DNA, 20 bp, Artificial Sequence
  Description of Artificial Sequence: Synthetic oligonucleotide
  Target: PCSK9; (-) strand; PAM type: YTN; PAM sequence: TTT
cctctgtgcactcgcctccc

SEQ ID NO: 21952 - DNA, 20 bp, Artificial Sequence
  Description of Artificial Sequence: Synthetic oligonucleotide
  Target: PCSK9; (-) strand; PAM type: YTN; PAM sequence: CTC
gtgtttcctctgtgcactcg

SEQ ID NO: 21953 - DNA, 20 bp, Artificial Sequence
  Description of Artificial Sequence: Synthetic oligonucleotide
  Target: PCSK9; (-) strand; PAM type: YTN; PAM sequence: CTG
acctcgtgtttcctctgtgc

SEQ ID NO: 21954 - DNA, 20 bp, Artificial Sequence
  Description of Artificial Sequence: Synthetic oligonucleotide
  Target: PCSK9; (-) strand; PAM type: YTN; PAM sequence: CTA
atacagccctgacctcgtgt

SEQ ID NO: 21955 - DNA, 20 bp, Artificial Sequence
  Description of Artificial Sequence: Synthetic oligonucleotide
  Target: PCSK9; (-) strand; PAM type: YTN; PAM sequence: CTC
taatacagccctgacctcgt

SEQ ID NO: 21956 - DNA, 20 bp, Artificial Sequence
  Description of Artificial Sequence: Synthetic oligonucleotide
  Target: PCSK9; (-) strand; PAM type: YTN; PAM sequence: CTC
cctctaatacagccctgacc

SEQ ID NO: 21957 - DNA, 20 bp, Artificial Sequence
  Description of Artificial Sequence: Synthetic oligonucleotide
  Target: PCSK9; (-) strand; PAM type: YTN; PAM sequence: CTG
ggctccctctaatacagccc

SEQ ID NO: 21958 - DNA, 20 bp, Artificial Sequence
  Description of Artificial Sequence: Synthetic oligonucleotide
  Target: PCSK9; (-) strand; PAM type: YTN; PAM sequence: CTC
tgggctccctctaatacagc

SEQ ID NO: 21959 - DNA, 20 bp, Artificial Sequence
  Description of Artificial Sequence: Synthetic oligonucleotide
  Target: PCSK9; (-) strand; PAM type: YTN; PAM sequence: CTC
ctctgggctccctctaatac

SEQ ID NO: 21960 - DNA, 20 bp, Artificial Sequence
  Description of Artificial Sequence: Synthetic oligonucleotide
  Target: PCSK9; (-) strand; PAM type: YTN; PAM sequence: CTG
ggcaggtgcctcctctgggc

SEQ ID NO: 21961 - DNA, 20 bp, Artificial Sequence
  Description of Artificial Sequence: Synthetic oligonucleotide
  Target: PCSK9; (-) strand; PAM type: YTN; PAM sequence: CTC
gggctgggcaggtgcctcct

SEQ ID NO: 21962 - DNA, 20 bp, Artificial Sequence
  Description of Artificial Sequence: Synthetic oligonucleotide
  Target: PCSK9; (-) strand; PAM type: YTN; PAM sequence: CTG
accctcgggctgggcaggtg

SEQ ID NO: 21963 - DNA, 20 bp, Artificial Sequence
  Description of Artificial Sequence: Synthetic oligonucleotide
  Target: PCSK9; (-) strand; PAM type: YTN; PAM sequence: CTC
tgaccctcgggctgggcagg

SEQ ID NO: 21964 - DNA, 20 bp, Artificial Sequence
  Description of Artificial Sequence: Synthetic oligonucleotide
  Target: PCSK9; (-) strand; PAM type: YTN; PAM sequence: TTC
tctgaccctcgggctgggca

SEQ ID NO: 21965 - DNA, 20 bp, Artificial Sequence
  Description of Artificial Sequence: Synthetic oligonucleotide
  Target: PCSK9; (-) strand; PAM type: YTN; PAM sequence: CTT
ctctgaccctcgggctgggc

SEQ ID NO: 21966 - DNA, 20 bp, Artificial Sequence
  Description of Artificial Sequence: Synthetic oligonucleotide
  Target: PCSK9; (-) strand; PAM type: YTN; PAM sequence: CTC
caagatgccttctctgaccc

SEQ ID NO: 21967 - DNA, 20 bp, Artificial Sequence
  Description of Artificial Sequence: Synthetic oligonucleotide
  Target: PCSK9; (-) strand; PAM type: YTN; PAM sequence: CTC
ctccaagatgccttctctga

SEQ ID NO: 21968 - DNA, 20 bp, Artificial Sequence
  Description of Artificial Sequence: Synthetic oligonucleotide
  Target: PCSK9; (-) strand; PAM type: YTN; PAM sequence: CTC
ccgatcaaatgtccctcctc

SEQ ID NO: 21969 - DNA, 20 bp, Artificial Sequence
  Description of Artificial Sequence: Synthetic oligonucleotide
  Target: PCSK9; (-) strand; PAM type: YTN; PAM sequence: TTC
atccatcaagctcccgatca

SEQ ID NO: 21970 - DNA, 20 bp, Artificial Sequence
  Description of Artificial Sequence: Synthetic oligonucleotide
  Target: PCSK9; (-) strand; PAM type: YTN; PAM sequence: CTA
ttcatccatcaagctcccga

SEQ ID NO: 21971 - DNA, 20 bp, Artificial Sequence
  Description of Artificial Sequence: Synthetic oligonucleotide
  Target: PCSK9; (-) strand; PAM type: YTN; PAM sequence: CTC
ctattcatccatcaagctcc

SEQ ID NO: 21972 - DNA, 20 bp, Artificial Sequence
  Description of Artificial Sequence: Synthetic oligonucleotide
  Target: PCSK9; (-) strand; PAM type: YTN; PAM sequence: TTA
tcggccaggtgaactcctat

SEQ ID NO: 21973 - DNA, 20 bp, Artificial Sequence
  Description of Artificial Sequence: Synthetic oligonucleotide
  Target: PCSK9; (-) strand; PAM type: YTN; PAM sequence: CTT
atcggccaggtgaactccta

SEQ ID NO: 21974 - DNA, 20 bp, Artificial Sequence
  Description of Artificial Sequence: Synthetic oligonucleotide
  Target: PCSK9; (-) strand; PAM type: YTN; PAM sequence: CTG
tcttatcggccaggtgaact

SEQ ID NO: 21975 - DNA, 20 bp, Artificial Sequence
  Description of Artificial Sequence: Synthetic oligonucleotide
  Target: PCSK9; (-) strand; PAM type: YTN; PAM sequence: TTG
ctgtcttatcggccaggtga

SEQ ID NO: 21976 - DNA, 20 bp, Artificial Sequence
  Description of Artificial Sequence: Synthetic oligonucleotide
  Target: PCSK9; (-) strand; PAM type: YTN; PAM sequence: TTG
gtagttgctgtcttatcggc

SEQ ID NO: 21977 - DNA, 20 bp, Artificial Sequence
  Description of Artificial Sequence: Synthetic oligonucleotide
  Target: PCSK9; (-) strand; PAM type: YTN; PAM sequence: CTT
ggtagttgctgtcttatcgg

SEQ ID NO: 21978 - DNA, 20 bp, Artificial Sequence
  Description of Artificial Sequence: Synthetic oligonucleotide
  Target: PCSK9; (-) strand; PAM type: YTN; PAM sequence: CTA
agccttggtagttgctgtct

SEQ ID NO: 21979 - DNA, 20 bp, Artificial Sequence
  Description of Artificial Sequence: Synthetic oligonucleotide
  Target: PCSK9; (-) strand; PAM type: YTN; PAM sequence: CTC
taagccttggtagttgctgt

SEQ ID NO: 21980 - DNA, 20 bp, Artificial Sequence
  Description of Artificial Sequence: Synthetic oligonucleotide
  Target: PCSK9; (-) strand; PAM type: YTN; PAM sequence: CTC
acacctctaagccttggtag

SEQ ID NO: 21981 - DNA, 20 bp, Artificial Sequence
  Description of Artificial Sequence: Synthetic oligonucleotide
  Target: PCSK9; (-) strand; PAM type: YTN; PAM sequence: CTC
tcacacctctaagccttggt

SEQ ID NO: 21982 - DNA, 20 bp, Artificial Sequence
  Description of Artificial Sequence: Synthetic oligonucleotide
  Target: PCSK9; (-) strand; PAM type: YTN; PAM sequence: CTC
ctctcacacctctaagcctt

SEQ ID NO: 21983 - DNA, 20 bp, Artificial Sequence
  Description of Artificial Sequence: Synthetic oligonucleotide
  Target: PCSK9; (-) strand; PAM type: YTN; PAM sequence: CTC
agtgaggtaagacagcctcc

SEQ ID NO: 21984 - DNA, 20 bp, Artificial Sequence
  Description of Artificial Sequence: Synthetic oligonucleotide
  Target: PCSK9; (-) strand; PAM type: YTN; PAM sequence: TTA
ctcagtgaggtaagacagcc

SEQ ID NO: 21985 - DNA, 20 bp, Artificial Sequence
  Description of Artificial Sequence: Synthetic oligonucleotide
  Target: PCSK9; (-) strand; PAM type: YTN; PAM sequence: CTT
actcagtgaggtaagacagc

SEQ ID NO: 21986 - DNA, 20 bp, Artificial Sequence
  Description of Artificial Sequence: Synthetic oligonucleotide
  Target: PCSK9; (-) strand; PAM type: YTN; PAM sequence: CTG
cagtccttactcagtgaggt

SEQ ID NO: 21987 - DNA, 20 bp, Artificial Sequence
  Description of Artificial Sequence: Synthetic oligonucleotide
  Target: PCSK9; (-) strand; PAM type: YTN; PAM sequence: CTC
gaaggtaagccgcctgcagt

SEQ ID NO: 21988 - DNA, 20 bp, Artificial Sequence
  Description of Artificial Sequence: Synthetic oligonucleotide
  Target: PCSK9; (-) strand; PAM type: YTN; PAM sequence: TTC
tcgaaggtaagccgcctgca

SEQ ID NO: 21989 - DNA, 20 bp, Artificial Sequence
  Description of Artificial Sequence: Synthetic oligonucleotide
  Target: PCSK9; (-) strand; PAM type: YTN; PAM sequence: CTT
ctcgaaggtaagccgcctgc

SEQ ID NO: 21990 - DNA, 20 bp, Artificial Sequence
  Description of Artificial Sequence: Synthetic oligonucleotide
  Target: PCSK9; (-) strand; PAM type: YTN; PAM sequence: CTC
ttctcgaaggtaagccgcct

SEQ ID NO: 21991 - DNA, 20 bp, Artificial Sequence
  Description of Artificial Sequence: Synthetic oligonucleotide
  Target: PCSK9; (-) strand; PAM type: YTN; PAM sequence: CTC
tcttctcgaaggtaagccgc

SEQ ID NO: 21992 - DNA, 20 bp, Artificial Sequence
  Description of Artificial Sequence: Synthetic oligonucleotide
  Target: PCSK9; (-) strand; PAM type: YTN; PAM sequence: CTA
agctctcttctcgaaggtaa

SEQ ID NO: 21993 - DNA, 20 bp, Artificial Sequence
  Description of Artificial Sequence: Synthetic oligonucleotide
  Target: PCSK9; (-) strand; PAM type: YTN; PAM sequence: CTG
ccagtgcacacacgcacaca

SEQ ID NO: 21994 - DNA, 20 bp, Artificial Sequence
  Description of Artificial Sequence: Synthetic oligonucleotide
  Target: PCSK9; (-) strand; PAM type: YTN; PAM sequence: CTC
ctgccagtgcacacacgcac

SEQ ID NO: 21995 - DNA, 20 bp, Artificial Sequence
  Description of Artificial Sequence: Synthetic oligonucleotide
  Target: PCSK9; (-) strand; PAM type: YTN; PAM sequence: CTG
ccccagcaggggactcctgc

SEQ ID NO: 21996 - DNA, 20 bp, Artificial Sequence
  Description of Artificial Sequence: Synthetic oligonucleotide
  Target: PCSK9; (-) strand; PAM type: YTN; PAM sequence: CTC
ctgccccagcaggggactcc

SEQ ID NO: 21997 - DNA, 20 bp, Artificial Sequence
  Description of Artificial Sequence: Synthetic oligonucleotide
  Target: PCSK9; (-) strand; PAM type: YTN; PAM sequence: CTG
gtgcaggggtgaatggtgaa

SEQ ID NO: 21998 - DNA, 20 bp, Artificial Sequence
  Description of Artificial Sequence: Synthetic oligonucleotide
  Target: PCSK9; (-) strand; PAM type: YTN; PAM sequence: CTG
caatgcctggtgcaggggtg

SEQ ID NO: 21999 - DNA, 20 bp, Artificial Sequence
  Description of Artificial Sequence: Synthetic oligonucleotide
  Target: PCSK9; (-) strand; PAM type: YTN; PAM sequence: CTC
ggcagacagcatcatggctg

SEQ ID NO: 22000 - DNA, 20 bp, Artificial Sequence
  Description of Artificial Sequence: Synthetic oligonucleotide
  Target: PCSK9; (-) strand; PAM type: YTN; PAM sequence: CTC
cggctcggcagacagcatca

SEQ ID NO: 22001 - DNA, 20 bp, Artificial Sequence
  Description of Artificial Sequence: Synthetic oligonucleotide
  Target: PCSK9; (-) strand; PAM type: YTN; PAM sequence: CTC
ggccagggtgagctccggct

SEQ ID NO: 22002 - DNA, 20 bp, Artificial Sequence
  Description of Artificial Sequence: Synthetic oligonucleotide
  Target: PCSK9; (-) strand; PAM type: YTN; PAM sequence: CTC
aactcggccagggtgagctc

SEQ ID NO: 22003 - DNA, 20 bp, Artificial Sequence
  Description of Artificial Sequence: Synthetic oligonucleotide
  Target: PCSK9; (-) strand; PAM type: YTN; PAM sequence: CTG
cctcaactcggccagggtga

SEQ ID NO: 22004 - DNA, 20 bp, Artificial Sequence
  Description of Artificial Sequence: Synthetic oligonucleotide
  Target: PCSK9; (-) strand; PAM type: YTN; PAM sequence: CTC
tgcctcaactcggccagggt

SEQ ID NO: 22005 - DNA, 20 bp, Artificial Sequence
  Description of Artificial Sequence: Synthetic oligonucleotide
  Target: PCSK9; (-) strand; PAM type: YTN; PAM sequence: TTG
gcagagaagtggatcagtct

SEQ ID NO: 22006 - DNA, 20 bp, Artificial Sequence
  Description of Artificial Sequence: Synthetic oligonucleotide
  Target: PCSK9; (-) strand; PAM type: YTN; PAM sequence: TTT
ggcagagaagtggatcagtc

SEQ ID NO: 22007 - DNA, 20 bp, Artificial Sequence
  Description of Artificial Sequence: Synthetic oligonucleotide
  Target: PCSK9; (-) strand; PAM type: YTN; PAM sequence: CTT
tggcagagaagtggatcagt

SEQ ID NO: 22008 - DNA, 20 bp, Artificial Sequence
  Description of Artificial Sequence: Synthetic oligonucleotide
  Target: PCSK9; (-) strand; PAM type: YTN; PAM sequence: TTG
atgacatctttggcagagaa

SEQ ID NO: 22009 - DNA, 20 bp, Artificial Sequence
  Description of Artificial Sequence: Synthetic oligonucleotide
  Target: PCSK9; (-) strand; PAM type: YTN; PAM sequence: CTC
attgatgacatctttggcag

SEQ ID NO: 22010 - DNA, 20 bp, Artificial Sequence
  Description of Artificial Sequence: Synthetic oligonucleotide
  Target: PCSK9; (-) strand; PAM type: YTN; PAM sequence: CTC
agggaaccaggcctcattga

SEQ ID NO: 22011 - DNA, 20 bp, Artificial Sequence
  Description of Artificial Sequence: Synthetic oligonucleotide
  Target: PCSK9; (-) strand; PAM type: YTN; PAM sequence: CTG
gtcctcagggaaccaggcct

SEQ ID NO: 22012 - DNA, 20 bp, Artificial Sequence
  Description of Artificial Sequence: Synthetic oligonucleotide
  Target: PCSK9; (-) strand; PAM type: YTN; PAM sequence: TTG
ggggtcagtacccgctggtc

SEQ ID NO: 22013 - DNA, 20 bp, Artificial Sequence
  Description of Artificial Sequence: Synthetic oligonucleotide
  Target: PCSK9; (-) strand; PAM type: YTN; PAM sequence: CTG
gggggcagggcggccaccag

SEQ ID NO: 22014 - DNA, 20 bp, Artificial Sequence
  Description of Artificial Sequence: Synthetic oligonucleotide
  Target: PCSK9; (-) strand; PAM type: YTN; PAM sequence: CTG
ccccatgggtgctggggggc

SEQ ID NO: 22015 - DNA, 20 bp, Artificial Sequence
  Description of Artificial Sequence: Synthetic oligonucleotide
  Target: PCSK9; (-) strand; PAM type: YTN; PAM sequence: TTA
cctgccccatgggtgctggg

SEQ ID NO: 22016 - DNA, 20 bp, Artificial Sequence
  Description of Artificial Sequence: Synthetic oligonucleotide
  Target: PCSK9; (-) strand; PAM type: YTN; PAM sequence: CTT
acctgccccatgggtgctgg

SEQ ID NO: 22017 - DNA, 20 bp, Artificial Sequence
  Description of Artificial Sequence: Synthetic oligonucleotide
  Target: PCSK9; (-) strand; PAM type: YTN; PAM sequence: CTG
cttacctgccccatgggtgc

SEQ ID NO: 22018 - DNA, 20 bp, Artificial Sequence
  Description of Artificial Sequence: Synthetic oligonucleotide
  Target: PCSK9; (-) strand; PAM type: YTN; PAM sequence: CTG
ccatcctgcttacctgcccc

SEQ ID NO: 22019 - DNA, 20 bp, Artificial Sequence
  Description of Artificial Sequence: Synthetic oligonucleotide
  Target: PCSK9; (-) strand; PAM type: YTN; PAM sequence: TTG
cccaccctgccatcctgctt

SEQ ID NO: 22020 - DNA, 20 bp, Artificial Sequence
  Description of Artificial Sequence: Synthetic oligonucleotide
  Target: PCSK9; (-) strand; PAM type: YTN; PAM sequence: CTT
gcccaccctgccatcctgct

SEQ ID NO: 22021 - DNA, 20 bp, Artificial Sequence
  Description of Artificial Sequence: Synthetic oligonucleotide
  Target: PCSK9; (-) strand; PAM type: YTN; PAM sequence: CTG
gacttgcccaccctgccatc

SEQ ID NO: 22022 - DNA, 20 bp, Artificial Sequence
  Description of Artificial Sequence: Synthetic oligonucleotide
  Target: PCSK9; (-) strand; PAM type: YTN; PAM sequence: CTC
ccaagccccagcctggactt

SEQ ID NO: 22023 - DNA, 20 bp, Artificial Sequence
  Description of Artificial Sequence: Synthetic oligonucleotide
  Target: PCSK9; (-) strand; PAM type: YTN; PAM sequence: CTG
tcaaggtcacacagacctcc

SEQ ID NO: 22024 - DNA, 20 bp, Artificial Sequence
  Description of Artificial Sequence: Synthetic oligonucleotide
  Target: PCSK9; (-) strand; PAM type: YTN; PAM sequence: TTA
cacagacaagggagaaggga

SEQ ID NO: 22025 - DNA, 20 bp, Artificial Sequence
  Description of Artificial Sequence: Synthetic oligonucleotide
  Target: PCSK9; (-) strand; PAM type: YTN; PAM sequence: CTT
acacagacaagggagaaggg

SEQ ID NO: 22026 - DNA, 20 bp, Artificial Sequence
  Description of Artificial Sequence: Synthetic oligonucleotide
  Target: PCSK9; (-) strand; PAM type: YTN; PAM sequence: CTC
cttacacagacaagggagaa

SEQ ID NO: 22027 - DNA, 20 bp, Artificial Sequence
  Description of Artificial Sequence: Synthetic oligonucleotide
  Target: PCSK9; (-) strand; PAM type: YTN; PAM sequence: TTA
aggtggcgtcatcctcctta

SEQ ID NO: 22028 - DNA, 20 bp, Artificial Sequence
  Description of Artificial Sequence: Synthetic oligonucleotide
  Target: PCSK9; (-) strand; PAM type: YTN; PAM sequence: TTT
aaggtggcgtcatcctcctt

SEQ ID NO: 22029 - DNA, 20 bp, Artificial Sequence
  Description of Artificial Sequence: Synthetic oligonucleotide
  Target: PCSK9; (-) strand; PAM type: YTN; PAM sequence: CTA
tttaaggtggcgtcatcctc

SEQ ID NO: 22030 - DNA, 20 bp, Artificial Sequence
  Description of Artificial Sequence: Synthetic oligonucleotide
  Target: PCSK9; (-) strand; PAM type: YTN; PAM sequence: TTA
atcctatttaaggtggcgtc

SEQ ID NO: 22031 - DNA, 20 bp, Artificial Sequence
  Description of Artificial Sequence: Synthetic oligonucleotide
  Target: PCSK9; (-) strand; PAM type: YTN; PAM sequence: TTT
aatcctatttaaggtggcgt

SEQ ID NO: 22032 - DNA, 20 bp, Artificial Sequence
  Description of Artificial Sequence: Synthetic oligonucleotide
  Target: PCSK9; (-) strand; PAM type: YTN; PAM sequence: CTC
atttaatcctatttaaggtg

SEQ ID NO: 22033 - DNA, 20 bp, Artificial Sequence
  Description of Artificial Sequence: Synthetic oligonucleotide
  Target: PCSK9; (-) strand; PAM type: YTN; PAM sequence: TTC
tcatttaatcctatttaagg

SEQ ID NO: 22034 - DNA, 20 bp, Artificial Sequence
  Description of Artificial Sequence: Synthetic oligonucleotide
  Target: PCSK9; (-) strand; PAM type: YTN; PAM sequence: TTC
agagccccattctcatttaa

SEQ ID NO: 22035 - DNA, 20 bp, Artificial Sequence
  Description of Artificial Sequence: Synthetic oligonucleotide
  Target: PCSK9; (-) strand; PAM type: YTN; PAM sequence: TTT
cagagccccattctcattta

SEQ ID NO: 22036 - DNA, 20 bp, Artificial Sequence
  Description of Artificial Sequence: Synthetic oligonucleotide
  Target: PCSK9; (-) strand; PAM type: YTN; PAM sequence: CTT
tcagagccccattctcattt

SEQ ID NO: 22037 - DNA, 20 bp, Artificial Sequence
  Description of Artificial Sequence: Synthetic oligonucleotide
  Target: PCSK9; (-) strand; PAM type: YTN; PAM sequence: TTG
cacagccctttcagagcccc

SEQ ID NO: 22038 - DNA, 20 bp, Artificial Sequence
  Description of Artificial Sequence: Synthetic oligonucleotide
  Target: PCSK9; (-) strand; PAM type: YTN; PAM sequence: TTA
tgaaaatattgcacagccct

SEQ ID NO: 22039 - DNA, 20 bp, Artificial Sequence
  Description of Artificial Sequence: Synthetic oligonucleotide
  Target: PCSK9; (-) strand; PAM type: YTN; PAM sequence: CTA
taaaaacacgttatgaaaat

SEQ ID NO: 22040 - DNA, 20 bp, Artificial Sequence
  Description of Artificial Sequence: Synthetic oligonucleotide
  Target: PCSK9; (-) strand; PAM type: YTN; PAM sequence: CTC
tataaaaacacgttatgaaa

SEQ ID NO: 22041 - DNA, 20 bp, Artificial Sequence
  Description of Artificial Sequence: Synthetic oligonucleotide
  Target: PCSK9; (-) strand; PAM type: YTN; PAM sequence: CTG
tctctataaaaacacgttat

SEQ ID NO: 22042 - DNA, 20 bp, Artificial Sequence
  Description of Artificial Sequence: Synthetic oligonucleotide
  Target: PCSK9; (-) strand; PAM type: YTN; PAM sequence: CTC
aactgtctctataaaaacac

SEQ ID NO: 22043 - DNA, 20 bp, Artificial Sequence
  Description of Artificial Sequence: Synthetic oligonucleotide
  Target: PCSK9; (-) strand; PAM type: YTN; PAM sequence: TTA
aagaacatactcaactgtct

SEQ ID NO: 22044 - DNA, 20 bp, Artificial Sequence
  Description of Artificial Sequence: Synthetic oligonucleotide
  Target: PCSK9; (-) strand; PAM type: YTN; PAM sequence: CTT
aaagaacatactcaactgtc

SEQ ID NO: 22045 - DNA, 20 bp, Artificial Sequence
  Description of Artificial Sequence: Synthetic oligonucleotide
  Target: PCSK9; (-) strand; PAM type: YTN; PAM sequence: TTC
atggtaggagagaggagggc

SEQ ID NO: 22046 - DNA, 20 bp, Artificial Sequence
  Description of Artificial Sequence: Synthetic oligonucleotide
  Target: PCSK9; (-) strand; PAM type: YTN; PAM sequence: TTA
gttcatggtaggagagagga

SEQ ID NO: 22047 - DNA, 20 bp, Artificial Sequence
  Description of Artificial Sequence: Synthetic oligonucleotide
  Target: PCSK9; (-) strand; PAM type: YTN; PAM sequence: TTT
agttcatggtaggagagagg

SEQ ID NO: 22048 - DNA, 20 bp, Artificial Sequence
  Description of Artificial Sequence: Synthetic oligonucleotide
  Target: PCSK9; (-) strand; PAM type: YTN; PAM sequence: CTT
tagttcatggtaggagagag

SEQ ID NO: 22049 - DNA, 20 bp, Artificial Sequence
  Description of Artificial Sequence: Synthetic oligonucleotide
  Target: PCSK9; (-) strand; PAM type: YTN; PAM sequence: CTC
cacagaaatctttagttcat

SEQ ID NO: 22050 - DNA, 20 bp, Artificial Sequence
  Description of Artificial Sequence: Synthetic oligonucleotide
  Target: PCSK9; (-) strand; PAM type: YTN; PAM sequence: CTG
ggagtgaggggacctccaca

SEQ ID NO: 22051 - DNA, 20 bp, Artificial Sequence
  Description of Artificial Sequence: Synthetic oligonucleotide
  Target: PCSK9; (-) strand; PAM type: YTN; PAM sequence: CTG
ggatgaggagggggtgctgg

SEQ ID NO: 22052 - DNA, 20 bp, Artificial Sequence
  Description of Artificial Sequence: Synthetic oligonucleotide
  Target: PCSK9; (-) strand; PAM type: YTN; PAM sequence: CTG
caaaaagggcctgggatgag

SEQ ID NO: 22053 - DNA, 20 bp, Artificial Sequence
  Description of Artificial Sequence: Synthetic oligonucleotide
  Target: PCSK9; (-) strand; PAM type: YTN; PAM sequence: CTG
ccaacctgcaaaaagggcct

SEQ ID NO: 22054 - DNA, 20 bp, Artificial Sequence
  Description of Artificial Sequence: Synthetic oligonucleotide
  Target: PCSK9; (-) strand; PAM type: YTN; PAM sequence: CTG
caaaacagctgccaacctgc

SEQ ID NO: 22055 - DNA, 20 bp, Artificial Sequence
  Description of Artificial Sequence: Synthetic oligonucleotide
  Target: PCSK9; (-) strand; PAM type: YTN; PAM sequence: CTG
accatacagtcctgcaaaac

SEQ ID NO: 22056 - DNA, 20 bp, Artificial Sequence
  Description of Artificial Sequence: Synthetic oligonucleotide
  Target: PCSK9; (-) strand; PAM type: YTN; PAM sequence: CTG
tggccatccgtgtaggcccc

SEQ ID NO: 22057 - DNA, 20 bp, Artificial Sequence
  Description of Artificial Sequence: Synthetic oligonucleotide
  Target: PCSK9; (-) strand; PAM type: YTN; PAM sequence: CTG
gggcgcagcgggcgacggct

SEQ ID NO: 22058 - DNA, 20 bp, Artificial Sequence
  Description of Artificial Sequence: Synthetic oligonucleotide
  Target: PCSK9; (-) strand; PAM type: YTN; PAM sequence: CTC
atctggggcgcagcgggcga

SEQ ID NO: 22059 - DNA, 20 bp, Artificial Sequence
  Description of Artificial Sequence: Synthetic oligonucleotide
  Target: PCSK9; (-) strand; PAM type: YTN; PAM sequence: CTC
ctcatctggggcgcagcggg

SEQ ID NO: 22060 - DNA, 20 bp, Artificial Sequence
  Description of Artificial Sequence: Synthetic oligonucleotide
  Target: PCSK9; (-) strand; PAM type: YTN; PAM sequence: CTC
agcagctcctcatctggggc

SEQ ID NO: 22061 - DNA, 20 bp, Artificial Sequence
  Description of Artificial Sequence: Synthetic oligonucleotide
  Target: PCSK9; (-) strand; PAM type: YTN; PAM sequence: CTG
gagcagctcagcagctcctc

SEQ ID NO: 22062 - DNA, 20 bp, Artificial Sequence
  Description of Artificial Sequence: Synthetic oligonucleotide
  Target: PCSK9; (-) strand; PAM type: YTN; PAM sequence: CTG
gagaaactggagcagctcag

SEQ ID NO: 22063 - DNA, 20 bp, Artificial Sequence
  Description of Artificial Sequence: Synthetic oligonucleotide
  Target: PCSK9; (-) strand; PAM type: YTN; PAM sequence: CTC
ctggagaaactggagcagct

SEQ ID NO: 22064 - DNA, 20 bp, Artificial Sequence
  Description of Artificial Sequence: Synthetic oligonucleotide
  Target: PCSK9; (-) strand; PAM type: YTN; PAM sequence: TTC
ccactcctggagaaactgga

SEQ ID NO: 22065 - DNA, 20 bp, Artificial Sequence
  Description of Artificial Sequence: Synthetic oligonucleotide
  Target: PCSK9; (-) strand; PAM type: YTN; PAM sequence: CTT
cccactcctggagaaactgg

SEQ ID NO: 22066 - DNA, 20 bp, Artificial Sequence
  Description of Artificial Sequence: Synthetic oligonucleotide
  Target: PCSK9; (-) strand; PAM type: YTN; PAM sequence: CTC
gccccgccgcttcccactcc

SEQ ID NO: 22067 - DNA, 20 bp, Artificial Sequence
  Description of Artificial Sequence: Synthetic oligonucleotide
  Target: PCSK9; (-) strand; PAM type: YTN; PAM sequence: CTC
catgcgctcgccccgccgct

SEQ ID NO: 22068 - DNA, 20 bp, Artificial Sequence
  Description of Artificial Sequence: Synthetic oligonucleotide
  Target: PCSK9; (-) strand; PAM type: YTN; PAM sequence: CTG
acacacacacacacacacac

SEQ ID NO: 22069 - DNA, 20 bp, Artificial Sequence
  Description of Artificial Sequence: Synthetic oligonucleotide
  Target: PCSK9; (-) strand; PAM type: YTN; PAM sequence: CTG
agggcccagcactgacacac

SEQ ID NO: 22070 - DNA, 20 bp, Artificial Sequence
  Description of Artificial Sequence: Synthetic oligonucleotide
  Target: PCSK9; (-) strand; PAM type: YTN; PAM sequence: CTG
ggggtccctgagggcccagc

SEQ ID NO: 22071 - DNA, 20 bp, Artificial Sequence
  Description of Artificial Sequence: Synthetic oligonucleotide
  Target: PCSK9; (-) strand; PAM type: YTN; PAM sequence: TTG
ctgggggtccctgagggccc

SEQ ID NO: 22072 - DNA, 20 bp, Artificial Sequence
  Description of Artificial Sequence: Synthetic oligonucleotide
  Target: PCSK9; (-) strand; PAM type: YTN; PAM sequence: CTT
gctgggggtccctgagggcc

SEQ ID NO: 22073 - DNA, 20 bp, Artificial Sequence
  Description of Artificial Sequence: Synthetic oligonucleotide
  Target: PCSK9; (-) strand; PAM type: YTN; PAM sequence: CTG
gaggatggaggggcttgctg

SEQ ID NO: 22074 - DNA, 20 bp, Artificial Sequence
  Description of Artificial Sequence: Synthetic oligonucleotide
  Target: PCSK9; (-) strand; PAM type: YTN; PAM sequence: CTG
gagtctggaggatggagggg

SEQ ID NO: 22075 - DNA, 20 bp, Artificial Sequence
  Description of Artificial Sequence: Synthetic oligonucleotide
  Target: PCSK9; (-) strand; PAM type: YTN; PAM sequence: TTA
cagaagagctggagtctgga

SEQ ID NO: 22076 - DNA, 20 bp, Artificial Sequence
  Description of Artificial Sequence: Synthetic oligonucleotide
  Target: PCSK9; (-) strand; PAM type: YTN; PAM sequence: CTT
acagaagagctggagtctgg

SEQ ID NO: 22077 - DNA, 20 bp, Artificial Sequence
  Description of Artificial Sequence: Synthetic oligonucleotide
  Target: PCSK9; (-) strand; PAM type: YTN; PAM sequence: CTG
taagcttacagaagagctgg

SEQ ID NO: 22078 - DNA, 20 bp, Artificial Sequence
  Description of Artificial Sequence: Synthetic oligonucleotide
  Target: PCSK9; (-) strand; PAM type: YTN; PAM sequence: CTG
gccagccctgtaagcttaca

SEQ ID NO: 22079 - DNA, 20 bp, Artificial Sequence
  Description of Artificial Sequence: Synthetic oligonucleotide
  Target: PCSK9; (-) strand; PAM type: YTN; PAM sequence: CTG
gtctggccagccctgtaagc

SEQ ID NO: 22080 - DNA, 20 bp, Artificial Sequence
  Description of Artificial Sequence: Synthetic oligonucleotide
  Target: PCSK9; (-) strand; PAM type: YTN; PAM sequence: CTC
ctggtctggccagccctgta

SEQ ID NO: 22081 - DNA, 20 bp, Artificial Sequence
  Description of Artificial Sequence: Synthetic oligonucleotide
  Target: PCSK9; (-) strand; PAM type: YTN; PAM sequence: CTC
cagcagcccccagccgcgtg

SEQ ID NO: 22082 - DNA, 20 bp, Artificial Sequence
  Description of Artificial Sequence: Synthetic oligonucleotide
  Target: PCSK9; (-) strand; PAM type: YTN; PAM sequence: CTC
tccagcagcccccagccgcg

SEQ ID NO: 22083 - DNA, 20 bp, Artificial Sequence
  Description of Artificial Sequence: Synthetic oligonucleotide
  Target: PCSK9; (-) strand; PAM type: YTN; PAM sequence: CTC
tctccagcagcccccagccg

SEQ ID NO: 22084 - DNA, 20 bp, Artificial Sequence
  Description of Artificial Sequence: Synthetic oligonucleotide
  Target: PCSK9; (-) strand; PAM type: YTN; PAM sequence: CTG
tggctctctccagcagcccc

SEQ ID NO: 22085 - DNA, 20 bp, Artificial Sequence
  Description of Artificial Sequence: Synthetic oligonucleotide
  Target: PCSK9; (-) strand; PAM type: YTN; PAM sequence: TTC
ccgctgtggctctctccagc

SEQ ID NO: 22086 - DNA, 20 bp, Artificial Sequence
  Description of Artificial Sequence: Synthetic oligonucleotide
  Target: PCSK9; (-) strand; PAM type: YTN; PAM sequence: CTT
cccgctgtggctctctccag

SEQ ID NO: 22087 - DNA, 20 bp, Artificial Sequence
  Description of Artificial Sequence: Synthetic oligonucleotide
  Target: PCSK9; (-) strand; PAM type: YTN; PAM sequence: CTA
ggaaacccttcccgctgtgg

SEQ ID NO: 22088 - DNA, 20 bp, Artificial Sequence
  Description of Artificial Sequence: Synthetic oligonucleotide
  Target: PCSK9; (-) strand; PAM type: YTN; PAM sequence: CTC
taggaaacccttcccgctgt

SEQ ID NO: 22089 - DNA, 20 bp, Artificial Sequence
  Description of Artificial Sequence: Synthetic oligonucleotide
  Target: PCSK9; (-) strand; PAM type: YTN; PAM sequence: CTG
cagcctctaggaaacccttc

SEQ ID NO: 22090 - DNA, 20 bp, Artificial Sequence
  Description of Artificial Sequence: Synthetic oligonucleotide
  Target: PCSK9; (-) strand; PAM type: YTN; PAM sequence: CTG
tcctgcagcctctaggaaac

SEQ ID NO: 22091 - DNA, 20 bp, Artificial Sequence
  Description of Artificial Sequence: Synthetic oligonucleotide
  Target: PCSK9; (-) strand; PAM type: YTN; PAM sequence: TTG
aaaatccatccagcactgtc

SEQ ID NO: 22092 - DNA, 20 bp, Artificial Sequence
  Description of Artificial Sequence: Synthetic oligonucleotide
  Target: PCSK9; (-) strand; PAM type: YTN; PAM sequence: CTC
acacccaggtgagcattgaa

SEQ ID NO: 22093 - DNA, 20 bp, Artificial Sequence
  Description of Artificial Sequence: Synthetic oligonucleotide
  Target: PCSK9; (-) strand; PAM type: YTN; PAM sequence: CTG
ccgcacgctcacacccaggt

SEQ ID NO: 22094 - DNA, 20 bp, Artificial Sequence
  Description of Artificial Sequence: Synthetic oligonucleotide
  Target: PCSK9; (-) strand; PAM type: YTN; PAM sequence: CTC
acgcggccctgccgcacgct

SEQ ID NO: 22095 - DNA, 20 bp, Artificial Sequence
  Description of Artificial Sequence: Synthetic oligonucleotide
  Target: PCSK9; (-) strand; PAM type: YTN; PAM sequence: CTG
accctcacgcggccctgccg

SEQ ID NO: 22096 - DNA, 20 bp, Artificial Sequence
  Description of Artificial Sequence: Synthetic oligonucleotide
  Target: PCSK9; (-) strand; PAM type: YTN; PAM sequence: CTG
agtccagagtagcagatcgc

SEQ ID NO: 22097 - DNA, 20 bp, Artificial Sequence
  Description of Artificial Sequence: Synthetic oligonucleotide
  Target: PCSK9; (-) strand; PAM type: YTN; PAM sequence: CTA
gagatggctgagtccagagt

SEQ ID NO: 22098 - DNA, 20 bp, Artificial Sequence
  Description of Artificial Sequence: Synthetic oligonucleotide
  Target: PCSK9; (-) strand; PAM type: YTN; PAM sequence: CTG
agtgagaggggcctagagat

SEQ ID NO: 22099 - DNA, 20 bp, Artificial Sequence
  Description of Artificial Sequence: Synthetic oligonucleotide
  Target: PCSK9; (-) strand; PAM type: YTN; PAM sequence: CTC
ccagaaccatggagcacctg

SEQ ID NO: 22100 - DNA, 20 bp, Artificial Sequence
  Description of Artificial Sequence: Synthetic oligonucleotide
  Target: PCSK9; (-) strand; PAM type: YTN; PAM sequence: CTC
agctcccagaaccatggagc

SEQ ID NO: 22101 - DNA, 20 bp, Artificial Sequence
  Description of Artificial Sequence: Synthetic oligonucleotide
  Target: PCSK9; (-) strand; PAM type: YTN; PAM sequence: TTC
tcagctcccagaaccatgga

SEQ ID NO: 22102 - DNA, 20 bp, Artificial Sequence
  Description of Artificial Sequence: Synthetic oligonucleotide
  Target: PCSK9; (-) strand; PAM type: YTN; PAM sequence: TTT
ctcagctcccagaaccatgg

SEQ ID NO: 22103 - DNA, 20 bp, Artificial Sequence
  Description of Artificial Sequence: Synthetic oligonucleotide
  Target: PCSK9; (-) strand; PAM type: YTN; PAM sequence: TTG
agatttctcagctcccagaa

SEQ ID NO: 22104 - DNA, 20 bp, Artificial Sequence
  Description of Artificial Sequence: Synthetic oligonucleotide
  Target: PCSK9; (-) strand; PAM type: YTN; PAM sequence: TTT
gagatttctcagctcccaga

SEQ ID NO: 22105 - DNA, 20 bp, Artificial Sequence
  Description of Artificial Sequence: Synthetic oligonucleotide
  Target: PCSK9; (-) strand; PAM type: YTN; PAM sequence: CTG
gtttgagatttctcagctcc

SEQ ID NO: 22106 - DNA, 20 bp, Artificial Sequence
  Description of Artificial Sequence: Synthetic oligonucleotide
  Target: PCSK9; (-) strand; PAM type: YTN; PAM sequence: TTG
ctggtttgagatttctcagc

SEQ ID NO: 22107 - DNA, 20 bp, Artificial Sequence
  Description of Artificial Sequence: Synthetic oligonucleotide
  Target: PCSK9; (-) strand; PAM type: YTN; PAM sequence: TTT
gctggtttgagatttctcag

SEQ ID NO: 22108 - DNA, 20 bp, Artificial Sequence
  Description of Artificial Sequence: Synthetic oligonucleotide
  Target: PCSK9; (-) strand; PAM type: YTN; PAM sequence: TTT
tgctggtttgagatttctca

SEQ ID NO: 22109 - DNA, 20 bp, Artificial Sequence
  Description of Artificial Sequence: Synthetic oligonucleotide
  Target: PCSK9; (-) strand; PAM type: YTN; PAM sequence: TTT
ttgctggtttgagatttctc

SEQ ID NO: 22110 - DNA, 20 bp, Artificial Sequence
  Description of Artificial Sequence: Synthetic oligonucleotide
  Target: PCSK9; (-) strand; PAM type: YTN; PAM sequence: TTT
tttgctggtttgagatttct

SEQ ID NO: 22111 - DNA, 20 bp, Artificial Sequence
  Description of Artificial Sequence: Synthetic oligonucleotide
  Target: PCSK9; (-) strand; PAM type: YTN; PAM sequence: CTT
ttttgctggtttgagatttc

SEQ ID NO: 22112 - DNA, 20 bp, Artificial Sequence
  Description of Artificial Sequence: Synthetic oligonucleotide
  Target: PCSK9; (-) strand; PAM type: YTN; PAM sequence: TTC
cacttttttgctggtttgag

SEQ ID NO: 22113 - DNA, 20 bp, Artificial Sequence
  Description of Artificial Sequence: Synthetic oligonucleotide
  Target: PCSK9; (-) strand; PAM type: YTN; PAM sequence: CTG
tagcatcaacatcaattcca

SEQ ID NO: 22114 - DNA, 20 bp, Artificial Sequence
  Description of Artificial Sequence: Synthetic oligonucleotide
  Target: PCSK9; (-) strand; PAM type: YTN; PAM sequence: CTA
tcctgtagcatcaacatcaa

SEQ ID NO: 22115 - DNA, 20 bp, Artificial Sequence
  Description of Artificial Sequence: Synthetic oligonucleotide
  Target: PCSK9; (-) strand; PAM type: YTN; PAM sequence: CTG
tgcactatcctgtagcatca

SEQ ID NO: 22116 - DNA, 20 bp, Artificial Sequence
  Description of Artificial Sequence: Synthetic oligonucleotide
  Target: PCSK9; (-) strand; PAM type: YTN; PAM sequence: CTG
caaccagatggcatctgtgc

SEQ ID NO: 22117 - DNA, 20 bp, Artificial Sequence
  Description of Artificial Sequence: Synthetic oligonucleotide
  Target: PCSK9; (-) strand; PAM type: YTN; PAM sequence: TTC
caccaaaatgctgcaaccag

SEQ ID NO: 22118 - DNA, 20 bp, Artificial Sequence
  Description of Artificial Sequence: Synthetic oligonucleotide
  Target: PCSK9; (-) strand; PAM type: YTN; PAM sequence: CTT
ccaccaaaatgctgcaacca

SEQ ID NO: 22119 - DNA, 20 bp, Artificial Sequence
  Description of Artificial Sequence: Synthetic oligonucleotide
  Target: PCSK9; (-) strand; PAM type: YTN; PAM sequence: CTG
cccttccaccaaaatgctgc

SEQ ID NO: 22120 - DNA, 20 bp, Artificial Sequence
  Description of Artificial Sequence: Synthetic oligonucleotide
  Target: PCSK9; (-) strand; PAM type: YTN; PAM sequence: CTG
ggcactgcccttccaccaaa

SEQ ID NO: 22121 - DNA, 20 bp, Artificial Sequence
  Description of Artificial Sequence: Synthetic oligonucleotide
  Target: PCSK9; (-) strand; PAM type: YTN; PAM sequence: CTA
gctgggcactgcccttccac

SEQ ID NO: 22122 - DNA, 20 bp, Artificial Sequence
  Description of Artificial Sequence: Synthetic oligonucleotide
  Target: PCSK9; (-) strand; PAM type: YTN; PAM sequence: CTC
ctagctgggcactgcccttc

SEQ ID NO: 22123 - DNA, 20 bp, Artificial Sequence
  Description of Artificial Sequence: Synthetic oligonucleotide
  Target: PCSK9; (-) strand; PAM type: YTN; PAM sequence: CTC
tcctagctgggcactgccct

SEQ ID NO: 22124 - DNA, 20 bp, Artificial Sequence
  Description of Artificial Sequence: Synthetic oligonucleotide
  Target: PCSK9; (-) strand; PAM type: YTN; PAM sequence: CTC
actctcctagctgggcactg

SEQ ID NO: 22125 - DNA, 20 bp, Artificial Sequence
  Description of Artificial Sequence: Synthetic oligonucleotide
  Target: PCSK9; (-) strand; PAM type: YTN; PAM sequence: CTC
ctcactctcctagctgggca

SEQ ID NO: 22126 - DNA, 20 bp, Artificial Sequence
  Description of Artificial Sequence: Synthetic oligonucleotide
  Target: PCSK9; (-) strand; PAM type: YTN; PAM sequence: CTG
cccctcctcactctcctagc

SEQ ID NO: 22127 - DNA, 20 bp, Artificial Sequence
  Description of Artificial Sequence: Synthetic oligonucleotide
  Target: PCSK9; (-) strand; PAM type: YTN; PAM sequence: CTC
aagccagaaatgcctgcccc

SEQ ID NO: 22128 - DNA, 20 bp, Artificial Sequence
  Description of Artificial Sequence: Synthetic oligonucleotide
  Target: PCSK9; (-) strand; PAM type: YTN; PAM sequence: CTC
ctcaagccagaaatgcctgc

SEQ ID NO: 22129 - DNA, 20 bp, Artificial Sequence
  Description of Artificial Sequence: Synthetic oligonucleotide
  Target: PCSK9; (-) strand; PAM type: YTN; PAM sequence: TTA
agaccccatctcctcaagcc

SEQ ID NO: 22130 - DNA, 20 bp, Artificial Sequence
  Description of Artificial Sequence: Synthetic oligonucleotide
  Target: PCSK9; (-) strand; PAM type: YTN; PAM sequence: CTC
acacgagcattaagacccca

SEQ ID NO: 22131 - DNA, 20 bp, Artificial Sequence
  Description of Artificial Sequence: Synthetic oligonucleotide
  Target: PCSK9; (-) strand; PAM type: YTN; PAM sequence: CTC
tcacacgagcattaagaccc

SEQ ID NO: 22132 - DNA, 20 bp, Artificial Sequence
  Description of Artificial Sequence: Synthetic oligonucleotide
  Target: PCSK9; (-) strand; PAM type: YTN; PAM sequence: CTG
cctctcacacgagcattaag

SEQ ID NO: 22133 - DNA, 20 bp, Artificial Sequence
  Description of Artificial Sequence: Synthetic oligonucleotide
  Target: PCSK9; (-) strand; PAM type: YTN; PAM sequence: CTC
tgcctctcacacgagcatta

SEQ ID NO: 22134 - DNA, 20 bp, Artificial Sequence
  Description of Artificial Sequence: Synthetic oligonucleotide
  Target: PCSK9; (-) strand; PAM type: YTN; PAM sequence: CTC
cacccactctgcctctcaca

SEQ ID NO: 22135 - DNA, 20 bp, Artificial Sequence
  Description of Artificial Sequence: Synthetic oligonucleotide
  Target: PCSK9; (-) strand; PAM type: YTN; PAM sequence: CTC
cactccacccactctgcctc

SEQ ID NO: 22136 - DNA, 20 bp, Artificial Sequence
  Description of Artificial Sequence: Synthetic oligonucleotide
  Target: PCSK9; (-) strand; PAM type: YTN; PAM sequence: TTC
aaaatggagatagagagaaa

SEQ ID NO: 22137 - DNA, 20 bp, Artificial Sequence
  Description of Artificial Sequence: Synthetic oligonucleotide
  Target: PCSK9; (-) strand; PAM type: YTN; PAM sequence: TTT
caaaatggagatagagagaa

SEQ ID NO: 22138 - DNA, 20 bp, Artificial Sequence
  Description of Artificial Sequence: Synthetic oligonucleotide
  Target: PCSK9; (-) strand; PAM type: YTN; PAM sequence: TTC
caaacacagagtggtttcaa

SEQ ID NO: 22139 - DNA, 20 bp, Artificial Sequence
  Description of Artificial Sequence: Synthetic oligonucleotide
  Target: PCSK9; (-) strand; PAM type: YTN; PAM sequence: CTT
ccaaacacagagtggtttca

SEQ ID NO: 22140 - DNA, 20 bp, Artificial Sequence
  Description of Artificial Sequence: Synthetic oligonucleotide
  Target: PCSK9; (-) strand; PAM type: YTN; PAM sequence: TTC
ttccaaacacagagtggttt

SEQ ID NO: 22141 - DNA, 20 bp, Artificial Sequence
  Description of Artificial Sequence: Synthetic oligonucleotide
  Target: PCSK9; (-) strand; PAM type: YTN; PAM sequence: CTC
aaaagttcttccaaacacag

SEQ ID NO: 22142 - DNA, 20 bp, Artificial Sequence
  Description of Artificial Sequence: Synthetic oligonucleotide
  Target: PCSK9; (-) strand; PAM type: YTN; PAM sequence: CTG
aatactcaaaagttcttcca

SEQ ID NO: 22143 - DNA, 20 bp, Artificial Sequence
  Description of Artificial Sequence: Synthetic oligonucleotide
  Target: PCSK9; (-) strand; PAM type: YTN; PAM sequence: CTC
tgaatactcaaaagttcttc

SEQ ID NO: 22144 - DNA, 20 bp, Artificial Sequence
  Description of Artificial Sequence: Synthetic oligonucleotide
  Target: PCSK9; (-) strand; PAM type: YTN; PAM sequence: CTG
ccagtgggcagctctgaata

SEQ ID NO: 22145 - DNA, 20 bp, Artificial Sequence
  Description of Artificial Sequence: Synthetic oligonucleotide
  Target: PCSK9; (-) strand; PAM type: YTN; PAM sequence: TTC
tgccagtgggcagctctgaa

SEQ ID NO: 22146 - DNA, 20 bp, Artificial Sequence
  Description of Artificial Sequence: Synthetic oligonucleotide
  Target: PCSK9; (-) strand; PAM type: YTN; PAM sequence: CTG
ttctgccagtgggcagctct

SEQ ID NO: 22147 - DNA, 20 bp, Artificial Sequence
  Description of Artificial Sequence: Synthetic oligonucleotide
  Target: PCSK9; (-) strand; PAM type: YTN; PAM sequence: CTG
cccaaggaagactgttctgc

SEQ ID NO: 22148 - DNA, 20 bp, Artificial Sequence
  Description of Artificial Sequence: Synthetic oligonucleotide
  Target: PCSK9; (-) strand; PAM type: YTN; PAM sequence: CTC
ctgcccaaggaagactgttc

SEQ ID NO: 22149 - DNA, 20 bp, Artificial Sequence
  Description of Artificial Sequence: Synthetic oligonucleotide
  Target: PCSK9; (-) strand; PAM type: YTN; PAM sequence: CTC
actcctgcccaaggaagact

SEQ ID NO: 22150 - DNA, 20 bp, Artificial Sequence
  Description of Artificial Sequence: Synthetic oligonucleotide
  Target: PCSK9; (-) strand; PAM type: YTN; PAM sequence: CTG
gggacaaggagctcactcct

SEQ ID NO: 22151 - DNA, 20 bp, Artificial Sequence
  Description of Artificial Sequence: Synthetic oligonucleotide
  Target: PCSK9; (-) strand; PAM type: YTN; PAM sequence: TTC
tggggacaaggagctcactc

SEQ ID NO: 22152 - DNA, 20 bp, Artificial Sequence
  Description of Artificial Sequence: Synthetic oligonucleotide
  Target: PCSK9; (-) strand; PAM type: YTN; PAM sequence: CTT
ctggggacaaggagctcact

SEQ ID NO: 22153 - DNA, 20 bp, Artificial Sequence
  Description of Artificial Sequence: Synthetic oligonucleotide
  Target: PCSK9; (-) strand; PAM type: YTN; PAM sequence: CTG
ccaggggccagccagaccca

SEQ ID NO: 22154 - DNA, 20 bp, Artificial Sequence
  Description of Artificial Sequence: Synthetic oligonucleotide
  Target: PCSK9; (-) strand; PAM type: YTN; PAM sequence: CTC
atcagtgtccctgccagggg

SEQ ID NO: 22155 - DNA, 20 bp, Artificial Sequence
  Description of Artificial Sequence: Synthetic oligonucleotide
  Target: PCSK9; (-) strand; PAM type: YTN; PAM sequence: CTC
aagcaccctcatcagtgtcc

SEQ ID NO: 22156 - DNA, 20 bp, Artificial Sequence
  Description of Artificial Sequence: Synthetic oligonucleotide
  Target: PCSK9; (-) strand; PAM type: YTN; PAM sequence: CTA
gacaggatcaactcaagcac

SEQ ID NO: 22157 - DNA, 20 bp, Artificial Sequence
  Description of Artificial Sequence: Synthetic oligonucleotide
  Target: PCSK9; (-) strand; PAM type: YTN; PAM sequence: TTG
aaaacacagaaagggactag

SEQ ID NO: 22158 - DNA, 20 bp, Artificial Sequence
  Description of Artificial Sequence: Synthetic oligonucleotide
  Target: PCSK9; (-) strand; PAM type: YTN; PAM sequence: TTT
gaaaacacagaaagggacta

SEQ ID NO: 22159 - DNA, 20 bp, Artificial Sequence
  Description of Artificial Sequence: Synthetic oligonucleotide
  Target: PCSK9; (-) strand; PAM type: YTN; PAM sequence: CTT
tgaaaacacagaaagggact

SEQ ID NO: 22160 - DNA, 20 bp, Artificial Sequence
  Description of Artificial Sequence: Synthetic oligonucleotide
  Target: PCSK9; (-) strand; PAM type: YTN; PAM sequence: TTA
gaatgggctttgaaaacaca

SEQ ID NO: 22161 - DNA, 20 bp, Artificial Sequence
  Description of Artificial Sequence: Synthetic oligonucleotide
  Target: PCSK9; (-) strand; PAM type: YTN; PAM sequence: TTT
agaatgggctttgaaaacac

SEQ ID NO: 22162 - DNA, 20 bp, Artificial Sequence
  Description of Artificial Sequence: Synthetic oligonucleotide
  Target: PCSK9; (-) strand; PAM type: YTN; PAM sequence: CTT
tagaatgggctttgaaaaca

SEQ ID NO: 22163 - DNA, 20 bp, Artificial Sequence
  Description of Artificial Sequence: Synthetic oligonucleotide
  Target: PCSK9; (-) strand; PAM type: YTN; PAM sequence: CTG
ctttagaatgggctttgaaa

SEQ ID NO: 22164 - DNA, 20 bp, Artificial Sequence
  Description of Artificial Sequence: Synthetic oligonucleotide
  Target: PCSK9; (-) strand; PAM type: YTN; PAM sequence: TTA
gagtcaaagacggaaatggg

SEQ ID NO: 22165 - DNA, 20 bp, Artificial Sequence
  Description of Artificial Sequence: Synthetic oligonucleotide
  Target: PCSK9; (-) strand; PAM type: YTN; PAM sequence: CTT
agagtcaaagacggaaatgg

SEQ ID NO: 22166 - DNA, 20 bp, Artificial Sequence
  Description of Artificial Sequence: Synthetic oligonucleotide
  Target: PCSK9; (-) strand; PAM type: YTN; PAM sequence: TTG
ggccttagagtcaaagacgg

SEQ ID NO: 22167 - DNA, 20 bp, Artificial Sequence
  Description of Artificial Sequence: Synthetic oligonucleotide
  Target: PCSK9; (-) strand; PAM type: YTN; PAM sequence: CTT
gggccttagagtcaaagacg

SEQ ID NO: 22168 - DNA, 20 bp, Artificial Sequence
  Description of Artificial Sequence: Synthetic oligonucleotide
  Target: PCSK9; (-) strand; PAM type: YTN; PAM sequence: TTG
cccccttgggccttagagtc

SEQ ID NO: 22169 - DNA, 20 bp, Artificial Sequence
  Description of Artificial Sequence: Synthetic oligonucleotide
  Target: PCSK9; (-) strand; PAM type: YTN; PAM sequence: CTT
gcccccttgggccttagagt

SEQ ID NO: 22170 - DNA, 20 bp, Artificial Sequence
  Description of Artificial Sequence: Synthetic oligonucleotide
  Target: PCSK9; (-) strand; PAM type: YTN; PAM sequence: TTG
tgggcccggcagaccagctt

SEQ ID NO: 22171 - DNA, 20 bp, Artificial Sequence
  Description of Artificial Sequence: Synthetic oligonucleotide
  Target: PCSK9; (-) strand; PAM type: YTN; PAM sequence: CTC
acccccaaaagcgttgtggg

SEQ ID NO: 22172 - DNA, 20 bp, Artificial Sequence
  Description of Artificial Sequence: Synthetic oligonucleotide
  Target: PCSK9; (-) strand; PAM type: YTN; PAM sequence: CTG
gcaatggcgtagacaccctc

SEQ ID NO: 22173 - DNA, 20 bp, Artificial Sequence
  Description of Artificial Sequence: Synthetic oligonucleotide
  Target: PCSK9; (-) strand; PAM type: YTN; PAM sequence: CTG
gggtagcaggcagcacctgg

SEQ ID NO: 22174 - DNA, 20 bp, Artificial Sequence
  Description of Artificial Sequence: Synthetic oligonucleotide
  Target: PCSK9; (-) strand; PAM type: YTN; PAM sequence: TTG
gcctggggtagcaggcagca

SEQ ID NO: 22175 - DNA, 20 bp, Artificial Sequence
  Description of Artificial Sequence: Synthetic oligonucleotide
  Target: PCSK9; (-) strand; PAM type: YTN; PAM sequence: CTG
cagttggcctggggtagcag

SEQ ID NO: 22176 - DNA, 20 bp, Artificial Sequence
  Description of Artificial Sequence: Synthetic oligonucleotide
  Target: PCSK9; (-) strand; PAM type: YTN; PAM sequence: CTG
tgtggacgctgcagttggcc

SEQ ID NO: 22177 - DNA, 20 bp, Artificial Sequence
  Description of Artificial Sequence: Synthetic oligonucleotide
  Target: PCSK9; (-) strand; PAM type: YTN; PAM sequence: CTG
gtggagctgtgtggacgctg

SEQ ID NO: 22178 - DNA, 20 bp, Artificial Sequence
  Description of Artificial Sequence: Synthetic oligonucleotide
  Target: PCSK9; (-) strand; PAM type: YTN; PAM sequence: CTC
agctggtggagctgtgtgga

SEQ ID NO: 22179 - DNA, 20 bp, Artificial Sequence
  Description of Artificial Sequence: Synthetic oligonucleotide
  Target: PCSK9; (-) strand; PAM type: YTN; PAM sequence: CTG
gcctcagctggtggagctgt

SEQ ID NO: 22180 - DNA, 20 bp, Artificial Sequence
  Description of Artificial Sequence: Synthetic oligonucleotide
  Target: PCSK9; (-) strand; PAM type: YTN; PAM sequence: TTG
gtggcagtggacacgggtcc

SEQ ID NO: 22181 - DNA, 20 bp, Artificial Sequence
  Description of Artificial Sequence: Synthetic oligonucleotide
  Target: PCSK9; (-) strand; PAM type: YTN; PAM sequence: CTG
ttggtggcagtggacacggg

SEQ ID NO: 22182 - DNA, 20 bp, Artificial Sequence
  Description of Artificial Sequence: Synthetic oligonucleotide
  Target: PCSK9; (-) strand; PAM type: YTN; PAM sequence: CTG
tgaggacgtggccctgttgg

SEQ ID NO: 22183 - DNA, 20 bp, Artificial Sequence
  Description of Artificial Sequence: Synthetic oligonucleotide
  Target: PCSK9; (-) strand; PAM type: YTN; PAM sequence: CTA
cctgtgaggacgtggccctg

SEQ ID NO: 22184 - DNA, 20 bp, Artificial Sequence
  Description of Artificial Sequence: Synthetic oligonucleotide
  Target: PCSK9; (-) strand; PAM type: YTN; PAM sequence: CTC
ctacctgtgaggacgtggcc

SEQ ID NO: 22185 - DNA, 20 bp, Artificial Sequence
  Description of Artificial Sequence: Synthetic oligonucleotide
  Target: PCSK9; (-) strand; PAM type: YTN; PAM sequence: CTC
accccagggcaagcccagcc

SEQ ID NO: 22186 - DNA, 20 bp, Artificial Sequence
  Description of Artificial Sequence: Synthetic oligonucleotide
  Target: PCSK9; (-) strand; PAM type: YTN; PAM sequence: CTC
ctcaccccagggcaagccca

SEQ ID NO: 22187 - DNA, 20 bp, Artificial Sequence
  Description of Artificial Sequence: Synthetic oligonucleotide
  Target: PCSK9; (-) strand; PAM type: YTN; PAM sequence: CTC
gcgggcagtgggtgcataag

SEQ ID NO: 22188 - DNA, 20 bp, Artificial Sequence
  Description of Artificial Sequence: Synthetic oligonucleotide
  Target: PCSK9; (-) strand; PAM type: YTN; PAM sequence: TTG
tgaggaccaagcctcgcggg

SEQ ID NO: 22189 - DNA, 20 bp, Artificial Sequence
  Description of Artificial Sequence: Synthetic oligonucleotide
  Target: PCSK9; (-) strand; PAM type: YTN; PAM sequence: CTT
gtgaggaccaagcctcgcgg

SEQ ID NO: 22190 - DNA, 20 bp, Artificial Sequence
  Description of Artificial Sequence: Synthetic oligonucleotide
  Target: PCSK9; (-) strand; PAM type: YTN; PAM sequence: CTC
atggatcacacttgtgagga

SEQ ID NO: 22191 - DNA, 20 bp, Artificial Sequence
  Description of Artificial Sequence: Synthetic oligonucleotide
  Target: PCSK9; (-) strand; PAM type: YTN; PAM sequence: TTG
agtctcatggatcacacttg

SEQ ID NO: 22192 - DNA, 20 bp, Artificial Sequence
  Description of Artificial Sequence: Synthetic oligonucleotide
  Target: PCSK9; (-) strand; PAM type: YTN; PAM sequence: CTT
gagtctcatggatcacactt

SEQ ID NO: 22193 - DNA, 20 bp, Artificial Sequence
  Description of Artificial Sequence: Synthetic oligonucleotide
  Target: PCSK9; (-) strand; PAM type: YTN; PAM sequence: CTG
caagtcaggcttgagtctca

SEQ ID NO: 22194 - DNA, 20 bp, Artificial Sequence
  Description of Artificial Sequence: Synthetic oligonucleotide
  Target: PCSK9; (-) strand; PAM type: YTN; PAM sequence: CTC
aaagggcatggaagtggcag

SEQ ID NO: 22195 - DNA, 20 bp, Artificial Sequence
  Description of Artificial Sequence: Synthetic oligonucleotide
  Target: PCSK9; (-) strand; PAM type: YTN; PAM sequence: CTG
cccaggctcaaagggcatgg

SEQ ID NO: 22196 - DNA, 20 bp, Artificial Sequence
  Description of Artificial Sequence: Synthetic oligonucleotide
  Target: PCSK9; (-) strand; PAM type: YTN; PAM sequence: CTG
agatgaggagaagtaaggtc

SEQ ID NO: 22197 - DNA, 20 bp, Artificial Sequence
  Description of Artificial Sequence: Synthetic oligonucleotide
  Target: PCSK9; (-) strand; PAM type: YTN; PAM sequence: TTA
tggaggaggaagctgagatg

SEQ ID NO: 22198 - DNA, 20 bp, Artificial Sequence
  Description of Artificial Sequence: Synthetic oligonucleotide
  Target: PCSK9; (-) strand; PAM type: YTN; PAM sequence: CTT
atggaggaggaagctgagat

SEQ ID NO: 22199 - DNA, 20 bp, Artificial Sequence
  Description of Artificial Sequence: Synthetic oligonucleotide
  Target: PCSK9; (-) strand; PAM type: YTN; PAM sequence: CTC
ttatggaggaggaagctgag

SEQ ID NO: 22200 - DNA, 20 bp, Artificial Sequence
  Description of Artificial Sequence: Synthetic oligonucleotide
  Target: PCSK9; (-) strand; PAM type: YTN; PAM sequence: TTC
cctcttatggaggaggaagc

SEQ ID NO: 22201 - DNA, 20 bp, Artificial Sequence
  Description of Artificial Sequence: Synthetic oligonucleotide
  Target: PCSK9; (-) strand; PAM type: YTN; PAM sequence: TTT
ccctcttatggaggaggaag

SEQ ID NO: 22202 - DNA, 20 bp, Artificial Sequence
  Description of Artificial Sequence: Synthetic oligonucleotide
  Target: PCSK9; (-) strand; PAM type: YTN; PAM sequence: TTT
tccctcttatggaggaggaa

SEQ ID NO: 22203 - DNA, 20 bp, Artificial Sequence
  Description of Artificial Sequence: Synthetic oligonucleotide
  Target: PCSK9; (-) strand; PAM type: YTN; PAM sequence: TTT
ttccctcttatggaggagga

SEQ ID NO: 22204 - DNA, 20 bp, Artificial Sequence
  Description of Artificial Sequence: Synthetic oligonucleotide
  Target: PCSK9; (-) strand; PAM type: YTN; PAM sequence: CTT
tttccctcttatggaggagg

SEQ ID NO: 22205 - DNA, 20 bp, Artificial Sequence
  Description of Artificial Sequence: Synthetic oligonucleotide
  Target: PCSK9; (-) strand; PAM type: YTN; PAM sequence: TTG
caacacaatgaggcaggtaa

SEQ ID NO: 22206 - DNA, 20 bp, Artificial Sequence
  Description of Artificial Sequence: Synthetic oligonucleotide
  Target: PCSK9; (-) strand; PAM type: YTN; PAM sequence: CTT
gcaacacaatgaggcaggta

SEQ ID NO: 22207 - DNA, 20 bp, Artificial Sequence
  Description of Artificial Sequence: Synthetic oligonucleotide
  Target: PCSK9; (-) strand; PAM type: YTN; PAM sequence: CTC
cttgcaacacaatgaggcag

SEQ ID NO: 22208 - DNA, 20 bp, Artificial Sequence
  Description of Artificial Sequence: Synthetic oligonucleotide
  Target: PCSK9; (-) strand; PAM type: YTN; PAM sequence: CTG
cccatctccttgcaacacaa

SEQ ID NO: 22209 - DNA, 20 bp, Artificial Sequence
  Description of Artificial Sequence: Synthetic oligonucleotide
  Target: PCSK9; (-) strand; PAM type: YTN; PAM sequence: CTA
gatgctgcccatctccttgc

SEQ ID NO: 22210 - DNA, 20 bp, Artificial Sequence
  Description of Artificial Sequence: Synthetic oligonucleotide
  Target: PCSK9; (-) strand; PAM type: YTN; PAM sequence: CTC
caggccagtgccctagatgc

SEQ ID NO: 22211 - DNA, 20 bp, Artificial Sequence
  Description of Artificial Sequence: Synthetic oligonucleotide
  Target: PCSK9; (-) strand; PAM type: YTN; PAM sequence: CTG
cgatactccaggccagtgcc

SEQ ID NO: 22212 - DNA, 20 bp, Artificial Sequence
  Description of Artificial Sequence: Synthetic oligonucleotide
  Target: PCSK9; (-) strand; PAM type: YTN; PAM sequence: TTA
ggcaaagcacctgcgatact

SEQ ID NO: 22213 - DNA, 20 bp, Artificial Sequence
  Description of Artificial Sequence: Synthetic oligonucleotide
  Target: PCSK9; (-) strand; PAM type: YTN; PAM sequence: CTT
aggcaaagcacctgcgatac

SEQ ID NO: 22214 - DNA, 20 bp, Artificial Sequence
  Description of Artificial Sequence: Synthetic oligonucleotide
  Target: PCSK9; (-) strand; PAM type: YTN; PAM sequence: CTG
caccaccttaggcaaagcac

SEQ ID NO: 22215 - DNA, 20 bp, Artificial Sequence
  Description of Artificial Sequence: Synthetic oligonucleotide
  Target: PCSK9; (-) strand; PAM type: YTN; PAM sequence: CTG
gactgcaccaccttaggcaa

SEQ ID NO: 22216 - DNA, 20 bp, Artificial Sequence
  Description of Artificial Sequence: Synthetic oligonucleotide
  Target: PCSK9; (-) strand; PAM type: YTN; PAM sequence: CTC
ctggactgcaccaccttagg

SEQ ID NO: 22217 - DNA, 20 bp, Artificial Sequence
  Description of Artificial Sequence: Synthetic oligonucleotide
  Target: PCSK9; (-) strand; PAM type: YTN; PAM sequence: CTC
tcctggactgcaccacctta

SEQ ID NO: 22218 - DNA, 20 bp, Artificial Sequence
  Description of Artificial Sequence: Synthetic oligonucleotide
  Target: PCSK9; (-) strand; PAM type: YTN; PAM sequence: CTG
cctctcctggactgcaccac

SEQ ID NO: 22219 - DNA, 20 bp, Artificial Sequence
  Description of Artificial Sequence: Synthetic oligonucleotide
  Target: PCSK9; (-) strand; PAM type: YTN; PAM sequence: CTG
gagctgcctctcctggactg

SEQ ID NO: 22220 - DNA, 20 bp, Artificial Sequence
  Description of Artificial Sequence: Synthetic oligonucleotide
  Target: PCSK9; (-) strand; PAM type: YTN; PAM sequence: CTC
tggagctgcctctcctggac

SEQ ID NO: 22221 - DNA, 20 bp, Artificial Sequence
  Description of Artificial Sequence: Synthetic oligonucleotide
  Target: PCSK9; (-) strand; PAM type: YTN; PAM sequence: CTC
tctggagctgcctctcctgg

SEQ ID NO: 22222 - DNA, 20 bp, Artificial Sequence
  Description of Artificial Sequence: Synthetic oligonucleotide
  Target: PCSK9; (-) strand; PAM type: YTN; PAM sequence: CTC
tctctggagctgcctctcct

SEQ ID NO: 22223 - DNA, 20 bp, Artificial Sequence
  Description of Artificial Sequence: Synthetic oligonucleotide
  Target: PCSK9; (-) strand; PAM type: YTN; PAM sequence: TTC
agccccagccgggggcctct

SEQ ID NO: 22224 - DNA, 20 bp, Artificial Sequence
  Description of Artificial Sequence: Synthetic oligonucleotide
  Target: PCSK9; (-) strand; PAM type: YTN; PAM sequence: TTT
cagccccagccgggggcctc

SEQ ID NO: 22225 - DNA, 20 bp, Artificial Sequence
  Description of Artificial Sequence: Synthetic oligonucleotide
  Target: PCSK9; (-) strand; PAM type: YTN; PAM sequence: CTT
tcagccccagccgggggcct

SEQ ID NO: 22226 - DNA, 20 bp, Artificial Sequence
  Description of Artificial Sequence: Synthetic oligonucleotide
  Target: PCSK9; (-) strand; PAM type: YTN; PAM sequence: CTC
ctttcagccccagccggggg

SEQ ID NO: 22227 - DNA, 20 bp, Artificial Sequence
  Description of Artificial Sequence: Synthetic oligonucleotide
  Target: PCSK9; (-) strand; PAM type: YTN; PAM sequence: CTG
ccctcctttcagccccagcc

SEQ ID NO: 22228 - DNA, 20 bp, Artificial Sequence
  Description of Artificial Sequence: Synthetic oligonucleotide
  Target: PCSK9; (-) strand; PAM type: YTN; PAM sequence: TTC
aaaccgaggtctgccctcct

SEQ ID NO: 22229 - DNA, 20 bp, Artificial Sequence
  Description of Artificial Sequence: Synthetic oligonucleotide
  Target: PCSK9; (-) strand; PAM type: YTN; PAM sequence: CTA
tagagcggcagggtgaaatt

SEQ ID NO: 22230 - DNA, 20 bp, Artificial Sequence
  Description of Artificial Sequence: Synthetic oligonucleotide
  Target: PCSK9; (-) strand; PAM type: YTN; PAM sequence: TTG
cccaagtcacacagctatag

SEQ ID NO: 22231 - DNA, 20 bp, Artificial Sequence
  Description of Artificial Sequence: Synthetic oligonucleotide
  Target: PCSK9; (-) strand; PAM type: YTN; PAM sequence: TTT
gcccaagtcacacagctata

SEQ ID NO: 22232 - DNA, 20 bp, Artificial Sequence
  Description of Artificial Sequence: Synthetic oligonucleotide
  Target: PCSK9; (-) strand; PAM type: YTN; PAM sequence: TTA
agtaatttgcccaagtcaca

SEQ ID NO: 22233 - DNA, 20 bp, Artificial Sequence
  Description of Artificial Sequence: Synthetic oligonucleotide
  Target: PCSK9; (-) strand; PAM type: YTN; PAM sequence: CTC
atacagagatgttaagtaat

SEQ ID NO: 22234 - DNA, 20 bp, Artificial Sequence
  Description of Artificial Sequence: Synthetic oligonucleotide
  Target: PCSK9; (-) strand; PAM type: YTN; PAM sequence: TTC
ctcatacagagatgttaagt

SEQ ID NO: 22235 - DNA, 20 bp, Artificial Sequence
  Description of Artificial Sequence: Synthetic oligonucleotide
  Target: PCSK9; (-) strand; PAM type: YTN; PAM sequence: TTT
cctcatacagagatgttaag

SEQ ID NO: 22236 - DNA, 20 bp, Artificial Sequence
  Description of Artificial Sequence: Synthetic oligonucleotide
  Target: PCSK9; (-) strand; PAM type: YTN; PAM sequence: CTC
atcatttcctcatacagaga

SEQ ID NO: 22237 - DNA, 20 bp, Artificial Sequence
  Description of Artificial Sequence: Synthetic oligonucleotide
  Target: PCSK9; (-) strand; PAM type: YTN; PAM sequence: TTA
gcactcatcatttcctcata

SEQ ID NO: 22238 - DNA, 20 bp, Artificial Sequence
  Description of Artificial Sequence: Synthetic oligonucleotide
  Target: PCSK9; (-) strand; PAM type: YTN; PAM sequence: CTT
agcactcatcatttcctcat

SEQ ID NO: 22239 - DNA, 20 bp, Artificial Sequence
  Description of Artificial Sequence: Synthetic oligonucleotide
  Target: PCSK9; (-) strand; PAM type: YTN; PAM sequence: CTA
agtgcttagcactcatcatt

SEQ ID NO: 22240 - DNA, 20 bp, Artificial Sequence
  Description of Artificial Sequence: Synthetic oligonucleotide
  Target: PCSK9; (-) strand; PAM type: YTN; PAM sequence: CTA
agctaagtgcttagcactca

SEQ ID NO: 22241 - DNA, 20 bp, Artificial Sequence
  Description of Artificial Sequence: Synthetic oligonucleotide
  Target: PCSK9; (-) strand; PAM type: YTN; PAM sequence: TTG
tcccggcactaagctaagtg

SEQ ID NO: 22242 - DNA, 20 bp, Artificial Sequence
  Description of Artificial Sequence: Synthetic oligonucleotide
  Target: PCSK9; (-) strand; PAM type: YTN; PAM sequence: TTA
tattgtcccggcactaagct

SEQ ID NO: 22243 - DNA, 20 bp, Artificial Sequence
  Description of Artificial Sequence: Synthetic oligonucleotide
  Target: PCSK9; (-) strand; PAM type: YTN; PAM sequence: TTT
atattgtcccggcactaagc

SEQ ID NO: 22244 - DNA, 20 bp, Artificial Sequence
  Description of Artificial Sequence: Synthetic oligonucleotide
  Target: PCSK9; (-) strand; PAM type: YTN; PAM sequence: CTA
gaatttatattgtcccggca

SEQ ID NO: 22245 - DNA, 20 bp, Artificial Sequence
  Description of Artificial Sequence: Synthetic oligonucleotide
  Target: PCSK9; (-) strand; PAM type: YTN; PAM sequence: TTA
aagcaacgggtgatgaaaac

SEQ ID NO: 22246 - DNA, 20 bp, Artificial Sequence
  Description of Artificial Sequence: Synthetic oligonucleotide
  Target: PCSK9; (-) strand; PAM type: YTN; PAM sequence: TTT
aaagcaacgggtgatgaaaa

SEQ ID NO: 22247 - DNA, 20 bp, Artificial Sequence
  Description of Artificial Sequence: Synthetic oligonucleotide
  Target: PCSK9; (-) strand; PAM type: YTN; PAM sequence: TTT
taaagcaacgggtgatgaaa

SEQ ID NO: 22248 - DNA, 20 bp, Artificial Sequence
  Description of Artificial Sequence: Synthetic oligonucleotide
  Target: PCSK9; (-) strand; PAM type: YTN; PAM sequence: CTG
gattttaaagcaacgggtga

SEQ ID NO: 22249 - DNA, 20 bp, Artificial Sequence
  Description of Artificial Sequence: Synthetic oligonucleotide
  Target: PCSK9; (-) strand; PAM type: YTN; PAM sequence: CTA
taccagaggctggattttaa

SEQ ID NO: 22250 - DNA, 20 bp, Artificial Sequence
  Description of Artificial Sequence: Synthetic oligonucleotide
  Target: PCSK9; (-) strand; PAM type: YTN; PAM sequence: TTG
cctataccagaggctggatt

SEQ ID NO: 22251 - DNA, 20 bp, Artificial Sequence
  Description of Artificial Sequence: Synthetic oligonucleotide
  Target: PCSK9; (-) strand; PAM type: YTN; PAM sequence: TTC
gacacagggtagcccgtcaa

SEQ ID NO: 22252 - DNA, 20 bp, Artificial Sequence
  Description of Artificial Sequence: Synthetic oligonucleotide
  Target: PCSK9; (-) strand; PAM type: YTN; PAM sequence: TTT
cgacacagggtagcccgtca

SEQ ID NO: 22253 - DNA, 20 bp, Artificial Sequence
  Description of Artificial Sequence: Synthetic oligonucleotide
  Target: PCSK9; (-) strand; PAM type: YTN; PAM sequence: TTT
tcgacacagggtagcccgtc

SEQ ID NO: 22254 - DNA, 20 bp, Artificial Sequence
  Description of Artificial Sequence: Synthetic oligonucleotide
  Target: PCSK9; (-) strand; PAM type: YTN; PAM sequence: CTG
ggcatgttttcgacacaggg

SEQ ID NO: 22255 - DNA, 20 bp, Artificial Sequence
  Description of Artificial Sequence: Synthetic oligonucleotide
  Target: PCSK9; (-) strand; PAM type: YTN; PAM sequence: CTG
cctgggcatgttttcgacac

SEQ ID NO: 22256 - DNA, 20 bp, Artificial Sequence
  Description of Artificial Sequence: Synthetic oligonucleotide
  Target: PCSK9; (-) strand; PAM type: YTN; PAM sequence: CTA
cctgcctgggcatgttttcg

SEQ ID NO: 22257 - DNA, 20 bp, Artificial Sequence
  Description of Artificial Sequence: Synthetic oligonucleotide
  Target: PCSK9; (-) strand; PAM type: YTN; PAM sequence: CTG
ctacctgcctgggcatgttt

SEQ ID NO: 22258 - DNA, 20 bp, Artificial Sequence
  Description of Artificial Sequence: Synthetic oligonucleotide
  Target: PCSK9; (-) strand; PAM type: YTN; PAM sequence: TTC
ctgctacctgcctgggcatg

SEQ ID NO: 22259 - DNA, 20 bp, Artificial Sequence
  Description of Artificial Sequence: Synthetic oligonucleotide
  Target: PCSK9; (-) strand; PAM type: YTN; PAM sequence: CTT
cctgctacctgcctgggcat

SEQ ID NO: 22260 - DNA, 20 bp, Artificial Sequence
  Description of Artificial Sequence: Synthetic oligonucleotide
  Target: PCSK9; (-) strand; PAM type: YTN; PAM sequence: CTG
tgacttcctgctacctgcct

SEQ ID NO: 22261 - DNA, 20 bp, Artificial Sequence
  Description of Artificial Sequence: Synthetic oligonucleotide
  Target: PCSK9; (-) strand; PAM type: YTN; PAM sequence: TTG
atgccccaagaggtccccat

SEQ ID NO: 22262 - DNA, 20 bp, Artificial Sequence
  Description of Artificial Sequence: Synthetic oligonucleotide
  Target: PCSK9; (-) strand; PAM type: YTN; PAM sequence: CTT
gatgccccaagaggtcccca

SEQ ID NO: 22263 - DNA, 20 bp, Artificial Sequence
  Description of Artificial Sequence: Synthetic oligonucleotide
  Target: PCSK9; (-) strand; PAM type: YTN; PAM sequence: CTC
agggcaccatcccttgatgc

SEQ ID NO: 22264 - DNA, 20 bp, Artificial Sequence
  Description of Artificial Sequence: Synthetic oligonucleotide
  Target: PCSK9; (-) strand; PAM type: YTN; PAM sequence: CTC
agcctcagggcaccatccct

SEQ ID NO: 22265 - DNA, 20 bp, Artificial Sequence
  Description of Artificial Sequence: Synthetic oligonucleotide
  Target: PCSK9; (-) strand; PAM type: YTN; PAM sequence: CTC
cacccaaccagaacagctca

SEQ ID NO: 22266 - DNA, 20 bp, Artificial Sequence
  Description of Artificial Sequence: Synthetic oligonucleotide
  Target: PCSK9; (-) strand; PAM type: YTN; PAM sequence: CTC
atgctccacccaaccagaac

SEQ ID NO: 22267 - DNA, 20 bp, Artificial Sequence
  Description of Artificial Sequence: Synthetic oligonucleotide
  Target: PCSK9; (-) strand; PAM type: YTN; PAM sequence: CTC
tcatgctccacccaaccaga

SEQ ID NO: 22268 - DNA, 20 bp, Artificial Sequence
  Description of Artificial Sequence: Synthetic oligonucleotide
  Target: PCSK9; (-) strand; PAM type: YTN; PAM sequence: TTC
ccagacctctcatgctccac

SEQ ID NO: 22269 - DNA, 20 bp, Artificial Sequence
  Description of Artificial Sequence: Synthetic oligonucleotide
  Target: PCSK9; (-) strand; PAM type: YTN; PAM sequence: CTT
cccagacctctcatgctcca

SEQ ID NO: 22270 - DNA, 20 bp, Artificial Sequence
  Description of Artificial Sequence: Synthetic oligonucleotide
  Target: PCSK9; (-) strand; PAM type: YTN; PAM sequence: CTG
tcttcccagacctctcatgc

SEQ ID NO: 22271 - DNA, 20 bp, Artificial Sequence
  Description of Artificial Sequence: Synthetic oligonucleotide
  Target: PCSK9; (-) strand; PAM type: YTN; PAM sequence: CTG
gagtcccactgtcttcccag

SEQ ID NO: 22272 - DNA, 20 bp, Artificial Sequence
  Description of Artificial Sequence: Synthetic oligonucleotide
  Target: PCSK9; (-) strand; PAM type: YTN; PAM sequence: TTC
caggctggagtcccactgtc

SEQ ID NO: 22273 - DNA, 20 bp, Artificial Sequence
  Description of Artificial Sequence: Synthetic oligonucleotide
  Target: PCSK9; (-) strand; PAM type: YTN; PAM sequence: TTA
ttccaggctggagtcccact

SEQ ID NO: 22274 - DNA, 20 bp, Artificial Sequence
  Description of Artificial Sequence: Synthetic oligonucleotide
  Target: PCSK9; (-) strand; PAM type: YTN; PAM sequence: CTT
attccaggctggagtcccac

SEQ ID NO: 22275 - DNA, 20 bp, Artificial Sequence
  Description of Artificial Sequence: Synthetic oligonucleotide
  Target: PCSK9; (-) strand; PAM type: YTN; PAM sequence: CTC
ttattccaggctggagtccc

SEQ ID NO: 22276 - DNA, 20 bp, Artificial Sequence
  Description of Artificial Sequence: Synthetic oligonucleotide
  Target: PCSK9; (-) strand; PAM type: YTN; PAM sequence: CTG
agcctcttattccaggctgg

SEQ ID NO: 22277 - DNA, 20 bp, Artificial Sequence
  Description of Artificial Sequence: Synthetic oligonucleotide
  Target: PCSK9; (-) strand; PAM type: YTN; PAM sequence: CTC
tgagcctcttattccaggct

SEQ ID NO: 22278 - DNA, 20 bp, Artificial Sequence
  Description of Artificial Sequence: Synthetic oligonucleotide
  Target: PCSK9; (-) strand; PAM type: YTN; PAM sequence: CTC
agacgagaatcaactctgag

SEQ ID NO: 22279 - DNA, 20 bp, Artificial Sequence
  Description of Artificial Sequence: Synthetic oligonucleotide
  Target: PCSK9; (-) strand; PAM type: YTN; PAM sequence: CTG
gacgtgctcagacgagaatc

SEQ ID NO: 22280 - DNA, 20 bp, Artificial Sequence
  Description of Artificial Sequence: Synthetic oligonucleotide
  Target: PCSK9; (-) strand; PAM type: YTN; PAM sequence: TTC
ccctggacgtgctcagacga

SEQ ID NO: 22281 - DNA, 20 bp, Artificial Sequence
  Description of Artificial Sequence: Synthetic oligonucleotide
  Target: PCSK9; (-) strand; PAM type: YTN; PAM sequence: CTC
agtggttcccctggacgtgc

SEQ ID NO: 22282 - DNA, 20 bp, Artificial Sequence
  Description of Artificial Sequence: Synthetic oligonucleotide
  Target: PCSK9; (-) strand; PAM type: YTN; PAM sequence: TTC
ccaaaccctcagtggttccc

SEQ ID NO: 22283 - DNA, 20 bp, Artificial Sequence
  Description of Artificial Sequence: Synthetic oligonucleotide
  Target: PCSK9; (-) strand; PAM type: YTN; PAM sequence: CTG
ttcccaaaccctcagtggtt

SEQ ID NO: 22284 - DNA, 20 bp, Artificial Sequence
  Description of Artificial Sequence: Synthetic oligonucleotide
  Target: PCSK9; (-) strand; PAM type: YTN; PAM sequence: CTC
ctgttcccaaaccctcagtg

SEQ ID NO: 22285 - DNA, 20 bp, Artificial Sequence
  Description of Artificial Sequence: Synthetic oligonucleotide
  Target: PCSK9; (-) strand; PAM type: YTN; PAM sequence: CTC
tcctgttcccaaaccctcag

SEQ ID NO: 22286 - DNA, 20 bp, Artificial Sequence
  Description of Artificial Sequence: Synthetic oligonucleotide
  Target: PCSK9; (-) strand; PAM type: YTN; PAM sequence: CTC
actctcctgttcccaaaccc

SEQ ID NO: 22287 - DNA, 20 bp, Artificial Sequence
  Description of Artificial Sequence: Synthetic oligonucleotide
  Target: PCSK9; (-) strand; PAM type: YTN; PAM sequence: CTC
accctcactctcctgttccc

SEQ ID NO: 22288 - DNA, 20 bp, Artificial Sequence
  Description of Artificial Sequence: Synthetic oligonucleotide
  Target: PCSK9; (-) strand; PAM type: YTN; PAM sequence: TTC
tcaccctcactctcctgttc

SEQ ID NO: 22289 - DNA, 20 bp, Artificial Sequence
  Description of Artificial Sequence: Synthetic oligonucleotide
  Target: PCSK9; (-) strand; PAM type: YTN; PAM sequence: CTG
tgcccagaaccaggttctca

SEQ ID NO: 22290 - DNA, 20 bp, Artificial Sequence
  Description of Artificial Sequence: Synthetic oligonucleotide
  Target: PCSK9; (-) strand; PAM type: YTN; PAM sequence: CTG
ctgtgcccagaaccaggttc

SEQ ID NO: 22291 - DNA, 20 bp, Artificial Sequence
  Description of Artificial Sequence: Synthetic oligonucleotide
  Target: PCSK9; (-) strand; PAM type: YTN; PAM sequence: CTA
catgccagcctgctgtgccc

SEQ ID NO: 22292 - DNA, 20 bp, Artificial Sequence
  Description of Artificial Sequence: Synthetic oligonucleotide
  Target: PCSK9; (-) strand; PAM type: YTN; PAM sequence: CTG
aacatccatcctacatgcca

SEQ ID NO: 22293 - DNA, 20 bp, Artificial Sequence
  Description of Artificial Sequence: Synthetic oligonucleotide
  Target: PCSK9; (-) strand; PAM type: YTN; PAM sequence: TTC
ctgaacatccatcctacatg

SEQ ID NO: 22294 - DNA, 20 bp, Artificial Sequence
  Description of Artificial Sequence: Synthetic oligonucleotide
  Target: PCSK9; (-) strand; PAM type: YTN; PAM sequence: TTT
cctgaacatccatcctacat

SEQ ID NO: 22295 - DNA, 20 bp, Artificial Sequence
  Description of Artificial Sequence: Synthetic oligonucleotide
  Target: PCSK9; (-) strand; PAM type: YTN; PAM sequence: CTT
tcctgaacatccatcctaca

SEQ ID NO: 22296 - DNA, 20 bp, Artificial Sequence
  Description of Artificial Sequence: Synthetic oligonucleotide
  Target: PCSK9; (-) strand; PAM type: YTN; PAM sequence: CTC
atctttcctgaacatccatc

SEQ ID NO: 22297 - DNA, 20 bp, Artificial Sequence
  Description of Artificial Sequence: Synthetic oligonucleotide
  Target: PCSK9; (-) strand; PAM type: YTN; PAM sequence: CTA
tgctcatctttcctgaacat

SEQ ID NO: 22298 - DNA, 20 bp, Artificial Sequence
  Description of Artificial Sequence: Synthetic oligonucleotide
  Target: PCSK9; (-) strand; PAM type: YTN; PAM sequence: CTG
actatgctcatctttcctga

SEQ ID NO: 22299 - DNA, 20 bp, Artificial Sequence
  Description of Artificial Sequence: Synthetic oligonucleotide
  Target: PCSK9; (-) strand; PAM type: YTN; PAM sequence: CTG
gacaagggcaccagccacct

SEQ ID NO: 22300 - DNA, 20 bp, Artificial Sequence
  Description of Artificial Sequence: Synthetic oligonucleotide
  Target: PCSK9; (-) strand; PAM type: YTN; PAM sequence: CTC
ccctggacaagggcaccagc

SEQ ID NO: 22301 - DNA, 20 bp, Artificial Sequence
  Description of Artificial Sequence: Synthetic oligonucleotide
  Target: PCSK9; (-) strand; PAM type: YTN; PAM sequence: CTC
tcccctggacaagggcacca

SEQ ID NO: 22302 - DNA, 20 bp, Artificial Sequence
  Description of Artificial Sequence: Synthetic oligonucleotide
  Target: PCSK9; (-) strand; PAM type: YTN; PAM sequence: CTG
acggagcctctcccctggac

SEQ ID NO: 22303 - DNA, 20 bp, Artificial Sequence
  Description of Artificial Sequence: Synthetic oligonucleotide
  Target: PCSK9; (-) strand; PAM type: YTN; PAM sequence: CTG
aacctgacggagcctctccc

SEQ ID NO: 22304 - DNA, 20 bp, Artificial Sequence
  Description of Artificial Sequence: Synthetic oligonucleotide
  Target: PCSK9; (-) strand; PAM type: YTN; PAM sequence: CTC
caagccaggacccctgaacc

SEQ ID NO: 22305 - DNA, 20 bp, Artificial Sequence
  Description of Artificial Sequence: Synthetic oligonucleotide
  Target: PCSK9; (-) strand; PAM type: YTN; PAM sequence: TTC
cctccaagccaggacccctg

SEQ ID NO: 22306 - DNA, 20 bp, Artificial Sequence
  Description of Artificial Sequence: Synthetic oligonucleotide
  Target: PCSK9; (-) strand; PAM type: YTN; PAM sequence: CTT
ccctccaagccaggacccct

SEQ ID NO: 22307 - DNA, 20 bp, Artificial Sequence
  Description of Artificial Sequence: Synthetic oligonucleotide
  Target: PCSK9; (-) strand; PAM type: YTN; PAM sequence: TTA
gagcatggcggacttccctc

SEQ ID NO: 22308 - DNA, 20 bp, Artificial Sequence
  Description of Artificial Sequence: Synthetic oligonucleotide
  Target: PCSK9; (-) strand; PAM type: YTN; PAM sequence: TTC
caaaggggagcgtgattaga

SEQ ID NO: 22309 - DNA, 20 bp, Artificial Sequence
  Description of Artificial Sequence: Synthetic oligonucleotide
  Target: PCSK9; (-) strand; PAM type: YTN; PAM sequence: CTT
ccaaaggggagcgtgattag

SEQ ID NO: 22310 - DNA, 20 bp, Artificial Sequence
  Description of Artificial Sequence: Synthetic oligonucleotide
  Target: PCSK9; (-) strand; PAM type: YTN; PAM sequence: CTG
agcacttccaaaggggagcg

SEQ ID NO: 22311 - DNA, 20 bp, Artificial Sequence
  Description of Artificial Sequence: Synthetic oligonucleotide
  Target: PCSK9; (-) strand; PAM type: YTN; PAM sequence: CTC
atcggctgagcacttccaaa

SEQ ID NO: 22312 - DNA, 20 bp, Artificial Sequence
  Description of Artificial Sequence: Synthetic oligonucleotide
  Target: PCSK9; (-) strand; PAM type: YTN; PAM sequence: CTG
tgagctcatcggctgagcac

SEQ ID NO: 22313 - DNA, 20 bp, Artificial Sequence
  Description of Artificial Sequence: Synthetic oligonucleotide
  Target: PCSK9; (-) strand; PAM type: YTN; PAM sequence: CTG
acatgtgcctgtgagctcat

SEQ ID NO: 22314 - DNA, 20 bp, Artificial Sequence
  Description of Artificial Sequence: Synthetic oligonucleotide
  Target: PCSK9; (-) strand; PAM type: YTN; PAM sequence: TTC
aaactgacatgtgcctgtga

SEQ ID NO: 22315 - DNA, 20 bp, Artificial Sequence
  Description of Artificial Sequence: Synthetic oligonucleotide
  Target: PCSK9; (-) strand; PAM type: YTN; PAM sequence: CTT
caaactgacatgtgcctgtg

SEQ ID NO: 22316 - DNA, 20 bp, Artificial Sequence
  Description of Artificial Sequence: Synthetic oligonucleotide
  Target: PCSK9; (-) strand; PAM type: YTN; PAM sequence: TTC
catgacttcaaactgacatg

SEQ ID NO: 22317 - DNA, 20 bp, Artificial Sequence
  Description of Artificial Sequence: Synthetic oligonucleotide
  Target: PCSK9; (-) strand; PAM type: YTN; PAM sequence: TTC
atggagtcagattccatgac

SEQ ID NO: 22318 - DNA, 20 bp, Artificial Sequence
  Description of Artificial Sequence: Synthetic oligonucleotide
  Target: PCSK9; (-) strand; PAM type: YTN; PAM sequence: CTT
catggagtcagattccatga

SEQ ID NO: 22319 - DNA, 20 bp, Artificial Sequence
  Description of Artificial Sequence: Synthetic oligonucleotide
  Target: PCSK9; (-) strand; PAM type: YTN; PAM sequence: TTG
aggtgcgcttcatggagtca

SEQ ID NO: 22320 - DNA, 20 bp, Artificial Sequence
  Description of Artificial Sequence: Synthetic oligonucleotide
  Target: PCSK9; (-) strand; PAM type: YTN; PAM sequence: TTT
gaggtgcgcttcatggagtc

SEQ ID NO: 22321 - DNA, 20 bp, Artificial Sequence
  Description of Artificial Sequence: Synthetic oligonucleotide
  Target: PCSK9; (-) strand; PAM type: YTN; PAM sequence: CTT
tgaggtgcgcttcatggagt

SEQ ID NO: 22322 - DNA, 20 bp, Artificial Sequence
  Description of Artificial Sequence: Synthetic oligonucleotide
  Target: PCSK9; (-) strand; PAM type: YTN; PAM sequence: CTC
tttgaggtgcgcttcatgga

SEQ ID NO: 22323 - DNA, 20 bp, Artificial Sequence
  Description of Artificial Sequence: Synthetic oligonucleotide
  Target: PCSK9; (-) strand; PAM type: YTN; PAM sequence: CTG
caaaatggtgctctttgagg

SEQ ID NO: 22324 - DNA, 20 bp, Artificial Sequence
  Description of Artificial Sequence: Synthetic oligonucleotide
  Target: PCSK9; (-) strand; PAM type: YTN; PAM sequence: TTA
gctgcaaaatggtgctcttt

SEQ ID NO: 22325 - DNA, 20 bp, Artificial Sequence
  Description of Artificial Sequence: Synthetic oligonucleotide
  Target: PCSK9; (-) strand; PAM type: YTN; PAM sequence: CTT
agctgcaaaatggtgctctt

SEQ ID NO: 22326 - DNA, 20 bp, Artificial Sequence
  Description of Artificial Sequence: Synthetic oligonucleotide
  Target: PCSK9; (-) strand; PAM type: YTN; PAM sequence: TTC
ccttagctgcaaaatggtgc

SEQ ID NO: 22327 - DNA, 20 bp, Artificial Sequence
  Description of Artificial Sequence: Synthetic oligonucleotide
  Target: PCSK9; (-) strand; PAM type: YTN; PAM sequence: CTG
cagttcccttagctgcaaaa

SEQ ID NO: 22328 - DNA, 20 bp, Artificial Sequence
  Description of Artificial Sequence: Synthetic oligonucleotide
  Target: PCSK9; (-) strand; PAM type: YTN; PAM sequence: CTC
agcatgtccagcctgcagtt

SEQ ID NO: 22329 - DNA, 20 bp, Artificial Sequence
  Description of Artificial Sequence: Synthetic oligonucleotide
  Target: PCSK9; (-) strand; PAM type: YTN; PAM sequence: CTC
ggggcagccactcagcatgt

SEQ ID NO: 22330 - DNA, 20 bp, Artificial Sequence
  Description of Artificial Sequence: Synthetic oligonucleotide
  Target: PCSK9; (-) strand; PAM type: YTN; PAM sequence: CTG
caagggctcggggcagccac

SEQ ID NO: 22331 - DNA, 20 bp, Artificial Sequence
  Description of Artificial Sequence: Synthetic oligonucleotide
  Target: PCSK9; (-) strand; PAM type: YTN; PAM sequence: CTA
gctgcaagggctcggggcag

SEQ ID NO: 22332 - DNA, 20 bp, Artificial Sequence
  Description of Artificial Sequence: Synthetic oligonucleotide
  Target: PCSK9; (-) strand; PAM type: YTN; PAM sequence: CTA
tgtcctagctgcaagggctc

SEQ ID NO: 22333 - DNA, 20 bp, Artificial Sequence
  Description of Artificial Sequence: Synthetic oligonucleotide
  Target: PCSK9; (-) strand; PAM type: YTN; PAM sequence: CTC
tatgtcctagctgcaagggc

SEQ ID NO: 22334 - DNA, 20 bp, Artificial Sequence
  Description of Artificial Sequence: Synthetic oligonucleotide
  Target: PCSK9; (-) strand; PAM type: YTN; PAM sequence: TTC
tctatgtcctagctgcaagg

SEQ ID NO: 22335 - DNA, 20 bp, Artificial Sequence
  Description of Artificial Sequence: Synthetic oligonucleotide
  Target: PCSK9; (-) strand; PAM type: YTN; PAM sequence: CTA
gcattctctatgtcctagct

SEQ ID NO: 22336 - DNA, 20 bp, Artificial Sequence
  Description of Artificial Sequence: Synthetic oligonucleotide
  Target: PCSK9; (-) strand; PAM type: YTN; PAM sequence: TTA
ctagcattctctatgtccta

SEQ ID NO: 22337 - DNA, 20 bp, Artificial Sequence
  Description of Artificial Sequence: Synthetic oligonucleotide
  Target: PCSK9; (-) strand; PAM type: YTN; PAM sequence: TTG
tggttactagcattctctat

SEQ ID NO: 22338 - DNA, 20 bp, Artificial Sequence
  Description of Artificial Sequence: Synthetic oligonucleotide
  Target: PCSK9; (-) strand; PAM type: YTN; PAM sequence: CTG
aacatggtagggttgtggtt

SEQ ID NO: 22339 - DNA, 20 bp, Artificial Sequence
  Description of Artificial Sequence: Synthetic oligonucleotide
  Target: PCSK9; (-) strand; PAM type: YTN; PAM sequence: CTC
tgaacatggtagggttgtgg

SEQ ID NO: 22340 - DNA, 20 bp, Artificial Sequence
  Description of Artificial Sequence: Synthetic oligonucleotide
  Target: PCSK9; (-) strand; PAM type: YTN; PAM sequence: CTG
gcatgtgctctgaacatggt

SEQ ID NO: 22341 - DNA, 20 bp, Artificial Sequence
  Description of Artificial Sequence: Synthetic oligonucleotide
  Target: PCSK9; (-) strand; PAM type: YTN; PAM sequence: CTG
tgaagatgacacgtgcgaag

SEQ ID NO: 22342 - DNA, 20 bp, Artificial Sequence
  Description of Artificial Sequence: Synthetic oligonucleotide
  Target: PCSK9; (-) strand; PAM type: YTN; PAM sequence: CTC
acagggacactgtgaagatg

SEQ ID NO: 22343 - DNA, 20 bp, Artificial Sequence
  Description of Artificial Sequence: Synthetic oligonucleotide
  Target: PCSK9; (-) strand; PAM type: YTN; PAM sequence: CTA
ctcacagggacactgtgaag

SEQ ID NO: 22344 - DNA, 20 bp, Artificial Sequence
  Description of Artificial Sequence: Synthetic oligonucleotide
  Target: PCSK9; (-) strand; PAM type: YTN; PAM sequence: TTG
taagatggaaagagaaacca

SEQ ID NO: 22345 - DNA, 20 bp, Artificial Sequence
  Description of Artificial Sequence: Synthetic oligonucleotide
  Target: PCSK9; (-) strand; PAM type: YTN; PAM sequence: TTT
gtaagatggaaagagaaacc

SEQ ID NO: 22346 - DNA, 20 bp, Artificial Sequence
  Description of Artificial Sequence: Synthetic oligonucleotide
  Target: PCSK9; (-) strand; PAM type: YTN; PAM sequence: CTC
atttgtaagatggaaagaga

SEQ ID NO: 22347 - DNA, 20 bp, Artificial Sequence
  Description of Artificial Sequence: Synthetic oligonucleotide
  Target: PCSK9; (-) strand; PAM type: YTN; PAM sequence: TTA
ctcatttgtaagatggaaag

SEQ ID NO: 22348 - DNA, 20 bp, Artificial Sequence
  Description of Artificial Sequence: Synthetic oligonucleotide
  Target: PCSK9; (-) strand; PAM type: YTN; PAM sequence: TTT
actcatttgtaagatggaaa

SEQ ID NO: 22349 - DNA, 20 bp, Artificial Sequence
  Description of Artificial Sequence: Synthetic oligonucleotide
  Target: PCSK9; (-) strand; PAM type: YTN; PAM sequence: CTG
tttactcatttgtaagatgg

SEQ ID NO: 22350 - DNA, 20 bp, Artificial Sequence
  Description of Artificial Sequence: Synthetic oligonucleotide
  Target: PCSK9; (-) strand; PAM type: YTN; PAM sequence: CTC
tgtttactcatttgtaagat

SEQ ID NO: 22351 - DNA, 20 bp, Artificial Sequence
  Description of Artificial Sequence: Synthetic oligonucleotide
  Target: PCSK9; (-) strand; PAM type: YTN; PAM sequence: CTG
aggctctgtttactcatttg

SEQ ID NO: 22352 - DNA, 20 bp, Artificial Sequence
  Description of Artificial Sequence: Synthetic oligonucleotide
  Target: PCSK9; (-) strand; PAM type: YTN; PAM sequence: CTA
cactgaggctctgtttactc

SEQ ID NO: 22353 - DNA, 20 bp, Artificial Sequence
  Description of Artificial Sequence: Synthetic oligonucleotide
  Target: PCSK9; (-) strand; PAM type: YTN; PAM sequence: TTA
gctacactgaggctctgttt

SEQ ID NO: 22354 - DNA, 20 bp, Artificial Sequence
  Description of Artificial Sequence: Synthetic oligonucleotide
  Target: PCSK9; (-) strand; PAM type: YTN; PAM sequence: CTT
agctacactgaggctctgtt

SEQ ID NO: 22355 - DNA, 20 bp, Artificial Sequence
  Description of Artificial Sequence: Synthetic oligonucleotide
  Target: PCSK9; (-) strand; PAM type: YTN; PAM sequence: TTA
cttagctacactgaggctct

SEQ ID NO: 22356 - DNA, 20 bp, Artificial Sequence
  Description of Artificial Sequence: Synthetic oligonucleotide
  Target: PCSK9; (-) strand; PAM type: YTN; PAM sequence: CTA
aaatagtggttacttagcta

SEQ ID NO: 22357 - DNA, 20 bp, Artificial Sequence
  Description of Artificial Sequence: Synthetic oligonucleotide
  Target: PCSK9; (-) strand; PAM type: YTN; PAM sequence: CTA
agaaacctaaaatagtggtt

SEQ ID NO: 22358 - DNA, 20 bp, Artificial Sequence
  Description of Artificial Sequence: Synthetic oligonucleotide
  Target: PCSK9; (-) strand; PAM type: YTN; PAM sequence: TTG
gctaagaaacctaaaatagt

SEQ ID NO: 22359 - DNA, 20 bp, Artificial Sequence
  Description of Artificial Sequence: Synthetic oligonucleotide
  Target: PCSK9; (-) strand; PAM type: YTN; PAM sequence: TTA
ggagtcagacacacccattg

SEQ ID NO: 22360 - DNA, 20 bp, Artificial Sequence
  Description of Artificial Sequence: Synthetic oligonucleotide
  Target: PCSK9; (-) strand; PAM type: YTN; PAM sequence: CTT
aggagtcagacacacccatt

SEQ ID NO: 22361 - DNA, 20 bp, Artificial Sequence
  Description of Artificial Sequence: Synthetic oligonucleotide
  Target: PCSK9; (-) strand; PAM type: YTN; PAM sequence: CTC
catgggcttaggagtcagac

SEQ ID NO: 22362 - DNA, 20 bp, Artificial Sequence
  Description of Artificial Sequence: Synthetic oligonucleotide
  Target: PCSK9; (-) strand; PAM type: YTN; PAM sequence: CTC
agaatgccctccatgggctt

SEQ ID NO: 22363 - DNA, 20 bp, Artificial Sequence
  Description of Artificial Sequence: Synthetic oligonucleotide
  Target: PCSK9; (-) strand; PAM type: YTN; PAM sequence: CTG
aaccacctcagaatgccctc

SEQ ID NO: 22364 - DNA, 20 bp, Artificial Sequence
  Description of Artificial Sequence: Synthetic oligonucleotide
  Target: PCSK9; (-) strand; PAM type: YTN; PAM sequence: CTG
tctgaaccacctcagaatgc

SEQ ID NO: 22365 - DNA, 20 bp, Artificial Sequence
  Description of Artificial Sequence: Synthetic oligonucleotide
  Target: PCSK9; (-) strand; PAM type: YTN; PAM sequence: TTC
aagggtaagccggggtctgt

SEQ ID NO: 22366 - DNA, 20 bp, Artificial Sequence
  Description of Artificial Sequence: Synthetic oligonucleotide
  Target: PCSK9; (-) strand; PAM type: YTN; PAM sequence: CTA
tgcagccagcaggcagaagt

SEQ ID NO: 22367 - DNA, 20 bp, Artificial Sequence
  Description of Artificial Sequence: Synthetic oligonucleotide
  Target: PCSK9; (-) strand; PAM type: YTN; PAM sequence: CTC
cctatgcagccagcaggcag

SEQ ID NO: 22368 - DNA, 20 bp, Artificial Sequence
  Description of Artificial Sequence: Synthetic oligonucleotide
  Target: PCSK9; (-) strand; PAM type: YTN; PAM sequence: CTC
cccccagcccctccctatgc

SEQ ID NO: 22369 - DNA, 20 bp, Artificial Sequence
  Description of Artificial Sequence: Synthetic oligonucleotide
  Target: PCSK9; (-) strand; PAM type: YTN; PAM sequence: CTC
aaactccccccagcccctcc

SEQ ID NO: 22370 - DNA, 20 bp, Artificial Sequence
  Description of Artificial Sequence: Synthetic oligonucleotide
  Target: PCSK9; (-) strand; PAM type: YTN; PAM sequence: CTG
agatgctcaaactcccccca

SEQ ID NO: 22371 - DNA, 20 bp, Artificial Sequence
  Description of Artificial Sequence: Synthetic oligonucleotide
  Target: PCSK9; (-) strand; PAM type: YTN; PAM sequence: CTA
tggcctgagatgctcaaact

SEQ ID NO: 22372 - DNA, 20 bp, Artificial Sequence
  Description of Artificial Sequence: Synthetic oligonucleotide
  Target: PCSK9; (-) strand; PAM type: YTN; PAM sequence: CTC
tatggcctgagatgctcaaa

SEQ ID NO: 22373 - DNA, 20 bp, Artificial Sequence
  Description of Artificial Sequence: Synthetic oligonucleotide
  Target: PCSK9; (-) strand; PAM type: YTN; PAM sequence: TTC
cacccagagatggagacagt

SEQ ID NO: 22374 - DNA, 20 bp, Artificial Sequence
  Description of Artificial Sequence: Synthetic oligonucleotide
  Target: PCSK9; (-) strand; PAM type: YTN; PAM sequence: TTT
ccacccagagatggagacag

SEQ ID NO: 22375 - DNA, 20 bp, Artificial Sequence
  Description of Artificial Sequence: Synthetic oligonucleotide
  Target: PCSK9; (-) strand; PAM type: YTN; PAM sequence: CTT
tccacccagagatggagaca

SEQ ID NO: 22376 - DNA, 20 bp, Artificial Sequence
  Description of Artificial Sequence: Synthetic oligonucleotide
  Target: PCSK9; (-) strand; PAM type: YTN; PAM sequence: CTC
agggaaaacaccatctttcc

SEQ ID NO: 22377 - DNA, 20 bp, Artificial Sequence
  Description of Artificial Sequence: Synthetic oligonucleotide
  Target: PCSK9; (-) strand; PAM type: YTN; PAM sequence: TTC
tcagggaaaacaccatcttt

SEQ ID NO: 22378 - DNA, 20 bp, Artificial Sequence
  Description of Artificial Sequence: Synthetic oligonucleotide
  Target: PCSK9; (-) strand; PAM type: YTN; PAM sequence: TTT
ctcagggaaaacaccatctt

SEQ ID NO: 22379 - DNA, 20 bp, Artificial Sequence
  Description of Artificial Sequence: Synthetic oligonucleotide
  Target: PCSK9; (-) strand; PAM type: YTN; PAM sequence: TTA
gtttctcagggaaaacacca

SEQ ID NO: 22380 - DNA, 20 bp, Artificial Sequence
  Description of Artificial Sequence: Synthetic oligonucleotide
  Target: PCSK9; (-) strand; PAM type: YTN; PAM sequence: CTT
agtttctcagggaaaacacc

SEQ ID NO: 22381 - DNA, 20 bp, Artificial Sequence
  Description of Artificial Sequence: Synthetic oligonucleotide
  Target: PCSK9; (-) strand; PAM type: YTN; PAM sequence: CTG
agccttagtttctcagggaa

SEQ ID NO: 22382 - DNA, 20 bp, Artificial Sequence
  Description of Artificial Sequence: Synthetic oligonucleotide
  Target: PCSK9; (-) strand; PAM type: YTN; PAM sequence: CTC
tgagccttagtttctcaggg

SEQ ID NO: 22383 - DNA, 20 bp, Artificial Sequence
  Description of Artificial Sequence: Synthetic oligonucleotide
  Target: PCSK9; (-) strand; PAM type: YTN; PAM sequence: CTC
tctgagccttagtttctcag

SEQ ID NO: 22384 - DNA, 20 bp, Artificial Sequence
  Description of Artificial Sequence: Synthetic oligonucleotide
  Target: PCSK9; (-) strand; PAM type: YTN; PAM sequence: TTC
aacctctctgagccttagtt

SEQ ID NO: 22385 - DNA, 20 bp, Artificial Sequence
  Description of Artificial Sequence: Synthetic oligonucleotide
  Target: PCSK9; (-) strand; PAM type: YTN; PAM sequence: TTG
ggagagccattcaacctctc

SEQ ID NO: 22386 - DNA, 20 bp, Artificial Sequence
  Description of Artificial Sequence: Synthetic oligonucleotide
  Target: PCSK9; (-) strand; PAM type: YTN; PAM sequence: CTT
gggagagccattcaacctct

SEQ ID NO: 22387 - DNA, 20 bp, Artificial Sequence
  Description of Artificial Sequence: Synthetic oligonucleotide
  Target: PCSK9; (-) strand; PAM type: YTN; PAM sequence: CTG
tgtgaccttgggagagccat

SEQ ID NO: 22388 - DNA, 20 bp, Artificial Sequence
  Description of Artificial Sequence: Synthetic oligonucleotide
  Target: PCSK9; (-) strand; PAM type: YTN; PAM sequence: CTG
accagctgtgtgaccttggg

SEQ ID NO: 22389 - DNA, 20 bp, Artificial Sequence
  Description of Artificial Sequence: Synthetic oligonucleotide
  Target: PCSK9; (-) strand; PAM type: YTN; PAM sequence: CTG
cagctgaccagctgtgtgac

SEQ ID NO: 22390 - DNA, 20 bp, Artificial Sequence
  Description of Artificial Sequence: Synthetic oligonucleotide
  Target: PCSK9; (-) strand; PAM type: YTN; PAM sequence: CTC
tgcagctgaccagctgtgtg

SEQ ID NO: 22391 - DNA, 20 bp, Artificial Sequence
  Description of Artificial Sequence: Synthetic oligonucleotide
  Target: PCSK9; (-) strand; PAM type: YTN; PAM sequence: CTC
aactctgcagctgaccagct

SEQ ID NO: 22392 - DNA, 20 bp, Artificial Sequence
  Description of Artificial Sequence: Synthetic oligonucleotide
  Target: PCSK9; (-) strand; PAM type: YTN; PAM sequence: TTC
tcaactctgcagctgaccag

SEQ ID NO: 22393 - DNA, 20 bp, Artificial Sequence
  Description of Artificial Sequence: Synthetic oligonucleotide
  Target: PCSK9; (-) strand; PAM type: YTN; PAM sequence: CTG
tgttctcaactctgcagctg

SEQ ID NO: 22394 - DNA, 20 bp, Artificial Sequence
  Description of Artificial Sequence: Synthetic oligonucleotide
  Target: PCSK9; (-) strand; PAM type: YTN; PAM sequence: CTC
ctgtgttctcaactctgcag

SEQ ID NO: 22395 - DNA, 20 bp, Artificial Sequence
  Description of Artificial Sequence: Synthetic oligonucleotide
  Target: PCSK9; (-) strand; PAM type: YTN; PAM sequence: CTG
agcaccaggactcctgtgtt

SEQ ID NO: 22396 - DNA, 20 bp, Artificial Sequence
  Description of Artificial Sequence: Synthetic oligonucleotide
  Target: PCSK9; (-) strand; PAM type: YTN; PAM sequence: CTG
gcctgagcaccaggactcct

SEQ ID NO: 22397 - DNA, 20 bp, Artificial Sequence
  Description of Artificial Sequence: Synthetic oligonucleotide
  Target: PCSK9; (-) strand; PAM type: YTN; PAM sequence: CTC
aaagaaaaaaagagatgctg

SEQ ID NO: 22398 - DNA, 20 bp, Artificial Sequence
  Description of Artificial Sequence: Synthetic oligonucleotide
  Target: PCSK9; (-) strand; PAM type: YTN; PAM sequence: CTA
gaaacaactcaaagaaaaaa

SEQ ID NO: 22399 - DNA, 20 bp, Artificial Sequence
  Description of Artificial Sequence: Synthetic oligonucleotide
  Target: PCSK9; (-) strand; PAM type: YTN; PAM sequence: CTA
ggaaacctagaaacaactca

SEQ ID NO: 22400 - DNA, 20 bp, Artificial Sequence
  Description of Artificial Sequence: Synthetic oligonucleotide
  Target: PCSK9; (-) strand; PAM type: YTN; PAM sequence: CTG
aggcaagagctaggaaacct

SEQ ID NO: 22401 - DNA, 20 bp, Artificial Sequence
  Description of Artificial Sequence: Synthetic oligonucleotide
  Target: PCSK9; (-) strand; PAM type: YTN; PAM sequence: TTA
aggtctgaggcaagagctag

SEQ ID NO: 22402 - DNA, 20 bp, Artificial Sequence
  Description of Artificial Sequence: Synthetic oligonucleotide
  Target: PCSK9; (-) strand; PAM type: YTN; PAM sequence: TTT
aaggtctgaggcaagagcta

SEQ ID NO: 22403 - DNA, 20 bp, Artificial Sequence
  Description of Artificial Sequence: Synthetic oligonucleotide
  Target: PCSK9; (-) strand; PAM type: YTN; PAM sequence: CTT
taaggtctgaggcaagagct

SEQ ID NO: 22404 - DNA, 20 bp, Artificial Sequence
  Description of Artificial Sequence: Synthetic oligonucleotide
  Target: PCSK9; (-) strand; PAM type: YTN; PAM sequence: CTC
tttaaggtctgaggcaagag

SEQ ID NO: 22405 - DNA, 20 bp, Artificial Sequence
  Description of Artificial Sequence: Synthetic oligonucleotide
  Target: PCSK9; (-) strand; PAM type: YTN; PAM sequence: CTC
tctttaaggtctgaggcaag

SEQ ID NO: 22406 - DNA, 20 bp, Artificial Sequence
  Description of Artificial Sequence: Synthetic oligonucleotide
  Target: PCSK9; (-) strand; PAM type: YTN; PAM sequence: CTC
tctctttaaggtctgaggca

SEQ ID NO: 22407 - DNA, 20 bp, Artificial Sequence
  Description of Artificial Sequence: Synthetic oligonucleotide
  Target: PCSK9; (-) strand; PAM type: YTN; PAM sequence: CTC
cagtgcccatccccatcaga

SEQ ID NO: 22408 - DNA, 20 bp, Artificial Sequence
  Description of Artificial Sequence: Synthetic oligonucleotide
  Target: PCSK9; (-) strand; PAM type: YTN; PAM sequence: CTC
cgtctccagtgcccatcccc

SEQ ID NO: 22409 - DNA, 20 bp, Artificial Sequence
  Description of Artificial Sequence: Synthetic oligonucleotide
  Target: PCSK9; (-) strand; PAM type: YTN; PAM sequence: CTG
ggatgctccgtctccagtgc

SEQ ID NO: 22410 - DNA, 20 bp, Artificial Sequence
  Description of Artificial Sequence: Synthetic oligonucleotide
  Target: PCSK9; (-) strand; PAM type: YTN; PAM sequence: CTC
agatgtgaaatgctgggatg

SEQ ID NO: 22411 - DNA, 20 bp, Artificial Sequence
  Description of Artificial Sequence: Synthetic oligonucleotide
  Target: PCSK9; (-) strand; PAM type: YTN; PAM sequence: CTG
gggcagaggaaagccagctc

SEQ ID NO: 22412 - DNA, 20 bp, Artificial Sequence
  Description of Artificial Sequence: Synthetic oligonucleotide
  Target: PCSK9; (-) strand; PAM type: YTN; PAM sequence: CTG
cagcctggggcagaggaaag

SEQ ID NO: 22413 - DNA, 20 bp, Artificial Sequence
  Description of Artificial Sequence: Synthetic oligonucleotide
  Target: PCSK9; (-) strand; PAM type: YTN; PAM sequence: CTC
ccagtgggagctgcagcctg

SEQ ID NO: 22414 - DNA, 20 bp, Artificial Sequence
  Description of Artificial Sequence: Synthetic oligonucleotide
  Target: PCSK9; (-) strand; PAM type: YTN; PAM sequence: CTC
cacctcccagtgggagctgc

SEQ ID NO: 22415 - DNA, 20 bp, Artificial Sequence
  Description of Artificial Sequence: Synthetic oligonucleotide
  Target: PCSK9; (-) strand; PAM type: YTN; PAM sequence: TTG
tgggtgccaaggtcctccac

SEQ ID NO: 22416 - DNA, 20 bp, Artificial Sequence
  Description of Artificial Sequence: Synthetic oligonucleotide
  Target: PCSK9; (-) strand; PAM type: YTN; PAM sequence: CTT
gtgggtgccaaggtcctcca

SEQ ID NO: 22417 - DNA, 20 bp, Artificial Sequence
  Description of Artificial Sequence: Synthetic oligonucleotide
  Target: PCSK9; (-) strand; PAM type: YTN; PAM sequence: CTC
agcacaggcggcttgtgggt

SEQ ID NO: 22418 - DNA, 20 bp, Artificial Sequence
  Description of Artificial Sequence: Synthetic oligonucleotide
  Target: PCSK9; (-) strand; PAM type: YTN; PAM sequence: CTC
gtggcctcagcacaggcggc

SEQ ID NO: 22419 - DNA, 20 bp, Artificial Sequence
  Description of Artificial Sequence: Synthetic oligonucleotide
  Target: PCSK9; (-) strand; PAM type: YTN; PAM sequence: CTG
acctcgtggcctcagcacag

SEQ ID NO: 22420 - DNA, 20 bp, Artificial Sequence
  Description of Artificial Sequence: Synthetic oligonucleotide
  Target: PCSK9; (-) strand; PAM type: YTN; PAM sequence: TTG
ggctgacctcgtggcctcag

SEQ ID NO: 22421 - DNA, 20 bp, Artificial Sequence
  Description of Artificial Sequence: Synthetic oligonucleotide
  Target: PCSK9; (-) strand; PAM type: YTN; PAM sequence: CTG
gttgggctgacctcgtggcc

SEQ ID NO: 22422 - DNA, 20 bp, Artificial Sequence
  Description of Artificial Sequence: Synthetic oligonucleotide
  Target: PCSK9; (-) strand; PAM type: YTN; PAM sequence: CTG
tggcccacgcactggttggg

SEQ ID NO: 22423 - DNA, 20 bp, Artificial Sequence
  Description of Artificial Sequence: Synthetic oligonucleotide
  Target: PCSK9; (-) strand; PAM type: YTN; PAM sequence: CTC
cctgtggcccacgcactggt

SEQ ID NO: 22424 - DNA, 20 bp, Artificial Sequence
  Description of Artificial Sequence: Synthetic oligonucleotide
  Target: PCSK9; (-) strand; PAM type: YTN; PAM sequence: CTG
gcctccctgtggcccacgca

SEQ ID NO: 22425 - DNA, 20 bp, Artificial Sequence
  Description of Artificial Sequence: Synthetic oligonucleotide
  Target: PCSK9; (-) strand; PAM type: YTN; PAM sequence: CTG
gggcatggcagcaggaagcg

SEQ ID NO: 22426 - DNA, 20 bp, Artificial Sequence
  Description of Artificial Sequence: Synthetic oligonucleotide
  Target: PCSK9; (-) strand; PAM type: YTN; PAM sequence: TTC
cagacctggggcatggcagc

SEQ ID NO: 22427 - DNA, 20 bp, Artificial Sequence
  Description of Artificial Sequence: Synthetic oligonucleotide
  Target: PCSK9; (-) strand; PAM type: YTN; PAM sequence: TTG
cattccagacctggggcatg

SEQ ID NO: 22428 - DNA, 20 bp, Artificial Sequence
  Description of Artificial Sequence: Synthetic oligonucleotide
  Target: PCSK9; (-) strand; PAM type: YTN; PAM sequence: TTT
gcattccagacctggggcat

SEQ ID NO: 22429 - DNA, 20 bp, Artificial Sequence
  Description of Artificial Sequence: Synthetic oligonucleotide
  Target: PCSK9; (-) strand; PAM type: YTN; PAM sequence: CTT
tgcattccagacctggggca

SEQ ID NO: 22430 - DNA, 20 bp, Artificial Sequence
  Description of Artificial Sequence: Synthetic oligonucleotide
  Target: PCSK9; (-) strand; PAM type: YTN; PAM sequence: TTG
actttgcattccagacctgg

SEQ ID NO: 22431 - DNA, 20 bp, Artificial Sequence
  Description of Artificial Sequence: Synthetic oligonucleotide
  Target: PCSK9; (-) strand; PAM type: YTN; PAM sequence: CTT
gactttgcattccagacctg

SEQ ID NO: 22432 - DNA, 20 bp, Artificial Sequence
  Description of Artificial Sequence: Synthetic oligonucleotide
  Target: PCSK9; (-) strand; PAM type: YTN; PAM sequence: CTC
cttgactttgcattccagac

SEQ ID NO: 22433 - DNA, 20 bp, Artificial Sequence
  Description of Artificial Sequence: Synthetic oligonucleotide
  Target: PCSK9; (-) strand; PAM type: YTN; PAM sequence: TTC
catgctccttgactttgcat

SEQ ID NO: 22434 - DNA, 20 bp, Artificial Sequence
  Description of Artificial Sequence: Synthetic oligonucleotide
  Target: PCSK9; (-) strand; PAM type: YTN; PAM sequence: CTG
aggggccgggattccatgct

SEQ ID NO: 22435 - DNA, 20 bp, Artificial Sequence
  Description of Artificial Sequence: Synthetic oligonucleotide
  Target: PCSK9; (-) strand; PAM type: YTN; PAM sequence: CTC
ctgaggggccgggattccat

SEQ ID NO: 22436 - DNA, 20 bp, Artificial Sequence
  Description of Artificial Sequence: Synthetic oligonucleotide
  Target: PCSK9; (-) strand; PAM type: YTN; PAM sequence: CTG
ctcctgaggggccgggattc

SEQ ID NO: 22437 - DNA, 20 bp, Artificial Sequence
  Description of Artificial Sequence: Synthetic oligonucleotide
  Target: PCSK9; (-) strand; PAM type: YTN; PAM sequence: TTC
acctgctcctgaggggccgg

SEQ ID NO: 22438 - DNA, 20 bp, Artificial Sequence
  Description of Artificial Sequence: Synthetic oligonucleotide
  Target: PCSK9; (-) strand; PAM type: YTN; PAM sequence: CTT
cacctgctcctgaggggccg

SEQ ID NO: 22439 - DNA, 20 bp, Artificial Sequence
  Description of Artificial Sequence: Synthetic oligonucleotide
  Target: PCSK9; (-) strand; PAM type: YTN; PAM sequence: CTC
ttcacctgctcctgaggggc

SEQ ID NO: 22440 - DNA, 20 bp, Artificial Sequence
  Description of Artificial Sequence: Synthetic oligonucleotide
  Target: PCSK9; (-) strand; PAM type: YTN; PAM sequence: CTC
acgggcctcttcacctgctc

SEQ ID NO: 22441 - DNA, 20 bp, Artificial Sequence
  Description of Artificial Sequence: Synthetic oligonucleotide
  Target: PCSK9; (-) strand; PAM type: YTN; PAM sequence: CTG
tgcaggagagacacgcagca

SEQ ID NO: 22442 - DNA, 20 bp, Artificial Sequence
  Description of Artificial Sequence: Synthetic oligonucleotide
  Target: PCSK9; (-) strand; PAM type: YTN; PAM sequence: CTG
acacagaaaagctgtgcagg

SEQ ID NO: 22443 - DNA, 20 bp, Artificial Sequence
  Description of Artificial Sequence: Synthetic oligonucleotide
  Target: PCSK9; (-) strand; PAM type: YTN; PAM sequence: CTG
atgcatggcggtatggtggt

SEQ ID NO: 22444 - DNA, 20 bp, Artificial Sequence
  Description of Artificial Sequence: Synthetic oligonucleotide
  Target: PCSK9; (-) strand; PAM type: YTN; PAM sequence: CTG
gcaaaccgccaccctgatgc

SEQ ID NO: 22445 - DNA, 20 bp, Artificial Sequence
  Description of Artificial Sequence: Synthetic oligonucleotide
  Target: PCSK9; (-) strand; PAM type: YTN; PAM sequence: CTA
cctggcaaaccgccaccctg

SEQ ID NO: 22446 - DNA, 20 bp, Artificial Sequence
  Description of Artificial Sequence: Synthetic oligonucleotide
  Target: PCSK9; (-) strand; PAM type: YTN; PAM sequence: CTG
cccacagcatctacctggca

SEQ ID NO: 22447 - DNA, 20 bp, Artificial Sequence
  Description of Artificial Sequence: Synthetic oligonucleotide
  Target: PCSK9; (-) strand; PAM type: YTN; PAM sequence: CTG
tccacacaatggcggaagct

SEQ ID NO: 22448 - DNA, 20 bp, Artificial Sequence
  Description of Artificial Sequence: Synthetic oligonucleotide
  Target: PCSK9; (-) strand; PAM type: YTN; PAM sequence: CTG
gacaaaagcaaaaacagacc

SEQ ID NO: 22449 - DNA, 20 bp, Artificial Sequence
  Description of Artificial Sequence: Synthetic oligonucleotide
  Target: PCSK9; (-) strand; PAM type: YTN; PAM sequence: CTG
atctggacaaaagcaaaaac

SEQ ID NO: 22450 - DNA, 20 bp, Artificial Sequence
  Description of Artificial Sequence: Synthetic oligonucleotide
  Target: PCSK9; (-) strand; PAM type: YTN; PAM sequence: TTA
ctgatctggacaaaagcaaa

SEQ ID NO: 22451 - DNA, 20 bp, Artificial Sequence
  Description of Artificial Sequence: Synthetic oligonucleotide
  Target: PCSK9; (-) strand; PAM type: YTN; PAM sequence: CTT
actgatctggacaaaagcaa

SEQ ID NO: 22452 - DNA, 20 bp, Artificial Sequence
  Description of Artificial Sequence: Synthetic oligonucleotide
  Target: PCSK9; (-) strand; PAM type: YTN; PAM sequence: CTC
caagtggagtggggtaccca

SEQ ID NO: 22453 - DNA, 20 bp, Artificial Sequence
  Description of Artificial Sequence: Synthetic oligonucleotide
  Target: PCSK9; (-) strand; PAM type: YTN; PAM sequence: CTA
ctccaagtggagtggggtac

SEQ ID NO: 22454 - DNA, 20 bp, Artificial Sequence
  Description of Artificial Sequence: Synthetic oligonucleotide
  Target: PCSK9; (-) strand; PAM type: YTN; PAM sequence: TTC
tactccaagtggagtggggt

SEQ ID NO: 22455 - DNA, 20 bp, Artificial Sequence
  Description of Artificial Sequence: Synthetic oligonucleotide
  Target: PCSK9; (-) strand; PAM type: YTN; PAM sequence: TTA
tgcacattctactccaagtg

SEQ ID NO: 22456 - DNA, 20 bp, Artificial Sequence
  Description of Artificial Sequence: Synthetic oligonucleotide
  Target: PCSK9; (-) strand; PAM type: YTN; PAM sequence: TTT
atgcacattctactccaagt

SEQ ID NO: 22457 - DNA, 20 bp, Artificial Sequence
  Description of Artificial Sequence: Synthetic oligonucleotide
  Target: PCSK9; (-) strand; PAM type: YTN; PAM sequence: TTA
tgccatatttatgcacattc

SEQ ID NO: 22458 - DNA, 20 bp, Artificial Sequence
  Description of Artificial Sequence: Synthetic oligonucleotide
  Target: PCSK9; (-) strand; PAM type: YTN; PAM sequence: TTT
atgccatatttatgcacatt

SEQ ID NO: 22459 - DNA, 20 bp, Artificial Sequence
  Description of Artificial Sequence: Synthetic oligonucleotide
  Target: PCSK9; (-) strand; PAM type: YTN; PAM sequence: CTT
tatgccatatttatgcacat

SEQ ID NO: 22460 - DNA, 20 bp, Artificial Sequence
  Description of Artificial Sequence: Synthetic oligonucleotide
  Target: PCSK9; (-) strand; PAM type: YTN; PAM sequence: TTC
tttatgccatatttatgcac

SEQ ID NO: 22461 - DNA, 20 bp, Artificial Sequence
  Description of Artificial Sequence: Synthetic oligonucleotide
  Target: PCSK9; (-) strand; PAM type: YTN; PAM sequence: TTT
ctttatgccatatttatgca

SEQ ID NO: 22462 - DNA, 20 bp, Artificial Sequence
  Description of Artificial Sequence: Synthetic oligonucleotide
  Target: PCSK9; (-) strand; PAM type: YTN; PAM sequence: TTG
catttctttatgccatattt

SEQ ID NO: 22463 - DNA, 20 bp, Artificial Sequence
  Description of Artificial Sequence: Synthetic oligonucleotide
  Target: PCSK9; (-) strand; PAM type: YTN; PAM sequence: CTC
agaaaaaaatagatcaatca

SEQ ID NO: 22464 - DNA, 20 bp, Artificial Sequence
  Description of Artificial Sequence: Synthetic oligonucleotide
  Target: PCSK9; (-) strand; PAM type: YTN; PAM sequence: CTG
ggcaacacagcaagacccca

SEQ ID NO: 22465 - DNA, 20 bp, Artificial Sequence
  Description of Artificial Sequence: Synthetic oligonucleotide
  Target: PCSK9; (-) strand; PAM type: YTN; PAM sequence: TTG
agaccagcctgggcaacaca

SEQ ID NO: 22466 - DNA, 20 bp, Artificial Sequence
  Description of Artificial Sequence: Synthetic oligonucleotide
  Target: PCSK9; (-) strand; PAM type: YTN; PAM sequence: TTT
gagaccagcctgggcaacac

SEQ ID NO: 22467 - DNA, 20 bp, Artificial Sequence
  Description of Artificial Sequence: Synthetic oligonucleotide
  Target: PCSK9; (-) strand; PAM type: YTN; PAM sequence: TTG
agcccaggaatttgagacca

SEQ ID NO: 22468 - DNA, 20 bp, Artificial Sequence
  Description of Artificial Sequence: Synthetic oligonucleotide
  Target: PCSK9; (-) strand; PAM type: YTN; PAM sequence: CTT
gagcccaggaatttgagacc

SEQ ID NO: 22469 - DNA, 20 bp, Artificial Sequence
  Description of Artificial Sequence: Synthetic oligonucleotide
  Target: PCSK9; (-) strand; PAM type: YTN; PAM sequence: TTG
cttgagcccaggaatttgag

SEQ ID NO: 22470 - DNA, 20 bp, Artificial Sequence
  Description of Artificial Sequence: Synthetic oligonucleotide
  Target: PCSK9; (-) strand; PAM type: YTN; PAM sequence: CTG
agaccagaggattgcttgag

SEQ ID NO: 22471 - DNA, 20 bp, Artificial Sequence
  Description of Artificial Sequence: Synthetic oligonucleotide
  Target: PCSK9; (-) strand; PAM type: YTN; PAM sequence: TTG
gggaggctgagaccagagga

SEQ ID NO: 22472 - DNA, 20 bp, Artificial Sequence
  Description of Artificial Sequence: Synthetic oligonucleotide
  Target: PCSK9; (-) strand; PAM type: YTN; PAM sequence: CTT
ggggaggctgagaccagagg

SEQ ID NO: 22473 - DNA, 20 bp, Artificial Sequence
  Description of Artificial Sequence: Synthetic oligonucleotide
  Target: PCSK9; (-) strand; PAM type: YTN; PAM sequence: CTA
taatcccaacacttggggag

SEQ ID NO: 22474 - DNA, 20 bp, Artificial Sequence
  Description of Artificial Sequence: Synthetic oligonucleotide
  Target: PCSK9; (-) strand; PAM type: YTN; PAM sequence: CTC
atgcctataatcccaacact

SEQ ID NO: 22475 - DNA, 20 bp, Artificial Sequence
  Description of Artificial Sequence: Synthetic oligonucleotide
  Target: PCSK9; (-) strand; PAM type: YTN; PAM sequence: TTA
aatagatcagagaggccagg

SEQ ID NO: 22476 - DNA, 20 bp, Artificial Sequence
  Description of Artificial Sequence: Synthetic oligonucleotide
  Target: PCSK9; (-) strand; PAM type: YTN; PAM sequence: TTG
ttaaatagatcagagaggcc

SEQ ID NO: 22477 - DNA, 20 bp, Artificial Sequence
  Description of Artificial Sequence: Synthetic oligonucleotide
  Target: PCSK9; (-) strand; PAM type: YTN; PAM sequence: TTT
gttaaatagatcagagaggc

SEQ ID NO: 22478 - DNA, 20 bp, Artificial Sequence
  Description of Artificial Sequence: Synthetic oligonucleotide
  Target: PCSK9; (-) strand; PAM type: YTN; PAM sequence: CTC
ccagcaggtttgttaaatag

SEQ ID NO: 22479 - DNA, 20 bp, Artificial Sequence
  Description of Artificial Sequence: Synthetic oligonucleotide
  Target: PCSK9; (-) strand; PAM type: YTN; PAM sequence: CTG
agaccctcccagcaggtttg

SEQ ID NO: 22480 - DNA, 20 bp, Artificial Sequence
  Description of Artificial Sequence: Synthetic oligonucleotide
  Target: PCSK9; (-) strand; PAM type: YTN; PAM sequence: CTG
accctgagaccctcccagca

SEQ ID NO: 22481 - DNA, 20 bp, Artificial Sequence
  Description of Artificial Sequence: Synthetic oligonucleotide
  Target: PCSK9; (-) strand; PAM type: YTN; PAM sequence: CTC
ctgaccctgagaccctccca

SEQ ID NO: 22482 - DNA, 20 bp, Artificial Sequence
  Description of Artificial Sequence: Synthetic oligonucleotide
  Target: PCSK9; (-) strand; PAM type: YTN; PAM sequence: CTG
ctcctgaccctgagaccctc

SEQ ID NO: 22483 - DNA, 20 bp, Artificial Sequence
  Description of Artificial Sequence: Synthetic oligonucleotide
  Target: PCSK9; (-) strand; PAM type: YTN; PAM sequence: CTC
agagcccagtgctgctcctg

SEQ ID NO: 22484 - DNA, 20 bp, Artificial Sequence
  Description of Artificial Sequence: Synthetic oligonucleotide
  Target: PCSK9; (-) strand; PAM type: YTN; PAM sequence: CTG
tgtcctcagagcccagtgct

SEQ ID NO: 22485 - DNA, 20 bp, Artificial Sequence
  Description of Artificial Sequence: Synthetic oligonucleotide
  Target: PCSK9; (-) strand; PAM type: YTN; PAM sequence: CTC
tgtgtcctcagagcccagtg

SEQ ID NO: 22486 - DNA, 20 bp, Artificial Sequence
  Description of Artificial Sequence: Synthetic oligonucleotide
  Target: PCSK9; (-) strand; PAM type: YTN; PAM sequence: CTG
agtgagctctgtgtcctcag

SEQ ID NO: 22487 - DNA, 20 bp, Artificial Sequence
  Description of Artificial Sequence: Synthetic oligonucleotide
  Target: PCSK9; (-) strand; PAM type: YTN; PAM sequence: CTG
ggtcacggctgagtgagctc

SEQ ID NO: 22488 - DNA, 20 bp, Artificial Sequence
  Description of Artificial Sequence: Synthetic oligonucleotide
  Target: PCSK9; (-) strand; PAM type: YTN; PAM sequence: CTC
tgggtcacggctgagtgagc

SEQ ID NO: 22489 - DNA, 20 bp, Artificial Sequence
  Description of Artificial Sequence: Synthetic oligonucleotide
  Target: PCSK9; (-) strand; PAM type: YTN; PAM sequence: CTC
aggcaccccctctgggtcac

SEQ ID NO: 22490 - DNA, 20 bp, Artificial Sequence
  Description of Artificial Sequence: Synthetic oligonucleotide
  Target: PCSK9; (-) strand; PAM type: YTN; PAM sequence: TTC
agcatgcagctcaggcaccc

SEQ ID NO: 22491 - DNA, 20 bp, Artificial Sequence
  Description of Artificial Sequence: Synthetic oligonucleotide
  Target: PCSK9; (-) strand; PAM type: YTN; PAM sequence: CTT
cagcatgcagctcaggcacc

SEQ ID NO: 22492 - DNA, 20 bp, Artificial Sequence
  Description of Artificial Sequence: Synthetic oligonucleotide
  Target: PCSK9; (-) strand; PAM type: YTN; PAM sequence: CTA
acaaccttcagcatgcagct

SEQ ID NO: 22493 - DNA, 20 bp, Artificial Sequence
  Description of Artificial Sequence: Synthetic oligonucleotide
  Target: PCSK9; (-) strand; PAM type: YTN; PAM sequence: CTG
gtcatgctaacaaccttcag

SEQ ID NO: 22494 - DNA, 20 bp, Artificial Sequence
  Description of Artificial Sequence: Synthetic oligonucleotide
  Target: PCSK9; (-) strand; PAM type: YTN; PAM sequence: TTG
ctggtcatgctaacaacctt

SEQ ID NO: 22495 - DNA, 20 bp, Artificial Sequence
  Description of Artificial Sequence: Synthetic oligonucleotide
  Target: PCSK9; (-) strand; PAM type: YTN; PAM sequence: CTT
gctggtcatgctaacaacct

SEQ ID NO: 22496 - DNA, 20 bp, Artificial Sequence
  Description of Artificial Sequence: Synthetic oligonucleotide
  Target: PCSK9; (-) strand; PAM type: YTN; PAM sequence: TTG
ccttgctggtcatgctaaca

SEQ ID NO: 22497 - DNA, 20 bp, Artificial Sequence
  Description of Artificial Sequence: Synthetic oligonucleotide
  Target: PCSK9; (-) strand; PAM type: YTN; PAM sequence: CTT
gccttgctggtcatgctaac

SEQ ID NO: 22498 - DNA, 20 bp, Artificial Sequence
  Description of Artificial Sequence: Synthetic oligonucleotide
  Target: PCSK9; (-) strand; PAM type: YTN; PAM sequence: TTC
ttgccttgctggtcatgcta

SEQ ID NO: 22499 - DNA, 20 bp, Artificial Sequence
  Description of Artificial Sequence: Synthetic oligonucleotide
  Target: PCSK9; (-) strand; PAM type: YTN; PAM sequence: TTT
cttgccttgctggtcatgct

SEQ ID NO: 22500 - DNA, 20 bp, Artificial Sequence
  Description of Artificial Sequence: Synthetic oligonucleotide
  Target: PCSK9; (-) strand; PAM type: YTN; PAM sequence: TTT
tcttgccttgctggtcatgc

SEQ ID NO: 22501 - DNA, 20 bp, Artificial Sequence
  Description of Artificial Sequence: Synthetic oligonucleotide
  Target: PCSK9; (-) strand; PAM type: YTN; PAM sequence: CTT
ttcttgccttgctggtcatg

SEQ ID NO: 22502 - DNA, 20 bp, Artificial Sequence
  Description of Artificial Sequence: Synthetic oligonucleotide
  Target: PCSK9; (-) strand; PAM type: YTN; PAM sequence: CTC
ggcagggccttttcttgcct

SEQ ID NO: 22503 - DNA, 20 bp, Artificial Sequence
  Description of Artificial Sequence: Synthetic oligonucleotide
  Target: PCSK9; (-) strand; PAM type: YTN; PAM sequence: CTA
atctcggcagggccttttct

SEQ ID NO: 22504 - DNA, 20 bp, Artificial Sequence
  Description of Artificial Sequence: Synthetic oligonucleotide
  Target: PCSK9; (-) strand; PAM type: YTN; PAM sequence: TTG
ctaatctcggcagggccttt

SEQ ID NO: 22505 - DNA, 20 bp, Artificial Sequence
  Description of Artificial Sequence: Synthetic oligonucleotide
  Target: PCSK9; (-) strand; PAM type: YTN; PAM sequence: CTT
gctaatctcggcagggcctt

SEQ ID NO: 22506 - DNA, 20 bp, Artificial Sequence
  Description of Artificial Sequence: Synthetic oligonucleotide
  Target: PCSK9; (-) strand; PAM type: YTN; PAM sequence: TTG
gcacatgccttgctaatctc

SEQ ID NO: 22507 - DNA, 20 bp, Artificial Sequence
  Description of Artificial Sequence: Synthetic oligonucleotide
  Target: PCSK9; (-) strand; PAM type: YTN; PAM sequence: CTT
ggcacatgccttgctaatct

SEQ ID NO: 22508 - DNA, 20 bp, Artificial Sequence
  Description of Artificial Sequence: Synthetic oligonucleotide
  Target: PCSK9; (-) strand; PAM type: YTN; PAM sequence: TTC
cagggcttggcacatgcctt

SEQ ID NO: 22509 - DNA, 20 bp, Artificial Sequence
  Description of Artificial Sequence: Synthetic oligonucleotide
  Target: PCSK9; (-) strand; PAM type: YTN; PAM sequence: CTG
tcacattccagggcttggca

SEQ ID NO: 22510 - DNA, 20 bp, Artificial Sequence
  Description of Artificial Sequence: Synthetic oligonucleotide
  Target: PCSK9; (-) strand; PAM type: YTN; PAM sequence: CTA
gaaggcccggctgtcacatt

SEQ ID NO: 22511 - DNA, 20 bp, Artificial Sequence
  Description of Artificial Sequence: Synthetic oligonucleotide
  Target: PCSK9; (-) strand; PAM type: YTN; PAM sequence: TTC
tagaaggcccggctgtcaca

SEQ ID NO: 22512 - DNA, 20 bp, Artificial Sequence
  Description of Artificial Sequence: Synthetic oligonucleotide
  Target: PCSK9; (-) strand; PAM type: YTN; PAM sequence: TTT
ctagaaggcccggctgtcac

SEQ ID NO: 22513 - DNA, 20 bp, Artificial Sequence
  Description of Artificial Sequence: Synthetic oligonucleotide
  Target: PCSK9; (-) strand; PAM type: YTN; PAM sequence: CTC
aggtttctagaaggcccggc

SEQ ID NO: 22514 - DNA, 20 bp, Artificial Sequence
  Description of Artificial Sequence: Synthetic oligonucleotide
  Target: PCSK9; (-) strand; PAM type: YTN; PAM sequence: TTA
tacactcaggtttctagaag

SEQ ID NO: 22515 - DNA, 20 bp, Artificial Sequence
  Description of Artificial Sequence: Synthetic oligonucleotide
  Target: PCSK9; (-) strand; PAM type: YTN; PAM sequence: TTA
aggagagttatacactcagg

SEQ ID NO: 22516 - DNA, 20 bp, Artificial Sequence
  Description of Artificial Sequence: Synthetic oligonucleotide
  Target: PCSK9; (-) strand; PAM type: YTN; PAM sequence: TTT
aaggagagttatacactcag

SEQ ID NO: 22517 - DNA, 20 bp, Artificial Sequence
  Description of Artificial Sequence: Synthetic oligonucleotide
  Target: PCSK9; (-) strand; PAM type: YTN; PAM sequence: TTT
taaggagagttatacactca

SEQ ID NO: 22518 - DNA, 20 bp, Artificial Sequence
  Description of Artificial Sequence: Synthetic oligonucleotide
  Target: PCSK9; (-) strand; PAM type: YTN; PAM sequence: CTT
ttaaggagagttatacactc

SEQ ID NO: 22519 - DNA, 20 bp, Artificial Sequence
  Description of Artificial Sequence: Synthetic oligonucleotide
  Target: PCSK9; (-) strand; PAM type: YTN; PAM sequence: CTG
gcttttaaggagagttatac

SEQ ID NO: 22520 - DNA, 20 bp, Artificial Sequence
  Description of Artificial Sequence: Synthetic oligonucleotide
  Target: PCSK9; (-) strand; PAM type: YTN; PAM sequence: CTA
ctggcttttaaggagagtta

SEQ ID NO: 22521 - DNA, 20 bp, Artificial Sequence
  Description of Artificial Sequence: Synthetic oligonucleotide
  Target: PCSK9; (-) strand; PAM type: YTN; PAM sequence: CTC
ctactggcttttaaggagag

SEQ ID NO: 22522 - DNA, 20 bp, Artificial Sequence
  Description of Artificial Sequence: Synthetic oligonucleotide
  Target: PCSK9; (-) strand; PAM type: YTN; PAM sequence: TTG
aggagctcctactggctttt

SEQ ID NO: 22523 - DNA, 20 bp, Artificial Sequence
  Description of Artificial Sequence: Synthetic oligonucleotide
  Target: PCSK9; (-) strand; PAM type: YTN; PAM sequence: TTT
gaggagctcctactggcttt

SEQ ID NO: 22524 - DNA, 20 bp, Artificial Sequence
  Description of Artificial Sequence: Synthetic oligonucleotide
  Target: PCSK9; (-) strand; PAM type: YTN; PAM sequence: TTT
tgaggagctcctactggctt

SEQ ID NO: 22525 - DNA, 20 bp, Artificial Sequence
  Description of Artificial Sequence: Synthetic oligonucleotide
  Target: PCSK9; (-) strand; PAM type: YTN; PAM sequence: CTT
ttgaggagctcctactggct

SEQ ID NO: 22526 - DNA, 20 bp, Artificial Sequence
  Description of Artificial Sequence: Synthetic oligonucleotide
  Target: PCSK9; (-) strand; PAM type: YTN; PAM sequence: CTG
ccttttgaggagctcctact

SEQ ID NO: 22527 - DNA, 20 bp, Artificial Sequence
  Description of Artificial Sequence: Synthetic oligonucleotide
  Target: PCSK9; (-) strand; PAM type: YTN; PAM sequence: TTA
gggctgccttttgaggagct

SEQ ID NO: 22528 - DNA, 20 bp, Artificial Sequence
  Description of Artificial Sequence: Synthetic oligonucleotide
  Target: PCSK9; (-) strand; PAM type: YTN; PAM sequence: CTT
agggctgccttttgaggagc

SEQ ID NO: 22529 - DNA, 20 bp, Artificial Sequence
  Description of Artificial Sequence: Synthetic oligonucleotide
  Target: PCSK9; (-) strand; PAM type: YTN; PAM sequence: CTC
cttagggctgccttttgagg

SEQ ID NO: 22530 - DNA, 20 bp, Artificial Sequence
  Description of Artificial Sequence: Synthetic oligonucleotide
  Target: PCSK9; (-) strand; PAM type: YTN; PAM sequence: TTA
agagtggactccttagggct

SEQ ID NO: 22531 - DNA, 20 bp, Artificial Sequence
  Description of Artificial Sequence: Synthetic oligonucleotide
  Target: PCSK9; (-) strand; PAM type: YTN; PAM sequence: TTT
aagagtggactccttagggc

SEQ ID NO: 22532 - DNA, 20 bp, Artificial Sequence
  Description of Artificial Sequence: Synthetic oligonucleotide
  Target: PCSK9; (-) strand; PAM type: YTN; PAM sequence: TTC
atttaagagtggactcctta

SEQ ID NO: 22533 - DNA, 20 bp, Artificial Sequence
  Description of Artificial Sequence: Synthetic oligonucleotide
  Target: PCSK9; (-) strand; PAM type: YTN; PAM sequence: CTG
agttcatttaagagtggact

SEQ ID NO: 22534 - DNA, 20 bp, Artificial Sequence
  Description of Artificial Sequence: Synthetic oligonucleotide
  Target: PCSK9; (-) strand; PAM type: YTN; PAM sequence: CTC
tgagttcatttaagagtgga

SEQ ID NO: 22535 - DNA, 20 bp, Artificial Sequence
  Description of Artificial Sequence: Synthetic oligonucleotide
  Target: PCSK9; (-) strand; PAM type: YTN; PAM sequence: CTG
actctgagttcatttaagag

SEQ ID NO: 22536 - DNA, 20 bp, Artificial Sequence
  Description of Artificial Sequence: Synthetic oligonucleotide
  Target: PCSK9; (-) strand; PAM type: YTN; PAM sequence: TTA
aaactgactctgagttcatt

SEQ ID NO: 22537 - DNA, 20 bp, Artificial Sequence
  Description of Artificial Sequence: Synthetic oligonucleotide
  Target: PCSK9; (-) strand; PAM type: YTN; PAM sequence: TTT
aaaactgactctgagttcat

SEQ ID NO: 22538 - DNA, 20 bp, Artificial Sequence
  Description of Artificial Sequence: Synthetic oligonucleotide
  Target: PCSK9; (-) strand; PAM type: YTN; PAM sequence: TTT
taaaactgactctgagttca

SEQ ID NO: 22539 - DNA, 20 bp, Artificial Sequence
  Description of Artificial Sequence: Synthetic oligonucleotide
  Target: PCSK9; (-) strand; PAM type: YTN; PAM sequence: TTG
cattttaaaactgactctga

SEQ ID NO: 22540 - DNA, 20 bp, Artificial Sequence
  Description of Artificial Sequence: Synthetic oligonucleotide
  Target: PCSK9; (-) strand; PAM type: YTN; PAM sequence: CTT
gcattttaaaactgactctg

SEQ ID NO: 22541 - DNA, 20 bp, Artificial Sequence
  Description of Artificial Sequence: Synthetic oligonucleotide
  Target: PCSK9; (-) strand; PAM type: YTN; PAM sequence: CTC
gaggaatgcaccatccagac

SEQ ID NO: 22542 - DNA, 20 bp, Artificial Sequence
  Description of Artificial Sequence: Synthetic oligonucleotide
  Target: PCSK9; (-) strand; PAM type: YTN; PAM sequence: CTC
tcgaggaatgcaccatccag

SEQ ID NO: 22543 - DNA, 20 bp, Artificial Sequence
  Description of Artificial Sequence: Synthetic oligonucleotide
  Target: PCSK9; (-) strand; PAM type: YTN; PAM sequence: TTG
ctctcgaggaatgcaccatc

SEQ ID NO: 22544 - DNA, 20 bp, Artificial Sequence
  Description of Artificial Sequence: Synthetic oligonucleotide
  Target: PCSK9; (-) strand; PAM type: YTN; PAM sequence: TTT
gctctcgaggaatgcaccat

SEQ ID NO: 22545 - DNA, 20 bp, Artificial Sequence
  Description of Artificial Sequence: Synthetic oligonucleotide
  Target: PCSK9; (-) strand; PAM type: YTN; PAM sequence: TTT
tgctctcgaggaatgcacca

SEQ ID NO: 22546 - DNA, 20 bp, Artificial Sequence
  Description of Artificial Sequence: Synthetic oligonucleotide
  Target: PCSK9; (-) strand; PAM type: YTN; PAM sequence: CTT
ttgctctcgaggaatgcacc

SEQ ID NO: 22547 - DNA, 20 bp, Artificial Sequence
  Description of Artificial Sequence: Synthetic oligonucleotide
  Target: PCSK9; (-) strand; PAM type: YTN; PAM sequence: CTG
tcttttgctctcgaggaatg

SEQ ID NO: 22548 - DNA, 20 bp, Artificial Sequence
  Description of Artificial Sequence: Synthetic oligonucleotide
  Target: PCSK9; (-) strand; PAM type: YTN; PAM sequence: CTC
agtgtacccagggcaagtgg

SEQ ID NO: 22549 - DNA, 20 bp, Artificial Sequence
  Description of Artificial Sequence: Synthetic oligonucleotide
  Target: PCSK9; (-) strand; PAM type: YTN; PAM sequence: CTA
gcagccctcagtgtacccag

SEQ ID NO: 22550 - DNA, 20 bp, Artificial Sequence
  Description of Artificial Sequence: Synthetic oligonucleotide
  Target: PCSK9; (-) strand; PAM type: YTN; PAM sequence: CTG
gaacctagcagccctcagtg

SEQ ID NO: 22551 - DNA, 20 bp, Artificial Sequence
  Description of Artificial Sequence: Synthetic oligonucleotide
  Target: PCSK9; (-) strand; PAM type: YTN; PAM sequence: CTC
cccagtgccaggaagagcac

SEQ ID NO: 22552 - DNA, 20 bp, Artificial Sequence
  Description of Artificial Sequence: Synthetic oligonucleotide
  Target: PCSK9; (-) strand; PAM type: YTN; PAM sequence: CTG
tatccctccccagtgccagg

SEQ ID NO: 22553 - DNA, 20 bp, Artificial Sequence
  Description of Artificial Sequence: Synthetic oligonucleotide
  Target: PCSK9; (-) strand; PAM type: YTN; PAM sequence: TTG
ggcctgtatccctccccagt

SEQ ID NO: 22554 - DNA, 20 bp, Artificial Sequence
  Description of Artificial Sequence: Synthetic oligonucleotide
  Target: PCSK9; (-) strand; PAM type: YTN; PAM sequence: CTT
gggcctgtatccctccccag

SEQ ID NO: 22555 - DNA, 20 bp, Artificial Sequence
  Description of Artificial Sequence: Synthetic oligonucleotide
  Target: PCSK9; (-) strand; PAM type: YTN; PAM sequence: CTC
ttgggcctgtatccctcccc

SEQ ID NO: 22556 - DNA, 20 bp, Artificial Sequence
  Description of Artificial Sequence: Synthetic oligonucleotide
  Target: PCSK9; (-) strand; PAM type: YTN; PAM sequence: CTC
caggagggagaacagcatgt

SEQ ID NO: 22557 - DNA, 20 bp, Artificial Sequence
  Description of Artificial Sequence: Synthetic oligonucleotide
  Target: PCSK9; (-) strand; PAM type: YTN; PAM sequence: CTA
aaatagatgctccaggaggg

SEQ ID NO: 22558 - DNA, 20 bp, Artificial Sequence
  Description of Artificial Sequence: Synthetic oligonucleotide
  Target: PCSK9; (-) strand; PAM type: YTN; PAM sequence: CTC
cactaaaatagatgctccag

SEQ ID NO: 22559 - DNA, 20 bp, Artificial Sequence
  Description of Artificial Sequence: Synthetic oligonucleotide
  Target: PCSK9; (-) strand; PAM type: YTN; PAM sequence: TTC
ctccactaaaatagatgctc

SEQ ID NO: 22560 - DNA, 20 bp, Artificial Sequence
  Description of Artificial Sequence: Synthetic oligonucleotide
  Target: PCSK9; (-) strand; PAM type: YTN; PAM sequence: CTT
cctccactaaaatagatgct

SEQ ID NO: 22561 - DNA, 20 bp, Artificial Sequence
  Description of Artificial Sequence: Synthetic oligonucleotide
  Target: PCSK9; (-) strand; PAM type: YTN; PAM sequence: CTG
tcttcctccactaaaataga

SEQ ID NO: 22562 - DNA, 20 bp, Artificial Sequence
  Description of Artificial Sequence: Synthetic oligonucleotide
  Target: PCSK9; (-) strand; PAM type: YTN; PAM sequence: TTC
tgtcttcctccactaaaata

SEQ ID NO: 22563 - DNA, 20 bp, Artificial Sequence
  Description of Artificial Sequence: Synthetic oligonucleotide
  Target: PCSK9; (-) strand; PAM type: YTN; PAM sequence: TTT
ctgtcttcctccactaaaat

SEQ ID NO: 22564 - DNA, 20 bp, Artificial Sequence
  Description of Artificial Sequence: Synthetic oligonucleotide
  Target: PCSK9; (-) strand; PAM type: YTN; PAM sequence: TTT
tctgtcttcctccactaaaa

SEQ ID NO: 22565 - DNA, 20 bp, Artificial Sequence
  Description of Artificial Sequence: Synthetic oligonucleotide
  Target: PCSK9; (-) strand; PAM type: YTN; PAM sequence: TTG
ttttctgtcttcctccacta

SEQ ID NO: 22566 - DNA, 20 bp, Artificial Sequence
  Description of Artificial Sequence: Synthetic oligonucleotide
  Target: PCSK9; (-) strand; PAM type: YTN; PAM sequence: TTT
gttttctgtcttcctccact

SEQ ID NO: 22567 - DNA, 20 bp, Artificial Sequence
  Description of Artificial Sequence: Synthetic oligonucleotide
  Target: PCSK9; (-) strand; PAM type: YTN; PAM sequence: TTA
atggtttgttttctgtcttc

SEQ ID NO: 22568 - DNA, 20 bp, Artificial Sequence
  Description of Artificial Sequence: Synthetic oligonucleotide
  Target: PCSK9; (-) strand; PAM type: YTN; PAM sequence: CTA
tattaatggtttgttttctg

SEQ ID NO: 22569 - DNA, 20 bp, Artificial Sequence
  Description of Artificial Sequence: Synthetic oligonucleotide
  Target: PCSK9; (-) strand; PAM type: YTN; PAM sequence: CTC
tatattaatggtttgttttc

SEQ ID NO: 22570 - DNA, 20 bp, Artificial Sequence
  Description of Artificial Sequence: Synthetic oligonucleotide
  Target: PCSK9; (-) strand; PAM type: YTN; PAM sequence: TTC
agtactctatattaatggtt

SEQ ID NO: 22571 - DNA, 20 bp, Artificial Sequence
  Description of Artificial Sequence: Synthetic oligonucleotide
  Target: PCSK9; (-) strand; PAM type: YTN; PAM sequence: TTT
cagtactctatattaatggt

SEQ ID NO: 22572 - DNA, 20 bp, Artificial Sequence
  Description of Artificial Sequence: Synthetic oligonucleotide
  Target: PCSK9; (-) strand; PAM type: YTN; PAM sequence: TTT
tcagtactctatattaatgg

SEQ ID NO: 22573 - DNA, 20 bp, Artificial Sequence
  Description of Artificial Sequence: Synthetic oligonucleotide
  Target: PCSK9; (-) strand; PAM type: YTN; PAM sequence: CTT
ttcagtactctatattaatg

SEQ ID NO: 22574 - DNA, 20 bp, Artificial Sequence
  Description of Artificial Sequence: Synthetic oligonucleotide
  Target: PCSK9; (-) strand; PAM type: YTN; PAM sequence: CTC
catcgcatcttttcagtact

SEQ ID NO: 22575 - DNA, 20 bp, Artificial Sequence
  Description of Artificial Sequence: Synthetic oligonucleotide
  Target: PCSK9; (-) strand; PAM type: YTN; PAM sequence: TTC
tccatcgcatcttttcagta

SEQ ID NO: 22576 - DNA, 20 bp, Artificial Sequence
  Description of Artificial Sequence: Synthetic oligonucleotide
  Target: PCSK9; (-) strand; PAM type: YTN; PAM sequence: TTT
ctccatcgcatcttttcagt

SEQ ID NO: 22577 - DNA, 20 bp, Artificial Sequence
  Description of Artificial Sequence: Synthetic oligonucleotide
  Target: PCSK9; (-) strand; PAM type: YTN; PAM sequence: TTT
tctccatcgcatcttttcag

SEQ ID NO: 22578 - DNA, 20 bp, Artificial Sequence
  Description of Artificial Sequence: Synthetic oligonucleotide
  Target: PCSK9; (-) strand; PAM type: YTN; PAM sequence: CTA
tagttttctccatcgcatct

SEQ ID NO: 22579 - DNA, 20 bp, Artificial Sequence
  Description of Artificial Sequence: Synthetic oligonucleotide
  Target: PCSK9; (-) strand; PAM type: YTN; PAM sequence: TTG
ctatagttttctccatcgca

SEQ ID NO: 22580 - DNA, 20 bp, Artificial Sequence
  Description of Artificial Sequence: Synthetic oligonucleotide
  Target: PCSK9; (-) strand; PAM type: YTN; PAM sequence: CTT
gctatagttttctccatcgc

SEQ ID NO: 22581 - DNA, 20 bp, Artificial Sequence
  Description of Artificial Sequence: Synthetic oligonucleotide
  Target: PCSK9; (-) strand; PAM type: YTN; PAM sequence: TTC
cttgctatagttttctccat

SEQ ID NO: 22582 - DNA, 20 bp, Artificial Sequence
  Description of Artificial Sequence: Synthetic oligonucleotide
  Target: PCSK9; (-) strand; PAM type: YTN; PAM sequence: CTT
ccttgctatagttttctcca

SEQ ID NO: 22583 - DNA, 20 bp, Artificial Sequence
  Description of Artificial Sequence: Synthetic oligonucleotide
  Target: PCSK9; (-) strand; PAM type: YTN; PAM sequence: TTC
ccttccttgctatagttttc

SEQ ID NO: 22584 - DNA, 20 bp, Artificial Sequence
  Description of Artificial Sequence: Synthetic oligonucleotide
  Target: PCSK9; (-) strand; PAM type: YTN; PAM sequence: CTC
ccaccccattcccttccttg

SEQ ID NO: 22585 - DNA, 20 bp, Artificial Sequence
  Description of Artificial Sequence: Synthetic oligonucleotide
  Target: PCSK9; (-) strand; PAM type: YTN; PAM sequence: CTC
tcccaccccattcccttcct

SEQ ID NO: 22586 - DNA, 20 bp, Artificial Sequence
  Description of Artificial Sequence: Synthetic oligonucleotide
  Target: PCSK9; (-) strand; PAM type: YTN; PAM sequence: CTC
tctcccaccccattcccttc

SEQ ID NO: 22587 - DNA, 20 bp, Artificial Sequence
  Description of Artificial Sequence: Synthetic oligonucleotide
  Target: PCSK9; (-) strand; PAM type: YTN; PAM sequence: CTG
acctctctcccaccccattc

SEQ ID NO: 22588 - DNA, 20 bp, Artificial Sequence
  Description of Artificial Sequence: Synthetic oligonucleotide
  Target: PCSK9; (-) strand; PAM type: YTN; PAM sequence: CTC
ctgacctctctcccacccca

SEQ ID NO: 22589 - DNA, 20 bp, Artificial Sequence
  Description of Artificial Sequence: Synthetic oligonucleotide
  Target: PCSK9; (-) strand; PAM type: YTN; PAM sequence: CTC
tcctgacctctctcccaccc

SEQ ID NO: 22590 - DNA, 20 bp, Artificial Sequence
  Description of Artificial Sequence: Synthetic oligonucleotide
  Target: PCSK9; (-) strand; PAM type: YTN; PAM sequence: TTG
tcagcgagacctctcctgac

SEQ ID NO: 22591 - DNA, 20 bp, Artificial Sequence
  Description of Artificial Sequence: Synthetic oligonucleotide
  Target: PCSK9; (-) strand; PAM type: YTN; PAM sequence: CTT
gtcagcgagacctctcctga

SEQ ID NO: 22592 - DNA, 20 bp, Artificial Sequence
  Description of Artificial Sequence: Synthetic oligonucleotide
  Target: PCSK9; (-) strand; PAM type: YTN; PAM sequence: TTC
gtccaccttgtcagcgagac

SEQ ID NO: 22593 - DNA, 20 bp, Artificial Sequence
  Description of Artificial Sequence: Synthetic oligonucleotide
  Target: PCSK9; (-) strand; PAM type: YTN; PAM sequence: TTT
cgtccaccttgtcagcgaga

SEQ ID NO: 22594 - DNA, 20 bp, Artificial Sequence
  Description of Artificial Sequence: Synthetic oligonucleotide
  Target: PCSK9; (-) strand; PAM type: YTN; PAM sequence: CTG
tttcgtccaccttgtcagcg

SEQ ID NO: 22595 - DNA, 20 bp, Artificial Sequence
  Description of Artificial Sequence: Synthetic oligonucleotide
  Target: PCSK9; (-) strand; PAM type: YTN; PAM sequence: CTC
atggcctgtttcgtccacct

SEQ ID NO: 22596 - DNA, 20 bp, Artificial Sequence
  Description of Artificial Sequence: Synthetic oligonucleotide
  Target: PCSK9; (-) strand; PAM type: YTN; PAM sequence: CTG
cctcatggcctgtttcgtcc

SEQ ID NO: 22597 - DNA, 20 bp, Artificial Sequence
  Description of Artificial Sequence: Synthetic oligonucleotide
  Target: PCSK9; (-) strand; PAM type: YTN; PAM sequence: CTC
tgcctcatggcctgtttcgt

SEQ ID NO: 22598 - DNA, 20 bp, Artificial Sequence
  Description of Artificial Sequence: Synthetic oligonucleotide
  Target: PCSK9; (-) strand; PAM type: YTN; PAM sequence: TTC
tctgcctcatggcctgtttc

SEQ ID NO: 22599 - DNA, 20 bp, Artificial Sequence
  Description of Artificial Sequence: Synthetic oligonucleotide
  Target: PCSK9; (-) strand; PAM type: YTN; PAM sequence: CTG
gaacatgttctctgcctcat

SEQ ID NO: 22600 - DNA, 20 bp, Artificial Sequence
  Description of Artificial Sequence: Synthetic oligonucleotide
  Target: PCSK9; (-) strand; PAM type: YTN; PAM sequence: TTG
cctggaacatgttctctgcc

SEQ ID NO: 22601 - DNA, 20 bp, Artificial Sequence
  Description of Artificial Sequence: Synthetic oligonucleotide
  Target: PCSK9; (-) strand; PAM type: YTN; PAM sequence: TTT
gcctggaacatgttctctgc

SEQ ID NO: 22602 - DNA, 20 bp, Artificial Sequence
  Description of Artificial Sequence: Synthetic oligonucleotide
  Target: PCSK9; (-) strand; PAM type: YTN; PAM sequence: CTT
tgcctggaacatgttctctg

SEQ ID NO: 22603 - DNA, 20 bp, Artificial Sequence
  Description of Artificial Sequence: Synthetic oligonucleotide
  Target: PCSK9; (-) strand; PAM type: YTN; PAM sequence: TTG
ctttgcctggaacatgttct

SEQ ID NO: 22604 - DNA, 20 bp, Artificial Sequence
  Description of Artificial Sequence: Synthetic oligonucleotide
  Target: PCSK9; (-) strand; PAM type: YTN; PAM sequence: TTT
gctttgcctggaacatgttc

SEQ ID NO: 22605 - DNA, 20 bp, Artificial Sequence
  Description of Artificial Sequence: Synthetic oligonucleotide
  Target: PCSK9; (-) strand; PAM type: YTN; PAM sequence: CTT
tgctttgcctggaacatgtt

SEQ ID NO: 22606 - DNA, 20 bp, Artificial Sequence
  Description of Artificial Sequence: Synthetic oligonucleotide
  Target: PCSK9; (-) strand; PAM type: YTN; PAM sequence: CTG
ggggcctttgctttgcctgg

SEQ ID NO: 22607 - DNA, 20 bp, Artificial Sequence
  Description of Artificial Sequence: Synthetic oligonucleotide
  Target: PCSK9; (-) strand; PAM type: YTN; PAM sequence: CTG
cacatccccacctgggggcc

SEQ ID NO: 22608 - DNA, 20 bp, Artificial Sequence
  Description of Artificial Sequence: Synthetic oligonucleotide
  Target: PCSK9; (-) strand; PAM type: YTN; PAM sequence: CTC
cctgcacatccccacctggg

SEQ ID NO: 22609 - DNA, 20 bp, Artificial Sequence
  Description of Artificial Sequence: Synthetic oligonucleotide
  Target: PCSK9; (-) strand; PAM type: YTN; PAM sequence: CTG
gtactccctgcacatcccca

SEQ ID NO: 22610 - DNA, 20 bp, Artificial Sequence
  Description of Artificial Sequence: Synthetic oligonucleotide
  Target: PCSK9; (-) strand; PAM type: YTN; PAM sequence: TTC
ctggtactccctgcacatcc

SEQ ID NO: 22611 - DNA, 20 bp, Artificial Sequence
  Description of Artificial Sequence: Synthetic oligonucleotide
  Target: PCSK9; (-) strand; PAM type: YTN; PAM sequence: TTT
cctggtactccctgcacatc

SEQ ID NO: 22612 - DNA, 20 bp, Artificial Sequence
  Description of Artificial Sequence: Synthetic oligonucleotide
  Target: PCSK9; (-) strand; PAM type: YTN; PAM sequence: CTG
gtttcctggtactccctgca

SEQ ID NO: 22613 - DNA, 20 bp, Artificial Sequence
  Description of Artificial Sequence: Synthetic oligonucleotide
  Target: PCSK9; (-) strand; PAM type: YTN; PAM sequence: CTC
tggtttcctggtactccctg

SEQ ID NO: 22614 - DNA, 20 bp, Artificial Sequence
  Description of Artificial Sequence: Synthetic oligonucleotide
  Target: PCSK9; (-) strand; PAM type: YTN; PAM sequence: CTC
tctggtttcctggtactccc

SEQ ID NO: 22615 - DNA, 20 bp, Artificial Sequence
  Description of Artificial Sequence: Synthetic oligonucleotide
  Target: PCSK9; (-) strand; PAM type: YTN; PAM sequence: TTC
ccacctctctggtttcctgg

SEQ ID NO: 22616 - DNA, 20 bp, Artificial Sequence
  Description of Artificial Sequence: Synthetic oligonucleotide
  Target: PCSK9; (-) strand; PAM type: YTN; PAM sequence: CTA
ttcccacctctctggtttcc

SEQ ID NO: 22617 - DNA, 20 bp, Artificial Sequence
  Description of Artificial Sequence: Synthetic oligonucleotide
  Target: PCSK9; (-) strand; PAM type: YTN; PAM sequence: CTC
ataactattcccacctctct

SEQ ID NO: 22618 - DNA, 20 bp, Artificial Sequence
  Description of Artificial Sequence: Synthetic oligonucleotide
  Target: PCSK9; (-) strand; PAM type: YTN; PAM sequence: CTG
aggcaccccccatctcataa

SEQ ID NO: 22619 - DNA, 20 bp, Artificial Sequence
  Description of Artificial Sequence: Synthetic oligonucleotide
  Target: PCSK9; (-) strand; PAM type: YTN; PAM sequence: CTC
tgaggcaccccccatctcat

SEQ ID NO: 22620 - DNA, 20 bp, Artificial Sequence
  Description of Artificial Sequence: Synthetic oligonucleotide
  Target: PCSK9; (-) strand; PAM type: YTN; PAM sequence: CTG
tcccctctgaggcacccccc

SEQ ID NO: 22621 - DNA, 20 bp, Artificial Sequence
  Description of Artificial Sequence: Synthetic oligonucleotide
  Target: PCSK9; (-) strand; PAM type: YTN; PAM sequence: TTG
gccctgtcccctctgaggca

SEQ ID NO: 22622 - DNA, 20 bp, Artificial Sequence
  Description of Artificial Sequence: Synthetic oligonucleotide
  Target: PCSK9; (-) strand; PAM type: YTN; PAM sequence: CTT
ggccctgtcccctctgaggc

SEQ ID NO: 22623 - DNA, 20 bp, Artificial Sequence
  Description of Artificial Sequence: Synthetic oligonucleotide
  Target: PCSK9; (-) strand; PAM type: YTN; PAM sequence: CTG
acttggccctgtcccctctg

SEQ ID NO: 22624 - DNA, 20 bp, Artificial Sequence
  Description of Artificial Sequence: Synthetic oligonucleotide
  Target: PCSK9; (-) strand; PAM type: YTN; PAM sequence: CTC
acctgacttggccctgtccc

SEQ ID NO: 22625 - DNA, 20 bp, Artificial Sequence
  Description of Artificial Sequence: Synthetic oligonucleotide
  Target: PCSK9; (-) strand; PAM type: YTN; PAM sequence: CTC
aggtctcacctgacttggcc

SEQ ID NO: 22626 - DNA, 20 bp, Artificial Sequence
  Description of Artificial Sequence: Synthetic oligonucleotide
  Target: PCSK9; (-) strand; PAM type: YTN; PAM sequence: CTG
tgaccctcaggtctcacctg

SEQ ID NO: 22627 - DNA, 20 bp, Artificial Sequence
  Description of Artificial Sequence: Synthetic oligonucleotide
  Target: PCSK9; (-) strand; PAM type: YTN; PAM sequence: CTG
actgtgaccctcaggtctca

SEQ ID NO: 22628 - DNA, 20 bp, Artificial Sequence
  Description of Artificial Sequence: Synthetic oligonucleotide
  Target: PCSK9; (-) strand; PAM type: YTN; PAM sequence: CTG
ctgactgtgaccctcaggtc

SEQ ID NO: 22629 - DNA, 20 bp, Artificial Sequence
  Description of Artificial Sequence: Synthetic oligonucleotide
  Target: PCSK9; (-) strand; PAM type: YTN; PAM sequence: CTC
actgctgactgtgaccctca

SEQ ID NO: 22630 - DNA, 20 bp, Artificial Sequence
  Description of Artificial Sequence: Synthetic oligonucleotide
  Target: PCSK9; (-) strand; PAM type: YTN; PAM sequence: CTG
catggccccagctcactgct

SEQ ID NO: 22631 - DNA, 20 bp, Artificial Sequence
  Description of Artificial Sequence: Synthetic oligonucleotide
  Target: PCSK9; (-) strand; PAM type: YTN; PAM sequence: CTG
aggccagacccctgcatggc

SEQ ID NO: 22632 - DNA, 20 bp, Artificial Sequence
  Description of Artificial Sequence: Synthetic oligonucleotide
  Target: PCSK9; (-) strand; PAM type: YTN; PAM sequence: CTC
tgaggccagacccctgcatg

SEQ ID NO: 22633 - DNA, 20 bp, Artificial Sequence
  Description of Artificial Sequence: Synthetic oligonucleotide
  Target: PCSK9; (-) strand; PAM type: YTN; PAM sequence: CTC
ctctgaggccagacccctgc

SEQ ID NO: 22634 - DNA, 20 bp, Artificial Sequence
  Description of Artificial Sequence: Synthetic oligonucleotide
  Target: PCSK9; (-) strand; PAM type: YTN; PAM sequence: TTC
agatccaggccagaccacac

SEQ ID NO: 22635 - DNA, 20 bp, Artificial Sequence
  Description of Artificial Sequence: Synthetic oligonucleotide
  Target: PCSK9; (-) strand; PAM type: YTN; PAM sequence: CTA
ggccacagtgagaggttcag

SEQ ID NO: 22636 - DNA, 20 bp, Artificial Sequence
  Description of Artificial Sequence: Synthetic oligonucleotide
  Target: PCSK9; (-) strand; PAM type: YTN; PAM sequence: CTC
agcagctaggccacagtgag

SEQ ID NO: 22637 - DNA, 20 bp, Artificial Sequence
  Description of Artificial Sequence: Synthetic oligonucleotide
  Target: PCSK9; (-) strand; PAM type: YTN; PAM sequence: CTC
agctcagcagctaggccaca

SEQ ID NO: 22638 - DNA, 20 bp, Artificial Sequence
  Description of Artificial Sequence: Synthetic oligonucleotide
  Target: PCSK9; (-) strand; PAM type: YTN; PAM sequence: TTC
tcagctcagcagctaggcca

SEQ ID NO: 22639 - DNA, 20 bp, Artificial Sequence
  Description of Artificial Sequence: Synthetic oligonucleotide
  Target: PCSK9; (-) strand; PAM type: YTN; PAM sequence: CTT
ctcagctcagcagctaggcc

SEQ ID NO: 22640 - DNA, 20 bp, Artificial Sequence
  Description of Artificial Sequence: Synthetic oligonucleotide
  Target: PCSK9; (-) strand; PAM type: YTN; PAM sequence: CTC
ttctcagctcagcagctagg

SEQ ID NO: 22641 - DNA, 20 bp, Artificial Sequence
  Description of Artificial Sequence: Synthetic oligonucleotide
  Target: PCSK9; (-) strand; PAM type: YTN; PAM sequence: TTG
tcatctcttctcagctcagc

SEQ ID NO: 22642 - DNA, 20 bp, Artificial Sequence
  Description of Artificial Sequence: Synthetic oligonucleotide
  Target: PCSK9; (-) strand; PAM type: YTN; PAM sequence: CTT
gtcatctcttctcagctcag

SEQ ID NO: 22643 - DNA, 20 bp, Artificial Sequence
  Description of Artificial Sequence: Synthetic oligonucleotide
  Target: PCSK9; (-) strand; PAM type: YTN; PAM sequence: CTG
cccaaggtccttgtcatctc

SEQ ID NO: 22644 - DNA, 20 bp, Artificial Sequence
  Description of Artificial Sequence: Synthetic oligonucleotide
  Target: PCSK9; (-) strand; PAM type: YTN; PAM sequence: TTC
tgcccaaggtccttgtcatc

SEQ ID NO: 22645 - DNA, 20 bp, Artificial Sequence
  Description of Artificial Sequence: Synthetic oligonucleotide
  Target: PCSK9; (-) strand; PAM type: YTN; PAM sequence: CTT
ctgcccaaggtccttgtcat

SEQ ID NO: 22646 - DNA, 20 bp, Artificial Sequence
  Description of Artificial Sequence: Synthetic oligonucleotide
  Target: PCSK9; (-) strand; PAM type: YTN; PAM sequence: CTG
cttctgcccaaggtccttgt

SEQ ID NO: 22647 - DNA, 20 bp, Artificial Sequence
  Description of Artificial Sequence: Synthetic oligonucleotide
  Target: PCSK9; (-) strand; PAM type: YTN; PAM sequence: CTC
cctgcttctgcccaaggtcc

SEQ ID NO: 22648 - DNA, 20 bp, Artificial Sequence
  Description of Artificial Sequence: Synthetic oligonucleotide
  Target: PCSK9; (-) strand; PAM type: YTN; PAM sequence: CTC
cagtctccctgcttctgccc

SEQ ID NO: 22649 - DNA, 20 bp, Artificial Sequence
  Description of Artificial Sequence: Synthetic oligonucleotide
  Target: PCSK9; (-) strand; PAM type: YTN; PAM sequence: CTC
cctccagtctccctgcttct

SEQ ID NO: 22650 - DNA, 20 bp, Artificial Sequence
  Description of Artificial Sequence: Synthetic oligonucleotide
  Target: PCSK9; (-) strand; PAM type: YTN; PAM sequence: CTC
caccgcctccctccagtctc

SEQ ID NO: 22651 - DNA, 20 bp, Artificial Sequence
  Description of Artificial Sequence: Synthetic oligonucleotide
  Target: PCSK9; (-) strand; PAM type: YTN; PAM sequence: CTG
gaccctccaccgcctccctc

SEQ ID NO: 22652 - DNA, 20 bp, Artificial Sequence
  Description of Artificial Sequence: Synthetic oligonucleotide
  Target: PCSK9; (-) strand; PAM type: YTN; PAM sequence: CTG
agccccgccccaacgcctgg

SEQ ID NO: 22653 - DNA, 20 bp, Artificial Sequence
  Description of Artificial Sequence: Synthetic oligonucleotide
  Target: PCSK9; (-) strand; PAM type: YTN; PAM sequence: CTC
cagcctgagccccgccccaa

SEQ ID NO: 22654 - DNA, 20 bp, Artificial Sequence
  Description of Artificial Sequence: Synthetic oligonucleotide
  Target: PCSK9; (-) strand; PAM type: YTN; PAM sequence: TTC
agactccagcctgagccccg

SEQ ID NO: 22655 - DNA, 20 bp, Artificial Sequence
  Description of Artificial Sequence: Synthetic oligonucleotide
  Target: PCSK9; (-) strand; PAM type: YTN; PAM sequence: CTT
cagactccagcctgagcccc

SEQ ID NO: 22656 - DNA, 20 bp, Artificial Sequence
  Description of Artificial Sequence: Synthetic oligonucleotide
  Target: PCSK9; (-) strand; PAM type: YTN; PAM sequence: CTC
ccttcagactccagcctgag

SEQ ID NO: 22657 - DNA, 20 bp, Artificial Sequence
  Description of Artificial Sequence: Synthetic oligonucleotide
  Target: PCSK9; (-) strand; PAM type: YTN; PAM sequence: CTG
caggctcccttcagactcca

SEQ ID NO: 22658 - DNA, 20 bp, Artificial Sequence
  Description of Artificial Sequence: Synthetic oligonucleotide
  Target: PCSK9; (-) strand; PAM type: YTN; PAM sequence: CTC
ccacccacatccacccacca

SEQ ID NO: 22659 - DNA, 20 bp, Artificial Sequence
  Description of Artificial Sequence: Synthetic oligonucleotide
  Target: PCSK9; (-) strand; PAM type: YTN; PAM sequence: CTC
tcccacccacatccacccac

SEQ ID NO: 22660 - DNA, 20 bp, Artificial Sequence
  Description of Artificial Sequence: Synthetic oligonucleotide
  Target: PCSK9; (-) strand; PAM type: YTN; PAM sequence: CTC
cccctctcccacccacatcc

SEQ ID NO: 22661 - DNA, 20 bp, Artificial Sequence
  Description of Artificial Sequence: Synthetic oligonucleotide
  Target: PCSK9; (-) strand; PAM type: YTN; PAM sequence: TTG
gtgccatcctccccctctcc

SEQ ID NO: 22662 - DNA, 20 bp, Artificial Sequence
  Description of Artificial Sequence: Synthetic oligonucleotide
  Target: PCSK9; (-) strand; PAM type: YTN; PAM sequence: CTT
ggtgccatcctccccctctc

SEQ ID NO: 22663 - DNA, 20 bp, Artificial Sequence
  Description of Artificial Sequence: Synthetic oligonucleotide
  Target: PCSK9; (-) strand; PAM type: YTN; PAM sequence: CTG
tccaggggcccgagccttgg

SEQ ID NO: 22664 - DNA, 20 bp, Artificial Sequence
  Description of Artificial Sequence: Synthetic oligonucleotide
  Target: PCSK9; (-) strand; PAM type: YTN; PAM sequence: CTC
catctgtccaggggcccgag

SEQ ID NO: 22665 - DNA, 20 bp, Artificial Sequence
  Description of Artificial Sequence: Synthetic oligonucleotide
  Target: PCSK9; (-) strand; PAM type: YTN; PAM sequence: TTA
atggcaactccatctgtcca

SEQ ID NO: 22666 - DNA, 20 bp, Artificial Sequence
  Description of Artificial Sequence: Synthetic oligonucleotide
  Target: PCSK9; (-) strand; PAM type: YTN; PAM sequence: CTT
aatggcaactccatctgtcc

SEQ ID NO: 22667 - DNA, 20 bp, Artificial Sequence
  Description of Artificial Sequence: Synthetic oligonucleotide
  Target: PCSK9; (-) strand; PAM type: YTN; PAM sequence: CTG
ccccatcccacttaatggca

SEQ ID NO: 22668 - DNA, 20 bp, Artificial Sequence
  Description of Artificial Sequence: Synthetic oligonucleotide
  Target: PCSK9; (-) strand; PAM type: YTN; PAM sequence: CTG
atggccccatagcctgcccc

SEQ ID NO: 22669 - DNA, 20 bp, Artificial Sequence
  Description of Artificial Sequence: Synthetic oligonucleotide
  Target: PCSK9; (-) strand; PAM type: YTN; PAM sequence: CTG
aaactgatggccccatagcc

SEQ ID NO: 22670 - DNA, 20 bp, Artificial Sequence
  Description of Artificial Sequence: Synthetic oligonucleotide
  Target: PCSK9; (-) strand; PAM type: YTN; PAM sequence: CTC
tgaaactgatggccccatag

SEQ ID NO: 22671 - DNA, 20 bp, Artificial Sequence
  Description of Artificial Sequence: Synthetic oligonucleotide
  Target: PCSK9; (-) strand; PAM type: YTN; PAM sequence: CTC
atccctctgaaactgatggc

SEQ ID NO: 22672 - DNA, 20 bp, Artificial Sequence
  Description of Artificial Sequence: Synthetic oligonucleotide
  Target: PCSK9; (-) strand; PAM type: YTN; PAM sequence: CTA
ccatgccagtgccaaactca

SEQ ID NO: 22673 - DNA, 20 bp, Artificial Sequence
  Description of Artificial Sequence: Synthetic oligonucleotide
  Target: PCSK9; (-) strand; PAM type: YTN; PAM sequence: TTG
agggccgtggagatagacag

SEQ ID NO: 22674 - DNA, 20 bp, Artificial Sequence
  Description of Artificial Sequence: Synthetic oligonucleotide
  Target: PCSK9; (-) strand; PAM type: YTN; PAM sequence: TTT
gagggccgtggagatagaca

SEQ ID NO: 22675 - DNA, 20 bp, Artificial Sequence
  Description of Artificial Sequence: Synthetic oligonucleotide
  Target: PCSK9; (-) strand; PAM type: YTN; PAM sequence: CTG
gtttgagggccgtggagata

SEQ ID NO: 22676 - DNA, 20 bp, Artificial Sequence
  Description of Artificial Sequence: Synthetic oligonucleotide
  Target: PCSK9; (-) strand; PAM type: YTN; PAM sequence: TTC
atgcctggtttgagggccgt

SEQ ID NO: 22677 - DNA, 20 bp, Artificial Sequence
  Description of Artificial Sequence: Synthetic oligonucleotide
  Target: PCSK9; (-) strand; PAM type: YTN; PAM sequence: CTT
catgcctggtttgagggccg

SEQ ID NO: 22678 - DNA, 20 bp, Artificial Sequence
  Description of Artificial Sequence: Synthetic oligonucleotide
  Target: PCSK9; (-) strand; PAM type: YTN; PAM sequence: CTG
cttcatgcctggtttgaggg

SEQ ID NO: 22679 - DNA, 20 bp, Artificial Sequence
  Description of Artificial Sequence: Synthetic oligonucleotide
  Target: PCSK9; (-) strand; PAM type: YTN; PAM sequence: CTC
ctgcttcatgcctggtttga

SEQ ID NO: 22680 - DNA, 20 bp, Artificial Sequence
  Description of Artificial Sequence: Synthetic oligonucleotide
  Target: PCSK9; (-) strand; PAM type: YTN; PAM sequence: CTG
accaaacacgtgagctcctg

SEQ ID NO: 22681 - DNA, 20 bp, Artificial Sequence
  Description of Artificial Sequence: Synthetic oligonucleotide
  Target: PCSK9; (-) strand; PAM type: YTN; PAM sequence: CTG
caccatggctgaccaaacac

SEQ ID NO: 22682 - DNA, 20 bp, Artificial Sequence
  Description of Artificial Sequence: Synthetic oligonucleotide
  Target: PCSK9; (-) strand; PAM type: YTN; PAM sequence: TTC
tgcaccatggctgaccaaac

SEQ ID NO: 22683 - DNA, 20 bp, Artificial Sequence
  Description of Artificial Sequence: Synthetic oligonucleotide
  Target: PCSK9; (-) strand; PAM type: YTN; PAM sequence: CTC
ccacccaggcggttctgcac

SEQ ID NO: 22684 - DNA, 20 bp, Artificial Sequence
  Description of Artificial Sequence: Synthetic oligonucleotide
  Target: PCSK9; (-) strand; PAM type: YTN; PAM sequence: CTC
ccaccccgcacctcccaccc

SEQ ID NO: 22685 - DNA, 20 bp, Artificial Sequence
  Description of Artificial Sequence: Synthetic oligonucleotide
  Target: PCSK9; (-) strand; PAM type: YTN; PAM sequence: TTG
ggacacaaccgtgtatctcc

SEQ ID NO: 22686 - DNA, 20 bp, Artificial Sequence
  Description of Artificial Sequence: Synthetic oligonucleotide
  Target: PCSK9; (-) strand; PAM type: YTN; PAM sequence: TTT
gggacacaaccgtgtatctc

SEQ ID NO: 22687 - DNA, 20 bp, Artificial Sequence
  Description of Artificial Sequence: Synthetic oligonucleotide
  Target: PCSK9; (-) strand; PAM type: YTN; PAM sequence: CTC
agagcccatttgggacacaa

SEQ ID NO: 22688 - DNA, 20 bp, Artificial Sequence
  Description of Artificial Sequence: Synthetic oligonucleotide
  Target: PCSK9; (-) strand; PAM type: YTN; PAM sequence: CTG
gctcagagcccatttgggac

SEQ ID NO: 22689 - DNA, 20 bp, Artificial Sequence
  Description of Artificial Sequence: Synthetic oligonucleotide
  Target: PCSK9; (-) strand; PAM type: YTN; PAM sequence: CTC
gctggctcagagcccatttg

SEQ ID NO: 22690 - DNA, 20 bp, Artificial Sequence
  Description of Artificial Sequence: Synthetic oligonucleotide
  Target: PCSK9; (-) strand; PAM type: YTN; PAM sequence: CTG
tgaggccaaagtgcagacgg

SEQ ID NO: 22691 - DNA, 20 bp, Artificial Sequence
  Description of Artificial Sequence: Synthetic oligonucleotide
  Target: PCSK9; (-) strand; PAM type: YTN; PAM sequence: TTC
tgtgaggccaaagtgcagac

SEQ ID NO: 22692 - DNA, 20 bp, Artificial Sequence
  Description of Artificial Sequence: Synthetic oligonucleotide
  Target: PCSK9; (-) strand; PAM type: YTN; PAM sequence: CTT
ctgtgaggccaaagtgcaga

SEQ ID NO: 22693 - DNA, 20 bp, Artificial Sequence
  Description of Artificial Sequence: Synthetic oligonucleotide
  Target: PCSK9; (-) strand; PAM type: YTN; PAM sequence: CTC
cgacatccttctgtgaggcc

SEQ ID NO: 22694 - DNA, 20 bp, Artificial Sequence
  Description of Artificial Sequence: Synthetic oligonucleotide
  Target: PCSK9; (-) strand; PAM type: YTN; PAM sequence: CTC
cctccgacatccttctgtga

SEQ ID NO: 22695 - DNA, 20 bp, Artificial Sequence
  Description of Artificial Sequence: Synthetic oligonucleotide
  Target: PCSK9; (-) strand; PAM type: YTN; PAM sequence: TTC
tccctccgacatccttctgt

SEQ ID NO: 22696 - DNA, 20 bp, Artificial Sequence
  Description of Artificial Sequence: Synthetic oligonucleotide
  Target: PCSK9; (-) strand; PAM type: YTN; PAM sequence: TTT
ctccctccgacatccttctg

SEQ ID NO: 22697 - DNA, 20 bp, Artificial Sequence
  Description of Artificial Sequence: Synthetic oligonucleotide
  Target: PCSK9; (-) strand; PAM type: YTN; PAM sequence: TTC
atttctccctccgacatcct

SEQ ID NO: 22698 - DNA, 20 bp, Artificial Sequence
  Description of Artificial Sequence: Synthetic oligonucleotide
  Target: PCSK9; (-) strand; PAM type: YTN; PAM sequence: CTT
catttctccctccgacatcc

SEQ ID NO: 22699 - DNA, 20 bp, Artificial Sequence
  Description of Artificial Sequence: Synthetic oligonucleotide
  Target: PCSK9; (-) strand; PAM type: YTN; PAM sequence: CTA
gcgtggcccgggacccccac

SEQ ID NO: 22700 - DNA, 20 bp, Artificial Sequence
  Description of Artificial Sequence: Synthetic oligonucleotide
  Target: PCSK9; (-) strand; PAM type: YTN; PAM sequence: CTG
ccagagcccgaggaaaagaa

SEQ ID NO: 22701 - DNA, 20 bp, Artificial Sequence
  Description of Artificial Sequence: Synthetic oligonucleotide
  Target: PCSK9; (-) strand; PAM type: YTN; PAM sequence: CTC
gcaggccacggtcacctgcc

SEQ ID NO: 22702 - DNA, 20 bp, Artificial Sequence
  Description of Artificial Sequence: Synthetic oligonucleotide
  Target: PCSK9; (-) strand; PAM type: YTN; PAM sequence: CTC
ctcgcaggccacggtcacct

SEQ ID NO: 22703 - DNA, 20 bp, Artificial Sequence
  Description of Artificial Sequence: Synthetic oligonucleotide
  Target: PCSK9; (-) strand; PAM type: YTN; PAM sequence: CTG
cagccagtcagggtccagcc

SEQ ID NO: 22704 - DNA, 20 bp, Artificial Sequence
  Description of Artificial Sequence: Synthetic oligonucleotide
  Target: PCSK9; (-) strand; PAM type: YTN; PAM sequence: CTA
cggcgtaggcccccaggacg

SEQ ID NO: 22705 - DNA, 20 bp, Artificial Sequence
  Description of Artificial Sequence: Synthetic oligonucleotide
  Target: PCSK9; (-) strand; PAM type: YTN; PAM sequence: TTG
tctacggcgtaggcccccag

SEQ ID NO: 22706 - DNA, 20 bp, Artificial Sequence
  Description of Artificial Sequence: Synthetic oligonucleotide
  Target: PCSK9; (-) strand; PAM type: YTN; PAM sequence: CTA
cacacgtgttgtctacggcg

SEQ ID NO: 22707 - DNA, 20 bp, Artificial Sequence
  Description of Artificial Sequence: Synthetic oligonucleotide
  Target: PCSK9; (-) strand; PAM type: YTN; PAM sequence: CTG
actacacacgtgttgtctac

SEQ ID NO: 22708 - DNA, 20 bp, Artificial Sequence
  Description of Artificial Sequence: Synthetic oligonucleotide
  Target: PCSK9; (-) strand; PAM type: YTN; PAM sequence: CTC
ctgactacacacgtgttgtc

SEQ ID NO: 22709 - DNA, 20 bp, Artificial Sequence
  Description of Artificial Sequence: Synthetic oligonucleotide
  Target: PCSK9; (-) strand; PAM type: YTN; PAM sequence: CTG
acgtcccggctcctgactac

SEQ ID NO: 22710 - DNA, 20 bp, Artificial Sequence
  Description of Artificial Sequence: Synthetic oligonucleotide
  Target: PCSK9; (-) strand; PAM type: YTN; PAM sequence: CTG
tagtgctgacgtcccggctc

SEQ ID NO: 22711 - DNA, 20 bp, Artificial Sequence
  Description of Artificial Sequence: Synthetic oligonucleotide
  Target: PCSK9; (-) strand; PAM type: YTN; PAM sequence: CTG
cctgtagtgctgacgtcccg

SEQ ID NO: 22712 - DNA, 20 bp, Artificial Sequence
  Description of Artificial Sequence: Synthetic oligonucleotide
  Target: PCSK9; (-) strand; PAM type: YTN; PAM sequence: CTG
gtgctgcctgtagtgctgac

SEQ ID NO: 22713 - DNA, 20 bp, Artificial Sequence
  Description of Artificial Sequence: Synthetic oligonucleotide
  Target: PCSK9; (-) strand; PAM type: YTN; PAM sequence: TTC
gctggtgctgcctgtagtgc

SEQ ID NO: 22714 - DNA, 20 bp, Artificial Sequence
  Description of Artificial Sequence: Synthetic oligonucleotide
  Target: PCSK9; (-) strand; PAM type: YTN; PAM sequence: CTT
cgctggtgctgcctgtagtg

SEQ ID NO: 22715 - DNA, 20 bp, Artificial Sequence
  Description of Artificial Sequence: Synthetic oligonucleotide
  Target: PCSK9; (-) strand; PAM type: YTN; PAM sequence: CTG
tcacggccccttcgctggtg

SEQ ID NO: 22716 - DNA, 20 bp, Artificial Sequence
  Description of Artificial Sequence: Synthetic oligonucleotide
  Target: PCSK9; (-) strand; PAM type: YTN; PAM sequence: CTC
cggcagcagatggcaacggc

SEQ ID NO: 22717 - DNA, 20 bp, Artificial Sequence
  Description of Artificial Sequence: Synthetic oligonucleotide
  Target: PCSK9; (-) strand; PAM type: YTN; PAM sequence: CTG
cgccaggtgccggctccggc

SEQ ID NO: 22718 - DNA, 20 bp, Artificial Sequence
  Description of Artificial Sequence: Synthetic oligonucleotide
  Target: PCSK9; (-) strand; PAM type: YTN; PAM sequence: CTG
ggaggcctgcgccaggtgcc

SEQ ID NO: 22719 - DNA, 20 bp, Artificial Sequence
  Description of Artificial Sequence: Synthetic oligonucleotide
  Target: PCSK9; (-) strand; PAM type: YTN; PAM sequence: CTC
ctgggaggcctgcgccaggt

SEQ ID NO: 22720 - DNA, 20 bp, Artificial Sequence
  Description of Artificial Sequence: Synthetic oligonucleotide
  Target: PCSK9; (-) strand; PAM type: YTN; PAM sequence: CTG
gagctcctgggaggcctgcg

SEQ ID NO: 22721 - DNA, 20 bp, Artificial Sequence
  Description of Artificial Sequence: Synthetic oligonucleotide
  Target: PCSK9; (-) strand; PAM type: YTN; PAM sequence: CTG
tcactggagctcctgggagg

SEQ ID NO: 22722 - DNA, 20 bp, Artificial Sequence
  Description of Artificial Sequence: Synthetic oligonucleotide
  Target: PCSK9; (-) strand; PAM type: YTN; PAM sequence: CTG
ggatggggctgtcactggag

SEQ ID NO: 22723 - DNA, 20 bp, Artificial Sequence
  Description of Artificial Sequence: Synthetic oligonucleotide
  Target: PCSK9; (-) strand; PAM type: YTN; PAM sequence: CTC
cccagacacccatcctggga

SEQ ID NO: 22724 - DNA, 20 bp, Artificial Sequence
  Description of Artificial Sequence: Synthetic oligonucleotide
  Target: PCSK9; (-) strand; PAM type: YTN; PAM sequence: TTG
accctccccagacacccatc

SEQ ID NO: 22725 - DNA, 20 bp, Artificial Sequence
  Description of Artificial Sequence: Synthetic oligonucleotide
  Target: PCSK9; (-) strand; PAM type: YTN; PAM sequence: CTT
gaccctccccagacacccat

SEQ ID NO: 22726 - DNA, 20 bp, Artificial Sequence
  Description of Artificial Sequence: Synthetic oligonucleotide
  Target: PCSK9; (-) strand; PAM type: YTN; PAM sequence: CTC
agccccagcccttgaccctc

SEQ ID NO: 22727 - DNA, 20 bp, Artificial Sequence
  Description of Artificial Sequence: Synthetic oligonucleotide
  Target: PCSK9; (-) strand; PAM type: YTN; PAM sequence: TTA
aagctcagccccagcccttg

SEQ ID NO: 22728 - DNA, 20 bp, Artificial Sequence
  Description of Artificial Sequence: Synthetic oligonucleotide
  Target: PCSK9; (-) strand; PAM type: YTN; PAM sequence: TTT
aaagctcagccccagccctt

SEQ ID NO: 22729 - DNA, 20 bp, Artificial Sequence
  Description of Artificial Sequence: Synthetic oligonucleotide
  Target: PCSK9; (-) strand; PAM type: YTN; PAM sequence: TTT
taaagctcagccccagccct

SEQ ID NO: 22730 - DNA, 20 bp, Artificial Sequence
  Description of Artificial Sequence: Synthetic oligonucleotide
  Target: PCSK9; (-) strand; PAM type: YTN; PAM sequence: CTG
agagagggacaagtcggaac

SEQ ID NO: 22731 - DNA, 20 bp, Artificial Sequence
  Description of Artificial Sequence: Synthetic oligonucleotide
  Target: PCSK9; (-) strand; PAM type: YTN; PAM sequence: CTC
gtgccaggccatggagggct

SEQ ID NO: 22732 - DNA, 20 bp, Artificial Sequence
  Description of Artificial Sequence: Synthetic oligonucleotide
  Target: PCSK9; (-) strand; PAM type: YTN; PAM sequence: CTC
aagggccaggccagcagccc

SEQ ID NO: 22733 - DNA, 20 bp, Artificial Sequence
  Description of Artificial Sequence: Synthetic oligonucleotide
  Target: PCSK9; (-) strand; PAM type: YTN; PAM sequence: CTG
ccccactcaagggccaggcc

SEQ ID NO: 22734 - DNA, 20 bp, Artificial Sequence
  Description of Artificial Sequence: Synthetic oligonucleotide
  Target: PCSK9; (-) strand; PAM type: YTN; PAM sequence: TTC
caggcaaggaggctgcccca

SEQ ID NO: 22735 - DNA, 20 bp, Artificial Sequence
  Description of Artificial Sequence: Synthetic oligonucleotide
  Target: PCSK9; (-) strand; PAM type: YTN; PAM sequence: CTG
gggaggaggcacccagagtg

SEQ ID NO: 22736 - DNA, 20 bp, Artificial Sequence
  Description of Artificial Sequence: Synthetic oligonucleotide
  Target: PCSK9; (-) strand; PAM type: YTN; PAM sequence: CTC
cacctggggaggaggcaccc

SEQ ID NO: 22737 - DNA, 20 bp, Artificial Sequence
  Description of Artificial Sequence: Synthetic oligonucleotide
  Target: PCSK9; (-) strand; PAM type: YTN; PAM sequence: CTG
gcacctccacctggggagga

SEQ ID NO: 22738 - DNA, 20 bp, Artificial Sequence
  Description of Artificial Sequence: Synthetic oligonucleotide
  Target: PCSK9; (-) strand; PAM type: YTN; PAM sequence: TTC
ctggcacctccacctgggga

SEQ ID NO: 22739 - DNA, 20 bp, Artificial Sequence
  Description of Artificial Sequence: Synthetic oligonucleotide
  Target: PCSK9; (-) strand; PAM type: YTN; PAM sequence: CTT
cctggcacctccacctgggg

SEQ ID NO: 22740 - DNA, 20 bp, Artificial Sequence
  Description of Artificial Sequence: Synthetic oligonucleotide
  Target: PCSK9; (-) strand; PAM type: YTN; PAM sequence: TTG
aatggtgaaatgccccacag

SEQ ID NO: 22741 - DNA, 20 bp, Artificial Sequence
  Description of Artificial Sequence: Synthetic oligonucleotide
  Target: PCSK9; (-) strand; PAM type: YTN; PAM sequence: TTT
gaatggtgaaatgccccaca

SEQ ID NO: 22742 - DNA, 20 bp, Artificial Sequence
  Description of Artificial Sequence: Synthetic oligonucleotide
  Target: PCSK9; (-) strand; PAM type: YTN; PAM sequence: CTG
tttgaatggtgaaatgcccc

SEQ ID NO: 22743 - DNA, 20 bp, Artificial Sequence
  Description of Artificial Sequence: Synthetic oligonucleotide
  Target: PCSK9; (-) strand; PAM type: YTN; PAM sequence: CTC
gacctgtttgaatggtgaaa

SEQ ID NO: 22744 - DNA, 20 bp, Artificial Sequence
  Description of Artificial Sequence: Synthetic oligonucleotide
  Target: PCSK9; (-) strand; PAM type: YTN; PAM sequence: CTG
gcagcacccgagcacagctc

SEQ ID NO: 22745 - DNA, 20 bp, Artificial Sequence
  Description of Artificial Sequence: Synthetic oligonucleotide
  Target: PCSK9; (-) strand; PAM type: YTN; PAM sequence: TTG
ggagcagctggcagcacccg

SEQ ID NO: 22746 - DNA, 20 bp, Artificial Sequence
  Description of Artificial Sequence: Synthetic oligonucleotide
  Target: PCSK9; (-) strand; PAM type: YTN; PAM sequence: CTG
cccacggacatcggcacatt

SEQ ID NO: 22747 - DNA, 20 bp, Artificial Sequence
  Description of Artificial Sequence: Synthetic oligonucleotide
  Target: PCSK9; (-) strand; PAM type: YTN; PAM sequence: TTC
tgcccacggacatcggcaca

SEQ ID NO: 22748 - DNA, 20 bp, Artificial Sequence
  Description of Artificial Sequence: Synthetic oligonucleotide
  Target: PCSK9; (-) strand; PAM type: YTN; PAM sequence: CTC
aataaaagtcattctgccca

SEQ ID NO: 22749 - DNA, 20 bp, Artificial Sequence
  Description of Artificial Sequence: Synthetic oligonucleotide
  Target: PCSK9; (-) strand; PAM type: YTN; PAM sequence: CTG
gcacggaacaagagctcaat

SEQ ID NO: 22750 - DNA, 20 bp, Artificial Sequence
  Description of Artificial Sequence: Synthetic oligonucleotide
  Target: PCSK9; (-) strand; PAM type: YTN; PAM sequence: TTG
aatgcctggcacggaacaag

SEQ ID NO: 22751 - DNA, 20 bp, Artificial Sequence
  Description of Artificial Sequence: Synthetic oligonucleotide
  Target: PCSK9; (-) strand; PAM type: YTN; PAM sequence: CTG
aggattgaatgcctggcacg

SEQ ID NO: 22752 - DNA, 20 bp, Artificial Sequence
  Description of Artificial Sequence: Synthetic oligonucleotide
  Target: PCSK9; (-) strand; PAM type: YTN; PAM sequence: TTG
gtggagacctgaggattgaa

SEQ ID NO: 22753 - DNA, 20 bp, Artificial Sequence
  Description of Artificial Sequence: Synthetic oligonucleotide
  Target: PCSK9; (-) strand; PAM type: YTN; PAM sequence: CTT
ggtggagacctgaggattga

SEQ ID NO: 22754 - DNA, 20 bp, Artificial Sequence
  Description of Artificial Sequence: Synthetic oligonucleotide
  Target: PCSK9; (-) strand; PAM type: YTN; PAM sequence: CTC
cttggtggagacctgaggat

SEQ ID NO: 22755 - DNA, 20 bp, Artificial Sequence
  Description of Artificial Sequence: Synthetic oligonucleotide
  Target: PCSK9; (-) strand; PAM type: YTN; PAM sequence: CTG
cctccttggtggagacctga

SEQ ID NO: 22756 - DNA, 20 bp, Artificial Sequence
  Description of Artificial Sequence: Synthetic oligonucleotide
  Target: PCSK9; (-) strand; PAM type: YTN; PAM sequence: CTA
tccatgggaagaatcctgcc

SEQ ID NO: 22757 - DNA, 20 bp, Artificial Sequence
  Description of Artificial Sequence: Synthetic oligonucleotide
  Target: PCSK9; (-) strand; PAM type: YTN; PAM sequence: CTC
ccctatccatgggaagaatc

SEQ ID NO: 22758 - DNA, 20 bp, Artificial Sequence
  Description of Artificial Sequence: Synthetic oligonucleotide
  Target: PCSK9; (-) strand; PAM type: YTN; PAM sequence: CTA
ccgccccctcccctatccat

SEQ ID NO: 22759 - DNA, 20 bp, Artificial Sequence
  Description of Artificial Sequence: Synthetic oligonucleotide
  Target: PCSK9; (-) strand; PAM type: YTN; PAM sequence: CTG
cagcccctaccgccccctcc

SEQ ID NO: 22760 - DNA, 20 bp, Artificial Sequence
  Description of Artificial Sequence: Synthetic oligonucleotide
  Target: PCSK9; (-) strand; PAM type: YTN; PAM sequence: TTG
tccctgcagcccctaccgcc

SEQ ID NO: 22761 - DNA, 20 bp, Artificial Sequence
  Description of Artificial Sequence: Synthetic oligonucleotide
  Target: PCSK9; (-) strand; PAM type: YTN; PAM sequence: TTT
gtccctgcagcccctaccgc

SEQ ID NO: 22762 - DNA, 20 bp, Artificial Sequence
  Description of Artificial Sequence: Synthetic oligonucleotide
  Target: PCSK9; (-) strand; PAM type: YTN; PAM sequence: CTC
accccccaacgatgtttgtc

SEQ ID NO: 22763 - DNA, 20 bp, Artificial Sequence
  Description of Artificial Sequence: Synthetic oligonucleotide
  Target: PCSK9; (-) strand; PAM type: YTN; PAM sequence: TTC
acactcaccccccaacgatg

SEQ ID NO: 22764 - DNA, 20 bp, Artificial Sequence
  Description of Artificial Sequence: Synthetic oligonucleotide
  Target: PCSK9; (-) strand; PAM type: YTN; PAM sequence: TTT
cacactcaccccccaacgat

SEQ ID NO: 22765 - DNA, 20 bp, Artificial Sequence
  Description of Artificial Sequence: Synthetic oligonucleotide
  Target: PCSK9; (-) strand; PAM type: YTN; PAM sequence: CTT
tcacactcaccccccaacga

SEQ ID NO: 22766 - DNA, 20 bp, Artificial Sequence
  Description of Artificial Sequence: Synthetic oligonucleotide
  Target: PCSK9; (-) strand; PAM type: YTN; PAM sequence: CTG
gagatgagggccatcagcac

SEQ ID NO: 22767 - DNA, 20 bp, Artificial Sequence
  Description of Artificial Sequence: Synthetic oligonucleotide
  Target: PCSK9; (-) strand; PAM type: YTN; PAM sequence: TTA
gctggagatgagggccatca

SEQ ID NO: 22768 - DNA, 20 bp, Artificial Sequence
  Description of Artificial Sequence: Synthetic oligonucleotide
  Target: PCSK9; (-) strand; PAM type: YTN; PAM sequence: CTC
cacagttagctggagatgag

SEQ ID NO: 22769 - DNA, 20 bp, Artificial Sequence
  Description of Artificial Sequence: Synthetic oligonucleotide
  Target: PCSK9; (-) strand; PAM type: YTN; PAM sequence: TTC
tccacagttagctggagatg

SEQ ID NO: 22770 - DNA, 20 bp, Artificial Sequence
  Description of Artificial Sequence: Synthetic oligonucleotide
  Target: PCSK9; (-) strand; PAM type: YTN; PAM sequence: CTT
ctccacagttagctggagat

SEQ ID NO: 22771 - DNA, 20 bp, Artificial Sequence
  Description of Artificial Sequence: Synthetic oligonucleotide
  Target: PCSK9; (-) strand; PAM type: YTN; PAM sequence: TTA
atcagggagcccccaggggc

SEQ ID NO: 22772 - DNA, 20 bp, Artificial Sequence
  Description of Artificial Sequence: Synthetic oligonucleotide
  Target: PCSK9; (-) strand; PAM type: YTN; PAM sequence: CTC
cattaatcagggagccccca

SEQ ID NO: 22773 - DNA, 20 bp, Artificial Sequence
  Description of Artificial Sequence: Synthetic oligonucleotide
  Target: PCSK9; (-) strand; PAM type: YTN; PAM sequence: CTA
agcctccattaatcagggag

SEQ ID NO: 22774 - DNA, 20 bp, Artificial Sequence
  Description of Artificial Sequence: Synthetic oligonucleotide
  Target: PCSK9; (-) strand; PAM type: YTN; PAM sequence: CTA
gatgccatccagaaagctaa

SEQ ID NO: 22775 - DNA, 20 bp, Artificial Sequence
  Description of Artificial Sequence: Synthetic oligonucleotide
  Target: PCSK9; (-) strand; PAM type: YTN; PAM sequence: CTG
gctagatgccatccagaaag

SEQ ID NO: 22776 - DNA, 20 bp, Artificial Sequence
  Description of Artificial Sequence: Synthetic oligonucleotide
  Target: PCSK9; (-) strand; PAM type: YTN; PAM sequence: CTC
tggctagatgccatccagaa

SEQ ID NO: 22777 - DNA, 20 bp, Artificial Sequence
  Description of Artificial Sequence: Synthetic oligonucleotide
  Target: PCSK9; (-) strand; PAM type: YTN; PAM sequence: CTC
cagcctctggctagatgcca

SEQ ID NO: 22778 - DNA, 20 bp, Artificial Sequence
  Description of Artificial Sequence: Synthetic oligonucleotide
  Target: PCSK9; (-) strand; PAM type: YTN; PAM sequence: CTG
tctccagcctctggctagat

SEQ ID NO: 22779 - DNA, 20 bp, Artificial Sequence
  Description of Artificial Sequence: Synthetic oligonucleotide
  Target: PCSK9; (-) strand; PAM type: YTN; PAM sequence: CTG
tgaccaccaggggcgcacct

SEQ ID NO: 22780 - DNA, 20 bp, Artificial Sequence
  Description of Artificial Sequence: Synthetic oligonucleotide
  Target: PCSK9; (-) strand; PAM type: YTN; PAM sequence: CTC
aggaaaccaaggcacagcct

SEQ ID NO: 22781 - DNA, 20 bp, Artificial Sequence
  Description of Artificial Sequence: Synthetic oligonucleotide
  Target: PCSK9; (-) strand; PAM type: YTN; PAM sequence: CTG
gcatagagcagagtaaaggt

SEQ ID NO: 22782 - DNA, 20 bp, Artificial Sequence
  Description of Artificial Sequence: Synthetic oligonucleotide
  Target: PCSK9; (-) strand; PAM type: YTN; PAM sequence: CTA
gcacagcctggcatagagca

SEQ ID NO: 22783 - DNA, 20 bp, Artificial Sequence
  Description of Artificial Sequence: Synthetic oligonucleotide
  Target: PCSK9; (-) strand; PAM type: YTN; PAM sequence: TTG
ctagcacagcctggcataga

SEQ ID NO: 22784 - DNA, 20 bp, Artificial Sequence
  Description of Artificial Sequence: Synthetic oligonucleotide
  Target: PCSK9; (-) strand; PAM type: YTN; PAM sequence: TTG
ggtgttgctagcacagcctg

SEQ ID NO: 22785 - DNA, 20 bp, Artificial Sequence
  Description of Artificial Sequence: Synthetic oligonucleotide
  Target: PCSK9; (-) strand; PAM type: YTN; PAM sequence: TTT
gggtgttgctagcacagcct

SEQ ID NO: 22786 - DNA, 20 bp, Artificial Sequence
  Description of Artificial Sequence: Synthetic oligonucleotide
  Target: PCSK9; (-) strand; PAM type: YTN; PAM sequence: CTT
tgggtgttgctagcacagcc

SEQ ID NO: 22787 - DNA, 20 bp, Artificial Sequence
  Description of Artificial Sequence: Synthetic oligonucleotide
  Target: PCSK9; (-) strand; PAM type: YTN; PAM sequence: CTC
cccgcaggccacctttgggt

SEQ ID NO: 22788 - DNA, 20 bp, Artificial Sequence
  Description of Artificial Sequence: Synthetic oligonucleotide
  Target: PCSK9; (-) strand; PAM type: YTN; PAM sequence: CTA
ggtgatggctccccgcaggc

SEQ ID NO: 22789 - DNA, 20 bp, Artificial Sequence
  Description of Artificial Sequence: Synthetic oligonucleotide
  Target: PCSK9; (-) strand; PAM type: YTN; PAM sequence: CTG
ccgagtcagtcctaggtgat

SEQ ID NO: 22790 - DNA, 20 bp, Artificial Sequence
  Description of Artificial Sequence: Synthetic oligonucleotide
  Target: PCSK9; (-) strand; PAM type: YTN; PAM sequence: CTG
cacactgccgagtcagtcct

SEQ ID NO: 22791 - DNA, 20 bp, Artificial Sequence
  Description of Artificial Sequence: Synthetic oligonucleotide
  Target: PCSK9; (-) strand; PAM type: YTN; PAM sequence: CTG
agacagtgcatgcaccactg

SEQ ID NO: 22792 - DNA, 20 bp, Artificial Sequence
  Description of Artificial Sequence: Synthetic oligonucleotide
  Target: PCSK9; (-) strand; PAM type: YTN; PAM sequence: TTG
gctgagacagtgcatgcacc

SEQ ID NO: 22793 - DNA, 20 bp, Artificial Sequence
  Description of Artificial Sequence: Synthetic oligonucleotide
  Target: PCSK9; (-) strand; PAM type: YTN; PAM sequence: CTG
ccgggtagtggagcgggttg

SEQ ID NO: 22794 - DNA, 20 bp, Artificial Sequence
  Description of Artificial Sequence: Synthetic oligonucleotide
  Target: PCSK9; (-) strand; PAM type: YTN; PAM sequence: CTG
tgaagtaggggtgcgaatgt

SEQ ID NO: 22795 - DNA, 20 bp, Artificial Sequence
  Description of Artificial Sequence: Synthetic oligonucleotide
  Target: PCSK9; (-) strand; PAM type: YTN; PAM sequence: CTC
tgtgaagtaggggtgcgaat

SEQ ID NO: 22796 - DNA, 20 bp, Artificial Sequence
  Description of Artificial Sequence: Synthetic oligonucleotide
  Target: PCSK9; (-) strand; PAM type: YTN; PAM sequence: TTC
ctctgtgaagtaggggtgcg

SEQ ID NO: 22797 - DNA, 20 bp, Artificial Sequence
  Description of Artificial Sequence: Synthetic oligonucleotide
  Target: PCSK9; (-) strand; PAM type: YTN; PAM sequence: CTT
cctctgtgaagtaggggtgc

SEQ ID NO: 22798 - DNA, 20 bp, Artificial Sequence
  Description of Artificial Sequence: Synthetic oligonucleotide
  Target: PCSK9; (-) strand; PAM type: YTN; PAM sequence: TTC
ttcctctgtgaagtaggggt

SEQ ID NO: 22799 - DNA, 20 bp, Artificial Sequence
  Description of Artificial Sequence: Synthetic oligonucleotide
  Target: PCSK9; (-) strand; PAM type: YTN; PAM sequence: TTT
cttcctctgtgaagtagggg

SEQ ID NO: 22800 - DNA, 20 bp, Artificial Sequence
  Description of Artificial Sequence: Synthetic oligonucleotide
  Target: PCSK9; (-) strand; PAM type: YTN; PAM sequence: TTC
caggtttcttcctctgtgaa

SEQ ID NO: 22801 - DNA, 20 bp, Artificial Sequence
  Description of Artificial Sequence: Synthetic oligonucleotide
  Target: PCSK9; (-) strand; PAM type: YTN; PAM sequence: CTG
gttccaggtttcttcctctg

SEQ ID NO: 22802 - DNA, 20 bp, Artificial Sequence
  Description of Artificial Sequence: Synthetic oligonucleotide
  Target: PCSK9; (-) strand; PAM type: YTN; PAM sequence: CTC
tggttccaggtttcttcctc

SEQ ID NO: 22803 - DNA, 20 bp, Artificial Sequence
  Description of Artificial Sequence: Synthetic oligonucleotide
  Target: PCSK9; (-) strand; PAM type: YTN; PAM sequence: TTG
gcaggcacgccccctctggt

SEQ ID NO: 22804 - DNA, 20 bp, Artificial Sequence
  Description of Artificial Sequence: Synthetic oligonucleotide
  Target: PCSK9; (-) strand; PAM type: YTN; PAM sequence: CTT
ggcaggcacgccccctctgg

SEQ ID NO: 22805 - DNA, 20 bp, Artificial Sequence
  Description of Artificial Sequence: Synthetic oligonucleotide
  Target: PCSK9; (-) strand; PAM type: YTN; PAM sequence: CTG
tgtgagcttggcaggcacgc

SEQ ID NO: 22806 - DNA, 20 bp, Artificial Sequence
  Description of Artificial Sequence: Synthetic oligonucleotide
  Target: PCSK9; (-) strand; PAM type: YTN; PAM sequence: CTG
ctgtgtgagcttggcaggca

SEQ ID NO: 22807 - DNA, 20 bp, Artificial Sequence
  Description of Artificial Sequence: Synthetic oligonucleotide
  Target: PCSK9; (-) strand; PAM type: YTN; PAM sequence: TTC
ctgctgtgtgagcttggcag

SEQ ID NO: 22808 - DNA, 20 bp, Artificial Sequence
  Description of Artificial Sequence: Synthetic oligonucleotide
  Target: PCSK9; (-) strand; PAM type: YTN; PAM sequence: CTC
agttcctgctgtgtgagctt

SEQ ID NO: 22809 - DNA, 20 bp, Artificial Sequence
  Description of Artificial Sequence: Synthetic oligonucleotide
  Target: PCSK9; (-) strand; PAM type: YTN; PAM sequence: CTG
gctcagttcctgctgtgtga

SEQ ID NO: 22810 - DNA, 20 bp, Artificial Sequence
  Description of Artificial Sequence: Synthetic oligonucleotide
  Target: PCSK9; (-) strand; PAM type: YTN; PAM sequence: TTC
tggctcagttcctgctgtgt

SEQ ID NO: 22811 - DNA, 20 bp, Artificial Sequence
  Description of Artificial Sequence: Synthetic oligonucleotide
  Target: PCSK9; (-) strand; PAM type: YTN; PAM sequence: TTT
ctggctcagttcctgctgtg

SEQ ID NO: 22812 - DNA, 20 bp, Artificial Sequence
  Description of Artificial Sequence: Synthetic oligonucleotide
  Target: PCSK9; (-) strand; PAM type: YTN; PAM sequence: CTG
cgtttctggctcagttcctg

SEQ ID NO: 22813 - DNA, 20 bp, Artificial Sequence
  Description of Artificial Sequence: Synthetic oligonucleotide
  Target: PCSK9; (-) strand; PAM type: YTN; PAM sequence: TTC
agagccagcccaatctgcgt

SEQ ID NO: 22814 - DNA, 20 bp, Artificial Sequence
  Description of Artificial Sequence: Synthetic oligonucleotide
  Target: PCSK9; (-) strand; PAM type: YTN; PAM sequence: CTT
cagagccagcccaatctgcg

SEQ ID NO: 22815 - DNA, 20 bp, Artificial Sequence
  Description of Artificial Sequence: Synthetic oligonucleotide
  Target: PCSK9; (-) strand; PAM type: YTN; PAM sequence: TTG
gcttcagagccagcccaatc

SEQ ID NO: 22816 - DNA, 20 bp, Artificial Sequence
  Description of Artificial Sequence: Synthetic oligonucleotide
  Target: PCSK9; (-) strand; PAM type: YTN; PAM sequence: CTT
ggcttcagagccagcccaat

SEQ ID NO: 22817 - DNA, 20 bp, Artificial Sequence
  Description of Artificial Sequence: Synthetic oligonucleotide
  Target: PCSK9; (-) strand; PAM type: YTN; PAM sequence: TTA
cccgtaaaaatgaggagccc

SEQ ID NO: 22818 - DNA, 20 bp, Artificial Sequence
  Description of Artificial Sequence: Synthetic oligonucleotide
  Target: PCSK9; (-) strand; PAM type: YTN; PAM sequence: CTG
ttacccgtaaaaatgaggag

SEQ ID NO: 22819 - DNA, 20 bp, Artificial Sequence
  Description of Artificial Sequence: Synthetic oligonucleotide
  Target: PCSK9; (-) strand; PAM type: YTN; PAM sequence: CTC
actgttacccgtaaaaatga

SEQ ID NO: 22820 - DNA, 20 bp, Artificial Sequence
  Description of Artificial Sequence: Synthetic oligonucleotide
  Target: PCSK9; (-) strand; PAM type: YTN; PAM sequence: TTC
ccagcctcactgttacccgt

SEQ ID NO: 22821 - DNA, 20 bp, Artificial Sequence
  Description of Artificial Sequence: Synthetic oligonucleotide
  Target: PCSK9; (-) strand; PAM type: YTN; PAM sequence: CTT
cccagcctcactgttacccg

SEQ ID NO: 22822 - DNA, 20 bp, Artificial Sequence
  Description of Artificial Sequence: Synthetic oligonucleotide
  Target: PCSK9; (-) strand; PAM type: YTN; PAM sequence: TTC
cccttcccagcctcactgtt

SEQ ID NO: 22823 - DNA, 20 bp, Artificial Sequence
  Description of Artificial Sequence: Synthetic oligonucleotide
  Target: PCSK9; (-) strand; PAM type: YTN; PAM sequence: CTG
tgttccccttcccagcctca

SEQ ID NO: 22824 - DNA, 20 bp, Artificial Sequence
  Description of Artificial Sequence: Synthetic oligonucleotide
  Target: PCSK9; (-) strand; PAM type: YTN; PAM sequence: CTG
gtctgtgttccccttcccag

SEQ ID NO: 22825 - DNA, 20 bp, Artificial Sequence
  Description of Artificial Sequence: Synthetic oligonucleotide
  Target: PCSK9; (-) strand; PAM type: YTN; PAM sequence: TTC
ctggtctgtgttccccttcc

SEQ ID NO: 22826 - DNA, 20 bp, Artificial Sequence
  Description of Artificial Sequence: Synthetic oligonucleotide
  Target: PCSK9; (-) strand; PAM type: YTN; PAM sequence: CTT
cctggtctgtgttccccttc

SEQ ID NO: 22827 - DNA, 20 bp, Artificial Sequence
  Description of Artificial Sequence: Synthetic oligonucleotide
  Target: PCSK9; (-) strand; PAM type: YTN; PAM sequence: CTC
accgagcttcctggtctgtg

SEQ ID NO: 22828 - DNA, 20 bp, Artificial Sequence
  Description of Artificial Sequence: Synthetic oligonucleotide
  Target: PCSK9; (-) strand; PAM type: YTN; PAM sequence: CTG
ccatcactcaccgagcttcc

SEQ ID NO: 22829 - DNA, 20 bp, Artificial Sequence
  Description of Artificial Sequence: Synthetic oligonucleotide
  Target: PCSK9; (-) strand; PAM type: YTN; PAM sequence: TTC
tgccatcactcaccgagctt

SEQ ID NO: 22830 - DNA, 20 bp, Artificial Sequence
  Description of Artificial Sequence: Synthetic oligonucleotide
  Target: PCSK9; (-) strand; PAM type: YTN; PAM sequence: CTG
caggcatcgttctgccatca

SEQ ID NO: 22831 - DNA, 20 bp, Artificial Sequence
  Description of Artificial Sequence: Synthetic oligonucleotide
  Target: PCSK9; (-) strand; PAM type: YTN; PAM sequence: TTC
catgcctgcaggcatcgttc

SEQ ID NO: 22832 - DNA, 20 bp, Artificial Sequence
  Description of Artificial Sequence: Synthetic oligonucleotide
  Target: PCSK9; (-) strand; PAM type: YTN; PAM sequence: CTG
ggtgataacggaaaaagttc

SEQ ID NO: 22833 - DNA, 20 bp, Artificial Sequence
  Description of Artificial Sequence: Synthetic oligonucleotide
  Target: PCSK9; (-) strand; PAM type: YTN; PAM sequence: CTC
cgccaggccagtgaatcagg

SEQ ID NO: 22834 - DNA, 20 bp, Artificial Sequence
  Description of Artificial Sequence: Synthetic oligonucleotide
  Target: PCSK9; (-) strand; PAM type: YTN; PAM sequence: TTA
gaagcatctccgccaggcca

SEQ ID NO: 22835 - DNA, 20 bp, Artificial Sequence
  Description of Artificial Sequence: Synthetic oligonucleotide
  Target: PCSK9; (-) strand; PAM type: YTN; PAM sequence: CTT
agaagcatctccgccaggcc

SEQ ID NO: 22836 - DNA, 20 bp, Artificial Sequence
  Description of Artificial Sequence: Synthetic oligonucleotide
  Target: PCSK9; (-) strand; PAM type: YTN; PAM sequence: CTC
ccccgaccatgccttagaag

SEQ ID NO: 22837 - DNA, 20 bp, Artificial Sequence
  Description of Artificial Sequence: Synthetic oligonucleotide
  Target: PCSK9; (-) strand; PAM type: YTN; PAM sequence: CTC
tcccccgaccatgccttaga

SEQ ID NO: 22838 - DNA, 20 bp, Artificial Sequence
  Description of Artificial Sequence: Synthetic oligonucleotide
  Target: PCSK9; (-) strand; PAM type: YTN; PAM sequence: TTG
gccctctcccccgaccatgc

SEQ ID NO: 22839 - DNA, 20 bp, Artificial Sequence
  Description of Artificial Sequence: Synthetic oligonucleotide
  Target: PCSK9; (-) strand; PAM type: YTN; PAM sequence: TTG
ttggccctctcccccgacca

SEQ ID NO: 22840 - DNA, 20 bp, Artificial Sequence
  Description of Artificial Sequence: Synthetic oligonucleotide
  Target: PCSK9; (-) strand; PAM type: YTN; PAM sequence: CTC
aaggagggacagttgttggc

SEQ ID NO: 22841 - DNA, 20 bp, Artificial Sequence
  Description of Artificial Sequence: Synthetic oligonucleotide
  Target: PCSK9; (-) strand; PAM type: YTN; PAM sequence: CTG
gtgctcaaggagggacagtt

SEQ ID NO: 22842 - DNA, 20 bp, Artificial Sequence
  Description of Artificial Sequence: Synthetic oligonucleotide
  Target: PCSK9; (-) strand; PAM type: YTN; PAM sequence: TTG
ggtggggctggtgctcaagg

SEQ ID NO: 22843 - DNA, 20 bp, Artificial Sequence
  Description of Artificial Sequence: Synthetic oligonucleotide
  Target: PCSK9; (-) strand; PAM type: YTN; PAM sequence: CTT
gggtggggctggtgctcaag

SEQ ID NO: 22844 - DNA, 20 bp, Artificial Sequence
  Description of Artificial Sequence: Synthetic oligonucleotide
  Target: PCSK9; (-) strand; PAM type: YTN; PAM sequence: TTG
cttgggtggggctggtgctc

SEQ ID NO: 22845 - DNA, 20 bp, Artificial Sequence
  Description of Artificial Sequence: Synthetic oligonucleotide
  Target: PCSK9; (-) strand; PAM type: YTN; PAM sequence: CTT
gcttgggtggggctggtgct

SEQ ID NO: 22846 - DNA, 20 bp, Artificial Sequence
  Description of Artificial Sequence: Synthetic oligonucleotide
  Target: PCSK9; (-) strand; PAM type: YTN; PAM sequence: CTG
cttgcttgggtggggctggt

SEQ ID NO: 22847 - DNA, 20 bp, Artificial Sequence
  Description of Artificial Sequence: Synthetic oligonucleotide
  Target: PCSK9; (-) strand; PAM type: YTN; PAM sequence: CTG
taaaaaggcaacagagagga

SEQ ID NO: 22848 - DNA, 20 bp, Artificial Sequence
  Description of Artificial Sequence: Synthetic oligonucleotide
  Target: PCSK9; (-) strand; PAM type: YTN; PAM sequence: TTG
gctgtaaaaaggcaacagag

SEQ ID NO: 22849 - DNA, 20 bp, Artificial Sequence
  Description of Artificial Sequence: Synthetic oligonucleotide
  Target: PCSK9; (-) strand; PAM type: YTN; PAM sequence: CTA
gaaaagttggctgtaaaaag

SEQ ID NO: 22850 - DNA, 20 bp, Artificial Sequence
  Description of Artificial Sequence: Synthetic oligonucleotide
  Target: PCSK9; (-) strand; PAM type: YTN; PAM sequence: TTA
caaaagcaaaacaggtctag

SEQ ID NO: 22851 - DNA, 20 bp, Artificial Sequence
  Description of Artificial Sequence: Synthetic oligonucleotide
  Target: PCSK9; (-) strand; PAM type: YTN; PAM sequence: TTC
aagttacaaaagcaaaacag

SEQ ID NO: 22852 - DNA, 20 bp, Artificial Sequence
  Description of Artificial Sequence: Synthetic oligonucleotide
  Target: PCSK9; (-) strand; PAM type: YTN; PAM sequence: CTT
caagttacaaaagcaaaaca

SEQ ID NO: 22853 - DNA, 20 bp, Artificial Sequence
  Description of Artificial Sequence: Synthetic oligonucleotide
  Target: PCSK9; (-) strand; PAM type: YTN; PAM sequence: CTA
caaaacccagaataaatatc

SEQ ID NO: 22854 - DNA, 20 bp, Artificial Sequence
  Description of Artificial Sequence: Synthetic oligonucleotide
  Target: PCSK9; (-) strand; PAM type: YTN; PAM sequence: TTA
ataaaaatgctacaaaaccc

SEQ ID NO: 22855 - DNA, 20 bp, Artificial Sequence
  Description of Artificial Sequence: Synthetic oligonucleotide
  Target: PCSK9; (-) strand; PAM type: YTN; PAM sequence: TTA
aaaagtcaccatattaataa

SEQ ID NO: 22856 - DNA, 20 bp, Artificial Sequence
  Description of Artificial Sequence: Synthetic oligonucleotide
  Target: PCSK9; (-) strand; PAM type: YTN; PAM sequence: TTT
aaaaagtcaccatattaata

SEQ ID NO: 22857 - DNA, 20 bp, Artificial Sequence
  Description of Artificial Sequence: Synthetic oligonucleotide
  Target: PCSK9; (-) strand; PAM type: YTN; PAM sequence: TTT
taaaaagtcaccatattaat

SEQ ID NO: 22858 - DNA, 20 bp, Artificial Sequence
  Description of Artificial Sequence: Synthetic oligonucleotide
  Target: PCSK9; (-) strand; PAM type: YTN; PAM sequence: TTA
ttttaaaaagtcaccatatt

SEQ ID NO: 22859 - DNA, 20 bp, Artificial Sequence
  Description of Artificial Sequence: Synthetic oligonucleotide
  Target: PCSK9; (-) strand; PAM type: YTN; PAM sequence: TTT
attttaaaaagtcaccatat

SEQ ID NO: 22860 - DNA, 20 bp, Artificial Sequence
  Description of Artificial Sequence: Synthetic oligonucleotide
  Target: PCSK9; (-) strand; PAM type: YTN; PAM sequence: TTT
tattttaaaaagtcaccata

SEQ ID NO: 22861 - DNA, 20 bp, Artificial Sequence
  Description of Artificial Sequence: Synthetic oligonucleotide
  Target: PCSK9; (-) strand; PAM type: YTN; PAM sequence: TTT
ttattttaaaaagtcaccat

SEQ ID NO: 22862 - DNA, 20 bp, Artificial Sequence
  Description of Artificial Sequence: Synthetic oligonucleotide
  Target: PCSK9; (-) strand; PAM type: YTN; PAM sequence: TTG
tttttattttaaaaagtcac

SEQ ID NO: 22863 - DNA, 20 bp, Artificial Sequence
  Description of Artificial Sequence: Synthetic oligonucleotide
  Target: PCSK9; (-) strand; PAM type: YTN; PAM sequence: TTT
gtttttattttaaaaagtca

SEQ ID NO: 22864 - DNA, 20 bp, Artificial Sequence
  Description of Artificial Sequence: Synthetic oligonucleotide
  Target: PCSK9; (-) strand; PAM type: YTN; PAM sequence: TTG
tttgtttttattttaaaaag

SEQ ID NO: 22865 - DNA, 20 bp, Artificial Sequence
  Description of Artificial Sequence: Synthetic oligonucleotide
  Target: PCSK9; (-) strand; PAM type: YTN; PAM sequence: TTT
gtttgtttttattttaaaaa

SEQ ID NO: 22866 - DNA, 20 bp, Artificial Sequence
  Description of Artificial Sequence: Synthetic oligonucleotide
  Target: PCSK9; (-) strand; PAM type: YTN; PAM sequence: TTA
ggacaacgtttgtttgtttt

SEQ ID NO: 22867 - DNA, 20 bp, Artificial Sequence
  Description of Artificial Sequence: Synthetic oligonucleotide
  Target: PCSK9; (-) strand; PAM type: YTN; PAM sequence: CTA
tgcaagagttaggacaacgt

SEQ ID NO: 22868 - DNA, 20 bp, Artificial Sequence
  Description of Artificial Sequence: Synthetic oligonucleotide
  Target: PCSK9; (-) strand; PAM type: YTN; PAM sequence: CTA
ggcagtcaagtctatgcaag

SEQ ID NO: 22869 - DNA, 20 bp, Artificial Sequence
  Description of Artificial Sequence: Synthetic oligonucleotide
  Target: PCSK9; (-) strand; PAM type: YTN; PAM sequence: CTA
gtataagcaaggcatcaccc

SEQ ID NO: 22870 - DNA, 20 bp, Artificial Sequence
  Description of Artificial Sequence: Synthetic oligonucleotide
  Target: PCSK9; (-) strand; PAM type: YTN; PAM sequence: TTC
ctagtataagcaaggcatca

SEQ ID NO: 22871 - DNA, 20 bp, Artificial Sequence
  Description of Artificial Sequence: Synthetic oligonucleotide
  Target: PCSK9; (-) strand; PAM type: YTN; PAM sequence: TTA
cccagttcctagtataagca

SEQ ID NO: 22872 - DNA, 20 bp, Artificial Sequence
  Description of Artificial Sequence: Synthetic oligonucleotide
  Target: PCSK9; (-) strand; PAM type: YTN; PAM sequence: CTT
acccagttcctagtataagc

SEQ ID NO: 22873 - DNA, 20 bp, Artificial Sequence
  Description of Artificial Sequence: Synthetic oligonucleotide
  Target: PCSK9; (-) strand; PAM type: YTN; PAM sequence: TTC
aacaaacttacccagttcct

SEQ ID NO: 22874 - DNA, 20 bp, Artificial Sequence
  Description of Artificial Sequence: Synthetic oligonucleotide
  Target: PCSK9; (-) strand; PAM type: YTN; PAM sequence: CTA
ttcaacaaacttacccagtt

SEQ ID NO: 22875 - DNA, 20 bp, Artificial Sequence
  Description of Artificial Sequence: Synthetic oligonucleotide
  Target: PCSK9; (-) strand; PAM type: YTN; PAM sequence: CTC
aactattcaacaaacttacc

SEQ ID NO: 22876 - DNA, 20 bp, Artificial Sequence
  Description of Artificial Sequence: Synthetic oligonucleotide
  Target: PCSK9; (-) strand; PAM type: YTN; PAM sequence: TTA
ctcaactattcaacaaactt

SEQ ID NO: 22877 - DNA, 20 bp, Artificial Sequence
  Description of Artificial Sequence: Synthetic oligonucleotide
  Target: PCSK9; (-) strand; PAM type: YTN; PAM sequence: CTT
actcaactattcaacaaact

SEQ ID NO: 22878 - DNA, 20 bp, Artificial Sequence
  Description of Artificial Sequence: Synthetic oligonucleotide
  Target: PCSK9; (-) strand; PAM type: YTN; PAM sequence: TTG
gcttactcaactattcaaca

SEQ ID NO: 22879 - DNA, 20 bp, Artificial Sequence
  Description of Artificial Sequence: Synthetic oligonucleotide
  Target: PCSK9; (-) strand; PAM type: YTN; PAM sequence: CTT
ggcttactcaactattcaac

SEQ ID NO: 22880 - DNA, 20 bp, Artificial Sequence
  Description of Artificial Sequence: Synthetic oligonucleotide
  Target: PCSK9; (-) strand; PAM type: YTN; PAM sequence: CTC
atcaaatacttggcttactc

SEQ ID NO: 22881 - DNA, 20 bp, Artificial Sequence
  Description of Artificial Sequence: Synthetic oligonucleotide
  Target: PCSK9; (-) strand; PAM type: YTN; PAM sequence: CTC
aagataaaagtactcatcaa

SEQ ID NO: 22882 - DNA, 20 bp, Artificial Sequence
  Description of Artificial Sequence: Synthetic oligonucleotide
  Target: PCSK9; (-) strand; PAM type: YTN; PAM sequence: TTG
tactcaagataaaagtactc

SEQ ID NO: 22883 - DNA, 20 bp, Artificial Sequence
  Description of Artificial Sequence: Synthetic oligonucleotide
  Target: PCSK9; (-) strand; PAM type: YTN; PAM sequence: CTT
gtactcaagataaaagtact

SEQ ID NO: 22884 - DNA, 20 bp, Artificial Sequence
  Description of Artificial Sequence: Synthetic oligonucleotide
  Target: PCSK9; (-) strand; PAM type: YTN; PAM sequence: TTG
cccaatacttgtactcaaga

SEQ ID NO: 22885 - DNA, 20 bp, Artificial Sequence
  Description of Artificial Sequence: Synthetic oligonucleotide
  Target: PCSK9; (-) strand; PAM type: YTN; PAM sequence: CTT
gcccaatacttgtactcaag

SEQ ID NO: 22886 - DNA, 20 bp, Artificial Sequence
  Description of Artificial Sequence: Synthetic oligonucleotide
  Target: PCSK9; (-) strand; PAM type: YTN; PAM sequence: TTC
acatcaccagtacttgccca

SEQ ID NO: 22887 - DNA, 20 bp, Artificial Sequence
  Description of Artificial Sequence: Synthetic oligonucleotide
  Target: PCSK9; (-) strand; PAM type: YTN; PAM sequence: CTA
ggataggcacaaggagtaag

SEQ ID NO: 22888 - DNA, 20 bp, Artificial Sequence
  Description of Artificial Sequence: Synthetic oligonucleotide
  Target: PCSK9; (-) strand; PAM type: YTN; PAM sequence: TTC
ctaggataggcacaaggagt

SEQ ID NO: 22889 - DNA, 20 bp, Artificial Sequence
  Description of Artificial Sequence: Synthetic oligonucleotide
  Target: PCSK9; (-) strand; PAM type: YTN; PAM sequence: TTC
attcctaggataggcacaag

SEQ ID NO: 22890 - DNA, 20 bp, Artificial Sequence
  Description of Artificial Sequence: Synthetic oligonucleotide
  Target: PCSK9; (-) strand; PAM type: YTN; PAM sequence: TTT
cattcctaggataggcacaa

SEQ ID NO: 22891 - DNA, 20 bp, Artificial Sequence
  Description of Artificial Sequence: Synthetic oligonucleotide
  Target: PCSK9; (-) strand; PAM type: YTN; PAM sequence: TTC
atttcattcctaggataggc

SEQ ID NO: 22892 - DNA, 20 bp, Artificial Sequence
  Description of Artificial Sequence: Synthetic oligonucleotide
  Target: PCSK9; (-) strand; PAM type: YTN; PAM sequence: CTG
caggaagacattcatttcat

SEQ ID NO: 22893 - DNA, 20 bp, Artificial Sequence
  Description of Artificial Sequence: Synthetic oligonucleotide
  Target: PCSK9; (-) strand; PAM type: YTN; PAM sequence: CTG
tcagggtggtcaggggagct

SEQ ID NO: 22894 - DNA, 20 bp, Artificial Sequence
  Description of Artificial Sequence: Synthetic oligonucleotide
  Target: PCSK9; (-) strand; PAM type: YTN; PAM sequence: TTG
actgtcagggtggtcagggg

SEQ ID NO: 22895 - DNA, 20 bp, Artificial Sequence
  Description of Artificial Sequence: Synthetic oligonucleotide
  Target: PCSK9; (-) strand; PAM type: YTN; PAM sequence: TTT
gactgtcagggtggtcaggg

SEQ ID NO: 22896 - DNA, 20 bp, Artificial Sequence
  Description of Artificial Sequence: Synthetic oligonucleotide
  Target: PCSK9; (-) strand; PAM type: YTN; PAM sequence: CTT
tgactgtcagggtggtcagg

SEQ ID NO: 22897 - DNA, 20 bp, Artificial Sequence
  Description of Artificial Sequence: Synthetic oligonucleotide
  Target: PCSK9; (-) strand; PAM type: YTN; PAM sequence: CTG
tcaccaaggaggaggcactt

SEQ ID NO: 22898 - DNA, 20 bp, Artificial Sequence
  Description of Artificial Sequence: Synthetic oligonucleotide
  Target: PCSK9; (-) strand; PAM type: YTN; PAM sequence: CTG
tagggcacctgtcaccaagg

SEQ ID NO: 22899 - DNA, 20 bp, Artificial Sequence
  Description of Artificial Sequence: Synthetic oligonucleotide
  Target: PCSK9; (-) strand; PAM type: YTN; PAM sequence: CTA
gagtgctgtagggcacctgt

SEQ ID NO: 22900 - DNA, 20 bp, Artificial Sequence
  Description of Artificial Sequence: Synthetic oligonucleotide
  Target: PCSK9; (-) strand; PAM type: YTN; PAM sequence: TTG
ggaggtcaggacaacagagc

SEQ ID NO: 22901 - DNA, 20 bp, Artificial Sequence
  Description of Artificial Sequence: Synthetic oligonucleotide
  Target: PCSK9; (-) strand; PAM type: YTN; PAM sequence: CTG
gggagaaaagaatgaaaagg

SEQ ID NO: 22902 - DNA, 20 bp, Artificial Sequence
  Description of Artificial Sequence: Synthetic oligonucleotide
  Target: PCSK9; (-) strand; PAM type: YTN; PAM sequence: CTG
tgtgccaggtactggggaga

SEQ ID NO: 22903 - DNA, 20 bp, Artificial Sequence
  Description of Artificial Sequence: Synthetic oligonucleotide
  Target: PCSK9; (-) strand; PAM type: YTN; PAM sequence: CTC
gggccaggctgtgtgccagg

SEQ ID NO: 22904 - DNA, 20 bp, Artificial Sequence
  Description of Artificial Sequence: Synthetic oligonucleotide
  Target: PCSK9; (-) strand; PAM type: YTN; PAM sequence: TTC
cgtaaatactcgggccaggc

SEQ ID NO: 22905 - DNA, 20 bp, Artificial Sequence
  Description of Artificial Sequence: Synthetic oligonucleotide
  Target: PCSK9; (-) strand; PAM type: YTN; PAM sequence: TTA
ttccgtaaatactcgggcca

SEQ ID NO: 22906 - DNA, 20 bp, Artificial Sequence
  Description of Artificial Sequence: Synthetic oligonucleotide
  Target: PCSK9; (-) strand; PAM type: YTN; PAM sequence: CTT
attccgtaaatactcgggcc

SEQ ID NO: 22907 - DNA, 20 bp, Artificial Sequence
  Description of Artificial Sequence: Synthetic oligonucleotide
  Target: PCSK9; (-) strand; PAM type: YTN; PAM sequence: CTG
taacttattccgtaaatact

SEQ ID NO: 22908 - DNA, 20 bp, Artificial Sequence
  Description of Artificial Sequence: Synthetic oligonucleotide
  Target: PCSK9; (-) strand; PAM type: YTN; PAM sequence: CTG
gcactgtaacttattccgta

SEQ ID NO: 22909 - DNA, 20 bp, Artificial Sequence
  Description of Artificial Sequence: Synthetic oligonucleotide
  Target: PCSK9; (-) strand; PAM type: YTN; PAM sequence: TTA
cagaagcatctggcactgta

SEQ ID NO: 22910 - DNA, 20 bp, Artificial Sequence
  Description of Artificial Sequence: Synthetic oligonucleotide
  Target: PCSK9; (-) strand; PAM type: YTN; PAM sequence: CTC
attacagaagcatctggcac

SEQ ID NO: 22911 - DNA, 20 bp, Artificial Sequence
  Description of Artificial Sequence: Synthetic oligonucleotide
  Target: PCSK9; (-) strand; PAM type: YTN; PAM sequence: CTG
gctcattacagaagcatctg

SEQ ID NO: 22912 - DNA, 20 bp, Artificial Sequence
  Description of Artificial Sequence: Synthetic oligonucleotide
  Target: PCSK9; (-) strand; PAM type: YTN; PAM sequence: TTA
gcactggctcattacagaag

SEQ ID NO: 22913 - DNA, 20 bp, Artificial Sequence
  Description of Artificial Sequence: Synthetic oligonucleotide
  Target: PCSK9; (-) strand; PAM type: YTN; PAM sequence: CTT
agcactggctcattacagaa

SEQ ID NO: 22914 - DNA, 20 bp, Artificial Sequence
  Description of Artificial Sequence: Synthetic oligonucleotide
  Target: PCSK9; (-) strand; PAM type: YTN; PAM sequence: TTA
aatcatgaaaaaagccatgg

SEQ ID NO: 22915 - DNA, 20 bp, Artificial Sequence
  Description of Artificial Sequence: Synthetic oligonucleotide
  Target: PCSK9; (-) strand; PAM type: YTN; PAM sequence: TTT
aaatcatgaaaaaagccatg

SEQ ID NO: 22916 - DNA, 20 bp, Artificial Sequence
  Description of Artificial Sequence: Synthetic oligonucleotide
  Target: PCSK9; (-) strand; PAM type: YTN; PAM sequence: TTT
taaatcatgaaaaaagccat

SEQ ID NO: 22917 - DNA, 20 bp, Artificial Sequence
  Description of Artificial Sequence: Synthetic oligonucleotide
  Target: PCSK9; (-) strand; PAM type: YTN; PAM sequence: CTG
aattttaaatcatgaaaaaa

SEQ ID NO: 22918 - DNA, 20 bp, Artificial Sequence
  Description of Artificial Sequence: Synthetic oligonucleotide
  Target: PCSK9; (-) strand; PAM type: YTN; PAM sequence: TTC
tgaattttaaatcatgaaaa

SEQ ID NO: 22919 - DNA, 20 bp, Artificial Sequence
  Description of Artificial Sequence: Synthetic oligonucleotide
  Target: PCSK9; (-) strand; PAM type: YTN; PAM sequence: CTG
ttctgaattttaaatcatga

SEQ ID NO: 22920 - DNA, 20 bp, Artificial Sequence
  Description of Artificial Sequence: Synthetic oligonucleotide
  Target: PCSK9; (-) strand; PAM type: YTN; PAM sequence: CTG
agactgttctgaattttaaa

SEQ ID NO: 22921 - DNA, 20 bp, Artificial Sequence
  Description of Artificial Sequence: Synthetic oligonucleotide
  Target: PCSK9; (-) strand; PAM type: YTN; PAM sequence: TTG
cacccaatctgagactgttc

SEQ ID NO: 22922 - DNA, 20 bp, Artificial Sequence
  Description of Artificial Sequence: Synthetic oligonucleotide
  Target: PCSK9; (-) strand; PAM type: YTN; PAM sequence: TTA
caggtgtgagccattgcacc

SEQ ID NO: 22923 - DNA, 20 bp, Artificial Sequence
  Description of Artificial Sequence: Synthetic oligonucleotide
  Target: PCSK9; (-) strand; PAM type: YTN; PAM sequence: CTG
agattacaggtgtgagccat

SEQ ID NO: 22924 - DNA, 20 bp, Artificial Sequence
  Description of Artificial Sequence: Synthetic oligonucleotide
  Target: PCSK9; (-) strand; PAM type: YTN; PAM sequence: CTC
ccaaagtactgagattacag

SEQ ID NO: 22925 - DNA, 20 bp, Artificial Sequence
  Description of Artificial Sequence: Synthetic oligonucleotide
  Target: PCSK9; (-) strand; PAM type: YTN; PAM sequence: CTC
agcctcccaaagtactgaga

SEQ ID NO: 22926 - DNA, 20 bp, Artificial Sequence
  Description of Artificial Sequence: Synthetic oligonucleotide
  Target: PCSK9; (-) strand; PAM type: YTN; PAM sequence: CTG
cctcagcctcccaaagtact

SEQ ID NO: 22927 - DNA, 20 bp, Artificial Sequence
  Description of Artificial Sequence: Synthetic oligonucleotide
  Target: PCSK9; (-) strand; PAM type: YTN; PAM sequence: CTC
ctgcctcagcctcccaaagt

SEQ ID NO: 22928 - DNA, 20 bp, Artificial Sequence
  Description of Artificial Sequence: Synthetic oligonucleotide
  Target: PCSK9; (-) strand; PAM type: YTN; PAM sequence: CTA
aacacaagcaatcctcctgc

SEQ ID NO: 22929 - DNA, 20 bp, Artificial Sequence
  Description of Artificial Sequence: Synthetic oligonucleotide
  Target: PCSK9; (-) strand; PAM type: YTN; PAM sequence: TTC
ctaaacacaagcaatcctcc

SEQ ID NO: 22930 - DNA, 20 bp, Artificial Sequence
  Description of Artificial Sequence: Synthetic oligonucleotide
  Target: PCSK9; (-) strand; PAM type: YTN; PAM sequence: TTG
aattcctaaacacaagcaat

SEQ ID NO: 22931 - DNA, 20 bp, Artificial Sequence
  Description of Artificial Sequence: Synthetic oligonucleotide
  Target: PCSK9; (-) strand; PAM type: YTN; PAM sequence: CTT
gaattcctaaacacaagcaa

SEQ ID NO: 22932 - DNA, 20 bp, Artificial Sequence
  Description of Artificial Sequence: Synthetic oligonucleotide
  Target: PCSK9; (-) strand; PAM type: YTN; PAM sequence: TTG
cccagggtcttgaattccta

SEQ ID NO: 22933 - DNA, 20 bp, Artificial Sequence
  Description of Artificial Sequence: Synthetic oligonucleotide
  Target: PCSK9; (-) strand; PAM type: YTN; PAM sequence: CTG
ttgcccagggtcttgaattc

SEQ ID NO: 22934 - DNA, 20 bp, Artificial Sequence
  Description of Artificial Sequence: Synthetic oligonucleotide
  Target: PCSK9; (-) strand; PAM type: YTN; PAM sequence: CTC
actgttgcccagggtcttga

SEQ ID NO: 22935 - DNA, 20 bp, Artificial Sequence
  Description of Artificial Sequence: Synthetic oligonucleotide
  Target: PCSK9; (-) strand; PAM type: YTN; PAM sequence: TTA
tagagacggggtctcactgt

SEQ ID NO: 22936 - DNA, 20 bp, Artificial Sequence
  Description of Artificial Sequence: Synthetic oligonucleotide
  Target: PCSK9; (-) strand; PAM type: YTN; PAM sequence: TTT
atagagacggggtctcactg

SEQ ID NO: 22937 - DNA, 20 bp, Artificial Sequence
  Description of Artificial Sequence: Synthetic oligonucleotide
  Target: PCSK9; (-) strand; PAM type: YTN; PAM sequence: TTT
tatagagacggggtctcact

SEQ ID NO: 22938 - DNA, 20 bp, Artificial Sequence
  Description of Artificial Sequence: Synthetic oligonucleotide
  Target: PCSK9; (-) strand; PAM type: YTN; PAM sequence: TTT
ttatagagacggggtctcac

SEQ ID NO: 22939 - DNA, 20 bp, Artificial Sequence
  Description of Artificial Sequence: Synthetic oligonucleotide
  Target: PCSK9; (-) strand; PAM type: YTN; PAM sequence: TTT
tttatagagacggggtctca

SEQ ID NO: 22940 - DNA, 20 bp, Artificial Sequence
  Description of Artificial Sequence: Synthetic oligonucleotide
  Target: PCSK9; (-) strand; PAM type: YTN; PAM sequence: TTT
ttttatagagacggggtctc

SEQ ID NO: 22941 - DNA, 20 bp, Artificial Sequence
  Description of Artificial Sequence: Synthetic oligonucleotide
  Target: PCSK9; (-) strand; PAM type: YTN; PAM sequence: TTA
aatttttttatagagacggg

SEQ ID NO: 22942 - DNA, 20 bp, Artificial Sequence
  Description of Artificial Sequence: Synthetic oligonucleotide
  Target: PCSK9; (-) strand; PAM type: YTN; PAM sequence: TTT
aaatttttttatagagacgg

SEQ ID NO: 22943 - DNA, 20 bp, Artificial Sequence
  Description of Artificial Sequence: Synthetic oligonucleotide
  Target: PCSK9; (-) strand; PAM type: YTN; PAM sequence: TTT
taaatttttttatagagacg

SEQ ID NO: 22944 - DNA, 20 bp, Artificial Sequence
  Description of Artificial Sequence: Synthetic oligonucleotide
  Target: PCSK9; (-) strand; PAM type: YTN; PAM sequence: CTT
ttaaatttttttatagagac

SEQ ID NO: 22945 - DNA, 20 bp, Artificial Sequence
  Description of Artificial Sequence: Synthetic oligonucleotide
  Target: PCSK9; (-) strand; PAM type: YTN; PAM sequence: CTA
atcttttaaatttttttata

SEQ ID NO: 22946 - DNA, 20 bp, Artificial Sequence
  Description of Artificial Sequence: Synthetic oligonucleotide
  Target: PCSK9; (-) strand; PAM type: YTN; PAM sequence: CTC
gctaatcttttaaatttttt

SEQ ID NO: 22947 - DNA, 20 bp, Artificial Sequence
  Description of Artificial Sequence: Synthetic oligonucleotide
  Target: PCSK9; (-) strand; PAM type: YTN; PAM sequence: CTA
ccacacctcgctaatctttt

SEQ ID NO: 22948 - DNA, 20 bp, Artificial Sequence
  Description of Artificial Sequence: Synthetic oligonucleotide
  Target: PCSK9; (-) strand; PAM type: YTN; PAM sequence: CTG
agtagccgggaccacaggca

SEQ ID NO: 22949 - DNA, 20 bp, Artificial Sequence
  Description of Artificial Sequence: Synthetic oligonucleotide
  Target: PCSK9; (-) strand; PAM type: YTN; PAM sequence: CTC
ctgagtagccgggaccacag

SEQ ID NO: 22950 - DNA, 20 bp, Artificial Sequence
  Description of Artificial Sequence: Synthetic oligonucleotide
  Target: PCSK9; (-) strand; PAM type: YTN; PAM sequence: CTC
ccatatcagcctcctgagta

SEQ ID NO: 22951 - DNA, 20 bp, Artificial Sequence
  Description of Artificial Sequence: Synthetic oligonucleotide
  Target: PCSK9; (-) strand; PAM type: YTN; PAM sequence: CTC
aagcaagcctcccatatcag

SEQ ID NO: 22952 - DNA, 20 bp, Artificial Sequence
  Description of Artificial Sequence: Synthetic oligonucleotide
  Target: PCSK9; (-) strand; PAM type: YTN; PAM sequence: CTC
ccagctcaagcaagcctccc

SEQ ID NO: 22953 - DNA, 20 bp, Artificial Sequence
  Description of Artificial Sequence: Synthetic oligonucleotide
  Target: PCSK9; (-) strand; PAM type: YTN; PAM sequence: CTC
agcctcccagctcaagcaag

SEQ ID NO: 22954 - DNA, 20 bp, Artificial Sequence
  Description of Artificial Sequence: Synthetic oligonucleotide
  Target: PCSK9; (-) strand; PAM type: YTN; PAM sequence: CTG
caccctcagcctcccagctc

SEQ ID NO: 22955 - DNA, 20 bp, Artificial Sequence
  Description of Artificial Sequence: Synthetic oligonucleotide
  Target: PCSK9; (-) strand; PAM type: YTN; PAM sequence: CTC
actgcaccctcagcctccca

SEQ ID NO: 22956 - DNA, 20 bp, Artificial Sequence
  Description of Artificial Sequence: Synthetic oligonucleotide
  Target: PCSK9; (-) strand; PAM type: YTN; PAM sequence: TTA
cagctcactgcaccctcagc

SEQ ID NO: 22957 - DNA, 20 bp, Artificial Sequence
  Description of Artificial Sequence: Synthetic oligonucleotide
  Target: PCSK9; (-) strand; PAM type: YTN; PAM sequence: CTG
cagtgcagtgatgatgtaat

SEQ ID NO: 22958 - DNA, 20 bp, Artificial Sequence
  Description of Artificial Sequence: Synthetic oligonucleotide
  Target: PCSK9; (-) strand; PAM type: YTN; PAM sequence: CTG
taacccaggctgcagtgcag

SEQ ID NO: 22959 - DNA, 20 bp, Artificial Sequence
  Description of Artificial Sequence: Synthetic oligonucleotide
  Target: PCSK9; (-) strand; PAM type: YTN; PAM sequence: CTC
tgtaacccaggctgcagtgc

SEQ ID NO: 22960 - DNA, 20 bp, Artificial Sequence
  Description of Artificial Sequence: Synthetic oligonucleotide
  Target: PCSK9; (-) strand; PAM type: YTN; PAM sequence: TTA
tgcactctgtaacccaggct

SEQ ID NO: 22961 - DNA, 20 bp, Artificial Sequence
  Description of Artificial Sequence: Synthetic oligonucleotide
  Target: PCSK9; (-) strand; PAM type: YTN; PAM sequence: TTG
aatgggatcattatgcactc

SEQ ID NO: 22962 - DNA, 20 bp, Artificial Sequence
  Description of Artificial Sequence: Synthetic oligonucleotide
  Target: PCSK9; (-) strand; PAM type: YTN; PAM sequence: CTG
gaggtcccacattgaatggg

SEQ ID NO: 22963 - DNA, 20 bp, Artificial Sequence
  Description of Artificial Sequence: Synthetic oligonucleotide
  Target: PCSK9; (-) strand; PAM type: YTN; PAM sequence: TTA
gagtggagggcctggaggtc

SEQ ID NO: 22964 - DNA, 20 bp, Artificial Sequence
  Description of Artificial Sequence: Synthetic oligonucleotide
  Target: PCSK9; (-) strand; PAM type: YTN; PAM sequence: CTT
agagtggagggcctggaggt

SEQ ID NO: 22965 - DNA, 20 bp, Artificial Sequence
  Description of Artificial Sequence: Synthetic oligonucleotide
  Target: PCSK9; (-) strand; PAM type: YTN; PAM sequence: TTC
accagccttagagtggaggg

SEQ ID NO: 22966 - DNA, 20 bp, Artificial Sequence
  Description of Artificial Sequence: Synthetic oligonucleotide
  Target: PCSK9; (-) strand; PAM type: YTN; PAM sequence: CTA
tattcaccagccttagagtg

SEQ ID NO: 22967 - DNA, 20 bp, Artificial Sequence
  Description of Artificial Sequence: Synthetic oligonucleotide
  Target: PCSK9; (-) strand; PAM type: YTN; PAM sequence: TTA
agacagctatattcaccagc

SEQ ID NO: 22968 - DNA, 20 bp, Artificial Sequence
  Description of Artificial Sequence: Synthetic oligonucleotide
  Target: PCSK9; (-) strand; PAM type: YTN; PAM sequence: CTT
aagacagctatattcaccag

SEQ ID NO: 22969 - DNA, 20 bp, Artificial Sequence
  Description of Artificial Sequence: Synthetic oligonucleotide
  Target: PCSK9; (-) strand; PAM type: YTN; PAM sequence: TTG
cttaagacagctatattcac

SEQ ID NO: 22970 - DNA, 20 bp, Artificial Sequence
  Description of Artificial Sequence: Synthetic oligonucleotide
  Target: PCSK9; (-) strand; PAM type: YTN; PAM sequence: CTT
gcttaagacagctatattca

SEQ ID NO: 22971 - DNA, 20 bp, Artificial Sequence
  Description of Artificial Sequence: Synthetic oligonucleotide
  Target: PCSK9; (-) strand; PAM type: YTN; PAM sequence: CTA
gagagagagagaacttgctt

SEQ ID NO: 22972 - DNA, 20 bp, Artificial Sequence
  Description of Artificial Sequence: Synthetic oligonucleotide
  Target: PCSK9; (-) strand; PAM type: YTN; PAM sequence: CTG
tctagagagagagagaactt

SEQ ID NO: 22973 - DNA, 20 bp, Artificial Sequence
  Description of Artificial Sequence: Synthetic oligonucleotide
  Target: PCSK9; (-) strand; PAM type: YTN; PAM sequence: TTA
tgacatgggctgtctagaga

SEQ ID NO: 22974 - DNA, 20 bp, Artificial Sequence
  Description of Artificial Sequence: Synthetic oligonucleotide
  Target: PCSK9; (-) strand; PAM type: YTN; PAM sequence: CTT
atgacatgggctgtctagag

SEQ ID NO: 22975 - DNA, 20 bp, Artificial Sequence
  Description of Artificial Sequence: Synthetic oligonucleotide
  Target: PCSK9; (-) strand; PAM type: YTN; PAM sequence: TTC
cttatgacatgggctgtcta

SEQ ID NO: 22976 - DNA, 20 bp, Artificial Sequence
  Description of Artificial Sequence: Synthetic oligonucleotide
  Target: PCSK9; (-) strand; PAM type: YTN; PAM sequence: CTG
agattccttatgacatgggc

SEQ ID NO: 22977 - DNA, 20 bp, Artificial Sequence
  Description of Artificial Sequence: Synthetic oligonucleotide
  Target: PCSK9; (-) strand; PAM type: YTN; PAM sequence: TTG
cctgagattccttatgacat

SEQ ID NO: 22978 - DNA, 20 bp, Artificial Sequence
  Description of Artificial Sequence: Synthetic oligonucleotide
  Target: PCSK9; (-) strand; PAM type: YTN; PAM sequence: TTT
gcctgagattccttatgaca

SEQ ID NO: 22979 - DNA, 20 bp, Artificial Sequence
  Description of Artificial Sequence: Synthetic oligonucleotide
  Target: PCSK9; (-) strand; PAM type: YTN; PAM sequence: TTT
tgcctgagattccttatgac

SEQ ID NO: 22980 - DNA, 20 bp, Artificial Sequence
  Description of Artificial Sequence: Synthetic oligonucleotide
  Target: PCSK9; (-) strand; PAM type: YTN; PAM sequence: CTG
ggaggaattttgcctgagat

SEQ ID NO: 22981 - DNA, 20 bp, Artificial Sequence
  Description of Artificial Sequence: Synthetic oligonucleotide
  Target: PCSK9; (-) strand; PAM type: YTN; PAM sequence: TTG
tcagaaaatgtaatctggga

SEQ ID NO: 22982 - DNA, 20 bp, Artificial Sequence
  Description of Artificial Sequence: Synthetic oligonucleotide
  Target: PCSK9; (-) strand; PAM type: YTN; PAM sequence: CTG
aattgtcagaaaatgtaatc

SEQ ID NO: 22983 - DNA, 20 bp, Artificial Sequence
  Description of Artificial Sequence: Synthetic oligonucleotide
  Target: PCSK9; (-) strand; PAM type: YTN; PAM sequence: TTC
catatatgacactgaattgt

SEQ ID NO: 22984 - DNA, 20 bp, Artificial Sequence
  Description of Artificial Sequence: Synthetic oligonucleotide
  Target: PCSK9; (-) strand; PAM type: YTN; PAM sequence: TTT
ccatatatgacactgaattg

SEQ ID NO: 22985 - DNA, 20 bp, Artificial Sequence
  Description of Artificial Sequence: Synthetic oligonucleotide
  Target: PCSK9; (-) strand; PAM type: YTN; PAM sequence: CTT
tccatatatgacactgaatt

SEQ ID NO: 22986 - DNA, 20 bp, Artificial Sequence
  Description of Artificial Sequence: Synthetic oligonucleotide
  Target: PCSK9; (-) strand; PAM type: YTN; PAM sequence: TTG
aatgctttccatatatgaca

SEQ ID NO: 22987 - DNA, 20 bp, Artificial Sequence
  Description of Artificial Sequence: Synthetic oligonucleotide
  Target: PCSK9; (-) strand; PAM type: YTN; PAM sequence: CTT
gaatgctttccatatatgac

SEQ ID NO: 22988 - DNA, 20 bp, Artificial Sequence
  Description of Artificial Sequence: Synthetic oligonucleotide
  Target: PCSK9; (-) strand; PAM type: YTN; PAM sequence: CTC
ttgaatgctttccatatatg

SEQ ID NO: 22989 - DNA, 20 bp, Artificial Sequence
  Description of Artificial Sequence: Synthetic oligonucleotide
  Target: PCSK9; (-) strand; PAM type: YTN; PAM sequence: CTG
tcaactcttgaatgctttcc

SEQ ID NO: 22990 - DNA, 20 bp, Artificial Sequence
  Description of Artificial Sequence: Synthetic oligonucleotide
  Target: PCSK9; (-) strand; PAM type: YTN; PAM sequence: TTG
ccatctgtcaactcttgaat

SEQ ID NO: 22991 - DNA, 20 bp, Artificial Sequence
  Description of Artificial Sequence: Synthetic oligonucleotide
  Target: PCSK9; (-) strand; PAM type: YTN; PAM sequence: TTC
aagccattgccatctgtcaa

SEQ ID NO: 22992 - DNA, 20 bp, Artificial Sequence
  Description of Artificial Sequence: Synthetic oligonucleotide
  Target: PCSK9; (-) strand; PAM type: YTN; PAM sequence: TTG
ggtgttcaagccattgccat

SEQ ID NO: 22993 - DNA, 20 bp, Artificial Sequence
  Description of Artificial Sequence: Synthetic oligonucleotide
  Target: PCSK9; (-) strand; PAM type: YTN; PAM sequence: TTC
caacgggcagagataacaca

SEQ ID NO: 22994 - DNA, 20 bp, Artificial Sequence
  Description of Artificial Sequence: Synthetic oligonucleotide
  Target: PCSK9; (-) strand; PAM type: YTN; PAM sequence: CTA
ggttccaacgggcagagata

SEQ ID NO: 22995 - DNA, 20 bp, Artificial Sequence
  Description of Artificial Sequence: Synthetic oligonucleotide
  Target: PCSK9; (-) strand; PAM type: YTN; PAM sequence: TTG
caccacaggcctaggttcca

SEQ ID NO: 22996 - DNA, 20 bp, Artificial Sequence
  Description of Artificial Sequence: Synthetic oligonucleotide
  Target: PCSK9; (-) strand; PAM type: YTN; PAM sequence: CTA
gggttgcaccacaggcctag

SEQ ID NO: 22997 - DNA, 20 bp, Artificial Sequence
  Description of Artificial Sequence: Synthetic oligonucleotide
  Target: PCSK9; (-) strand; PAM type: YTN; PAM sequence: CTG
tggaggggaaggagagagag

SEQ ID NO: 22998 - DNA, 20 bp, Artificial Sequence
  Description of Artificial Sequence: Synthetic oligonucleotide
  Target: PCSK9; (-) strand; PAM type: YTN; PAM sequence: TTC
tgtggaggggaaggagagag

SEQ ID NO: 22999 - DNA, 20 bp, Artificial Sequence
  Description of Artificial Sequence: Synthetic oligonucleotide
  Target: PCSK9; (-) strand; PAM type: YTN; PAM sequence: TTG
attctgtggaggggaaggag

SEQ ID NO: 23000 - DNA, 20 bp, Artificial Sequence
  Description of Artificial Sequence: Synthetic oligonucleotide
  Target: PCSK9; (-) strand; PAM type: YTN; PAM sequence: CTT
gattctgtggaggggaagga

SEQ ID NO: 23001 - DNA, 20 bp, Artificial Sequence
  Description of Artificial Sequence: Synthetic oligonucleotide
  Target: PCSK9; (-) strand; PAM type: YTN; PAM sequence: CTG
atacttgattctgtggaggg

SEQ ID NO: 23002 - DNA, 20 bp, Artificial Sequence
  Description of Artificial Sequence: Synthetic oligonucleotide
  Target: PCSK9; (-) strand; PAM type: YTN; PAM sequence: CTA
accagctgatacttgattct

SEQ ID NO: 23003 - DNA, 20 bp, Artificial Sequence
  Description of Artificial Sequence: Synthetic oligonucleotide
  Target: PCSK9; (-) strand; PAM type: YTN; PAM sequence: CTC
taaccagctgatacttgatt

SEQ ID NO: 23004 - DNA, 20 bp, Artificial Sequence
  Description of Artificial Sequence: Synthetic oligonucleotide
  Target: PCSK9; (-) strand; PAM type: YTN; PAM sequence: CTG
tcagggtgtggatctctaac

SEQ ID NO: 23005 - DNA, 20 bp, Artificial Sequence
  Description of Artificial Sequence: Synthetic oligonucleotide
  Target: PCSK9; (-) strand; PAM type: YTN; PAM sequence: TTC
caacatcacagagctgtcag

SEQ ID NO: 23006 - DNA, 20 bp, Artificial Sequence
  Description of Artificial Sequence: Synthetic oligonucleotide
  Target: PCSK9; (-) strand; PAM type: YTN; PAM sequence: TTG
ttccaacatcacagagctgt

SEQ ID NO: 23007 - DNA, 20 bp, Artificial Sequence
  Description of Artificial Sequence: Synthetic oligonucleotide
  Target: PCSK9; (-) strand; PAM type: YTN; PAM sequence: CTG
caagaaccaagttgttccaa

SEQ ID NO: 23008 - DNA, 20 bp, Artificial Sequence
  Description of Artificial Sequence: Synthetic oligonucleotide
  Target: PCSK9; (-) strand; PAM type: YTN; PAM sequence: CTC
tgcaagaaccaagttgttcc

SEQ ID NO: 23009 - DNA, 20 bp, Artificial Sequence
  Description of Artificial Sequence: Synthetic oligonucleotide
  Target: PCSK9; (-) strand; PAM type: YTN; PAM sequence: CTA
accctctgcaagaaccaagt

SEQ ID NO: 23010 - DNA, 20 bp, Artificial Sequence
  Description of Artificial Sequence: Synthetic oligonucleotide
  Target: PCSK9; (-) strand; PAM type: YTN; PAM sequence: CTG
ctaaccctctgcaagaacca

SEQ ID NO: 23011 - DNA, 20 bp, Artificial Sequence
  Description of Artificial Sequence: Synthetic oligonucleotide
  Target: PCSK9; (-) strand; PAM type: YTN; PAM sequence: CTG
gtgaccacctgctaaccctc

SEQ ID NO: 23012 - DNA, 20 bp, Artificial Sequence
  Description of Artificial Sequence: Synthetic oligonucleotide
  Target: PCSK9; (-) strand; PAM type: YTN; PAM sequence: CTC
cccgatccctggtgaccacc

SEQ ID NO: 23013 - DNA, 20 bp, Artificial Sequence
  Description of Artificial Sequence: Synthetic oligonucleotide
  Target: PCSK9; (-) strand; PAM type: YTN; PAM sequence: TTC
ctccccgatccctggtgacc

SEQ ID NO: 23014 - DNA, 20 bp, Artificial Sequence
  Description of Artificial Sequence: Synthetic oligonucleotide
  Target: PCSK9; (-) strand; PAM type: YTN; PAM sequence: CTT
cctccccgatccctggtgac

SEQ ID NO: 23015 - DNA, 20 bp, Artificial Sequence
  Description of Artificial Sequence: Synthetic oligonucleotide
  Target: PCSK9; (-) strand; PAM type: YTN; PAM sequence: CTG
caagccacaccccttcctcc

SEQ ID NO: 23016 - DNA, 20 bp, Artificial Sequence
  Description of Artificial Sequence: Synthetic oligonucleotide
  Target: PCSK9; (-) strand; PAM type: YTN; PAM sequence: TTC
ctgcaagccacaccccttcc

SEQ ID NO: 23017 - DNA, 20 bp, Artificial Sequence
  Description of Artificial Sequence: Synthetic oligonucleotide
  Target: PCSK9; (-) strand; PAM type: YTN; PAM sequence: CTT
cctgcaagccacaccccttc

SEQ ID NO: 23018 - DNA, 20 bp, Artificial Sequence
  Description of Artificial Sequence: Synthetic oligonucleotide
  Target: PCSK9; (-) strand; PAM type: YTN; PAM sequence: TTC
gccttcctgcaagccacacc

SEQ ID NO: 23019 - DNA, 20 bp, Artificial Sequence
  Description of Artificial Sequence: Synthetic oligonucleotide
  Target: PCSK9; (-) strand; PAM type: YTN; PAM sequence: TTT
cgccttcctgcaagccacac

SEQ ID NO: 23020 - DNA, 20 bp, Artificial Sequence
  Description of Artificial Sequence: Synthetic oligonucleotide
  Target: PCSK9; (-) strand; PAM type: YTN; PAM sequence: TTT
tcgccttcctgcaagccaca

SEQ ID NO: 23021 - DNA, 20 bp, Artificial Sequence
  Description of Artificial Sequence: Synthetic oligonucleotide
  Target: PCSK9; (-) strand; PAM type: YTN; PAM sequence: CTA
gtccagattttcgccttcct

SEQ ID NO: 23022 - DNA, 20 bp, Artificial Sequence
  Description of Artificial Sequence: Synthetic oligonucleotide
  Target: PCSK9; (-) strand; PAM type: YTN; PAM sequence: TTG
ctagtccagattttcgcctt

SEQ ID NO: 23023 - DNA, 20 bp, Artificial Sequence
  Description of Artificial Sequence: Synthetic oligonucleotide
  Target: PCSK9; (-) strand; PAM type: YTN; PAM sequence: TTT
gctagtccagattttcgcct

SEQ ID NO: 23024 - DNA, 20 bp, Artificial Sequence
  Description of Artificial Sequence: Synthetic oligonucleotide
  Target: PCSK9; (-) strand; PAM type: YTN; PAM sequence: CTA
tttgctagtccagattttcg

SEQ ID NO: 23025 - DNA, 20 bp, Artificial Sequence
  Description of Artificial Sequence: Synthetic oligonucleotide
  Target: PCSK9; (-) strand; PAM type: YTN; PAM sequence: TTC
cctatttgctagtccagatt

SEQ ID NO: 23026 - DNA, 20 bp, Artificial Sequence
  Description of Artificial Sequence: Synthetic oligonucleotide
  Target: PCSK9; (-) strand; PAM type: YTN; PAM sequence: CTT
ccctatttgctagtccagat

SEQ ID NO: 23027 - DNA, 20 bp, Artificial Sequence
  Description of Artificial Sequence: Synthetic oligonucleotide
  Target: PCSK9; (-) strand; PAM type: YTN; PAM sequence: CTC
acatgggtccccttccctat

SEQ ID NO: 23028 - DNA, 20 bp, Artificial Sequence
  Description of Artificial Sequence: Synthetic oligonucleotide
  Target: PCSK9; (-) strand; PAM type: YTN; PAM sequence: TTG
ctcacatgggtccccttccc

SEQ ID NO: 23029 - DNA, 20 bp, Artificial Sequence
  Description of Artificial Sequence: Synthetic oligonucleotide
  Target: PCSK9; (-) strand; PAM type: YTN; PAM sequence: CTA
gtggccagcgttgctcacat

SEQ ID NO: 23030 - DNA, 20 bp, Artificial Sequence
  Description of Artificial Sequence: Synthetic oligonucleotide
  Target: PCSK9; (-) strand; PAM type: YTN; PAM sequence: TTC
ctagtggccagcgttgctca

SEQ ID NO: 23031 - DNA, 20 bp, Artificial Sequence
  Description of Artificial Sequence: Synthetic oligonucleotide
  Target: PCSK9; (-) strand; PAM type: YTN; PAM sequence: CTC
attcctagtggccagcgttg

SEQ ID NO: 23032 - DNA, 20 bp, Artificial Sequence
  Description of Artificial Sequence: Synthetic oligonucleotide
  Target: PCSK9; (-) strand; PAM type: YTN; PAM sequence: CTC
agtctcattcctagtggcca

SEQ ID NO: 23033 - DNA, 20 bp, Artificial Sequence
  Description of Artificial Sequence: Synthetic oligonucleotide
  Target: PCSK9; (-) strand; PAM type: YTN; PAM sequence: CTA
gatcccacaggtctcagtct

SEQ ID NO: 23034 - DNA, 20 bp, Artificial Sequence
  Description of Artificial Sequence: Synthetic oligonucleotide
  Target: PCSK9; (-) strand; PAM type: YTN; PAM sequence: TTG
ctagatcccacaggtctcag

SEQ ID NO: 23035 - DNA, 20 bp, Artificial Sequence
  Description of Artificial Sequence: Synthetic oligonucleotide
  Target: PCSK9; (-) strand; PAM type: YTN; PAM sequence: CTT
gctagatcccacaggtctca

SEQ ID NO: 23036 - DNA, 20 bp, Artificial Sequence
  Description of Artificial Sequence: Synthetic oligonucleotide
  Target: PCSK9; (-) strand; PAM type: YTN; PAM sequence: TTC
ttgctagatcccacaggtct

SEQ ID NO: 23037 - DNA, 20 bp, Artificial Sequence
  Description of Artificial Sequence: Synthetic oligonucleotide
  Target: PCSK9; (-) strand; PAM type: YTN; PAM sequence: CTT
cttgctagatcccacaggtc

SEQ ID NO: 23038 - DNA, 20 bp, Artificial Sequence
  Description of Artificial Sequence: Synthetic oligonucleotide
  Target: PCSK9; (-) strand; PAM type: YTN; PAM sequence: CTG
ggcttcttgctagatcccac

SEQ ID NO: 23039 - DNA, 20 bp, Artificial Sequence
  Description of Artificial Sequence: Synthetic oligonucleotide
  Target: PCSK9; (-) strand; PAM type: YTN; PAM sequence: CTG
gtcacactgggcttcttgct

SEQ ID NO: 23040 - DNA, 20 bp, Artificial Sequence
  Description of Artificial Sequence: Synthetic oligonucleotide
  Target: PCSK9; (-) strand; PAM type: YTN; PAM sequence: CTC
ccaagtggtccccagcatag

SEQ ID NO: 23041 - DNA, 20 bp, Artificial Sequence
  Description of Artificial Sequence: Synthetic oligonucleotide
  Target: PCSK9; (-) strand; PAM type: YTN; PAM sequence: CTC
tcccaagtggtccccagcat

SEQ ID NO: 23042 - DNA, 20 bp, Artificial Sequence
  Description of Artificial Sequence: Synthetic oligonucleotide
  Target: PCSK9; (-) strand; PAM type: YTN; PAM sequence: TTG
gctctcccaagtggtcccca

SEQ ID NO: 23043 - DNA, 20 bp, Artificial Sequence
  Description of Artificial Sequence: Synthetic oligonucleotide
  Target: PCSK9; (-) strand; PAM type: YTN; PAM sequence: TTT
ggctctcccaagtggtcccc

SEQ ID NO: 23044 - DNA, 20 bp, Artificial Sequence
  Description of Artificial Sequence: Synthetic oligonucleotide
  Target: PCSK9; (-) strand; PAM type: YTN; PAM sequence: TTT
tggctctcccaagtggtccc

SEQ ID NO: 23045 - DNA, 20 bp, Artificial Sequence
  Description of Artificial Sequence: Synthetic oligonucleotide
  Target: PCSK9; (-) strand; PAM type: YTN; PAM sequence: CTT
ttggctctcccaagtggtcc

SEQ ID NO: 23046 - DNA, 20 bp, Artificial Sequence
  Description of Artificial Sequence: Synthetic oligonucleotide
  Target: PCSK9; (-) strand; PAM type: YTN; PAM sequence: CTC
caccaaagcttttggctctc

SEQ ID NO: 23047 - DNA, 20 bp, Artificial Sequence
  Description of Artificial Sequence: Synthetic oligonucleotide
  Target: PCSK9; (-) strand; PAM type: YTN; PAM sequence: TTC
atctccaccaaagcttttgg

SEQ ID NO: 23048 - DNA, 20 bp, Artificial Sequence
  Description of Artificial Sequence: Synthetic oligonucleotide
  Target: PCSK9; (-) strand; PAM type: YTN; PAM sequence: CTC
cattcatctccaccaaagct

SEQ ID NO: 23049 - DNA, 20 bp, Artificial Sequence
  Description of Artificial Sequence: Synthetic oligonucleotide
  Target: PCSK9; (-) strand; PAM type: YTN; PAM sequence: TTG
atggtctccattcatctcca

SEQ ID NO: 23050 - DNA, 20 bp, Artificial Sequence
  Description of Artificial Sequence: Synthetic oligonucleotide
  Target: PCSK9; (-) strand; PAM type: YTN; PAM sequence: TTA
ggttgatggtctccattcat

SEQ ID NO: 23051 - DNA, 20 bp, Artificial Sequence
  Description of Artificial Sequence: Synthetic oligonucleotide
  Target: PCSK9; (-) strand; PAM type: YTN; PAM sequence: CTT
aggttgatggtctccattca

SEQ ID NO: 23052 - DNA, 20 bp, Artificial Sequence
  Description of Artificial Sequence: Synthetic oligonucleotide
  Target: PCSK9; (-) strand; PAM type: YTN; PAM sequence: CTG
aacttaggttgatggtctcc

SEQ ID NO: 23053 - DNA, 20 bp, Artificial Sequence
  Description of Artificial Sequence: Synthetic oligonucleotide
  Target: PCSK9; (-) strand; PAM type: YTN; PAM sequence: TTA
gaggaggatgctgaacttag

SEQ ID NO: 23054 - DNA, 20 bp, Artificial Sequence
  Description of Artificial Sequence: Synthetic oligonucleotide
  Target: PCSK9; (-) strand; PAM type: YTN; PAM sequence: CTT
agaggaggatgctgaactta

SEQ ID NO: 23055 - DNA, 20 bp, Artificial Sequence
  Description of Artificial Sequence: Synthetic oligonucleotide
  Target: PCSK9; (-) strand; PAM type: YTN; PAM sequence: CTG
caaagcttagaggaggatgc

SEQ ID NO: 23056 - DNA, 20 bp, Artificial Sequence
  Description of Artificial Sequence: Synthetic oligonucleotide
  Target: PCSK9; (-) strand; PAM type: YTN; PAM sequence: TTC
atctgcaaagcttagaggag

SEQ ID NO: 23057 - DNA, 20 bp, Artificial Sequence
  Description of Artificial Sequence: Synthetic oligonucleotide
  Target: PCSK9; (-) strand; PAM type: YTN; PAM sequence: TTC
aggattcatctgcaaagctt

SEQ ID NO: 23058 - DNA, 20 bp, Artificial Sequence
  Description of Artificial Sequence: Synthetic oligonucleotide
  Target: PCSK9; (-) strand; PAM type: YTN; PAM sequence: TTT
caggattcatctgcaaagct

SEQ ID NO: 23059 - DNA, 20 bp, Artificial Sequence
  Description of Artificial Sequence: Synthetic oligonucleotide
  Target: PCSK9; (-) strand; PAM type: YTN; PAM sequence: CTG
accatttcaggattcatctg

SEQ ID NO: 23060 - DNA, 20 bp, Artificial Sequence
  Description of Artificial Sequence: Synthetic oligonucleotide
  Target: PCSK9; (-) strand; PAM type: YTN; PAM sequence: CTG
gaggggctgaccatttcagg

SEQ ID NO: 23061 - DNA, 20 bp, Artificial Sequence
  Description of Artificial Sequence: Synthetic oligonucleotide
  Target: PCSK9; (-) strand; PAM type: YTN; PAM sequence: CTC
tggaggggctgaccatttca

SEQ ID NO: 23062 - DNA, 20 bp, Artificial Sequence
  Description of Artificial Sequence: Synthetic oligonucleotide
  Target: PCSK9; (-) strand; PAM type: YTN; PAM sequence: TTC
tctggaggggctgaccattt

SEQ ID NO: 23063 - DNA, 20 bp, Artificial Sequence
  Description of Artificial Sequence: Synthetic oligonucleotide
  Target: PCSK9; (-) strand; PAM type: YTN; PAM sequence: TTT
ctctggaggggctgaccatt

SEQ ID NO: 23064 - DNA, 20 bp, Artificial Sequence
  Description of Artificial Sequence: Synthetic oligonucleotide
  Target: PCSK9; (-) strand; PAM type: YTN; PAM sequence: TTT
tctctggaggggctgaccat

SEQ ID NO: 23065 - DNA, 20 bp, Artificial Sequence
  Description of Artificial Sequence: Synthetic oligonucleotide
  Target: PCSK9; (-) strand; PAM type: YTN; PAM sequence: CTT
ttctctggaggggctgacca

SEQ ID NO: 23066 - DNA, 20 bp, Artificial Sequence
  Description of Artificial Sequence: Synthetic oligonucleotide
  Target: PCSK9; (-) strand; PAM type: YTN; PAM sequence: TTC
ttttctctggaggggctgac

SEQ ID NO: 23067 - DNA, 20 bp, Artificial Sequence
  Description of Artificial Sequence: Synthetic oligonucleotide
  Target: PCSK9; (-) strand; PAM type: YTN; PAM sequence: CTG
ttcttttctctggaggggct

SEQ ID NO: 23068 - DNA, 20 bp, Artificial Sequence
  Description of Artificial Sequence: Synthetic oligonucleotide
  Target: PCSK9; (-) strand; PAM type: YTN; PAM sequence: TTG
ctgttcttttctctggaggg

SEQ ID NO: 23069 - DNA, 20 bp, Artificial Sequence
  Description of Artificial Sequence: Synthetic oligonucleotide
  Target: PCSK9; (-) strand; PAM type: YTN; PAM sequence: CTG
ttgctgttcttttctctgga

SEQ ID NO: 23070 - DNA, 20 bp, Artificial Sequence
  Description of Artificial Sequence: Synthetic oligonucleotide
  Target: PCSK9; (-) strand; PAM type: YTN; PAM sequence: CTG
agcctgttgctgttcttttc

SEQ ID NO: 23071 - DNA, 20 bp, Artificial Sequence
  Description of Artificial Sequence: Synthetic oligonucleotide
  Target: PCSK9; (-) strand; PAM type: YTN; PAM sequence: CTC
tgagcctgttgctgttcttt

SEQ ID NO: 23072 - DNA, 20 bp, Artificial Sequence
  Description of Artificial Sequence: Synthetic oligonucleotide
  Target: PCSK9; (-) strand; PAM type: YTN; PAM sequence: CTG
tgggtcctctgagcctgttg

SEQ ID NO: 23073 - DNA, 20 bp, Artificial Sequence
  Description of Artificial Sequence: Synthetic oligonucleotide
  Target: PCSK9; (-) strand; PAM type: YTN; PAM sequence: CTA
ataaaggggactgtgggtcc

SEQ ID NO: 23074 - DNA, 20 bp, Artificial Sequence
  Description of Artificial Sequence: Synthetic oligonucleotide
  Target: PCSK9; (-) strand; PAM type: YTN; PAM sequence: TTA
cactaataaaggggactgtg

SEQ ID NO: 23075 - DNA, 20 bp, Artificial Sequence
  Description of Artificial Sequence: Synthetic oligonucleotide
  Target: PCSK9; (-) strand; PAM type: YTN; PAM sequence: TTT
acactaataaaggggactgt

SEQ ID NO: 23076 - DNA, 20 bp, Artificial Sequence
  Description of Artificial Sequence: Synthetic oligonucleotide
  Target: PCSK9; (-) strand; PAM type: YTN; PAM sequence: CTT
tacactaataaaggggactg

SEQ ID NO: 23077 - DNA, 20 bp, Artificial Sequence
  Description of Artificial Sequence: Synthetic oligonucleotide
  Target: PCSK9; (-) strand; PAM type: YTN; PAM sequence: TTA
gtactttacactaataaagg

SEQ ID NO: 23078 - DNA, 20 bp, Artificial Sequence
  Description of Artificial Sequence: Synthetic oligonucleotide
  Target: PCSK9; (-) strand; PAM type: YTN; PAM sequence: CTT
agtactttacactaataaag

SEQ ID NO: 23079 - DNA, 20 bp, Artificial Sequence
  Description of Artificial Sequence: Synthetic oligonucleotide
  Target: PCSK9; (-) strand; PAM type: YTN; PAM sequence: CTC
ttagtactttacactaataa

SEQ ID NO: 23080 - DNA, 20 bp, Artificial Sequence
  Description of Artificial Sequence: Synthetic oligonucleotide
  Target: PCSK9; (-) strand; PAM type: YTN; PAM sequence: TTC
ctcttagtactttacactaa

SEQ ID NO: 23081 - DNA, 20 bp, Artificial Sequence
  Description of Artificial Sequence: Synthetic oligonucleotide
  Target: PCSK9; (-) strand; PAM type: YTN; PAM sequence: TTG
attcctcttagtactttaca

SEQ ID NO: 23082 - DNA, 20 bp, Artificial Sequence
  Description of Artificial Sequence: Synthetic oligonucleotide
  Target: PCSK9; (-) strand; PAM type: YTN; PAM sequence: CTG
ttgattcctcttagtacttt

SEQ ID NO: 23083 - DNA, 20 bp, Artificial Sequence
  Description of Artificial Sequence: Synthetic oligonucleotide
  Target: PCSK9; (-) strand; PAM type: YTN; PAM sequence: CTA
aatgctgttgattcctctta

SEQ ID NO: 23084 - DNA, 20 bp, Artificial Sequence
  Description of Artificial Sequence: Synthetic oligonucleotide
  Target: PCSK9; (-) strand; PAM type: YTN; PAM sequence: CTG
gtgctaaatgctgttgattc

SEQ ID NO: 23085 - DNA, 20 bp, Artificial Sequence
  Description of Artificial Sequence: Synthetic oligonucleotide
  Target: PCSK9; (-) strand; PAM type: YTN; PAM sequence: CTG
tgcctggtgctaaatgctgt

SEQ ID NO: 23086 - DNA, 20 bp, Artificial Sequence
  Description of Artificial Sequence: Synthetic oligonucleotide
  Target: PCSK9; (-) strand; PAM type: YTN; PAM sequence: TTC
atatatcagaacacagccgt

SEQ ID NO: 23087 - DNA, 20 bp, Artificial Sequence
  Description of Artificial Sequence: Synthetic oligonucleotide
  Target: PCSK9; (-) strand; PAM type: YTN; PAM sequence: CTT
catatatcagaacacagccg

SEQ ID NO: 23088 - DNA, 20 bp, Artificial Sequence
  Description of Artificial Sequence: Synthetic oligonucleotide
  Target: PCSK9; (-) strand; PAM type: YTN; PAM sequence: TTC
ttcatatatcagaacacagc

SEQ ID NO: 23089 - DNA, 20 bp, Artificial Sequence
  Description of Artificial Sequence: Synthetic oligonucleotide
  Target: PCSK9; (-) strand; PAM type: YTN; PAM sequence: TTG
ccgccattcttcatatatca

SEQ ID NO: 23090 - DNA, 20 bp, Artificial Sequence
  Description of Artificial Sequence: Synthetic oligonucleotide
  Target: PCSK9; (-) strand; PAM type: YTN; PAM sequence: CTT
gccgccattcttcatatatc

SEQ ID NO: 23091 - DNA, 20 bp, Artificial Sequence
  Description of Artificial Sequence: Synthetic oligonucleotide
  Target: PCSK9; (-) strand; PAM type: YTN; PAM sequence: TTG
gagtcttgccgccattcttc

SEQ ID NO: 23092 - DNA, 20 bp, Artificial Sequence
  Description of Artificial Sequence: Synthetic oligonucleotide
  Target: PCSK9; (-) strand; PAM type: YTN; PAM sequence: TTC
aaaaacagagttggagtctt

SEQ ID NO: 23093 - DNA, 20 bp, Artificial Sequence
  Description of Artificial Sequence: Synthetic oligonucleotide
  Target: PCSK9; (-) strand; PAM type: YTN; PAM sequence: TTT
caaaaacagagttggagtct

SEQ ID NO: 23094 - DNA, 20 bp, Artificial Sequence
  Description of Artificial Sequence: Synthetic oligonucleotide
  Target: PCSK9; (-) strand; PAM type: YTN; PAM sequence: TTT
tcaaaaacagagttggagtc

SEQ ID NO: 23095 - DNA, 20 bp, Artificial Sequence
  Description of Artificial Sequence: Synthetic oligonucleotide
  Target: PCSK9; (-) strand; PAM type: YTN; PAM sequence: TTT
ttcaaaaacagagttggagt

SEQ ID NO: 23096 - DNA, 20 bp, Artificial Sequence
  Description of Artificial Sequence: Synthetic oligonucleotide
  Target: PCSK9; (-) strand; PAM type: YTN; PAM sequence: CTA
agagtataaaataaattttt

SEQ ID NO: 23097 - DNA, 20 bp, Artificial Sequence
  Description of Artificial Sequence: Synthetic oligonucleotide
  Target: PCSK9; (-) strand; PAM type: YTN; PAM sequence: TTC
taagagtataaaataaattt

SEQ ID NO: 23098 - DNA, 20 bp, Artificial Sequence
  Description of Artificial Sequence: Synthetic oligonucleotide
  Target: PCSK9; (-) strand; PAM type: YTN; PAM sequence: CTT
ctaagagtataaaataaatt

SEQ ID NO: 23099 - DNA, 20 bp, Artificial Sequence
  Description of Artificial Sequence: Synthetic oligonucleotide
  Target: PCSK9; (-) strand; PAM type: YTN; PAM sequence: TTA
gcttctaagagtataaaata

SEQ ID NO: 23100 - DNA, 20 bp, Artificial Sequence
  Description of Artificial Sequence: Synthetic oligonucleotide
  Target: PCSK9; (-) strand; PAM type: YTN; PAM sequence: CTT
agcttctaagagtataaaat

SEQ ID NO: 23101 - DNA, 20 bp, Artificial Sequence
  Description of Artificial Sequence: Synthetic oligonucleotide
  Target: PCSK9; (-) strand; PAM type: YTN; PAM sequence: TTC
ttagcttctaagagtataaa

SEQ ID NO: 23102 - DNA, 20 bp, Artificial Sequence
  Description of Artificial Sequence: Synthetic oligonucleotide
  Target: PCSK9; (-) strand; PAM type: YTN; PAM sequence: TTC
atgtgtggcaaagttcttag

SEQ ID NO: 23103 - DNA, 20 bp, Artificial Sequence
  Description of Artificial Sequence: Synthetic oligonucleotide
  Target: PCSK9; (-) strand; PAM type: YTN; PAM sequence: TTG
gttcatgtgtggcaaagttc

SEQ ID NO: 23104 - DNA, 20 bp, Artificial Sequence
  Description of Artificial Sequence: Synthetic oligonucleotide
  Target: PCSK9; (-) strand; PAM type: YTN; PAM sequence: TTT
ggttcatgtgtggcaaagtt

SEQ ID NO: 23105 - DNA, 20 bp, Artificial Sequence
  Description of Artificial Sequence: Synthetic oligonucleotide
  Target: PCSK9; (-) strand; PAM type: YTN; PAM sequence: CTA
aatttggttcatgtgtggca

SEQ ID NO: 23106 - DNA, 20 bp, Artificial Sequence
  Description of Artificial Sequence: Synthetic oligonucleotide
  Target: PCSK9; (-) strand; PAM type: YTN; PAM sequence: TTC
taaatttggttcatgtgtgg

SEQ ID NO: 23107 - DNA, 20 bp, Artificial Sequence
  Description of Artificial Sequence: Synthetic oligonucleotide
  Target: PCSK9; (-) strand; PAM type: YTN; PAM sequence: TTA
attctaaatttggttcatgt

SEQ ID NO: 23108 - DNA, 20 bp, Artificial Sequence
  Description of Artificial Sequence: Synthetic oligonucleotide
  Target: PCSK9; (-) strand; PAM type: YTN; PAM sequence: CTT
aattctaaatttggttcatg

SEQ ID NO: 23109 - DNA, 20 bp, Artificial Sequence
  Description of Artificial Sequence: Synthetic oligonucleotide
  Target: PCSK9; (-) strand; PAM type: YTN; PAM sequence: CTA
gggaagaaccttaattctaa

SEQ ID NO: 23110 - DNA, 20 bp, Artificial Sequence
  Description of Artificial Sequence: Synthetic oligonucleotide
  Target: PCSK9; (-) strand; PAM type: YTN; PAM sequence: TTC
aaaaggaagtagatacacta

SEQ ID NO: 23111 - DNA, 20 bp, Artificial Sequence
  Description of Artificial Sequence: Synthetic oligonucleotide
  Target: PCSK9; (-) strand; PAM type: YTN; PAM sequence: TTT
caaaaggaagtagatacact

SEQ ID NO: 23112 - DNA, 20 bp, Artificial Sequence
  Description of Artificial Sequence: Synthetic oligonucleotide
  Target: PCSK9; (-) strand; PAM type: YTN; PAM sequence: TTA
taaaatttcaaaaggaagta

SEQ ID NO: 23113 - DNA, 20 bp, Artificial Sequence
  Description of Artificial Sequence: Synthetic oligonucleotide
  Target: PCSK9; (-) strand; PAM type: YTN; PAM sequence: TTT
ataaaatttcaaaaggaagt

SEQ ID NO: 23114 - DNA, 20 bp, Artificial Sequence
  Description of Artificial Sequence: Synthetic oligonucleotide
  Target: PCSK9; (-) strand; PAM type: YTN; PAM sequence: TTG
tttataaaatttcaaaagga

SEQ ID NO: 23115 - DNA, 20 bp, Artificial Sequence
  Description of Artificial Sequence: Synthetic oligonucleotide
  Target: PCSK9; (-) strand; PAM type: YTN; PAM sequence: CTT
gtttataaaatttcaaaagg

SEQ ID NO: 23116 - DNA, 20 bp, Artificial Sequence
  Description of Artificial Sequence: Synthetic oligonucleotide
  Target: PCSK9; (-) strand; PAM type: YTN; PAM sequence: TTG
tgtataaaatcttgtttata

SEQ ID NO: 23117 - DNA, 20 bp, Artificial Sequence
  Description of Artificial Sequence: Synthetic oligonucleotide
  Target: PCSK9; (-) strand; PAM type: YTN; PAM sequence: CTT
gtgtataaaatcttgtttat

SEQ ID NO: 23118 - DNA, 20 bp, Artificial Sequence
  Description of Artificial Sequence: Synthetic oligonucleotide
  Target: PCSK9; (-) strand; PAM type: YTN; PAM sequence: CTC
ttgtgtataaaatcttgttt

SEQ ID NO: 23119 - DNA, 20 bp, Artificial Sequence
  Description of Artificial Sequence: Synthetic oligonucleotide
  Target: PCSK9; (-) strand; PAM type: YTN; PAM sequence: CTA
cctcttgtgtataaaatctt

SEQ ID NO: 23120 - DNA, 20 bp, Artificial Sequence
  Description of Artificial Sequence: Synthetic oligonucleotide
  Target: PCSK9; (-) strand; PAM type: YTN; PAM sequence: CTG
ctacctcttgtgtataaaat

SEQ ID NO: 23121 - DNA, 20 bp, Artificial Sequence
  Description of Artificial Sequence: Synthetic oligonucleotide
  Target: PCSK9; (-) strand; PAM type: YTN; PAM sequence: CTC
tgctacctcttgtgtataaa

SEQ ID NO: 23122 - DNA, 20 bp, Artificial Sequence
  Description of Artificial Sequence: Synthetic oligonucleotide
  Target: PCSK9; (-) strand; PAM type: YTN; PAM sequence: TTC
ctctgctacctcttgtgtat

SEQ ID NO: 23123 - DNA, 20 bp, Artificial Sequence
  Description of Artificial Sequence: Synthetic oligonucleotide
  Target: PCSK9; (-) strand; PAM type: YTN; PAM sequence: TTT
cctctgctacctcttgtgta

SEQ ID NO: 23124 - DNA, 20 bp, Artificial Sequence
  Description of Artificial Sequence: Synthetic oligonucleotide
  Target: PCSK9; (-) strand; PAM type: YTN; PAM sequence: TTT
tcctctgctacctcttgtgt

SEQ ID NO: 23125 - DNA, 20 bp, Artificial Sequence
  Description of Artificial Sequence: Synthetic oligonucleotide
  Target: PCSK9; (-) strand; PAM type: YTN; PAM sequence: CTG
gaattttcctctgctacctc

SEQ ID NO: 23126 - DNA, 20 bp, Artificial Sequence
  Description of Artificial Sequence: Synthetic oligonucleotide
  Target: PCSK9; (-) strand; PAM type: YTN; PAM sequence: TTG
gaacaagcagactggaattt

SEQ ID NO: 23127 - DNA, 20 bp, Artificial Sequence
  Description of Artificial Sequence: Synthetic oligonucleotide
  Target: PCSK9; (-) strand; PAM type: YTN; PAM sequence: CTT
ggaacaagcagactggaatt

SEQ ID NO: 23128 - DNA, 20 bp, Artificial Sequence
  Description of Artificial Sequence: Synthetic oligonucleotide
  Target: PCSK9; (-) strand; PAM type: YTN; PAM sequence: CTG
agcttggaacaagcagactg

SEQ ID NO: 23129 - DNA, 20 bp, Artificial Sequence
  Description of Artificial Sequence: Synthetic oligonucleotide
  Target: PCSK9; (-) strand; PAM type: YTN; PAM sequence: TTC
tgagcttggaacaagcagac

SEQ ID NO: 23130 - DNA, 20 bp, Artificial Sequence
  Description of Artificial Sequence: Synthetic oligonucleotide
  Target: PCSK9; (-) strand; PAM type: YTN; PAM sequence: CTT
ctgagcttggaacaagcaga

SEQ ID NO: 23131 - DNA, 20 bp, Artificial Sequence
  Description of Artificial Sequence: Synthetic oligonucleotide
  Target: PCSK9; (-) strand; PAM type: YTN; PAM sequence: TTA
ccttctgagcttggaacaag

SEQ ID NO: 23132 - DNA, 20 bp, Artificial Sequence
  Description of Artificial Sequence: Synthetic oligonucleotide
  Target: PCSK9; (-) strand; PAM type: YTN; PAM sequence: CTA
acatcgaggtgtgtgcagtt

SEQ ID NO: 23133 - DNA, 20 bp, Artificial Sequence
  Description of Artificial Sequence: Synthetic oligonucleotide
  Target: PCSK9; (-) strand; PAM type: YTN; PAM sequence: CTG
ctaacatcgaggtgtgtgca

SEQ ID NO: 23134 - DNA, 20 bp, Artificial Sequence
  Description of Artificial Sequence: Synthetic oligonucleotide
  Target: PCSK9; (-) strand; PAM type: YTN; PAM sequence: TTC
cctgctaacatcgaggtgtg

SEQ ID NO: 23135 - DNA, 20 bp, Artificial Sequence
  Description of Artificial Sequence: Synthetic oligonucleotide
  Target: PCSK9; (-) strand; PAM type: YTN; PAM sequence: CTT
ccctgctaacatcgaggtgt

SEQ ID NO: 23136 - DNA, 20 bp, Artificial Sequence
  Description of Artificial Sequence: Synthetic oligonucleotide
  Target: PCSK9; (-) strand; PAM type: YTN; PAM sequence: CTG
ccccaccttccctgctaaca

SEQ ID NO: 23137 - DNA, 20 bp, Artificial Sequence
  Description of Artificial Sequence: Synthetic oligonucleotide
  Target: PCSK9; (-) strand; PAM type: YTN; PAM sequence: CTG
tcctgccccaccttccctgc

SEQ ID NO: 23138 - DNA, 20 bp, Artificial Sequence
  Description of Artificial Sequence: Synthetic oligonucleotide
  Target: PCSK9; (-) strand; PAM type: YTN; PAM sequence: TTA
ccctgtcctgccccaccttc

SEQ ID NO: 23139 - DNA, 20 bp, Artificial Sequence
  Description of Artificial Sequence: Synthetic oligonucleotide
  Target: PCSK9; (-) strand; PAM type: YTN; PAM sequence: CTT
accctgtcctgccccacctt

SEQ ID NO: 23140 - DNA, 20 bp, Artificial Sequence
  Description of Artificial Sequence: Synthetic oligonucleotide
  Target: PCSK9; (-) strand; PAM type: YTN; PAM sequence: CTA
gagtgccgtatcatcagact

SEQ ID NO: 23141 - DNA, 20 bp, Artificial Sequence
  Description of Artificial Sequence: Synthetic oligonucleotide
  Target: PCSK9; (-) strand; PAM type: YTN; PAM sequence: TTA
ggaactagagtgccgtatca

SEQ ID NO: 23142 - DNA, 20 bp, Artificial Sequence
  Description of Artificial Sequence: Synthetic oligonucleotide
  Target: PCSK9; (-) strand; PAM type: YTN; PAM sequence: TTT
aggaactagagtgccgtatc

SEQ ID NO: 23143 - DNA, 20 bp, Artificial Sequence
  Description of Artificial Sequence: Synthetic oligonucleotide
  Target: PCSK9; (-) strand; PAM type: YTN; PAM sequence: TTT
taggaactagagtgccgtat

SEQ ID NO: 23144 - DNA, 20 bp, Artificial Sequence
  Description of Artificial Sequence: Synthetic oligonucleotide
  Target: PCSK9; (-) strand; PAM type: YTN; PAM sequence: CTA
cagtcagttttaggaactag

SEQ ID NO: 23145 - DNA, 20 bp, Artificial Sequence
  Description of Artificial Sequence: Synthetic oligonucleotide
  Target: PCSK9; (-) strand; PAM type: YTN; PAM sequence: CTG
acaactacagtcagttttag

SEQ ID NO: 23146 - DNA, 20 bp, Artificial Sequence
  Description of Artificial Sequence: Synthetic oligonucleotide
  Target: PCSK9; (-) strand; PAM type: YTN; PAM sequence: CTC
acacggtcactgacaactac

SEQ ID NO: 23147 - DNA, 20 bp, Artificial Sequence
  Description of Artificial Sequence: Synthetic oligonucleotide
  Target: PCSK9; (-) strand; PAM type: YTN; PAM sequence: CTG
gagtcctcacacggtcactg

SEQ ID NO: 23148 - DNA, 20 bp, Artificial Sequence
  Description of Artificial Sequence: Synthetic oligonucleotide
  Target: PCSK9; (-) strand; PAM type: YTN; PAM sequence: CTC
ctggagtcctcacacggtca

SEQ ID NO: 23149 - DNA, 20 bp, Artificial Sequence
  Description of Artificial Sequence: Synthetic oligonucleotide
  Target: PCSK9; (-) strand; PAM type: YTN; PAM sequence: TTC
tcctggagtcctcacacggt

SEQ ID NO: 23150 - DNA, 20 bp, Artificial Sequence
  Description of Artificial Sequence: Synthetic oligonucleotide
  Target: PCSK9; (-) strand; PAM type: YTN; PAM sequence: CTT
ctcctggagtcctcacacgg

SEQ ID NO: 23151 - DNA, 20 bp, Artificial Sequence
  Description of Artificial Sequence: Synthetic oligonucleotide
  Target: PCSK9; (-) strand; PAM type: YTN; PAM sequence: CTC
accacgacttctcctggagt

SEQ ID NO: 23152 - DNA, 20 bp, Artificial Sequence
  Description of Artificial Sequence: Synthetic oligonucleotide
  Target: PCSK9; (-) strand; PAM type: YTN; PAM sequence: CTG
ggaaagaaaacaagcatccc

SEQ ID NO: 23153 - DNA, 20 bp, Artificial Sequence
  Description of Artificial Sequence: Synthetic oligonucleotide
  Target: PCSK9; (-) strand; PAM type: YTN; PAM sequence: TTG
aaggcatcctgggaaagaaa

SEQ ID NO: 23154 - DNA, 20 bp, Artificial Sequence
  Description of Artificial Sequence: Synthetic oligonucleotide
  Target: PCSK9; (-) strand; PAM type: YTN; PAM sequence: CTG
cccgttgaaggcatcctggg

SEQ ID NO: 23155 - DNA, 20 bp, Artificial Sequence
  Description of Artificial Sequence: Synthetic oligonucleotide
  Target: PCSK9; (-) strand; PAM type: YTN; PAM sequence: TTC
tgcccgttgaaggcatcctg

SEQ ID NO: 23156 - DNA, 20 bp, Artificial Sequence
  Description of Artificial Sequence: Synthetic oligonucleotide
  Target: PCSK9; (-) strand; PAM type: YTN; PAM sequence: TTA
agatggccgattctgcccgt

SEQ ID NO: 23157 - DNA, 20 bp, Artificial Sequence
  Description of Artificial Sequence: Synthetic oligonucleotide
  Target: PCSK9; (-) strand; PAM type: YTN; PAM sequence: CTT
aagatggccgattctgcccg

SEQ ID NO: 23158 - DNA, 20 bp, Artificial Sequence
  Description of Artificial Sequence: Synthetic oligonucleotide
  Target: PCSK9; (-) strand; PAM type: YTN; PAM sequence: TTA
gtgaggccgatcttaagatg

SEQ ID NO: 23159 - DNA, 20 bp, Artificial Sequence
  Description of Artificial Sequence: Synthetic oligonucleotide
  Target: PCSK9; (-) strand; PAM type: YTN; PAM sequence: CTT
agtgaggccgatcttaagat

SEQ ID NO: 23160 - DNA, 20 bp, Artificial Sequence
  Description of Artificial Sequence: Synthetic oligonucleotide
  Target: PCSK9; (-) strand; PAM type: YTN; PAM sequence: CTC
ccttagtgaggccgatctta

SEQ ID NO: 23161 - DNA, 20 bp, Artificial Sequence
  Description of Artificial Sequence: Synthetic oligonucleotide
  Target: PCSK9; (-) strand; PAM type: YTN; PAM sequence: CTC
aagaagctcccttagtgagg

SEQ ID NO: 23162 - DNA, 20 bp, Artificial Sequence
  Description of Artificial Sequence: Synthetic oligonucleotide
  Target: PCSK9; (-) strand; PAM type: YTN; PAM sequence: TTC
tcaagaagctcccttagtga

SEQ ID NO: 23163 - DNA, 20 bp, Artificial Sequence
  Description of Artificial Sequence: Synthetic oligonucleotide
  Target: PCSK9; (-) strand; PAM type: YTN; PAM sequence: CTG
tgtgttctcaagaagctccc

SEQ ID NO: 23164 - DNA, 20 bp, Artificial Sequence
  Description of Artificial Sequence: Synthetic oligonucleotide
  Target: PCSK9; (-) strand; PAM type: YTN; PAM sequence: CTC
aataatgctgtgtgttctca

SEQ ID NO: 23165 - DNA, 20 bp, Artificial Sequence
  Description of Artificial Sequence: Synthetic oligonucleotide
  Target: PCSK9; (-) strand; PAM type: YTN; PAM sequence: TTA
actcaataatgctgtgtgtt

SEQ ID NO: 23166 - DNA, 20 bp, Artificial Sequence
  Description of Artificial Sequence: Synthetic oligonucleotide
  Target: PCSK9; (-) strand; PAM type: YTN; PAM sequence: TTG
cacaattaactcaataatgc

SEQ ID NO: 23167 - DNA, 20 bp, Artificial Sequence
  Description of Artificial Sequence: Synthetic oligonucleotide
  Target: PCSK9; (-) strand; PAM type: YTN; PAM sequence: CTG
caaacagagcaggaattgca

SEQ ID NO: 23168 - DNA, 20 bp, Artificial Sequence
  Description of Artificial Sequence: Synthetic oligonucleotide
  Target: PCSK9; (-) strand; PAM type: YTN; PAM sequence: TTC
aaaatggtctgcaaacagag

SEQ ID NO: 23169 - DNA, 20 bp, Artificial Sequence
  Description of Artificial Sequence: Synthetic oligonucleotide
  Target: PCSK9; (-) strand; PAM type: YTN; PAM sequence: TTT
caaaatggtctgcaaacaga

SEQ ID NO: 23170 - DNA, 20 bp, Artificial Sequence
  Description of Artificial Sequence: Synthetic oligonucleotide
  Target: PCSK9; (-) strand; PAM type: YTN; PAM sequence: CTT
tcaaaatggtctgcaaacag

SEQ ID NO: 23171 - DNA, 20 bp, Artificial Sequence
  Description of Artificial Sequence: Synthetic oligonucleotide
  Target: PCSK9; (-) strand; PAM type: YTN; PAM sequence: TTA
taaacctttcaaaatggtct

SEQ ID NO: 23172 - DNA, 20 bp, Artificial Sequence
  Description of Artificial Sequence: Synthetic oligonucleotide
  Target: PCSK9; (-) strand; PAM type: YTN; PAM sequence: TTT
ataaacctttcaaaatggtc

SEQ ID NO: 23173 - DNA, 20 bp, Artificial Sequence
  Description of Artificial Sequence: Synthetic oligonucleotide
  Target: PCSK9; (-) strand; PAM type: YTN; PAM sequence: TTT
tataaacctttcaaaatggt

SEQ ID NO: 23174 - DNA, 20 bp, Artificial Sequence
  Description of Artificial Sequence: Synthetic oligonucleotide
  Target: PCSK9; (-) strand; PAM type: YTN; PAM sequence: TTT
ttataaacctttcaaaatgg

SEQ ID NO: 23175 - DNA, 20 bp, Artificial Sequence
  Description of Artificial Sequence: Synthetic oligonucleotide
  Target: PCSK9; (-) strand; PAM type: YTN; PAM sequence: TTG
gatgaagatgtttttataaa

SEQ ID NO: 23176 - DNA, 20 bp, Artificial Sequence
  Description of Artificial Sequence: Synthetic oligonucleotide
  Target: PCSK9; (-) strand; PAM type: YTN; PAM sequence: TTT
ggatgaagatgtttttataa

SEQ ID NO: 23177 - DNA, 20 bp, Artificial Sequence
  Description of Artificial Sequence: Synthetic oligonucleotide
  Target: PCSK9; (-) strand; PAM type: YTN; PAM sequence: TTT
tggatgaagatgtttttata

SEQ ID NO: 23178 - DNA, 20 bp, Artificial Sequence
  Description of Artificial Sequence: Synthetic oligonucleotide
  Target: PCSK9; (-) strand; PAM type: YTN; PAM sequence: TTT
ttggatgaagatgtttttat

SEQ ID NO: 23179 - DNA, 20 bp, Artificial Sequence
  Description of Artificial Sequence: Synthetic oligonucleotide
  Target: PCSK9; (-) strand; PAM type: YTN; PAM sequence: TTT
tttggatgaagatgttttta

SEQ ID NO: 23180 - DNA, 20 bp, Artificial Sequence
  Description of Artificial Sequence: Synthetic oligonucleotide
  Target: PCSK9; (-) strand; PAM type: YTN; PAM sequence: CTG
ccaattttttggatgaagat

SEQ ID NO: 23181 - DNA, 20 bp, Artificial Sequence
  Description of Artificial Sequence: Synthetic oligonucleotide
  Target: PCSK9; (-) strand; PAM type: YTN; PAM sequence: TTA
ctgccaattttttggatgaa

SEQ ID NO: 23182 - DNA, 20 bp, Artificial Sequence
  Description of Artificial Sequence: Synthetic oligonucleotide
  Target: PCSK9; (-) strand; PAM type: YTN; PAM sequence: TTT
actgccaattttttggatga

SEQ ID NO: 23183 - DNA, 20 bp, Artificial Sequence
  Description of Artificial Sequence: Synthetic oligonucleotide
  Target: PCSK9; (-) strand; PAM type: YTN; PAM sequence: TTT
tactgccaattttttggatg

SEQ ID NO: 23184 - DNA, 20 bp, Artificial Sequence
  Description of Artificial Sequence: Synthetic oligonucleotide
  Target: PCSK9; (-) strand; PAM type: YTN; PAM sequence: TTT
ttactgccaattttttggat

SEQ ID NO: 23185 - DNA, 20 bp, Artificial Sequence
  Description of Artificial Sequence: Synthetic oligonucleotide
  Target: PCSK9; (-) strand; PAM type: YTN; PAM sequence: TTG
tcatttttactgccaatttt

SEQ ID NO: 23186 - DNA, 20 bp, Artificial Sequence
  Description of Artificial Sequence: Synthetic oligonucleotide
  Target: PCSK9; (-) strand; PAM type: YTN; PAM sequence: TTG
gaagagttgtcatttttact

SEQ ID NO: 23187 - DNA, 20 bp, Artificial Sequence
  Description of Artificial Sequence: Synthetic oligonucleotide
  Target: PCSK9; (-) strand; PAM type: YTN; PAM sequence: CTT
ggaagagttgtcatttttac

SEQ ID NO: 23188 - DNA, 20 bp, Artificial Sequence
  Description of Artificial Sequence: Synthetic oligonucleotide
  Target: PCSK9; (-) strand; PAM type: YTN; PAM sequence: TTA
ccttggaagagttgtcattt

SEQ ID NO: 23189 - DNA, 20 bp, Artificial Sequence
  Description of Artificial Sequence: Synthetic oligonucleotide
  Target: PCSK9; (-) strand; PAM type: YTN; PAM sequence: CTT
accttggaagagttgtcatt

SEQ ID NO: 23190 - DNA, 20 bp, Artificial Sequence
  Description of Artificial Sequence: Synthetic oligonucleotide
  Target: PCSK9; (-) strand; PAM type: YTN; PAM sequence: TTA
tgacaggcttaccttggaag

SEQ ID NO: 23191 - DNA, 20 bp, Artificial Sequence
  Description of Artificial Sequence: Synthetic oligonucleotide
  Target: PCSK9; (-) strand; PAM type: YTN; PAM sequence: TTA
atgtagtacaacagtgacag

SEQ ID NO: 23192 - DNA, 20 bp, Artificial Sequence
  Description of Artificial Sequence: Synthetic oligonucleotide
  Target: PCSK9; (-) strand; PAM type: YTN; PAM sequence: TTT
aatgtagtacaacagtgaca

SEQ ID NO: 23193 - DNA, 20 bp, Artificial Sequence
  Description of Artificial Sequence: Synthetic oligonucleotide
  Target: PCSK9; (-) strand; PAM type: YTN; PAM sequence: TTT
taatgtagtacaacagtgac

SEQ ID NO: 23194 - DNA, 20 bp, Artificial Sequence
  Description of Artificial Sequence: Synthetic oligonucleotide
  Target: PCSK9; (-) strand; PAM type: YTN; PAM sequence: TTT
ttaatgtagtacaacagtga

SEQ ID NO: 23195 - DNA, 20 bp, Artificial Sequence
  Description of Artificial Sequence: Synthetic oligonucleotide
  Target: PCSK9; (-) strand; PAM type: YTN; PAM sequence: TTT
tttaatgtagtacaacagtg

SEQ ID NO: 23196 - DNA, 20 bp, Artificial Sequence
  Description of Artificial Sequence: Synthetic oligonucleotide
  Target: PCSK9; (-) strand; PAM type: YTN; PAM sequence: TTT
ttttaatgtagtacaacagt

SEQ ID NO: 23197 - DNA, 20 bp, Artificial Sequence
  Description of Artificial Sequence: Synthetic oligonucleotide
  Target: PCSK9; (-) strand; PAM type: YTN; PAM sequence: CTT
tttttaatgtagtacaacag

SEQ ID NO: 23198 - DNA, 20 bp, Artificial Sequence
  Description of Artificial Sequence: Synthetic oligonucleotide
  Target: PCSK9; (-) strand; PAM type: YTN; PAM sequence: CTG
atgactttttttaatgtagt

SEQ ID NO: 23199 - DNA, 20 bp, Artificial Sequence
  Description of Artificial Sequence: Synthetic oligonucleotide
  Target: PCSK9; (-) strand; PAM type: YTN; PAM sequence: CTG
ctgatgactttttttaatgt

SEQ ID NO: 23200 - DNA, 20 bp, Artificial Sequence
  Description of Artificial Sequence: Synthetic oligonucleotide
  Target: PCSK9; (-) strand; PAM type: YTN; PAM sequence: CTA
cagtcaatgaacctgctgat

SEQ ID NO: 23201 - DNA, 20 bp, Artificial Sequence
  Description of Artificial Sequence: Synthetic oligonucleotide
  Target: PCSK9; (-) strand; PAM type: YTN; PAM sequence: CTG
acagctacagtcaatgaacc

SEQ ID NO: 23202 - DNA, 20 bp, Artificial Sequence
  Description of Artificial Sequence: Synthetic oligonucleotide
  Target: PCSK9; (-) strand; PAM type: YTN; PAM sequence: TTG
ctgacagctacagtcaatga

SEQ ID NO: 23203 - DNA, 20 bp, Artificial Sequence
  Description of Artificial Sequence: Synthetic oligonucleotide
  Target: PCSK9; (-) strand; PAM type: YTN; PAM sequence: TTG
attgctgacagctacagtca

SEQ ID NO: 23204 - DNA, 20 bp, Artificial Sequence
  Description of Artificial Sequence: Synthetic oligonucleotide
  Target: PCSK9; (-) strand; PAM type: YTN; PAM sequence: CTT
gattgctgacagctacagtc

SEQ ID NO: 23205 - DNA, 20 bp, Artificial Sequence
  Description of Artificial Sequence: Synthetic oligonucleotide
  Target: PCSK9; (-) strand; PAM type: YTN; PAM sequence: CTG
gtaaccacttgattgctgac

SEQ ID NO: 23206 - DNA, 20 bp, Artificial Sequence
  Description of Artificial Sequence: Synthetic oligonucleotide
  Target: PCSK9; (-) strand; PAM type: YTN; PAM sequence: TTG
ctggtaaccacttgattgct

SEQ ID NO: 23207 - DNA, 20 bp, Artificial Sequence
  Description of Artificial Sequence: Synthetic oligonucleotide
  Target: PCSK9; (-) strand; PAM type: YTN; PAM sequence: TTT
gctggtaaccacttgattgc

SEQ ID NO: 23208 - DNA, 20 bp, Artificial Sequence
  Description of Artificial Sequence: Synthetic oligonucleotide
  Target: PCSK9; (-) strand; PAM type: YTN; PAM sequence: CTT
tgctggtaaccacttgattg

SEQ ID NO: 23209 - DNA, 20 bp, Artificial Sequence
  Description of Artificial Sequence: Synthetic oligonucleotide
  Target: PCSK9; (-) strand; PAM type: YTN; PAM sequence: TTC
actttgctggtaaccacttg

SEQ ID NO: 23210 - DNA, 20 bp, Artificial Sequence
  Description of Artificial Sequence: Synthetic oligonucleotide
  Target: PCSK9; (-) strand; PAM type: YTN; PAM sequence: TTT
cactttgctggtaaccactt

SEQ ID NO: 23211 - DNA, 20 bp, Artificial Sequence
  Description of Artificial Sequence: Synthetic oligonucleotide
  Target: PCSK9; (-) strand; PAM type: YTN; PAM sequence: TTT
tcactttgctggtaaccact

SEQ ID NO: 23212 - DNA, 20 bp, Artificial Sequence
  Description of Artificial Sequence: Synthetic oligonucleotide
  Target: PCSK9; (-) strand; PAM type: YTN; PAM sequence: CTG
caatgaccatcgttttcact

SEQ ID NO: 23213 - DNA, 20 bp, Artificial Sequence
  Description of Artificial Sequence: Synthetic oligonucleotide
  Target: PCSK9; (-) strand; PAM type: YTN; PAM sequence: TTG
ctgcaatgaccatcgttttc

SEQ ID NO: 23214 - DNA, 20 bp, Artificial Sequence
  Description of Artificial Sequence: Synthetic oligonucleotide
  Target: PCSK9; (-) strand; PAM type: YTN; PAM sequence: TTG
ttgctgcaatgaccatcgtt

SEQ ID NO: 23215 - DNA, 20 bp, Artificial Sequence
  Description of Artificial Sequence: Synthetic oligonucleotide
  Target: PCSK9; (-) strand; PAM type: YTN; PAM sequence: TTA
tattgttgctgcaatgacca

SEQ ID NO: 23216 - DNA, 20 bp, Artificial Sequence
  Description of Artificial Sequence: Synthetic oligonucleotide
  Target: PCSK9; (-) strand; PAM type: YTN; PAM sequence: CTT
atattgttgctgcaatgacc

SEQ ID NO: 23217 - DNA, 20 bp, Artificial Sequence
  Description of Artificial Sequence: Synthetic oligonucleotide
  Target: PCSK9; (-) strand; PAM type: YTN; PAM sequence: TTG
cttatattgttgctgcaatg

SEQ ID NO: 23218 - DNA, 20 bp, Artificial Sequence
  Description of Artificial Sequence: Synthetic oligonucleotide
  Target: PCSK9; (-) strand; PAM type: YTN; PAM sequence: TTC
agatcatgttgcttatattg

SEQ ID NO: 23219 - DNA, 20 bp, Artificial Sequence
  Description of Artificial Sequence: Synthetic oligonucleotide
  Target: PCSK9; (-) strand; PAM type: YTN; PAM sequence: CTT
cagatcatgttgcttatatt

SEQ ID NO: 23220 - DNA, 20 bp, Artificial Sequence
  Description of Artificial Sequence: Synthetic oligonucleotide
  Target: PCSK9; (-) strand; PAM type: YTN; PAM sequence: TTA
tacgcttcagatcatgttgc

SEQ ID NO: 23221 - DNA, 20 bp, Artificial Sequence
  Description of Artificial Sequence: Synthetic oligonucleotide
  Target: PCSK9; (-) strand; PAM type: YTN; PAM sequence: TTC
atcaggatcgtccaccgtgt

SEQ ID NO: 23222 - DNA, 20 bp, Artificial Sequence
  Description of Artificial Sequence: Synthetic oligonucleotide
  Target: PCSK9; (-) strand; PAM type: YTN; PAM sequence: CTT
catcaggatcgtccaccgtg

SEQ ID NO: 23223 - DNA, 20 bp, Artificial Sequence
  Description of Artificial Sequence: Synthetic oligonucleotide
  Target: PCSK9; (-) strand; PAM type: YTN; PAM sequence: CTG
taaagcttcatcaggatcgt

SEQ ID NO: 23224 - DNA, 20 bp, Artificial Sequence
  Description of Artificial Sequence: Synthetic oligonucleotide
  Target: PCSK9; (-) strand; PAM type: YTN; PAM sequence: CTC
actgtaaagcttcatcagga

SEQ ID NO: 23225 - DNA, 20 bp, Artificial Sequence
  Description of Artificial Sequence: Synthetic oligonucleotide
  Target: PCSK9; (-) strand; PAM type: YTN; PAM sequence: CTG
ccgtcctcactgtaaagctt

SEQ ID NO: 23226 - DNA, 20 bp, Artificial Sequence
  Description of Artificial Sequence: Synthetic oligonucleotide
  Target: PCSK9; (-) strand; PAM type: YTN; PAM sequence: CTA
gcacctgccgtcctcactgt

SEQ ID NO: 23227 - DNA, 20 bp, Artificial Sequence
  Description of Artificial Sequence: Synthetic oligonucleotide
  Target: PCSK9; (-) strand; PAM type: YTN; PAM sequence: TTC
cgcacccctagcacctgccg

SEQ ID NO: 23228 - DNA, 20 bp, Artificial Sequence
  Description of Artificial Sequence: Synthetic oligonucleotide
  Target: PCSK9; (-) strand; PAM type: YTN; PAM sequence: CTT
ccgcacccctagcacctgcc

SEQ ID NO: 23229 - DNA, 20 bp, Artificial Sequence
  Description of Artificial Sequence: Synthetic oligonucleotide
  Target: PCSK9; (-) strand; PAM type: YTN; PAM sequence: CTA
tggaaacaacgccttccgca

SEQ ID NO: 23230 - DNA, 20 bp, Artificial Sequence
  Description of Artificial Sequence: Synthetic oligonucleotide
  Target: PCSK9; (-) strand; PAM type: YTN; PAM sequence: TTC
ctatggaaacaacgccttcc

SEQ ID NO: 23231 - DNA, 20 bp, Artificial Sequence
  Description of Artificial Sequence: Synthetic oligonucleotide
  Target: PCSK9; (-) strand; PAM type: YTN; PAM sequence: TTT
cctatggaaacaacgccttc

SEQ ID NO: 23232 - DNA, 20 bp, Artificial Sequence
  Description of Artificial Sequence: Synthetic oligonucleotide
  Target: PCSK9; (-) strand; PAM type: YTN; PAM sequence: TTA
tttcctatggaaacaacgcc

SEQ ID NO: 23233 - DNA, 20 bp, Artificial Sequence
  Description of Artificial Sequence: Synthetic oligonucleotide
  Target: PCSK9; (-) strand; PAM type: YTN; PAM sequence: CTT
atttcctatggaaacaacgc

SEQ ID NO: 23234 - DNA, 20 bp, Artificial Sequence
  Description of Artificial Sequence: Synthetic oligonucleotide
  Target: PCSK9; (-) strand; PAM type: YTN; PAM sequence: CTA
gtccccttatttcctatgga

SEQ ID NO: 23235 - DNA, 20 bp, Artificial Sequence
  Description of Artificial Sequence: Synthetic oligonucleotide
  Target: PCSK9; (-) strand; PAM type: YTN; PAM sequence: TTC
tagtccccttatttcctatg

SEQ ID NO: 23236 - DNA, 20 bp, Artificial Sequence
  Description of Artificial Sequence: Synthetic oligonucleotide
  Target: PCSK9; (-) strand; PAM type: YTN; PAM sequence: CTT
ctagtccccttatttcctat

SEQ ID NO: 23237 - DNA, 20 bp, Artificial Sequence
  Description of Artificial Sequence: Synthetic oligonucleotide
  Target: PCSK9; (-) strand; PAM type: YTN; PAM sequence: TTG
ccacttctagtccccttatt

SEQ ID NO: 23238 - DNA, 20 bp, Artificial Sequence
  Description of Artificial Sequence: Synthetic oligonucleotide
  Target: PCSK9; (-) strand; PAM type: YTN; PAM sequence: CTC
aggagcccaaaatcaggagt

SEQ ID NO: 23239 - DNA, 20 bp, Artificial Sequence
  Description of Artificial Sequence: Synthetic oligonucleotide
  Target: PCSK9; (-) strand; PAM type: YTN; PAM sequence: CTC
tcaggagcccaaaatcagga

SEQ ID NO: 23240 - DNA, 20 bp, Artificial Sequence
  Description of Artificial Sequence: Synthetic oligonucleotide
  Target: PCSK9; (-) strand; PAM type: YTN; PAM sequence: CTG
cactctcaggagcccaaaat

SEQ ID NO: 23241 - DNA, 20 bp, Artificial Sequence
  Description of Artificial Sequence: Synthetic oligonucleotide
  Target: PCSK9; (-) strand; PAM type: YTN; PAM sequence: CTG
gcgactgcactctcaggagc

SEQ ID NO: 23242 - DNA, 20 bp, Artificial Sequence
  Description of Artificial Sequence: Synthetic oligonucleotide
  Target: PCSK9; (-) strand; PAM type: YTN; PAM sequence: CTG
ggatatcatcgctggcgact

SEQ ID NO: 23243 - DNA, 20 bp, Artificial Sequence
  Description of Artificial Sequence: Synthetic oligonucleotide
  Target: PCSK9; (-) strand; PAM type: YTN; PAM sequence: CTG
gcgatgatccacactgggat

SEQ ID NO: 23244 - DNA, 20 bp, Artificial Sequence
  Description of Artificial Sequence: Synthetic oligonucleotide
  Target: PCSK9; (-) strand; PAM type: YTN; PAM sequence: TTG
aaatgctggcgatgatccac

SEQ ID NO: 23245 - DNA, 20 bp, Artificial Sequence
  Description of Artificial Sequence: Synthetic oligonucleotide
  Target: PCSK9; (-) strand; PAM type: YTN; PAM sequence: CTT
gaaatgctggcgatgatcca

SEQ ID NO: 23246 - DNA, 20 bp, Artificial Sequence
  Description of Artificial Sequence: Synthetic oligonucleotide
  Target: PCSK9; (-) strand; PAM type: YTN; PAM sequence: TTG
tgtgggacatgaccttgaaa

SEQ ID NO: 23247 - DNA, 20 bp, Artificial Sequence
  Description of Artificial Sequence: Synthetic oligonucleotide
  Target: PCSK9; (-) strand; PAM type: YTN; PAM sequence: CTC
accaagagattgtgtgggac

SEQ ID NO: 23248 - DNA, 20 bp, Artificial Sequence
  Description of Artificial Sequence: Synthetic oligonucleotide
  Target: PCSK9; (-) strand; PAM type: YTN; PAM sequence: CTC
cgcccacatcctcaccaaga

SEQ ID NO: 23249 - DNA, 20 bp, Artificial Sequence
  Description of Artificial Sequence: Synthetic oligonucleotide
  Target: PCSK9; (-) strand; PAM type: YTN; PAM sequence: CTC
tccgcccacatcctcaccaa

SEQ ID NO: 23250 - DNA, 20 bp, Artificial Sequence
  Description of Artificial Sequence: Synthetic oligonucleotide
  Target: PCSK9; (-) strand; PAM type: YTN; PAM sequence: TTC
tctccgcccacatcctcacc

SEQ ID NO: 23251 - DNA, 20 bp, Artificial Sequence
  Description of Artificial Sequence: Synthetic oligonucleotide
  Target: PCSK9; (-) strand; PAM type: YTN; PAM sequence: CTT
ctctccgcccacatcctcac

SEQ ID NO: 23252 - DNA, 20 bp, Artificial Sequence
  Description of Artificial Sequence: Synthetic oligonucleotide
  Target: PCSK9; (-) strand; PAM type: YTN; PAM sequence: CTC
accttctctccgcccacatc

SEQ ID NO: 23253 - DNA, 20 bp, Artificial Sequence
  Description of Artificial Sequence: Synthetic oligonucleotide
  Target: PCSK9; (-) strand; PAM type: YTN; PAM sequence: TTC
tcaccttctctccgcccaca

SEQ ID NO: 23254 - DNA, 20 bp, Artificial Sequence
  Description of Artificial Sequence: Synthetic oligonucleotide
  Target: PCSK9; (-) strand; PAM type: YTN; PAM sequence: CTA
ttctcaccttctctccgccc

SEQ ID NO: 23255 - DNA, 20 bp, Artificial Sequence
  Description of Artificial Sequence: Synthetic oligonucleotide
  Target: PCSK9; (-) strand; PAM type: YTN; PAM sequence: CTA
ccctattctcaccttctctc

SEQ ID NO: 23256 - DNA, 20 bp, Artificial Sequence
  Description of Artificial Sequence: Synthetic oligonucleotide
  Target: PCSK9; (-) strand; PAM type: YTN; PAM sequence: TTC
ccctaccctattctcacctt

SEQ ID NO: 23257 - DNA, 20 bp, Artificial Sequence
  Description of Artificial Sequence: Synthetic oligonucleotide
  Target: PCSK9; (-) strand; PAM type: YTN; PAM sequence: TTT
cccctaccctattctcacct

SEQ ID NO: 23258 - DNA, 20 bp, Artificial Sequence
  Description of Artificial Sequence: Synthetic oligonucleotide
  Target: PCSK9; (-) strand; PAM type: YTN; PAM sequence: CTG
tttcccctaccctattctca

SEQ ID NO: 23259 - DNA, 20 bp, Artificial Sequence
  Description of Artificial Sequence: Synthetic oligonucleotide
  Target: PCSK9; (-) strand; PAM type: YTN; PAM sequence: CTA
ctgtttcccctaccctattc

SEQ ID NO: 23260 - DNA, 20 bp, Artificial Sequence
  Description of Artificial Sequence: Synthetic oligonucleotide
  Target: PCSK9; (-) strand; PAM type: YTN; PAM sequence: CTG
tcctactgtttcccctaccc

SEQ ID NO: 23261 - DNA, 20 bp, Artificial Sequence
  Description of Artificial Sequence: Synthetic oligonucleotide
  Target: PCSK9; (-) strand; PAM type: YTN; PAM sequence: TTC
ctgtcctactgtttccccta

SEQ ID NO: 23262 - DNA, 20 bp, Artificial Sequence
  Description of Artificial Sequence: Synthetic oligonucleotide
  Target: PCSK9; (-) strand; PAM type: YTN; PAM sequence: CTT
cctgtcctactgtttcccct

SEQ ID NO: 23263 - DNA, 20 bp, Artificial Sequence
  Description of Artificial Sequence: Synthetic oligonucleotide
  Target: PCSK9; (-) strand; PAM type: YTN; PAM sequence: TTG
agtacgtgaatacttcctgt

SEQ ID NO: 23264 - DNA, 20 bp, Artificial Sequence
  Description of Artificial Sequence: Synthetic oligonucleotide
  Target: PCSK9; (-) strand; PAM type: YTN; PAM sequence: TTT
gagtacgtgaatacttcctg

SEQ ID NO: 23265 - DNA, 20 bp, Artificial Sequence
  Description of Artificial Sequence: Synthetic oligonucleotide
  Target: PCSK9; (-) strand; PAM type: YTN; PAM sequence: TTT
tgagtacgtgaatacttcct

SEQ ID NO: 23266 - DNA, 20 bp, Artificial Sequence
  Description of Artificial Sequence: Synthetic oligonucleotide
  Target: PCSK9; (-) strand; PAM type: YTN; PAM sequence: TTG
gttttgagtacgtgaatact

SEQ ID NO: 23267 - DNA, 20 bp, Artificial Sequence
  Description of Artificial Sequence: Synthetic oligonucleotide
  Target: PCSK9; (-) strand; PAM type: YTN; PAM sequence: CTA
ccattggttttgagtacgtg

SEQ ID NO: 23268 - DNA, 20 bp, Artificial Sequence
  Description of Artificial Sequence: Synthetic oligonucleotide
  Target: PCSK9; (-) strand; PAM type: YTN; PAM sequence: TTC
taccattggttttgagtacg

SEQ ID NO: 23269 - DNA, 20 bp, Artificial Sequence
  Description of Artificial Sequence: Synthetic oligonucleotide
  Target: PCSK9; (-) strand; PAM type: YTN; PAM sequence: TTG
aaatgtgatgttctaccatt

SEQ ID NO: 23270 - DNA, 20 bp, Artificial Sequence
  Description of Artificial Sequence: Synthetic oligonucleotide
  Target: PCSK9; (-) strand; PAM type: YTN; PAM sequence: TTT
gaaatgtgatgttctaccat

SEQ ID NO: 23271 - DNA, 20 bp, Artificial Sequence
  Description of Artificial Sequence: Synthetic oligonucleotide
  Target: PCSK9; (-) strand; PAM type: YTN; PAM sequence: TTG
cagtttgaaatgtgatgttc

SEQ ID NO: 23272 - DNA, 20 bp, Artificial Sequence
  Description of Artificial Sequence: Synthetic oligonucleotide
  Target: PCSK9; (-) strand; PAM type: YTN; PAM sequence: CTT
gcagtttgaaatgtgatgtt

SEQ ID NO: 23273 - DNA, 20 bp, Artificial Sequence
  Description of Artificial Sequence: Synthetic oligonucleotide
  Target: PCSK9; (-) strand; PAM type: YTN; PAM sequence: TTC
caatggtcttgcagtttgaa

SEQ ID NO: 23274 - DNA, 20 bp, Artificial Sequence
  Description of Artificial Sequence: Synthetic oligonucleotide
  Target: PCSK9; (-) strand; PAM type: YTN; PAM sequence: TTC
agacggttccaatggtcttg

SEQ ID NO: 23275 - DNA, 20 bp, Artificial Sequence
  Description of Artificial Sequence: Synthetic oligonucleotide
  Target: PCSK9; (-) strand; PAM type: YTN; PAM sequence: CTT
cagacggttccaatggtctt

SEQ ID NO: 23276 - DNA, 20 bp, Artificial Sequence
  Description of Artificial Sequence: Synthetic oligonucleotide
  Target: PCSK9; (-) strand; PAM type: YTN; PAM sequence: TTA
gagaaacggacagaggcgag

SEQ ID NO: 23277 - DNA, 20 bp, Artificial Sequence
  Description of Artificial Sequence: Synthetic oligonucleotide
  Target: PCSK9; (-) strand; PAM type: YTN; PAM sequence: CTT
agagaaacggacagaggcga

SEQ ID NO: 23278 - DNA, 20 bp, Artificial Sequence
  Description of Artificial Sequence: Synthetic oligonucleotide
  Target: PCSK9; (-) strand; PAM type: YTN; PAM sequence: CTG
tacccttagagaaacggaca

SEQ ID NO: 23279 - DNA, 20 bp, Artificial Sequence
  Description of Artificial Sequence: Synthetic oligonucleotide
  Target: PCSK9; (-) strand; PAM type: YTN; PAM sequence: TTA
agagcagaactgtaccctta

SEQ ID NO: 23280 - DNA, 20 bp, Artificial Sequence
  Description of Artificial Sequence: Synthetic oligonucleotide
  Target: PCSK9; (-) strand; PAM type: YTN; PAM sequence: CTT
aagagcagaactgtaccctt

SEQ ID NO: 23281 - DNA, 20 bp, Artificial Sequence
  Description of Artificial Sequence: Synthetic oligonucleotide
  Target: PCSK9; (-) strand; PAM type: YTN; PAM sequence: CTG
agaagatggaagggccagca

SEQ ID NO: 23282 - DNA, 20 bp, Artificial Sequence
  Description of Artificial Sequence: Synthetic oligonucleotide
  Target: PCSK9; (-) strand; PAM type: YTN; PAM sequence: TTG
tcaaacacactgagaagatg

SEQ ID NO: 23283 - DNA, 20 bp, Artificial Sequence
  Description of Artificial Sequence: Synthetic oligonucleotide
  Target: PCSK9; (-) strand; PAM type: YTN; PAM sequence: TTT
gtcaaacacactgagaagat

SEQ ID NO: 23284 - DNA, 20 bp, Artificial Sequence
  Description of Artificial Sequence: Synthetic oligonucleotide
  Target: PCSK9; (-) strand; PAM type: YTN; PAM sequence: CTT
tgtcaaacacactgagaaga

SEQ ID NO: 23285 - DNA, 20 bp, Artificial Sequence
  Description of Artificial Sequence: Synthetic oligonucleotide
  Target: PCSK9; (-) strand; PAM type: YTN; PAM sequence: TTG
gcagtggcctttgtcaaaca

SEQ ID NO: 23286 - DNA, 20 bp, Artificial Sequence
  Description of Artificial Sequence: Synthetic oligonucleotide
  Target: PCSK9; (-) strand; PAM type: YTN; PAM sequence: CTG
gaggttggcagtggcctttg

SEQ ID NO: 23287 - DNA, 20 bp, Artificial Sequence
  Description of Artificial Sequence: Synthetic oligonucleotide
  Target: PCSK9; (-) strand; PAM type: YTN; PAM sequence: TTG
ctggaggttggcagtggcct

SEQ ID NO: 23288 - DNA, 20 bp, Artificial Sequence
  Description of Artificial Sequence: Synthetic oligonucleotide
  Target: PCSK9; (-) strand; PAM type: YTN; PAM sequence: CTT
gctggaggttggcagtggcc

SEQ ID NO: 23289 - DNA, 20 bp, Artificial Sequence
  Description of Artificial Sequence: Synthetic oligonucleotide
  Target: PCSK9; (-) strand; PAM type: YTN; PAM sequence: CTG
tgacttgctggaggttggca

SEQ ID NO: 23290 - DNA, 20 bp, Artificial Sequence
  Description of Artificial Sequence: Synthetic oligonucleotide
  Target: PCSK9; (-) strand; PAM type: YTN; PAM sequence: TTC
tgtgacttgctggaggttgg

SEQ ID NO: 23291 - DNA, 20 bp, Artificial Sequence
  Description of Artificial Sequence: Synthetic oligonucleotide
  Target: PCSK9; (-) strand; PAM type: YTN; PAM sequence: TTA
ttctgtgacttgctggaggt

SEQ ID NO: 23292 - DNA, 20 bp, Artificial Sequence
  Description of Artificial Sequence: Synthetic oligonucleotide
  Target: PCSK9; (-) strand; PAM type: YTN; PAM sequence: TTG
ttattctgtgacttgctgga

SEQ ID NO: 23293 - DNA, 20 bp, Artificial Sequence
  Description of Artificial Sequence: Synthetic oligonucleotide
  Target: PCSK9; (-) strand; PAM type: YTN; PAM sequence: TTC
attgttattctgtgacttgc

SEQ ID NO: 23294 - DNA, 20 bp, Artificial Sequence
  Description of Artificial Sequence: Synthetic oligonucleotide
  Target: PCSK9; (-) strand; PAM type: YTN; PAM sequence: CTT
cattgttattctgtgacttg

SEQ ID NO: 23295 - DNA, 20 bp, Artificial Sequence
  Description of Artificial Sequence: Synthetic oligonucleotide
  Target: PCSK9; (-) strand; PAM type: YTN; PAM sequence: CTG
tcagacttcattgttattct

SEQ ID NO: 23296 - DNA, 20 bp, Artificial Sequence
  Description of Artificial Sequence: Synthetic oligonucleotide
  Target: PCSK9; (-) strand; PAM type: YTN; PAM sequence: CTG
tgctgtcagacttcattgtt

SEQ ID NO: 23297 - DNA, 20 bp, Artificial Sequence
  Description of Artificial Sequence: Synthetic oligonucleotide
  Target: PCSK9; (-) strand; PAM type: YTN; PAM sequence: TTC
tgtgctgtcagacttcattg

SEQ ID NO: 23298 - DNA, 20 bp, Artificial Sequence
  Description of Artificial Sequence: Synthetic oligonucleotide
  Target: PCSK9; (-) strand; PAM type: YTN; PAM sequence: TTT
ctgtgctgtcagacttcatt

SEQ ID NO: 23299 - DNA, 20 bp, Artificial Sequence
  Description of Artificial Sequence: Synthetic oligonucleotide
  Target: PCSK9; (-) strand; PAM type: YTN; PAM sequence: CTG
gcagtgagggtttctgtgct

SEQ ID NO: 23300 - DNA, 20 bp, Artificial Sequence
  Description of Artificial Sequence: Synthetic oligonucleotide
  Target: PCSK9; (-) strand; PAM type: YTN; PAM sequence: CTC
tggcagtgagggtttctgtg

SEQ ID NO: 23301 - DNA, 20 bp, Artificial Sequence
  Description of Artificial Sequence: Synthetic oligonucleotide
  Target: PCSK9; (-) strand; PAM type: YTN; PAM sequence: TTC
tctggcagtgagggtttctg

SEQ ID NO: 23302 - DNA, 20 bp, Artificial Sequence
  Description of Artificial Sequence: Synthetic oligonucleotide
  Target: PCSK9; (-) strand; PAM type: YTN; PAM sequence: TTC
attctctggcagtgagggtt

SEQ ID NO: 23303 - DNA, 20 bp, Artificial Sequence
  Description of Artificial Sequence: Synthetic oligonucleotide
  Target: PCSK9; (-) strand; PAM type: YTN; PAM sequence: TTT
cattctctggcagtgagggt

SEQ ID NO: 23304 - DNA, 20 bp, Artificial Sequence
  Description of Artificial Sequence: Synthetic oligonucleotide
  Target: PCSK9; (-) strand; PAM type: YTN; PAM sequence: TTT
tcattctctggcagtgaggg

SEQ ID NO: 23305 - DNA, 20 bp, Artificial Sequence
  Description of Artificial Sequence: Synthetic oligonucleotide
  Target: PCSK9; (-) strand; PAM type: YTN; PAM sequence: CTT
ttcattctctggcagtgagg

SEQ ID NO: 23306 - DNA, 20 bp, Artificial Sequence
  Description of Artificial Sequence: Synthetic oligonucleotide
  Target: PCSK9; (-) strand; PAM type: YTN; PAM sequence: CTC
gccatggcccagtcttttca

SEQ ID NO: 23307 - DNA, 20 bp, Artificial Sequence
  Description of Artificial Sequence: Synthetic oligonucleotide
  Target: PCSK9; (-) strand; PAM type: YTN; PAM sequence: CTC
tcgccatggcccagtctttt

SEQ ID NO: 23308 - DNA, 20 bp, Artificial Sequence
  Description of Artificial Sequence: Synthetic oligonucleotide
  Target: PCSK9; (-) strand; PAM type: YTN; PAM sequence: CTG
tgctctcgccatggcccagt

SEQ ID NO: 23309 - DNA, 20 bp, Artificial Sequence
  Description of Artificial Sequence: Synthetic oligonucleotide
  Target: PCSK9; (-) strand; PAM type: YTN; PAM sequence: TTA
ctgtgctctcgccatggccc

SEQ ID NO: 23310 - DNA, 20 bp, Artificial Sequence
  Description of Artificial Sequence: Synthetic oligonucleotide
  Target: PCSK9; (-) strand; PAM type: YTN; PAM sequence: CTC
attactgtgctctcgccatg

SEQ ID NO: 23311 - DNA, 20 bp, Artificial Sequence
  Description of Artificial Sequence: Synthetic oligonucleotide
  Target: PCSK9; (-) strand; PAM type: YTN; PAM sequence: TTG
tgtgggcatgtggccaggca

SEQ ID NO: 23312 - DNA, 20 bp, Artificial Sequence
  Description of Artificial Sequence: Synthetic oligonucleotide
  Target: PCSK9; (-) strand; PAM type: YTN; PAM sequence: CTG
tggcattgtgtgggcatgtg

SEQ ID NO: 23313 - DNA, 20 bp, Artificial Sequence
  Description of Artificial Sequence: Synthetic oligonucleotide
  Target: PCSK9; (-) strand; PAM type: YTN; PAM sequence: CTG
ctgtggcattgtgtgggcat

SEQ ID NO: 23314 - DNA, 20 bp, Artificial Sequence
  Description of Artificial Sequence: Synthetic oligonucleotide
  Target: PCSK9; (-) strand; PAM type: YTN; PAM sequence: CTG
gctgctgtggcattgtgtgg

SEQ ID NO: 23315 - DNA, 20 bp, Artificial Sequence
  Description of Artificial Sequence: Synthetic oligonucleotide
  Target: PCSK9; (-) strand; PAM type: YTN; PAM sequence: CTG
tctggctgctgtggcattgt

SEQ ID NO: 23316 - DNA, 20 bp, Artificial Sequence
  Description of Artificial Sequence: Synthetic oligonucleotide
  Target: PCSK9; (-) strand; PAM type: YTN; PAM sequence: CTG
aagtgcctgtctggctgctg

SEQ ID NO: 23317 - DNA, 20 bp, Artificial Sequence
  Description of Artificial Sequence: Synthetic oligonucleotide
  Target: PCSK9; (-) strand; PAM type: YTN; PAM sequence: TTG
ccaagtcacagaggcgcagc

SEQ ID NO: 23318 - DNA, 20 bp, Artificial Sequence
  Description of Artificial Sequence: Synthetic oligonucleotide
  Target: PCSK9; (-) strand; PAM type: YTN; PAM sequence: TTT
gccaagtcacagaggcgcag

SEQ ID NO: 23319 - DNA, 20 bp, Artificial Sequence
  Description of Artificial Sequence: Synthetic oligonucleotide
  Target: PCSK9; (-) strand; PAM type: YTN; PAM sequence: CTG
tcagatttgccaagtcacag

SEQ ID NO: 23320 - DNA, 20 bp, Artificial Sequence
  Description of Artificial Sequence: Synthetic oligonucleotide
  Target: PCSK9; (-) strand; PAM type: YTN; PAM sequence: TTC
actgtcagatttgccaagtc

SEQ ID NO: 23321 - DNA, 20 bp, Artificial Sequence
  Description of Artificial Sequence: Synthetic oligonucleotide
  Target: PCSK9; (-) strand; PAM type: YTN; PAM sequence: TTT
cactgtcagatttgccaagt

SEQ ID NO: 23322 - DNA, 20 bp, Artificial Sequence
  Description of Artificial Sequence: Synthetic oligonucleotide
  Target: PCSK9; (-) strand; PAM type: YTN; PAM sequence: TTT
tcactgtcagatttgccaag

SEQ ID NO: 23323 - DNA, 20 bp, Artificial Sequence
  Description of Artificial Sequence: Synthetic oligonucleotide
  Target: PCSK9; (-) strand; PAM type: YTN; PAM sequence: TTA
ggaagtgccaggttttcact

SEQ ID NO: 23324 - DNA, 20 bp, Artificial Sequence
  Description of Artificial Sequence: Synthetic oligonucleotide
  Target: PCSK9; (-) strand; PAM type: YTN; PAM sequence: CTT
aggaagtgccaggttttcac

SEQ ID NO: 23325 - DNA, 20 bp, Artificial Sequence
  Description of Artificial Sequence: Synthetic oligonucleotide
  Target: PCSK9; (-) strand; PAM type: YTN; PAM sequence: CTA
gggagccttaggaagtgcca

SEQ ID NO: 23326 - DNA, 20 bp, Artificial Sequence
  Description of Artificial Sequence: Synthetic oligonucleotide
  Target: PCSK9; (-) strand; PAM type: YTN; PAM sequence: CTC
accatgcacagaactaggga

SEQ ID NO: 23327 - DNA, 20 bp, Artificial Sequence
  Description of Artificial Sequence: Synthetic oligonucleotide
  Target: PCSK9; (-) strand; PAM type: YTN; PAM sequence: TTC
atctcaccatgcacagaact

SEQ ID NO: 23328 - DNA, 20 bp, Artificial Sequence
  Description of Artificial Sequence: Synthetic oligonucleotide
  Target: PCSK9; (-) strand; PAM type: YTN; PAM sequence: TTT
catctcaccatgcacagaac

SEQ ID NO: 23329 - DNA, 20 bp, Artificial Sequence
  Description of Artificial Sequence: Synthetic oligonucleotide
  Target: PCSK9; (-) strand; PAM type: YTN; PAM sequence: TTT
tcatctcaccatgcacagaa

SEQ ID NO: 23330 - DNA, 20 bp, Artificial Sequence
  Description of Artificial Sequence: Synthetic oligonucleotide
  Target: PCSK9; (-) strand; PAM type: YTN; PAM sequence: TTA
ttttcatctcaccatgcaca

SEQ ID NO: 23331 - DNA, 20 bp, Artificial Sequence
  Description of Artificial Sequence: Synthetic oligonucleotide
  Target: PCSK9; (-) strand; PAM type: YTN; PAM sequence: CTT
attttcatctcaccatgcac

SEQ ID NO: 23332 - DNA, 20 bp, Artificial Sequence
  Description of Artificial Sequence: Synthetic oligonucleotide
  Target: PCSK9; (-) strand; PAM type: YTN; PAM sequence: CTG
ccttattttcatctcaccat

SEQ ID NO: 23333 - DNA, 20 bp, Artificial Sequence
  Description of Artificial Sequence: Synthetic oligonucleotide
  Target: PCSK9; (-) strand; PAM type: YTN; PAM sequence: TTA
caggtcctgccttattttca

SEQ ID NO: 23334 - DNA, 20 bp, Artificial Sequence
  Description of Artificial Sequence: Synthetic oligonucleotide
  Target: PCSK9; (-) strand; PAM type: YTN; PAM sequence: TTA
gttacaggtcctgccttatt

SEQ ID NO: 23335 - DNA, 20 bp, Artificial Sequence
  Description of Artificial Sequence: Synthetic oligonucleotide
  Target: PCSK9; (-) strand; PAM type: YTN; PAM sequence: TTT
agttacaggtcctgccttat

SEQ ID NO: 23336 - DNA, 20 bp, Artificial Sequence
  Description of Artificial Sequence: Synthetic oligonucleotide
  Target: PCSK9; (-) strand; PAM type: YTN; PAM sequence: CTT
tagttacaggtcctgcctta

SEQ ID NO: 23337 - DNA, 20 bp, Artificial Sequence
  Description of Artificial Sequence: Synthetic oligonucleotide
  Target: PCSK9; (-) strand; PAM type: YTN; PAM sequence: TTG
cctttagttacaggtcctgc

SEQ ID NO: 23338 - DNA, 20 bp, Artificial Sequence
  Description of Artificial Sequence: Synthetic oligonucleotide
  Target: PCSK9; (-) strand; PAM type: YTN; PAM sequence: TTT
gcctttagttacaggtcctg

SEQ ID NO: 23339 - DNA, 20 bp, Artificial Sequence
  Description of Artificial Sequence: Synthetic oligonucleotide
  Target: PCSK9; (-) strand; PAM type: YTN; PAM sequence: TTT
tgcctttagttacaggtcct

SEQ ID NO: 23340 - DNA, 20 bp, Artificial Sequence
  Description of Artificial Sequence: Synthetic oligonucleotide
  Target: PCSK9; (-) strand; PAM type: YTN; PAM sequence: CTG
ttttgcctttagttacaggt

SEQ ID NO: 23341 - DNA, 20 bp, Artificial Sequence
  Description of Artificial Sequence: Synthetic oligonucleotide
  Target: PCSK9; (-) strand; PAM type: YTN; PAM sequence: TTC
ggccctgttttgcctttagt

SEQ ID NO: 23342 - DNA, 20 bp, Artificial Sequence
  Description of Artificial Sequence: Synthetic oligonucleotide
  Target: PCSK9; (-) strand; PAM type: YTN; PAM sequence: TTT
cggccctgttttgcctttag

SEQ ID NO: 23343 - DNA, 20 bp, Artificial Sequence
  Description of Artificial Sequence: Synthetic oligonucleotide
  Target: PCSK9; (-) strand; PAM type: YTN; PAM sequence: TTT
tcggccctgttttgccttta

SEQ ID NO: 23344 - DNA, 20 bp, Artificial Sequence
  Description of Artificial Sequence: Synthetic oligonucleotide
  Target: PCSK9; (-) strand; PAM type: YTN; PAM sequence: CTC
acattttcggccctgttttg

SEQ ID NO: 23345 - DNA, 20 bp, Artificial Sequence
  Description of Artificial Sequence: Synthetic oligonucleotide
  Target: PCSK9; (-) strand; PAM type: YTN; PAM sequence: TTG
ctcacattttcggccctgtt

SEQ ID NO: 23346 - DNA, 20 bp, Artificial Sequence
  Description of Artificial Sequence: Synthetic oligonucleotide
  Target: PCSK9; (-) strand; PAM type: YTN; PAM sequence: TTG
aattgctcacattttcggcc

SEQ ID NO: 23347 - DNA, 20 bp, Artificial Sequence
  Description of Artificial Sequence: Synthetic oligonucleotide
  Target: PCSK9; (-) strand; PAM type: YTN; PAM sequence: TTT
gaattgctcacattttcggc

SEQ ID NO: 23348 - DNA, 20 bp, Artificial Sequence
  Description of Artificial Sequence: Synthetic oligonucleotide
  Target: PCSK9; (-) strand; PAM type: YTN; PAM sequence: TTT
tgaattgctcacattttcgg

SEQ ID NO: 23349 - DNA, 20 bp, Artificial Sequence
  Description of Artificial Sequence: Synthetic oligonucleotide
  Target: PCSK9; (-) strand; PAM type: YTN; PAM sequence: TTG
tattttgaattgctcacatt

SEQ ID NO: 23350 - DNA, 20 bp, Artificial Sequence
  Description of Artificial Sequence: Synthetic oligonucleotide
  Target: PCSK9; (-) strand; PAM type: YTN; PAM sequence: TTT
gtattttgaattgctcacat

SEQ ID NO: 23351 - DNA, 20 bp, Artificial Sequence
  Description of Artificial Sequence: Synthetic oligonucleotide
  Target: PCSK9; (-) strand; PAM type: YTN; PAM sequence: TTT
tgtattttgaattgctcaca

SEQ ID NO: 23352 - DNA, 20 bp, Artificial Sequence
  Description of Artificial Sequence: Synthetic oligonucleotide
  Target: PCSK9; (-) strand; PAM type: YTN; PAM sequence: TTG
tacattttgtattttgaatt

SEQ ID NO: 23353 - DNA, 20 bp, Artificial Sequence
  Description of Artificial Sequence: Synthetic oligonucleotide
  Target: PCSK9; (-) strand; PAM type: YTN; PAM sequence: TTT
gtacattttgtattttgaat

SEQ ID NO: 23354 - DNA, 20 bp, Artificial Sequence
  Description of Artificial Sequence: Synthetic oligonucleotide
  Target: PCSK9; (-) strand; PAM type: YTN; PAM sequence: TTT
tgtacattttgtattttgaa

SEQ ID NO: 23355 - DNA, 20 bp, Artificial Sequence
  Description of Artificial Sequence: Synthetic oligonucleotide
  Target: PCSK9; (-) strand; PAM type: YTN; PAM sequence: TTC
atatatattttgtacatttt

SEQ ID NO: 23356 - DNA, 20 bp, Artificial Sequence
  Description of Artificial Sequence: Synthetic oligonucleotide
  Target: PCSK9; (-) strand; PAM type: YTN; PAM sequence: TTT
catatatattttgtacattt

SEQ ID NO: 23357 - DNA, 20 bp, Artificial Sequence
  Description of Artificial Sequence: Synthetic oligonucleotide
  Target: PCSK9; (-) strand; PAM type: YTN; PAM sequence: TTA
cacccacatatttcatatat

SEQ ID NO: 23358 - DNA, 20 bp, Artificial Sequence
  Description of Artificial Sequence: Synthetic oligonucleotide
  Target: PCSK9; (-) strand; PAM type: YTN; PAM sequence: TTT
acacccacatatttcatata

SEQ ID NO: 23359 - DNA, 20 bp, Artificial Sequence
  Description of Artificial Sequence: Synthetic oligonucleotide
  Target: PCSK9; (-) strand; PAM type: YTN; PAM sequence: TTA
tggtgtgggggagaggttta

SEQ ID NO: 23360 - DNA, 20 bp, Artificial Sequence
  Description of Artificial Sequence: Synthetic oligonucleotide
  Target: PCSK9; (-) strand; PAM type: YTN; PAM sequence: TTT
atggtgtgggggagaggttt

SEQ ID NO: 23361 - DNA, 20 bp, Artificial Sequence
  Description of Artificial Sequence: Synthetic oligonucleotide
  Target: PCSK9; (-) strand; PAM type: YTN; PAM sequence: TTT
tatggtgtgggggagaggtt

SEQ ID NO: 23362 - DNA, 20 bp, Artificial Sequence
  Description of Artificial Sequence: Synthetic oligonucleotide
  Target: PCSK9; (-) strand; PAM type: YTN; PAM sequence: CTT
ttatggtgtgggggagaggt

SEQ ID NO: 23363 - DNA, 20 bp, Artificial Sequence
  Description of Artificial Sequence: Synthetic oligonucleotide
  Target: PCSK9; (-) strand; PAM type: YTN; PAM sequence: CTC
ccttttatggtgtgggggag

SEQ ID NO: 23364 - DNA, 20 bp, Artificial Sequence
  Description of Artificial Sequence: Synthetic oligonucleotide
  Target: PCSK9; (-) strand; PAM type: YTN; PAM sequence: TTA
taccagctcccttttatggt

SEQ ID NO: 23365 - DNA, 20 bp, Artificial Sequence
  Description of Artificial Sequence: Synthetic oligonucleotide
  Target: PCSK9; (-) strand; PAM type: YTN; PAM sequence: TTT
ataccagctcccttttatgg

SEQ ID NO: 23366 - DNA, 20 bp, Artificial Sequence
  Description of Artificial Sequence: Synthetic oligonucleotide
  Target: PCSK9; (-) strand; PAM type: YTN; PAM sequence: CTC
atttataccagctccctttt

SEQ ID NO: 23367 - DNA, 20 bp, Artificial Sequence
  Description of Artificial Sequence: Synthetic oligonucleotide
  Target: PCSK9; (-) strand; PAM type: YTN; PAM sequence: TTC
actcatttataccagctccc

SEQ ID NO: 23368 - DNA, 20 bp, Artificial Sequence
  Description of Artificial Sequence: Synthetic oligonucleotide
  Target: PCSK9; (-) strand; PAM type: YTN; PAM sequence: TTC
caaagtatagcaccattcac

SEQ ID NO: 23369 - DNA, 20 bp, Artificial Sequence
  Description of Artificial Sequence: Synthetic oligonucleotide
  Target: PCSK9; (-) strand; PAM type: YTN; PAM sequence: TTT
ccaaagtatagcaccattca

SEQ ID NO: 23370 - DNA, 20 bp, Artificial Sequence
  Description of Artificial Sequence: Synthetic oligonucleotide
  Target: PCSK9; (-) strand; PAM type: YTN; PAM sequence: TTA
gtcgtatttccaaagtatag

SEQ ID NO: 23371 - DNA, 20 bp, Artificial Sequence
  Description of Artificial Sequence: Synthetic oligonucleotide
  Target: PCSK9; (-) strand; PAM type: YTN; PAM sequence: TTT
agtcgtatttccaaagtata

SEQ ID NO: 23372 - DNA, 20 bp, Artificial Sequence
  Description of Artificial Sequence: Synthetic oligonucleotide
  Target: PCSK9; (-) strand; PAM type: YTN; PAM sequence: TTG
aataaccatccatttagtcg

SEQ ID NO: 23373 - DNA, 20 bp, Artificial Sequence
  Description of Artificial Sequence: Synthetic oligonucleotide
  Target: PCSK9; (-) strand; PAM type: YTN; PAM sequence: TTC
ccagaaataaatataaagca

SEQ ID NO: 23374 - DNA, 20 bp, Artificial Sequence
  Description of Artificial Sequence: Synthetic oligonucleotide
  Target: PCSK9; (-) strand; PAM type: YTN; PAM sequence: TTT
cccagaaataaatataaagc

SEQ ID NO: 23375 - DNA, 20 bp, Artificial Sequence
  Description of Artificial Sequence: Synthetic oligonucleotide
  Target: PCSK9; (-) strand; PAM type: YTN; PAM sequence: TTT
tcccagaaataaatataaag

SEQ ID NO: 23376 - DNA, 20 bp, Artificial Sequence
  Description of Artificial Sequence: Synthetic oligonucleotide
  Target: PCSK9; (-) strand; PAM type: YTN; PAM sequence: TTA
ttttcccagaaataaatata

SEQ ID NO: 23377 - DNA, 20 bp, Artificial Sequence
  Description of Artificial Sequence: Synthetic oligonucleotide
  Target: PCSK9; (-) strand; PAM type: YTN; PAM sequence: TTT
attttcccagaaataaatat

SEQ ID NO: 23378 - DNA, 20 bp, Artificial Sequence
  Description of Artificial Sequence: Synthetic oligonucleotide
  Target: PCSK9; (-) strand; PAM type: YTN; PAM sequence: TTA
agatttattttcccagaaat

SEQ ID NO: 23379 - DNA, 20 bp, Artificial Sequence
  Description of Artificial Sequence: Synthetic oligonucleotide
  Target: PCSK9; (-) strand; PAM type: YTN; PAM sequence: TTT
aagatttattttcccagaaa

SEQ ID NO: 23380 - DNA, 20 bp, Artificial Sequence
  Description of Artificial Sequence: Synthetic oligonucleotide
  Target: PCSK9; (-) strand; PAM type: YTN; PAM sequence: CTG
aaaagtcagtcaaggtttaa

SEQ ID NO: 23381 - DNA, 20 bp, Artificial Sequence
  Description of Artificial Sequence: Synthetic oligonucleotide
  Target: PCSK9; (-) strand; PAM type: YTN; PAM sequence: TTA
acactgaaaagtcagtcaag

SEQ ID NO: 23382 - DNA, 20 bp, Artificial Sequence
  Description of Artificial Sequence: Synthetic oligonucleotide
  Target: PCSK9; (-) strand; PAM type: YTN; PAM sequence: CTA
attaacactgaaaagtcagt

SEQ ID NO: 23383 - DNA, 20 bp, Artificial Sequence
  Description of Artificial Sequence: Synthetic oligonucleotide
  Target: PCSK9; (-) strand; PAM type: YTN; PAM sequence: CTC
aacatgactaattaacactg

SEQ ID NO: 23384 - DNA, 20 bp, Artificial Sequence
  Description of Artificial Sequence: Synthetic oligonucleotide
  Target: PCSK9; (-) strand; PAM type: YTN; PAM sequence: CTC
ctcaacatgactaattaaca

SEQ ID NO: 23385 - DNA, 20 bp, Artificial Sequence
  Description of Artificial Sequence: Synthetic oligonucleotide
  Target: PCSK9; (-) strand; PAM type: YTN; PAM sequence: TTC
tcctcaacatgactaattaa

SEQ ID NO: 23386 - DNA, 20 bp, Artificial Sequence
  Description of Artificial Sequence: Synthetic oligonucleotide
  Target: PCSK9; (-) strand; PAM type: YTN; PAM sequence: TTT
ctcctcaacatgactaatta

SEQ ID NO: 23387 - DNA, 20 bp, Artificial Sequence
  Description of Artificial Sequence: Synthetic oligonucleotide
  Target: PCSK9; (-) strand; PAM type: YTN; PAM sequence: TTG
tttctcctcaacatgactaa

SEQ ID NO: 23388 - DNA, 20 bp, Artificial Sequence
  Description of Artificial Sequence: Synthetic oligonucleotide
  Target: PCSK9; (-) strand; PAM type: YTN; PAM sequence: TTT
gtttctcctcaacatgacta

SEQ ID NO: 23389 - DNA, 20 bp, Artificial Sequence
  Description of Artificial Sequence: Synthetic oligonucleotide
  Target: PCSK9; (-) strand; PAM type: YTN; PAM sequence: TTG
agaatttgtttctcctcaac

SEQ ID NO: 23390 - DNA, 20 bp, Artificial Sequence
  Description of Artificial Sequence: Synthetic oligonucleotide
  Target: PCSK9; (-) strand; PAM type: YTN; PAM sequence: TTT
gagaatttgtttctcctcaa

SEQ ID NO: 23391 - DNA, 20 bp, Artificial Sequence
  Description of Artificial Sequence: Synthetic oligonucleotide
  Target: PCSK9; (-) strand; PAM type: YTN; PAM sequence: TTG
taatgcagagaaggaatttg

SEQ ID NO: 23392 - DNA, 20 bp, Artificial Sequence
  Description of Artificial Sequence: Synthetic oligonucleotide
  Target: PCSK9; (-) strand; PAM type: YTN; PAM sequence: TTA
ttgtaatgcagagaaggaat

SEQ ID NO: 23393 - DNA, 20 bp, Artificial Sequence
  Description of Artificial Sequence: Synthetic oligonucleotide
  Target: PCSK9; (-) strand; PAM type: YTN; PAM sequence: TTC
atagttattgtaatgcagag

SEQ ID NO: 23394 - DNA, 20 bp, Artificial Sequence
  Description of Artificial Sequence: Synthetic oligonucleotide
  Target: PCSK9; (-) strand; PAM type: YTN; PAM sequence: TTT
catagttattgtaatgcaga

SEQ ID NO: 23395 - DNA, 20 bp, Artificial Sequence
  Description of Artificial Sequence: Synthetic oligonucleotide
  Target: PCSK9; (-) strand; PAM type: YTN; PAM sequence: TTG
tgagtttcatagttattgta

SEQ ID NO: 23396 - DNA, 20 bp, Artificial Sequence
  Description of Artificial Sequence: Synthetic oligonucleotide
  Target: PCSK9; (-) strand; PAM type: YTN; PAM sequence: CTT
gtgagtttcatagttattgt

SEQ ID NO: 23397 - DNA, 20 bp, Artificial Sequence
  Description of Artificial Sequence: Synthetic oligonucleotide
  Target: PCSK9; (-) strand; PAM type: YTN; PAM sequence: CTG
cttgtgagtttcatagttat

SEQ ID NO: 23398 - DNA, 20 bp, Artificial Sequence
  Description of Artificial Sequence: Synthetic oligonucleotide
  Target: PCSK9; (-) strand; PAM type: YTN; PAM sequence: TTG
gtacacactgcttgtgagtt

SEQ ID NO: 23399 - DNA, 20 bp, Artificial Sequence
  Description of Artificial Sequence: Synthetic oligonucleotide
  Target: PCSK9; (-) strand; PAM type: YTN; PAM sequence: TTG
agttggtacacactgcttgt

SEQ ID NO: 23400 - DNA, 20 bp, Artificial Sequence
  Description of Artificial Sequence: Synthetic oligonucleotide
  Target: PCSK9; (-) strand; PAM type: YTN; PAM sequence: TTT
gagttggtacacactgcttg

SEQ ID NO: 23401 - DNA, 20 bp, Artificial Sequence
  Description of Artificial Sequence: Synthetic oligonucleotide
  Target: PCSK9; (-) strand; PAM type: YTN; PAM sequence: CTA
tttgagttggtacacactgc

SEQ ID NO: 23402 - DNA, 20 bp, Artificial Sequence
  Description of Artificial Sequence: Synthetic oligonucleotide
  Target: PCSK9; (-) strand; PAM type: YTN; PAM sequence: TTA
actatttgagttggtacaca

SEQ ID NO: 23403 - DNA, 20 bp, Artificial Sequence
  Description of Artificial Sequence: Synthetic oligonucleotide
  Target: PCSK9; (-) strand; PAM type: YTN; PAM sequence: TTG
tatatgaagttaactatttg

SEQ ID NO: 23404 - DNA, 20 bp, Artificial Sequence
  Description of Artificial Sequence: Synthetic oligonucleotide
  Target: PCSK9; (-) strand; PAM type: YTN; PAM sequence: TTG
gttgtatatgaagttaacta

SEQ ID NO: 23405 - DNA, 20 bp, Artificial Sequence
  Description of Artificial Sequence: Synthetic oligonucleotide
  Target: PCSK9; (-) strand; PAM type: YTN; PAM sequence: TTG
gtattggttgtatatgaagt

SEQ ID NO: 23406 - DNA, 20 bp, Artificial Sequence
  Description of Artificial Sequence: Synthetic oligonucleotide
  Target: PCSK9; (-) strand; PAM type: YTN; PAM sequence: CTT
ggtattggttgtatatgaag

SEQ ID NO: 23407 - DNA, 20 bp, Artificial Sequence
  Description of Artificial Sequence: Synthetic oligonucleotide
  Target: PCSK9; (-) strand; PAM type: YTN; PAM sequence: CTG
aaacccttggtattggttgt

SEQ ID NO: 23408 - DNA, 20 bp, Artificial Sequence
  Description of Artificial Sequence: Synthetic oligonucleotide
  Target: PCSK9; (-) strand; PAM type: YTN; PAM sequence: TTA
ctgaaacccttggtattggt

SEQ ID NO: 23409 - DNA, 20 bp, Artificial Sequence
  Description of Artificial Sequence: Synthetic oligonucleotide
  Target: PCSK9; (-) strand; PAM type: YTN; PAM sequence: TTA
aaacataattactgaaaccc

SEQ ID NO: 23410 - DNA, 20 bp, Artificial Sequence
  Description of Artificial Sequence: Synthetic oligonucleotide
  Target: PCSK9; (-) strand; PAM type: YTN; PAM sequence: CTT
aaaacataattactgaaacc

SEQ ID NO: 23411 - DNA, 20 bp, Artificial Sequence
  Description of Artificial Sequence: Synthetic oligonucleotide
  Target: PCSK9; (-) strand; PAM type: YTN; PAM sequence: TTG
cttaaaacataattactgaa

SEQ ID NO: 23412 - DNA, 20 bp, Artificial Sequence
  Description of Artificial Sequence: Synthetic oligonucleotide
  Target: PCSK9; (-) strand; PAM type: YTN; PAM sequence: TTT
gcttaaaacataattactga

SEQ ID NO: 23413 - DNA, 20 bp, Artificial Sequence
  Description of Artificial Sequence: Synthetic oligonucleotide
  Target: PCSK9; (-) strand; PAM type: YTN; PAM sequence: TTT
tgcttaaaacataattactg

SEQ ID NO: 23414 - DNA, 20 bp, Artificial Sequence
  Description of Artificial Sequence: Synthetic oligonucleotide
  Target: PCSK9; (-) strand; PAM type: YTN; PAM sequence: CTT
ttgcttaaaacataattact

SEQ ID NO: 23415 - DNA, 20 bp, Artificial Sequence
  Description of Artificial Sequence: Synthetic oligonucleotide
  Target: PCSK9; (-) strand; PAM type: YTN; PAM sequence: TTG
cttttgcttaaaacataatt

SEQ ID NO: 23416 - DNA, 20 bp, Artificial Sequence
  Description of Artificial Sequence: Synthetic oligonucleotide
  Target: PCSK9; (-) strand; PAM type: YTN; PAM sequence: TTT
gcttttgcttaaaacataat

SEQ ID NO: 23417 - DNA, 20 bp, Artificial Sequence
  Description of Artificial Sequence: Synthetic oligonucleotide
  Target: PCSK9; (-) strand; PAM type: YTN; PAM sequence: CTG
caatcgtttgcttttgctta

SEQ ID NO: 23418 - DNA, 20 bp, Artificial Sequence
  Description of Artificial Sequence: Synthetic oligonucleotide
  Target: PCSK9; (-) strand; PAM type: YTN; PAM sequence: TTA
aatcatgtgatctgcaatcg

SEQ ID NO: 23419 - DNA, 20 bp, Artificial Sequence
  Description of Artificial Sequence: Synthetic oligonucleotide
  Target: PCSK9; (-) strand; PAM type: YTN; PAM sequence: CTT
aaatcatgtgatctgcaatc

SEQ ID NO: 23420 - DNA, 20 bp, Artificial Sequence
  Description of Artificial Sequence: Synthetic oligonucleotide
  Target: PCSK9; (-) strand; PAM type: YTN; PAM sequence: CTG
tagtcttaaatcatgtgatc

SEQ ID NO: 23421 - DNA, 20 bp, Artificial Sequence
  Description of Artificial Sequence: Synthetic oligonucleotide
  Target: PCSK9; (-) strand; PAM type: YTN; PAM sequence: TTG
aataaactgtagtcttaaat

SEQ ID NO: 23422 - DNA, 20 bp, Artificial Sequence
  Description of Artificial Sequence: Synthetic oligonucleotide
  Target: PCSK9; (-) strand; PAM type: YTN; PAM sequence: TTG
gagacatattgaataaactg

SEQ ID NO: 23423 - DNA, 20 bp, Artificial Sequence
  Description of Artificial Sequence: Synthetic oligonucleotide
  Target: PCSK9; (-) strand; PAM type: YTN; PAM sequence: CTT
ggagacatattgaataaact

SEQ ID NO: 23424 - DNA, 20 bp, Artificial Sequence
  Description of Artificial Sequence: Synthetic oligonucleotide
  Target: PCSK9; (-) strand; PAM type: YTN; PAM sequence: TTA
atgcttggagacatattgaa

SEQ ID NO: 23425 - DNA, 20 bp, Artificial Sequence
  Description of Artificial Sequence: Synthetic oligonucleotide
  Target: PCSK9; (-) strand; PAM type: YTN; PAM sequence: TTT
aatgcttggagacatattga

SEQ ID NO: 23426 - DNA, 20 bp, Artificial Sequence
  Description of Artificial Sequence: Synthetic oligonucleotide
  Target: PCSK9; (-) strand; PAM type: YTN; PAM sequence: TTT
taatgcttggagacatattg

SEQ ID NO: 23427 - DNA, 20 bp, Artificial Sequence
  Description of Artificial Sequence: Synthetic oligonucleotide
  Target: PCSK9; (-) strand; PAM type: YTN; PAM sequence: TTT
ttaatgcttggagacatatt

SEQ ID NO: 23428 - DNA, 20 bp, Artificial Sequence
  Description of Artificial Sequence: Synthetic oligonucleotide
  Target: PCSK9; (-) strand; PAM type: YTN; PAM sequence: CTT
tttaatgcttggagacatat

SEQ ID NO: 23429 - DNA, 20 bp, Artificial Sequence
  Description of Artificial Sequence: Synthetic oligonucleotide
  Target: PCSK9; (-) strand; PAM type: YTN; PAM sequence: TTA
tctttttaatgcttggagac

SEQ ID NO: 23430 - DNA, 20 bp, Artificial Sequence
  Description of Artificial Sequence: Synthetic oligonucleotide
  Target: PCSK9; (-) strand; PAM type: YTN; PAM sequence: TTC
acagaattatctttttaatg

SEQ ID NO: 23431 - DNA, 20 bp, Artificial Sequence
  Description of Artificial Sequence: Synthetic oligonucleotide
  Target: PCSK9; (-) strand; PAM type: YTN; PAM sequence: CTT
cacagaattatctttttaat

SEQ ID NO: 23432 - DNA, 20 bp, Artificial Sequence
  Description of Artificial Sequence: Synthetic oligonucleotide
  Target: PCSK9; (-) strand; PAM type: YTN; PAM sequence: TTA
acttcacagaattatctttt

SEQ ID NO: 23433 - DNA, 20 bp, Artificial Sequence
  Description of Artificial Sequence: Synthetic oligonucleotide
  Target: PCSK9; (-) strand; PAM type: YTN; PAM sequence: TTT
aacttcacagaattatcttt

SEQ ID NO: 23434 - DNA, 20 bp, Artificial Sequence
  Description of Artificial Sequence: Synthetic oligonucleotide
  Target: PCSK9; (-) strand; PAM type: YTN; PAM sequence: CTG
agtttaacttcacagaatta

SEQ ID NO: 23435 - DNA, 20 bp, Artificial Sequence
  Description of Artificial Sequence: Synthetic oligonucleotide
  Target: PCSK9; (-) strand; PAM type: YTN; PAM sequence: TTA
ctgagtttaacttcacagaa

SEQ ID NO: 23436 - DNA, 20 bp, Artificial Sequence
  Description of Artificial Sequence: Synthetic oligonucleotide
  Target: PCSK9; (-) strand; PAM type: YTN; PAM sequence: TTT
actgagtttaacttcacaga

SEQ ID NO: 23437 - DNA, 20 bp, Artificial Sequence
  Description of Artificial Sequence: Synthetic oligonucleotide
  Target: PCSK9; (-) strand; PAM type: YTN; PAM sequence: TTT
tactgagtttaacttcacag

SEQ ID NO: 23438 - DNA, 20 bp, Artificial Sequence
  Description of Artificial Sequence: Synthetic oligonucleotide
  Target: PCSK9; (-) strand; PAM type: YTN; PAM sequence: TTA
agatataattttactgagtt

SEQ ID NO: 23439 - DNA, 20 bp, Artificial Sequence
  Description of Artificial Sequence: Synthetic oligonucleotide
  Target: PCSK9; (-) strand; PAM type: YTN; PAM sequence: TTT
aagatataattttactgagt

SEQ ID NO: 23440 - DNA, 20 bp, Artificial Sequence
  Description of Artificial Sequence: Synthetic oligonucleotide
  Target: PCSK9; (-) strand; PAM type: YTN; PAM sequence: CTT
taagatataattttactgag

SEQ ID NO: 23441 - DNA, 20 bp, Artificial Sequence
  Description of Artificial Sequence: Synthetic oligonucleotide
  Target: PCSK9; (-) strand; PAM type: YTN; PAM sequence: TTA
aaaacagcaaaataaaagca

SEQ ID NO: 23442 - DNA, 20 bp, Artificial Sequence
  Description of Artificial Sequence: Synthetic oligonucleotide
  Target: PCSK9; (-) strand; PAM type: YTN; PAM sequence: TTT
aaaaacagcaaaataaaagc

SEQ ID NO: 23443 - DNA, 20 bp, Artificial Sequence
  Description of Artificial Sequence: Synthetic oligonucleotide
  Target: PCSK9; (-) strand; PAM type: YTN; PAM sequence: TTT
taaaaacagcaaaataaaag

SEQ ID NO: 23444 - DNA, 20 bp, Artificial Sequence
  Description of Artificial Sequence: Synthetic oligonucleotide
  Target: PCSK9; (-) strand; PAM type: YTN; PAM sequence: TTC
cccaaacagattttaaaaac

SEQ ID NO: 23445 - DNA, 20 bp, Artificial Sequence
  Description of Artificial Sequence: Synthetic oligonucleotide
  Target: PCSK9; (-) strand; PAM type: YTN; PAM sequence: TTG
ttccccaaacagattttaaa

SEQ ID NO: 23446 - DNA, 20 bp, Artificial Sequence
  Description of Artificial Sequence: Synthetic oligonucleotide
  Target: PCSK9; (-) strand; PAM type: YTN; PAM sequence: TTA
tgagttgttccccaaacaga

SEQ ID NO: 23447 - DNA, 20 bp, Artificial Sequence
  Description of Artificial Sequence: Synthetic oligonucleotide
  Target: PCSK9; (-) strand; PAM type: YTN; PAM sequence: TTA
aagaagttatgagttgttcc

SEQ ID NO: 23448 - DNA, 20 bp, Artificial Sequence
  Description of Artificial Sequence: Synthetic oligonucleotide
  Target: PCSK9; (-) strand; PAM type: YTN; PAM sequence: CTT
aaagaagttatgagttgttc

SEQ ID NO: 23449 - DNA, 20 bp, Artificial Sequence
  Description of Artificial Sequence: Synthetic oligonucleotide
  Target: PCSK9; (-) strand; PAM type: YTN; PAM sequence: TTA
cttaaagaagttatgagttg

SEQ ID NO: 23450 - DNA, 20 bp, Artificial Sequence
  Description of Artificial Sequence: Synthetic oligonucleotide
  Target: PCSK9; (-) strand; PAM type: YTN; PAM sequence: TTG
acatcaattacttaaagaag

SEQ ID NO: 23451 - DNA, 20 bp, Artificial Sequence
  Description of Artificial Sequence: Synthetic oligonucleotide
  Target: PCSK9; (-) strand; PAM type: YTN; PAM sequence: TTT
gacatcaattacttaaagaa

SEQ ID NO: 23452 - DNA, 20 bp, Artificial Sequence
  Description of Artificial Sequence: Synthetic oligonucleotide
  Target: PCSK9; (-) strand; PAM type: YTN; PAM sequence: TTA
tttgacatcaattacttaaa

SEQ ID NO: 23453 - DNA, 20 bp, Artificial Sequence
  Description of Artificial Sequence: Synthetic oligonucleotide
  Target: PCSK9; (-) strand; PAM type: YTN; PAM sequence: CTC
cagaagtacagggtgcatta

SEQ ID NO: 23454 - DNA, 20 bp, Artificial Sequence
  Description of Artificial Sequence: Synthetic oligonucleotide
  Target: PCSK9; (-) strand; PAM type: YTN; PAM sequence: TTC
tccagaagtacagggtgcat

SEQ ID NO: 23455 - DNA, 20 bp, Artificial Sequence
  Description of Artificial Sequence: Synthetic oligonucleotide
  Target: PCSK9; (-) strand; PAM type: YTN; PAM sequence: CTG
tgttctccagaagtacaggg

SEQ ID NO: 23456 - DNA, 20 bp, Artificial Sequence
  Description of Artificial Sequence: Synthetic oligonucleotide
  Target: PCSK9; (-) strand; PAM type: YTN; PAM sequence: TTG
aaaatgctgtgttctccaga

SEQ ID NO: 23457 - DNA, 20 bp, Artificial Sequence
  Description of Artificial Sequence: Synthetic oligonucleotide
  Target: PCSK9; (-) strand; PAM type: YTN; PAM sequence: TTT
gaaaatgctgtgttctccag

SEQ ID NO: 23458 - DNA, 20 bp, Artificial Sequence
  Description of Artificial Sequence: Synthetic oligonucleotide
  Target: PCSK9; (-) strand; PAM type: YTN; PAM sequence: TTT
tgaaaatgctgtgttctcca

SEQ ID NO: 23459 - DNA, 20 bp, Artificial Sequence
  Description of Artificial Sequence: Synthetic oligonucleotide
  Target: PCSK9; (-) strand; PAM type: YTN; PAM sequence: TTG
aaaagagcaattttgaaaat

SEQ ID NO: 23460 - DNA, 20 bp, Artificial Sequence
  Description of Artificial Sequence: Synthetic oligonucleotide
  Target: PCSK9; (-) strand; PAM type: YTN; PAM sequence: TTA
gattgaaaagagcaattttg

SEQ ID NO: 23461 - DNA, 20 bp, Artificial Sequence
  Description of Artificial Sequence: Synthetic oligonucleotide
  Target: PCSK9; (-) strand; PAM type: YTN; PAM sequence: CTG
atataattagattgaaaaga

SEQ ID NO: 23462 - DNA, 20 bp, Artificial Sequence
  Description of Artificial Sequence: Synthetic oligonucleotide
  Target: PCSK9; (-) strand; PAM type: YTN; PAM sequence: TTC
tgatataattagattgaaaa

SEQ ID NO: 23463 - DNA, 20 bp, Artificial Sequence
  Description of Artificial Sequence: Synthetic oligonucleotide
  Target: PCSK9; (-) strand; PAM type: YTN; PAM sequence: TTT
ctgatataattagattgaaa

SEQ ID NO: 23464 - DNA, 20 bp, Artificial Sequence
  Description of Artificial Sequence: Synthetic oligonucleotide
  Target: PCSK9; (-) strand; PAM type: YTN; PAM sequence: TTT
tctgatataattagattgaa

SEQ ID NO: 23465 - DNA, 20 bp, Artificial Sequence
  Description of Artificial Sequence: Synthetic oligonucleotide
  Target: PCSK9; (-) strand; PAM type: YTN; PAM sequence: TTT
ttctgatataattagattga

SEQ ID NO: 23466 - DNA, 20 bp, Artificial Sequence
  Description of Artificial Sequence: Synthetic oligonucleotide
  Target: PCSK9; (-) strand; PAM type: YTN; PAM sequence: TTG
aagatatttttctgatataa

SEQ ID NO: 23467 - DNA, 20 bp, Artificial Sequence
  Description of Artificial Sequence: Synthetic oligonucleotide
  Target: PCSK9; (-) strand; PAM type: YTN; PAM sequence: CTT
gaagatatttttctgatata

SEQ ID NO: 23468 - DNA, 20 bp, Artificial Sequence
  Description of Artificial Sequence: Synthetic oligonucleotide
  Target: PCSK9; (-) strand; PAM type: YTN; PAM sequence: CTC
ttgaagatatttttctgata

SEQ ID NO: 23469 - DNA, 20 bp, Artificial Sequence
  Description of Artificial Sequence: Synthetic oligonucleotide
  Target: PCSK9; (-) strand; PAM type: YTN; PAM sequence: CTA
agctcttgaagatatttttc

SEQ ID NO: 23470 - DNA, 20 bp, Artificial Sequence
  Description of Artificial Sequence: Synthetic oligonucleotide
  Target: PCSK9; (-) strand; PAM type: YTN; PAM sequence: TTG
ggaaatactaagctcttgaa

SEQ ID NO: 23471 - DNA, 20 bp, Artificial Sequence
  Description of Artificial Sequence: Synthetic oligonucleotide
  Target: PCSK9; (-) strand; PAM type: YTN; PAM sequence: TTA
ccaggatcaggatcaaaaat

SEQ ID NO: 23472 - DNA, 20 bp, Artificial Sequence
  Description of Artificial Sequence: Synthetic oligonucleotide
  Target: PCSK9; (-) strand; PAM type: YTN; PAM sequence: TTG
atgaaaggttaccaggatca

SEQ ID NO: 23473 - DNA, 20 bp, Artificial Sequence
  Description of Artificial Sequence: Synthetic oligonucleotide
  Target: PCSK9; (-) strand; PAM type: YTN; PAM sequence: CTT
gatgaaaggttaccaggatc

SEQ ID NO: 23474 - DNA, 20 bp, Artificial Sequence
  Description of Artificial Sequence: Synthetic oligonucleotide
  Target: PCSK9; (-) strand; PAM type: YTN; PAM sequence: TTG
gatcttgatgaaaggttacc

SEQ ID NO: 23475 - DNA, 20 bp, Artificial Sequence
  Description of Artificial Sequence: Synthetic oligonucleotide
  Target: PCSK9; (-) strand; PAM type: YTN; PAM sequence: CTT
ggatcttgatgaaaggttac

SEQ ID NO: 23476 - DNA, 20 bp, Artificial Sequence
  Description of Artificial Sequence: Synthetic oligonucleotide
  Target: PCSK9; (-) strand; PAM type: YTN; PAM sequence: CTA
tgcataagcttggatcttga

SEQ ID NO: 23477 - DNA, 20 bp, Artificial Sequence
  Description of Artificial Sequence: Synthetic oligonucleotide
  Target: PCSK9; (-) strand; PAM type: YTN; PAM sequence: CTA
gatgagaaccctatgcataa

SEQ ID NO: 23478 - DNA, 20 bp, Artificial Sequence
  Description of Artificial Sequence: Synthetic oligonucleotide
  Target: PCSK9; (-) strand; PAM type: YTN; PAM sequence: TTC
agatgggtctagatgagaac

SEQ ID NO: 23479 - DNA, 20 bp, Artificial Sequence
  Description of Artificial Sequence: Synthetic oligonucleotide
  Target: PCSK9; (-) strand; PAM type: YTN; PAM sequence: TTT
cagatgggtctagatgagaa

SEQ ID NO: 23480 - DNA, 20 bp, Artificial Sequence
  Description of Artificial Sequence: Synthetic oligonucleotide
  Target: PCSK9; (-) strand; PAM type: YTN; PAM sequence: TTG
tatagaatttcagatgggtc

SEQ ID NO: 23481 - DNA, 20 bp, Artificial Sequence
  Description of Artificial Sequence: Synthetic oligonucleotide
  Target: PCSK9; (-) strand; PAM type: YTN; PAM sequence: TTT
gtatagaatttcagatgggt

SEQ ID NO: 23482 - DNA, 20 bp, Artificial Sequence
  Description of Artificial Sequence: Synthetic oligonucleotide
  Target: PCSK9; (-) strand; PAM type: YTN; PAM sequence: CTA
tttgtatagaatttcagatg

SEQ ID NO: 23483 - DNA, 20 bp, Artificial Sequence
  Description of Artificial Sequence: Synthetic oligonucleotide
  Target: PCSK9; (-) strand; PAM type: YTN; PAM sequence: CTC
cctatttgtatagaatttca

SEQ ID NO: 23484 - DNA, 20 bp, Artificial Sequence
  Description of Artificial Sequence: Synthetic oligonucleotide
  Target: PCSK9; (-) strand; PAM type: YTN; PAM sequence: TTA
atatgtctccctatttgtat

SEQ ID NO: 23485 - DNA, 20 bp, Artificial Sequence
  Description of Artificial Sequence: Synthetic oligonucleotide
  Target: PCSK9; (-) strand; PAM type: YTN; PAM sequence: TTT
aatatgtctccctatttgta

SEQ ID NO: 23486 - DNA, 20 bp, Artificial Sequence
  Description of Artificial Sequence: Synthetic oligonucleotide
  Target: PCSK9; (-) strand; PAM type: YTN; PAM sequence: TTG
tatttaatatgtctccctat

SEQ ID NO: 23487 - DNA, 20 bp, Artificial Sequence
  Description of Artificial Sequence: Synthetic oligonucleotide
  Target: PCSK9; (-) strand; PAM type: YTN; PAM sequence: TTT
gtatttaatatgtctcccta

SEQ ID NO: 23488 - DNA, 20 bp, Artificial Sequence
  Description of Artificial Sequence: Synthetic oligonucleotide
  Target: PCSK9; (-) strand; PAM type: YTN; PAM sequence: CTT
tgtatttaatatgtctccct

SEQ ID NO: 23489 - DNA, 20 bp, Artificial Sequence
  Description of Artificial Sequence: Synthetic oligonucleotide
  Target: PCSK9; (-) strand; PAM type: YTN; PAM sequence: TTA
cacagacctttgtatttaat

SEQ ID NO: 23490 - DNA, 20 bp, Artificial Sequence
  Description of Artificial Sequence: Synthetic oligonucleotide
  Target: PCSK9; (-) strand; PAM type: YTN; PAM sequence: TTT
acacagacctttgtatttaa

SEQ ID NO: 23491 - DNA, 20 bp, Artificial Sequence
  Description of Artificial Sequence: Synthetic oligonucleotide
  Target: PCSK9; (-) strand; PAM type: YTN; PAM sequence: TTA
agtcaatttacacagacctt

SEQ ID NO: 23492 - DNA, 20 bp, Artificial Sequence
  Description of Artificial Sequence: Synthetic oligonucleotide
  Target: PCSK9; (-) strand; PAM type: YTN; PAM sequence: TTG
taaaatagtaattaagtcaa

SEQ ID NO: 23493 - DNA, 20 bp, Artificial Sequence
  Description of Artificial Sequence: Synthetic oligonucleotide
  Target: PCSK9; (-) strand; PAM type: YTN; PAM sequence: TTC
attgtaaaatagtaattaag

SEQ ID NO: 23494 - DNA, 20 bp, Artificial Sequence
  Description of Artificial Sequence: Synthetic oligonucleotide
  Target: PCSK9; (-) strand; PAM type: YTN; PAM sequence: TTT
cattgtaaaatagtaattaa

SEQ ID NO: 23495 - DNA, 20 bp, Artificial Sequence
  Description of Artificial Sequence: Synthetic oligonucleotide
  Target: PCSK9; (-) strand; PAM type: YTN; PAM sequence: TTT
tcattgtaaaatagtaatta

SEQ ID NO: 23496 - DNA, 20 bp, Artificial Sequence
  Description of Artificial Sequence: Synthetic oligonucleotide
  Target: PCSK9; (-) strand; PAM type: YTN; PAM sequence: CTT
ttcattgtaaaatagtaatt

SEQ ID NO: 23497 - DNA, 20 bp, Artificial Sequence
  Description of Artificial Sequence: Synthetic oligonucleotide
  Target: PCSK9; (-) strand; PAM type: YTN; PAM sequence: TTC
cttttcattgtaaaatagta

SEQ ID NO: 23498 - DNA, 20 bp, Artificial Sequence
  Description of Artificial Sequence: Synthetic oligonucleotide
  Target: PCSK9; (-) strand; PAM type: YTN; PAM sequence: TTA
aaatgatgtaaagatgtaat

SEQ ID NO: 23499 - DNA, 20 bp, Artificial Sequence
  Description of Artificial Sequence: Synthetic oligonucleotide
  Target: PCSK9; (-) strand; PAM type: YTN; PAM sequence: TTT
aaaatgatgtaaagatgtaa

SEQ ID NO: 23500 - DNA, 20 bp, Artificial Sequence
  Description of Artificial Sequence: Synthetic oligonucleotide
  Target: PCSK9; (-) strand; PAM type: YTN; PAM sequence: TTA
aacaggaatatccaatttaa

SEQ ID NO: 23501 - DNA, 20 bp, Artificial Sequence
  Description of Artificial Sequence: Synthetic oligonucleotide
  Target: PCSK9; (-) strand; PAM type: YTN; PAM sequence: TTG
cagtaatattaaacaggaat

SEQ ID NO: 23502 - DNA, 20 bp, Artificial Sequence
  Description of Artificial Sequence: Synthetic oligonucleotide
  Target: PCSK9; (-) strand; PAM type: YTN; PAM sequence: CTT
gcagtaatattaaacaggaa

SEQ ID NO: 23503 - DNA, 20 bp, Artificial Sequence
  Description of Artificial Sequence: Synthetic oligonucleotide
  Target: PCSK9; (-) strand; PAM type: YTN; PAM sequence: TTA
atcttgcagtaatattaaac

SEQ ID NO: 23504 - DNA, 20 bp, Artificial Sequence
  Description of Artificial Sequence: Synthetic oligonucleotide
  Target: PCSK9; (-) strand; PAM type: YTN; PAM sequence: TTT
aatcttgcagtaatattaaa

SEQ ID NO: 23505 - DNA, 20 bp, Artificial Sequence
  Description of Artificial Sequence: Synthetic oligonucleotide
  Target: PCSK9; (-) strand; PAM type: YTN; PAM sequence: TTT
taatcttgcagtaatattaa

SEQ ID NO: 23506 - DNA, 20 bp, Artificial Sequence
  Description of Artificial Sequence: Synthetic oligonucleotide
  Target: PCSK9; (-) strand; PAM type: YTN; PAM sequence: TTT
ttaatcttgcagtaatatta

SEQ ID NO: 23507 - DNA, 20 bp, Artificial Sequence
  Description of Artificial Sequence: Synthetic oligonucleotide
  Target: PCSK9; (-) strand; PAM type: YTN; PAM sequence: TTA
gatatgtgggggcaaatttt

SEQ ID NO: 23508 - DNA, 20 bp, Artificial Sequence
  Description of Artificial Sequence: Synthetic oligonucleotide
  Target: PCSK9; (-) strand; PAM type: YTN; PAM sequence: TTT
agatatgtgggggcaaattt

SEQ ID NO: 23509 - DNA, 20 bp, Artificial Sequence
  Description of Artificial Sequence: Synthetic oligonucleotide
  Target: PCSK9; (-) strand; PAM type: YTN; PAM sequence: TTT
tagatatgtgggggcaaatt

SEQ ID NO: 23510 - DNA, 20 bp, Artificial Sequence
  Description of Artificial Sequence: Synthetic oligonucleotide
  Target: PCSK9; (-) strand; PAM type: YTN; PAM sequence: CTT
ttagatatgtgggggcaaat

SEQ ID NO: 23511 - DNA, 20 bp, Artificial Sequence
  Description of Artificial Sequence: Synthetic oligonucleotide
  Target: PCSK9; (-) strand; PAM type: YTN; PAM sequence: CTG
cttttagatatgtgggggca

SEQ ID NO: 23512 - DNA, 20 bp, Artificial Sequence
  Description of Artificial Sequence: Synthetic oligonucleotide
  Target: PCSK9; (-) strand; PAM type: YTN; PAM sequence: TTA
agaaaaagcaagctgctttt

SEQ ID NO: 23513 - DNA, 20 bp, Artificial Sequence
  Description of Artificial Sequence: Synthetic oligonucleotide
  Target: PCSK9; (-) strand; PAM type: YTN; PAM sequence: TTT
aagaaaaagcaagctgcttt

SEQ ID NO: 23514 - DNA, 20 bp, Artificial Sequence
  Description of Artificial Sequence: Synthetic oligonucleotide
  Target: PCSK9; (-) strand; PAM type: YTN; PAM sequence: TTT
taagaaaaagcaagctgctt

SEQ ID NO: 23515 - DNA, 20 bp, Artificial Sequence
  Description of Artificial Sequence: Synthetic oligonucleotide
  Target: PCSK9; (-) strand; PAM type: YTN; PAM sequence: TTA
tattttaagaaaaagcaagc

SEQ ID NO: 23516 - DNA, 20 bp, Artificial Sequence
  Description of Artificial Sequence: Synthetic oligonucleotide
  Target: PCSK9; (-) strand; PAM type: YTN; PAM sequence: TTT
atattttaagaaaaagcaag

SEQ ID NO: 23517 - DNA, 20 bp, Artificial Sequence
  Description of Artificial Sequence: Synthetic oligonucleotide
  Target: PCSK9; (-) strand; PAM type: YTN; PAM sequence: TTT
tatattttaagaaaaagcaa

SEQ ID NO: 23518 - DNA, 20 bp, Artificial Sequence
  Description of Artificial Sequence: Synthetic oligonucleotide
  Target: PCSK9; (-) strand; PAM type: YTN; PAM sequence: TTT
ttatattttaagaaaaagca

SEQ ID NO: 23519 - DNA, 20 bp, Artificial Sequence
  Description of Artificial Sequence: Synthetic oligonucleotide
  Target: PCSK9; (-) strand; PAM type: YTN; PAM sequence: TTG
gtttttatattttaagaaaa

SEQ ID NO: 23520 - DNA, 20 bp, Artificial Sequence
  Description of Artificial Sequence: Synthetic oligonucleotide
  Target: PCSK9; (-) strand; PAM type: YTN; PAM sequence: TTT
ggtttttatattttaagaaa

SEQ ID NO: 23521 - DNA, 20 bp, Artificial Sequence
  Description of Artificial Sequence: Synthetic oligonucleotide
  Target: PCSK9; (-) strand; PAM type: YTN; PAM sequence: CTT
tggtttttatattttaagaa

SEQ ID NO: 23522 - DNA, 20 bp, Artificial Sequence
  Description of Artificial Sequence: Synthetic oligonucleotide
  Target: PCSK9; (-) strand; PAM type: YTN; PAM sequence: TTC
ctttggtttttatattttaa

SEQ ID NO: 23523 - DNA, 20 bp, Artificial Sequence
  Description of Artificial Sequence: Synthetic oligonucleotide
  Target: PCSK9; (-) strand; PAM type: YTN; PAM sequence: CTA
caaaagaaattcctttggtt

SEQ ID NO: 23524 - DNA, 20 bp, Artificial Sequence
  Description of Artificial Sequence: Synthetic oligonucleotide
  Target: PCSK9; (-) strand; PAM type: YTN; PAM sequence: CTA
cgatgctacaaaagaaattc

SEQ ID NO: 23525 - DNA, 20 bp, Artificial Sequence
  Description of Artificial Sequence: Synthetic oligonucleotide
  Target: PCSK9; (-) strand; PAM type: YTN; PAM sequence: CTC
tacgatgctacaaaagaaat

SEQ ID NO: 23526 - DNA, 20 bp, Artificial Sequence
  Description of Artificial Sequence: Synthetic oligonucleotide
  Target: PCSK9; (-) strand; PAM type: YTN; PAM sequence: TTC
tctacgatgctacaaaagaa

SEQ ID NO: 23527 - DNA, 20 bp, Artificial Sequence
  Description of Artificial Sequence: Synthetic oligonucleotide
  Target: PCSK9; (-) strand; PAM type: YTN; PAM sequence: TTT
ctctacgatgctacaaaaga

SEQ ID NO: 23528 - DNA, 20 bp, Artificial Sequence
  Description of Artificial Sequence: Synthetic oligonucleotide
  Target: PCSK9; (-) strand; PAM type: YTN; PAM sequence: CTT
tctctacgatgctacaaaag

SEQ ID NO: 23529 - DNA, 20 bp, Artificial Sequence
  Description of Artificial Sequence: Synthetic oligonucleotide
  Target: PCSK9; (-) strand; PAM type: YTN; PAM sequence: TTG
ctttctctacgatgctacaa

SEQ ID NO: 23530 - DNA, 20 bp, Artificial Sequence
  Description of Artificial Sequence: Synthetic oligonucleotide
  Target: PCSK9; (-) strand; PAM type: YTN; PAM sequence: CTG
ttgctttctctacgatgcta

SEQ ID NO: 23531 - DNA, 20 bp, Artificial Sequence
  Description of Artificial Sequence: Synthetic oligonucleotide
  Target: PCSK9; (-) strand; PAM type: YTN; PAM sequence: TTA
cacgaacatacaagagtgag

SEQ ID NO: 23532 - DNA, 20 bp, Artificial Sequence
  Description of Artificial Sequence: Synthetic oligonucleotide
  Target: PCSK9; (-) strand; PAM type: YTN; PAM sequence: TTG
ttacacgaacatacaagagt

SEQ ID NO: 23533 - DNA, 20 bp, Artificial Sequence
  Description of Artificial Sequence: Synthetic oligonucleotide
  Target: PCSK9; (-) strand; PAM type: YTN; PAM sequence: TTT
gttacacgaacatacaagag

SEQ ID NO: 23534 - DNA, 20 bp, Artificial Sequence
  Description of Artificial Sequence: Synthetic oligonucleotide
  Target: PCSK9; (-) strand; PAM type: YTN; PAM sequence: TTT
tgttacacgaacatacaaga

SEQ ID NO: 23535 - DNA, 20 bp, Artificial Sequence
  Description of Artificial Sequence: Synthetic oligonucleotide
  Target: PCSK9; (-) strand; PAM type: YTN; PAM sequence: TTT
ttgttacacgaacatacaag

SEQ ID NO: 23536 - DNA, 20 bp, Artificial Sequence
  Description of Artificial Sequence: Synthetic oligonucleotide
  Target: PCSK9; (-) strand; PAM type: YTN; PAM sequence: TTT
tttgttacacgaacatacaa

SEQ ID NO: 23537 - DNA, 20 bp, Artificial Sequence
  Description of Artificial Sequence: Synthetic oligonucleotide
  Target: PCSK9; (-) strand; PAM type: YTN; PAM sequence: CTT
ttttgttacacgaacataca

SEQ ID NO: 23538 - DNA, 20 bp, Artificial Sequence
  Description of Artificial Sequence: Synthetic oligonucleotide
  Target: PCSK9; (-) strand; PAM type: YTN; PAM sequence: TTC
ggaaatagagccagtggcag

SEQ ID NO: 23539 - DNA, 20 bp, Artificial Sequence
  Description of Artificial Sequence: Synthetic oligonucleotide
  Target: PCSK9; (-) strand; PAM type: YTN; PAM sequence: TTT
cggaaatagagccagtggca

SEQ ID NO: 23540 - DNA, 20 bp, Artificial Sequence
  Description of Artificial Sequence: Synthetic oligonucleotide
  Target: PCSK9; (-) strand; PAM type: YTN; PAM sequence: TTT
tcggaaatagagccagtggc

SEQ ID NO: 23541 - DNA, 20 bp, Artificial Sequence
  Description of Artificial Sequence: Synthetic oligonucleotide
  Target: PCSK9; (-) strand; PAM type: YTN; PAM sequence: CTG
tggagattttcggaaataga

SEQ ID NO: 23542 - DNA, 20 bp, Artificial Sequence
  Description of Artificial Sequence: Synthetic oligonucleotide
  Target: PCSK9; (-) strand; PAM type: YTN; PAM sequence: TTC
tgtggagattttcggaaata

SEQ ID NO: 23543 - DNA, 20 bp, Artificial Sequence
  Description of Artificial Sequence: Synthetic oligonucleotide
  Target: PCSK9; (-) strand; PAM type: YTN; PAM sequence: TTT
ctgtggagattttcggaaat

SEQ ID NO: 23544 - DNA, 20 bp, Artificial Sequence
  Description of Artificial Sequence: Synthetic oligonucleotide
  Target: PCSK9; (-) strand; PAM type: YTN; PAM sequence: TTC
acatttctgtggagattttc

SEQ ID NO: 23545 - DNA, 20 bp, Artificial Sequence
  Description of Artificial Sequence: Synthetic oligonucleotide
  Target: PCSK9; (-) strand; PAM type: YTN; PAM sequence: CTA
tatgtggattcacatttctg

SEQ ID NO: 23546 - DNA, 20 bp, Artificial Sequence
  Description of Artificial Sequence: Synthetic oligonucleotide
  Target: PCSK9; (-) strand; PAM type: YTN; PAM sequence: CTG
tcccgggagcgtggtctata

SEQ ID NO: 23547 - DNA, 20 bp, Artificial Sequence
  Description of Artificial Sequence: Synthetic oligonucleotide
  Target: PCSK9; (-) strand; PAM type: YTN; PAM sequence: CTC
cggcatgtggatcagctgtc

SEQ ID NO: 23548 - DNA, 20 bp, Artificial Sequence
  Description of Artificial Sequence: Synthetic oligonucleotide
  Target: PCSK9; (-) strand; PAM type: YTN; PAM sequence: TTG
gcagtgggagaactccggca

SEQ ID NO: 23549 - DNA, 20 bp, Artificial Sequence
  Description of Artificial Sequence: Synthetic oligonucleotide
  Target: PCSK9; (-) strand; PAM type: YTN; PAM sequence: TTT
ggcagtgggagaactccggc

SEQ ID NO: 23550 - DNA, 20 bp, Artificial Sequence
  Description of Artificial Sequence: Synthetic oligonucleotide
  Target: PCSK9; (-) strand; PAM type: YTN; PAM sequence: CTG
tttggcagtgggagaactcc

SEQ ID NO: 23551 - DNA, 20 bp, Artificial Sequence
  Description of Artificial Sequence: Synthetic oligonucleotide
  Target: PCSK9; (-) strand; PAM type: YTN; PAM sequence: TTG
ggagctgtttggcagtggga

SEQ ID NO: 23552 - DNA, 20 bp, Artificial Sequence
  Description of Artificial Sequence: Synthetic oligonucleotide
  Target: PCSK9; (-) strand; PAM type: YTN; PAM sequence: TTT
gggagctgtttggcagtggg

SEQ ID NO: 23553 - DNA, 20 bp, Artificial Sequence
  Description of Artificial Sequence: Synthetic oligonucleotide
  Target: PCSK9; (-) strand; PAM type: YTN; PAM sequence: CTA
gaaggtttgggagctgtttg

SEQ ID NO: 23554 - DNA, 20 bp, Artificial Sequence
  Description of Artificial Sequence: Synthetic oligonucleotide
  Target: PCSK9; (-) strand; PAM type: YTN; PAM sequence: TTA
agccactagaaggtttggga

SEQ ID NO: 23555 - DNA, 20 bp, Artificial Sequence
  Description of Artificial Sequence: Synthetic oligonucleotide
  Target: PCSK9; (-) strand; PAM type: YTN; PAM sequence: TTT
aagccactagaaggtttggg

SEQ ID NO: 23556 - DNA, 20 bp, Artificial Sequence
  Description of Artificial Sequence: Synthetic oligonucleotide
  Target: PCSK9; (-) strand; PAM type: YTN; PAM sequence: TTT
taagccactagaaggtttgg

SEQ ID NO: 23557 - DNA, 20 bp, Artificial Sequence
  Description of Artificial Sequence: Synthetic oligonucleotide
  Target: PCSK9; (-) strand; PAM type: YTN; PAM sequence: TTT
ttaagccactagaaggtttg

SEQ ID NO: 23558 - DNA, 20 bp, Artificial Sequence
  Description of Artificial Sequence: Synthetic oligonucleotide
  Target: PCSK9; (-) strand; PAM type: YTN; PAM sequence: CTC
aaggaaagcatttttaagcc

SEQ ID NO: 23559 - DNA, 20 bp, Artificial Sequence
  Description of Artificial Sequence: Synthetic oligonucleotide
  Target: PCSK9; (-) strand; PAM type: YTN; PAM sequence: TTC
tcaaggaaagcatttttaag

SEQ ID NO: 23560 - DNA, 20 bp, Artificial Sequence
  Description of Artificial Sequence: Synthetic oligonucleotide
  Target: PCSK9; (-) strand; PAM type: YTN; PAM sequence: TTT
ctcaaggaaagcatttttaa

SEQ ID NO: 23561 - DNA, 20 bp, Artificial Sequence
  Description of Artificial Sequence: Synthetic oligonucleotide
  Target: PCSK9; (-) strand; PAM type: YTN; PAM sequence: TTG
ggcggatcgtgtatttctca

SEQ ID NO: 23562 - DNA, 20 bp, Artificial Sequence
  Description of Artificial Sequence: Synthetic oligonucleotide
  Target: PCSK9; (-) strand; PAM type: YTN; PAM sequence: CTT
gggcggatcgtgtatttctc

SEQ ID NO: 23563 - DNA, 20 bp, Artificial Sequence
  Description of Artificial Sequence: Synthetic oligonucleotide
  Target: PCSK9; (-) strand; PAM type: YTN; PAM sequence: CTG
tgacttgggcggatcgtgta

SEQ ID NO: 23564 - DNA, 20 bp, Artificial Sequence
  Description of Artificial Sequence: Synthetic oligonucleotide
  Target: PCSK9; (-) strand; PAM type: YTN; PAM sequence: CTG
ctgtgacttgggcggatcgt

SEQ ID NO: 23565 - DNA, 20 bp, Artificial Sequence
  Description of Artificial Sequence: Synthetic oligonucleotide
  Target: PCSK9; (-) strand; PAM type: YTN; PAM sequence: CTG
ggaaagctgctgtgacttgg

SEQ ID NO: 23566 - DNA, 20 bp, Artificial Sequence
  Description of Artificial Sequence: Synthetic oligonucleotide
  Target: PCSK9; (-) strand; PAM type: YTN; PAM sequence: TTG
gactgggaaagctgctgtga

SEQ ID NO: 23567 - DNA, 20 bp, Artificial Sequence
  Description of Artificial Sequence: Synthetic oligonucleotide
  Target: PCSK9; (-) strand; PAM type: YTN; PAM sequence: CTG
gagattggactgggaaagct

SEQ ID NO: 23568 - DNA, 20 bp, Artificial Sequence
  Description of Artificial Sequence: Synthetic oligonucleotide
  Target: PCSK9; (-) strand; PAM type: YTN; PAM sequence: TTG
gaagagcctggagattggac

SEQ ID NO: 23569 - DNA, 20 bp, Artificial Sequence
  Description of Artificial Sequence: Synthetic oligonucleotide
  Target: PCSK9; (-) strand; PAM type: YTN; PAM sequence: TTT
ggaagagcctggagattgga

SEQ ID NO: 23570 - DNA, 20 bp, Artificial Sequence
  Description of Artificial Sequence: Synthetic oligonucleotide
  Target: PCSK9; (-) strand; PAM type: YTN; PAM sequence: CTT
tggaagagcctggagattgg

SEQ ID NO: 23571 - DNA, 20 bp, Artificial Sequence
  Description of Artificial Sequence: Synthetic oligonucleotide
  Target: PCSK9; (-) strand; PAM type: YTN; PAM sequence: CTC
gaaccctttggaagagcctg

SEQ ID NO: 23572 - DNA, 20 bp, Artificial Sequence
  Description of Artificial Sequence: Synthetic oligonucleotide
  Target: PCSK9; (-) strand; PAM type: YTN; PAM sequence: TTG
gaatcagaatctcgaaccct

SEQ ID NO: 23573 - DNA, 20 bp, Artificial Sequence
  Description of Artificial Sequence: Synthetic oligonucleotide
  Target: PCSK9; (-) strand; PAM type: YTN; PAM sequence: CTT
ggaatcagaatctcgaaccc

SEQ ID NO: 23574 - DNA, 20 bp, Artificial Sequence
  Description of Artificial Sequence: Synthetic oligonucleotide
  Target: PCSK9; (-) strand; PAM type: YTN; PAM sequence: TTC
ttggaatcagaatctcgaac

SEQ ID NO: 23575 - DNA, 20 bp, Artificial Sequence
  Description of Artificial Sequence: Synthetic oligonucleotide
  Target: PCSK9; (-) strand; PAM type: YTN; PAM sequence: CTT
cttggaatcagaatctcgaa

SEQ ID NO: 23576 - DNA, 20 bp, Artificial Sequence
  Description of Artificial Sequence: Synthetic oligonucleotide
  Target: PCSK9; (-) strand; PAM type: YTN; PAM sequence: CTC
agcaccttcttggaatcaga

SEQ ID NO: 23577 - DNA, 20 bp, Artificial Sequence
  Description of Artificial Sequence: Synthetic oligonucleotide
  Target: PCSK9; (-) strand; PAM type: YTN; PAM sequence: CTG
gatgctcagcaccttcttgg

SEQ ID NO: 23578 - DNA, 20 bp, Artificial Sequence
  Description of Artificial Sequence: Synthetic oligonucleotide
  Target: PCSK9; (-) strand; PAM type: YTN; PAM sequence: CTG
agaggagtcaagacacaata

SEQ ID NO: 23579 - DNA, 20 bp, Artificial Sequence
  Description of Artificial Sequence: Synthetic oligonucleotide
  Target: PCSK9; (-) strand; PAM type: YTN; PAM sequence: CTA
gaggaacatgcccagcctga

SEQ ID NO: 23580 - DNA, 20 bp, Artificial Sequence
  Description of Artificial Sequence: Synthetic oligonucleotide
  Target: PCSK9; (-) strand; PAM type: YTN; PAM sequence: TTG
atccctagaggaacatgccc

SEQ ID NO: 23581 - DNA, 20 bp, Artificial Sequence
  Description of Artificial Sequence: Synthetic oligonucleotide
  Target: PCSK9; (-) strand; PAM type: YTN; PAM sequence: TTG
atgatgttgatccctagagg

SEQ ID NO: 23582 - DNA, 20 bp, Artificial Sequence
  Description of Artificial Sequence: Synthetic oligonucleotide
  Target: PCSK9; (-) strand; PAM type: YTN; PAM sequence: CTT
gatgatgttgatccctagag

SEQ ID NO: 23583 - DNA, 20 bp, Artificial Sequence
  Description of Artificial Sequence: Synthetic oligonucleotide
  Target: PCSK9; (-) strand; PAM type: YTN; PAM sequence: TTG
agaagtgaccttgatgatgt

SEQ ID NO: 23584 - DNA, 20 bp, Artificial Sequence
  Description of Artificial Sequence: Synthetic oligonucleotide
  Target: PCSK9; (-) strand; PAM type: YTN; PAM sequence: TTG
gtgagttgagaagtgacctt

SEQ ID NO: 23585 - DNA, 20 bp, Artificial Sequence
  Description of Artificial Sequence: Synthetic oligonucleotide
  Target: PCSK9; (-) strand; PAM type: YTN; PAM sequence: CTC
ccatgatgattggtgagttg

SEQ ID NO: 23586 - DNA, 20 bp, Artificial Sequence
  Description of Artificial Sequence: Synthetic oligonucleotide
  Target: PCSK9; (-) strand; PAM type: YTN; PAM sequence: TTC
agaatctcccatgatgattg

SEQ ID NO: 23587 - DNA, 20 bp, Artificial Sequence
  Description of Artificial Sequence: Synthetic oligonucleotide
  Target: PCSK9; (-) strand; PAM type: YTN; PAM sequence: CTG
cagggttcagaatctcccat

SEQ ID NO: 23588 - DNA, 20 bp, Artificial Sequence
  Description of Artificial Sequence: Synthetic oligonucleotide
  Target: PCSK9; (-) strand; PAM type: YTN; PAM sequence: TTC
tgcagggttcagaatctccc

SEQ ID NO: 23589 - DNA, 20 bp, Artificial Sequence
  Description of Artificial Sequence: Synthetic oligonucleotide
  Target: PCSK9; (-) strand; PAM type: YTN; PAM sequence: TTT
ctgcagggttcagaatctcc

SEQ ID NO: 23590 - DNA, 20 bp, Artificial Sequence
  Description of Artificial Sequence: Synthetic oligonucleotide
  Target: PCSK9; (-) strand; PAM type: YTN; PAM sequence: TTT
tctgcagggttcagaatctc

SEQ ID NO: 23591 - DNA, 20 bp, Artificial Sequence
  Description of Artificial Sequence: Synthetic oligonucleotide
  Target: PCSK9; (-) strand; PAM type: YTN; PAM sequence: CTT
ttctgcagggttcagaatct

SEQ ID NO: 23592 - DNA, 20 bp, Artificial Sequence
  Description of Artificial Sequence: Synthetic oligonucleotide
  Target: PCSK9; (-) strand; PAM type: YTN; PAM sequence: TTC
ttttctgcagggttcagaat

SEQ ID NO: 23593 - DNA, 20 bp, Artificial Sequence
  Description of Artificial Sequence: Synthetic oligonucleotide
  Target: PCSK9; (-) strand; PAM type: YTN; PAM sequence: TTT
cttttctgcagggttcagaa

SEQ ID NO: 23594 - DNA, 20 bp, Artificial Sequence
  Description of Artificial Sequence: Synthetic oligonucleotide
  Target: PCSK9; (-) strand; PAM type: YTN; PAM sequence: TTT
tcttttctgcagggttcaga

SEQ ID NO: 23595 - DNA, 20 bp, Artificial Sequence
  Description of Artificial Sequence: Synthetic oligonucleotide
  Target: PCSK9; (-) strand; PAM type: YTN; PAM sequence: CTT
ttcttttctgcagggttcag

SEQ ID NO: 23596 - DNA, 20 bp, Artificial Sequence
  Description of Artificial Sequence: Synthetic oligonucleotide
  Target: PCSK9; (-) strand; PAM type: YTN; PAM sequence: TTC
cttttcttttctgcagggtt

SEQ ID NO: 23597 - DNA, 20 bp, Artificial Sequence
  Description of Artificial Sequence: Synthetic oligonucleotide
  Target: PCSK9; (-) strand; PAM type: YTN; PAM sequence: CTT
ccttttcttttctgcagggt

SEQ ID NO: 23598 - DNA, 20 bp, Artificial Sequence
  Description of Artificial Sequence: Synthetic oligonucleotide
  Target: PCSK9; (-) strand; PAM type: YTN; PAM sequence: TTA
acttccttttcttttctgca

SEQ ID NO: 23599 - DNA, 20 bp, Artificial Sequence
  Description of Artificial Sequence: Synthetic oligonucleotide
  Target: PCSK9; (-) strand; PAM type: YTN; PAM sequence: TTT
aacttccttttcttttctgc

SEQ ID NO: 23600 - DNA, 20 bp, Artificial Sequence
  Description of Artificial Sequence: Synthetic oligonucleotide
  Target: PCSK9; (-) strand; PAM type: YTN; PAM sequence: CTT
taacttccttttcttttctg

SEQ ID NO: 23601 - DNA, 20 bp, Artificial Sequence
  Description of Artificial Sequence: Synthetic oligonucleotide
  Target: PCSK9; (-) strand; PAM type: YTN; PAM sequence: CTA
accgtatgaactttaacttc

SEQ ID NO: 23602 - DNA, 20 bp, Artificial Sequence
  Description of Artificial Sequence: Synthetic oligonucleotide
  Target: PCSK9; (-) strand; PAM type: YTN; PAM sequence: CTC
taaccgtatgaactttaact

SEQ ID NO: 23603 - DNA, 20 bp, Artificial Sequence
  Description of Artificial Sequence: Synthetic oligonucleotide
  Target: PCSK9; (-) strand; PAM type: YTN; PAM sequence: TTC
tctaaccgtatgaactttaa

SEQ ID NO: 23604 - DNA, 20 bp, Artificial Sequence
  Description of Artificial Sequence: Synthetic oligonucleotide
  Target: PCSK9; (-) strand; PAM type: YTN; PAM sequence: TTT
ctctaaccgtatgaacttta

SEQ ID NO: 23605 - DNA, 20 bp, Artificial Sequence
  Description of Artificial Sequence: Synthetic oligonucleotide
  Target: PCSK9; (-) strand; PAM type: YTN; PAM sequence: TTT
tctctaaccgtatgaacttt

SEQ ID NO: 23606 - DNA, 20 bp, Artificial Sequence
  Description of Artificial Sequence: Synthetic oligonucleotide
  Target: PCSK9; (-) strand; PAM type: YTN; PAM sequence: CTT
ttctctaaccgtatgaactt

SEQ ID NO: 23607 - DNA, 20 bp, Artificial Sequence
  Description of Artificial Sequence: Synthetic oligonucleotide
  Target: PCSK9; (-) strand; PAM type: YTN; PAM sequence: TTG
cagaacacaagtcagcatag

SEQ ID NO: 23608 - DNA, 20 bp, Artificial Sequence
  Description of Artificial Sequence: Synthetic oligonucleotide
  Target: PCSK9; (-) strand; PAM type: YTN; PAM sequence: TTA
aattgcagaacacaagtcag

SEQ ID NO: 23609 - DNA, 20 bp, Artificial Sequence
  Description of Artificial Sequence: Synthetic oligonucleotide
  Target: PCSK9; (-) strand; PAM type: YTN; PAM sequence: TTT
aaattgcagaacacaagtca

SEQ ID NO: 23610 - DNA, 20 bp, Artificial Sequence
  Description of Artificial Sequence: Synthetic oligonucleotide
  Target: PCSK9; (-) strand; PAM type: YTN; PAM sequence: TTG
ccagatgaagacatgtttaa

SEQ ID NO: 23611 - DNA, 20 bp, Artificial Sequence
  Description of Artificial Sequence: Synthetic oligonucleotide
  Target: PCSK9; (-) strand; PAM type: YTN; PAM sequence: TTA
agttgccagatgaagacatg

SEQ ID NO: 23612 - DNA, 20 bp, Artificial Sequence
  Description of Artificial Sequence: Synthetic oligonucleotide
  Target: PCSK9; (-) strand; PAM type: YTN; PAM sequence: TTG
cattaagttgccagatgaag

SEQ ID NO: 23613 - DNA, 20 bp, Artificial Sequence
  Description of Artificial Sequence: Synthetic oligonucleotide
  Target: PCSK9; (-) strand; PAM type: YTN; PAM sequence: TTG
ataaacattgcattaagttg

SEQ ID NO: 23614 - DNA, 20 bp, Artificial Sequence
  Description of Artificial Sequence: Synthetic oligonucleotide
  Target: PCSK9; (-) strand; PAM type: YTN; PAM sequence: TTT
gataaacattgcattaagtt

SEQ ID NO: 23615 - DNA, 20 bp, Artificial Sequence
  Description of Artificial Sequence: Synthetic oligonucleotide
  Target: PCSK9; (-) strand; PAM type: YTN; PAM sequence: CTT
tgataaacattgcattaagt

SEQ ID NO: 23616 - DNA, 20 bp, Artificial Sequence
  Description of Artificial Sequence: Synthetic oligonucleotide
  Target: PCSK9; (-) strand; PAM type: YTN; PAM sequence: TTA
ccctttgataaacattgcat

SEQ ID NO: 23617 - DNA, 20 bp, Artificial Sequence
  Description of Artificial Sequence: Synthetic oligonucleotide
  Target: PCSK9; (-) strand; PAM type: YTN; PAM sequence: TTA
ttaccctttgataaacattg

SEQ ID NO: 23618 - DNA, 20 bp, Artificial Sequence
  Description of Artificial Sequence: Synthetic oligonucleotide
  Target: PCSK9; (-) strand; PAM type: YTN; PAM sequence: TTT
attaccctttgataaacatt

SEQ ID NO: 23619 - DNA, 20 bp, Artificial Sequence
  Description of Artificial Sequence: Synthetic oligonucleotide
  Target: PCSK9; (-) strand; PAM type: YTN; PAM sequence: TTT
tattaccctttgataaacat

SEQ ID NO: 23620 - DNA, 20 bp, Artificial Sequence
  Description of Artificial Sequence: Synthetic oligonucleotide
  Target: PCSK9; (-) strand; PAM type: YTN; PAM sequence: TTA
tcacattttattaccctttg

SEQ ID NO: 23621 - DNA, 20 bp, Artificial Sequence
  Description of Artificial Sequence: Synthetic oligonucleotide
  Target: PCSK9; (-) strand; PAM type: YTN; PAM sequence: TTA
gatgtaatagttatcacatt

SEQ ID NO: 23622 - DNA, 20 bp, Artificial Sequence
  Description of Artificial Sequence: Synthetic oligonucleotide
  Target: PCSK9; (-) strand; PAM type: YTN; PAM sequence: TTG
tcaaatattagatgtaatag

SEQ ID NO: 23623 - DNA, 20 bp, Artificial Sequence
  Description of Artificial Sequence: Synthetic oligonucleotide
  Target: PCSK9; (-) strand; PAM type: YTN; PAM sequence: TTA
cataatcatgaattgtcaaa

SEQ ID NO: 23624 - DNA, 20 bp, Artificial Sequence
  Description of Artificial Sequence: Synthetic oligonucleotide
  Target: PCSK9; (-) strand; PAM type: YTN; PAM sequence: TTT
acataatcatgaattgtcaa

SEQ ID NO: 23625 - DNA, 20 bp, Artificial Sequence
  Description of Artificial Sequence: Synthetic oligonucleotide
  Target: PCSK9; (-) strand; PAM type: YTN; PAM sequence: TTT
tacataatcatgaattgtca

SEQ ID NO: 23626 - DNA, 20 bp, Artificial Sequence
  Description of Artificial Sequence: Synthetic oligonucleotide
  Target: PCSK9; (-) strand; PAM type: YTN; PAM sequence: CTA
aatgagatcatagaaatgta

SEQ ID NO: 23627 - DNA, 20 bp, Artificial Sequence
  Description of Artificial Sequence: Synthetic oligonucleotide
  Target: PCSK9; (-) strand; PAM type: YTN; PAM sequence: CTG
actaaatgagatcatagaaa

SEQ ID NO: 23628 - DNA, 20 bp, Artificial Sequence
  Description of Artificial Sequence: Synthetic oligonucleotide
  Target: PCSK9; (-) strand; PAM type: YTN; PAM sequence: TTC
actgactaaatgagatcata

SEQ ID NO: 23629 - DNA, 20 bp, Artificial Sequence
  Description of Artificial Sequence: Synthetic oligonucleotide
  Target: PCSK9; (-) strand; PAM type: YTN; PAM sequence: TTT
cactgactaaatgagatcat

SEQ ID NO: 23630 - DNA, 20 bp, Artificial Sequence
  Description of Artificial Sequence: Synthetic oligonucleotide
  Target: PCSK9; (-) strand; PAM type: YTN; PAM sequence: TTG
tttcactgactaaatgagat

SEQ ID NO: 23631 - DNA, 20 bp, Artificial Sequence
  Description of Artificial Sequence: Synthetic oligonucleotide
  Target: PCSK9; (-) strand; PAM type: YTN; PAM sequence: CTG
ggttgtttcactgactaaat

SEQ ID NO: 23632 - DNA, 20 bp, Artificial Sequence
  Description of Artificial Sequence: Synthetic oligonucleotide
  Target: PCSK9; (-) strand; PAM type: YTN; PAM sequence: TTA
gacaagtcgctgggttgttt

SEQ ID NO: 23633 - DNA, 20 bp, Artificial Sequence
  Description of Artificial Sequence: Synthetic oligonucleotide
  Target: PCSK9; (-) strand; PAM type: YTN; PAM sequence: TTT
agacaagtcgctgggttgtt

SEQ ID NO: 23634 - DNA, 20 bp, Artificial Sequence
  Description of Artificial Sequence: Synthetic oligonucleotide
  Target: PCSK9; (-) strand; PAM type: YTN; PAM sequence: CTT
tagacaagtcgctgggttgt

SEQ ID NO: 23635 - DNA, 20 bp, Artificial Sequence
  Description of Artificial Sequence: Synthetic oligonucleotide
  Target: PCSK9; (-) strand; PAM type: YTN; PAM sequence: TTG
tgactttagacaagtcgctg

SEQ ID NO: 23636 - DNA, 20 bp, Artificial Sequence
  Description of Artificial Sequence: Synthetic oligonucleotide
  Target: PCSK9; (-) strand; PAM type: YTN; PAM sequence: CTC
acatgggtgcagagtagcat

SEQ ID NO: 23637 - DNA, 20 bp, Artificial Sequence
  Description of Artificial Sequence: Synthetic oligonucleotide
  Target: PCSK9; (-) strand; PAM type: YTN; PAM sequence: TTC
tcacatgggtgcagagtagc

SEQ ID NO: 23638 - DNA, 20 bp, Artificial Sequence
  Description of Artificial Sequence: Synthetic oligonucleotide
  Target: PCSK9; (-) strand; PAM type: YTN; PAM sequence: CTG
cgttctcacatgggtgcaga

SEQ ID NO: 23639 - DNA, 20 bp, Artificial Sequence
  Description of Artificial Sequence: Synthetic oligonucleotide
  Target: PCSK9; (-) strand; PAM type: YTN; PAM sequence: CTC
tgcgttctcacatgggtgca

SEQ ID NO: 23640 - DNA, 20 bp, Artificial Sequence
  Description of Artificial Sequence: Synthetic oligonucleotide
  Target: PCSK9; (-) strand; PAM type: YTN; PAM sequence: CTG
ctctgcgttctcacatgggt

SEQ ID NO: 23641 - DNA, 20 bp, Artificial Sequence
  Description of Artificial Sequence: Synthetic oligonucleotide
  Target: PCSK9; (-) strand; PAM type: YTN; PAM sequence: TTA
tcactgctctgcgttctcac

SEQ ID NO: 23642 - DNA, 20 bp, Artificial Sequence
  Description of Artificial Sequence: Synthetic oligonucleotide
  Target: PCSK9; (-) strand; PAM type: YTN; PAM sequence: TTT
atcactgctctgcgttctca

SEQ ID NO: 23643 - DNA, 20 bp, Artificial Sequence
  Description of Artificial Sequence: Synthetic oligonucleotide
  Target: PCSK9; (-) strand; PAM type: YTN; PAM sequence: CTT
tatcactgctctgcgttctc

SEQ ID NO: 23644 - DNA, 20 bp, Artificial Sequence
  Description of Artificial Sequence: Synthetic oligonucleotide
  Target: PCSK9; (-) strand; PAM type: YTN; PAM sequence: CTC
ccagctttatcactgctctg

SEQ ID NO: 23645 - DNA, 20 bp, Artificial Sequence
  Description of Artificial Sequence: Synthetic oligonucleotide
  Target: PCSK9; (-) strand; PAM type: YTN; PAM sequence: CTC
tcccagctttatcactgctc

SEQ ID NO: 23646 - DNA, 20 bp, Artificial Sequence
  Description of Artificial Sequence: Synthetic oligonucleotide
  Target: PCSK9; (-) strand; PAM type: YTN; PAM sequence: CTC
acacagtgcccaacgtgaag

SEQ ID NO: 23647 - DNA, 20 bp, Artificial Sequence
  Description of Artificial Sequence: Synthetic oligonucleotide
  Target: PCSK9; (-) strand; PAM type: YTN; PAM sequence: TTG
gcaggtgcagggcagggagg

SEQ ID NO: 23648 - DNA, 20 bp, Artificial Sequence
  Description of Artificial Sequence: Synthetic oligonucleotide
  Target: PCSK9; (-) strand; PAM type: YTN; PAM sequence: TTT
ggcaggtgcagggcagggag

SEQ ID NO: 23649 - DNA, 20 bp, Artificial Sequence
  Description of Artificial Sequence: Synthetic oligonucleotide
  Target: PCSK9; (-) strand; PAM type: YTN; PAM sequence: TTC
agacccaggagtgacccaga

SEQ ID NO: 23650 - DNA, 20 bp, Artificial Sequence
  Description of Artificial Sequence: Synthetic oligonucleotide
  Target: PCSK9; (-) strand; PAM type: YTN; PAM sequence: CTT
cagacccaggagtgacccag

SEQ ID NO: 23651 - DNA, 20 bp, Artificial Sequence
  Description of Artificial Sequence: Synthetic oligonucleotide
  Target: PCSK9; (-) strand; PAM type: YTN; PAM sequence: TTC
gccaagtgtgtaagccaaag

SEQ ID NO: 23652 - DNA, 20 bp, Artificial Sequence
  Description of Artificial Sequence: Synthetic oligonucleotide
  Target: PCSK9; (-) strand; PAM type: YTN; PAM sequence: TTC
agaacgattcgccaagtgtg

SEQ ID NO: 23653 - DNA, 20 bp, Artificial Sequence
  Description of Artificial Sequence: Synthetic oligonucleotide
  Target: PCSK9; (-) strand; PAM type: YTN; PAM sequence: CTA
gatcagccccatggcacacg

SEQ ID NO: 23654 - DNA, 20 bp, Artificial Sequence
  Description of Artificial Sequence: Synthetic oligonucleotide
  Target: PCSK9; (-) strand; PAM type: YTN; PAM sequence: CTC
caactagatcagccccatgg

SEQ ID NO: 23655 - DNA, 20 bp, Artificial Sequence
  Description of Artificial Sequence: Synthetic oligonucleotide
  Target: PCSK9; (-) strand; PAM type: YTN; PAM sequence: CTC
cccaccccagctccaactag

SEQ ID NO: 23656 - DNA, 20 bp, Artificial Sequence
  Description of Artificial Sequence: Synthetic oligonucleotide
  Target: PCSK9; (-) strand; PAM type: YTN; PAM sequence: CTC
ctccccaccccagctccaac

SEQ ID NO: 23657 - DNA, 20 bp, Artificial Sequence
  Description of Artificial Sequence: Synthetic oligonucleotide
  Target: PCSK9; (-) strand; PAM type: YTN; PAM sequence: TTG
ctcctccccaccccagctcc

SEQ ID NO: 23658 - DNA, 20 bp, Artificial Sequence
  Description of Artificial Sequence: Synthetic oligonucleotide
  Target: PCSK9; (-) strand; PAM type: YTN; PAM sequence: CTT
gctcctccccaccccagctc

SEQ ID NO: 23659 - DNA, 20 bp, Artificial Sequence
  Description of Artificial Sequence: Synthetic oligonucleotide
  Target: PCSK9; (-) strand; PAM type: YTN; PAM sequence: CTG
tccttgctcctccccacccc

SEQ ID NO: 23660 - DNA, 20 bp, Artificial Sequence
  Description of Artificial Sequence: Synthetic oligonucleotide
  Target: PCSK9; (-) strand; PAM type: YTN; PAM sequence: TTA
gagagactgtccttgctcct

SEQ ID NO: 23661 - DNA, 20 bp, Artificial Sequence
  Description of Artificial Sequence: Synthetic oligonucleotide
  Target: PCSK9; (-) strand; PAM type: YTN; PAM sequence: TTT
agagagactgtccttgctcc

SEQ ID NO: 23662 - DNA, 20 bp, Artificial Sequence
  Description of Artificial Sequence: Synthetic oligonucleotide
  Target: PCSK9; (-) strand; PAM type: YTN; PAM sequence: CTT
tagagagactgtccttgctc

SEQ ID NO: 23663 - DNA, 20 bp, Artificial Sequence
  Description of Artificial Sequence: Synthetic oligonucleotide
  Target: PCSK9; (-) strand; PAM type: YTN; PAM sequence: TTG
tcactttagagagactgtcc

SEQ ID NO: 23664 - DNA, 20 bp, Artificial Sequence
  Description of Artificial Sequence: Synthetic oligonucleotide
  Target: PCSK9; (-) strand; PAM type: YTN; PAM sequence: TTA
ggttgtcactttagagagac

SEQ ID NO: 23665 - DNA, 20 bp, Artificial Sequence
  Description of Artificial Sequence: Synthetic oligonucleotide
  Target: PCSK9; (-) strand; PAM type: YTN; PAM sequence: CTT
aggttgtcactttagagaga

SEQ ID NO: 23666 - DNA, 20 bp, Artificial Sequence
  Description of Artificial Sequence: Synthetic oligonucleotide
  Target: PCSK9; (-) strand; PAM type: YTN; PAM sequence: CTC
agcttaggttgtcactttag

SEQ ID NO: 23667 - DNA, 20 bp, Artificial Sequence
  Description of Artificial Sequence: Synthetic oligonucleotide
  Target: PCSK9; (-) strand; PAM type: YTN; PAM sequence: CTC
actcagcttaggttgtcact

SEQ ID NO: 23668 - DNA, 20 bp, Artificial Sequence
  Description of Artificial Sequence: Synthetic oligonucleotide
  Target: PCSK9; (-) strand; PAM type: YTN; PAM sequence: CTC
tcactcagcttaggttgtca

SEQ ID NO: 23669 - DNA, 20 bp, Artificial Sequence
  Description of Artificial Sequence: Synthetic oligonucleotide
  Target: PCSK9; (-) strand; PAM type: YTN; PAM sequence: CTC
acccccaactctcactcagc

SEQ ID NO: 23670 - DNA, 20 bp, Artificial Sequence
  Description of Artificial Sequence: Synthetic oligonucleotide
  Target: PCSK9; (-) strand; PAM type: YTN; PAM sequence: CTA
ctcacccccaactctcactc

SEQ ID NO: 23671 - DNA, 20 bp, Artificial Sequence
  Description of Artificial Sequence: Synthetic oligonucleotide
  Target: PCSK9; (-) strand; PAM type: YTN; PAM sequence: CTC
agggcccccctactcacccc

SEQ ID NO: 23672 - DNA, 20 bp, Artificial Sequence
  Description of Artificial Sequence: Synthetic oligonucleotide
  Target: PCSK9; (-) strand; PAM type: YTN; PAM sequence: TTC
cacctcagggcccccctact

SEQ ID NO: 23673 - DNA, 20 bp, Artificial Sequence
  Description of Artificial Sequence: Synthetic oligonucleotide
  Target: PCSK9; (-) strand; PAM type: YTN; PAM sequence: CTT
ccacctcagggcccccctac

SEQ ID NO: 23674 - DNA, 20 bp, Artificial Sequence
  Description of Artificial Sequence: Synthetic oligonucleotide
  Target: PCSK9; (-) strand; PAM type: YTN; PAM sequence: TTC
cttccacctcagggcccccc

SEQ ID NO: 23675 - DNA, 20 bp, Artificial Sequence
  Description of Artificial Sequence: Synthetic oligonucleotide
  Target: PCSK9; (-) strand; PAM type: YTN; PAM sequence: CTT
ccttccacctcagggccccc

SEQ ID NO: 23676 - DNA, 20 bp, Artificial Sequence
  Description of Artificial Sequence: Synthetic oligonucleotide
  Target: PCSK9; (-) strand; PAM type: YTN; PAM sequence: CTC
ttccttccacctcagggccc

SEQ ID NO: 23677 - DNA, 20 bp, Artificial Sequence
  Description of Artificial Sequence: Synthetic oligonucleotide
  Target: PCSK9; (-) strand; PAM type: YTN; PAM sequence: CTC
tcttccttccacctcagggc

SEQ ID NO: 23678 - DNA, 20 bp, Artificial Sequence
  Description of Artificial Sequence: Synthetic oligonucleotide
  Target: PCSK9; (-) strand; PAM type: YTN; PAM sequence: TTA
tcaaatgtactctcttcctt

SEQ ID NO: 23679 - DNA, 20 bp, Artificial Sequence
  Description of Artificial Sequence: Synthetic oligonucleotide
  Target: PCSK9; (-) strand; PAM type: YTN; PAM sequence: TTT
atcaaatgtactctcttcct

SEQ ID NO: 23680 - DNA, 20 bp, Artificial Sequence
  Description of Artificial Sequence: Synthetic oligonucleotide
  Target: PCSK9; (-) strand; PAM type: YTN; PAM sequence: TTA
tttatcaaatgtactctctt

SEQ ID NO: 23681 - DNA, 20 bp, Artificial Sequence
  Description of Artificial Sequence: Synthetic oligonucleotide
  Target: PCSK9; (-) strand; PAM type: YTN; PAM sequence: TTT
atttatcaaatgtactctct

SEQ ID NO: 23682 - DNA, 20 bp, Artificial Sequence
  Description of Artificial Sequence: Synthetic oligonucleotide
  Target: PCSK9; (-) strand; PAM type: YTN; PAM sequence: TTT
tatttatcaaatgtactctc

SEQ ID NO: 23683 - DNA, 20 bp, Artificial Sequence
  Description of Artificial Sequence: Synthetic oligonucleotide
  Target: PCSK9; (-) strand; PAM type: YTN; PAM sequence: CTG
aattttatttatcaaatgta

SEQ ID NO: 23684 - DNA, 20 bp, Artificial Sequence
  Description of Artificial Sequence: Synthetic oligonucleotide
  Target: PCSK9; (-) strand; PAM type: YTN; PAM sequence: TTC
tgaattttatttatcaaatg

SEQ ID NO: 23685 - DNA, 20 bp, Artificial Sequence
  Description of Artificial Sequence: Synthetic oligonucleotide
  Target: PCSK9; (-) strand; PAM type: YTN; PAM sequence: TTT
ctgaattttatttatcaaat

SEQ ID NO: 23686 - DNA, 20 bp, Artificial Sequence
  Description of Artificial Sequence: Synthetic oligonucleotide
  Target: PCSK9; (-) strand; PAM type: YTN; PAM sequence: TTT
tctgaattttatttatcaaa

SEQ ID NO: 23687 - DNA, 20 bp, Artificial Sequence
  Description of Artificial Sequence: Synthetic oligonucleotide
  Target: PCSK9; (-) strand; PAM type: YTN; PAM sequence: CTG
gcccattttctgaattttat

SEQ ID NO: 23688 - DNA, 20 bp, Artificial Sequence
  Description of Artificial Sequence: Synthetic oligonucleotide
  Target: PCSK9; (-) strand; PAM type: YTN; PAM sequence: CTG
tgcctggcccattttctgaa

SEQ ID NO: 23689 - DNA, 20 bp, Artificial Sequence
  Description of Artificial Sequence: Synthetic oligonucleotide
  Target: PCSK9; (-) strand; PAM type: YTN; PAM sequence: TTA
caggcataagcgactgtgcc

SEQ ID NO: 23690 - DNA, 20 bp, Artificial Sequence
  Description of Artificial Sequence: Synthetic oligonucleotide
  Target: PCSK9; (-) strand; PAM type: YTN; PAM sequence: CTG
ggattacaggcataagcgac

SEQ ID NO: 23691 - DNA, 20 bp, Artificial Sequence
  Description of Artificial Sequence: Synthetic oligonucleotide
  Target: PCSK9; (-) strand; PAM type: YTN; PAM sequence: CTC
ccaagtagctgggattacag

SEQ ID NO: 23692 - DNA, 20 bp, Artificial Sequence
  Description of Artificial Sequence: Synthetic oligonucleotide
  Target: PCSK9; (-) strand; PAM type: YTN; PAM sequence: CTC
agcctcccaagtagctggga

SEQ ID NO: 23693 - DNA, 20 bp, Artificial Sequence
  Description of Artificial Sequence: Synthetic oligonucleotide
  Target: PCSK9; (-) strand; PAM type: YTN; PAM sequence: TTG
cctcagcctcccaagtagct

SEQ ID NO: 23694 - DNA, 20 bp, Artificial Sequence
  Description of Artificial Sequence: Synthetic oligonucleotide
  Target: PCSK9; (-) strand; PAM type: YTN; PAM sequence: CTT
gcctcagcctcccaagtagc

SEQ ID NO: 23695 - DNA, 20 bp, Artificial Sequence
  Description of Artificial Sequence: Synthetic oligonucleotide
  Target: PCSK9; (-) strand; PAM type: YTN; PAM sequence: CTC
cttgcctcagcctcccaagt

SEQ ID NO: 23696 - DNA, 20 bp, Artificial Sequence
  Description of Artificial Sequence: Synthetic oligonucleotide
  Target: PCSK9; (-) strand; PAM type: YTN; PAM sequence: TTC
tccttgcctcagcctcccaa

SEQ ID NO: 23697 - DNA, 20 bp, Artificial Sequence
  Description of Artificial Sequence: Synthetic oligonucleotide
  Target: PCSK9; (-) strand; PAM type: YTN; PAM sequence: TTC
cagcgattctccttgcctca

SEQ ID NO: 23698 - DNA, 20 bp, Artificial Sequence
  Description of Artificial Sequence: Synthetic oligonucleotide
  Target: PCSK9; (-) strand; PAM type: YTN; PAM sequence: CTC
ccaggttccagcgattctcc

SEQ ID NO: 23699 - DNA, 20 bp, Artificial Sequence
  Description of Artificial Sequence: Synthetic oligonucleotide
  Target: PCSK9; (-) strand; PAM type: YTN; PAM sequence: TTC
tcccaggttccagcgattct

SEQ ID NO: 23700 - DNA, 20 bp, Artificial Sequence
  Description of Artificial Sequence: Synthetic oligonucleotide
  Target: PCSK9; (-) strand; PAM type: YTN; PAM sequence: CTT
ctcccaggttccagcgattc

SEQ ID NO: 23701 - DNA, 20 bp, Artificial Sequence
  Description of Artificial Sequence: Synthetic oligonucleotide
  Target: PCSK9; (-) strand; PAM type: YTN; PAM sequence: CTC
cttctcccaggttccagcga

SEQ ID NO: 23702 - DNA, 20 bp, Artificial Sequence
  Description of Artificial Sequence: Synthetic oligonucleotide
  Target: PCSK9; (-) strand; PAM type: YTN; PAM sequence: CTA
cctccttctcccaggttcca

SEQ ID NO: 23703 - DNA, 20 bp, Artificial Sequence
  Description of Artificial Sequence: Synthetic oligonucleotide
  Target: PCSK9; (-) strand; PAM type: YTN; PAM sequence: CTG
ctacctccttctcccaggtt

SEQ ID NO: 23704 - DNA, 20 bp, Artificial Sequence
  Description of Artificial Sequence: Synthetic oligonucleotide
  Target: PCSK9; (-) strand; PAM type: YTN; PAM sequence: CTC
actgctacctccttctccca

SEQ ID NO: 23705 - DNA, 20 bp, Artificial Sequence
  Description of Artificial Sequence: Synthetic oligonucleotide
  Target: PCSK9; (-) strand; PAM type: YTN; PAM sequence: CTC
acctcactgctacctccttc

SEQ ID NO: 23706 - DNA, 20 bp, Artificial Sequence
  Description of Artificial Sequence: Synthetic oligonucleotide
  Target: PCSK9; (-) strand; PAM type: YTN; PAM sequence: CTG
gagtgcagtggtgcaatctc

SEQ ID NO: 23707 - DNA, 20 bp, Artificial Sequence
  Description of Artificial Sequence: Synthetic oligonucleotide
  Target: PCSK9; (+) strand; PAM type: YTN; PAM sequence: CTC
ttataattccatttggggtc

SEQ ID NO: 23708 - DNA, 20 bp, Artificial Sequence
  Description of Artificial Sequence: Synthetic oligonucleotide
  Target: PCSK9; (+) strand; PAM type: YTN; PAM sequence: CTT
ataattccatttggggtctg

SEQ ID NO: 23709 - DNA, 20 bp, Artificial Sequence
  Description of Artificial Sequence: Synthetic oligonucleotide
  Target: PCSK9; (+) strand; PAM type: YTN; PAM sequence: TTA
taattccatttggggtctgt

SEQ ID NO: 23710 - DNA, 20 bp, Artificial Sequence
  Description of Artificial Sequence: Synthetic oligonucleotide
  Target: PCSK9; (+) strand; PAM type: YTN; PAM sequence: TTC
catttggggtctgtacctta

SEQ ID NO: 23711 - DNA, 20 bp, Artificial Sequence
  Description of Artificial Sequence: Synthetic oligonucleotide
  Target: PCSK9; (+) strand; PAM type: YTN; PAM sequence: TTT
ggggtctgtaccttaaatct

SEQ ID NO: 23712 - DNA, 20 bp, Artificial Sequence
  Description of Artificial Sequence: Synthetic oligonucleotide
  Target: PCSK9; (+) strand; PAM type: YTN; PAM sequence: TTG
gggtctgtaccttaaatctt

SEQ ID NO: 23713 - DNA, 20 bp, Artificial Sequence
  Description of Artificial Sequence: Synthetic oligonucleotide
  Target: PCSK9; (+) strand; PAM type: YTN; PAM sequence: CTG
taccttaaatcttatgttgt

SEQ ID NO: 23714 - DNA, 20 bp, Artificial Sequence
  Description of Artificial Sequence: Synthetic oligonucleotide
  Target: PCSK9; (+) strand; PAM type: YTN; PAM sequence: CTT
aaatcttatgttgtttatgc

SEQ ID NO: 23715 - DNA, 20 bp, Artificial Sequence
  Description of Artificial Sequence: Synthetic oligonucleotide
  Target: PCSK9; (+) strand; PAM type: YTN; PAM sequence: TTA
aatcttatgttgtttatgca

SEQ ID NO: 23716 - DNA, 20 bp, Artificial Sequence
  Description of Artificial Sequence: Synthetic oligonucleotide
  Target: PCSK9; (+) strand; PAM type: YTN; PAM sequence: CTT
atgttgtttatgcagagaca

SEQ ID NO: 23717 - DNA, 20 bp, Artificial Sequence
  Description of Artificial Sequence: Synthetic oligonucleotide
  Target: PCSK9; (+) strand; PAM type: YTN; PAM sequence: TTA
tgttgtttatgcagagacaa

SEQ ID NO: 23718 - DNA, 20 bp, Artificial Sequence
  Description of Artificial Sequence: Synthetic oligonucleotide
  Target: PCSK9; (+) strand; PAM type: YTN; PAM sequence: TTG
tttatgcagagacaaacatt

SEQ ID NO: 23719 - DNA, 20 bp, Artificial Sequence
  Description of Artificial Sequence: Synthetic oligonucleotide
  Target: PCSK9; (+) strand; PAM type: YTN; PAM sequence: TTT
atgcagagacaaacattata

SEQ ID NO: 23720 - DNA, 20 bp, Artificial Sequence
  Description of Artificial Sequence: Synthetic oligonucleotide
  Target: PCSK9; (+) strand; PAM type: YTN; PAM sequence: TTA
tgcagagacaaacattatat

SEQ ID NO: 23721 - DNA, 20 bp, Artificial Sequence
  Description of Artificial Sequence: Synthetic oligonucleotide
  Target: PCSK9; (+) strand; PAM type: YTN; PAM sequence: TTA
tatatacaaatgtaaccact

SEQ ID NO: 23722 - DNA, 20 bp, Artificial Sequence
  Description of Artificial Sequence: Synthetic oligonucleotide
  Target: PCSK9; (+) strand; PAM type: YTN; PAM sequence: CTT
tattgaaatgggatcataac

SEQ ID NO: 23723 - DNA, 20 bp, Artificial Sequence
  Description of Artificial Sequence: Synthetic oligonucleotide
  Target: PCSK9; (+) strand; PAM type: YTN; PAM sequence: TTT
attgaaatgggatcataaca

SEQ ID NO: 23724 - DNA, 20 bp, Artificial Sequence
  Description of Artificial Sequence: Synthetic oligonucleotide
  Target: PCSK9; (+) strand; PAM type: YTN; PAM sequence: TTA
ttgaaatgggatcataacat

SEQ ID NO: 23725 - DNA, 20 bp, Artificial Sequence
  Description of Artificial Sequence: Synthetic oligonucleotide
  Target: PCSK9; (+) strand; PAM type: YTN; PAM sequence: TTG
aaatgggatcataacatgct

SEQ ID NO: 23726 - DNA, 20 bp, Artificial Sequence
  Description of Artificial Sequence: Synthetic oligonucleotide
  Target: PCSK9; (+) strand; PAM type: YTN; PAM sequence: CTG
tttaaaagttattgatgttg

SEQ ID NO: 23727 - DNA, 20 bp, Artificial Sequence
  Description of Artificial Sequence: Synthetic oligonucleotide
  Target: PCSK9; (+) strand; PAM type: YTN; PAM sequence: TTT
aaaagttattgatgttggac

SEQ ID NO: 23728 - DNA, 20 bp, Artificial Sequence
  Description of Artificial Sequence: Synthetic oligonucleotide
  Target: PCSK9; (+) strand; PAM type: YTN; PAM sequence: TTA
aaagttattgatgttggaca

SEQ ID NO: 23729 - DNA, 20 bp, Artificial Sequence
  Description of Artificial Sequence: Synthetic oligonucleotide
  Target: PCSK9; (+) strand; PAM type: YTN; PAM sequence: TTA
ttgatgttggacatctttcc

SEQ ID NO: 23730 - DNA, 20 bp, Artificial Sequence
  Description of Artificial Sequence: Synthetic oligonucleotide
  Target: PCSK9; (+) strand; PAM type: YTN; PAM sequence: TTG
atgttggacatctttccatg

SEQ ID NO: 23731 - DNA, 20 bp, Artificial Sequence
  Description of Artificial Sequence: Synthetic oligonucleotide
  Target: PCSK9; (+) strand; PAM type: YTN; PAM sequence: TTG
gacatctttccatgtcaata

SEQ ID NO: 23732 - DNA, 20 bp, Artificial Sequence
  Description of Artificial Sequence: Synthetic oligonucleotide
  Target: PCSK9; (+) strand; PAM type: YTN; PAM sequence: CTT
tccatgtcaatatataaacc

SEQ ID NO: 23733 - DNA, 20 bp, Artificial Sequence
  Description of Artificial Sequence: Synthetic oligonucleotide
  Target: PCSK9; (+) strand; PAM type: YTN; PAM sequence: TTT
ccatgtcaatatataaacct

SEQ ID NO: 23734 - DNA, 20 bp, Artificial Sequence
  Description of Artificial Sequence: Synthetic oligonucleotide
  Target: PCSK9; (+) strand; PAM type: YTN; PAM sequence: TTC
catgtcaatatataaacctc

SEQ ID NO: 23735 - DNA, 20 bp, Artificial Sequence
  Description of Artificial Sequence: Synthetic oligonucleotide
  Target: PCSK9; (+) strand; PAM type: YTN; PAM sequence: CTC
catttatttctttttaccag

SEQ ID NO: 23736 - DNA, 20 bp, Artificial Sequence
  Description of Artificial Sequence: Synthetic oligonucleotide
  Target: PCSK9; (+) strand; PAM type: YTN; PAM sequence: TTT
atttctttttaccagctgcc

SEQ ID NO: 23737 - DNA, 20 bp, Artificial Sequence
  Description of Artificial Sequence: Synthetic oligonucleotide
  Target: PCSK9; (+) strand; PAM type: YTN; PAM sequence: TTA
tttctttttaccagctgcca

SEQ ID NO: 23738 - DNA, 20 bp, Artificial Sequence
  Description of Artificial Sequence: Synthetic oligonucleotide
  Target: PCSK9; (+) strand; PAM type: YTN; PAM sequence: TTT
ctttttaccagctgccaaat

SEQ ID NO: 23739 - DNA, 20 bp, Artificial Sequence
  Description of Artificial Sequence: Synthetic oligonucleotide
  Target: PCSK9; (+) strand; PAM type: YTN; PAM sequence: TTC
tttttaccagctgccaaata

SEQ ID NO: 23740 - DNA, 20 bp, Artificial Sequence
  Description of Artificial Sequence: Synthetic oligonucleotide
  Target: PCSK9; (+) strand; PAM type: YTN; PAM sequence: CTT
tttaccagctgccaaatatc

SEQ ID NO: 23741 - DNA, 20 bp, Artificial Sequence
  Description of Artificial Sequence: Synthetic oligonucleotide
  Target: PCSK9; (+) strand; PAM type: YTN; PAM sequence: TTT
ttaccagctgccaaatatcc

SEQ ID NO: 23742 - DNA, 20 bp, Artificial Sequence
  Description of Artificial Sequence: Synthetic oligonucleotide
  Target: PCSK9; (+) strand; PAM type: YTN; PAM sequence: TTT
taccagctgccaaatatccc

SEQ ID NO: 23743 - DNA, 20 bp, Artificial Sequence
  Description of Artificial Sequence: Synthetic oligonucleotide
  Target: PCSK9; (+) strand; PAM type: YTN; PAM sequence: TTT
accagctgccaaatatccca

SEQ ID NO: 23744 - DNA, 20 bp, Artificial Sequence
  Description of Artificial Sequence: Synthetic oligonucleotide
  Target: PCSK9; (+) strand; PAM type: YTN; PAM sequence: TTA
ccagctgccaaatatcccac

SEQ ID NO: 23745 - DNA, 20 bp, Artificial Sequence
  Description of Artificial Sequence: Synthetic oligonucleotide
  Target: PCSK9; (+) strand; PAM type: YTN; PAM sequence: CTG
ccaaatatcccaccatatga

SEQ ID NO: 23746 - DNA, 20 bp, Artificial Sequence
  Description of Artificial Sequence: Synthetic oligonucleotide
  Target: PCSK9; (+) strand; PAM type: YTN; PAM sequence: CTA
aaatctgtccctccattgat

SEQ ID NO: 23747 - DNA, 20 bp, Artificial Sequence
  Description of Artificial Sequence: Synthetic oligonucleotide
  Target: PCSK9; (+) strand; PAM type: YTN; PAM sequence: CTG
tccctccattgatgaatgtt

SEQ ID NO: 23748 - DNA, 20 bp, Artificial Sequence
  Description of Artificial Sequence: Synthetic oligonucleotide
  Target: PCSK9; (+) strand; PAM type: YTN; PAM sequence: CTC
cattgatgaatgtttggatt

SEQ ID NO: 23749 - DNA, 20 bp, Artificial Sequence
  Description of Artificial Sequence: Synthetic oligonucleotide
  Target: PCSK9; (+) strand; PAM type: YTN; PAM sequence: TTG
atgaatgtttggattgctga

SEQ ID NO: 23750 - DNA, 20 bp, Artificial Sequence
  Description of Artificial Sequence: Synthetic oligonucleotide
  Target: PCSK9; (+) strand; PAM type: YTN; PAM sequence: TTT
ggattgctgaacccctggaa

SEQ ID NO: 23751 - DNA, 20 bp, Artificial Sequence
  Description of Artificial Sequence: Synthetic oligonucleotide
  Target: PCSK9; (+) strand; PAM type: YTN; PAM sequence: TTG
gattgctgaacccctggaag

SEQ ID NO: 23752 - DNA, 20 bp, Artificial Sequence
  Description of Artificial Sequence: Synthetic oligonucleotide
  Target: PCSK9; (+) strand; PAM type: YTN; PAM sequence: TTG
ctgaacccctggaagaaatt

SEQ ID NO: 23753 - DNA, 20 bp, Artificial Sequence
  Description of Artificial Sequence: Synthetic oligonucleotide
  Target: PCSK9; (+) strand; PAM type: YTN; PAM sequence: CTG
aacccctggaagaaattcaa

SEQ ID NO: 23754 - DNA, 20 bp, Artificial Sequence
  Description of Artificial Sequence: Synthetic oligonucleotide
  Target: PCSK9; (+) strand; PAM type: YTN; PAM sequence: CTG
gaagaaattcaataagagca

SEQ ID NO: 23755 - DNA, 20 bp, Artificial Sequence
  Description of Artificial Sequence: Synthetic oligonucleotide
  Target: PCSK9; (+) strand; PAM type: YTN; PAM sequence: TTC
aataagagcaaacagaagtg

SEQ ID NO: 23756 - DNA, 20 bp, Artificial Sequence
  Description of Artificial Sequence: Synthetic oligonucleotide
  Target: PCSK9; (+) strand; PAM type: YTN; PAM sequence: CTG
gcagatcaaagtgagagttt

SEQ ID NO: 23757 - DNA, 20 bp, Artificial Sequence
  Description of Artificial Sequence: Synthetic oligonucleotide
  Target: PCSK9; (+) strand; PAM type: YTN; PAM sequence: TTT
tattagaggagacagtaaag

SEQ ID NO: 23758 - DNA, 20 bp, Artificial Sequence
  Description of Artificial Sequence: Synthetic oligonucleotide
  Target: PCSK9; (+) strand; PAM type: YTN; PAM sequence: TTT
attagaggagacagtaaagc

SEQ ID NO: 23759 - DNA, 20 bp, Artificial Sequence
  Description of Artificial Sequence: Synthetic oligonucleotide
  Target: PCSK9; (+) strand; PAM type: YTN; PAM sequence: TTA
ttagaggagacagtaaagct

SEQ ID NO: 23760 - DNA, 20 bp, Artificial Sequence
  Description of Artificial Sequence: Synthetic oligonucleotide
  Target: PCSK9; (+) strand; PAM type: YTN; PAM sequence: TTA
gaggagacagtaaagctggt

SEQ ID NO: 23761 - DNA, 20 bp, Artificial Sequence
  Description of Artificial Sequence: Synthetic oligonucleotide
  Target: PCSK9; (+) strand; PAM type: YTN; PAM sequence: CTG
gtggagcggggagagctaag

SEQ ID NO: 23762 - DNA, 20 bp, Artificial Sequence
  Description of Artificial Sequence: Synthetic oligonucleotide
  Target: PCSK9; (+) strand; PAM type: YTN; PAM sequence: CTA
agtgaatcaacatgttgcag

SEQ ID NO: 23763 - DNA, 20 bp, Artificial Sequence
  Description of Artificial Sequence: Synthetic oligonucleotide
  Target: PCSK9; (+) strand; PAM type: YTN; PAM sequence: TTG
cagtcggagccaggactcat

SEQ ID NO: 23764 - DNA, 20 bp, Artificial Sequence
  Description of Artificial Sequence: Synthetic oligonucleotide
  Target: PCSK9; (+) strand; PAM type: YTN; PAM sequence: CTC
ataccaccccaagaggcagg

SEQ ID NO: 23765 - DNA, 20 bp, Artificial Sequence
  Description of Artificial Sequence: Synthetic oligonucleotide
  Target: PCSK9; (+) strand; PAM type: YTN; PAM sequence: CTG
aggagccatggccacagctc

SEQ ID NO: 23766 - DNA, 20 bp, Artificial Sequence
  Description of Artificial Sequence: Synthetic oligonucleotide
  Target: PCSK9; (+) strand; PAM type: YTN; PAM sequence: CTC
cctgtggctcccagcagcgg

SEQ ID NO: 23767 - DNA, 20 bp, Artificial Sequence
  Description of Artificial Sequence: Synthetic oligonucleotide
  Target: PCSK9; (+) strand; PAM type: YTN; PAM sequence: CTG
tggctcccagcagcgggacc

SEQ ID NO: 23768 - DNA, 20 bp, Artificial Sequence
  Description of Artificial Sequence: Synthetic oligonucleotide
  Target: PCSK9; (+) strand; PAM type: YTN; PAM sequence: CTC
ccagcagcgggaccagatgc

SEQ ID NO: 23769 - DNA, 20 bp, Artificial Sequence
  Description of Artificial Sequence: Synthetic oligonucleotide
  Target: PCSK9; (+) strand; PAM type: YTN; PAM sequence: CTT
cccaccccaccacatgtctg

SEQ ID NO: 23770 - DNA, 20 bp, Artificial Sequence
  Description of Artificial Sequence: Synthetic oligonucleotide
  Target: PCSK9; (+) strand; PAM type: YTN; PAM sequence: TTC
ccaccccaccacatgtctgg

SEQ ID NO: 23771 - DNA, 20 bp, Artificial Sequence
  Description of Artificial Sequence: Synthetic oligonucleotide
  Target: PCSK9; (+) strand; PAM type: YTN; PAM sequence: CTG
ggcttcctataccctgttca

SEQ ID NO: 23772 - DNA, 20 bp, Artificial Sequence
  Description of Artificial Sequence: Synthetic oligonucleotide
  Target: PCSK9; (+) strand; PAM type: YTN; PAM sequence: CTT
cctataccctgttcagtctt

SEQ ID NO: 23773 - DNA, 20 bp, Artificial Sequence
  Description of Artificial Sequence: Synthetic oligonucleotide
  Target: PCSK9; (+) strand; PAM type: YTN; PAM sequence: TTC
ctataccctgttcagtcttt

SEQ ID NO: 23774 - DNA, 20 bp, Artificial Sequence
  Description of Artificial Sequence: Synthetic oligonucleotide
  Target: PCSK9; (+) strand; PAM type: YTN; PAM sequence: CTA
taccctgttcagtctttact

SEQ ID NO: 23775 - DNA, 20 bp, Artificial Sequence
  Description of Artificial Sequence: Synthetic oligonucleotide
  Target: PCSK9; (+) strand; PAM type: YTN; PAM sequence: CTG
ttcagtctttactgagtcag

SEQ ID NO: 23776 - DNA, 20 bp, Artificial Sequence
  Description of Artificial Sequence: Synthetic oligonucleotide
  Target: PCSK9; (+) strand; PAM type: YTN; PAM sequence: TTC
agtctttactgagtcagaag

SEQ ID NO: 23777 - DNA, 20 bp, Artificial Sequence
  Description of Artificial Sequence: Synthetic oligonucleotide
  Target: PCSK9; (+) strand; PAM type: YTN; PAM sequence: CTT
tactgagtcagaagctgttt

SEQ ID NO: 23778 - DNA, 20 bp, Artificial Sequence
  Description of Artificial Sequence: Synthetic oligonucleotide
  Target: PCSK9; (+) strand; PAM type: YTN; PAM sequence: TTT
actgagtcagaagctgtttt

SEQ ID NO: 23779 - DNA, 20 bp, Artificial Sequence
  Description of Artificial Sequence: Synthetic oligonucleotide
  Target: PCSK9; (+) strand; PAM type: YTN; PAM sequence: TTA
ctgagtcagaagctgtttta

SEQ ID NO: 23780 - DNA, 20 bp, Artificial Sequence
  Description of Artificial Sequence: Synthetic oligonucleotide
  Target: PCSK9; (+) strand; PAM type: YTN; PAM sequence: CTG
agtcagaagctgttttaaga

SEQ ID NO: 23781 - DNA, 20 bp, Artificial Sequence
  Description of Artificial Sequence: Synthetic oligonucleotide
  Target: PCSK9; (+) strand; PAM type: YTN; PAM sequence: CTG
ttttaagagctgagcacacc

SEQ ID NO: 23782 - DNA, 20 bp, Artificial Sequence
  Description of Artificial Sequence: Synthetic oligonucleotide
  Target: PCSK9; (+) strand; PAM type: YTN; PAM sequence: TTT
taagagctgagcacacccat

SEQ ID NO: 23783 - DNA, 20 bp, Artificial Sequence
  Description of Artificial Sequence: Synthetic oligonucleotide
  Target: PCSK9; (+) strand; PAM type: YTN; PAM sequence: TTT
aagagctgagcacacccatt

SEQ ID NO: 23784 - DNA, 20 bp, Artificial Sequence
  Description of Artificial Sequence: Synthetic oligonucleotide
  Target: PCSK9; (+) strand; PAM type: YTN; PAM sequence: TTA
agagctgagcacacccattt

SEQ ID NO: 23785 - DNA, 20 bp, Artificial Sequence
  Description of Artificial Sequence: Synthetic oligonucleotide
  Target: PCSK9; (+) strand; PAM type: YTN; PAM sequence: CTG
agcacacccattttacagca

SEQ ID NO: 23786 - DNA, 20 bp, Artificial Sequence
  Description of Artificial Sequence: Synthetic oligonucleotide
  Target: PCSK9; (+) strand; PAM type: YTN; PAM sequence: TTT
tacagcagagcttcttacgg

SEQ ID NO: 23787 - DNA, 20 bp, Artificial Sequence
  Description of Artificial Sequence: Synthetic oligonucleotide
  Target: PCSK9; (+) strand; PAM type: YTN; PAM sequence: TTT
acagcagagcttcttacgga

SEQ ID NO: 23788 - DNA, 20 bp, Artificial Sequence
  Description of Artificial Sequence: Synthetic oligonucleotide
  Target: PCSK9; (+) strand; PAM type: YTN; PAM sequence: TTA
cagcagagcttcttacggaa

SEQ ID NO: 23789 - DNA, 20 bp, Artificial Sequence
  Description of Artificial Sequence: Synthetic oligonucleotide
  Target: PCSK9; (+) strand; PAM type: YTN; PAM sequence: CTT
cttacggaaaagcgtgctgc

SEQ ID NO: 23790 - DNA, 20 bp, Artificial Sequence
  Description of Artificial Sequence: Synthetic oligonucleotide
  Target: PCSK9; (+) strand; PAM type: YTN; PAM sequence: TTC
ttacggaaaagcgtgctgct

SEQ ID NO: 23791 - DNA, 20 bp, Artificial Sequence
  Description of Artificial Sequence: Synthetic oligonucleotide
  Target: PCSK9; (+) strand; PAM type: YTN; PAM sequence: CTT
acggaaaagcgtgctgctgt

SEQ ID NO: 23792 - DNA, 20 bp, Artificial Sequence
  Description of Artificial Sequence: Synthetic oligonucleotide
  Target: PCSK9; (+) strand; PAM type: YTN; PAM sequence: TTA
cggaaaagcgtgctgctgtc

SEQ ID NO: 23793 - DNA, 20 bp, Artificial Sequence
  Description of Artificial Sequence: Synthetic oligonucleotide
  Target: PCSK9; (+) strand; PAM type: YTN; PAM sequence: CTG
ctgtcctggaccctttgtcc

SEQ ID NO: 23794 - DNA, 20 bp, Artificial Sequence
  Description of Artificial Sequence: Synthetic oligonucleotide
  Target: PCSK9; (+) strand; PAM type: YTN; PAM sequence: CTG
tcctggaccctttgtccatc

SEQ ID NO: 23795 - DNA, 20 bp, Artificial Sequence
  Description of Artificial Sequence: Synthetic oligonucleotide
  Target: PCSK9; (+) strand; PAM type: YTN; PAM sequence: CTG
gaccctttgtccatcctggg

SEQ ID NO: 23796 - DNA, 20 bp, Artificial Sequence
  Description of Artificial Sequence: Synthetic oligonucleotide
  Target: PCSK9; (+) strand; PAM type: YTN; PAM sequence: CTT
tgtccatcctgggccattgg

SEQ ID NO: 23797 - DNA, 20 bp, Artificial Sequence
  Description of Artificial Sequence: Synthetic oligonucleotide
  Target: PCSK9; (+) strand; PAM type: YTN; PAM sequence: TTT
gtccatcctgggccattggg

SEQ ID NO: 23798 - DNA, 20 bp, Artificial Sequence
  Description of Artificial Sequence: Synthetic oligonucleotide
  Target: PCSK9; (+) strand; PAM type: YTN; PAM sequence: TTG
tccatcctgggccattgggc

SEQ ID NO: 23799 - DNA, 20 bp, Artificial Sequence
  Description of Artificial Sequence: Synthetic oligonucleotide
  Target: PCSK9; (+) strand; PAM type: YTN; PAM sequence: CTG
ggccattgggccagctccag

SEQ ID NO: 23800 - DNA, 20 bp, Artificial Sequence
  Description of Artificial Sequence: Synthetic oligonucleotide
  Target: PCSK9; (+) strand; PAM type: YTN; PAM sequence: TTG
ggccagctccagcctcatcc

SEQ ID NO: 23801 - DNA, 20 bp, Artificial Sequence
  Description of Artificial Sequence: Synthetic oligonucleotide
  Target: PCSK9; (+) strand; PAM type: YTN; PAM sequence: CTC
cagcctcatccttgaatggt

SEQ ID NO: 23802 - DNA, 20 bp, Artificial Sequence
  Description of Artificial Sequence: Synthetic oligonucleotide
  Target: PCSK9; (+) strand; PAM type: YTN; PAM sequence: CTC
atccttgaatggtgggtgta

SEQ ID NO: 23803 - DNA, 20 bp, Artificial Sequence
  Description of Artificial Sequence: Synthetic oligonucleotide
  Target: PCSK9; (+) strand; PAM type: YTN; PAM sequence: CTT
gaatggtgggtgtacatcgc

SEQ ID NO: 23804 - DNA, 20 bp, Artificial Sequence
  Description of Artificial Sequence: Synthetic oligonucleotide
  Target: PCSK9; (+) strand; PAM type: YTN; PAM sequence: TTG
aatggtgggtgtacatcgct

SEQ ID NO: 23805 - DNA, 20 bp, Artificial Sequence
  Description of Artificial Sequence: Synthetic oligonucleotide
  Target: PCSK9; (+) strand; PAM type: YTN; PAM sequence: CTG
gggtccttgctagattatat

SEQ ID NO: 23806 - DNA, 20 bp, Artificial Sequence
  Description of Artificial Sequence: Synthetic oligonucleotide
  Target: PCSK9; (+) strand; PAM type: YTN; PAM sequence: CTT
gctagattatattagggcct

SEQ ID NO: 23807 - DNA, 20 bp, Artificial Sequence
  Description of Artificial Sequence: Synthetic oligonucleotide
  Target: PCSK9; (+) strand; PAM type: YTN; PAM sequence: TTG
ctagattatattagggcctc

SEQ ID NO: 23808 - DNA, 20 bp, Artificial Sequence
  Description of Artificial Sequence: Synthetic oligonucleotide
  Target: PCSK9; (+) strand; PAM type: YTN; PAM sequence: CTA
gattatattagggcctccac

SEQ ID NO: 23809 - DNA, 20 bp, Artificial Sequence
  Description of Artificial Sequence: Synthetic oligonucleotide
  Target: PCSK9; (+) strand; PAM type: YTN; PAM sequence: TTA
tattagggcctccacacact

SEQ ID NO: 23810 - DNA, 20 bp, Artificial Sequence
  Description of Artificial Sequence: Synthetic oligonucleotide
  Target: PCSK9; (+) strand; PAM type: YTN; PAM sequence: TTA
gggcctccacacactttagt

SEQ ID NO: 23811 - DNA, 20 bp, Artificial Sequence
  Description of Artificial Sequence: Synthetic oligonucleotide
  Target: PCSK9; (+) strand; PAM type: YTN; PAM sequence: CTC
cacacactttagttgctctc

SEQ ID NO: 23812 - DNA, 20 bp, Artificial Sequence
  Description of Artificial Sequence: Synthetic oligonucleotide
  Target: PCSK9; (+) strand; PAM type: YTN; PAM sequence: CTT
tagttgctctccgtttgcac

SEQ ID NO: 23813 - DNA, 20 bp, Artificial Sequence
  Description of Artificial Sequence: Synthetic oligonucleotide
  Target: PCSK9; (+) strand; PAM type: YTN; PAM sequence: TTT
agttgctctccgtttgcaca

SEQ ID NO: 23814 - DNA, 20 bp, Artificial Sequence
  Description of Artificial Sequence: Synthetic oligonucleotide
  Target: PCSK9; (+) strand; PAM type: YTN; PAM sequence: TTA
gttgctctccgtttgcacaa

SEQ ID NO: 23815 - DNA, 20 bp, Artificial Sequence
  Description of Artificial Sequence: Synthetic oligonucleotide
  Target: PCSK9; (+) strand; PAM type: YTN; PAM sequence: TTG
ctctccgtttgcacaatgat

SEQ ID NO: 23816 - DNA, 20 bp, Artificial Sequence
  Description of Artificial Sequence: Synthetic oligonucleotide
  Target: PCSK9; (+) strand; PAM type: YTN; PAM sequence: CTC
tccgtttgcacaatgatttc

SEQ ID NO: 23817 - DNA, 20 bp, Artificial Sequence
  Description of Artificial Sequence: Synthetic oligonucleotide
  Target: PCSK9; (+) strand; PAM type: YTN; PAM sequence: CTC
cgtttgcacaatgatttcta

SEQ ID NO: 23818 - DNA, 20 bp, Artificial Sequence
  Description of Artificial Sequence: Synthetic oligonucleotide
  Target: PCSK9; (+) strand; PAM type: YTN; PAM sequence: TTT
gcacaatgatttctatatca

SEQ ID NO: 23819 - DNA, 20 bp, Artificial Sequence
  Description of Artificial Sequence: Synthetic oligonucleotide
  Target: PCSK9; (+) strand; PAM type: YTN; PAM sequence: TTG
cacaatgatttctatatcat

SEQ ID NO: 23820 - DNA, 20 bp, Artificial Sequence
  Description of Artificial Sequence: Synthetic oligonucleotide
  Target: PCSK9; (+) strand; PAM type: YTN; PAM sequence: TTT
ctatatcattagtacctctt

SEQ ID NO: 23821 - DNA, 20 bp, Artificial Sequence
  Description of Artificial Sequence: Synthetic oligonucleotide
  Target: PCSK9; (+) strand; PAM type: YTN; PAM sequence: TTC
tatatcattagtacctcttt

SEQ ID NO: 23822 - DNA, 20 bp, Artificial Sequence
  Description of Artificial Sequence: Synthetic oligonucleotide
  Target: PCSK9; (+) strand; PAM type: YTN; PAM sequence: CTA
tatcattagtacctctttgt

SEQ ID NO: 23823 - DNA, 20 bp, Artificial Sequence
  Description of Artificial Sequence: Synthetic oligonucleotide
  Target: PCSK9; (+) strand; PAM type: YTN; PAM sequence: TTA
gtacctctttgtccacttgc

SEQ ID NO: 23824 - DNA, 20 bp, Artificial Sequence
  Description of Artificial Sequence: Synthetic oligonucleotide
  Target: PCSK9; (+) strand; PAM type: YTN; PAM sequence: CTC
tttgtccacttgcctaatta

SEQ ID NO: 23825 - DNA, 20 bp, Artificial Sequence
  Description of Artificial Sequence: Synthetic oligonucleotide
  Target: PCSK9; (+) strand; PAM type: YTN; PAM sequence: CTT
tgtccacttgcctaattatt

SEQ ID NO: 23826 - DNA, 20 bp, Artificial Sequence
  Description of Artificial Sequence: Synthetic oligonucleotide
  Target: PCSK9; (+) strand; PAM type: YTN; PAM sequence: TTT
gtccacttgcctaattattt

SEQ ID NO: 23827 - DNA, 20 bp, Artificial Sequence
  Description of Artificial Sequence: Synthetic oligonucleotide
  Target: PCSK9; (+) strand; PAM type: YTN; PAM sequence: TTG
tccacttgcctaattatttc

SEQ ID NO: 23828 - DNA, 20 bp, Artificial Sequence
  Description of Artificial Sequence: Synthetic oligonucleotide
  Target: PCSK9; (+) strand; PAM type: YTN; PAM sequence: CTT
gcctaattatttccttagga

SEQ ID NO: 23829 - DNA, 20 bp, Artificial Sequence
  Description of Artificial Sequence: Synthetic oligonucleotide
  Target: PCSK9; (+) strand; PAM type: YTN; PAM sequence: TTG
cctaattatttccttaggat

SEQ ID NO: 23830 - DNA, 20 bp, Artificial Sequence
  Description of Artificial Sequence: Synthetic oligonucleotide
  Target: PCSK9; (+) strand; PAM type: YTN; PAM sequence: CTA
attatttccttaggataaat

SEQ ID NO: 23831 - DNA, 20 bp, Artificial Sequence
  Description of Artificial Sequence: Synthetic oligonucleotide
  Target: PCSK9; (+) strand; PAM type: YTN; PAM sequence: TTA
tttccttaggataaattcct

SEQ ID NO: 23832 - DNA, 20 bp, Artificial Sequence
  Description of Artificial Sequence: Synthetic oligonucleotide
  Target: PCSK9; (+) strand; PAM type: YTN; PAM sequence: TTT
ccttaggataaattcctaag

SEQ ID NO: 23833 - DNA, 20 bp, Artificial Sequence
  Description of Artificial Sequence: Synthetic oligonucleotide
  Target: PCSK9; (+) strand; PAM type: YTN; PAM sequence: TTC
cttaggataaattcctaaga

SEQ ID NO: 23834 - DNA, 20 bp, Artificial Sequence
  Description of Artificial Sequence: Synthetic oligonucleotide
  Target: PCSK9; (+) strand; PAM type: YTN; PAM sequence: CTT
aggataaattcctaagaaat

SEQ ID NO: 23835 - DNA, 20 bp, Artificial Sequence
  Description of Artificial Sequence: Synthetic oligonucleotide
  Target: PCSK9; (+) strand; PAM type: YTN; PAM sequence: TTA
ggataaattcctaagaaatc

SEQ ID NO: 23836 - DNA, 20 bp, Artificial Sequence
  Description of Artificial Sequence: Synthetic oligonucleotide
  Target: PCSK9; (+) strand; PAM type: YTN; PAM sequence: TTC
ctaagaaatcaaatagctag

SEQ ID NO: 23837 - DNA, 20 bp, Artificial Sequence
  Description of Artificial Sequence: Synthetic oligonucleotide
  Target: PCSK9; (+) strand; PAM type: YTN; PAM sequence: CTA
agaaatcaaatagctaggtc

SEQ ID NO: 23838 - DNA, 20 bp, Artificial Sequence
  Description of Artificial Sequence: Synthetic oligonucleotide
  Target: PCSK9; (+) strand; PAM type: YTN; PAM sequence: CTA
ggtcagtatatagcacattt

SEQ ID NO: 23839 - DNA, 20 bp, Artificial Sequence
  Description of Artificial Sequence: Synthetic oligonucleotide
  Target: PCSK9; (+) strand; PAM type: YTN; PAM sequence: TTT
tcacagtttgctactgacta

SEQ ID NO: 23840 - DNA, 20 bp, Artificial Sequence
  Description of Artificial Sequence: Synthetic oligonucleotide
  Target: PCSK9; (+) strand; PAM type: YTN; PAM sequence: TTT
cacagtttgctactgactag

SEQ ID NO: 23841 - DNA, 20 bp, Artificial Sequence
  Description of Artificial Sequence: Synthetic oligonucleotide
  Target: PCSK9; (+) strand; PAM type: YTN; PAM sequence: TTC
acagtttgctactgactaga

SEQ ID NO: 23842 - DNA, 20 bp, Artificial Sequence
  Description of Artificial Sequence: Synthetic oligonucleotide
  Target: PCSK9; (+) strand; PAM type: YTN; PAM sequence: TTT
gctactgactagagatatta

SEQ ID NO: 23843 - DNA, 20 bp, Artificial Sequence
  Description of Artificial Sequence: Synthetic oligonucleotide
  Target: PCSK9; (+) strand; PAM type: YTN; PAM sequence: TTG
ctactgactagagatattaa

SEQ ID NO: 23844 - DNA, 20 bp, Artificial Sequence
  Description of Artificial Sequence: Synthetic oligonucleotide
  Target: PCSK9; (+) strand; PAM type: YTN; PAM sequence: CTA
ctgactagagatattaaagg

SEQ ID NO: 23845 - DNA, 20 bp, Artificial Sequence
  Description of Artificial Sequence: Synthetic oligonucleotide
  Target: PCSK9; (+) strand; PAM type: YTN; PAM sequence: CTG
actagagatattaaaggtac

SEQ ID NO: 23846 - DNA, 20 bp, Artificial Sequence
  Description of Artificial Sequence: Synthetic oligonucleotide
  Target: PCSK9; (+) strand; PAM type: YTN; PAM sequence: CTA
gagatattaaaggtacaaaa

SEQ ID NO: 23847 - DNA, 20 bp, Artificial Sequence
  Description of Artificial Sequence: Synthetic oligonucleotide
  Target: PCSK9; (+) strand; PAM type: YTN; PAM sequence: TTA
aaggtacaaaaacagccaga

SEQ ID NO: 23848 - DNA, 20 bp, Artificial Sequence
  Description of Artificial Sequence: Synthetic oligonucleotide
  Target: PCSK9; (+) strand; PAM type: YTN; PAM sequence: TTA
gatgtagagtcgcaagggag

SEQ ID NO: 23849 - DNA, 20 bp, Artificial Sequence
  Description of Artificial Sequence: Synthetic oligonucleotide
  Target: PCSK9; (+) strand; PAM type: YTN; PAM sequence: TTT
tgttactaagacgtcatttc

SEQ ID NO: 23850 - DNA, 20 bp, Artificial Sequence
  Description of Artificial Sequence: Synthetic oligonucleotide
  Target: PCSK9; (+) strand; PAM type: YTN; PAM sequence: TTT
gttactaagacgtcatttct

SEQ ID NO: 23851 - DNA, 20 bp, Artificial Sequence
  Description of Artificial Sequence: Synthetic oligonucleotide
  Target: PCSK9; (+) strand; PAM type: YTN; PAM sequence: TTG
ttactaagacgtcatttcta

SEQ ID NO: 23852 - DNA, 20 bp, Artificial Sequence
  Description of Artificial Sequence: Synthetic oligonucleotide
  Target: PCSK9; (+) strand; PAM type: YTN; PAM sequence: TTA
ctaagacgtcatttctaatc

SEQ ID NO: 23853 - DNA, 20 bp, Artificial Sequence
  Description of Artificial Sequence: Synthetic oligonucleotide
  Target: PCSK9; (+) strand; PAM type: YTN; PAM sequence: CTA
agacgtcatttctaatcagg

SEQ ID NO: 23854 - DNA, 20 bp, Artificial Sequence
  Description of Artificial Sequence: Synthetic oligonucleotide
  Target: PCSK9; (+) strand; PAM type: YTN; PAM sequence: TTT
ctaatcagggagaaaaaatg

SEQ ID NO: 23855 - DNA, 20 bp, Artificial Sequence
  Description of Artificial Sequence: Synthetic oligonucleotide
  Target: PCSK9; (+) strand; PAM type: YTN; PAM sequence: TTC
taatcagggagaaaaaatga

SEQ ID NO: 23856 - DNA, 20 bp, Artificial Sequence
  Description of Artificial Sequence: Synthetic oligonucleotide
  Target: PCSK9; (+) strand; PAM type: YTN; PAM sequence: CTA
atcagggagaaaaaatgagt

SEQ ID NO: 23857 - DNA, 20 bp, Artificial Sequence
  Description of Artificial Sequence: Synthetic oligonucleotide
  Target: PCSK9; (+) strand; PAM type: YTN; PAM sequence: TTA
cggaataaacggtattggaa

SEQ ID NO: 23858 - DNA, 20 bp, Artificial Sequence
  Description of Artificial Sequence: Synthetic oligonucleotide
  Target: PCSK9; (+) strand; PAM type: YTN; PAM sequence: TTG
gaacaataggctagccttct

SEQ ID NO: 23859 - DNA, 20 bp, Artificial Sequence
  Description of Artificial Sequence: Synthetic oligonucleotide
  Target: PCSK9; (+) strand; PAM type: YTN; PAM sequence: CTA
gccttctggagaaaaataac

SEQ ID NO: 23860 - DNA, 20 bp, Artificial Sequence
  Description of Artificial Sequence: Synthetic oligonucleotide
  Target: PCSK9; (+) strand; PAM type: YTN; PAM sequence: CTT
ctggagaaaaataacctcac

SEQ ID NO: 23861 - DNA, 20 bp, Artificial Sequence
  Description of Artificial Sequence: Synthetic oligonucleotide
  Target: PCSK9; (+) strand; PAM type: YTN; PAM sequence: TTC
tggagaaaaataacctcact

SEQ ID NO: 23862 - DNA, 20 bp, Artificial Sequence
  Description of Artificial Sequence: Synthetic oligonucleotide
  Target: PCSK9; (+) strand; PAM type: YTN; PAM sequence: CTG
gagaaaaataacctcactcc

SEQ ID NO: 23863 - DNA, 20 bp, Artificial Sequence
  Description of Artificial Sequence: Synthetic oligonucleotide
  Target: PCSK9; (+) strand; PAM type: YTN; PAM sequence: CTC
actccttatacaaaagtaaa

SEQ ID NO: 23864 - DNA, 20 bp, Artificial Sequence
  Description of Artificial Sequence: Synthetic oligonucleotide
  Target: PCSK9; (+) strand; PAM type: YTN; PAM sequence: CTC
cttatacaaaagtaaatccc

SEQ ID NO: 23865 - DNA, 20 bp, Artificial Sequence
  Description of Artificial Sequence: Synthetic oligonucleotide
  Target: PCSK9; (+) strand; PAM type: YTN; PAM sequence: CTT
atacaaaagtaaatcccagt

SEQ ID NO: 23866 - DNA, 20 bp, Artificial Sequence
  Description of Artificial Sequence: Synthetic oligonucleotide
  Target: PCSK9; (+) strand; PAM type: YTN; PAM sequence: TTA
tacaaaagtaaatcccagtg

SEQ ID NO: 23867 - DNA, 20 bp, Artificial Sequence
  Description of Artificial Sequence: Synthetic oligonucleotide
  Target: PCSK9; (+) strand; PAM type: YTN; PAM sequence: TTA
aaaaaagatttaaaaaagga

SEQ ID NO: 23868 - DNA, 20 bp, Artificial Sequence
  Description of Artificial Sequence: Synthetic oligonucleotide
  Target: PCSK9; (+) strand; PAM type: YTN; PAM sequence: TTT
aaaaaaggaggacaattttt

SEQ ID NO: 23869 - DNA, 20 bp, Artificial Sequence
  Description of Artificial Sequence: Synthetic oligonucleotide
  Target: PCSK9; (+) strand; PAM type: YTN; PAM sequence: TTA
aaaaaggaggacaattttta

SEQ ID NO: 23870 - DNA, 20 bp, Artificial Sequence
  Description of Artificial Sequence: Synthetic oligonucleotide
  Target: PCSK9; (+) strand; PAM type: YTN; PAM sequence: TTT
ttatatgatcttgataagga

SEQ ID NO: 23871 - DNA, 20 bp, Artificial Sequence
  Description of Artificial Sequence: Synthetic oligonucleotide
  Target: PCSK9; (+) strand; PAM type: YTN; PAM sequence: TTT
tatatgatcttgataaggag

SEQ ID NO: 23872 - DNA, 20 bp, Artificial Sequence
  Description of Artificial Sequence: Synthetic oligonucleotide
  Target: PCSK9; (+) strand; PAM type: YTN; PAM sequence: TTT
atatgatcttgataaggagg

SEQ ID NO: 23873 - DNA, 20 bp, Artificial Sequence
  Description of Artificial Sequence: Synthetic oligonucleotide
  Target: PCSK9; (+) strand; PAM type: YTN; PAM sequence: TTA
tatgatcttgataaggagga

SEQ ID NO: 23874 - DNA, 20 bp, Artificial Sequence
  Description of Artificial Sequence: Synthetic oligonucleotide
  Target: PCSK9; (+) strand; PAM type: YTN; PAM sequence: CTT
gataaggaggaggcctttct

SEQ ID NO: 23875 - DNA, 20 bp, Artificial Sequence
  Description of Artificial Sequence: Synthetic oligonucleotide
  Target: PCSK9; (+) strand; PAM type: YTN; PAM sequence: TTG
ataaggaggaggcctttcta

SEQ ID NO: 23876 - DNA, 20 bp, Artificial Sequence
  Description of Artificial Sequence: Synthetic oligonucleotide
  Target: PCSK9; (+) strand; PAM type: YTN; PAM sequence: CTT
tctaagcacagtacaaaatc

SEQ ID NO: 23877 - DNA, 20 bp, Artificial Sequence
  Description of Artificial Sequence: Synthetic oligonucleotide
  Target: PCSK9; (+) strand; PAM type: YTN; PAM sequence: TTT
ctaagcacagtacaaaatca

SEQ ID NO: 23878 - DNA, 20 bp, Artificial Sequence
  Description of Artificial Sequence: Synthetic oligonucleotide
  Target: PCSK9; (+) strand; PAM type: YTN; PAM sequence: TTC
taagcacagtacaaaatcaa

SEQ ID NO: 23879 - DNA, 20 bp, Artificial Sequence
  Description of Artificial Sequence: Synthetic oligonucleotide
  Target: PCSK9; (+) strand; PAM type: YTN; PAM sequence: CTA
agcacagtacaaaatcaaga

SEQ ID NO: 23880 - DNA, 20 bp, Artificial Sequence
  Description of Artificial Sequence: Synthetic oligonucleotide
  Target: PCSK9; (+) strand; PAM type: YTN; PAM sequence: CTG
ataagtttgactccatgaaa

SEQ ID NO: 23881 - DNA, 20 bp, Artificial Sequence
  Description of Artificial Sequence: Synthetic oligonucleotide
  Target: PCSK9; (+) strand; PAM type: YTN; PAM sequence: TTT
gactccatgaaaattaaaat

SEQ ID NO: 23882 - DNA, 20 bp, Artificial Sequence
  Description of Artificial Sequence: Synthetic oligonucleotide
  Target: PCSK9; (+) strand; PAM type: YTN; PAM sequence: TTG
actccatgaaaattaaaatt

SEQ ID NO: 23883 - DNA, 20 bp, Artificial Sequence
  Description of Artificial Sequence: Synthetic oligonucleotide
  Target: PCSK9; (+) strand; PAM type: YTN; PAM sequence: CTC
catgaaaattaaaattttct

SEQ ID NO: 23884 - DNA, 20 bp, Artificial Sequence
  Description of Artificial Sequence: Synthetic oligonucleotide
  Target: PCSK9; (+) strand; PAM type: YTN; PAM sequence: TTA
aaattttctatggaaaaaaa

SEQ ID NO: 23885 - DNA, 20 bp, Artificial Sequence
  Description of Artificial Sequence: Synthetic oligonucleotide
  Target: PCSK9; (+) strand; PAM type: YTN; PAM sequence: TTT
tctatggaaaaaaatacaat

SEQ ID NO: 23886 - DNA, 20 bp, Artificial Sequence
  Description of Artificial Sequence: Synthetic oligonucleotide
  Target: PCSK9; (+) strand; PAM type: YTN; PAM sequence: TTT
ctatggaaaaaaatacaata

SEQ ID NO: 23887 - DNA, 20 bp, Artificial Sequence
  Description of Artificial Sequence: Synthetic oligonucleotide
  Target: PCSK9; (+) strand; PAM type: YTN; PAM sequence: TTC
tatggaaaaaaatacaataa

SEQ ID NO: 23888 - DNA, 20 bp, Artificial Sequence
  Description of Artificial Sequence: Synthetic oligonucleotide
  Target: PCSK9; (+) strand; PAM type: YTN; PAM sequence: CTA
tggaaaaaaatacaataaag

SEQ ID NO: 23889 - DNA, 20 bp, Artificial Sequence
  Description of Artificial Sequence: Synthetic oligonucleotide
  Target: PCSK9; (+) strand; PAM type: YTN; PAM sequence: CTG
gaaaatagatttgcaacata

SEQ ID NO: 23890 - DNA, 20 bp, Artificial Sequence
  Description of Artificial Sequence: Synthetic oligonucleotide
  Target: PCSK9; (+) strand; PAM type: YTN; PAM sequence: TTT
gcaacatacataagagacag

SEQ ID NO: 23891 - DNA, 20 bp, Artificial Sequence
  Description of Artificial Sequence: Synthetic oligonucleotide
  Target: PCSK9; (+) strand; PAM type: YTN; PAM sequence: TTG
caacatacataagagacagc

SEQ ID NO: 23892 - DNA, 20 bp, Artificial Sequence
  Description of Artificial Sequence: Synthetic oligonucleotide
  Target: PCSK9; (+) strand; PAM type: YTN; PAM sequence: CTA
attttggtattatacataaa

SEQ ID NO: 23893 - DNA, 20 bp, Artificial Sequence
  Description of Artificial Sequence: Synthetic oligonucleotide
  Target: PCSK9; (+) strand; PAM type: YTN; PAM sequence: TTT
tggtattatacataaaaagc

SEQ ID NO: 23894 - DNA, 20 bp, Artificial Sequence
  Description of Artificial Sequence: Synthetic oligonucleotide
  Target: PCSK9; (+) strand; PAM type: YTN; PAM sequence: TTT
ggtattatacataaaaagct

SEQ ID NO: 23895 - DNA, 20 bp, Artificial Sequence
  Description of Artificial Sequence: Synthetic oligonucleotide
  Target: PCSK9; (+) strand; PAM type: YTN; PAM sequence: TTG
gtattatacataaaaagcta

SEQ ID NO: 23896 - DNA, 20 bp, Artificial Sequence
  Description of Artificial Sequence: Synthetic oligonucleotide
  Target: PCSK9; (+) strand; PAM type: YTN; PAM sequence: TTA
tacataaaaagctattacaa

SEQ ID NO: 23897 - DNA, 20 bp, Artificial Sequence
  Description of Artificial Sequence: Synthetic oligonucleotide
  Target: PCSK9; (+) strand; PAM type: YTN; PAM sequence: CTA
ttacaaatcatcaaacaaaa

SEQ ID NO: 23898 - DNA, 20 bp, Artificial Sequence
  Description of Artificial Sequence: Synthetic oligonucleotide
  Target: PCSK9; (+) strand; PAM type: YTN; PAM sequence: TTA
caaatcatcaaacaaaagct

SEQ ID NO: 23899 - DNA, 20 bp, Artificial Sequence
  Description of Artificial Sequence: Synthetic oligonucleotide
  Target: PCSK9; (+) strand; PAM type: YTN; PAM sequence: CTC
cacagccaaaatgaaaaaat

SEQ ID NO: 23900 - DNA, 20 bp, Artificial Sequence
  Description of Artificial Sequence: Synthetic oligonucleotide
  Target: PCSK9; (+) strand; PAM type: YTN; PAM sequence: TTC
aaagacaaacaaatgtagat

SEQ ID NO: 23901 - DNA, 20 bp, Artificial Sequence
  Description of Artificial Sequence: Synthetic oligonucleotide
  Target: PCSK9; (+) strand; PAM type: YTN; PAM sequence: TTG
tttaacttaaggaaaggtca

SEQ ID NO: 23902 - DNA, 20 bp, Artificial Sequence
  Description of Artificial Sequence: Synthetic oligonucleotide
  Target: PCSK9; (+) strand; PAM type: YTN; PAM sequence: TTT
aacttaaggaaaggtcaaaa

SEQ ID NO: 23903 - DNA, 20 bp, Artificial Sequence
  Description of Artificial Sequence: Synthetic oligonucleotide
  Target: PCSK9; (+) strand; PAM type: YTN; PAM sequence: TTA
acttaaggaaaggtcaaaat

SEQ ID NO: 23904 - DNA, 20 bp, Artificial Sequence
  Description of Artificial Sequence: Synthetic oligonucleotide
  Target: PCSK9; (+) strand; PAM type: YTN; PAM sequence: CTT
aaggaaaggtcaaaatattt

SEQ ID NO: 23905 - DNA, 20 bp, Artificial Sequence
  Description of Artificial Sequence: Synthetic oligonucleotide
  Target: PCSK9; (+) strand; PAM type: YTN; PAM sequence: TTA
aggaaaggtcaaaatatttg

SEQ ID NO: 23906 - DNA, 20 bp, Artificial Sequence
  Description of Artificial Sequence: Synthetic oligonucleotide
  Target: PCSK9; (+) strand; PAM type: YTN; PAM sequence: TTT
ggcaactctgtgttggcctg

SEQ ID NO: 23907 - DNA, 20 bp, Artificial Sequence
  Description of Artificial Sequence: Synthetic oligonucleotide
  Target: PCSK9; (+) strand; PAM type: YTN; PAM sequence: TTG
gcaactctgtgttggcctgg

SEQ ID NO: 23908 - DNA, 20 bp, Artificial Sequence
  Description of Artificial Sequence: Synthetic oligonucleotide
  Target: PCSK9; (+) strand; PAM type: YTN; PAM sequence: CTC
tgtgttggcctgggtgtgac

SEQ ID NO: 23909 - DNA, 20 bp, Artificial Sequence
  Description of Artificial Sequence: Synthetic oligonucleotide
  Target: PCSK9; (+) strand; PAM type: YTN; PAM sequence: CTG
tgttggcctgggtgtgacca

SEQ ID NO: 23910 - DNA, 20 bp, Artificial Sequence
  Description of Artificial Sequence: Synthetic oligonucleotide
  Target: PCSK9; (+) strand; PAM type: YTN; PAM sequence: TTG
gcctgggtgtgaccatgagc

SEQ ID NO: 23911 - DNA, 20 bp, Artificial Sequence
  Description of Artificial Sequence: Synthetic oligonucleotide
  Target: PCSK9; (+) strand; PAM type: YTN; PAM sequence: CTG
ggtgtgaccatgagcggtag

SEQ ID NO: 23912 - DNA, 20 bp, Artificial Sequence
  Description of Artificial Sequence: Synthetic oligonucleotide
  Target: PCSK9; (+) strand; PAM type: YTN; PAM sequence: TTG
ccagtggtattcacaaatat

SEQ ID NO: 23913 - DNA, 20 bp, Artificial Sequence
  Description of Artificial Sequence: Synthetic oligonucleotide
  Target: PCSK9; (+) strand; PAM type: YTN; PAM sequence: TTC
acaaatataccctttctcct

SEQ ID NO: 23914 - DNA, 20 bp, Artificial Sequence
  Description of Artificial Sequence: Synthetic oligonucleotide
  Target: PCSK9; (+) strand; PAM type: YTN; PAM sequence: CTT
tctcctccttctgggcactt

SEQ ID NO: 23915 - DNA, 20 bp, Artificial Sequence
  Description of Artificial Sequence: Synthetic oligonucleotide
  Target: PCSK9; (+) strand; PAM type: YTN; PAM sequence: TTT
ctcctccttctgggcacttg

SEQ ID NO: 23916 - DNA, 20 bp, Artificial Sequence
  Description of Artificial Sequence: Synthetic oligonucleotide
  Target: PCSK9; (+) strand; PAM type: YTN; PAM sequence: TTC
tcctccttctgggcacttgg

SEQ ID NO: 23917 - DNA, 20 bp, Artificial Sequence
  Description of Artificial Sequence: Synthetic oligonucleotide
  Target: PCSK9; (+) strand; PAM type: YTN; PAM sequence: CTC
ctccttctgggcacttggtg

SEQ ID NO: 23918 - DNA, 20 bp, Artificial Sequence
  Description of Artificial Sequence: Synthetic oligonucleotide
  Target: PCSK9; (+) strand; PAM type: YTN; PAM sequence: CTC
cttctgggcacttggtgtga

SEQ ID NO: 23919 - DNA, 20 bp, Artificial Sequence
  Description of Artificial Sequence: Synthetic oligonucleotide
  Target: PCSK9; (+) strand; PAM type: YTN; PAM sequence: CTT
ctgggcacttggtgtgattg

SEQ ID NO: 23920 - DNA, 20 bp, Artificial Sequence
  Description of Artificial Sequence: Synthetic oligonucleotide
  Target: PCSK9; (+) strand; PAM type: YTN; PAM sequence: TTC
tgggcacttggtgtgattgc

SEQ ID NO: 23921 - DNA, 20 bp, Artificial Sequence
  Description of Artificial Sequence: Synthetic oligonucleotide
  Target: PCSK9; (+) strand; PAM type: YTN; PAM sequence: CTG
ggcacttggtgtgattgcag

SEQ ID NO: 23922 - DNA, 20 bp, Artificial Sequence
  Description of Artificial Sequence: Synthetic oligonucleotide
  Target: PCSK9; (+) strand; PAM type: YTN; PAM sequence: CTT
ggtgtgattgcagtttccta

SEQ ID NO: 23923 - DNA, 20 bp, Artificial Sequence
  Description of Artificial Sequence: Synthetic oligonucleotide
  Target: PCSK9; (+) strand; PAM type: YTN; PAM sequence: TTG
gtgtgattgcagtttcctac

SEQ ID NO: 23924 - DNA, 20 bp, Artificial Sequence
  Description of Artificial Sequence: Synthetic oligonucleotide
  Target: PCSK9; (+) strand; PAM type: YTN; PAM sequence: TTG
cagtttcctacatttgacct

SEQ ID NO: 23925 - DNA, 20 bp, Artificial Sequence
  Description of Artificial Sequence: Synthetic oligonucleotide
  Target: PCSK9; (+) strand; PAM type: YTN; PAM sequence: TTT
cctacatttgaccttaggtg

SEQ ID NO: 23926 - DNA, 20 bp, Artificial Sequence
  Description of Artificial Sequence: Synthetic oligonucleotide
  Target: PCSK9; (+) strand; PAM type: YTN; PAM sequence: TTC
ctacatttgaccttaggtgt

SEQ ID NO: 23927 - DNA, 20 bp, Artificial Sequence
  Description of Artificial Sequence: Synthetic oligonucleotide
  Target: PCSK9; (+) strand; PAM type: YTN; PAM sequence: CTA
catttgaccttaggtgtggt

SEQ ID NO: 23928 - DNA, 20 bp, Artificial Sequence
  Description of Artificial Sequence: Synthetic oligonucleotide
  Target: PCSK9; (+) strand; PAM type: YTN; PAM sequence: TTT
gaccttaggtgtggtcatgt

SEQ ID NO: 23929 - DNA, 20 bp, Artificial Sequence
  Description of Artificial Sequence: Synthetic oligonucleotide
  Target: PCSK9; (+) strand; PAM type: YTN; PAM sequence: TTG
accttaggtgtggtcatgtg

SEQ ID NO: 23930 - DNA, 20 bp, Artificial Sequence
  Description of Artificial Sequence: Synthetic oligonucleotide
  Target: PCSK9; (+) strand; PAM type: YTN; PAM sequence: CTT
aggtgtggtcatgtgtctcg

SEQ ID NO: 23931 - DNA, 20 bp, Artificial Sequence
  Description of Artificial Sequence: Synthetic oligonucleotide
  Target: PCSK9; (+) strand; PAM type: YTN; PAM sequence: TTA
ggtgtggtcatgtgtctcgc

SEQ ID NO: 23932 - DNA, 20 bp, Artificial Sequence
  Description of Artificial Sequence: Synthetic oligonucleotide
  Target: PCSK9; (+) strand; PAM type: YTN; PAM sequence: CTC
gcttaggagaaggaaatgtg

SEQ ID NO: 23933 - DNA, 20 bp, Artificial Sequence
  Description of Artificial Sequence: Synthetic oligonucleotide
  Target: PCSK9; (+) strand; PAM type: YTN; PAM sequence: CTT
aggagaaggaaatgtgaacg

SEQ ID NO: 23934 - DNA, 20 bp, Artificial Sequence
  Description of Artificial Sequence: Synthetic oligonucleotide
  Target: PCSK9; (+) strand; PAM type: YTN; PAM sequence: TTA
ggagaaggaaatgtgaacgg

SEQ ID NO: 23935 - DNA, 20 bp, Artificial Sequence
  Description of Artificial Sequence: Synthetic oligonucleotide
  Target: PCSK9; (+) strand; PAM type: YTN; PAM sequence: TTG
tgggtcacttttgtgtggaa

SEQ ID NO: 23936 - DNA, 20 bp, Artificial Sequence
  Description of Artificial Sequence: Synthetic oligonucleotide
  Target: PCSK9; (+) strand; PAM type: YTN; PAM sequence: CTT
ttgtgtggaagctgcatgga

SEQ ID NO: 23937 - DNA, 20 bp, Artificial Sequence
  Description of Artificial Sequence: Synthetic oligonucleotide
  Target: PCSK9; (+) strand; PAM type: YTN; PAM sequence: TTT
tgtgtggaagctgcatggag

SEQ ID NO: 23938 - DNA, 20 bp, Artificial Sequence
  Description of Artificial Sequence: Synthetic oligonucleotide
  Target: PCSK9; (+) strand; PAM type: YTN; PAM sequence: TTT
gtgtggaagctgcatggagt

SEQ ID NO: 23939 - DNA, 20 bp, Artificial Sequence
  Description of Artificial Sequence: Synthetic oligonucleotide
  Target: PCSK9; (+) strand; PAM type: YTN; PAM sequence: TTG
tgtggaagctgcatggagtc

SEQ ID NO: 23940 - DNA, 20 bp, Artificial Sequence
  Description of Artificial Sequence: Synthetic oligonucleotide
  Target: PCSK9; (+) strand; PAM type: YTN; PAM sequence: CTG
catggagtcacctctttgct

SEQ ID NO: 23941 - DNA, 20 bp, Artificial Sequence
  Description of Artificial Sequence: Synthetic oligonucleotide
  Target: PCSK9; (+) strand; PAM type: YTN; PAM sequence: CTC
tttgctttccgtcagcctca

SEQ ID NO: 23942 - DNA, 20 bp, Artificial Sequence
  Description of Artificial Sequence: Synthetic oligonucleotide
  Target: PCSK9; (+) strand; PAM type: YTN; PAM sequence: CTT
tgctttccgtcagcctcagt

SEQ ID NO: 23943 - DNA, 20 bp, Artificial Sequence
  Description of Artificial Sequence: Synthetic oligonucleotide
  Target: PCSK9; (+) strand; PAM type: YTN; PAM sequence: TTT
gctttccgtcagcctcagtg

SEQ ID NO: 23944 - DNA, 20 bp, Artificial Sequence
  Description of Artificial Sequence: Synthetic oligonucleotide
  Target: PCSK9; (+) strand; PAM type: YTN; PAM sequence: TTG
ctttccgtcagcctcagtgt

SEQ ID NO: 23945 - DNA, 20 bp, Artificial Sequence
  Description of Artificial Sequence: Synthetic oligonucleotide
  Target: PCSK9; (+) strand; PAM type: YTN; PAM sequence: CTT
tccgtcagcctcagtgttca

SEQ ID NO: 23946 - DNA, 20 bp, Artificial Sequence
  Description of Artificial Sequence: Synthetic oligonucleotide
  Target: PCSK9; (+) strand; PAM type: YTN; PAM sequence: TTT
ccgtcagcctcagtgttcag

SEQ ID NO: 23947 - DNA, 20 bp, Artificial Sequence
  Description of Artificial Sequence: Synthetic oligonucleotide
  Target: PCSK9; (+) strand; PAM type: YTN; PAM sequence: TTC
cgtcagcctcagtgttcagc

SEQ ID NO: 23948 - DNA, 20 bp, Artificial Sequence
  Description of Artificial Sequence: Synthetic oligonucleotide
  Target: PCSK9; (+) strand; PAM type: YTN; PAM sequence: CTC
agtgttcagcaatgttctga

SEQ ID NO: 23949 - DNA, 20 bp, Artificial Sequence
  Description of Artificial Sequence: Synthetic oligonucleotide
  Target: PCSK9; (+) strand; PAM type: YTN; PAM sequence: TTC
agcaatgttctgaatgatgg

SEQ ID NO: 23950 - DNA, 20 bp, Artificial Sequence
  Description of Artificial Sequence: Synthetic oligonucleotide
  Target: PCSK9; (+) strand; PAM type: YTN; PAM sequence: TTC
tgaatgatggttgctttatc

SEQ ID NO: 23951 - DNA, 20 bp, Artificial Sequence
  Description of Artificial Sequence: Synthetic oligonucleotide
  Target: PCSK9; (+) strand; PAM type: YTN; PAM sequence: CTG
aatgatggttgctttatcag

SEQ ID NO: 23952 - DNA, 20 bp, Artificial Sequence
  Description of Artificial Sequence: Synthetic oligonucleotide
  Target: PCSK9; (+) strand; PAM type: YTN; PAM sequence: TTG
ctttatcagtctggttctgg

SEQ ID NO: 23953 - DNA, 20 bp, Artificial Sequence
  Description of Artificial Sequence: Synthetic oligonucleotide
  Target: PCSK9; (+) strand; PAM type: YTN; PAM sequence: CTT
tatcagtctggttctggggt

SEQ ID NO: 23954 - DNA, 20 bp, Artificial Sequence
  Description of Artificial Sequence: Synthetic oligonucleotide
  Target: PCSK9; (+) strand; PAM type: YTN; PAM sequence: TTT
atcagtctggttctggggtg

SEQ ID NO: 23955 - DNA, 20 bp, Artificial Sequence
  Description of Artificial Sequence: Synthetic oligonucleotide
  Target: PCSK9; (+) strand; PAM type: YTN; PAM sequence: TTA
tcagtctggttctggggtga

SEQ ID NO: 23956 - DNA, 20 bp, Artificial Sequence
  Description of Artificial Sequence: Synthetic oligonucleotide
  Target: PCSK9; (+) strand; PAM type: YTN; PAM sequence: CTG
gttctggggtgagggtaatg

SEQ ID NO: 23957 - DNA, 20 bp, Artificial Sequence
  Description of Artificial Sequence: Synthetic oligonucleotide
  Target: PCSK9; (+) strand; PAM type: YTN; PAM sequence: TTC
tggggtgagggtaatgaagt

SEQ ID NO: 23958 - DNA, 20 bp, Artificial Sequence
  Description of Artificial Sequence: Synthetic oligonucleotide
  Target: PCSK9; (+) strand; PAM type: YTN; PAM sequence: CTG
gggtgagggtaatgaagtag

SEQ ID NO: 23959 - DNA, 20 bp, Artificial Sequence
  Description of Artificial Sequence: Synthetic oligonucleotide
  Target: PCSK9; (+) strand; PAM type: YTN; PAM sequence: CTT
gatggacatgtgaggtgaga

SEQ ID NO: 23960 - DNA, 20 bp, Artificial Sequence
  Description of Artificial Sequence: Synthetic oligonucleotide
  Target: PCSK9; (+) strand; PAM type: YTN; PAM sequence: TTG
atggacatgtgaggtgagac

SEQ ID NO: 23961 - DNA, 20 bp, Artificial Sequence
  Description of Artificial Sequence: Synthetic oligonucleotide
  Target: PCSK9; (+) strand; PAM type: YTN; PAM sequence: CTT
tgacatttcaagcccctgag

SEQ ID NO: 23962 - DNA, 20 bp, Artificial Sequence
  Description of Artificial Sequence: Synthetic oligonucleotide
  Target: PCSK9; (+) strand; PAM type: YTN; PAM sequence: TTT
gacatttcaagcccctgaga

SEQ ID NO: 23963 - DNA, 20 bp, Artificial Sequence
  Description of Artificial Sequence: Synthetic oligonucleotide
  Target: PCSK9; (+) strand; PAM type: YTN; PAM sequence: TTG
acatttcaagcccctgagat

SEQ ID NO: 23964 - DNA, 20 bp, Artificial Sequence
  Description of Artificial Sequence: Synthetic oligonucleotide
  Target: PCSK9; (+) strand; PAM type: YTN; PAM sequence: TTT
caagcccctgagatttgggg

SEQ ID NO: 23965 - DNA, 20 bp, Artificial Sequence
  Description of Artificial Sequence: Synthetic oligonucleotide
  Target: PCSK9; (+) strand; PAM type: YTN; PAM sequence: TTC
aagcccctgagatttggggc

SEQ ID NO: 23966 - DNA, 20 bp, Artificial Sequence
  Description of Artificial Sequence: Synthetic oligonucleotide
  Target: PCSK9; (+) strand; PAM type: YTN; PAM sequence: CTG
agatttggggcgtgcatgtg

SEQ ID NO: 23967 - DNA, 20 bp, Artificial Sequence
  Description of Artificial Sequence: Synthetic oligonucleotide
  Target: PCSK9; (+) strand; PAM type: YTN; PAM sequence: TTT
ggggcgtgcatgtgctggaa

SEQ ID NO: 23968 - DNA, 20 bp, Artificial Sequence
  Description of Artificial Sequence: Synthetic oligonucleotide
  Target: PCSK9; (+) strand; PAM type: YTN; PAM sequence: TTG
gggcgtgcatgtgctggaag

SEQ ID NO: 23969 - DNA, 20 bp, Artificial Sequence
  Description of Artificial Sequence: Synthetic oligonucleotide
  Target: PCSK9; (+) strand; PAM type: YTN; PAM sequence: CTG
gaagcagaacctagcctatt

SEQ ID NO: 23970 - DNA, 20 bp, Artificial Sequence
  Description of Artificial Sequence: Synthetic oligonucleotide
  Target: PCSK9; (+) strand; PAM type: YTN; PAM sequence: CTA
gcctattctgatggattcct

SEQ ID NO: 23971 - DNA, 20 bp, Artificial Sequence
  Description of Artificial Sequence: Synthetic oligonucleotide
  Target: PCSK9; (+) strand; PAM type: YTN; PAM sequence: CTA
ttctgatggattcctccagc

SEQ ID NO: 23972 - DNA, 20 bp, Artificial Sequence
  Description of Artificial Sequence: Synthetic oligonucleotide
  Target: PCSK9; (+) strand; PAM type: YTN; PAM sequence: TTC
tgatggattcctccagcact

SEQ ID NO: 23973 - DNA, 20 bp, Artificial Sequence
  Description of Artificial Sequence: Synthetic oligonucleotide
  Target: PCSK9; (+) strand; PAM type: YTN; PAM sequence: CTG
atggattcctccagcactgc

SEQ ID NO: 23974 - DNA, 20 bp, Artificial Sequence
  Description of Artificial Sequence: Synthetic oligonucleotide
  Target: PCSK9; (+) strand; PAM type: YTN; PAM sequence: TTC
ctccagcactgctcgtggga

SEQ ID NO: 23975 - DNA, 20 bp, Artificial Sequence
  Description of Artificial Sequence: Synthetic oligonucleotide
  Target: PCSK9; (+) strand; PAM type: YTN; PAM sequence: CTC
cagcactgctcgtgggaaga

SEQ ID NO: 23976 - DNA, 20 bp, Artificial Sequence
  Description of Artificial Sequence: Synthetic oligonucleotide
  Target: PCSK9; (+) strand; PAM type: YTN; PAM sequence: CTG
ctcgtgggaagacatcatca

SEQ ID NO: 23977 - DNA, 20 bp, Artificial Sequence
  Description of Artificial Sequence: Synthetic oligonucleotide
  Target: PCSK9; (+) strand; PAM type: YTN; PAM sequence: CTC
gtgggaagacatcatcaata

SEQ ID NO: 23978 - DNA, 20 bp, Artificial Sequence
  Description of Artificial Sequence: Synthetic oligonucleotide
  Target: PCSK9; (+) strand; PAM type: YTN; PAM sequence: TTC
atgtgccctttatctcgaaa

SEQ ID NO: 23979 - DNA, 20 bp, Artificial Sequence
  Description of Artificial Sequence: Synthetic oligonucleotide
  Target: PCSK9; (+) strand; PAM type: YTN; PAM sequence: CTT
tatctcgaaattccacttcc

SEQ ID NO: 23980 - DNA, 20 bp, Artificial Sequence
  Description of Artificial Sequence: Synthetic oligonucleotide
  Target: PCSK9; (+) strand; PAM type: YTN; PAM sequence: TTT
atctcgaaattccacttcca

SEQ ID NO: 23981 - DNA, 20 bp, Artificial Sequence
  Description of Artificial Sequence: Synthetic oligonucleotide
  Target: PCSK9; (+) strand; PAM type: YTN; PAM sequence: TTA
tctcgaaattccacttccag

SEQ ID NO: 23982 - DNA, 20 bp, Artificial Sequence
  Description of Artificial Sequence: Synthetic oligonucleotide
  Target: PCSK9; (+) strand; PAM type: YTN; PAM sequence: CTC
gaaattccacttccaggaat

SEQ ID NO: 23983 - DNA, 20 bp, Artificial Sequence
  Description of Artificial Sequence: Synthetic oligonucleotide
  Target: PCSK9; (+) strand; PAM type: YTN; PAM sequence: TTC
cacttccaggaatttatgaa

SEQ ID NO: 23984 - DNA, 20 bp, Artificial Sequence
  Description of Artificial Sequence: Synthetic oligonucleotide
  Target: PCSK9; (+) strand; PAM type: YTN; PAM sequence: CTT
ccaggaatttatgaaacaga

SEQ ID NO: 23985 - DNA, 20 bp, Artificial Sequence
  Description of Artificial Sequence: Synthetic oligonucleotide
  Target: PCSK9; (+) strand; PAM type: YTN; PAM sequence: TTC
caggaatttatgaaacagat

SEQ ID NO: 23986 - DNA, 20 bp, Artificial Sequence
  Description of Artificial Sequence: Synthetic oligonucleotide
  Target: PCSK9; (+) strand; PAM type: YTN; PAM sequence: TTT
atgaaacagatactctcaca

SEQ ID NO: 23987 - DNA, 20 bp, Artificial Sequence
  Description of Artificial Sequence: Synthetic oligonucleotide
  Target: PCSK9; (+) strand; PAM type: YTN; PAM sequence: TTA
tgaaacagatactctcacat

SEQ ID NO: 23988 - DNA, 20 bp, Artificial Sequence
  Description of Artificial Sequence: Synthetic oligonucleotide
  Target: PCSK9; (+) strand; PAM type: YTN; PAM sequence: CTC
tcacatgtgcaaacagctat

SEQ ID NO: 23989 - DNA, 20 bp, Artificial Sequence
  Description of Artificial Sequence: Synthetic oligonucleotide
  Target: PCSK9; (+) strand; PAM type: YTN; PAM sequence: CTC
acatgtgcaaacagctatgg

SEQ ID NO: 23990 - DNA, 20 bp, Artificial Sequence
  Description of Artificial Sequence: Synthetic oligonucleotide
  Target: PCSK9; (+) strand; PAM type: YTN; PAM sequence: CTA
tggataaggacagacatggc

SEQ ID NO: 23991 - DNA, 20 bp, Artificial Sequence
  Description of Artificial Sequence: Synthetic oligonucleotide
  Target: PCSK9; (+) strand; PAM type: YTN; PAM sequence: CTT
ggattgcaatagcaaaagac

SEQ ID NO: 23992 - DNA, 20 bp, Artificial Sequence
  Description of Artificial Sequence: Synthetic oligonucleotide
  Target: PCSK9; (+) strand; PAM type: YTN; PAM sequence: TTG
gattgcaatagcaaaagaca

SEQ ID NO: 23993 - DNA, 20 bp, Artificial Sequence
  Description of Artificial Sequence: Synthetic oligonucleotide
  Target: PCSK9; (+) strand; PAM type: YTN; PAM sequence: TTG
caatagcaaaagacagaaac

SEQ ID NO: 23994 - DNA, 20 bp, Artificial Sequence
  Description of Artificial Sequence: Synthetic oligonucleotide
  Target: PCSK9; (+) strand; PAM type: YTN; PAM sequence: TTG
gctaaagacattgtgaaaca

SEQ ID NO: 23995 - DNA, 20 bp, Artificial Sequence
  Description of Artificial Sequence: Synthetic oligonucleotide
  Target: PCSK9; (+) strand; PAM type: YTN; PAM sequence: CTA
aagacattgtgaaacataca

SEQ ID NO: 23996 - DNA, 20 bp, Artificial Sequence
  Description of Artificial Sequence: Synthetic oligonucleotide
  Target: PCSK9; (+) strand; PAM type: YTN; PAM sequence: TTG
tgaaacatacatagaatgaa

SEQ ID NO: 23997 - DNA, 20 bp, Artificial Sequence
  Description of Artificial Sequence: Synthetic oligonucleotide
  Target: PCSK9; (+) strand; PAM type: YTN; PAM sequence: CTG
caaccagaaaaataaggcag

SEQ ID NO: 23998 - DNA, 20 bp, Artificial Sequence
  Description of Artificial Sequence: Synthetic oligonucleotide
  Target: PCSK9; (+) strand; PAM type: YTN; PAM sequence: TTT
ttattccgagattagggcta

SEQ ID NO: 23999 - DNA, 20 bp, Artificial Sequence
  Description of Artificial Sequence: Synthetic oligonucleotide
  Target: PCSK9; (+) strand; PAM type: YTN; PAM sequence: TTT
tattccgagattagggctag

SEQ ID NO: 24000 - DNA, 20 bp, Artificial Sequence
  Description of Artificial Sequence: Synthetic oligonucleotide
  Target: PCSK9; (+) strand; PAM type: YTN; PAM sequence: TTT
attccgagattagggctagg

SEQ ID NO: 24001 - DNA, 20 bp, Artificial Sequence
  Description of Artificial Sequence: Synthetic oligonucleotide
  Target: PCSK9; (+) strand; PAM type: YTN; PAM sequence: TTA
ttccgagattagggctaggt

SEQ ID NO: 24002 - DNA, 20 bp, Artificial Sequence
  Description of Artificial Sequence: Synthetic oligonucleotide
  Target: PCSK9; (+) strand; PAM type: YTN; PAM sequence: TTC
cgagattagggctaggttaa

SEQ ID NO: 24003 - DNA, 20 bp, Artificial Sequence
  Description of Artificial Sequence: Synthetic oligonucleotide
  Target: PCSK9; (+) strand; PAM type: YTN; PAM sequence: TTA
gggctaggttaagacgtcag

SEQ ID NO: 24004 - DNA, 20 bp, Artificial Sequence
  Description of Artificial Sequence: Synthetic oligonucleotide
  Target: PCSK9; (+) strand; PAM type: YTN; PAM sequence: CTA
ggttaagacgtcagattaag

SEQ ID NO: 24005 - DNA, 20 bp, Artificial Sequence
  Description of Artificial Sequence: Synthetic oligonucleotide
  Target: PCSK9; (+) strand; PAM type: YTN; PAM sequence: TTA
agacgtcagattaagttgtc

SEQ ID NO: 24006 - DNA, 20 bp, Artificial Sequence
  Description of Artificial Sequence: Synthetic oligonucleotide
  Target: PCSK9; (+) strand; PAM type: YTN; PAM sequence: TTA
agttgtccctctccacccca

SEQ ID NO: 24007 - DNA, 20 bp, Artificial Sequence
  Description of Artificial Sequence: Synthetic oligonucleotide
  Target: PCSK9; (+) strand; PAM type: YTN; PAM sequence: TTG
tccctctccaccccaccaat

SEQ ID NO: 24008 - DNA, 20 bp, Artificial Sequence
  Description of Artificial Sequence: Synthetic oligonucleotide
  Target: PCSK9; (+) strand; PAM type: YTN; PAM sequence: CTC
tccaccccaccaatataaat

SEQ ID NO: 24009 - DNA, 20 bp, Artificial Sequence
  Description of Artificial Sequence: Synthetic oligonucleotide
  Target: PCSK9; (+) strand; PAM type: YTN; PAM sequence: CTC
caccccaccaatataaataa

SEQ ID NO: 24010 - DNA, 20 bp, Artificial Sequence
  Description of Artificial Sequence: Synthetic oligonucleotide
  Target: PCSK9; (+) strand; PAM type: YTN; PAM sequence: TTA
aaagtaaatcataaactatt

SEQ ID NO: 24011 - DNA, 20 bp, Artificial Sequence
  Description of Artificial Sequence: Synthetic oligonucleotide
  Target: PCSK9; (+) strand; PAM type: YTN; PAM sequence: CTA
tttttacaattttaaaaagt

SEQ ID NO: 24012 - DNA, 20 bp, Artificial Sequence
  Description of Artificial Sequence: Synthetic oligonucleotide
  Target: PCSK9; (+) strand; PAM type: YTN; PAM sequence: TTT
ttacaattttaaaaagtggg

SEQ ID NO: 24013 - DNA, 20 bp, Artificial Sequence
  Description of Artificial Sequence: Synthetic oligonucleotide
  Target: PCSK9; (+) strand; PAM type: YTN; PAM sequence: TTT
tacaattttaaaaagtgggt

SEQ ID NO: 24014 - DNA, 20 bp, Artificial Sequence
  Description of Artificial Sequence: Synthetic oligonucleotide
  Target: PCSK9; (+) strand; PAM type: YTN; PAM sequence: TTT
acaattttaaaaagtgggtt

SEQ ID NO: 24015 - DNA, 20 bp, Artificial Sequence
  Description of Artificial Sequence: Synthetic oligonucleotide
  Target: PCSK9; (+) strand; PAM type: YTN; PAM sequence: TTA
caattttaaaaagtgggtta

SEQ ID NO: 24016 - DNA, 20 bp, Artificial Sequence
  Description of Artificial Sequence: Synthetic oligonucleotide
  Target: PCSK9; (+) strand; PAM type: YTN; PAM sequence: TTT
taaaaagtgggttaaagagc

SEQ ID NO: 24017 - DNA, 20 bp, Artificial Sequence
  Description of Artificial Sequence: Synthetic oligonucleotide
  Target: PCSK9; (+) strand; PAM type: YTN; PAM sequence: TTT
aaaaagtgggttaaagagcc

SEQ ID NO: 24018 - DNA, 20 bp, Artificial Sequence
  Description of Artificial Sequence: Synthetic oligonucleotide
  Target: PCSK9; (+) strand; PAM type: YTN; PAM sequence: TTA
aaaagtgggttaaagagccc

SEQ ID NO: 24019 - DNA, 20 bp, Artificial Sequence
  Description of Artificial Sequence: Synthetic oligonucleotide
  Target: PCSK9; (+) strand; PAM type: YTN; PAM sequence: TTA
aagagcccatccaagtagtt

SEQ ID NO: 24020 - DNA, 20 bp, Artificial Sequence
  Description of Artificial Sequence: Synthetic oligonucleotide
  Target: PCSK9; (+) strand; PAM type: YTN; PAM sequence: TTT
tataaaagtagactatctcc

SEQ ID NO: 24021 - DNA, 20 bp, Artificial Sequence
  Description of Artificial Sequence: Synthetic oligonucleotide
  Target: PCSK9; (+) strand; PAM type: YTN; PAM sequence: TTT
ataaaagtagactatctccg

SEQ ID NO: 24022 - DNA, 20 bp, Artificial Sequence
  Description of Artificial Sequence: Synthetic oligonucleotide
  Target: PCSK9; (+) strand; PAM type: YTN; PAM sequence: TTA
taaaagtagactatctccga

SEQ ID NO: 24023 - DNA, 20 bp, Artificial Sequence
  Description of Artificial Sequence: Synthetic oligonucleotide
  Target: PCSK9; (+) strand; PAM type: YTN; PAM sequence: CTA
tctccgaaaagatacccaat

SEQ ID NO: 24024 - DNA, 20 bp, Artificial Sequence
  Description of Artificial Sequence: Synthetic oligonucleotide
  Target: PCSK9; (+) strand; PAM type: YTN; PAM sequence: CTC
cgaaaagatacccaataaat

SEQ ID NO: 24025 - DNA, 20 bp, Artificial Sequence
  Description of Artificial Sequence: Synthetic oligonucleotide
  Target: PCSK9; (+) strand; PAM type: YTN; PAM sequence: TTA
ctttcctggggctgttataa

SEQ ID NO: 24026 - DNA, 20 bp, Artificial Sequence
  Description of Artificial Sequence: Synthetic oligonucleotide
  Target: PCSK9; (+) strand; PAM type: YTN; PAM sequence: CTT
tcctggggctgttataacaa

SEQ ID NO: 24027 - DNA, 20 bp, Artificial Sequence
  Description of Artificial Sequence: Synthetic oligonucleotide
  Target: PCSK9; (+) strand; PAM type: YTN; PAM sequence: TTT
cctggggctgttataacaag

SEQ ID NO: 24028 - DNA, 20 bp, Artificial Sequence
  Description of Artificial Sequence: Synthetic oligonucleotide
  Target: PCSK9; (+) strand; PAM type: YTN; PAM sequence: TTC
ctggggctgttataacaagt

SEQ ID NO: 24029 - DNA, 20 bp, Artificial Sequence
  Description of Artificial Sequence: Synthetic oligonucleotide
  Target: PCSK9; (+) strand; PAM type: YTN; PAM sequence: CTG
gggctgttataacaagtttc

SEQ ID NO: 24030 - DNA, 20 bp, Artificial Sequence
  Description of Artificial Sequence: Synthetic oligonucleotide
  Target: PCSK9; (+) strand; PAM type: YTN; PAM sequence: CTG
ttataacaagtttctacaaa

SEQ ID NO: 24031 - DNA, 20 bp, Artificial Sequence
  Description of Artificial Sequence: Synthetic oligonucleotide
  Target: PCSK9; (+) strand; PAM type: YTN; PAM sequence: TTA
taacaagtttctacaaattt

SEQ ID NO: 24032 - DNA, 20 bp, Artificial Sequence
  Description of Artificial Sequence: Synthetic oligonucleotide
  Target: PCSK9; (+) strand; PAM type: YTN; PAM sequence: TTT
ctacaaatttgctggcttca

SEQ ID NO: 24033 - DNA, 20 bp, Artificial Sequence
  Description of Artificial Sequence: Synthetic oligonucleotide
  Target: PCSK9; (+) strand; PAM type: YTN; PAM sequence: TTC
tacaaatttgctggcttcaa

SEQ ID NO: 24034 - DNA, 20 bp, Artificial Sequence
  Description of Artificial Sequence: Synthetic oligonucleotide
  Target: PCSK9; (+) strand; PAM type: YTN; PAM sequence: CTA
caaatttgctggcttcaaat

SEQ ID NO: 24035 - DNA, 20 bp, Artificial Sequence
  Description of Artificial Sequence: Synthetic oligonucleotide
  Target: PCSK9; (+) strand; PAM type: YTN; PAM sequence: TTT
gctggcttcaaataacaaaa

SEQ ID NO: 24036 - DNA, 20 bp, Artificial Sequence
  Description of Artificial Sequence: Synthetic oligonucleotide
  Target: PCSK9; (+) strand; PAM type: YTN; PAM sequence: TTG
ctggcttcaaataacaaaaa

SEQ ID NO: 24037 - DNA, 20 bp, Artificial Sequence
  Description of Artificial Sequence: Synthetic oligonucleotide
  Target: PCSK9; (+) strand; PAM type: YTN; PAM sequence: CTG
gcttcaaataacaaaaacgt

SEQ ID NO: 24038 - DNA, 20 bp, Artificial Sequence
  Description of Artificial Sequence: Synthetic oligonucleotide
  Target: PCSK9; (+) strand; PAM type: YTN; PAM sequence: CTT
caaataacaaaaacgtattc

SEQ ID NO: 24039 - DNA, 20 bp, Artificial Sequence
  Description of Artificial Sequence: Synthetic oligonucleotide
  Target: PCSK9; (+) strand; PAM type: YTN; PAM sequence: TTC
aaataacaaaaacgtattct

SEQ ID NO: 24040 - DNA, 20 bp, Artificial Sequence
  Description of Artificial Sequence: Synthetic oligonucleotide
  Target: PCSK9; (+) strand; PAM type: YTN; PAM sequence: TTC
tcttgcagttatggaagcca

SEQ ID NO: 24041 - DNA, 20 bp, Artificial Sequence
  Description of Artificial Sequence: Synthetic oligonucleotide
  Target: PCSK9; (+) strand; PAM type: YTN; PAM sequence: CTC
ttgcagttatggaagccaga

SEQ ID NO: 24042 - DNA, 20 bp, Artificial Sequence
  Description of Artificial Sequence: Synthetic oligonucleotide
  Target: PCSK9; (+) strand; PAM type: YTN; PAM sequence: CTT
gcagttatggaagccagaag

SEQ ID NO: 24043 - DNA, 20 bp, Artificial Sequence
  Description of Artificial Sequence: Synthetic oligonucleotide
  Target: PCSK9; (+) strand; PAM type: YTN; PAM sequence: TTG
cagttatggaagccagaagt

SEQ ID NO: 24044 - DNA, 20 bp, Artificial Sequence
  Description of Artificial Sequence: Synthetic oligonucleotide
  Target: PCSK9; (+) strand; PAM type: YTN; PAM sequence: TTA
tggaagccagaagtatggaa

SEQ ID NO: 24045 - DNA, 20 bp, Artificial Sequence
  Description of Artificial Sequence: Synthetic oligonucleotide
  Target: PCSK9; (+) strand; PAM type: YTN; PAM sequence: TTG
cagggtggtgccctctccca

SEQ ID NO: 24046 - DNA, 20 bp, Artificial Sequence
  Description of Artificial Sequence: Synthetic oligonucleotide
  Target: PCSK9; (+) strand; PAM type: YTN; PAM sequence: CTC
tcccaaagctctaggggagg

SEQ ID NO: 24047 - DNA, 20 bp, Artificial Sequence
  Description of Artificial Sequence: Synthetic oligonucleotide
  Target: PCSK9; (+) strand; PAM type: YTN; PAM sequence: CTC
ccaaagctctaggggaggaa

SEQ ID NO: 24048 - DNA, 20 bp, Artificial Sequence
  Description of Artificial Sequence: Synthetic oligonucleotide
  Target: PCSK9; (+) strand; PAM type: YTN; PAM sequence: CTC
taggggaggaacattccttg

SEQ ID NO: 24049 - DNA, 20 bp, Artificial Sequence
  Description of Artificial Sequence: Synthetic oligonucleotide
  Target: PCSK9; (+) strand; PAM type: YTN; PAM sequence: CTA
ggggaggaacattccttgct

SEQ ID NO: 24050 - DNA, 20 bp, Artificial Sequence
  Description of Artificial Sequence: Synthetic oligonucleotide
  Target: PCSK9; (+) strand; PAM type: YTN; PAM sequence: TTC
cttgcttcttccagctcctt

SEQ ID NO: 24051 - DNA, 20 bp, Artificial Sequence
  Description of Artificial Sequence: Synthetic oligonucleotide
  Target: PCSK9; (+) strand; PAM type: YTN; PAM sequence: CTT
gcttcttccagctcctttgg

SEQ ID NO: 24052 - DNA, 20 bp, Artificial Sequence
  Description of Artificial Sequence: Synthetic oligonucleotide
  Target: PCSK9; (+) strand; PAM type: YTN; PAM sequence: TTG
cttcttccagctcctttggg

SEQ ID NO: 24053 - DNA, 20 bp, Artificial Sequence
  Description of Artificial Sequence: Synthetic oligonucleotide
  Target: PCSK9; (+) strand; PAM type: YTN; PAM sequence: CTT
cttccagctcctttgggggc

SEQ ID NO: 24054 - DNA, 20 bp, Artificial Sequence
  Description of Artificial Sequence: Synthetic oligonucleotide
  Target: PCSK9; (+) strand; PAM type: YTN; PAM sequence: TTC
ttccagctcctttgggggct

SEQ ID NO: 24055 - DNA, 20 bp, Artificial Sequence
  Description of Artificial Sequence: Synthetic oligonucleotide
  Target: PCSK9; (+) strand; PAM type: YTN; PAM sequence: CTT
ccagctcctttgggggctcc

SEQ ID NO: 24056 - DNA, 20 bp, Artificial Sequence
  Description of Artificial Sequence: Synthetic oligonucleotide
  Target: PCSK9; (+) strand; PAM type: YTN; PAM sequence: TTC
cagctcctttgggggctcct

SEQ ID NO: 24057 - DNA, 20 bp, Artificial Sequence
  Description of Artificial Sequence: Synthetic oligonucleotide
  Target: PCSK9; (+) strand; PAM type: YTN; PAM sequence: CTC
ctttgggggctcctggcatt

SEQ ID NO: 24058 - DNA, 20 bp, Artificial Sequence
  Description of Artificial Sequence: Synthetic oligonucleotide
  Target: PCSK9; (+) strand; PAM type: YTN; PAM sequence: CTT
tgggggctcctggcattcct

SEQ ID NO: 24059 - DNA, 20 bp, Artificial Sequence
  Description of Artificial Sequence: Synthetic oligonucleotide
  Target: PCSK9; (+) strand; PAM type: YTN; PAM sequence: TTT
gggggctcctggcattcctt

SEQ ID NO: 24060 - DNA, 20 bp, Artificial Sequence
  Description of Artificial Sequence: Synthetic oligonucleotide
  Target: PCSK9; (+) strand; PAM type: YTN; PAM sequence: TTG
ggggctcctggcattccttg

SEQ ID NO: 24061 - DNA, 20 bp, Artificial Sequence
  Description of Artificial Sequence: Synthetic oligonucleotide
  Target: PCSK9; (+) strand; PAM type: YTN; PAM sequence: CTC
ctggcattccttggcttatg

SEQ ID NO: 24062 - DNA, 20 bp, Artificial Sequence
  Description of Artificial Sequence: Synthetic oligonucleotide
  Target: PCSK9; (+) strand; PAM type: YTN; PAM sequence: CTG
gcattccttggcttatgtcg

SEQ ID NO: 24063 - DNA, 20 bp, Artificial Sequence
  Description of Artificial Sequence: Synthetic oligonucleotide
  Target: PCSK9; (+) strand; PAM type: YTN; PAM sequence: TTC
cttggcttatgtcggcacag

SEQ ID NO: 24064 - DNA, 20 bp, Artificial Sequence
  Description of Artificial Sequence: Synthetic oligonucleotide
  Target: PCSK9; (+) strand; PAM type: YTN; PAM sequence: CTT
ggcttatgtcggcacagctc

SEQ ID NO: 24065 - DNA, 20 bp, Artificial Sequence
  Description of Artificial Sequence: Synthetic oligonucleotide
  Target: PCSK9; (+) strand; PAM type: YTN; PAM sequence: TTG
gcttatgtcggcacagctct

SEQ ID NO: 24066 - DNA, 20 bp, Artificial Sequence
  Description of Artificial Sequence: Synthetic oligonucleotide
  Target: PCSK9; (+) strand; PAM type: YTN; PAM sequence: CTT
atgtcggcacagctctaatc

SEQ ID NO: 24067 - DNA, 20 bp, Artificial Sequence
  Description of Artificial Sequence: Synthetic oligonucleotide
  Target: PCSK9; (+) strand; PAM type: YTN; PAM sequence: TTA
tgtcggcacagctctaatcg

SEQ ID NO: 24068 - DNA, 20 bp, Artificial Sequence
  Description of Artificial Sequence: Synthetic oligonucleotide
  Target: PCSK9; (+) strand; PAM type: YTN; PAM sequence: CTC
taatcggcgcctccattgtt

SEQ ID NO: 24069 - DNA, 20 bp, Artificial Sequence
  Description of Artificial Sequence: Synthetic oligonucleotide
  Target: PCSK9; (+) strand; PAM type: YTN; PAM sequence: CTA
atcggcgcctccattgttac

SEQ ID NO: 24070 - DNA, 20 bp, Artificial Sequence
  Description of Artificial Sequence: Synthetic oligonucleotide
  Target: PCSK9; (+) strand; PAM type: YTN; PAM sequence: CTC
cattgttacataggtgtttc

SEQ ID NO: 24071 - DNA, 20 bp, Artificial Sequence
  Description of Artificial Sequence: Synthetic oligonucleotide
  Target: PCSK9; (+) strand; PAM type: YTN; PAM sequence: TTG
ttacataggtgtttctgtgt

SEQ ID NO: 24072 - DNA, 20 bp, Artificial Sequence
  Description of Artificial Sequence: Synthetic oligonucleotide
  Target: PCSK9; (+) strand; PAM type: YTN; PAM sequence: TTA
cataggtgtttctgtgtctc

SEQ ID NO: 24073 - DNA, 20 bp, Artificial Sequence
  Description of Artificial Sequence: Synthetic oligonucleotide
  Target: PCSK9; (+) strand; PAM type: YTN; PAM sequence: TTT
ctgtgtctcaagtatctctc

SEQ ID NO: 24074 - DNA, 20 bp, Artificial Sequence
  Description of Artificial Sequence: Synthetic oligonucleotide
  Target: PCSK9; (+) strand; PAM type: YTN; PAM sequence: TTC
tgtgtctcaagtatctctcc

SEQ ID NO: 24075 - DNA, 20 bp, Artificial Sequence
  Description of Artificial Sequence: Synthetic oligonucleotide
  Target: PCSK9; (+) strand; PAM type: YTN; PAM sequence: CTG
tgtctcaagtatctctcccc

SEQ ID NO: 24076 - DNA, 20 bp, Artificial Sequence
  Description of Artificial Sequence: Synthetic oligonucleotide
  Target: PCSK9; (+) strand; PAM type: YTN; PAM sequence: CTC
aagtatctctcccctttctc

SEQ ID NO: 24077 - DNA, 20 bp, Artificial Sequence
  Description of Artificial Sequence: Synthetic oligonucleotide
  Target: PCSK9; (+) strand; PAM type: YTN; PAM sequence: CTC
tcccctttctcttctgatat

SEQ ID NO: 24078 - DNA, 20 bp, Artificial Sequence
  Description of Artificial Sequence: Synthetic oligonucleotide
  Target: PCSK9; (+) strand; PAM type: YTN; PAM sequence: CTC
ccctttctcttctgatatca

SEQ ID NO: 24079 - DNA, 20 bp, Artificial Sequence
  Description of Artificial Sequence: Synthetic oligonucleotide
  Target: PCSK9; (+) strand; PAM type: YTN; PAM sequence: CTT
tctcttctgatatcagtcat

SEQ ID NO: 24080 - DNA, 20 bp, Artificial Sequence
  Description of Artificial Sequence: Synthetic oligonucleotide
  Target: PCSK9; (+) strand; PAM type: YTN; PAM sequence: TTT
ctcttctgatatcagtcatt

SEQ ID NO: 24081 - DNA, 20 bp, Artificial Sequence
  Description of Artificial Sequence: Synthetic oligonucleotide
  Target: PCSK9; (+) strand; PAM type: YTN; PAM sequence: TTC
tcttctgatatcagtcattg

SEQ ID NO: 24082 - DNA, 20 bp, Artificial Sequence
  Description of Artificial Sequence: Synthetic oligonucleotide
  Target: PCSK9; (+) strand; PAM type: YTN; PAM sequence: CTC
ttctgatatcagtcattgga

SEQ ID NO: 24083 - DNA, 20 bp, Artificial Sequence
  Description of Artificial Sequence: Synthetic oligonucleotide
  Target: PCSK9; (+) strand; PAM type: YTN; PAM sequence: CTT
ctgatatcagtcattggatt

SEQ ID NO: 24084 - DNA, 20 bp, Artificial Sequence
  Description of Artificial Sequence: Synthetic oligonucleotide
  Target: PCSK9; (+) strand; PAM type: YTN; PAM sequence: TTC
tgatatcagtcattggattt

SEQ ID NO: 24085 - DNA, 20 bp, Artificial Sequence
  Description of Artificial Sequence: Synthetic oligonucleotide
  Target: PCSK9; (+) strand; PAM type: YTN; PAM sequence: CTG
atatcagtcattggatttag

SEQ ID NO: 24086 - DNA, 20 bp, Artificial Sequence
  Description of Artificial Sequence: Synthetic oligonucleotide
  Target: PCSK9; (+) strand; PAM type: YTN; PAM sequence: TTG
gatttagggaccatcctaaa

SEQ ID NO: 24087 - DNA, 20 bp, Artificial Sequence
  Description of Artificial Sequence: Synthetic oligonucleotide
  Target: PCSK9; (+) strand; PAM type: YTN; PAM sequence: TTT
agggaccatcctaaacccag

SEQ ID NO: 24088 - DNA, 20 bp, Artificial Sequence
  Description of Artificial Sequence: Synthetic oligonucleotide
  Target: PCSK9; (+) strand; PAM type: YTN; PAM sequence: TTA
gggaccatcctaaacccagg

SEQ ID NO: 24089 - DNA, 20 bp, Artificial Sequence
  Description of Artificial Sequence: Synthetic oligonucleotide
  Target: PCSK9; (+) strand; PAM type: YTN; PAM sequence: CTA
aacccaggataatctcctca

SEQ ID NO: 24090 - DNA, 20 bp, Artificial Sequence
  Description of Artificial Sequence: Synthetic oligonucleotide
  Target: PCSK9; (+) strand; PAM type: YTN; PAM sequence: CTC
ctcatgagatccttaggtca

SEQ ID NO: 24091 - DNA, 20 bp, Artificial Sequence
  Description of Artificial Sequence: Synthetic oligonucleotide
  Target: PCSK9; (+) strand; PAM type: YTN; PAM sequence: CTC
atgagatccttaggtcaatt

SEQ ID NO: 24092 - DNA, 20 bp, Artificial Sequence
  Description of Artificial Sequence: Synthetic oligonucleotide
  Target: PCSK9; (+) strand; PAM type: YTN; PAM sequence: CTT
aggtcaattacatctgcaaa

SEQ ID NO: 24093 - DNA, 20 bp, Artificial Sequence
  Description of Artificial Sequence: Synthetic oligonucleotide
  Target: PCSK9; (+) strand; PAM type: YTN; PAM sequence: TTA
ggtcaattacatctgcaaag

SEQ ID NO: 24094 - DNA, 20 bp, Artificial Sequence
  Description of Artificial Sequence: Synthetic oligonucleotide
  Target: PCSK9; (+) strand; PAM type: YTN; PAM sequence: TTA
catctgcaaagatctcattt

SEQ ID NO: 24095 - DNA, 20 bp, Artificial Sequence
  Description of Artificial Sequence: Synthetic oligonucleotide
  Target: PCSK9; (+) strand; PAM type: YTN; PAM sequence: CTG
caaagatctcatttccaaat

SEQ ID NO: 24096 - DNA, 20 bp, Artificial Sequence
  Description of Artificial Sequence: Synthetic oligonucleotide
  Target: PCSK9; (+) strand; PAM type: YTN; PAM sequence: CTC
atttccaaataaggtcacat

SEQ ID NO: 24097 - DNA, 20 bp, Artificial Sequence
  Description of Artificial Sequence: Synthetic oligonucleotide
  Target: PCSK9; (+) strand; PAM type: YTN; PAM sequence: TTT
ccaaataaggtcacattcaa

SEQ ID NO: 24098 - DNA, 20 bp, Artificial Sequence
  Description of Artificial Sequence: Synthetic oligonucleotide
  Target: PCSK9; (+) strand; PAM type: YTN; PAM sequence: TTC
caaataaggtcacattcaaa

SEQ ID NO: 24099 - DNA, 20 bp, Artificial Sequence
  Description of Artificial Sequence: Synthetic oligonucleotide
  Target: PCSK9; (+) strand; PAM type: YTN; PAM sequence: TTC
aaaagtaccaggggttagtc

SEQ ID NO: 24100 - DNA, 20 bp, Artificial Sequence
  Description of Artificial Sequence: Synthetic oligonucleotide
  Target: PCSK9; (+) strand; PAM type: YTN; PAM sequence: TTA
gtcttagacttatctttttg

SEQ ID NO: 24101 - DNA, 20 bp, Artificial Sequence
  Description of Artificial Sequence: Synthetic oligonucleotide
  Target: PCSK9; (+) strand; PAM type: YTN; PAM sequence: CTT
agacttatctttttggggga

SEQ ID NO: 24102 - DNA, 20 bp, Artificial Sequence
  Description of Artificial Sequence: Synthetic oligonucleotide
  Target: PCSK9; (+) strand; PAM type: YTN; PAM sequence: TTA
gacttatctttttgggggac

SEQ ID NO: 24103 - DNA, 20 bp, Artificial Sequence
  Description of Artificial Sequence: Synthetic oligonucleotide
  Target: PCSK9; (+) strand; PAM type: YTN; PAM sequence: CTT
atctttttgggggacacgat

SEQ ID NO: 24104 - DNA, 20 bp, Artificial Sequence
  Description of Artificial Sequence: Synthetic oligonucleotide
  Target: PCSK9; (+) strand; PAM type: YTN; PAM sequence: TTA
tctttttgggggacacgatt

SEQ ID NO: 24105 - DNA, 20 bp, Artificial Sequence
  Description of Artificial Sequence: Synthetic oligonucleotide
  Target: PCSK9; (+) strand; PAM type: YTN; PAM sequence: CTT
tttgggggacacgattcaac

SEQ ID NO: 24106 - DNA, 20 bp, Artificial Sequence
  Description of Artificial Sequence: Synthetic oligonucleotide
  Target: PCSK9; (+) strand; PAM type: YTN; PAM sequence: TTT
ttgggggacacgattcaacc

SEQ ID NO: 24107 - DNA, 20 bp, Artificial Sequence
  Description of Artificial Sequence: Synthetic oligonucleotide
  Target: PCSK9; (+) strand; PAM type: YTN; PAM sequence: TTT
tgggggacacgattcaaccc

SEQ ID NO: 24108 - DNA, 20 bp, Artificial Sequence
  Description of Artificial Sequence: Synthetic oligonucleotide
  Target: PCSK9; (+) strand; PAM type: YTN; PAM sequence: TTT
gggggacacgattcaaccca

SEQ ID NO: 24109 - DNA, 20 bp, Artificial Sequence
  Description of Artificial Sequence: Synthetic oligonucleotide
  Target: PCSK9; (+) strand; PAM type: YTN; PAM sequence: TTG
ggggacacgattcaacccac

SEQ ID NO: 24110 - DNA, 20 bp, Artificial Sequence
  Description of Artificial Sequence: Synthetic oligonucleotide
  Target: PCSK9; (+) strand; PAM type: YTN; PAM sequence: TTC
aacccactaccgtgggtaac

SEQ ID NO: 24111 - DNA, 20 bp, Artificial Sequence
  Description of Artificial Sequence: Synthetic oligonucleotide
  Target: PCSK9; (+) strand; PAM type: YTN; PAM sequence: CTA
ccgtgggtaacagtggtttt

SEQ ID NO: 24112 - DNA, 20 bp, Artificial Sequence
  Description of Artificial Sequence: Synthetic oligonucleotide
  Target: PCSK9; (+) strand; PAM type: YTN; PAM sequence: TTT
tccctcagaaggtggtggtt

SEQ ID NO: 24113 - DNA, 20 bp, Artificial Sequence
  Description of Artificial Sequence: Synthetic oligonucleotide
  Target: PCSK9; (+) strand; PAM type: YTN; PAM sequence: TTT
ccctcagaaggtggtggttc

SEQ ID NO: 24114 - DNA, 20 bp, Artificial Sequence
  Description of Artificial Sequence: Synthetic oligonucleotide
  Target: PCSK9; (+) strand; PAM type: YTN; PAM sequence: TTC
cctcagaaggtggtggttca

SEQ ID NO: 24115 - DNA, 20 bp, Artificial Sequence
  Description of Artificial Sequence: Synthetic oligonucleotide
  Target: PCSK9; (+) strand; PAM type: YTN; PAM sequence: CTC
agaaggtggtggttcaggag

SEQ ID NO: 24116 - DNA, 20 bp, Artificial Sequence
  Description of Artificial Sequence: Synthetic oligonucleotide
  Target: PCSK9; (+) strand; PAM type: YTN; PAM sequence: TTC
aggagtgggaggaagatgaa

SEQ ID NO: 24117 - DNA, 20 bp, Artificial Sequence
  Description of Artificial Sequence: Synthetic oligonucleotide
  Target: PCSK9; (+) strand; PAM type: YTN; PAM sequence: CTT
ttcactgtatatcctttcaa

SEQ ID NO: 24118 - DNA, 20 bp, Artificial Sequence
  Description of Artificial Sequence: Synthetic oligonucleotide
  Target: PCSK9; (+) strand; PAM type: YTN; PAM sequence: TTT
tcactgtatatcctttcaaa

SEQ ID NO: 24119 - DNA, 20 bp, Artificial Sequence
  Description of Artificial Sequence: Synthetic oligonucleotide
  Target: PCSK9; (+) strand; PAM type: YTN; PAM sequence: TTT
cactgtatatcctttcaaac

SEQ ID NO: 24120 - DNA, 20 bp, Artificial Sequence
  Description of Artificial Sequence: Synthetic oligonucleotide
  Target: PCSK9; (+) strand; PAM type: YTN; PAM sequence: TTC
actgtatatcctttcaaact

SEQ ID NO: 24121 - DNA, 20 bp, Artificial Sequence
  Description of Artificial Sequence: Synthetic oligonucleotide
  Target: PCSK9; (+) strand; PAM type: YTN; PAM sequence: CTG
tatatcctttcaaactattc

SEQ ID NO: 24122 - DNA, 20 bp, Artificial Sequence
  Description of Artificial Sequence: Synthetic oligonucleotide
  Target: PCSK9; (+) strand; PAM type: YTN; PAM sequence: CTT
tcaaactattcacgttttaa

SEQ ID NO: 24123 - DNA, 20 bp, Artificial Sequence
  Description of Artificial Sequence: Synthetic oligonucleotide
  Target: PCSK9; (+) strand; PAM type: YTN; PAM sequence: TTT
caaactattcacgttttaaa

SEQ ID NO: 24124 - DNA, 20 bp, Artificial Sequence
  Description of Artificial Sequence: Synthetic oligonucleotide
  Target: PCSK9; (+) strand; PAM type: YTN; PAM sequence: TTC
aaactattcacgttttaaaa

SEQ ID NO: 24125 - DNA, 20 bp, Artificial Sequence
  Description of Artificial Sequence: Synthetic oligonucleotide
  Target: PCSK9; (+) strand; PAM type: YTN; PAM sequence: CTA
ttcacgttttaaaaaaaaca

SEQ ID NO: 24126 - DNA, 20 bp, Artificial Sequence
  Description of Artificial Sequence: Synthetic oligonucleotide
  Target: PCSK9; (+) strand; PAM type: YTN; PAM sequence: TTC
acgttttaaaaaaaacattt

SEQ ID NO: 24127 - DNA, 20 bp, Artificial Sequence
  Description of Artificial Sequence: Synthetic oligonucleotide
  Target: PCSK9; (+) strand; PAM type: YTN; PAM sequence: TTT
taaaaaaaacattttcatgt

SEQ ID NO: 24128 - DNA, 20 bp, Artificial Sequence
  Description of Artificial Sequence: Synthetic oligonucleotide
  Target: PCSK9; (+) strand; PAM type: YTN; PAM sequence: TTT
aaaaaaaacattttcatgta

SEQ ID NO: 24129 - DNA, 20 bp, Artificial Sequence
  Description of Artificial Sequence: Synthetic oligonucleotide
  Target: PCSK9; (+) strand; PAM type: YTN; PAM sequence: TTA
aaaaaaacattttcatgtaa

SEQ ID NO: 24130 - DNA, 20 bp, Artificial Sequence
  Description of Artificial Sequence: Synthetic oligonucleotide
  Target: PCSK9; (+) strand; PAM type: YTN; PAM sequence: TTT
tcatgtaaatttaaaaaaat

SEQ ID NO: 24131 - DNA, 20 bp, Artificial Sequence
  Description of Artificial Sequence: Synthetic oligonucleotide
  Target: PCSK9; (+) strand; PAM type: YTN; PAM sequence: TTT
catgtaaatttaaaaaaatt

SEQ ID NO: 24132 - DNA, 20 bp, Artificial Sequence
  Description of Artificial Sequence: Synthetic oligonucleotide
  Target: PCSK9; (+) strand; PAM type: YTN; PAM sequence: TTC
atgtaaatttaaaaaaattg

SEQ ID NO: 24133 - DNA, 20 bp, Artificial Sequence
  Description of Artificial Sequence: Synthetic oligonucleotide
  Target: PCSK9; (+) strand; PAM type: YTN; PAM sequence: TTT
aaaaaaattgaacattcaca

SEQ ID NO: 24134 - DNA, 20 bp, Artificial Sequence
  Description of Artificial Sequence: Synthetic oligonucleotide
  Target: PCSK9; (+) strand; PAM type: YTN; PAM sequence: TTA
aaaaaattgaacattcacac

SEQ ID NO: 24135 - DNA, 20 bp, Artificial Sequence
  Description of Artificial Sequence: Synthetic oligonucleotide
  Target: PCSK9; (+) strand; PAM type: YTN; PAM sequence: TTG
aacattcacacaaaaagatg

SEQ ID NO: 24136 - DNA, 20 bp, Artificial Sequence
  Description of Artificial Sequence: Synthetic oligonucleotide
  Target: PCSK9; (+) strand; PAM type: YTN; PAM sequence: TTC
acacaaaaagatgccccctc

SEQ ID NO: 24137 - DNA, 20 bp, Artificial Sequence
  Description of Artificial Sequence: Synthetic oligonucleotide
  Target: PCSK9; (+) strand; PAM type: YTN; PAM sequence: CTC
ccttgcaaaaaagagtatgc

SEQ ID NO: 24138 - DNA, 20 bp, Artificial Sequence
  Description of Artificial Sequence: Synthetic oligonucleotide
  Target: PCSK9; (+) strand; PAM type: YTN; PAM sequence: CTT
gcaaaaaagagtatgcccgt

SEQ ID NO: 24139 - DNA, 20 bp, Artificial Sequence
  Description of Artificial Sequence: Synthetic oligonucleotide
  Target: PCSK9; (+) strand; PAM type: YTN; PAM sequence: TTG
caaaaaagagtatgcccgtt

SEQ ID NO: 24140 - DNA, 20 bp, Artificial Sequence
  Description of Artificial Sequence: Synthetic oligonucleotide
  Target: PCSK9; (+) strand; PAM type: YTN; PAM sequence: TTC
aaaatgttgaaatgtacact

SEQ ID NO: 24141 - DNA, 20 bp, Artificial Sequence
  Description of Artificial Sequence: Synthetic oligonucleotide
  Target: PCSK9; (+) strand; PAM type: YTN; PAM sequence: TTG
aaatgtacactcacagcaat

SEQ ID NO: 24142 - DNA, 20 bp, Artificial Sequence
  Description of Artificial Sequence: Synthetic oligonucleotide
  Target: PCSK9; (+) strand; PAM type: YTN; PAM sequence: CTC
acagcaatggtggctgcaga

SEQ ID NO: 24143 - DNA, 20 bp, Artificial Sequence
  Description of Artificial Sequence: Synthetic oligonucleotide
  Target: PCSK9; (+) strand; PAM type: YTN; PAM sequence: CTG
cagactccaagtttctgagg

SEQ ID NO: 24144 - DNA, 20 bp, Artificial Sequence
  Description of Artificial Sequence: Synthetic oligonucleotide
  Target: PCSK9; (+) strand; PAM type: YTN; PAM sequence: CTC
caagtttctgaggttggaga

SEQ ID NO: 24145 - DNA, 20 bp, Artificial Sequence
  Description of Artificial Sequence: Synthetic oligonucleotide
  Target: PCSK9; (+) strand; PAM type: YTN; PAM sequence: TTT
ctgaggttggagaaggtagc

SEQ ID NO: 24146 - DNA, 20 bp, Artificial Sequence
  Description of Artificial Sequence: Synthetic oligonucleotide
  Target: PCSK9; (+) strand; PAM type: YTN; PAM sequence: TTC
tgaggttggagaaggtagcc

SEQ ID NO: 24147 - DNA, 20 bp, Artificial Sequence
  Description of Artificial Sequence: Synthetic oligonucleotide
  Target: PCSK9; (+) strand; PAM type: YTN; PAM sequence: CTG
aggttggagaaggtagccag

SEQ ID NO: 24148 - DNA, 20 bp, Artificial Sequence
  Description of Artificial Sequence: Synthetic oligonucleotide
  Target: PCSK9; (+) strand; PAM type: YTN; PAM sequence: TTG
gagaaggtagccagggagca

SEQ ID NO: 24149 - DNA, 20 bp, Artificial Sequence
  Description of Artificial Sequence: Synthetic oligonucleotide
  Target: PCSK9; (+) strand; PAM type: YTN; PAM sequence: TTC
tatctactcattcagtctat

SEQ ID NO: 24150 - DNA, 20 bp, Artificial Sequence
  Description of Artificial Sequence: Synthetic oligonucleotide
  Target: PCSK9; (+) strand; PAM type: YTN; PAM sequence: CTA
tctactcattcagtctatga

SEQ ID NO: 24151 - DNA, 20 bp, Artificial Sequence
  Description of Artificial Sequence: Synthetic oligonucleotide
  Target: PCSK9; (+) strand; PAM type: YTN; PAM sequence: CTA
ctcattcagtctatgagggg

SEQ ID NO: 24152 - DNA, 20 bp, Artificial Sequence
  Description of Artificial Sequence: Synthetic oligonucleotide
  Target: PCSK9; (+) strand; PAM type: YTN; PAM sequence: CTC
attcagtctatgaggggaag

SEQ ID NO: 24153 - DNA, 20 bp, Artificial Sequence
  Description of Artificial Sequence: Synthetic oligonucleotide
  Target: PCSK9; (+) strand; PAM type: YTN; PAM sequence: TTC
agtctatgaggggaaggcaa

SEQ ID NO: 24154 - DNA, 20 bp, Artificial Sequence
  Description of Artificial Sequence: Synthetic oligonucleotide
  Target: PCSK9; (+) strand; PAM type: YTN; PAM sequence: CTA
tgaggggaaggcaatggcta

SEQ ID NO: 24155 - DNA, 20 bp, Artificial Sequence
  Description of Artificial Sequence: Synthetic oligonucleotide
  Target: PCSK9; (+) strand; PAM type: YTN; PAM sequence: CTA
gaaaagcattttgagggaca

SEQ ID NO: 24156 - DNA, 20 bp, Artificial Sequence
  Description of Artificial Sequence: Synthetic oligonucleotide
  Target: PCSK9; (+) strand; PAM type: YTN; PAM sequence: TTT
tgagggacagtaaaagtggc

SEQ ID NO: 24157 - DNA, 20 bp, Artificial Sequence
  Description of Artificial Sequence: Synthetic oligonucleotide
  Target: PCSK9; (+) strand; PAM type: YTN; PAM sequence: TTT
gagggacagtaaaagtggca

SEQ ID NO: 24158 - DNA, 20 bp, Artificial Sequence
  Description of Artificial Sequence: Synthetic oligonucleotide
  Target: PCSK9; (+) strand; PAM type: YTN; PAM sequence: TTG
agggacagtaaaagtggcat

SEQ ID NO: 24159 - DNA, 20 bp, Artificial Sequence
  Description of Artificial Sequence: Synthetic oligonucleotide
  Target: PCSK9; (+) strand; PAM type: YTN; PAM sequence: TTT
ttagagggaggaagccttga

SEQ ID NO: 24160 - DNA, 20 bp, Artificial Sequence
  Description of Artificial Sequence: Synthetic oligonucleotide
  Target: PCSK9; (+) strand; PAM type: YTN; PAM sequence: TTT
tagagggaggaagccttgag

SEQ ID NO: 24161 - DNA, 20 bp, Artificial Sequence
  Description of Artificial Sequence: Synthetic oligonucleotide
  Target: PCSK9; (+) strand; PAM type: YTN; PAM sequence: TTT
agagggaggaagccttgagg

SEQ ID NO: 24162 - DNA, 20 bp, Artificial Sequence
  Description of Artificial Sequence: Synthetic oligonucleotide
  Target: PCSK9; (+) strand; PAM type: YTN; PAM sequence: TTA
gagggaggaagccttgagga

SEQ ID NO: 24163 - DNA, 20 bp, Artificial Sequence
  Description of Artificial Sequence: Synthetic oligonucleotide
  Target: PCSK9; (+) strand; PAM type: YTN; PAM sequence: CTT
gaggatgcttgtggggtgaa

SEQ ID NO: 24164 - DNA, 20 bp, Artificial Sequence
  Description of Artificial Sequence: Synthetic oligonucleotide
  Target: PCSK9; (+) strand; PAM type: YTN; PAM sequence: TTG
aggatgcttgtggggtgaag

SEQ ID NO: 24165 - DNA, 20 bp, Artificial Sequence
  Description of Artificial Sequence: Synthetic oligonucleotide
  Target: PCSK9; (+) strand; PAM type: YTN; PAM sequence: CTT
gtggggtgaagggaaagaat

SEQ ID NO: 24166 - DNA, 20 bp, Artificial Sequence
  Description of Artificial Sequence: Synthetic oligonucleotide
  Target: PCSK9; (+) strand; PAM type: YTN; PAM sequence: TTG
tggggtgaagggaaagaata

SEQ ID NO: 24167 - DNA, 20 bp, Artificial Sequence
  Description of Artificial Sequence: Synthetic oligonucleotide
  Target: PCSK9; (+) strand; PAM type: YTN; PAM sequence: CTC
aggaagaggcatttagggat

SEQ ID NO: 24168 - DNA, 20 bp, Artificial Sequence
  Description of Artificial Sequence: Synthetic oligonucleotide
  Target: PCSK9; (+) strand; PAM type: YTN; PAM sequence: TTT
agggataagaggaggagagg

SEQ ID NO: 24169 - DNA, 20 bp, Artificial Sequence
  Description of Artificial Sequence: Synthetic oligonucleotide
  Target: PCSK9; (+) strand; PAM type: YTN; PAM sequence: TTA
gggataagaggaggagagga

SEQ ID NO: 24170 - DNA, 20 bp, Artificial Sequence
  Description of Artificial Sequence: Synthetic oligonucleotide
  Target: PCSK9; (+) strand; PAM type: YTN; PAM sequence: CTG
cggaggccagattggggcag

SEQ ID NO: 24171 - DNA, 20 bp, Artificial Sequence
  Description of Artificial Sequence: Synthetic oligonucleotide
  Target: PCSK9; (+) strand; PAM type: YTN; PAM sequence: TTG
gggcaggggagtgtcagctg

SEQ ID NO: 24172 - DNA, 20 bp, Artificial Sequence
  Description of Artificial Sequence: Synthetic oligonucleotide
  Target: PCSK9; (+) strand; PAM type: YTN; PAM sequence: CTG
agtataagaggatggtcccc

SEQ ID NO: 24173 - DNA, 20 bp, Artificial Sequence
  Description of Artificial Sequence: Synthetic oligonucleotide
  Target: PCSK9; (+) strand; PAM type: YTN; PAM sequence: CTC
tgccctgaaggaggaaggca

SEQ ID NO: 24174 - DNA, 20 bp, Artificial Sequence
  Description of Artificial Sequence: Synthetic oligonucleotide
  Target: PCSK9; (+) strand; PAM type: YTN; PAM sequence: CTG
ccctgaaggaggaaggcagg

SEQ ID NO: 24175 - DNA, 20 bp, Artificial Sequence
  Description of Artificial Sequence: Synthetic oligonucleotide
  Target: PCSK9; (+) strand; PAM type: YTN; PAM sequence: CTG
aaggaggaaggcaggagggg

SEQ ID NO: 24176 - DNA, 20 bp, Artificial Sequence
  Description of Artificial Sequence: Synthetic oligonucleotide
  Target: PCSK9; (+) strand; PAM type: YTN; PAM sequence: TTG
acccagaaagcacttgtggt

SEQ ID NO: 24177 - DNA, 20 bp, Artificial Sequence
  Description of Artificial Sequence: Synthetic oligonucleotide
  Target: PCSK9; (+) strand; PAM type: YTN; PAM sequence: CTT
gtggtggaggggaggcccca

SEQ ID NO: 24178 - DNA, 20 bp, Artificial Sequence
  Description of Artificial Sequence: Synthetic oligonucleotide
  Target: PCSK9; (+) strand; PAM type: YTN; PAM sequence: TTG
tggtggaggggaggccccag

SEQ ID NO: 24179 - DNA, 20 bp, Artificial Sequence
  Description of Artificial Sequence: Synthetic oligonucleotide
  Target: PCSK9; (+) strand; PAM type: YTN; PAM sequence: CTT
ctgacttaccctgattgctg

SEQ ID NO: 24180 - DNA, 20 bp, Artificial Sequence
  Description of Artificial Sequence: Synthetic oligonucleotide
  Target: PCSK9; (+) strand; PAM type: YTN; PAM sequence: TTC
tgacttaccctgattgctgg

SEQ ID NO: 24181 - DNA, 20 bp, Artificial Sequence
  Description of Artificial Sequence: Synthetic oligonucleotide
  Target: PCSK9; (+) strand; PAM type: YTN; PAM sequence: CTG
acttaccctgattgctggta

SEQ ID NO: 24182 - DNA, 20 bp, Artificial Sequence
  Description of Artificial Sequence: Synthetic oligonucleotide
  Target: PCSK9; (+) strand; PAM type: YTN; PAM sequence: CTT
accctgattgctggtacctc

SEQ ID NO: 24183 - DNA, 20 bp, Artificial Sequence
  Description of Artificial Sequence: Synthetic oligonucleotide
  Target: PCSK9; (+) strand; PAM type: YTN; PAM sequence: TTA
ccctgattgctggtacctct

SEQ ID NO: 24184 - DNA, 20 bp, Artificial Sequence
  Description of Artificial Sequence: Synthetic oligonucleotide
  Target: PCSK9; (+) strand; PAM type: YTN; PAM sequence: CTG
attgctggtacctctcaggg

SEQ ID NO: 24185 - DNA, 20 bp, Artificial Sequence
  Description of Artificial Sequence: Synthetic oligonucleotide
  Target: PCSK9; (+) strand; PAM type: YTN; PAM sequence: TTG
ctggtacctctcaggggagc

SEQ ID NO: 24186 - DNA, 20 bp, Artificial Sequence
  Description of Artificial Sequence: Synthetic oligonucleotide
  Target: PCSK9; (+) strand; PAM type: YTN; PAM sequence: CTG
gtacctctcaggggagctgg

SEQ ID NO: 24187 - DNA, 20 bp, Artificial Sequence
  Description of Artificial Sequence: Synthetic oligonucleotide
  Target: PCSK9; (+) strand; PAM type: YTN; PAM sequence: CTC
tcaggggagctggctgctta

SEQ ID NO: 24188 - DNA, 20 bp, Artificial Sequence
  Description of Artificial Sequence: Synthetic oligonucleotide
  Target: PCSK9; (+) strand; PAM type: YTN; PAM sequence: CTC
aggggagctggctgcttatt

SEQ ID NO: 24189 - DNA, 20 bp, Artificial Sequence
  Description of Artificial Sequence: Synthetic oligonucleotide
  Target: PCSK9; (+) strand; PAM type: YTN; PAM sequence: CTG
gctgcttatttgctggccag

SEQ ID NO: 24190 - DNA, 20 bp, Artificial Sequence
  Description of Artificial Sequence: Synthetic oligonucleotide
  Target: PCSK9; (+) strand; PAM type: YTN; PAM sequence: CTG
cttatttgctggccagggtg

SEQ ID NO: 24191 - DNA, 20 bp, Artificial Sequence
  Description of Artificial Sequence: Synthetic oligonucleotide
  Target: PCSK9; (+) strand; PAM type: YTN; PAM sequence: CTT
atttgctggccagggtgtgg

SEQ ID NO: 24192 - DNA, 20 bp, Artificial Sequence
  Description of Artificial Sequence: Synthetic oligonucleotide
  Target: PCSK9; (+) strand; PAM type: YTN; PAM sequence: TTA
tttgctggccagggtgtggg

SEQ ID NO: 24193 - DNA, 20 bp, Artificial Sequence
  Description of Artificial Sequence: Synthetic oligonucleotide
  Target: PCSK9; (+) strand; PAM type: YTN; PAM sequence: TTT
gctggccagggtgtggggga

SEQ ID NO: 24194 - DNA, 20 bp, Artificial Sequence
  Description of Artificial Sequence: Synthetic oligonucleotide
  Target: PCSK9; (+) strand; PAM type: YTN; PAM sequence: TTG
ctggccagggtgtgggggaa

SEQ ID NO: 24195 - DNA, 20 bp, Artificial Sequence
  Description of Artificial Sequence: Synthetic oligonucleotide
  Target: PCSK9; (+) strand; PAM type: YTN; PAM sequence: CTG
gccagggtgtgggggaaccc

SEQ ID NO: 24196 - DNA, 20 bp, Artificial Sequence
  Description of Artificial Sequence: Synthetic oligonucleotide
  Target: PCSK9; (+) strand; PAM type: YTN; PAM sequence: TTT
gagaagagggagaaggtgac

SEQ ID NO: 24197 - DNA, 20 bp, Artificial Sequence
  Description of Artificial Sequence: Synthetic oligonucleotide
  Target: PCSK9; (+) strand; PAM type: YTN; PAM sequence: TTG
agaagagggagaaggtgaca

SEQ ID NO: 24198 - DNA, 20 bp, Artificial Sequence
  Description of Artificial Sequence: Synthetic oligonucleotide
  Target: PCSK9; (+) strand; PAM type: YTN; PAM sequence: TTC
ctttgggcaacttatgggag

SEQ ID NO: 24199 - DNA, 20 bp, Artificial Sequence
  Description of Artificial Sequence: Synthetic oligonucleotide
  Target: PCSK9; (+) strand; PAM type: YTN; PAM sequence: CTT
tgggcaacttatgggagggg

SEQ ID NO: 24200 - DNA, 20 bp, Artificial Sequence
  Description of Artificial Sequence: Synthetic oligonucleotide
  Target: PCSK9; (+) strand; PAM type: YTN; PAM sequence: TTT
gggcaacttatgggaggggt

SEQ ID NO: 24201 - DNA, 20 bp, Artificial Sequence
  Description of Artificial Sequence: Synthetic oligonucleotide
  Target: PCSK9; (+) strand; PAM type: YTN; PAM sequence: TTG
ggcaacttatgggaggggta

SEQ ID NO: 24202 - DNA, 20 bp, Artificial Sequence
  Description of Artificial Sequence: Synthetic oligonucleotide
  Target: PCSK9; (+) strand; PAM type: YTN; PAM sequence: CTT
atgggaggggtaattggtga

SEQ ID NO: 24203 - DNA, 20 bp, Artificial Sequence
  Description of Artificial Sequence: Synthetic oligonucleotide
  Target: PCSK9; (+) strand; PAM type: YTN; PAM sequence: TTA
tgggaggggtaattggtgag

SEQ ID NO: 24204 - DNA, 20 bp, Artificial Sequence
  Description of Artificial Sequence: Synthetic oligonucleotide
  Target: PCSK9; (+) strand; PAM type: YTN; PAM sequence: TTG
gtgagggatgaaagccctgc

SEQ ID NO: 24205 - DNA, 20 bp, Artificial Sequence
  Description of Artificial Sequence: Synthetic oligonucleotide
  Target: PCSK9; (+) strand; PAM type: YTN; PAM sequence: CTG
ccaagtggcaggaggcccag

SEQ ID NO: 24206 - DNA, 20 bp, Artificial Sequence
  Description of Artificial Sequence: Synthetic oligonucleotide
  Target: PCSK9; (+) strand; PAM type: YTN; PAM sequence: CTG
gggctgcccctcataagagt

SEQ ID NO: 24207 - DNA, 20 bp, Artificial Sequence
  Description of Artificial Sequence: Synthetic oligonucleotide
  Target: PCSK9; (+) strand; PAM type: YTN; PAM sequence: CTG
cccctcataagagtgcagtg

SEQ ID NO: 24208 - DNA, 20 bp, Artificial Sequence
  Description of Artificial Sequence: Synthetic oligonucleotide
  Target: PCSK9; (+) strand; PAM type: YTN; PAM sequence: CTC
ataagagtgcagtggaggat

SEQ ID NO: 24209 - DNA, 20 bp, Artificial Sequence
  Description of Artificial Sequence: Synthetic oligonucleotide
  Target: PCSK9; (+) strand; PAM type: YTN; PAM sequence: CTG
cccctctggttccatctgtc

SEQ ID NO: 24210 - DNA, 20 bp, Artificial Sequence
  Description of Artificial Sequence: Synthetic oligonucleotide
  Target: PCSK9; (+) strand; PAM type: YTN; PAM sequence: CTC
tggttccatctgtcgcagag

SEQ ID NO: 24211 - DNA, 20 bp, Artificial Sequence
  Description of Artificial Sequence: Synthetic oligonucleotide
  Target: PCSK9; (+) strand; PAM type: YTN; PAM sequence: CTG
gttccatctgtcgcagagcc

SEQ ID NO: 24212 - DNA, 20 bp, Artificial Sequence
  Description of Artificial Sequence: Synthetic oligonucleotide
  Target: PCSK9; (+) strand; PAM type: YTN; PAM sequence: TTC
catctgtcgcagagcccagg

SEQ ID NO: 24213 - DNA, 20 bp, Artificial Sequence
  Description of Artificial Sequence: Synthetic oligonucleotide
  Target: PCSK9; (+) strand; PAM type: YTN; PAM sequence: CTG
tcgcagagcccagggtgctt

SEQ ID NO: 24214 - DNA, 20 bp, Artificial Sequence
  Description of Artificial Sequence: Synthetic oligonucleotide
  Target: PCSK9; (+) strand; PAM type: YTN; PAM sequence: CTT
ccttcctcccccacctccct

SEQ ID NO: 24215 - DNA, 20 bp, Artificial Sequence
  Description of Artificial Sequence: Synthetic oligonucleotide
  Target: PCSK9; (+) strand; PAM type: YTN; PAM sequence: TTC
cttcctcccccacctccctc

SEQ ID NO: 24216 - DNA, 20 bp, Artificial Sequence
  Description of Artificial Sequence: Synthetic oligonucleotide
  Target: PCSK9; (+) strand; PAM type: YTN; PAM sequence: CTT
cctcccccacctccctcaga

SEQ ID NO: 24217 - DNA, 20 bp, Artificial Sequence
  Description of Artificial Sequence: Synthetic oligonucleotide
  Target: PCSK9; (+) strand; PAM type: YTN; PAM sequence: TTC
ctcccccacctccctcagaa

SEQ ID NO: 24218 - DNA, 20 bp, Artificial Sequence
  Description of Artificial Sequence: Synthetic oligonucleotide
  Target: PCSK9; (+) strand; PAM type: YTN; PAM sequence: CTC
ccccacctccctcagaacac

SEQ ID NO: 24219 - DNA, 20 bp, Artificial Sequence
  Description of Artificial Sequence: Synthetic oligonucleotide
  Target: PCSK9; (+) strand; PAM type: YTN; PAM sequence: CTC
cctcagaacacacccactgc

SEQ ID NO: 24220 - DNA, 20 bp, Artificial Sequence
  Description of Artificial Sequence: Synthetic oligonucleotide
  Target: PCSK9; (+) strand; PAM type: YTN; PAM sequence: CTC
agaacacacccactgcatgc

SEQ ID NO: 24221 - DNA, 20 bp, Artificial Sequence
  Description of Artificial Sequence: Synthetic oligonucleotide
  Target: PCSK9; (+) strand; PAM type: YTN; PAM sequence: CTG
catgctggacagcagccccc

SEQ ID NO: 24222 - DNA, 20 bp, Artificial Sequence
  Description of Artificial Sequence: Synthetic oligonucleotide
  Target: PCSK9; (+) strand; PAM type: YTN; PAM sequence: CTG
gacagcagcccccttcctgg

SEQ ID NO: 24223 - DNA, 20 bp, Artificial Sequence
  Description of Artificial Sequence: Synthetic oligonucleotide
  Target: PCSK9; (+) strand; PAM type: YTN; PAM sequence: CTT
cctgggcctggggacatcca

SEQ ID NO: 24224 - DNA, 20 bp, Artificial Sequence
  Description of Artificial Sequence: Synthetic oligonucleotide
  Target: PCSK9; (+) strand; PAM type: YTN; PAM sequence: TTC
ctgggcctggggacatccat

SEQ ID NO: 24225 - DNA, 20 bp, Artificial Sequence
  Description of Artificial Sequence: Synthetic oligonucleotide
  Target: PCSK9; (+) strand; PAM type: YTN; PAM sequence: CTG
ggcctggggacatccatgtc

SEQ ID NO: 24226 - DNA, 20 bp, Artificial Sequence
  Description of Artificial Sequence: Synthetic oligonucleotide
  Target: PCSK9; (+) strand; PAM type: YTN; PAM sequence: CTG
gggacatccatgtccctctg

SEQ ID NO: 24227 - DNA, 20 bp, Artificial Sequence
  Description of Artificial Sequence: Synthetic oligonucleotide
  Target: PCSK9; (+) strand; PAM type: YTN; PAM sequence: CTC
tgtgcacaggcttcatcatt

SEQ ID NO: 24228 - DNA, 20 bp, Artificial Sequence
  Description of Artificial Sequence: Synthetic oligonucleotide
  Target: PCSK9; (+) strand; PAM type: YTN; PAM sequence: CTG
tgcacaggcttcatcattct

SEQ ID NO: 24229 - DNA, 20 bp, Artificial Sequence
  Description of Artificial Sequence: Synthetic oligonucleotide
  Target: PCSK9; (+) strand; PAM type: YTN; PAM sequence: CTT
catcattctctgggtgcacg

SEQ ID NO: 24230 - DNA, 20 bp, Artificial Sequence
  Description of Artificial Sequence: Synthetic oligonucleotide
  Target: PCSK9; (+) strand; PAM type: YTN; PAM sequence: TTC
atcattctctgggtgcacgg

SEQ ID NO: 24231 - DNA, 20 bp, Artificial Sequence
  Description of Artificial Sequence: Synthetic oligonucleotide
  Target: PCSK9; (+) strand; PAM type: YTN; PAM sequence: TTC
tctgggtgcacggtaacgac

SEQ ID NO: 24232 - DNA, 20 bp, Artificial Sequence
  Description of Artificial Sequence: Synthetic oligonucleotide
  Target: PCSK9; (+) strand; PAM type: YTN; PAM sequence: CTC
tgggtgcacggtaacgaccc

SEQ ID NO: 24233 - DNA, 20 bp, Artificial Sequence
  Description of Artificial Sequence: Synthetic oligonucleotide
  Target: PCSK9; (+) strand; PAM type: YTN; PAM sequence: CTG
ggtgcacggtaacgaccccg

SEQ ID NO: 24234 - DNA, 20 bp, Artificial Sequence
  Description of Artificial Sequence: Synthetic oligonucleotide
  Target: PCSK9; (+) strand; PAM type: YTN; PAM sequence: TTA
gctcccatctattcttgctc

SEQ ID NO: 24235 - DNA, 20 bp, Artificial Sequence
  Description of Artificial Sequence: Synthetic oligonucleotide
  Target: PCSK9; (+) strand; PAM type: YTN; PAM sequence: CTC
ccatctattcttgctccagg

SEQ ID NO: 24236 - DNA, 20 bp, Artificial Sequence
  Description of Artificial Sequence: Synthetic oligonucleotide
  Target: PCSK9; (+) strand; PAM type: YTN; PAM sequence: CTA
ttcttgctccaggggaggcc

SEQ ID NO: 24237 - DNA, 20 bp, Artificial Sequence
  Description of Artificial Sequence: Synthetic oligonucleotide
  Target: PCSK9; (+) strand; PAM type: YTN; PAM sequence: TTC
ttgctccaggggaggccttt

SEQ ID NO: 24238 - DNA, 20 bp, Artificial Sequence
  Description of Artificial Sequence: Synthetic oligonucleotide
  Target: PCSK9; (+) strand; PAM type: YTN; PAM sequence: CTT
gctccaggggaggcctttga

SEQ ID NO: 24239 - DNA, 20 bp, Artificial Sequence
  Description of Artificial Sequence: Synthetic oligonucleotide
  Target: PCSK9; (+) strand; PAM type: YTN; PAM sequence: TTG
ctccaggggaggcctttgat

SEQ ID NO: 24240 - DNA, 20 bp, Artificial Sequence
  Description of Artificial Sequence: Synthetic oligonucleotide
  Target: PCSK9; (+) strand; PAM type: YTN; PAM sequence: CTC
caggggaggcctttgatgag

SEQ ID NO: 24241 - DNA, 20 bp, Artificial Sequence
  Description of Artificial Sequence: Synthetic oligonucleotide
  Target: PCSK9; (+) strand; PAM type: YTN; PAM sequence: CTT
tgatgaggaagctgccaaaa

SEQ ID NO: 24242 - DNA, 20 bp, Artificial Sequence
  Description of Artificial Sequence: Synthetic oligonucleotide
  Target: PCSK9; (+) strand; PAM type: YTN; PAM sequence: TTT
gatgaggaagctgccaaaag

SEQ ID NO: 24243 - DNA, 20 bp, Artificial Sequence
  Description of Artificial Sequence: Synthetic oligonucleotide
  Target: PCSK9; (+) strand; PAM type: YTN; PAM sequence: TTG
atgaggaagctgccaaaagc

SEQ ID NO: 24244 - DNA, 20 bp, Artificial Sequence
  Description of Artificial Sequence: Synthetic oligonucleotide
  Target: PCSK9; (+) strand; PAM type: YTN; PAM sequence: CTG
ccaaaagcacattgcaaata

SEQ ID NO: 24245 - DNA, 20 bp, Artificial Sequence
  Description of Artificial Sequence: Synthetic oligonucleotide
  Target: PCSK9; (+) strand; PAM type: YTN; PAM sequence: TTG
caaatacaattccaattaca

SEQ ID NO: 24246 - DNA, 20 bp, Artificial Sequence
  Description of Artificial Sequence: Synthetic oligonucleotide
  Target: PCSK9; (+) strand; PAM type: YTN; PAM sequence: TTC
caattacaggcaacaggaag

SEQ ID NO: 24247 - DNA, 20 bp, Artificial Sequence
  Description of Artificial Sequence: Synthetic oligonucleotide
  Target: PCSK9; (+) strand; PAM type: YTN; PAM sequence: TTA
caggcaacaggaaggagaac

SEQ ID NO: 24248 - DNA, 20 bp, Artificial Sequence
  Description of Artificial Sequence: Synthetic oligonucleotide
  Target: PCSK9; (+) strand; PAM type: YTN; PAM sequence: CTC
tgccacctctgtcagcaaac

SEQ ID NO: 24249 - DNA, 20 bp, Artificial Sequence
  Description of Artificial Sequence: Synthetic oligonucleotide
  Target: PCSK9; (+) strand; PAM type: YTN; PAM sequence: CTG
ccacctctgtcagcaaacca

SEQ ID NO: 24250 - DNA, 20 bp, Artificial Sequence
  Description of Artificial Sequence: Synthetic oligonucleotide
  Target: PCSK9; (+) strand; PAM type: YTN; PAM sequence: CTC
tgtcagcaaaccatgagctc

SEQ ID NO: 24251 - DNA, 20 bp, Artificial Sequence
  Description of Artificial Sequence: Synthetic oligonucleotide
  Target: PCSK9; (+) strand; PAM type: YTN; PAM sequence: CTG
tcagcaaaccatgagctcct

SEQ ID NO: 24252 - DNA, 20 bp, Artificial Sequence
  Description of Artificial Sequence: Synthetic oligonucleotide
  Target: PCSK9; (+) strand; PAM type: YTN; PAM sequence: CTC
ctactctgtgctgcgatggc

SEQ ID NO: 24253 - DNA, 20 bp, Artificial Sequence
  Description of Artificial Sequence: Synthetic oligonucleotide
  Target: PCSK9; (+) strand; PAM type: YTN; PAM sequence: CTA
ctctgtgctgcgatggcggg

SEQ ID NO: 24254 - DNA, 20 bp, Artificial Sequence
  Description of Artificial Sequence: Synthetic oligonucleotide
  Target: PCSK9; (+) strand; PAM type: YTN; PAM sequence: CTC
tgtgctgcgatggcgggctc

SEQ ID NO: 24255 - DNA, 20 bp, Artificial Sequence
  Description of Artificial Sequence: Synthetic oligonucleotide
  Target: PCSK9; (+) strand; PAM type: YTN; PAM sequence: CTG
tgctgcgatggcgggctcga

SEQ ID NO: 24256 - DNA, 20 bp, Artificial Sequence
  Description of Artificial Sequence: Synthetic oligonucleotide
  Target: PCSK9; (+) strand; PAM type: YTN; PAM sequence: CTG
cgatggcgggctcgatgggg

SEQ ID NO: 24257 - DNA, 20 bp, Artificial Sequence
  Description of Artificial Sequence: Synthetic oligonucleotide
  Target: PCSK9; (+) strand; PAM type: YTN; PAM sequence: CTC
gatggggataactctgacct

SEQ ID NO: 24258 - DNA, 20 bp, Artificial Sequence
  Description of Artificial Sequence: Synthetic oligonucleotide
  Target: PCSK9; (+) strand; PAM type: YTN; PAM sequence: CTC
tgaccttacctcatggagtc

SEQ ID NO: 24259 - DNA, 20 bp, Artificial Sequence
  Description of Artificial Sequence: Synthetic oligonucleotide
  Target: PCSK9; (+) strand; PAM type: YTN; PAM sequence: CTG
accttacctcatggagtcac

SEQ ID NO: 24260 - DNA, 20 bp, Artificial Sequence
  Description of Artificial Sequence: Synthetic oligonucleotide
  Target: PCSK9; (+) strand; PAM type: YTN; PAM sequence: CTT
acctcatggagtcactgtca

SEQ ID NO: 24261 - DNA, 20 bp, Artificial Sequence
  Description of Artificial Sequence: Synthetic oligonucleotide
  Target: PCSK9; (+) strand; PAM type: YTN; PAM sequence: TTA
cctcatggagtcactgtcaa

SEQ ID NO: 24262 - DNA, 20 bp, Artificial Sequence
  Description of Artificial Sequence: Synthetic oligonucleotide
  Target: PCSK9; (+) strand; PAM type: YTN; PAM sequence: CTC
atggagtcactgtcaaccca

SEQ ID NO: 24263 - DNA, 20 bp, Artificial Sequence
  Description of Artificial Sequence: Synthetic oligonucleotide
  Target: PCSK9; (+) strand; PAM type: YTN; PAM sequence: CTG
tcaacccactggttgcactg

SEQ ID NO: 24264 - DNA, 20 bp, Artificial Sequence
  Description of Artificial Sequence: Synthetic oligonucleotide
  Target: PCSK9; (+) strand; PAM type: YTN; PAM sequence: CTG
gttgcactgtctttgtgcac

SEQ ID NO: 24265 - DNA, 20 bp, Artificial Sequence
  Description of Artificial Sequence: Synthetic oligonucleotide
  Target: PCSK9; (+) strand; PAM type: YTN; PAM sequence: TTG
cactgtctttgtgcactggc

SEQ ID NO: 24266 - DNA, 20 bp, Artificial Sequence
  Description of Artificial Sequence: Synthetic oligonucleotide
  Target: PCSK9; (+) strand; PAM type: YTN; PAM sequence: CTG
tctttgtgcactggctctct

SEQ ID NO: 24267 - DNA, 20 bp, Artificial Sequence
  Description of Artificial Sequence: Synthetic oligonucleotide
  Target: PCSK9; (+) strand; PAM type: YTN; PAM sequence: CTT
tgtgcactggctctctggag

SEQ ID NO: 24268 - DNA, 20 bp, Artificial Sequence
  Description of Artificial Sequence: Synthetic oligonucleotide
  Target: PCSK9; (+) strand; PAM type: YTN; PAM sequence: TTT
gtgcactggctctctggagt

SEQ ID NO: 24269 - DNA, 20 bp, Artificial Sequence
  Description of Artificial Sequence: Synthetic oligonucleotide
  Target: PCSK9; (+) strand; PAM type: YTN; PAM sequence: TTG
tgcactggctctctggagtg

SEQ ID NO: 24270 - DNA, 20 bp, Artificial Sequence
  Description of Artificial Sequence: Synthetic oligonucleotide
  Target: PCSK9; (+) strand; PAM type: YTN; PAM sequence: CTG
gctctctggagtgaggtctt

SEQ ID NO: 24271 - DNA, 20 bp, Artificial Sequence
  Description of Artificial Sequence: Synthetic oligonucleotide
  Target: PCSK9; (+) strand; PAM type: YTN; PAM sequence: CTC
tctggagtgaggtctttgca

SEQ ID NO: 24272 - DNA, 20 bp, Artificial Sequence
  Description of Artificial Sequence: Synthetic oligonucleotide
  Target: PCSK9; (+) strand; PAM type: YTN; PAM sequence: CTC
tggagtgaggtctttgcaaa

SEQ ID NO: 24273 - DNA, 20 bp, Artificial Sequence
  Description of Artificial Sequence: Synthetic oligonucleotide
  Target: PCSK9; (+) strand; PAM type: YTN; PAM sequence: CTG
gagtgaggtctttgcaaaca

SEQ ID NO: 24274 - DNA, 20 bp, Artificial Sequence
  Description of Artificial Sequence: Synthetic oligonucleotide
  Target: PCSK9; (+) strand; PAM type: YTN; PAM sequence: CTT
tgcaaacaaagtggaaagag

SEQ ID NO: 24275 - DNA, 20 bp, Artificial Sequence
  Description of Artificial Sequence: Synthetic oligonucleotide
  Target: PCSK9; (+) strand; PAM type: YTN; PAM sequence: TTT
gcaaacaaagtggaaagagc

SEQ ID NO: 24276 - DNA, 20 bp, Artificial Sequence
  Description of Artificial Sequence: Synthetic oligonucleotide
  Target: PCSK9; (+) strand; PAM type: YTN; PAM sequence: TTG
caaacaaagtggaaagagca

SEQ ID NO: 24277 - DNA, 20 bp, Artificial Sequence
  Description of Artificial Sequence: Synthetic oligonucleotide
  Target: PCSK9; (+) strand; PAM type: YTN; PAM sequence: CTT
tggactccagcacctagatt

SEQ ID NO: 24278 - DNA, 20 bp, Artificial Sequence
  Description of Artificial Sequence: Synthetic oligonucleotide
  Target: PCSK9; (+) strand; PAM type: YTN; PAM sequence: TTT
ggactccagcacctagattc

SEQ ID NO: 24279 - DNA, 20 bp, Artificial Sequence
  Description of Artificial Sequence: Synthetic oligonucleotide
  Target: PCSK9; (+) strand; PAM type: YTN; PAM sequence: TTG
gactccagcacctagattca

SEQ ID NO: 24280 - DNA, 20 bp, Artificial Sequence
  Description of Artificial Sequence: Synthetic oligonucleotide
  Target: PCSK9; (+) strand; PAM type: YTN; PAM sequence: CTC
cagcacctagattcagagca

SEQ ID NO: 24281 - DNA, 20 bp, Artificial Sequence
  Description of Artificial Sequence: Synthetic oligonucleotide
  Target: PCSK9; (+) strand; PAM type: YTN; PAM sequence: CTA
gattcagagcaggccatttc

SEQ ID NO: 24282 - DNA, 20 bp, Artificial Sequence
  Description of Artificial Sequence: Synthetic oligonucleotide
  Target: PCSK9; (+) strand; PAM type: YTN; PAM sequence: TTC
agagcaggccatttcactcg

SEQ ID NO: 24283 - DNA, 20 bp, Artificial Sequence
  Description of Artificial Sequence: Synthetic oligonucleotide
  Target: PCSK9; (+) strand; PAM type: YTN; PAM sequence: TTT
cactcggaatctgctgtgca

SEQ ID NO: 24284 - DNA, 20 bp, Artificial Sequence
  Description of Artificial Sequence: Synthetic oligonucleotide
  Target: PCSK9; (+) strand; PAM type: YTN; PAM sequence: TTC
actcggaatctgctgtgcat

SEQ ID NO: 24285 - DNA, 20 bp, Artificial Sequence
  Description of Artificial Sequence: Synthetic oligonucleotide
  Target: PCSK9; (+) strand; PAM type: YTN; PAM sequence: CTC
ggaatctgctgtgcatctgc

SEQ ID NO: 24286 - DNA, 20 bp, Artificial Sequence
  Description of Artificial Sequence: Synthetic oligonucleotide
  Target: PCSK9; (+) strand; PAM type: YTN; PAM sequence: CTG
ctgtgcatctgcaagggagg

SEQ ID NO: 24287 - DNA, 20 bp, Artificial Sequence
  Description of Artificial Sequence: Synthetic oligonucleotide
  Target: PCSK9; (+) strand; PAM type: YTN; PAM sequence: CTG
tgcatctgcaagggaggatc

SEQ ID NO: 24288 - DNA, 20 bp, Artificial Sequence
  Description of Artificial Sequence: Synthetic oligonucleotide
  Target: PCSK9; (+) strand; PAM type: YTN; PAM sequence: CTG
caagggaggatcataaattc

SEQ ID NO: 24289 - DNA, 20 bp, Artificial Sequence
  Description of Artificial Sequence: Synthetic oligonucleotide
  Target: PCSK9; (+) strand; PAM type: YTN; PAM sequence: TTC
gcctttgtttcttcccagta

SEQ ID NO: 24290 - DNA, 20 bp, Artificial Sequence
  Description of Artificial Sequence: Synthetic oligonucleotide
  Target: PCSK9; (+) strand; PAM type: YTN; PAM sequence: CTT
tgtttcttcccagtatcgac

SEQ ID NO: 24291 - DNA, 20 bp, Artificial Sequence
  Description of Artificial Sequence: Synthetic oligonucleotide
  Target: PCSK9; (+) strand; PAM type: YTN; PAM sequence: TTT
gtttcttcccagtatcgaca

SEQ ID NO: 24292 - DNA, 20 bp, Artificial Sequence
  Description of Artificial Sequence: Synthetic oligonucleotide
  Target: PCSK9; (+) strand; PAM type: YTN; PAM sequence: TTG
tttcttcccagtatcgacag

SEQ ID NO: 24293 - DNA, 20 bp, Artificial Sequence
  Description of Artificial Sequence: Synthetic oligonucleotide
  Target: PCSK9; (+) strand; PAM type: YTN; PAM sequence: TTT
cttcccagtatcgacagccc

SEQ ID NO: 24294 - DNA, 20 bp, Artificial Sequence
  Description of Artificial Sequence: Synthetic oligonucleotide
  Target: PCSK9; (+) strand; PAM type: YTN; PAM sequence: TTC
ttcccagtatcgacagccct

SEQ ID NO: 24295 - DNA, 20 bp, Artificial Sequence
  Description of Artificial Sequence: Synthetic oligonucleotide
  Target: PCSK9; (+) strand; PAM type: YTN; PAM sequence: CTT
cccagtatcgacagcccttc

SEQ ID NO: 24296 - DNA, 20 bp, Artificial Sequence
  Description of Artificial Sequence: Synthetic oligonucleotide
  Target: PCSK9; (+) strand; PAM type: YTN; PAM sequence: TTC
ccagtatcgacagcccttcc

SEQ ID NO: 24297 - DNA, 20 bp, Artificial Sequence
  Description of Artificial Sequence: Synthetic oligonucleotide
  Target: PCSK9; (+) strand; PAM type: YTN; PAM sequence: CTT
ccagaaagagcaagcctcat

SEQ ID NO: 24298 - DNA, 20 bp, Artificial Sequence
  Description of Artificial Sequence: Synthetic oligonucleotide
  Target: PCSK9; (+) strand; PAM type: YTN; PAM sequence: TTC
cagaaagagcaagcctcatg

SEQ ID NO: 24299 - DNA, 20 bp, Artificial Sequence
  Description of Artificial Sequence: Synthetic oligonucleotide
  Target: PCSK9; (+) strand; PAM type: YTN; PAM sequence: CTC
atgtcatgccacatgtacaa

SEQ ID NO: 24300 - DNA, 20 bp, Artificial Sequence
  Description of Artificial Sequence: Synthetic oligonucleotide
  Target: PCSK9; (+) strand; PAM type: YTN; PAM sequence: CTG
aggccaggagctctctttcc

SEQ ID NO: 24301 - DNA, 20 bp, Artificial Sequence
  Description of Artificial Sequence: Synthetic oligonucleotide
  Target: PCSK9; (+) strand; PAM type: YTN; PAM sequence: CTC
tctttccccttttcatcctc

SEQ ID NO: 24302 - DNA, 20 bp, Artificial Sequence
  Description of Artificial Sequence: Synthetic oligonucleotide
  Target: PCSK9; (+) strand; PAM type: YTN; PAM sequence: CTC
tttccccttttcatcctcct

SEQ ID NO: 24303 - DNA, 20 bp, Artificial Sequence
  Description of Artificial Sequence: Synthetic oligonucleotide
  Target: PCSK9; (+) strand; PAM type: YTN; PAM sequence: CTT
tccccttttcatcctcctgc

SEQ ID NO: 24304 - DNA, 20 bp, Artificial Sequence
  Description of Artificial Sequence: Synthetic oligonucleotide
  Target: PCSK9; (+) strand; PAM type: YTN; PAM sequence: TTT
ccccttttcatcctcctgcc

SEQ ID NO: 24305 - DNA, 20 bp, Artificial Sequence
  Description of Artificial Sequence: Synthetic oligonucleotide
  Target: PCSK9; (+) strand; PAM type: YTN; PAM sequence: TTC
cccttttcatcctcctgcct

SEQ ID NO: 24306 - DNA, 20 bp, Artificial Sequence
  Description of Artificial Sequence: Synthetic oligonucleotide
  Target: PCSK9; (+) strand; PAM type: YTN; PAM sequence: CTT
ttcatcctcctgcctggtac

SEQ ID NO: 24307 - DNA, 20 bp, Artificial Sequence
  Description of Artificial Sequence: Synthetic oligonucleotide
  Target: PCSK9; (+) strand; PAM type: YTN; PAM sequence: TTT
tcatcctcctgcctggtaca

SEQ ID NO: 24308 - DNA, 20 bp, Artificial Sequence
  Description of Artificial Sequence: Synthetic oligonucleotide
  Target: PCSK9; (+) strand; PAM type: YTN; PAM sequence: TTT
catcctcctgcctggtacac

SEQ ID NO: 24309 - DNA, 20 bp, Artificial Sequence
  Description of Artificial Sequence: Synthetic oligonucleotide
  Target: PCSK9; (+) strand; PAM type: YTN; PAM sequence: TTC
atcctcctgcctggtacaca

SEQ ID NO: 24310 - DNA, 20 bp, Artificial Sequence
  Description of Artificial Sequence: Synthetic oligonucleotide
  Target: PCSK9; (+) strand; PAM type: YTN; PAM sequence: CTC
ctgcctggtacacaataggt

SEQ ID NO: 24311 - DNA, 20 bp, Artificial Sequence
  Description of Artificial Sequence: Synthetic oligonucleotide
  Target: PCSK9; (+) strand; PAM type: YTN; PAM sequence: CTG
cctggtacacaataggtgtt

SEQ ID NO: 24312 - DNA, 20 bp, Artificial Sequence
  Description of Artificial Sequence: Synthetic oligonucleotide
  Target: PCSK9; (+) strand; PAM type: YTN; PAM sequence: CTG
gtacacaataggtgtttact

SEQ ID NO: 24313 - DNA, 20 bp, Artificial Sequence
  Description of Artificial Sequence: Synthetic oligonucleotide
  Target: PCSK9; (+) strand; PAM type: YTN; PAM sequence: TTT
actggatgcttgtccagttg

SEQ ID NO: 24314 - DNA, 20 bp, Artificial Sequence
  Description of Artificial Sequence: Synthetic oligonucleotide
  Target: PCSK9; (+) strand; PAM type: YTN; PAM sequence: TTA
ctggatgcttgtccagttga

SEQ ID NO: 24315 - DNA, 20 bp, Artificial Sequence
  Description of Artificial Sequence: Synthetic oligonucleotide
  Target: PCSK9; (+) strand; PAM type: YTN; PAM sequence: CTG
gatgcttgtccagttgattt

SEQ ID NO: 24316 - DNA, 20 bp, Artificial Sequence
  Description of Artificial Sequence: Synthetic oligonucleotide
  Target: PCSK9; (+) strand; PAM type: YTN; PAM sequence: CTT
gtccagttgatttcttgaac

SEQ ID NO: 24317 - DNA, 20 bp, Artificial Sequence
  Description of Artificial Sequence: Synthetic oligonucleotide
  Target: PCSK9; (+) strand; PAM type: YTN; PAM sequence: TTG
tccagttgatttcttgaaca

SEQ ID NO: 24318 - DNA, 20 bp, Artificial Sequence
  Description of Artificial Sequence: Synthetic oligonucleotide
  Target: PCSK9; (+) strand; PAM type: YTN; PAM sequence: TTG
atttcttgaacatggtgtgt

SEQ ID NO: 24319 - DNA, 20 bp, Artificial Sequence
  Description of Artificial Sequence: Synthetic oligonucleotide
  Target: PCSK9; (+) strand; PAM type: YTN; PAM sequence: TTT
cttgaacatggtgtgtaaaa

SEQ ID NO: 24320 - DNA, 20 bp, Artificial Sequence
  Description of Artificial Sequence: Synthetic oligonucleotide
  Target: PCSK9; (+) strand; PAM type: YTN; PAM sequence: TTC
ttgaacatggtgtgtaaaag

SEQ ID NO: 24321 - DNA, 20 bp, Artificial Sequence
  Description of Artificial Sequence: Synthetic oligonucleotide
  Target: PCSK9; (+) strand; PAM type: YTN; PAM sequence: CTT
gaacatggtgtgtaaaagga

SEQ ID NO: 24322 - DNA, 20 bp, Artificial Sequence
  Description of Artificial Sequence: Synthetic oligonucleotide
  Target: PCSK9; (+) strand; PAM type: YTN; PAM sequence: TTG
aacatggtgtgtaaaaggaa

SEQ ID NO: 24323 - DNA, 20 bp, Artificial Sequence
  Description of Artificial Sequence: Synthetic oligonucleotide
  Target: PCSK9; (+) strand; PAM type: YTN; PAM sequence: CTT
tgcaaattgaatcttctgga

SEQ ID NO: 24324 - DNA, 20 bp, Artificial Sequence
  Description of Artificial Sequence: Synthetic oligonucleotide
  Target: PCSK9; (+) strand; PAM type: YTN; PAM sequence: TTT
gcaaattgaatcttctggaa

SEQ ID NO: 24325 - DNA, 20 bp, Artificial Sequence
  Description of Artificial Sequence: Synthetic oligonucleotide
  Target: PCSK9; (+) strand; PAM type: YTN; PAM sequence: TTG
caaattgaatcttctggaaa

SEQ ID NO: 24326 - DNA, 20 bp, Artificial Sequence
  Description of Artificial Sequence: Synthetic oligonucleotide
  Target: PCSK9; (+) strand; PAM type: YTN; PAM sequence: TTG
aatcttctggaaagctgagc

SEQ ID NO: 24327 - DNA, 20 bp, Artificial Sequence
  Description of Artificial Sequence: Synthetic oligonucleotide
  Target: PCSK9; (+) strand; PAM type: YTN; PAM sequence: CTT
ctggaaagctgagcttgtgc

SEQ ID NO: 24328 - DNA, 20 bp, Artificial Sequence
  Description of Artificial Sequence: Synthetic oligonucleotide
  Target: PCSK9; (+) strand; PAM type: YTN; PAM sequence: TTC
tggaaagctgagcttgtgcc

SEQ ID NO: 24329 - DNA, 20 bp, Artificial Sequence
  Description of Artificial Sequence: Synthetic oligonucleotide
  Target: PCSK9; (+) strand; PAM type: YTN; PAM sequence: CTG
gaaagctgagcttgtgccta

SEQ ID NO: 24330 - DNA, 20 bp, Artificial Sequence
  Description of Artificial Sequence: Synthetic oligonucleotide
  Target: PCSK9; (+) strand; PAM type: YTN; PAM sequence: CTG
agcttgtgcctaccatagaa

SEQ ID NO: 24331 - DNA, 20 bp, Artificial Sequence
  Description of Artificial Sequence: Synthetic oligonucleotide
  Target: PCSK9; (+) strand; PAM type: YTN; PAM sequence: CTT
gtgcctaccatagaattctg

SEQ ID NO: 24332 - DNA, 20 bp, Artificial Sequence
  Description of Artificial Sequence: Synthetic oligonucleotide
  Target: PCSK9; (+) strand; PAM type: YTN; PAM sequence: TTG
tgcctaccatagaattctga

SEQ ID NO: 24333 - DNA, 20 bp, Artificial Sequence
  Description of Artificial Sequence: Synthetic oligonucleotide
  Target: PCSK9; (+) strand; PAM type: YTN; PAM sequence: CTA
ccatagaattctgaatgtac

SEQ ID NO: 24334 - DNA, 20 bp, Artificial Sequence
  Description of Artificial Sequence: Synthetic oligonucleotide
  Target: PCSK9; (+) strand; PAM type: YTN; PAM sequence: TTC
tgaatgtacctatatgacgt

SEQ ID NO: 24335 - DNA, 20 bp, Artificial Sequence
  Description of Artificial Sequence: Synthetic oligonucleotide
  Target: PCSK9; (+) strand; PAM type: YTN; PAM sequence: CTG
aatgtacctatatgacgtct

SEQ ID NO: 24336 - DNA, 20 bp, Artificial Sequence
  Description of Artificial Sequence: Synthetic oligonucleotide
  Target: PCSK9; (+) strand; PAM type: YTN; PAM sequence: CTA
tatgacgtctttgcaaactt

SEQ ID NO: 24337 - DNA, 20 bp, Artificial Sequence
  Description of Artificial Sequence: Synthetic oligonucleotide
  Target: PCSK9; (+) strand; PAM type: YTN; PAM sequence: CTT
tgcaaacttaaaacctgaat

SEQ ID NO: 24338 - DNA, 20 bp, Artificial Sequence
  Description of Artificial Sequence: Synthetic oligonucleotide
  Target: PCSK9; (+) strand; PAM type: YTN; PAM sequence: TTT
gcaaacttaaaacctgaatc

SEQ ID NO: 24339 - DNA, 20 bp, Artificial Sequence
  Description of Artificial Sequence: Synthetic oligonucleotide
  Target: PCSK9; (+) strand; PAM type: YTN; PAM sequence: TTG
caaacttaaaacctgaatct

SEQ ID NO: 24340 - DNA, 20 bp, Artificial Sequence
  Description of Artificial Sequence: Synthetic oligonucleotide
  Target: PCSK9; (+) strand; PAM type: YTN; PAM sequence: CTT
aaaacctgaatctttgtagt

SEQ ID NO: 24341 - DNA, 20 bp, Artificial Sequence
  Description of Artificial Sequence: Synthetic oligonucleotide
  Target: PCSK9; (+) strand; PAM type: YTN; PAM sequence: TTA
aaacctgaatctttgtagta

SEQ ID NO: 24342 - DNA, 20 bp, Artificial Sequence
  Description of Artificial Sequence: Synthetic oligonucleotide
  Target: PCSK9; (+) strand; PAM type: YTN; PAM sequence: CTG
aatctttgtagtataaatcc

SEQ ID NO: 24343 - DNA, 20 bp, Artificial Sequence
  Description of Artificial Sequence: Synthetic oligonucleotide
  Target: PCSK9; (+) strand; PAM type: YTN; PAM sequence: CTT
tgtagtataaatcccttgaa

SEQ ID NO: 24344 - DNA, 20 bp, Artificial Sequence
  Description of Artificial Sequence: Synthetic oligonucleotide
  Target: PCSK9; (+) strand; PAM type: YTN; PAM sequence: TTT
gtagtataaatcccttgaaa

SEQ ID NO: 24345 - DNA, 20 bp, Artificial Sequence
  Description of Artificial Sequence: Synthetic oligonucleotide
  Target: PCSK9; (+) strand; PAM type: YTN; PAM sequence: TTG
tagtataaatcccttgaaat

SEQ ID NO: 24346 - DNA, 20 bp, Artificial Sequence
  Description of Artificial Sequence: Synthetic oligonucleotide
  Target: PCSK9; (+) strand; PAM type: YTN; PAM sequence: CTT
gaaatgcatgtaggctggac

SEQ ID NO: 24347 - DNA, 20 bp, Artificial Sequence
  Description of Artificial Sequence: Synthetic oligonucleotide
  Target: PCSK9; (+) strand; PAM type: YTN; PAM sequence: TTG
aaatgcatgtaggctggaca

SEQ ID NO: 24348 - DNA, 20 bp, Artificial Sequence
  Description of Artificial Sequence: Synthetic oligonucleotide
  Target: PCSK9; (+) strand; PAM type: YTN; PAM sequence: CTG
gacatcaaaagcaagcaatc

SEQ ID NO: 24349 - DNA, 20 bp, Artificial Sequence
  Description of Artificial Sequence: Synthetic oligonucleotide
  Target: PCSK9; (+) strand; PAM type: YTN; PAM sequence: CTC
ttcaaggagcagctagttgg

SEQ ID NO: 24350 - DNA, 20 bp, Artificial Sequence
  Description of Artificial Sequence: Synthetic oligonucleotide
  Target: PCSK9; (+) strand; PAM type: YTN; PAM sequence: CTT
caaggagcagctagttggta

SEQ ID NO: 24351 - DNA, 20 bp, Artificial Sequence
  Description of Artificial Sequence: Synthetic oligonucleotide
  Target: PCSK9; (+) strand; PAM type: YTN; PAM sequence: TTC
aaggagcagctagttggtaa

SEQ ID NO: 24352 - DNA, 20 bp, Artificial Sequence
  Description of Artificial Sequence: Synthetic oligonucleotide
  Target: PCSK9; (+) strand; PAM type: YTN; PAM sequence: CTA
gttggtaaggtcagtgtgca

SEQ ID NO: 24353 - DNA, 20 bp, Artificial Sequence
  Description of Artificial Sequence: Synthetic oligonucleotide
  Target: PCSK9; (+) strand; PAM type: YTN; PAM sequence: TTG
gtaaggtcagtgtgcagggt

SEQ ID NO: 24354 - DNA, 20 bp, Artificial Sequence
  Description of Artificial Sequence: Synthetic oligonucleotide
  Target: PCSK9; (+) strand; PAM type: YTN; PAM sequence: CTA
agtttagaaggctgccaggt

SEQ ID NO: 24355 - DNA, 20 bp, Artificial Sequence
  Description of Artificial Sequence: Synthetic oligonucleotide
  Target: PCSK9; (+) strand; PAM type: YTN; PAM sequence: TTT
agaaggctgccaggttaagg

SEQ ID NO: 24356 - DNA, 20 bp, Artificial Sequence
  Description of Artificial Sequence: Synthetic oligonucleotide
  Target: PCSK9; (+) strand; PAM type: YTN; PAM sequence: TTA
gaaggctgccaggttaaggc

SEQ ID NO: 24357 - DNA, 20 bp, Artificial Sequence
  Description of Artificial Sequence: Synthetic oligonucleotide
  Target: PCSK9; (+) strand; PAM type: YTN; PAM sequence: CTG
ccaggttaaggccagtggaa

SEQ ID NO: 24358 - DNA, 20 bp, Artificial Sequence
  Description of Artificial Sequence: Synthetic oligonucleotide
  Target: PCSK9; (+) strand; PAM type: YTN; PAM sequence: TTA
aggccagtggaaagaattcg

SEQ ID NO: 24359 - DNA, 20 bp, Artificial Sequence
  Description of Artificial Sequence: Synthetic oligonucleotide
  Target: PCSK9; (+) strand; PAM type: YTN; PAM sequence: TTC
ggtgggcagcgaggagtcca

SEQ ID NO: 24360 - DNA, 20 bp, Artificial Sequence
  Description of Artificial Sequence: Synthetic oligonucleotide
  Target: PCSK9; (+) strand; PAM type: YTN; PAM sequence: TTG
attcagaagtctcactggtc

SEQ ID NO: 24361 - DNA, 20 bp, Artificial Sequence
  Description of Artificial Sequence: Synthetic oligonucleotide
  Target: PCSK9; (+) strand; PAM type: YTN; PAM sequence: TTC
agaagtctcactggtcagca

SEQ ID NO: 24362 - DNA, 20 bp, Artificial Sequence
  Description of Artificial Sequence: Synthetic oligonucleotide
  Target: PCSK9; (+) strand; PAM type: YTN; PAM sequence: CTC
actggtcagcaggagacaag

SEQ ID NO: 24363 - DNA, 20 bp, Artificial Sequence
  Description of Artificial Sequence: Synthetic oligonucleotide
  Target: PCSK9; (+) strand; PAM type: YTN; PAM sequence: CTG
gtcagcaggagacaaggtgg

SEQ ID NO: 24364 - DNA, 20 bp, Artificial Sequence
  Description of Artificial Sequence: Synthetic oligonucleotide
  Target: PCSK9; (+) strand; PAM type: YTN; PAM sequence: CTG
aaaaggtgggcccggcagaa

SEQ ID NO: 24365 - DNA, 20 bp, Artificial Sequence
  Description of Artificial Sequence: Synthetic oligonucleotide
  Target: PCSK9; (+) strand; PAM type: YTN; PAM sequence: CTT
ggagtctggcatcccacgca

SEQ ID NO: 24366 - DNA, 20 bp, Artificial Sequence
  Description of Artificial Sequence: Synthetic oligonucleotide
  Target: PCSK9; (+) strand; PAM type: YTN; PAM sequence: TTG
gagtctggcatcccacgcag

SEQ ID NO: 24367 - DNA, 20 bp, Artificial Sequence
  Description of Artificial Sequence: Synthetic oligonucleotide
  Target: PCSK9; (+) strand; PAM type: YTN; PAM sequence: CTG
gcatcccacgcagggtgaga

SEQ ID NO: 24368 - DNA, 20 bp, Artificial Sequence
  Description of Artificial Sequence: Synthetic oligonucleotide
  Target: PCSK9; (+) strand; PAM type: YTN; PAM sequence: CTA
gggcgccggcctgccttcca

SEQ ID NO: 24369 - DNA, 20 bp, Artificial Sequence
  Description of Artificial Sequence: Synthetic oligonucleotide
  Target: PCSK9; (+) strand; PAM type: YTN; PAM sequence: CTG
ccttccagcccagttaggat

SEQ ID NO: 24370 - DNA, 20 bp, Artificial Sequence
  Description of Artificial Sequence: Synthetic oligonucleotide
  Target: PCSK9; (+) strand; PAM type: YTN; PAM sequence: CTT
ccagcccagttaggatttgg

SEQ ID NO: 24371 - DNA, 20 bp, Artificial Sequence
  Description of Artificial Sequence: Synthetic oligonucleotide
  Target: PCSK9; (+) strand; PAM type: YTN; PAM sequence: TTC
cagcccagttaggatttggg

SEQ ID NO: 24372 - DNA, 20 bp, Artificial Sequence
  Description of Artificial Sequence: Synthetic oligonucleotide
  Target: PCSK9; (+) strand; PAM type: YTN; PAM sequence: TTA
ggatttgggagttttttctt

SEQ ID NO: 24373 - DNA, 20 bp, Artificial Sequence
  Description of Artificial Sequence: Synthetic oligonucleotide
  Target: PCSK9; (+) strand; PAM type: YTN; PAM sequence: TTT
gggagttttttcttccctct

SEQ ID NO: 24374 - DNA, 20 bp, Artificial Sequence
  Description of Artificial Sequence: Synthetic oligonucleotide
  Target: PCSK9; (+) strand; PAM type: YTN; PAM sequence: TTG
ggagttttttcttccctctg

SEQ ID NO: 24375 - DNA, 20 bp, Artificial Sequence
  Description of Artificial Sequence: Synthetic oligonucleotide
  Target: PCSK9; (+) strand; PAM type: YTN; PAM sequence: TTT
tttcttccctctgcgcgtaa

SEQ ID NO: 24376 - DNA, 20 bp, Artificial Sequence
  Description of Artificial Sequence: Synthetic oligonucleotide
  Target: PCSK9; (+) strand; PAM type: YTN; PAM sequence: TTT
ttcttccctctgcgcgtaat

SEQ ID NO: 24377 - DNA, 20 bp, Artificial Sequence
  Description of Artificial Sequence: Synthetic oligonucleotide
  Target: PCSK9; (+) strand; PAM type: YTN; PAM sequence: TTT
tcttccctctgcgcgtaatc

SEQ ID NO: 24378 - DNA, 20 bp, Artificial Sequence
  Description of Artificial Sequence: Synthetic oligonucleotide
  Target: PCSK9; (+) strand; PAM type: YTN; PAM sequence: TTT
cttccctctgcgcgtaatct

SEQ ID NO: 24379 - DNA, 20 bp, Artificial Sequence
  Description of Artificial Sequence: Synthetic oligonucleotide
  Target: PCSK9; (+) strand; PAM type: YTN; PAM sequence: TTC
ttccctctgcgcgtaatctg

SEQ ID NO: 24380 - DNA, 20 bp, Artificial Sequence
  Description of Artificial Sequence: Synthetic oligonucleotide
  Target: PCSK9; (+) strand; PAM type: YTN; PAM sequence: CTT
ccctctgcgcgtaatctgac

SEQ ID NO: 24381 - DNA, 20 bp, Artificial Sequence
  Description of Artificial Sequence: Synthetic oligonucleotide
  Target: PCSK9; (+) strand; PAM type: YTN; PAM sequence: TTC
cctctgcgcgtaatctgacg

SEQ ID NO: 24382 - DNA, 20 bp, Artificial Sequence
  Description of Artificial Sequence: Synthetic oligonucleotide
  Target: PCSK9; (+) strand; PAM type: YTN; PAM sequence: CTC
tgcgcgtaatctgacgctgt

SEQ ID NO: 24383 - DNA, 20 bp, Artificial Sequence
  Description of Artificial Sequence: Synthetic oligonucleotide
  Target: PCSK9; (+) strand; PAM type: YTN; PAM sequence: CTG
cgcgtaatctgacgctgttt

SEQ ID NO: 24384 - DNA, 20 bp, Artificial Sequence
  Description of Artificial Sequence: Synthetic oligonucleotide
  Target: PCSK9; (+) strand; PAM type: YTN; PAM sequence: CTG
acgctgtttggggagggcga

SEQ ID NO: 24385 - DNA, 20 bp, Artificial Sequence
  Description of Artificial Sequence: Synthetic oligonucleotide
  Target: PCSK9; (+) strand; PAM type: YTN; PAM sequence: CTG
tttggggagggcgaggccga

SEQ ID NO: 24386 - DNA, 20 bp, Artificial Sequence
  Description of Artificial Sequence: Synthetic oligonucleotide
  Target: PCSK9; (+) strand; PAM type: YTN; PAM sequence: TTT
ggggagggcgaggccgaaac

SEQ ID NO: 24387 - DNA, 20 bp, Artificial Sequence
  Description of Artificial Sequence: Synthetic oligonucleotide
  Target: PCSK9; (+) strand; PAM type: YTN; PAM sequence: TTG
gggagggcgaggccgaaacc

SEQ ID NO: 24388 - DNA, 20 bp, Artificial Sequence
  Description of Artificial Sequence: Synthetic oligonucleotide
  Target: PCSK9; (+) strand; PAM type: YTN; PAM sequence: CTG
atcctccagtccgggggttc

SEQ ID NO: 24389 - DNA, 20 bp, Artificial Sequence
  Description of Artificial Sequence: Synthetic oligonucleotide
  Target: PCSK9; (+) strand; PAM type: YTN; PAM sequence: CTC
cagtccgggggttccgttaa

SEQ ID NO: 24390 - DNA, 20 bp, Artificial Sequence
  Description of Artificial Sequence: Synthetic oligonucleotide
  Target: PCSK9; (+) strand; PAM type: YTN; PAM sequence: TTC
cgttaatgtttaatcagata

SEQ ID NO: 24391 - DNA, 20 bp, Artificial Sequence
  Description of Artificial Sequence: Synthetic oligonucleotide
  Target: PCSK9; (+) strand; PAM type: YTN; PAM sequence: TTA
atgtttaatcagataggatc

SEQ ID NO: 24392 - DNA, 20 bp, Artificial Sequence
  Description of Artificial Sequence: Synthetic oligonucleotide
  Target: PCSK9; (+) strand; PAM type: YTN; PAM sequence: TTT
aatcagataggatcgtccga

SEQ ID NO: 24393 - DNA, 20 bp, Artificial Sequence
  Description of Artificial Sequence: Synthetic oligonucleotide
  Target: PCSK9; (+) strand; PAM type: YTN; PAM sequence: TTA
atcagataggatcgtccgat

SEQ ID NO: 24394 - DNA, 20 bp, Artificial Sequence
  Description of Artificial Sequence: Synthetic oligonucleotide
  Target: PCSK9; (+) strand; PAM type: YTN; PAM sequence: CTC
tggtggcgtgatctgcgcgc

SEQ ID NO: 24395 - DNA, 20 bp, Artificial Sequence
  Description of Artificial Sequence: Synthetic oligonucleotide
  Target: PCSK9; (+) strand; PAM type: YTN; PAM sequence: CTG
gtggcgtgatctgcgcgccc

SEQ ID NO: 24396 - DNA, 20 bp, Artificial Sequence
  Description of Artificial Sequence: Synthetic oligonucleotide
  Target: PCSK9; (+) strand; PAM type: YTN; PAM sequence: CTG
cgcgccccaggcgtcaagca

SEQ ID NO: 24397 - DNA, 20 bp, Artificial Sequence
  Description of Artificial Sequence: Synthetic oligonucleotide
  Target: PCSK9; (+) strand; PAM type: YTN; PAM sequence: CTA
gaaggtttccgcagcgacgt

SEQ ID NO: 24398 - DNA, 20 bp, Artificial Sequence
  Description of Artificial Sequence: Synthetic oligonucleotide
  Target: PCSK9; (+) strand; PAM type: YTN; PAM sequence: TTT
ccgcagcgacgtcgaggcgc

SEQ ID NO: 24399 - DNA, 20 bp, Artificial Sequence
  Description of Artificial Sequence: Synthetic oligonucleotide
  Target: PCSK9; (+) strand; PAM type: YTN; PAM sequence: TTC
cgcagcgacgtcgaggcgct

SEQ ID NO: 24400 - DNA, 20 bp, Artificial Sequence
  Description of Artificial Sequence: Synthetic oligonucleotide
  Target: PCSK9; (+) strand; PAM type: YTN; PAM sequence: CTC
atggttgcaggcgggcgccg

SEQ ID NO: 24401 - DNA, 20 bp, Artificial Sequence
  Description of Artificial Sequence: Synthetic oligonucleotide
  Target: PCSK9; (+) strand; PAM type: YTN; PAM sequence: TTG
caggcgggcgccgccgttca

SEQ ID NO: 24402 - DNA, 20 bp, Artificial Sequence
  Description of Artificial Sequence: Synthetic oligonucleotide
  Target: PCSK9; (+) strand; PAM type: YTN; PAM sequence: TTC
agttcagggtctgagcctgg

SEQ ID NO: 24403 - DNA, 20 bp, Artificial Sequence
  Description of Artificial Sequence: Synthetic oligonucleotide
  Target: PCSK9; (+) strand; PAM type: YTN; PAM sequence: TTC
agggtctgagcctggaggag

SEQ ID NO: 24404 - DNA, 20 bp, Artificial Sequence
  Description of Artificial Sequence: Synthetic oligonucleotide
  Target: PCSK9; (+) strand; PAM type: YTN; PAM sequence: CTG
agcctggaggagtgagccag

SEQ ID NO: 24405 - DNA, 20 bp, Artificial Sequence
  Description of Artificial Sequence: Synthetic oligonucleotide
  Target: PCSK9; (+) strand; PAM type: YTN; PAM sequence: CTG
gaggagtgagccaggcagtg

SEQ ID NO: 24406 - DNA, 20 bp, Artificial Sequence
  Description of Artificial Sequence: Synthetic oligonucleotide
  Target: PCSK9; (+) strand; PAM type: YTN; PAM sequence: CTG
gctcgggcgggccgggacgc

SEQ ID NO: 24407 - DNA, 20 bp, Artificial Sequence
  Description of Artificial Sequence: Synthetic oligonucleotide
  Target: PCSK9; (+) strand; PAM type: YTN; PAM sequence: CTC
gggcgggccgggacgcgtcg

SEQ ID NO: 24408 - DNA, 20 bp, Artificial Sequence
  Description of Artificial Sequence: Synthetic oligonucleotide
  Target: PCSK9; (+) strand; PAM type: YTN; PAM sequence: TTG
cagcagcggctcccagctcc

SEQ ID NO: 24409 - DNA, 20 bp, Artificial Sequence
  Description of Artificial Sequence: Synthetic oligonucleotide
  Target: PCSK9; (+) strand; PAM type: YTN; PAM sequence: CTC
ccagctcccagccaggattc

SEQ ID NO: 24410 - DNA, 20 bp, Artificial Sequence
  Description of Artificial Sequence: Synthetic oligonucleotide
  Target: PCSK9; (+) strand; PAM type: YTN; PAM sequence: CTC
ccagccaggattccgcgcgc

SEQ ID NO: 24411 - DNA, 20 bp, Artificial Sequence
  Description of Artificial Sequence: Synthetic oligonucleotide
  Target: PCSK9; (+) strand; PAM type: YTN; PAM sequence: TTC
cgcgcgccccttcacgcgcc

SEQ ID NO: 24412 - DNA, 20 bp, Artificial Sequence
  Description of Artificial Sequence: Synthetic oligonucleotide
  Target: PCSK9; (+) strand; PAM type: YTN; PAM sequence: CTT
cacgcgccctgctcctgaac

SEQ ID NO: 24413 - DNA, 20 bp, Artificial Sequence
  Description of Artificial Sequence: Synthetic oligonucleotide
  Target: PCSK9; (+) strand; PAM type: YTN; PAM sequence: TTC
acgcgccctgctcctgaact

SEQ ID NO: 24414 - DNA, 20 bp, Artificial Sequence
  Description of Artificial Sequence: Synthetic oligonucleotide
  Target: PCSK9; (+) strand; PAM type: YTN; PAM sequence: CTG
ctcctgaacttcagctcctg

SEQ ID NO: 24415 - DNA, 20 bp, Artificial Sequence
  Description of Artificial Sequence: Synthetic oligonucleotide
  Target: PCSK9; (+) strand; PAM type: YTN; PAM sequence: CTC
ctgaacttcagctcctgcac

SEQ ID NO: 24416 - DNA, 20 bp, Artificial Sequence
  Description of Artificial Sequence: Synthetic oligonucleotide
  Target: PCSK9; (+) strand; PAM type: YTN; PAM sequence: CTG
aacttcagctcctgcacagt

SEQ ID NO: 24417 - DNA, 20 bp, Artificial Sequence
  Description of Artificial Sequence: Synthetic oligonucleotide
  Target: PCSK9; (+) strand; PAM type: YTN; PAM sequence: CTT
cagctcctgcacagtcctcc

SEQ ID NO: 24418 - DNA, 20 bp, Artificial Sequence
  Description of Artificial Sequence: Synthetic oligonucleotide
  Target: PCSK9; (+) strand; PAM type: YTN; PAM sequence: TTC
agctcctgcacagtcctccc

SEQ ID NO: 24419 - DNA, 20 bp, Artificial Sequence
  Description of Artificial Sequence: Synthetic oligonucleotide
  Target: PCSK9; (+) strand; PAM type: YTN; PAM sequence: CTC
ctgcacagtcctccccaccg

SEQ ID NO: 24420 - DNA, 20 bp, Artificial Sequence
  Description of Artificial Sequence: Synthetic oligonucleotide
  Target: PCSK9; (+) strand; PAM type: YTN; PAM sequence: CTG
cacagtcctccccaccgcaa

SEQ ID NO: 24421 - DNA, 20 bp, Artificial Sequence
  Description of Artificial Sequence: Synthetic oligonucleotide
  Target: PCSK9; (+) strand; PAM type: YTN; PAM sequence: CTC
cccaccgcaaggctcaaggc

SEQ ID NO: 24422 - DNA, 20 bp, Artificial Sequence
  Description of Artificial Sequence: Synthetic oligonucleotide
  Target: PCSK9; (+) strand; PAM type: YTN; PAM sequence: CTC
aaggcgccgccggcgtggac

SEQ ID NO: 24423 - DNA, 20 bp, Artificial Sequence
  Description of Artificial Sequence: Synthetic oligonucleotide
  Target: PCSK9; (+) strand; PAM type: YTN; PAM sequence: CTC
taggtctcctcgccaggaca

SEQ ID NO: 24424 - DNA, 20 bp, Artificial Sequence
  Description of Artificial Sequence: Synthetic oligonucleotide
  Target: PCSK9; (+) strand; PAM type: YTN; PAM sequence: CTA
ggtctcctcgccaggacagc

SEQ ID NO: 24425 - DNA, 20 bp, Artificial Sequence
  Description of Artificial Sequence: Synthetic oligonucleotide
  Target: PCSK9; (+) strand; PAM type: YTN; PAM sequence: CTC
ctcgccaggacagcaacctc

SEQ ID NO: 24426 - DNA, 20 bp, Artificial Sequence
  Description of Artificial Sequence: Synthetic oligonucleotide
  Target: PCSK9; (+) strand; PAM type: YTN; PAM sequence: CTC
gccaggacagcaacctctcc

SEQ ID NO: 24427 - DNA, 20 bp, Artificial Sequence
  Description of Artificial Sequence: Synthetic oligonucleotide
  Target: PCSK9; (+) strand; PAM type: YTN; PAM sequence: CTC
tcccctggccctcatgggca

SEQ ID NO: 24428 - DNA, 20 bp, Artificial Sequence
  Description of Artificial Sequence: Synthetic oligonucleotide
  Target: PCSK9; (+) strand; PAM type: YTN; PAM sequence: CTC
ccctggccctcatgggcacc

SEQ ID NO: 24429 - DNA, 20 bp, Artificial Sequence
  Description of Artificial Sequence: Synthetic oligonucleotide
  Target: PCSK9; (+) strand; PAM type: YTN; PAM sequence: CTG
gccctcatgggcaccgtcag

SEQ ID NO: 24430 - DNA, 20 bp, Artificial Sequence
  Description of Artificial Sequence: Synthetic oligonucleotide
  Target: PCSK9; (+) strand; PAM type: YTN; PAM sequence: CTC
atgggcaccgtcagctccag

SEQ ID NO: 24431 - DNA, 20 bp, Artificial Sequence
  Description of Artificial Sequence: Synthetic oligonucleotide
  Target: PCSK9; (+) strand; PAM type: YTN; PAM sequence: CTC
caggcggtcctggtggccgc

SEQ ID NO: 24432 - DNA, 20 bp, Artificial Sequence
  Description of Artificial Sequence: Synthetic oligonucleotide
  Target: PCSK9; (+) strand; PAM type: YTN; PAM sequence: CTG
gtggccgctgccactgctgc

SEQ ID NO: 24433 - DNA, 20 bp, Artificial Sequence
  Description of Artificial Sequence: Synthetic oligonucleotide
  Target: PCSK9; (+) strand; PAM type: YTN; PAM sequence: CTG
ccactgctgctgctgctgct

SEQ ID NO: 24434 - DNA, 20 bp, Artificial Sequence
  Description of Artificial Sequence: Synthetic oligonucleotide
  Target: PCSK9; (+) strand; PAM type: YTN; PAM sequence: CTG
ctgctgctgctgctgctgct

SEQ ID NO: 24435 - DNA, 20 bp, Artificial Sequence
  Description of Artificial Sequence: Synthetic oligonucleotide
  Target: PCSK9; (+) strand; PAM type: YTN; PAM sequence: CTG
ctgctgctgctgctgctcct

SEQ ID NO: 24436 - DNA, 20 bp, Artificial Sequence
  Description of Artificial Sequence: Synthetic oligonucleotide
  Target: PCSK9; (+) strand; PAM type: YTN; PAM sequence: CTG
ctgctgctgctgctcctggg

SEQ ID NO: 24437 - DNA, 20 bp, Artificial Sequence
  Description of Artificial Sequence: Synthetic oligonucleotide
  Target: PCSK9; (+) strand; PAM type: YTN; PAM sequence: CTG
ctgctgctgctcctgggtcc

SEQ ID NO: 24438 - DNA, 20 bp, Artificial Sequence
  Description of Artificial Sequence: Synthetic oligonucleotide
  Target: PCSK9; (+) strand; PAM type: YTN; PAM sequence: CTG
ctgctgctcctgggtcccgc

SEQ ID NO: 24439 - DNA, 20 bp, Artificial Sequence
  Description of Artificial Sequence: Synthetic oligonucleotide
  Target: PCSK9; (+) strand; PAM type: YTN; PAM sequence: CTG
ctgctcctgggtcccgcggg

SEQ ID NO: 24440 - DNA, 20 bp, Artificial Sequence
  Description of Artificial Sequence: Synthetic oligonucleotide
  Target: PCSK9; (+) strand; PAM type: YTN; PAM sequence: CTG
ctcctgggtcccgcgggcgc

SEQ ID NO: 24441 - DNA, 20 bp, Artificial Sequence
  Description of Artificial Sequence: Synthetic oligonucleotide
  Target: PCSK9; (+) strand; PAM type: YTN; PAM sequence: CTC
ctgggtcccgcgggcgcccg

SEQ ID NO: 24442 - DNA, 20 bp, Artificial Sequence
  Description of Artificial Sequence: Synthetic oligonucleotide
  Target: PCSK9; (+) strand; PAM type: YTN; PAM sequence: CTG
ggtcccgcgggcgcccgtgc

SEQ ID NO: 24443 - DNA, 20 bp, Artificial Sequence
  Description of Artificial Sequence: Synthetic oligonucleotide
  Target: PCSK9; (+) strand; PAM type: YTN; PAM sequence: CTA
cgaggagctggtgctagcct

SEQ ID NO: 24444 - DNA, 20 bp, Artificial Sequence
  Description of Artificial Sequence: Synthetic oligonucleotide
  Target: PCSK9; (+) strand; PAM type: YTN; PAM sequence: CTG
gtgctagccttgcgttccga

SEQ ID NO: 24445 - DNA, 20 bp, Artificial Sequence
  Description of Artificial Sequence: Synthetic oligonucleotide
  Target: PCSK9; (+) strand; PAM type: YTN; PAM sequence: CTA
gccttgcgttccgaggagga

SEQ ID NO: 24446 - DNA, 20 bp, Artificial Sequence
  Description of Artificial Sequence: Synthetic oligonucleotide
  Target: PCSK9; (+) strand; PAM type: YTN; PAM sequence: CTT
gcgttccgaggaggacggcc

SEQ ID NO: 24447 - DNA, 20 bp, Artificial Sequence
  Description of Artificial Sequence: Synthetic oligonucleotide
  Target: PCSK9; (+) strand; PAM type: YTN; PAM sequence: TTG
cgttccgaggaggacggcct

SEQ ID NO: 24448 - DNA, 20 bp, Artificial Sequence
  Description of Artificial Sequence: Synthetic oligonucleotide
  Target: PCSK9; (+) strand; PAM type: YTN; PAM sequence: TTC
cgaggaggacggcctggccg

SEQ ID NO: 24449 - DNA, 20 bp, Artificial Sequence
  Description of Artificial Sequence: Synthetic oligonucleotide
  Target: PCSK9; (+) strand; PAM type: YTN; PAM sequence: CTG
gccgaagcacccgagcacgg

SEQ ID NO: 24450 - DNA, 20 bp, Artificial Sequence
  Description of Artificial Sequence: Synthetic oligonucleotide
  Target: PCSK9; (+) strand; PAM type: YTN; PAM sequence: CTT
ccaccgctgcgccaaggtgc

SEQ ID NO: 24451 - DNA, 20 bp, Artificial Sequence
  Description of Artificial Sequence: Synthetic oligonucleotide
  Target: PCSK9; (+) strand; PAM type: YTN; PAM sequence: TTC
caccgctgcgccaaggtgcg

SEQ ID NO: 24452 - DNA, 20 bp, Artificial Sequence
  Description of Artificial Sequence: Synthetic oligonucleotide
  Target: PCSK9; (+) strand; PAM type: YTN; PAM sequence: CTG
cgccaaggtgcgggtgtagg

SEQ ID NO: 24453 - DNA, 20 bp, Artificial Sequence
  Description of Artificial Sequence: Synthetic oligonucleotide
  Target: PCSK9; (+) strand; PAM type: YTN; PAM sequence: CTG
tttcctctcgggcctcagtt

SEQ ID NO: 24454 - DNA, 20 bp, Artificial Sequence
  Description of Artificial Sequence: Synthetic oligonucleotide
  Target: PCSK9; (+) strand; PAM type: YTN; PAM sequence: TTT
cctctcgggcctcagtttcc

SEQ ID NO: 24455 - DNA, 20 bp, Artificial Sequence
  Description of Artificial Sequence: Synthetic oligonucleotide
  Target: PCSK9; (+) strand; PAM type: YTN; PAM sequence: TTC
ctctcgggcctcagtttccc

SEQ ID NO: 24456 - DNA, 20 bp, Artificial Sequence
  Description of Artificial Sequence: Synthetic oligonucleotide
  Target: PCSK9; (+) strand; PAM type: YTN; PAM sequence: CTC
tcgggcctcagtttcccccc

SEQ ID NO: 24457 - DNA, 20 bp, Artificial Sequence
  Description of Artificial Sequence: Synthetic oligonucleotide
  Target: PCSK9; (+) strand; PAM type: YTN; PAM sequence: CTC
gggcctcagtttccccccat

SEQ ID NO: 24458 - DNA, 20 bp, Artificial Sequence
  Description of Artificial Sequence: Synthetic oligonucleotide
  Target: PCSK9; (+) strand; PAM type: YTN; PAM sequence: CTC
agtttccccccatgtaagag

SEQ ID NO: 24459 - DNA, 20 bp, Artificial Sequence
  Description of Artificial Sequence: Synthetic oligonucleotide
  Target: PCSK9; (+) strand; PAM type: YTN; PAM sequence: TTT
ccccccatgtaagagaggaa

SEQ ID NO: 24460 - DNA, 20 bp, Artificial Sequence
  Description of Artificial Sequence: Synthetic oligonucleotide
  Target: PCSK9; (+) strand; PAM type: YTN; PAM sequence: TTC
cccccatgtaagagaggaag

SEQ ID NO: 24461 - DNA, 20 bp, Artificial Sequence
  Description of Artificial Sequence: Synthetic oligonucleotide
  Target: PCSK9; (+) strand; PAM type: YTN; PAM sequence: CTC
ttcgcttggcacgatcttgg

SEQ ID NO: 24462 - DNA, 20 bp, Artificial Sequence
  Description of Artificial Sequence: Synthetic oligonucleotide
  Target: PCSK9; (+) strand; PAM type: YTN; PAM sequence: CTT
cgcttggcacgatcttgggg

SEQ ID NO: 24463 - DNA, 20 bp, Artificial Sequence
  Description of Artificial Sequence: Synthetic oligonucleotide
  Target: PCSK9; (+) strand; PAM type: YTN; PAM sequence: TTC
gcttggcacgatcttgggga

SEQ ID NO: 24464 - DNA, 20 bp, Artificial Sequence
  Description of Artificial Sequence: Synthetic oligonucleotide
  Target: PCSK9; (+) strand; PAM type: YTN; PAM sequence: CTT
ggcacgatcttggggactgc

SEQ ID NO: 24465 - DNA, 20 bp, Artificial Sequence
  Description of Artificial Sequence: Synthetic oligonucleotide
  Target: PCSK9; (+) strand; PAM type: YTN; PAM sequence: TTG
gcacgatcttggggactgca

SEQ ID NO: 24466 - DNA, 20 bp, Artificial Sequence
  Description of Artificial Sequence: Synthetic oligonucleotide
  Target: PCSK9; (+) strand; PAM type: YTN; PAM sequence: CTT
ggggactgcaggcaaggcgg

SEQ ID NO: 24467 - DNA, 20 bp, Artificial Sequence
  Description of Artificial Sequence: Synthetic oligonucleotide
  Target: PCSK9; (+) strand; PAM type: YTN; PAM sequence: TTG
gggactgcaggcaaggcggc

SEQ ID NO: 24468 - DNA, 20 bp, Artificial Sequence
  Description of Artificial Sequence: Synthetic oligonucleotide
  Target: PCSK9; (+) strand; PAM type: YTN; PAM sequence: CTG
caggcaaggcggcgggggag

SEQ ID NO: 24469 - DNA, 20 bp, Artificial Sequence
  Description of Artificial Sequence: Synthetic oligonucleotide
  Target: PCSK9; (+) strand; PAM type: YTN; PAM sequence: CTC
tttggggacttgctggggcg

SEQ ID NO: 24470 - DNA, 20 bp, Artificial Sequence
  Description of Artificial Sequence: Synthetic oligonucleotide
  Target: PCSK9; (+) strand; PAM type: YTN; PAM sequence: CTT
tggggacttgctggggcgtg

SEQ ID NO: 24471 - DNA, 20 bp, Artificial Sequence
  Description of Artificial Sequence: Synthetic oligonucleotide
  Target: PCSK9; (+) strand; PAM type: YTN; PAM sequence: TTT
ggggacttgctggggcgtgc

SEQ ID NO: 24472 - DNA, 20 bp, Artificial Sequence
  Description of Artificial Sequence: Synthetic oligonucleotide
  Target: PCSK9; (+) strand; PAM type: YTN; PAM sequence: TTG
gggacttgctggggcgtgcg

SEQ ID NO: 24473 - DNA, 20 bp, Artificial Sequence
  Description of Artificial Sequence: Synthetic oligonucleotide
  Target: PCSK9; (+) strand; PAM type: YTN; PAM sequence: CTT
gctggggcgtgcggctgcgc

SEQ ID NO: 24474 - DNA, 20 bp, Artificial Sequence
  Description of Artificial Sequence: Synthetic oligonucleotide
  Target: PCSK9; (+) strand; PAM type: YTN; PAM sequence: TTG
ctggggcgtgcggctgcgct

SEQ ID NO: 24475 - DNA, 20 bp, Artificial Sequence
  Description of Artificial Sequence: Synthetic oligonucleotide
  Target: PCSK9; (+) strand; PAM type: YTN; PAM sequence: CTG
gggcgtgcggctgcgctatt

SEQ ID NO: 24476 - DNA, 20 bp, Artificial Sequence
  Description of Artificial Sequence: Synthetic oligonucleotide
  Target: PCSK9; (+) strand; PAM type: YTN; PAM sequence: CTG
cgctattcagtgggaaggtt

SEQ ID NO: 24477 - DNA, 20 bp, Artificial Sequence
  Description of Artificial Sequence: Synthetic oligonucleotide
  Target: PCSK9; (+) strand; PAM type: YTN; PAM sequence: CTA
ttcagtgggaaggttcgcgg

SEQ ID NO: 24478 - DNA, 20 bp, Artificial Sequence
  Description of Artificial Sequence: Synthetic oligonucleotide
  Target: PCSK9; (+) strand; PAM type: YTN; PAM sequence: TTC
agtgggaaggttcgcggggt

SEQ ID NO: 24479 - DNA, 20 bp, Artificial Sequence
  Description of Artificial Sequence: Synthetic oligonucleotide
  Target: PCSK9; (+) strand; PAM type: YTN; PAM sequence: TTC
gcggggttgggagacccgga

SEQ ID NO: 24480 - DNA, 20 bp, Artificial Sequence
  Description of Artificial Sequence: Synthetic oligonucleotide
  Target: PCSK9; (+) strand; PAM type: YTN; PAM sequence: TTG
ggagacccggaggccgagga

SEQ ID NO: 24481 - DNA, 20 bp, Artificial Sequence
  Description of Artificial Sequence: Synthetic oligonucleotide
  Target: PCSK9; (+) strand; PAM type: YTN; PAM sequence: CTG
ccaggatatcctgcccagat

SEQ ID NO: 24482 - DNA, 20 bp, Artificial Sequence
  Description of Artificial Sequence: Synthetic oligonucleotide
  Target: PCSK9; (+) strand; PAM type: YTN; PAM sequence: CTG
cccagatttcccagtttctg

SEQ ID NO: 24483 - DNA, 20 bp, Artificial Sequence
  Description of Artificial Sequence: Synthetic oligonucleotide
  Target: PCSK9; (+) strand; PAM type: YTN; PAM sequence: TTT
cccagtttctgcctcgccgc

SEQ ID NO: 24484 - DNA, 20 bp, Artificial Sequence
  Description of Artificial Sequence: Synthetic oligonucleotide
  Target: PCSK9; (+) strand; PAM type: YTN; PAM sequence: TTC
ccagtttctgcctcgccgcg

SEQ ID NO: 24485 - DNA, 20 bp, Artificial Sequence
  Description of Artificial Sequence: Synthetic oligonucleotide
  Target: PCSK9; (+) strand; PAM type: YTN; PAM sequence: TTT
ctgcctcgccgcggcacagg

SEQ ID NO: 24486 - DNA, 20 bp, Artificial Sequence
  Description of Artificial Sequence: Synthetic oligonucleotide
  Target: PCSK9; (+) strand; PAM type: YTN; PAM sequence: TTC
tgcctcgccgcggcacaggt

SEQ ID NO: 24487 - DNA, 20 bp, Artificial Sequence
  Description of Artificial Sequence: Synthetic oligonucleotide
  Target: PCSK9; (+) strand; PAM type: YTN; PAM sequence: CTG
cctcgccgcggcacaggtgg

SEQ ID NO: 24488 - DNA, 20 bp, Artificial Sequence
  Description of Artificial Sequence: Synthetic oligonucleotide
  Target: PCSK9; (+) strand; PAM type: YTN; PAM sequence: CTC
gccgcggcacaggtgggtga

SEQ ID NO: 24489 - DNA, 20 bp, Artificial Sequence
  Description of Artificial Sequence: Synthetic oligonucleotide
  Target: PCSK9; (+) strand; PAM type: YTN; PAM sequence: CTG
gaacgtactgggaactgcac

SEQ ID NO: 24490 - DNA, 20 bp, Artificial Sequence
  Description of Artificial Sequence: Synthetic oligonucleotide
  Target: PCSK9; (+) strand; PAM type: YTN; PAM sequence: CTG
ggaactgcaccaggcacaga

SEQ ID NO: 24491 - DNA, 20 bp, Artificial Sequence
  Description of Artificial Sequence: Synthetic oligonucleotide
  Target: PCSK9; (+) strand; PAM type: YTN; PAM sequence: CTG
caccaggcacagagaaagcg

SEQ ID NO: 24492 - DNA, 20 bp, Artificial Sequence
  Description of Artificial Sequence: Synthetic oligonucleotide
  Target: PCSK9; (+) strand; PAM type: YTN; PAM sequence: CTT
gccattatagtgggttccga

SEQ ID NO: 24493 - DNA, 20 bp, Artificial Sequence
  Description of Artificial Sequence: Synthetic oligonucleotide
  Target: PCSK9; (+) strand; PAM type: YTN; PAM sequence: TTG
ccattatagtgggttccgat

SEQ ID NO: 24494 - DNA, 20 bp, Artificial Sequence
  Description of Artificial Sequence: Synthetic oligonucleotide
  Target: PCSK9; (+) strand; PAM type: YTN; PAM sequence: TTA
tagtgggttccgatttggtt

SEQ ID NO: 24495 - DNA, 20 bp, Artificial Sequence
  Description of Artificial Sequence: Synthetic oligonucleotide
  Target: PCSK9; (+) strand; PAM type: YTN; PAM sequence: TTC
cgatttggtttggaaaacat

SEQ ID NO: 24496 - DNA, 20 bp, Artificial Sequence
  Description of Artificial Sequence: Synthetic oligonucleotide
  Target: PCSK9; (+) strand; PAM type: YTN; PAM sequence: TTT
ggtttggaaaacatgggcag

SEQ ID NO: 24497 - DNA, 20 bp, Artificial Sequence
  Description of Artificial Sequence: Synthetic oligonucleotide
  Target: PCSK9; (+) strand; PAM type: YTN; PAM sequence: TTG
gtttggaaaacatgggcagc

SEQ ID NO: 24498 - DNA, 20 bp, Artificial Sequence
  Description of Artificial Sequence: Synthetic oligonucleotide
  Target: PCSK9; (+) strand; PAM type: YTN; PAM sequence: TTT
ggaaaacatgggcagcggag

SEQ ID NO: 24499 - DNA, 20 bp, Artificial Sequence
  Description of Artificial Sequence: Synthetic oligonucleotide
  Target: PCSK9; (+) strand; PAM type: YTN; PAM sequence: TTG
gaaaacatgggcagcggagg

SEQ ID NO: 24500 - DNA, 20 bp, Artificial Sequence
  Description of Artificial Sequence: Synthetic oligonucleotide
  Target: PCSK9; (+) strand; PAM type: YTN; PAM sequence: CTG
gagagaaggccctacccgag

SEQ ID NO: 24501 - DNA, 20 bp, Artificial Sequence
  Description of Artificial Sequence: Synthetic oligonucleotide
  Target: PCSK9; (+) strand; PAM type: YTN; PAM sequence: CTA
cccgagacaggggcggggtg

SEQ ID NO: 24502 - DNA, 20 bp, Artificial Sequence
  Description of Artificial Sequence: Synthetic oligonucleotide
  Target: PCSK9; (+) strand; PAM type: YTN; PAM sequence: CTG
ggagcacgaggcaatttctt

SEQ ID NO: 24503 - DNA, 20 bp, Artificial Sequence
  Description of Artificial Sequence: Synthetic oligonucleotide
  Target: PCSK9; (+) strand; PAM type: YTN; PAM sequence: TTT
ctttatgacacagaactcat

SEQ ID NO: 24504 - DNA, 20 bp, Artificial Sequence
  Description of Artificial Sequence: Synthetic oligonucleotide
  Target: PCSK9; (+) strand; PAM type: YTN; PAM sequence: TTC
tttatgacacagaactcatg

SEQ ID NO: 24505 - DNA, 20 bp, Artificial Sequence
  Description of Artificial Sequence: Synthetic oligonucleotide
  Target: PCSK9; (+) strand; PAM type: YTN; PAM sequence: CTT
tatgacacagaactcatgct

SEQ ID NO: 24506 - DNA, 20 bp, Artificial Sequence
  Description of Artificial Sequence: Synthetic oligonucleotide
  Target: PCSK9; (+) strand; PAM type: YTN; PAM sequence: TTT
atgacacagaactcatgctc

SEQ ID NO: 24507 - DNA, 20 bp, Artificial Sequence
  Description of Artificial Sequence: Synthetic oligonucleotide
  Target: PCSK9; (+) strand; PAM type: YTN; PAM sequence: TTA
tgacacagaactcatgctct

SEQ ID NO: 24508 - DNA, 20 bp, Artificial Sequence
  Description of Artificial Sequence: Synthetic oligonucleotide
  Target: PCSK9; (+) strand; PAM type: YTN; PAM sequence: CTC
atgctctagtattccatctg

SEQ ID NO: 24509 - DNA, 20 bp, Artificial Sequence
  Description of Artificial Sequence: Synthetic oligonucleotide
  Target: PCSK9; (+) strand; PAM type: YTN; PAM sequence: CTC
tagtattccatctgtttcag

SEQ ID NO: 24510 - DNA, 20 bp, Artificial Sequence
  Description of Artificial Sequence: Synthetic oligonucleotide
  Target: PCSK9; (+) strand; PAM type: YTN; PAM sequence: CTA
gtattccatctgtttcagcc

SEQ ID NO: 24511 - DNA, 20 bp, Artificial Sequence
  Description of Artificial Sequence: Synthetic oligonucleotide
  Target: PCSK9; (+) strand; PAM type: YTN; PAM sequence: TTC
catctgtttcagccgaagaa

SEQ ID NO: 24512 - DNA, 20 bp, Artificial Sequence
  Description of Artificial Sequence: Synthetic oligonucleotide
  Target: PCSK9; (+) strand; PAM type: YTN; PAM sequence: CTG
tttcagccgaagaaaagaac

SEQ ID NO: 24513 - DNA, 20 bp, Artificial Sequence
  Description of Artificial Sequence: Synthetic oligonucleotide
  Target: PCSK9; (+) strand; PAM type: YTN; PAM sequence: TTT
cagccgaagaaaagaaccag

SEQ ID NO: 24514 - DNA, 20 bp, Artificial Sequence
  Description of Artificial Sequence: Synthetic oligonucleotide
  Target: PCSK9; (+) strand; PAM type: YTN; PAM sequence: TTC
agccgaagaaaagaaccagc

SEQ ID NO: 24515 - DNA, 20 bp, Artificial Sequence
  Description of Artificial Sequence: Synthetic oligonucleotide
  Target: PCSK9; (+) strand; PAM type: YTN; PAM sequence: CTG
aaggggcaggggagaagggg

SEQ ID NO: 24516 - DNA, 20 bp, Artificial Sequence
  Description of Artificial Sequence: Synthetic oligonucleotide
  Target: PCSK9; (+) strand; PAM type: YTN; PAM sequence: TTC
tcgaggcccattggcgtcct

SEQ ID NO: 24517 - DNA, 20 bp, Artificial Sequence
  Description of Artificial Sequence: Synthetic oligonucleotide
  Target: PCSK9; (+) strand; PAM type: YTN; PAM sequence: CTC
gaggcccattggcgtccttt

SEQ ID NO: 24518 - DNA, 20 bp, Artificial Sequence
  Description of Artificial Sequence: Synthetic oligonucleotide
  Target: PCSK9; (+) strand; PAM type: YTN; PAM sequence: TTG
gcgtcctttaggactcaggc

SEQ ID NO: 24519 - DNA, 20 bp, Artificial Sequence
  Description of Artificial Sequence: Synthetic oligonucleotide
  Target: PCSK9; (+) strand; PAM type: YTN; PAM sequence: CTT
taggactcaggcagggaagg

SEQ ID NO: 24520 - DNA, 20 bp, Artificial Sequence
  Description of Artificial Sequence: Synthetic oligonucleotide
  Target: PCSK9; (+) strand; PAM type: YTN; PAM sequence: TTT
aggactcaggcagggaaggg

SEQ ID NO: 24521 - DNA, 20 bp, Artificial Sequence
  Description of Artificial Sequence: Synthetic oligonucleotide
  Target: PCSK9; (+) strand; PAM type: YTN; PAM sequence: TTA
ggactcaggcagggaagggc

SEQ ID NO: 24522 - DNA, 20 bp, Artificial Sequence
  Description of Artificial Sequence: Synthetic oligonucleotide
  Target: PCSK9; (+) strand; PAM type: YTN; PAM sequence: CTC
aggcagggaagggcccttgg

SEQ ID NO: 24523 - DNA, 20 bp, Artificial Sequence
  Description of Artificial Sequence: Synthetic oligonucleotide
  Target: PCSK9; (+) strand; PAM type: YTN; PAM sequence: CTT
ggtgctctggagccggaggt

SEQ ID NO: 24524 - DNA, 20 bp, Artificial Sequence
  Description of Artificial Sequence: Synthetic oligonucleotide
  Target: PCSK9; (+) strand; PAM type: YTN; PAM sequence: TTG
gtgctctggagccggaggtg

SEQ ID NO: 24525 - DNA, 20 bp, Artificial Sequence
  Description of Artificial Sequence: Synthetic oligonucleotide
  Target: PCSK9; (+) strand; PAM type: YTN; PAM sequence: CTC
tggagccggaggtggtgcgc

SEQ ID NO: 24526 - DNA, 20 bp, Artificial Sequence
  Description of Artificial Sequence: Synthetic oligonucleotide
  Target: PCSK9; (+) strand; PAM type: YTN; PAM sequence: CTG
gagccggaggtggtgcgcct

SEQ ID NO: 24527 - DNA, 20 bp, Artificial Sequence
  Description of Artificial Sequence: Synthetic oligonucleotide
  Target: PCSK9; (+) strand; PAM type: YTN; PAM sequence: CTG
gtactgggaccccggagctg

SEQ ID NO: 24528 - DNA, 20 bp, Artificial Sequence
  Description of Artificial Sequence: Synthetic oligonucleotide
  Target: PCSK9; (+) strand; PAM type: YTN; PAM sequence: CTG
ggaccccggagctgagcccg

SEQ ID NO: 24529 - DNA, 20 bp, Artificial Sequence
  Description of Artificial Sequence: Synthetic oligonucleotide
  Target: PCSK9; (+) strand; PAM type: YTN; PAM sequence: CTG
agcccggcgcctcagcccac

SEQ ID NO: 24530 - DNA, 20 bp, Artificial Sequence
  Description of Artificial Sequence: Synthetic oligonucleotide
  Target: PCSK9; (+) strand; PAM type: YTN; PAM sequence: CTC
agcccacctggctgtctgcc

SEQ ID NO: 24531 - DNA, 20 bp, Artificial Sequence
  Description of Artificial Sequence: Synthetic oligonucleotide
  Target: PCSK9; (+) strand; PAM type: YTN; PAM sequence: CTG
gctgtctgccgaccgtgtgc

SEQ ID NO: 24532 - DNA, 20 bp, Artificial Sequence
  Description of Artificial Sequence: Synthetic oligonucleotide
  Target: PCSK9; (+) strand; PAM type: YTN; PAM sequence: CTG
tctgccgaccgtgtgcgggg

SEQ ID NO: 24533 - DNA, 20 bp, Artificial Sequence
  Description of Artificial Sequence: Synthetic oligonucleotide
  Target: PCSK9; (+) strand; PAM type: YTN; PAM sequence: CTG
ccgaccgtgtgcggggcgag

SEQ ID NO: 24534 - DNA, 20 bp, Artificial Sequence
  Description of Artificial Sequence: Synthetic oligonucleotide
  Target: PCSK9; (+) strand; PAM type: YTN; PAM sequence: TTT
gctcaacaactctgccagct

SEQ ID NO: 24535 - DNA, 20 bp, Artificial Sequence
  Description of Artificial Sequence: Synthetic oligonucleotide
  Target: PCSK9; (+) strand; PAM type: YTN; PAM sequence: TTG
ctcaacaactctgccagctt

SEQ ID NO: 24536 - DNA, 20 bp, Artificial Sequence
  Description of Artificial Sequence: Synthetic oligonucleotide
  Target: PCSK9; (+) strand; PAM type: YTN; PAM sequence: CTC
aacaactctgccagcttctg

SEQ ID NO: 24537 - DNA, 20 bp, Artificial Sequence
  Description of Artificial Sequence: Synthetic oligonucleotide
  Target: PCSK9; (+) strand; PAM type: YTN; PAM sequence: CTC
tgccagcttctggccctcag

SEQ ID NO: 24538 - DNA, 20 bp, Artificial Sequence
  Description of Artificial Sequence: Synthetic oligonucleotide
  Target: PCSK9; (+) strand; PAM type: YTN; PAM sequence: CTG
ccagcttctggccctcaggc

SEQ ID NO: 24539 - DNA, 20 bp, Artificial Sequence
  Description of Artificial Sequence: Synthetic oligonucleotide
  Target: PCSK9; (+) strand; PAM type: YTN; PAM sequence: CTT
ctggccctcaggctgtggga

SEQ ID NO: 24540 - DNA, 20 bp, Artificial Sequence
  Description of Artificial Sequence: Synthetic oligonucleotide
  Target: PCSK9; (+) strand; PAM type: YTN; PAM sequence: TTC
tggccctcaggctgtgggaa

SEQ ID NO: 24541 - DNA, 20 bp, Artificial Sequence
  Description of Artificial Sequence: Synthetic oligonucleotide
  Target: PCSK9; (+) strand; PAM type: YTN; PAM sequence: CTG
gccctcaggctgtgggaagc

SEQ ID NO: 24542 - DNA, 20 bp, Artificial Sequence
  Description of Artificial Sequence: Synthetic oligonucleotide
  Target: PCSK9; (+) strand; PAM type: YTN; PAM sequence: CTC
aggctgtgggaagcttcttc

SEQ ID NO: 24543 - DNA, 20 bp, Artificial Sequence
  Description of Artificial Sequence: Synthetic oligonucleotide
  Target: PCSK9; (+) strand; PAM type: YTN; PAM sequence: CTG
tgggaagcttcttcccgggg

SEQ ID NO: 24544 - DNA, 20 bp, Artificial Sequence
  Description of Artificial Sequence: Synthetic oligonucleotide
  Target: PCSK9; (+) strand; PAM type: YTN; PAM sequence: CTT
cttcccggggcgagaccact

SEQ ID NO: 24545 - DNA, 20 bp, Artificial Sequence
  Description of Artificial Sequence: Synthetic oligonucleotide
  Target: PCSK9; (+) strand; PAM type: YTN; PAM sequence: TTC
ttcccggggcgagaccacta

SEQ ID NO: 24546 - DNA, 20 bp, Artificial Sequence
  Description of Artificial Sequence: Synthetic oligonucleotide
  Target: PCSK9; (+) strand; PAM type: YTN; PAM sequence: CTT
cccggggcgagaccactagc

SEQ ID NO: 24547 - DNA, 20 bp, Artificial Sequence
  Description of Artificial Sequence: Synthetic oligonucleotide
  Target: PCSK9; (+) strand; PAM type: YTN; PAM sequence: TTC
ccggggcgagaccactagct

SEQ ID NO: 24548 - DNA, 20 bp, Artificial Sequence
  Description of Artificial Sequence: Synthetic oligonucleotide
  Target: PCSK9; (+) strand; PAM type: YTN; PAM sequence: CTA
gctttttctaagtattacca

SEQ ID NO: 24549 - DNA, 20 bp, Artificial Sequence
  Description of Artificial Sequence: Synthetic oligonucleotide
  Target: PCSK9; (+) strand; PAM type: YTN; PAM sequence: CTT
tttctaagtattaccagccc

SEQ ID NO: 24550 - DNA, 20 bp, Artificial Sequence
  Description of Artificial Sequence: Synthetic oligonucleotide
  Target: PCSK9; (+) strand; PAM type: YTN; PAM sequence: TTT
ttctaagtattaccagccca

SEQ ID NO: 24551 - DNA, 20 bp, Artificial Sequence
  Description of Artificial Sequence: Synthetic oligonucleotide
  Target: PCSK9; (+) strand; PAM type: YTN; PAM sequence: TTT
tctaagtattaccagcccag

SEQ ID NO: 24552 - DNA, 20 bp, Artificial Sequence
  Description of Artificial Sequence: Synthetic oligonucleotide
  Target: PCSK9; (+) strand; PAM type: YTN; PAM sequence: TTT
ctaagtattaccagcccagg

SEQ ID NO: 24553 - DNA, 20 bp, Artificial Sequence
  Description of Artificial Sequence: Synthetic oligonucleotide
  Target: PCSK9; (+) strand; PAM type: YTN; PAM sequence: TTC
taagtattaccagcccagga

SEQ ID NO: 24554 - DNA, 20 bp, Artificial Sequence
  Description of Artificial Sequence: Synthetic oligonucleotide
  Target: PCSK9; (+) strand; PAM type: YTN; PAM sequence: CTA
agtattaccagcccaggact

SEQ ID NO: 24555 - DNA, 20 bp, Artificial Sequence
  Description of Artificial Sequence: Synthetic oligonucleotide
  Target: PCSK9; (+) strand; PAM type: YTN; PAM sequence: TTA
ccagcccaggacttggctga

SEQ ID NO: 24556 - DNA, 20 bp, Artificial Sequence
  Description of Artificial Sequence: Synthetic oligonucleotide
  Target: PCSK9; (+) strand; PAM type: YTN; PAM sequence: CTT
ggctgaggttctgtgtcccc

SEQ ID NO: 24557 - DNA, 20 bp, Artificial Sequence
  Description of Artificial Sequence: Synthetic oligonucleotide
  Target: PCSK9; (+) strand; PAM type: YTN; PAM sequence: TTG
gctgaggttctgtgtccccc

SEQ ID NO: 24558 - DNA, 20 bp, Artificial Sequence
  Description of Artificial Sequence: Synthetic oligonucleotide
  Target: PCSK9; (+) strand; PAM type: YTN; PAM sequence: CTG
aggttctgtgtcccccagct

SEQ ID NO: 24559 - DNA, 20 bp, Artificial Sequence
  Description of Artificial Sequence: Synthetic oligonucleotide
  Target: PCSK9; (+) strand; PAM type: YTN; PAM sequence: TTC
tgtgtcccccagcttggagt

SEQ ID NO: 24560 - DNA, 20 bp, Artificial Sequence
  Description of Artificial Sequence: Synthetic oligonucleotide
  Target: PCSK9; (+) strand; PAM type: YTN; PAM sequence: CTG
tgtcccccagcttggagtca

SEQ ID NO: 24561 - DNA, 20 bp, Artificial Sequence
  Description of Artificial Sequence: Synthetic oligonucleotide
  Target: PCSK9; (+) strand; PAM type: YTN; PAM sequence: CTT
ggagtcagatgtggggttga

SEQ ID NO: 24562 - DNA, 20 bp, Artificial Sequence
  Description of Artificial Sequence: Synthetic oligonucleotide
  Target: PCSK9; (+) strand; PAM type: YTN; PAM sequence: TTG
gagtcagatgtggggttgaa

SEQ ID NO: 24563 - DNA, 20 bp, Artificial Sequence
  Description of Artificial Sequence: Synthetic oligonucleotide
  Target: PCSK9; (+) strand; PAM type: YTN; PAM sequence: TTG
aatcttggcttcctctcact

SEQ ID NO: 24564 - DNA, 20 bp, Artificial Sequence
  Description of Artificial Sequence: Synthetic oligonucleotide
  Target: PCSK9; (+) strand; PAM type: YTN; PAM sequence: CTT
ggcttcctctcactagctgt

SEQ ID NO: 24565 - DNA, 20 bp, Artificial Sequence
  Description of Artificial Sequence: Synthetic oligonucleotide
  Target: PCSK9; (+) strand; PAM type: YTN; PAM sequence: TTG
gcttcctctcactagctgtg

SEQ ID NO: 24566 - DNA, 20 bp, Artificial Sequence
  Description of Artificial Sequence: Synthetic oligonucleotide
  Target: PCSK9; (+) strand; PAM type: YTN; PAM sequence: CTT
cctctcactagctgtggtgc

SEQ ID NO: 24567 - DNA, 20 bp, Artificial Sequence
  Description of Artificial Sequence: Synthetic oligonucleotide
  Target: PCSK9; (+) strand; PAM type: YTN; PAM sequence: TTC
ctctcactagctgtggtgct

SEQ ID NO: 24568 - DNA, 20 bp, Artificial Sequence
  Description of Artificial Sequence: Synthetic oligonucleotide
  Target: PCSK9; (+) strand; PAM type: YTN; PAM sequence: CTC
tcactagctgtggtgcttga

SEQ ID NO: 24569 - DNA, 20 bp, Artificial Sequence
  Description of Artificial Sequence: Synthetic oligonucleotide
  Target: PCSK9; (+) strand; PAM type: YTN; PAM sequence: CTC
actagctgtggtgcttgaca

SEQ ID NO: 24570 - DNA, 20 bp, Artificial Sequence
  Description of Artificial Sequence: Synthetic oligonucleotide
  Target: PCSK9; (+) strand; PAM type: YTN; PAM sequence: CTA
gctgtggtgcttgacaagtc

SEQ ID NO: 24571 - DNA, 20 bp, Artificial Sequence
  Description of Artificial Sequence: Synthetic oligonucleotide
  Target: PCSK9; (+) strand; PAM type: YTN; PAM sequence: CTG
tggtgcttgacaagtcactt

SEQ ID NO: 24572 - DNA, 20 bp, Artificial Sequence
  Description of Artificial Sequence: Synthetic oligonucleotide
  Target: PCSK9; (+) strand; PAM type: YTN; PAM sequence: CTT
gacaagtcacttatccttga

SEQ ID NO: 24573 - DNA, 20 bp, Artificial Sequence
  Description of Artificial Sequence: Synthetic oligonucleotide
  Target: PCSK9; (+) strand; PAM type: YTN; PAM sequence: TTG
acaagtcacttatccttgag

SEQ ID NO: 24574 - DNA, 20 bp, Artificial Sequence
  Description of Artificial Sequence: Synthetic oligonucleotide
  Target: PCSK9; (+) strand; PAM type: YTN; PAM sequence: CTT
atccttgagcctccattgcc

SEQ ID NO: 24575 - DNA, 20 bp, Artificial Sequence
  Description of Artificial Sequence: Synthetic oligonucleotide
  Target: PCSK9; (+) strand; PAM type: YTN; PAM sequence: TTA
tccttgagcctccattgcct

SEQ ID NO: 24576 - DNA, 20 bp, Artificial Sequence
  Description of Artificial Sequence: Synthetic oligonucleotide
  Target: PCSK9; (+) strand; PAM type: YTN; PAM sequence: CTT
gagcctccattgcctaatct

SEQ ID NO: 24577 - DNA, 20 bp, Artificial Sequence
  Description of Artificial Sequence: Synthetic oligonucleotide
  Target: PCSK9; (+) strand; PAM type: YTN; PAM sequence: TTG
agcctccattgcctaatctt

SEQ ID NO: 24578 - DNA, 20 bp, Artificial Sequence
  Description of Artificial Sequence: Synthetic oligonucleotide
  Target: PCSK9; (+) strand; PAM type: YTN; PAM sequence: CTC
cattgcctaatctttaaaag

SEQ ID NO: 24579 - DNA, 20 bp, Artificial Sequence
  Description of Artificial Sequence: Synthetic oligonucleotide
  Target: PCSK9; (+) strand; PAM type: YTN; PAM sequence: TTG
cctaatctttaaaagggagg

SEQ ID NO: 24580 - DNA, 20 bp, Artificial Sequence
  Description of Artificial Sequence: Synthetic oligonucleotide
  Target: PCSK9; (+) strand; PAM type: YTN; PAM sequence: CTA
atctttaaaagggaggtgac

SEQ ID NO: 24581 - DNA, 20 bp, Artificial Sequence
  Description of Artificial Sequence: Synthetic oligonucleotide
  Target: PCSK9; (+) strand; PAM type: YTN; PAM sequence: CTT
taaaagggaggtgacaatcg

SEQ ID NO: 24582 - DNA, 20 bp, Artificial Sequence
  Description of Artificial Sequence: Synthetic oligonucleotide
  Target: PCSK9; (+) strand; PAM type: YTN; PAM sequence: TTT
aaaagggaggtgacaatcgt

SEQ ID NO: 24583 - DNA, 20 bp, Artificial Sequence
  Description of Artificial Sequence: Synthetic oligonucleotide
  Target: PCSK9; (+) strand; PAM type: YTN; PAM sequence: TTA
aaagggaggtgacaatcgtc

SEQ ID NO: 24584 - DNA, 20 bp, Artificial Sequence
  Description of Artificial Sequence: Synthetic oligonucleotide
  Target: PCSK9; (+) strand; PAM type: YTN; PAM sequence: CTA
cggctcagtggcagcagatg

SEQ ID NO: 24585 - DNA, 20 bp, Artificial Sequence
  Description of Artificial Sequence: Synthetic oligonucleotide
  Target: PCSK9; (+) strand; PAM type: YTN; PAM sequence: CTC
agtggcagcagatggggaga

SEQ ID NO: 24586 - DNA, 20 bp, Artificial Sequence
  Description of Artificial Sequence: Synthetic oligonucleotide
  Target: PCSK9; (+) strand; PAM type: YTN; PAM sequence: TTC
tgttgaccatgagtgaactt

SEQ ID NO: 24587 - DNA, 20 bp, Artificial Sequence
  Description of Artificial Sequence: Synthetic oligonucleotide
  Target: PCSK9; (+) strand; PAM type: YTN; PAM sequence: CTG
ttgaccatgagtgaacttac

SEQ ID NO: 24588 - DNA, 20 bp, Artificial Sequence
  Description of Artificial Sequence: Synthetic oligonucleotide
  Target: PCSK9; (+) strand; PAM type: YTN; PAM sequence: TTG
accatgagtgaacttacaat

SEQ ID NO: 24589 - DNA, 20 bp, Artificial Sequence
  Description of Artificial Sequence: Synthetic oligonucleotide
  Target: PCSK9; (+) strand; PAM type: YTN; PAM sequence: CTT
acaatgcaagccccgggggg

SEQ ID NO: 24590 - DNA, 20 bp, Artificial Sequence
  Description of Artificial Sequence: Synthetic oligonucleotide
  Target: PCSK9; (+) strand; PAM type: YTN; PAM sequence: TTA
caatgcaagccccgggggga

SEQ ID NO: 24591 - DNA, 20 bp, Artificial Sequence
  Description of Artificial Sequence: Synthetic oligonucleotide
  Target: PCSK9; (+) strand; PAM type: YTN; PAM sequence: CTT
gcagttttgtccctgtctgc

SEQ ID NO: 24592 - DNA, 20 bp, Artificial Sequence
  Description of Artificial Sequence: Synthetic oligonucleotide
  Target: PCSK9; (+) strand; PAM type: YTN; PAM sequence: TTG
cagttttgtccctgtctgca

SEQ ID NO: 24593 - DNA, 20 bp, Artificial Sequence
  Description of Artificial Sequence: Synthetic oligonucleotide
  Target: PCSK9; (+) strand; PAM type: YTN; PAM sequence: TTT
tgtccctgtctgcagtgtga

SEQ ID NO: 24594 - DNA, 20 bp, Artificial Sequence
  Description of Artificial Sequence: Synthetic oligonucleotide
  Target: PCSK9; (+) strand; PAM type: YTN; PAM sequence: TTT
gtccctgtctgcagtgtgac

SEQ ID NO: 24595 - DNA, 20 bp, Artificial Sequence
  Description of Artificial Sequence: Synthetic oligonucleotide
  Target: PCSK9; (+) strand; PAM type: YTN; PAM sequence: TTG
tccctgtctgcagtgtgacc

SEQ ID NO: 24596 - DNA, 20 bp, Artificial Sequence
  Description of Artificial Sequence: Synthetic oligonucleotide
  Target: PCSK9; (+) strand; PAM type: YTN; PAM sequence: CTG
tctgcagtgtgacctgttgg

SEQ ID NO: 24597 - DNA, 20 bp, Artificial Sequence
  Description of Artificial Sequence: Synthetic oligonucleotide
  Target: PCSK9; (+) strand; PAM type: YTN; PAM sequence: CTG
cagtgtgacctgttggtgac

SEQ ID NO: 24598 - DNA, 20 bp, Artificial Sequence
  Description of Artificial Sequence: Synthetic oligonucleotide
  Target: PCSK9; (+) strand; PAM type: YTN; PAM sequence: CTG
ttggtgacattgtctttgct

SEQ ID NO: 24599 - DNA, 20 bp, Artificial Sequence
  Description of Artificial Sequence: Synthetic oligonucleotide
  Target: PCSK9; (+) strand; PAM type: YTN; PAM sequence: TTG
gtgacattgtctttgctcca

SEQ ID NO: 24600 - DNA, 20 bp, Artificial Sequence
  Description of Artificial Sequence: Synthetic oligonucleotide
  Target: PCSK9; (+) strand; PAM type: YTN; PAM sequence: TTG
tctttgctccaaaccacagc

SEQ ID NO: 24601 - DNA, 20 bp, Artificial Sequence
  Description of Artificial Sequence: Synthetic oligonucleotide
  Target: PCSK9; (+) strand; PAM type: YTN; PAM sequence: CTT
tgctccaaaccacagctcct

SEQ ID NO: 24602 - DNA, 20 bp, Artificial Sequence
  Description of Artificial Sequence: Synthetic oligonucleotide
  Target: PCSK9; (+) strand; PAM type: YTN; PAM sequence: TTT
gctccaaaccacagctcctg

SEQ ID NO: 24603 - DNA, 20 bp, Artificial Sequence
  Description of Artificial Sequence: Synthetic oligonucleotide
  Target: PCSK9; (+) strand; PAM type: YTN; PAM sequence: TTG
ctccaaaccacagctcctgg

SEQ ID NO: 24604 - DNA, 20 bp, Artificial Sequence
  Description of Artificial Sequence: Synthetic oligonucleotide
  Target: PCSK9; (+) strand; PAM type: YTN; PAM sequence: CTC
caaaccacagctcctggggc

SEQ ID NO: 24605 - DNA, 20 bp, Artificial Sequence
  Description of Artificial Sequence: Synthetic oligonucleotide
  Target: PCSK9; (+) strand; PAM type: YTN; PAM sequence: CTC
ctggggcagaggggaaaatt

SEQ ID NO: 24606 - DNA, 20 bp, Artificial Sequence
  Description of Artificial Sequence: Synthetic oligonucleotide
  Target: PCSK9; (+) strand; PAM type: YTN; PAM sequence: CTG
gggcagaggggaaaattctg

SEQ ID NO: 24607 - DNA, 20 bp, Artificial Sequence
  Description of Artificial Sequence: Synthetic oligonucleotide
  Target: PCSK9; (+) strand; PAM type: YTN; PAM sequence: TTC
tgccactcacagctgcctgc

SEQ ID NO: 24608 - DNA, 20 bp, Artificial Sequence
  Description of Artificial Sequence: Synthetic oligonucleotide
  Target: PCSK9; (+) strand; PAM type: YTN; PAM sequence: CTG
ccactcacagctgcctgccc

SEQ ID NO: 24609 - DNA, 20 bp, Artificial Sequence
  Description of Artificial Sequence: Synthetic oligonucleotide
  Target: PCSK9; (+) strand; PAM type: YTN; PAM sequence: CTC
acagctgcctgcccacgctt

SEQ ID NO: 24610 - DNA, 20 bp, Artificial Sequence
  Description of Artificial Sequence: Synthetic oligonucleotide
  Target: PCSK9; (+) strand; PAM type: YTN; PAM sequence: CTG
cctgcccacgcttctgtctg

SEQ ID NO: 24611 - DNA, 20 bp, Artificial Sequence
  Description of Artificial Sequence: Synthetic oligonucleotide
  Target: PCSK9; (+) strand; PAM type: YTN; PAM sequence: CTG
cccacgcttctgtctgagtg

SEQ ID NO: 24612 - DNA, 20 bp, Artificial Sequence
  Description of Artificial Sequence: Synthetic oligonucleotide
  Target: PCSK9; (+) strand; PAM type: YTN; PAM sequence: CTT
ctgtctgagtgtgctgggtg

SEQ ID NO: 24613 - DNA, 20 bp, Artificial Sequence
  Description of Artificial Sequence: Synthetic oligonucleotide
  Target: PCSK9; (+) strand; PAM type: YTN; PAM sequence: TTC
tgtctgagtgtgctgggtgg

SEQ ID NO: 24614 - DNA, 20 bp, Artificial Sequence
  Description of Artificial Sequence: Synthetic oligonucleotide
  Target: PCSK9; (+) strand; PAM type: YTN; PAM sequence: CTG
tctgagtgtgctgggtggca

SEQ ID NO: 24615 - DNA, 20 bp, Artificial Sequence
  Description of Artificial Sequence: Synthetic oligonucleotide
  Target: PCSK9; (+) strand; PAM type: YTN; PAM sequence: CTG
agtgtgctgggtggcaggat

SEQ ID NO: 24616 - DNA, 20 bp, Artificial Sequence
  Description of Artificial Sequence: Synthetic oligonucleotide
  Target: PCSK9; (+) strand; PAM type: YTN; PAM sequence: CTG
ggtggcaggatggcaagtcc

SEQ ID NO: 24617 - DNA, 20 bp, Artificial Sequence
  Description of Artificial Sequence: Synthetic oligonucleotide
  Target: PCSK9; (+) strand; PAM type: YTN; PAM sequence: CTT
actcagctcagtatagccct

SEQ ID NO: 24618 - DNA, 20 bp, Artificial Sequence
  Description of Artificial Sequence: Synthetic oligonucleotide
  Target: PCSK9; (+) strand; PAM type: YTN; PAM sequence: TTA
ctcagctcagtatagccctc

SEQ ID NO: 24619 - DNA, 20 bp, Artificial Sequence
  Description of Artificial Sequence: Synthetic oligonucleotide
  Target: PCSK9; (+) strand; PAM type: YTN; PAM sequence: CTC
agctcagtatagccctcttc

SEQ ID NO: 24620 - DNA, 20 bp, Artificial Sequence
  Description of Artificial Sequence: Synthetic oligonucleotide
  Target: PCSK9; (+) strand; PAM type: YTN; PAM sequence: CTC
agtatagccctcttccttgt

SEQ ID NO: 24621 - DNA, 20 bp, Artificial Sequence
  Description of Artificial Sequence: Synthetic oligonucleotide
  Target: PCSK9; (+) strand; PAM type: YTN; PAM sequence: CTC
ttccttgttccctgagcctt

SEQ ID NO: 24622 - DNA, 20 bp, Artificial Sequence
  Description of Artificial Sequence: Synthetic oligonucleotide
  Target: PCSK9; (+) strand; PAM type: YTN; PAM sequence: CTT
ccttgttccctgagcctttg

SEQ ID NO: 24623 - DNA, 20 bp, Artificial Sequence
  Description of Artificial Sequence: Synthetic oligonucleotide
  Target: PCSK9; (+) strand; PAM type: YTN; PAM sequence: TTC
cttgttccctgagcctttga

SEQ ID NO: 24624 - DNA, 20 bp, Artificial Sequence
  Description of Artificial Sequence: Synthetic oligonucleotide
  Target: PCSK9; (+) strand; PAM type: YTN; PAM sequence: CTT
gttccctgagcctttgactt

SEQ ID NO: 24625 - DNA, 20 bp, Artificial Sequence
  Description of Artificial Sequence: Synthetic oligonucleotide
  Target: PCSK9; (+) strand; PAM type: YTN; PAM sequence: TTG
ttccctgagcctttgacttt

SEQ ID NO: 24626 - DNA, 20 bp, Artificial Sequence
  Description of Artificial Sequence: Synthetic oligonucleotide
  Target: PCSK9; (+) strand; PAM type: YTN; PAM sequence: TTC
cctgagcctttgactttctc

SEQ ID NO: 24627 - DNA, 20 bp, Artificial Sequence
  Description of Artificial Sequence: Synthetic oligonucleotide
  Target: PCSK9; (+) strand; PAM type: YTN; PAM sequence: CTG
agcctttgactttctcgagg

SEQ ID NO: 24628 - DNA, 20 bp, Artificial Sequence
  Description of Artificial Sequence: Synthetic oligonucleotide
  Target: PCSK9; (+) strand; PAM type: YTN; PAM sequence: CTT
tgactttctcgagggatgtt

SEQ ID NO: 24629 - DNA, 20 bp, Artificial Sequence
  Description of Artificial Sequence: Synthetic oligonucleotide
  Target: PCSK9; (+) strand; PAM type: YTN; PAM sequence: TTT
gactttctcgagggatgttg

SEQ ID NO: 24630 - DNA, 20 bp, Artificial Sequence
  Description of Artificial Sequence: Synthetic oligonucleotide
  Target: PCSK9; (+) strand; PAM type: YTN; PAM sequence: TTG
actttctcgagggatgttgt

SEQ ID NO: 24631 - DNA, 20 bp, Artificial Sequence
  Description of Artificial Sequence: Synthetic oligonucleotide
  Target: PCSK9; (+) strand; PAM type: YTN; PAM sequence: CTT
tctcgagggatgttgtgggg

SEQ ID NO: 24632 - DNA, 20 bp, Artificial Sequence
  Description of Artificial Sequence: Synthetic oligonucleotide
  Target: PCSK9; (+) strand; PAM type: YTN; PAM sequence: TTT
ctcgagggatgttgtggggt

SEQ ID NO: 24633 - DNA, 20 bp, Artificial Sequence
  Description of Artificial Sequence: Synthetic oligonucleotide
  Target: PCSK9; (+) strand; PAM type: YTN; PAM sequence: TTC
tcgagggatgttgtggggtt

SEQ ID NO: 24634 - DNA, 20 bp, Artificial Sequence
  Description of Artificial Sequence: Synthetic oligonucleotide
  Target: PCSK9; (+) strand; PAM type: YTN; PAM sequence: CTC
gagggatgttgtggggttgt

SEQ ID NO: 24635 - DNA, 20 bp, Artificial Sequence
  Description of Artificial Sequence: Synthetic oligonucleotide
  Target: PCSK9; (+) strand; PAM type: YTN; PAM sequence: TTG
tggggttgtggccaggataa

SEQ ID NO: 24636 - DNA, 20 bp, Artificial Sequence
  Description of Artificial Sequence: Synthetic oligonucleotide
  Target: PCSK9; (+) strand; PAM type: YTN; PAM sequence: TTG
tggccaggataagaaagggc

SEQ ID NO: 24637 - DNA, 20 bp, Artificial Sequence
  Description of Artificial Sequence: Synthetic oligonucleotide
  Target: PCSK9; (+) strand; PAM type: YTN; PAM sequence: TTT
caagttaccactgctccaaa

SEQ ID NO: 24638 - DNA, 20 bp, Artificial Sequence
  Description of Artificial Sequence: Synthetic oligonucleotide
  Target: PCSK9; (+) strand; PAM type: YTN; PAM sequence: TTC
aagttaccactgctccaaaa

SEQ ID NO: 24639 - DNA, 20 bp, Artificial Sequence
  Description of Artificial Sequence: Synthetic oligonucleotide
  Target: PCSK9; (+) strand; PAM type: YTN; PAM sequence: TTA
ccactgctccaaaacaactg

SEQ ID NO: 24640 - DNA, 20 bp, Artificial Sequence
  Description of Artificial Sequence: Synthetic oligonucleotide
  Target: PCSK9; (+) strand; PAM type: YTN; PAM sequence: CTG
ctccaaaacaactgttctgg

SEQ ID NO: 24641 - DNA, 20 bp, Artificial Sequence
  Description of Artificial Sequence: Synthetic oligonucleotide
  Target: PCSK9; (+) strand; PAM type: YTN; PAM sequence: CTC
caaaacaactgttctggaaa

SEQ ID NO: 24642 - DNA, 20 bp, Artificial Sequence
  Description of Artificial Sequence: Synthetic oligonucleotide
  Target: PCSK9; (+) strand; PAM type: YTN; PAM sequence: CTG
ttctggaaatagtgagtacc

SEQ ID NO: 24643 - DNA, 20 bp, Artificial Sequence
  Description of Artificial Sequence: Synthetic oligonucleotide
  Target: PCSK9; (+) strand; PAM type: YTN; PAM sequence: TTC
tggaaatagtgagtacccca

SEQ ID NO: 24644 - DNA, 20 bp, Artificial Sequence
  Description of Artificial Sequence: Synthetic oligonucleotide
  Target: PCSK9; (+) strand; PAM type: YTN; PAM sequence: CTG
gaaatagtgagtaccccatc

SEQ ID NO: 24645 - DNA, 20 bp, Artificial Sequence
  Description of Artificial Sequence: Synthetic oligonucleotide
  Target: PCSK9; (+) strand; PAM type: YTN; PAM sequence: CTG
agaggtgagtaagcagaggc

SEQ ID NO: 24646 - DNA, 20 bp, Artificial Sequence
  Description of Artificial Sequence: Synthetic oligonucleotide
  Target: PCSK9; (+) strand; PAM type: YTN; PAM sequence: CTG
tatgaccacctgaaccaagc

SEQ ID NO: 24647 - DNA, 20 bp, Artificial Sequence
  Description of Artificial Sequence: Synthetic oligonucleotide
  Target: PCSK9; (+) strand; PAM type: YTN; PAM sequence: CTG
aaccaagcccttgaggatgt

SEQ ID NO: 24648 - DNA, 20 bp, Artificial Sequence
  Description of Artificial Sequence: Synthetic oligonucleotide
  Target: PCSK9; (+) strand; PAM type: YTN; PAM sequence: CTT
gaggatgtttcttctctggt

SEQ ID NO: 24649 - DNA, 20 bp, Artificial Sequence
  Description of Artificial Sequence: Synthetic oligonucleotide
  Target: PCSK9; (+) strand; PAM type: YTN; PAM sequence: TTG
aggatgtttcttctctggtg

SEQ ID NO: 24650 - DNA, 20 bp, Artificial Sequence
  Description of Artificial Sequence: Synthetic oligonucleotide
  Target: PCSK9; (+) strand; PAM type: YTN; PAM sequence: TTT
cttctctggtggaagtttgg

SEQ ID NO: 24651 - DNA, 20 bp, Artificial Sequence
  Description of Artificial Sequence: Synthetic oligonucleotide
  Target: PCSK9; (+) strand; PAM type: YTN; PAM sequence: TTC
ttctctggtggaagtttgga

SEQ ID NO: 24652 - DNA, 20 bp, Artificial Sequence
  Description of Artificial Sequence: Synthetic oligonucleotide
  Target: PCSK9; (+) strand; PAM type: YTN; PAM sequence: CTT
ctctggtggaagtttggaac

SEQ ID NO: 24653 - DNA, 20 bp, Artificial Sequence
  Description of Artificial Sequence: Synthetic oligonucleotide
  Target: PCSK9; (+) strand; PAM type: YTN; PAM sequence: TTC
tctggtggaagtttggaaca

SEQ ID NO: 24654 - DNA, 20 bp, Artificial Sequence
  Description of Artificial Sequence: Synthetic oligonucleotide
  Target: PCSK9; (+) strand; PAM type: YTN; PAM sequence: CTC
tggtggaagtttggaacagg

SEQ ID NO: 24655 - DNA, 20 bp, Artificial Sequence
  Description of Artificial Sequence: Synthetic oligonucleotide
  Target: PCSK9; (+) strand; PAM type: YTN; PAM sequence: CTG
gtggaagtttggaacaggag

SEQ ID NO: 24656 - DNA, 20 bp, Artificial Sequence
  Description of Artificial Sequence: Synthetic oligonucleotide
  Target: PCSK9; (+) strand; PAM type: YTN; PAM sequence: TTT
ggaacaggagcctcctcaag

SEQ ID NO: 24657 - DNA, 20 bp, Artificial Sequence
  Description of Artificial Sequence: Synthetic oligonucleotide
  Target: PCSK9; (+) strand; PAM type: YTN; PAM sequence: TTG
gaacaggagcctcctcaagt

SEQ ID NO: 24658 - DNA, 20 bp, Artificial Sequence
  Description of Artificial Sequence: Synthetic oligonucleotide
  Target: PCSK9; (+) strand; PAM type: YTN; PAM sequence: CTC
ctcaagttcatttattcatt

SEQ ID NO: 24659 - DNA, 20 bp, Artificial Sequence
  Description of Artificial Sequence: Synthetic oligonucleotide
  Target: PCSK9; (+) strand; PAM type: YTN; PAM sequence: CTC
aagttcatttattcattcat

SEQ ID NO: 24660 - DNA, 20 bp, Artificial Sequence
  Description of Artificial Sequence: Synthetic oligonucleotide
  Target: PCSK9; (+) strand; PAM type: YTN; PAM sequence: TTC
atttattcattcattcaatg

SEQ ID NO: 24661 - DNA, 20 bp, Artificial Sequence
  Description of Artificial Sequence: Synthetic oligonucleotide
  Target: PCSK9; (+) strand; PAM type: YTN; PAM sequence: TTT
attcattcattcaatggtta

SEQ ID NO: 24662 - DNA, 20 bp, Artificial Sequence
  Description of Artificial Sequence: Synthetic oligonucleotide
  Target: PCSK9; (+) strand; PAM type: YTN; PAM sequence: TTA
ttcattcattcaatggttat

SEQ ID NO: 24663 - DNA, 20 bp, Artificial Sequence
  Description of Artificial Sequence: Synthetic oligonucleotide
  Target: PCSK9; (+) strand; PAM type: YTN; PAM sequence: TTC
attcattcaatggttatttt

SEQ ID NO: 24664 - DNA, 20 bp, Artificial Sequence
  Description of Artificial Sequence: Synthetic oligonucleotide
  Target: PCSK9; (+) strand; PAM type: YTN; PAM sequence: TTC
attcaatggttattttgtgg

SEQ ID NO: 24665 - DNA, 20 bp, Artificial Sequence
  Description of Artificial Sequence: Synthetic oligonucleotide
  Target: PCSK9; (+) strand; PAM type: YTN; PAM sequence: TTC
aatggttattttgtgggaat

SEQ ID NO: 24666 - DNA, 20 bp, Artificial Sequence
  Description of Artificial Sequence: Synthetic oligonucleotide
  Target: PCSK9; (+) strand; PAM type: YTN; PAM sequence: TTA
ttttgtgggaatcgaattta

SEQ ID NO: 24667 - DNA, 20 bp, Artificial Sequence
  Description of Artificial Sequence: Synthetic oligonucleotide
  Target: PCSK9; (+) strand; PAM type: YTN; PAM sequence: TTT
tgtgggaatcgaatttagaa

SEQ ID NO: 24668 - DNA, 20 bp, Artificial Sequence
  Description of Artificial Sequence: Synthetic oligonucleotide
  Target: PCSK9; (+) strand; PAM type: YTN; PAM sequence: TTT
gtgggaatcgaatttagaat

SEQ ID NO: 24669 - DNA, 20 bp, Artificial Sequence
  Description of Artificial Sequence: Synthetic oligonucleotide
  Target: PCSK9; (+) strand; PAM type: YTN; PAM sequence: TTG
tgggaatcgaatttagaatg

SEQ ID NO: 24670 - DNA, 20 bp, Artificial Sequence
  Description of Artificial Sequence: Synthetic oligonucleotide
  Target: PCSK9; (+) strand; PAM type: YTN; PAM sequence: TTT
agaatgaaaatattttttgg

SEQ ID NO: 24671 - DNA, 20 bp, Artificial Sequence
  Description of Artificial Sequence: Synthetic oligonucleotide
  Target: PCSK9; (+) strand; PAM type: YTN; PAM sequence: TTA
gaatgaaaatattttttggc

SEQ ID NO: 24672 - DNA, 20 bp, Artificial Sequence
  Description of Artificial Sequence: Synthetic oligonucleotide
  Target: PCSK9; (+) strand; PAM type: YTN; PAM sequence: TTT
tttggcaagcagaaaataat

SEQ ID NO: 24673 - DNA, 20 bp, Artificial Sequence
  Description of Artificial Sequence: Synthetic oligonucleotide
  Target: PCSK9; (+) strand; PAM type: YTN; PAM sequence: TTT
ttggcaagcagaaaataatt

SEQ ID NO: 24674 - DNA, 20 bp, Artificial Sequence
  Description of Artificial Sequence: Synthetic oligonucleotide
  Target: PCSK9; (+) strand; PAM type: YTN; PAM sequence: TTT
tggcaagcagaaaataattt

SEQ ID NO: 24675 - DNA, 20 bp, Artificial Sequence
  Description of Artificial Sequence: Synthetic oligonucleotide
  Target: PCSK9; (+) strand; PAM type: YTN; PAM sequence: TTT
ggcaagcagaaaataatttt

SEQ ID NO: 24676 - DNA, 20 bp, Artificial Sequence
  Description of Artificial Sequence: Synthetic oligonucleotide
  Target: PCSK9; (+) strand; PAM type: YTN; PAM sequence: TTG
gcaagcagaaaataattttt

SEQ ID NO: 24677 - DNA, 20 bp, Artificial Sequence
  Description of Artificial Sequence: Synthetic oligonucleotide
  Target: PCSK9; (+) strand; PAM type: YTN; PAM sequence: TTT
ttagaccaatccttttcttt

SEQ ID NO: 24678 - DNA, 20 bp, Artificial Sequence
  Description of Artificial Sequence: Synthetic oligonucleotide
  Target: PCSK9; (+) strand; PAM type: YTN; PAM sequence: TTT
tagaccaatccttttctttt

SEQ ID NO: 24679 - DNA, 20 bp, Artificial Sequence
  Description of Artificial Sequence: Synthetic oligonucleotide
  Target: PCSK9; (+) strand; PAM type: YTN; PAM sequence: TTT
agaccaatccttttctttta

SEQ ID NO: 24680 - DNA, 20 bp, Artificial Sequence
  Description of Artificial Sequence: Synthetic oligonucleotide
  Target: PCSK9; (+) strand; PAM type: YTN; PAM sequence: TTA
gaccaatccttttcttttag

SEQ ID NO: 24681 - DNA, 20 bp, Artificial Sequence
  Description of Artificial Sequence: Synthetic oligonucleotide
  Target: PCSK9; (+) strand; PAM type: YTN; PAM sequence: CTT
ttcttttagtcatgagaaac

SEQ ID NO: 24682 - DNA, 20 bp, Artificial Sequence
  Description of Artificial Sequence: Synthetic oligonucleotide
  Target: PCSK9; (+) strand; PAM type: YTN; PAM sequence: TTT
tcttttagtcatgagaaact

SEQ ID NO: 24683 - DNA, 20 bp, Artificial Sequence
  Description of Artificial Sequence: Synthetic oligonucleotide
  Target: PCSK9; (+) strand; PAM type: YTN; PAM sequence: TTT
cttttagtcatgagaaactg

SEQ ID NO: 24684 - DNA, 20 bp, Artificial Sequence
  Description of Artificial Sequence: Synthetic oligonucleotide
  Target: PCSK9; (+) strand; PAM type: YTN; PAM sequence: TTC
ttttagtcatgagaaactga

SEQ ID NO: 24685 - DNA, 20 bp, Artificial Sequence
  Description of Artificial Sequence: Synthetic oligonucleotide
  Target: PCSK9; (+) strand; PAM type: YTN; PAM sequence: CTT
ttagtcatgagaaactgagg

SEQ ID NO: 24686 - DNA, 20 bp, Artificial Sequence
  Description of Artificial Sequence: Synthetic oligonucleotide
  Target: PCSK9; (+) strand; PAM type: YTN; PAM sequence: TTT
tagtcatgagaaactgaggc

SEQ ID NO: 24687 - DNA, 20 bp, Artificial Sequence
  Description of Artificial Sequence: Synthetic oligonucleotide
  Target: PCSK9; (+) strand; PAM type: YTN; PAM sequence: TTT
agtcatgagaaactgaggcc

SEQ ID NO: 24688 - DNA, 20 bp, Artificial Sequence
  Description of Artificial Sequence: Synthetic oligonucleotide
  Target: PCSK9; (+) strand; PAM type: YTN; PAM sequence: TTA
gtcatgagaaactgaggccc

SEQ ID NO: 24689 - DNA, 20 bp, Artificial Sequence
  Description of Artificial Sequence: Synthetic oligonucleotide
  Target: PCSK9; (+) strand; PAM type: YTN; PAM sequence: CTG
aggcccagagagaggaggtc

SEQ ID NO: 24690 - DNA, 20 bp, Artificial Sequence
  Description of Artificial Sequence: Synthetic oligonucleotide
  Target: PCSK9; (+) strand; PAM type: YTN; PAM sequence: TTA
gaactgggtttccagaactg

SEQ ID NO: 24691 - DNA, 20 bp, Artificial Sequence
  Description of Artificial Sequence: Synthetic oligonucleotide
  Target: PCSK9; (+) strand; PAM type: YTN; PAM sequence: CTG
ggtttccagaactgacactc

SEQ ID NO: 24692 - DNA, 20 bp, Artificial Sequence
  Description of Artificial Sequence: Synthetic oligonucleotide
  Target: PCSK9; (+) strand; PAM type: YTN; PAM sequence: TTT
ccagaactgacactccactg

SEQ ID NO: 24693 - DNA, 20 bp, Artificial Sequence
  Description of Artificial Sequence: Synthetic oligonucleotide
  Target: PCSK9; (+) strand; PAM type: YTN; PAM sequence: TTC
cagaactgacactccactgc

SEQ ID NO: 24694 - DNA, 20 bp, Artificial Sequence
  Description of Artificial Sequence: Synthetic oligonucleotide
  Target: PCSK9; (+) strand; PAM type: YTN; PAM sequence: CTG
acactccactgcacagagta

SEQ ID NO: 24695 - DNA, 20 bp, Artificial Sequence
  Description of Artificial Sequence: Synthetic oligonucleotide
  Target: PCSK9; (+) strand; PAM type: YTN; PAM sequence: CTC
cactgcacagagtactctcc

SEQ ID NO: 24696 - DNA, 20 bp, Artificial Sequence
  Description of Artificial Sequence: Synthetic oligonucleotide
  Target: PCSK9; (+) strand; PAM type: YTN; PAM sequence: CTG
cacagagtactctcccaatt

SEQ ID NO: 24697 - DNA, 20 bp, Artificial Sequence
  Description of Artificial Sequence: Synthetic oligonucleotide
  Target: PCSK9; (+) strand; PAM type: YTN; PAM sequence: CTC
tcccaattcattcaattttt

SEQ ID NO: 24698 - DNA, 20 bp, Artificial Sequence
  Description of Artificial Sequence: Synthetic oligonucleotide
  Target: PCSK9; (+) strand; PAM type: YTN; PAM sequence: CTC
ccaattcattcaatttttat

SEQ ID NO: 24699 - DNA, 20 bp, Artificial Sequence
  Description of Artificial Sequence: Synthetic oligonucleotide
  Target: PCSK9; (+) strand; PAM type: YTN; PAM sequence: TTC
attcaatttttatttagcgg

SEQ ID NO: 24700 - DNA, 20 bp, Artificial Sequence
  Description of Artificial Sequence: Synthetic oligonucleotide
  Target: PCSK9; (+) strand; PAM type: YTN; PAM sequence: TTC
aatttttatttagcggaagg

SEQ ID NO: 24701 - DNA, 20 bp, Artificial Sequence
  Description of Artificial Sequence: Synthetic oligonucleotide
  Target: PCSK9; (+) strand; PAM type: YTN; PAM sequence: TTT
ttatttagcggaaggcattt

SEQ ID NO: 24702 - DNA, 20 bp, Artificial Sequence
  Description of Artificial Sequence: Synthetic oligonucleotide
  Target: PCSK9; (+) strand; PAM type: YTN; PAM sequence: TTT
tatttagcggaaggcatttt

SEQ ID NO: 24703 - DNA, 20 bp, Artificial Sequence
  Description of Artificial Sequence: Synthetic oligonucleotide
  Target: PCSK9; (+) strand; PAM type: YTN; PAM sequence: TTT
atttagcggaaggcattttc

SEQ ID NO: 24704 - DNA, 20 bp, Artificial Sequence
  Description of Artificial Sequence: Synthetic oligonucleotide
  Target: PCSK9; (+) strand; PAM type: YTN; PAM sequence: TTA
tttagcggaaggcattttca

SEQ ID NO: 24705 - DNA, 20 bp, Artificial Sequence
  Description of Artificial Sequence: Synthetic oligonucleotide
  Target: PCSK9; (+) strand; PAM type: YTN; PAM sequence: TTT
agcggaaggcattttcagat

SEQ ID NO: 24706 - DNA, 20 bp, Artificial Sequence
  Description of Artificial Sequence: Synthetic oligonucleotide
  Target: PCSK9; (+) strand; PAM type: YTN; PAM sequence: TTA
gcggaaggcattttcagatg

SEQ ID NO: 24707 - DNA, 20 bp, Artificial Sequence
  Description of Artificial Sequence: Synthetic oligonucleotide
  Target: PCSK9; (+) strand; PAM type: YTN; PAM sequence: TTT
tcagatgggtctttgaagca

SEQ ID NO: 24708 - DNA, 20 bp, Artificial Sequence
  Description of Artificial Sequence: Synthetic oligonucleotide
  Target: PCSK9; (+) strand; PAM type: YTN; PAM sequence: TTT
cagatgggtctttgaagcat

SEQ ID NO: 24709 - DNA, 20 bp, Artificial Sequence
  Description of Artificial Sequence: Synthetic oligonucleotide
  Target: PCSK9; (+) strand; PAM type: YTN; PAM sequence: TTC
agatgggtctttgaagcatt

SEQ ID NO: 24710 - DNA, 20 bp, Artificial Sequence
  Description of Artificial Sequence: Synthetic oligonucleotide
  Target: PCSK9; (+) strand; PAM type: YTN; PAM sequence: CTT
tgaagcattagtaggagttc

SEQ ID NO: 24711 - DNA, 20 bp, Artificial Sequence
  Description of Artificial Sequence: Synthetic oligonucleotide
  Target: PCSK9; (+) strand; PAM type: YTN; PAM sequence: TTT
gaagcattagtaggagttca

SEQ ID NO: 24712 - DNA, 20 bp, Artificial Sequence
  Description of Artificial Sequence: Synthetic oligonucleotide
  Target: PCSK9; (+) strand; PAM type: YTN; PAM sequence: TTG
aagcattagtaggagttcag

SEQ ID NO: 24713 - DNA, 20 bp, Artificial Sequence
  Description of Artificial Sequence: Synthetic oligonucleotide
  Target: PCSK9; (+) strand; PAM type: YTN; PAM sequence: TTA
gtaggagttcagcgatgatg

SEQ ID NO: 24714 - DNA, 20 bp, Artificial Sequence
  Description of Artificial Sequence: Synthetic oligonucleotide
  Target: PCSK9; (+) strand; PAM type: YTN; PAM sequence: TTC
agcgatgatggtgtcatgag

SEQ ID NO: 24715 - DNA, 20 bp, Artificial Sequence
  Description of Artificial Sequence: Synthetic oligonucleotide
  Target: PCSK9; (+) strand; PAM type: YTN; PAM sequence: TTT
tattctaggattaggaggta

SEQ ID NO: 24716 - DNA, 20 bp, Artificial Sequence
  Description of Artificial Sequence: Synthetic oligonucleotide
  Target: PCSK9; (+) strand; PAM type: YTN; PAM sequence: TTT
attctaggattaggaggtac

SEQ ID NO: 24717 - DNA, 20 bp, Artificial Sequence
  Description of Artificial Sequence: Synthetic oligonucleotide
  Target: PCSK9; (+) strand; PAM type: YTN; PAM sequence: TTA
ttctaggattaggaggtacc

SEQ ID NO: 24718 - DNA, 20 bp, Artificial Sequence
  Description of Artificial Sequence: Synthetic oligonucleotide
  Target: PCSK9; (+) strand; PAM type: YTN; PAM sequence: TTC
taggattaggaggtaccatg

SEQ ID NO: 24719 - DNA, 20 bp, Artificial Sequence
  Description of Artificial Sequence: Synthetic oligonucleotide
  Target: PCSK9; (+) strand; PAM type: YTN; PAM sequence: CTA
ggattaggaggtaccatgaa

SEQ ID NO: 24720 - DNA, 20 bp, Artificial Sequence
  Description of Artificial Sequence: Synthetic oligonucleotide
  Target: PCSK9; (+) strand; PAM type: YTN; PAM sequence: TTA
ggaggtaccatgaacaaaga

SEQ ID NO: 24721 - DNA, 20 bp, Artificial Sequence
  Description of Artificial Sequence: Synthetic oligonucleotide
  Target: PCSK9; (+) strand; PAM type: YTN; PAM sequence: CTG
ggaaaaccagaggtggaaga

SEQ ID NO: 24722 - DNA, 20 bp, Artificial Sequence
  Description of Artificial Sequence: Synthetic oligonucleotide
  Target: PCSK9; (+) strand; PAM type: YTN; PAM sequence: TTC
tttttcttttttttttgaga

SEQ ID NO: 24723 - DNA, 20 bp, Artificial Sequence
  Description of Artificial Sequence: Synthetic oligonucleotide
  Target: PCSK9; (+) strand; PAM type: YTN; PAM sequence: CTT
tttcttttttttttgagatg

SEQ ID NO: 24724 - DNA, 20 bp, Artificial Sequence
  Description of Artificial Sequence: Synthetic oligonucleotide
  Target: PCSK9; (+) strand; PAM type: YTN; PAM sequence: TTT
ttcttttttttttgagatgg

SEQ ID NO: 24725 - DNA, 20 bp, Artificial Sequence
  Description of Artificial Sequence: Synthetic oligonucleotide
  Target: PCSK9; (+) strand; PAM type: YTN; PAM sequence: TTT
tcttttttttttgagatgga

SEQ ID NO: 24726 - DNA, 20 bp, Artificial Sequence
  Description of Artificial Sequence: Synthetic oligonucleotide
  Target: PCSK9; (+) strand; PAM type: YTN; PAM sequence: TTT
cttttttttttgagatggag

SEQ ID NO: 24727 - DNA, 20 bp, Artificial Sequence
  Description of Artificial Sequence: Synthetic oligonucleotide
  Target: PCSK9; (+) strand; PAM type: YTN; PAM sequence: TTC
ttttttttttgagatggagt

SEQ ID NO: 24728 - DNA, 20 bp, Artificial Sequence
  Description of Artificial Sequence: Synthetic oligonucleotide
  Target: PCSK9; (+) strand; PAM type: YTN; PAM sequence: CTT
ttttttttgagatggagttt

SEQ ID NO: 24729 - DNA, 20 bp, Artificial Sequence
  Description of Artificial Sequence: Synthetic oligonucleotide
  Target: PCSK9; (+) strand; PAM type: YTN; PAM sequence: TTT
tttttttgagatggagtttc

SEQ ID NO: 24730 - DNA, 20 bp, Artificial Sequence
  Description of Artificial Sequence: Synthetic oligonucleotide
  Target: PCSK9; (+) strand; PAM type: YTN; PAM sequence: TTT
ttttttgagatggagtttcg

SEQ ID NO: 24731 - DNA, 20 bp, Artificial Sequence
  Description of Artificial Sequence: Synthetic oligonucleotide
  Target: PCSK9; (+) strand; PAM type: YTN; PAM sequence: TTT
tttttgagatggagtttcgc

SEQ ID NO: 24732 - DNA, 20 bp, Artificial Sequence
  Description of Artificial Sequence: Synthetic oligonucleotide
  Target: PCSK9; (+) strand; PAM type: YTN; PAM sequence: TTT
ttttgagatggagtttcgct

SEQ ID NO: 24733 - DNA, 20 bp, Artificial Sequence
  Description of Artificial Sequence: Synthetic oligonucleotide
  Target: PCSK9; (+) strand; PAM type: YTN; PAM sequence: TTT
tttgagatggagtttcgctc

SEQ ID NO: 24734 - DNA, 20 bp, Artificial Sequence
  Description of Artificial Sequence: Synthetic oligonucleotide
  Target: PCSK9; (+) strand; PAM type: YTN; PAM sequence: TTT
ttgagatggagtttcgctct

SEQ ID NO: 24735 - DNA, 20 bp, Artificial Sequence
  Description of Artificial Sequence: Synthetic oligonucleotide
  Target: PCSK9; (+) strand; PAM type: YTN; PAM sequence: TTT
tgagatggagtttcgctctt

SEQ ID NO: 24736 - DNA, 20 bp, Artificial Sequence
  Description of Artificial Sequence: Synthetic oligonucleotide
  Target: PCSK9; (+) strand; PAM type: YTN; PAM sequence: TTT
gagatggagtttcgctcttg

SEQ ID NO: 24737 - DNA, 20 bp, Artificial Sequence
  Description of Artificial Sequence: Synthetic oligonucleotide
  Target: PCSK9; (+) strand; PAM type: YTN; PAM sequence: TTG
agatggagtttcgctcttgt

SEQ ID NO: 24738 - DNA, 20 bp, Artificial Sequence
  Description of Artificial Sequence: Synthetic oligonucleotide
  Target: PCSK9; (+) strand; PAM type: YTN; PAM sequence: TTT
cgctcttgttgcccaggctg

SEQ ID NO: 24739 - DNA, 20 bp, Artificial Sequence
  Description of Artificial Sequence: Synthetic oligonucleotide
  Target: PCSK9; (+) strand; PAM type: YTN; PAM sequence: TTC
gctcttgttgcccaggctgg

SEQ ID NO: 24740 - DNA, 20 bp, Artificial Sequence
  Description of Artificial Sequence: Synthetic oligonucleotide
  Target: PCSK9; (+) strand; PAM type: YTN; PAM sequence: CTC
ttgttgcccaggctggagtg

SEQ ID NO: 24741 - DNA, 20 bp, Artificial Sequence
  Description of Artificial Sequence: Synthetic oligonucleotide
  Target: PCSK9; (+) strand; PAM type: YTN; PAM sequence: CTT
gttgcccaggctggagtgca

SEQ ID NO: 24742 - DNA, 20 bp, Artificial Sequence
  Description of Artificial Sequence: Synthetic oligonucleotide
  Target: PCSK9; (+) strand; PAM type: YTN; PAM sequence: TTG
ttgcccaggctggagtgcaa

SEQ ID NO: 24743 - DNA, 20 bp, Artificial Sequence
  Description of Artificial Sequence: Synthetic oligonucleotide
  Target: PCSK9; (+) strand; PAM type: YTN; PAM sequence: TTG
cccaggctggagtgcaatgg

SEQ ID NO: 24744 - DNA, 20 bp, Artificial Sequence
  Description of Artificial Sequence: Synthetic oligonucleotide
  Target: PCSK9; (+) strand; PAM type: YTN; PAM sequence: CTG
gagtgcaatggtgcagtctc

SEQ ID NO: 24745 - DNA, 20 bp, Artificial Sequence
  Description of Artificial Sequence: Synthetic oligonucleotide
  Target: PCSK9; (+) strand; PAM type: YTN; PAM sequence: CTC
agctcactgcaacatctgtc

SEQ ID NO: 24746 - DNA, 20 bp, Artificial Sequence
  Description of Artificial Sequence: Synthetic oligonucleotide
  Target: PCSK9; (+) strand; PAM type: YTN; PAM sequence: CTC
actgcaacatctgtctcccg

SEQ ID NO: 24747 - DNA, 20 bp, Artificial Sequence
  Description of Artificial Sequence: Synthetic oligonucleotide
  Target: PCSK9; (+) strand; PAM type: YTN; PAM sequence: CTG
caacatctgtctcccgggtt

SEQ ID NO: 24748 - DNA, 20 bp, Artificial Sequence
  Description of Artificial Sequence: Synthetic oligonucleotide
  Target: PCSK9; (+) strand; PAM type: YTN; PAM sequence: CTG
tctcccgggttcaagtggtt

SEQ ID NO: 24749 - DNA, 20 bp, Artificial Sequence
  Description of Artificial Sequence: Synthetic oligonucleotide
  Target: PCSK9; (+) strand; PAM type: YTN; PAM sequence: CTC
ccgggttcaagtggttctcc

SEQ ID NO: 24750 - DNA, 20 bp, Artificial Sequence
  Description of Artificial Sequence: Synthetic oligonucleotide
  Target: PCSK9; (+) strand; PAM type: YTN; PAM sequence: TTC
aagtggttctcctgcctcag

SEQ ID NO: 24751 - DNA, 20 bp, Artificial Sequence
  Description of Artificial Sequence: Synthetic oligonucleotide
  Target: PCSK9; (+) strand; PAM type: YTN; PAM sequence: TTC
tcctgcctcagcctcccaag

SEQ ID NO: 24752 - DNA, 20 bp, Artificial Sequence
  Description of Artificial Sequence: Synthetic oligonucleotide
  Target: PCSK9; (+) strand; PAM type: YTN; PAM sequence: CTC
ctgcctcagcctcccaagaa

SEQ ID NO: 24753 - DNA, 20 bp, Artificial Sequence
  Description of Artificial Sequence: Synthetic oligonucleotide
  Target: PCSK9; (+) strand; PAM type: YTN; PAM sequence: CTG
cctcagcctcccaagaagct

SEQ ID NO: 24754 - DNA, 20 bp, Artificial Sequence
  Description of Artificial Sequence: Synthetic oligonucleotide
  Target: PCSK9; (+) strand; PAM type: YTN; PAM sequence: CTC
agcctcccaagaagctggga

SEQ ID NO: 24755 - DNA, 20 bp, Artificial Sequence
  Description of Artificial Sequence: Synthetic oligonucleotide
  Target: PCSK9; (+) strand; PAM type: YTN; PAM sequence: CTC
ccaagaagctgggattacag

SEQ ID NO: 24756 - DNA, 20 bp, Artificial Sequence
  Description of Artificial Sequence: Synthetic oligonucleotide
  Target: PCSK9; (+) strand; PAM type: YTN; PAM sequence: CTG
ggattacaggtacctgccac

SEQ ID NO: 24757 - DNA, 20 bp, Artificial Sequence
  Description of Artificial Sequence: Synthetic oligonucleotide
  Target: PCSK9; (+) strand; PAM type: YTN; PAM sequence: TTA
caggtacctgccaccacgcc

SEQ ID NO: 24758 - DNA, 20 bp, Artificial Sequence
  Description of Artificial Sequence: Synthetic oligonucleotide
  Target: PCSK9; (+) strand; PAM type: YTN; PAM sequence: CTG
ccaccacgcccggctaattt

SEQ ID NO: 24759 - DNA, 20 bp, Artificial Sequence
  Description of Artificial Sequence: Synthetic oligonucleotide
  Target: PCSK9; (+) strand; PAM type: YTN; PAM sequence: CTA
atttttgtatttttagtaga

SEQ ID NO: 24760 - DNA, 20 bp, Artificial Sequence
  Description of Artificial Sequence: Synthetic oligonucleotide
  Target: PCSK9; (+) strand; PAM type: YTN; PAM sequence: TTT
ttgtatttttagtagagaag

SEQ ID NO: 24761 - DNA, 20 bp, Artificial Sequence
  Description of Artificial Sequence: Synthetic oligonucleotide
  Target: PCSK9; (+) strand; PAM type: YTN; PAM sequence: TTT
tgtatttttagtagagaagg

SEQ ID NO: 24762 - DNA, 20 bp, Artificial Sequence
  Description of Artificial Sequence: Synthetic oligonucleotide
  Target: PCSK9; (+) strand; PAM type: YTN; PAM sequence: TTT
gtatttttagtagagaaggg

SEQ ID NO: 24763 - DNA, 20 bp, Artificial Sequence
  Description of Artificial Sequence: Synthetic oligonucleotide
  Target: PCSK9; (+) strand; PAM type: YTN; PAM sequence: TTG
tatttttagtagagaagggg

SEQ ID NO: 24764 - DNA, 20 bp, Artificial Sequence
  Description of Artificial Sequence: Synthetic oligonucleotide
  Target: PCSK9; (+) strand; PAM type: YTN; PAM sequence: TTT
ttagtagagaaggggtttca

SEQ ID NO: 24765 - DNA, 20 bp, Artificial Sequence
  Description of Artificial Sequence: Synthetic oligonucleotide
  Target: PCSK9; (+) strand; PAM type: YTN; PAM sequence: TTT
tagtagagaaggggtttcac

SEQ ID NO: 24766 - DNA, 20 bp, Artificial Sequence
  Description of Artificial Sequence: Synthetic oligonucleotide
  Target: PCSK9; (+) strand; PAM type: YTN; PAM sequence: TTT
agtagagaaggggtttcacc

SEQ ID NO: 24767 - DNA, 20 bp, Artificial Sequence
  Description of Artificial Sequence: Synthetic oligonucleotide
  Target: PCSK9; (+) strand; PAM type: YTN; PAM sequence: TTA
gtagagaaggggtttcacca

SEQ ID NO: 24768 - DNA, 20 bp, Artificial Sequence
  Description of Artificial Sequence: Synthetic oligonucleotide
  Target: PCSK9; (+) strand; PAM type: YTN; PAM sequence: TTT
caccacgttggccaggctag

SEQ ID NO: 24769 - DNA, 20 bp, Artificial Sequence
  Description of Artificial Sequence: Synthetic oligonucleotide
  Target: PCSK9; (+) strand; PAM type: YTN; PAM sequence: TTC
accacgttggccaggctagt

SEQ ID NO: 24770 - DNA, 20 bp, Artificial Sequence
  Description of Artificial Sequence: Synthetic oligonucleotide
  Target: PCSK9; (+) strand; PAM type: YTN; PAM sequence: TTG
gccaggctagtcgcaaactc

SEQ ID NO: 24771 - DNA, 20 bp, Artificial Sequence
  Description of Artificial Sequence: Synthetic oligonucleotide
  Target: PCSK9; (+) strand; PAM type: YTN; PAM sequence: CTA
gtcgcaaactcctgacctcc

SEQ ID NO: 24772 - DNA, 20 bp, Artificial Sequence
  Description of Artificial Sequence: Synthetic oligonucleotide
  Target: PCSK9; (+) strand; PAM type: YTN; PAM sequence: CTC
ctgacctcctcagtggatcc

SEQ ID NO: 24773 - DNA, 20 bp, Artificial Sequence
  Description of Artificial Sequence: Synthetic oligonucleotide
  Target: PCSK9; (+) strand; PAM type: YTN; PAM sequence: CTG
acctcctcagtggatccgag

SEQ ID NO: 24774 - DNA, 20 bp, Artificial Sequence
  Description of Artificial Sequence: Synthetic oligonucleotide
  Target: PCSK9; (+) strand; PAM type: YTN; PAM sequence: CTC
ctcagtggatccgaggaggt

SEQ ID NO: 24775 - DNA, 20 bp, Artificial Sequence
  Description of Artificial Sequence: Synthetic oligonucleotide
  Target: PCSK9; (+) strand; PAM type: YTN; PAM sequence: CTC
agtggatccgaggaggtgat

SEQ ID NO: 24776 - DNA, 20 bp, Artificial Sequence
  Description of Artificial Sequence: Synthetic oligonucleotide
  Target: PCSK9; (+) strand; PAM type: YTN; PAM sequence: CTC
ccgcctcagcctcccaaagt

SEQ ID NO: 24777 - DNA, 20 bp, Artificial Sequence
  Description of Artificial Sequence: Synthetic oligonucleotide
  Target: PCSK9; (+) strand; PAM type: YTN; PAM sequence: CTC
agcctcccaaagtgctcgaa

SEQ ID NO: 24778 - DNA, 20 bp, Artificial Sequence
  Description of Artificial Sequence: Synthetic oligonucleotide
  Target: PCSK9; (+) strand; PAM type: YTN; PAM sequence: CTC
ccaaagtgctcgaattacag

SEQ ID NO: 24779 - DNA, 20 bp, Artificial Sequence
  Description of Artificial Sequence: Synthetic oligonucleotide
  Target: PCSK9; (+) strand; PAM type: YTN; PAM sequence: CTC
gaattacaggtgtgagccac

SEQ ID NO: 24780 - DNA, 20 bp, Artificial Sequence
  Description of Artificial Sequence: Synthetic oligonucleotide
  Target: PCSK9; (+) strand; PAM type: YTN; PAM sequence: TTA
caggtgtgagccaccacgcc

SEQ ID NO: 24781 - DNA, 20 bp, Artificial Sequence
  Description of Artificial Sequence: Synthetic oligonucleotide
  Target: PCSK9; (+) strand; PAM type: YTN; PAM sequence: CTG
gcctccacagttctttatcc

SEQ ID NO: 24782 - DNA, 20 bp, Artificial Sequence
  Description of Artificial Sequence: Synthetic oligonucleotide
  Target: PCSK9; (+) strand; PAM type: YTN; PAM sequence: CTC
cacagttctttatccaccgt

SEQ ID NO: 24783 - DNA, 20 bp, Artificial Sequence
  Description of Artificial Sequence: Synthetic oligonucleotide
  Target: PCSK9; (+) strand; PAM type: YTN; PAM sequence: TTC
tttatccaccgtctgaaatg

SEQ ID NO: 24784 - DNA, 20 bp, Artificial Sequence
  Description of Artificial Sequence: Synthetic oligonucleotide
  Target: PCSK9; (+) strand; PAM type: YTN; PAM sequence: CTT
tatccaccgtctgaaatgta

SEQ ID NO: 24785 - DNA, 20 bp, Artificial Sequence
  Description of Artificial Sequence: Synthetic oligonucleotide
  Target: PCSK9; (+) strand; PAM type: YTN; PAM sequence: TTT
atccaccgtctgaaatgtaa

SEQ ID NO: 24786 - DNA, 20 bp, Artificial Sequence
  Description of Artificial Sequence: Synthetic oligonucleotide
  Target: PCSK9; (+) strand; PAM type: YTN; PAM sequence: TTA
tccaccgtctgaaatgtaaa

SEQ ID NO: 24787 - DNA, 20 bp, Artificial Sequence
  Description of Artificial Sequence: Synthetic oligonucleotide
  Target: PCSK9; (+) strand; PAM type: YTN; PAM sequence: CTG
aaatgtaaaatgttacgaaa

SEQ ID NO: 24788 - DNA, 20 bp, Artificial Sequence
  Description of Artificial Sequence: Synthetic oligonucleotide
  Target: PCSK9; (+) strand; PAM type: YTN; PAM sequence: TTA
cgaaaaccaaaagttttttt

SEQ ID NO: 24789 - DNA, 20 bp, Artificial Sequence
  Description of Artificial Sequence: Synthetic oligonucleotide
  Target: PCSK9; (+) strand; PAM type: YTN; PAM sequence: TTT
tttttgtgatttatttgatg

SEQ ID NO: 24790 - DNA, 20 bp, Artificial Sequence
  Description of Artificial Sequence: Synthetic oligonucleotide
  Target: PCSK9; (+) strand; PAM type: YTN; PAM sequence: TTT
ttttgtgatttatttgatgg

SEQ ID NO: 24791 - DNA, 20 bp, Artificial Sequence
  Description of Artificial Sequence: Synthetic oligonucleotide
  Target: PCSK9; (+) strand; PAM type: YTN; PAM sequence: TTT
tttgtgatttatttgatggt

SEQ ID NO: 24792 - DNA, 20 bp, Artificial Sequence
  Description of Artificial Sequence: Synthetic oligonucleotide
  Target: PCSK9; (+) strand; PAM type: YTN; PAM sequence: TTT
ttgtgatttatttgatggta

SEQ ID NO: 24793 - DNA, 20 bp, Artificial Sequence
  Description of Artificial Sequence: Synthetic oligonucleotide
  Target: PCSK9; (+) strand; PAM type: YTN; PAM sequence: TTT
tgtgatttatttgatggtag

SEQ ID NO: 24794 - DNA, 20 bp, Artificial Sequence
  Description of Artificial Sequence: Synthetic oligonucleotide
  Target: PCSK9; (+) strand; PAM type: YTN; PAM sequence: TTT
gtgatttatttgatggtagc

SEQ ID NO: 24795 - DNA, 20 bp, Artificial Sequence
  Description of Artificial Sequence: Synthetic oligonucleotide
  Target: PCSK9; (+) strand; PAM type: YTN; PAM sequence: TTG
tgatttatttgatggtagca

SEQ ID NO: 24796 - DNA, 20 bp, Artificial Sequence
  Description of Artificial Sequence: Synthetic oligonucleotide
  Target: PCSK9; (+) strand; PAM type: YTN; PAM sequence: TTT
atttgatggtagcacctgac

SEQ ID NO: 24797 - DNA, 20 bp, Artificial Sequence
  Description of Artificial Sequence: Synthetic oligonucleotide
  Target: PCSK9; (+) strand; PAM type: YTN; PAM sequence: TTA
tttgatggtagcacctgacg

SEQ ID NO: 24798 - DNA, 20 bp, Artificial Sequence
  Description of Artificial Sequence: Synthetic oligonucleotide
  Target: PCSK9; (+) strand; PAM type: YTN; PAM sequence: TTT
gatggtagcacctgacgtga

SEQ ID NO: 24799 - DNA, 20 bp, Artificial Sequence
  Description of Artificial Sequence: Synthetic oligonucleotide
  Target: PCSK9; (+) strand; PAM type: YTN; PAM sequence: TTG
atggtagcacctgacgtgaa

SEQ ID NO: 24800 - DNA, 20 bp, Artificial Sequence
  Description of Artificial Sequence: Synthetic oligonucleotide
  Target: PCSK9; (+) strand; PAM type: YTN; PAM sequence: CTG
acgtgaactgacatgagatt

SEQ ID NO: 24801 - DNA, 20 bp, Artificial Sequence
  Description of Artificial Sequence: Synthetic oligonucleotide
  Target: PCSK9; (+) strand; PAM type: YTN; PAM sequence: CTG
acatgagattatttttaatt

SEQ ID NO: 24802 - DNA, 20 bp, Artificial Sequence
  Description of Artificial Sequence: Synthetic oligonucleotide
  Target: PCSK9; (+) strand; PAM type: YTN; PAM sequence: TTA
tttttaatttagttgtgtga

SEQ ID NO: 24803 - DNA, 20 bp, Artificial Sequence
  Description of Artificial Sequence: Synthetic oligonucleotide
  Target: PCSK9; (+) strand; PAM type: YTN; PAM sequence: TTT
ttaatttagttgtgtgaata

SEQ ID NO: 24804 - DNA, 20 bp, Artificial Sequence
  Description of Artificial Sequence: Synthetic oligonucleotide
  Target: PCSK9; (+) strand; PAM type: YTN; PAM sequence: TTT
taatttagttgtgtgaatat

SEQ ID NO: 24805 - DNA, 20 bp, Artificial Sequence
  Description of Artificial Sequence: Synthetic oligonucleotide
  Target: PCSK9; (+) strand; PAM type: YTN; PAM sequence: TTT
aatttagttgtgtgaatatg

SEQ ID NO: 24806 - DNA, 20 bp, Artificial Sequence
  Description of Artificial Sequence: Synthetic oligonucleotide
  Target: PCSK9; (+) strand; PAM type: YTN; PAM sequence: TTA
atttagttgtgtgaatatgc

SEQ ID NO: 24807 - DNA, 20 bp, Artificial Sequence
  Description of Artificial Sequence: Synthetic oligonucleotide
  Target: PCSK9; (+) strand; PAM type: YTN; PAM sequence: TTT
agttgtgtgaatatgcatat

SEQ ID NO: 24808 - DNA, 20 bp, Artificial Sequence
  Description of Artificial Sequence: Synthetic oligonucleotide
  Target: PCSK9; (+) strand; PAM type: YTN; PAM sequence: TTA
gttgtgtgaatatgcatatt

SEQ ID NO: 24809 - DNA, 20 bp, Artificial Sequence
  Description of Artificial Sequence: Synthetic oligonucleotide
  Target: PCSK9; (+) strand; PAM type: YTN; PAM sequence: TTG
tgtgaatatgcatattcata

SEQ ID NO: 24810 - DNA, 20 bp, Artificial Sequence
  Description of Artificial Sequence: Synthetic oligonucleotide
  Target: PCSK9; (+) strand; PAM type: YTN; PAM sequence: TTC
atatattttgctgcatagat

SEQ ID NO: 24811 - DNA, 20 bp, Artificial Sequence
  Description of Artificial Sequence: Synthetic oligonucleotide
  Target: PCSK9; (+) strand; PAM type: YTN; PAM sequence: TTT
tgctgcatagattacagtat

SEQ ID NO: 24812 - DNA, 20 bp, Artificial Sequence
  Description of Artificial Sequence: Synthetic oligonucleotide
  Target: PCSK9; (+) strand; PAM type: YTN; PAM sequence: TTT
gctgcatagattacagtatg

SEQ ID NO: 24813 - DNA, 20 bp, Artificial Sequence
  Description of Artificial Sequence: Synthetic oligonucleotide
  Target: PCSK9; (+) strand; PAM type: YTN; PAM sequence: TTG
ctgcatagattacagtatgc

SEQ ID NO: 24814 - DNA, 20 bp, Artificial Sequence
  Description of Artificial Sequence: Synthetic oligonucleotide
  Target: PCSK9; (+) strand; PAM type: YTN; PAM sequence: CTG
catagattacagtatgcagc

SEQ ID NO: 24815 - DNA, 20 bp, Artificial Sequence
  Description of Artificial Sequence: Synthetic oligonucleotide
  Target: PCSK9; (+) strand; PAM type: YTN; PAM sequence: TTA
cagtatgcagctccagattc

SEQ ID NO: 24816 - DNA, 20 bp, Artificial Sequence
  Description of Artificial Sequence: Synthetic oligonucleotide
  Target: PCSK9; (+) strand; PAM type: YTN; PAM sequence: CTC
cagattcttccaagcagact

SEQ ID NO: 24817 - DNA, 20 bp, Artificial Sequence
  Description of Artificial Sequence: Synthetic oligonucleotide
  Target: PCSK9; (+) strand; PAM type: YTN; PAM sequence: TTC
ttccaagcagactctgattg

SEQ ID NO: 24818 - DNA, 20 bp, Artificial Sequence
  Description of Artificial Sequence: Synthetic oligonucleotide
  Target: PCSK9; (+) strand; PAM type: YTN; PAM sequence: CTT
ccaagcagactctgattgcc

SEQ ID NO: 24819 - DNA, 20 bp, Artificial Sequence
  Description of Artificial Sequence: Synthetic oligonucleotide
  Target: PCSK9; (+) strand; PAM type: YTN; PAM sequence: TTC
caagcagactctgattgccc

SEQ ID NO: 24820 - DNA, 20 bp, Artificial Sequence
  Description of Artificial Sequence: Synthetic oligonucleotide
  Target: PCSK9; (+) strand; PAM type: YTN; PAM sequence: CTC
tgattgcccattactgcctt

SEQ ID NO: 24821 - DNA, 20 bp, Artificial Sequence
  Description of Artificial Sequence: Synthetic oligonucleotide
  Target: PCSK9; (+) strand; PAM type: YTN; PAM sequence: CTG
attgcccattactgcctttc

SEQ ID NO: 24822 - DNA, 20 bp, Artificial Sequence
  Description of Artificial Sequence: Synthetic oligonucleotide
  Target: PCSK9; (+) strand; PAM type: YTN; PAM sequence: TTG
cccattactgcctttctaaa

SEQ ID NO: 24823 - DNA, 20 bp, Artificial Sequence
  Description of Artificial Sequence: Synthetic oligonucleotide
  Target: PCSK9; (+) strand; PAM type: YTN; PAM sequence: TTA
ctgcctttctaaaatccaaa

SEQ ID NO: 24824 - DNA, 20 bp, Artificial Sequence
  Description of Artificial Sequence: Synthetic oligonucleotide
  Target: PCSK9; (+) strand; PAM type: YTN; PAM sequence: CTG
cctttctaaaatccaaacaa

SEQ ID NO: 24825 - DNA, 20 bp, Artificial Sequence
  Description of Artificial Sequence: Synthetic oligonucleotide
  Target: PCSK9; (+) strand; PAM type: YTN; PAM sequence: CTT
tctaaaatccaaacaagttc

SEQ ID NO: 24826 - DNA, 20 bp, Artificial Sequence
  Description of Artificial Sequence: Synthetic oligonucleotide
  Target: PCSK9; (+) strand; PAM type: YTN; PAM sequence: TTT
ctaaaatccaaacaagttct

SEQ ID NO: 24827 - DNA, 20 bp, Artificial Sequence
  Description of Artificial Sequence: Synthetic oligonucleotide
  Target: PCSK9; (+) strand; PAM type: YTN; PAM sequence: TTC
taaaatccaaacaagttctg

SEQ ID NO: 24828 - DNA, 20 bp, Artificial Sequence
  Description of Artificial Sequence: Synthetic oligonucleotide
  Target: PCSK9; (+) strand; PAM type: YTN; PAM sequence: CTA
aaatccaaacaagttctgag

SEQ ID NO: 24829 - DNA, 20 bp, Artificial Sequence
  Description of Artificial Sequence: Synthetic oligonucleotide
  Target: PCSK9; (+) strand; PAM type: YTN; PAM sequence: TTC
tgaggttcaaaaccgttttg

SEQ ID NO: 24830 - DNA, 20 bp, Artificial Sequence
  Description of Artificial Sequence: Synthetic oligonucleotide
  Target: PCSK9; (+) strand; PAM type: YTN; PAM sequence: CTG
aggttcaaaaccgttttggc

SEQ ID NO: 24831 - DNA, 20 bp, Artificial Sequence
  Description of Artificial Sequence: Synthetic oligonucleotide
  Target: PCSK9; (+) strand; PAM type: YTN; PAM sequence: TTC
aaaaccgttttggccctaag

SEQ ID NO: 24832 - DNA, 20 bp, Artificial Sequence
  Description of Artificial Sequence: Synthetic oligonucleotide
  Target: PCSK9; (+) strand; PAM type: YTN; PAM sequence: TTT
tggccctaaggctttgggta

SEQ ID NO: 24833 - DNA, 20 bp, Artificial Sequence
  Description of Artificial Sequence: Synthetic oligonucleotide
  Target: PCSK9; (+) strand; PAM type: YTN; PAM sequence: TTT
ggccctaaggctttgggtaa

SEQ ID NO: 24834 - DNA, 20 bp, Artificial Sequence
  Description of Artificial Sequence: Synthetic oligonucleotide
  Target: PCSK9; (+) strand; PAM type: YTN; PAM sequence: TTG
gccctaaggctttgggtaaa

SEQ ID NO: 24835 - DNA, 20 bp, Artificial Sequence
  Description of Artificial Sequence: Synthetic oligonucleotide
  Target: PCSK9; (+) strand; PAM type: YTN; PAM sequence: CTA
aggctttgggtaaagggggt

SEQ ID NO: 24836 - DNA, 20 bp, Artificial Sequence
  Description of Artificial Sequence: Synthetic oligonucleotide
  Target: PCSK9; (+) strand; PAM type: YTN; PAM sequence: CTT
tgggtaaagggggtggactc

SEQ ID NO: 24837 - DNA, 20 bp, Artificial Sequence
  Description of Artificial Sequence: Synthetic oligonucleotide
  Target: PCSK9; (+) strand; PAM type: YTN; PAM sequence: TTT
gggtaaagggggtggactct

SEQ ID NO: 24838 - DNA, 20 bp, Artificial Sequence
  Description of Artificial Sequence: Synthetic oligonucleotide
  Target: PCSK9; (+) strand; PAM type: YTN; PAM sequence: TTG
ggtaaagggggtggactctg

SEQ ID NO: 24839 - DNA, 20 bp, Artificial Sequence
  Description of Artificial Sequence: Synthetic oligonucleotide
  Target: PCSK9; (+) strand; PAM type: YTN; PAM sequence: CTC
tgttctactctgactggagt

SEQ ID NO: 24840 - DNA, 20 bp, Artificial Sequence
  Description of Artificial Sequence: Synthetic oligonucleotide
  Target: PCSK9; (+) strand; PAM type: YTN; PAM sequence: CTG
ttctactctgactggagtcc

SEQ ID NO: 24841 - DNA, 20 bp, Artificial Sequence
  Description of Artificial Sequence: Synthetic oligonucleotide
  Target: PCSK9; (+) strand; PAM type: YTN; PAM sequence: TTC
tactctgactggagtccaag

SEQ ID NO: 24842 - DNA, 20 bp, Artificial Sequence
  Description of Artificial Sequence: Synthetic oligonucleotide
  Target: PCSK9; (+) strand; PAM type: YTN; PAM sequence: CTA
ctctgactggagtccaagat

SEQ ID NO: 24843 - DNA, 20 bp, Artificial Sequence
  Description of Artificial Sequence: Synthetic oligonucleotide
  Target: PCSK9; (+) strand; PAM type: YTN; PAM sequence: CTC
tgactggagtccaagatgca

SEQ ID NO: 24844 - DNA, 20 bp, Artificial Sequence
  Description of Artificial Sequence: Synthetic oligonucleotide
  Target: PCSK9; (+) strand; PAM type: YTN; PAM sequence: CTG
actggagtccaagatgcata

SEQ ID NO: 24845 - DNA, 20 bp, Artificial Sequence
  Description of Artificial Sequence: Synthetic oligonucleotide
  Target: PCSK9; (+) strand; PAM type: YTN; PAM sequence: CTG
gagtccaagatgcatatata

SEQ ID NO: 24846 - DNA, 20 bp, Artificial Sequence
  Description of Artificial Sequence: Synthetic oligonucleotide
  Target: PCSK9; (+) strand; PAM type: YTN; PAM sequence: CTG
caaggtaggttgaggtaggg

SEQ ID NO: 24847 - DNA, 20 bp, Artificial Sequence
  Description of Artificial Sequence: Synthetic oligonucleotide
  Target: PCSK9; (+) strand; PAM type: YTN; PAM sequence: TTG
aggtaggggccaaggaggag

SEQ ID NO: 24848 - DNA, 20 bp, Artificial Sequence
  Description of Artificial Sequence: Synthetic oligonucleotide
  Target: PCSK9; (+) strand; PAM type: YTN; PAM sequence: TTT
ggacttgattcatgaggctg

SEQ ID NO: 24849 - DNA, 20 bp, Artificial Sequence
  Description of Artificial Sequence: Synthetic oligonucleotide
  Target: PCSK9; (+) strand; PAM type: YTN; PAM sequence: TTG
gacttgattcatgaggctgt

SEQ ID NO: 24850 - DNA, 20 bp, Artificial Sequence
  Description of Artificial Sequence: Synthetic oligonucleotide
  Target: PCSK9; (+) strand; PAM type: YTN; PAM sequence: CTT
gattcatgaggctgtgggga

SEQ ID NO: 24851 - DNA, 20 bp, Artificial Sequence
  Description of Artificial Sequence: Synthetic oligonucleotide
  Target: PCSK9; (+) strand; PAM type: YTN; PAM sequence: TTG
attcatgaggctgtggggag

SEQ ID NO: 24852 - DNA, 20 bp, Artificial Sequence
  Description of Artificial Sequence: Synthetic oligonucleotide
  Target: PCSK9; (+) strand; PAM type: YTN; PAM sequence: TTC
atgaggctgtggggagccag

SEQ ID NO: 24853 - DNA, 20 bp, Artificial Sequence
  Description of Artificial Sequence: Synthetic oligonucleotide
  Target: PCSK9; (+) strand; PAM type: YTN; PAM sequence: CTG
tggggagccagtgaaggttc

SEQ ID NO: 24854 - DNA, 20 bp, Artificial Sequence
  Description of Artificial Sequence: Synthetic oligonucleotide
  Target: PCSK9; (+) strand; PAM type: YTN; PAM sequence: TTC
ttaagcaggtatgtctgcct

SEQ ID NO: 24855 - DNA, 20 bp, Artificial Sequence
  Description of Artificial Sequence: Synthetic oligonucleotide
  Target: PCSK9; (+) strand; PAM type: YTN; PAM sequence: CTT
aagcaggtatgtctgcctga

SEQ ID NO: 24856 - DNA, 20 bp, Artificial Sequence
  Description of Artificial Sequence: Synthetic oligonucleotide
  Target: PCSK9; (+) strand; PAM type: YTN; PAM sequence: TTA
agcaggtatgtctgcctgag

SEQ ID NO: 24857 - DNA, 20 bp, Artificial Sequence
  Description of Artificial Sequence: Synthetic oligonucleotide
  Target: PCSK9; (+) strand; PAM type: YTN; PAM sequence: CTG
cctgagagcagttggagcag

SEQ ID NO: 24858 - DNA, 20 bp, Artificial Sequence
  Description of Artificial Sequence: Synthetic oligonucleotide
  Target: PCSK9; (+) strand; PAM type: YTN; PAM sequence: CTG
agagcagttggagcagacaa

SEQ ID NO: 24859 - DNA, 20 bp, Artificial Sequence
  Description of Artificial Sequence: Synthetic oligonucleotide
  Target: PCSK9; (+) strand; PAM type: YTN; PAM sequence: TTG
gagcagacaagagctaaaaa

SEQ ID NO: 24860 - DNA, 20 bp, Artificial Sequence
  Description of Artificial Sequence: Synthetic oligonucleotide
  Target: PCSK9; (+) strand; PAM type: YTN; PAM sequence: CTA
aaaaccaaacaaatcaccat

SEQ ID NO: 24861 - DNA, 20 bp, Artificial Sequence
  Description of Artificial Sequence: Synthetic oligonucleotide
  Target: PCSK9; (+) strand; PAM type: YTN; PAM sequence: CTG
ctataatttgtttgtcccct

SEQ ID NO: 24862 - DNA, 20 bp, Artificial Sequence
  Description of Artificial Sequence: Synthetic oligonucleotide
  Target: PCSK9; (+) strand; PAM type: YTN; PAM sequence: CTA
taatttgtttgtcccctcca

SEQ ID NO: 24863 - DNA, 20 bp, Artificial Sequence
  Description of Artificial Sequence: Synthetic oligonucleotide
  Target: PCSK9; (+) strand; PAM type: YTN; PAM sequence: TTT
gtttgtcccctccaaatctc

SEQ ID NO: 24864 - DNA, 20 bp, Artificial Sequence
  Description of Artificial Sequence: Synthetic oligonucleotide
  Target: PCSK9; (+) strand; PAM type: YTN; PAM sequence: TTG
tttgtcccctccaaatctca

SEQ ID NO: 24865 - DNA, 20 bp, Artificial Sequence
  Description of Artificial Sequence: Synthetic oligonucleotide
  Target: PCSK9; (+) strand; PAM type: YTN; PAM sequence: TTT
gtcccctccaaatctcatgt

SEQ ID NO: 24866 - DNA, 20 bp, Artificial Sequence
  Description of Artificial Sequence: Synthetic oligonucleotide
  Target: PCSK9; (+) strand; PAM type: YTN; PAM sequence: TTG
tcccctccaaatctcatgtg

SEQ ID NO: 24867 - DNA, 20 bp, Artificial Sequence
  Description of Artificial Sequence: Synthetic oligonucleotide
  Target: PCSK9; (+) strand; PAM type: YTN; PAM sequence: CTC
caaatctcatgtggaaattt

SEQ ID NO: 24868 - DNA, 20 bp, Artificial Sequence
  Description of Artificial Sequence: Synthetic oligonucleotide
  Target: PCSK9; (+) strand; PAM type: YTN; PAM sequence: CTC
atgtggaaatttggtcctca

SEQ ID NO: 24869 - DNA, 20 bp, Artificial Sequence
  Description of Artificial Sequence: Synthetic oligonucleotide
  Target: PCSK9; (+) strand; PAM type: YTN; PAM sequence: TTT
ggtcctcagtgttggaagtg

SEQ ID NO: 24870 - DNA, 20 bp, Artificial Sequence
  Description of Artificial Sequence: Synthetic oligonucleotide
  Target: PCSK9; (+) strand; PAM type: YTN; PAM sequence: TTG
gtcctcagtgttggaagtgg

SEQ ID NO: 24871 - DNA, 20 bp, Artificial Sequence
  Description of Artificial Sequence: Synthetic oligonucleotide
  Target: PCSK9; (+) strand; PAM type: YTN; PAM sequence: CTC
agtgttggaagtggggccta

SEQ ID NO: 24872 - DNA, 20 bp, Artificial Sequence
  Description of Artificial Sequence: Synthetic oligonucleotide
  Target: PCSK9; (+) strand; PAM type: YTN; PAM sequence: TTG
gaagtggggcctaatgggag

SEQ ID NO: 24873 - DNA, 20 bp, Artificial Sequence
  Description of Artificial Sequence: Synthetic oligonucleotide
  Target: PCSK9; (+) strand; PAM type: YTN; PAM sequence: CTA
atgggaggtgtttgggtcat

SEQ ID NO: 24874 - DNA, 20 bp, Artificial Sequence
  Description of Artificial Sequence: Synthetic oligonucleotide
  Target: PCSK9; (+) strand; PAM type: YTN; PAM sequence: TTT
gggtcatgggggaggaaccc

SEQ ID NO: 24875 - DNA, 20 bp, Artificial Sequence
  Description of Artificial Sequence: Synthetic oligonucleotide
  Target: PCSK9; (+) strand; PAM type: YTN; PAM sequence: TTG
ggtcatgggggaggaacccc

SEQ ID NO: 24876 - DNA, 20 bp, Artificial Sequence
  Description of Artificial Sequence: Synthetic oligonucleotide
  Target: PCSK9; (+) strand; PAM type: YTN; PAM sequence: CTG
tgaaaggcttggtgccgtcc

SEQ ID NO: 24877 - DNA, 20 bp, Artificial Sequence
  Description of Artificial Sequence: Synthetic oligonucleotide
  Target: PCSK9; (+) strand; PAM type: YTN; PAM sequence: CTT
ggtgccgtccttgtgataat

SEQ ID NO: 24878 - DNA, 20 bp, Artificial Sequence
  Description of Artificial Sequence: Synthetic oligonucleotide
  Target: PCSK9; (+) strand; PAM type: YTN; PAM sequence: TTG
gtgccgtccttgtgataatg

SEQ ID NO: 24879 - DNA, 20 bp, Artificial Sequence
  Description of Artificial Sequence: Synthetic oligonucleotide
  Target: PCSK9; (+) strand; PAM type: YTN; PAM sequence: CTT
gtgataatgagtaagttctc

SEQ ID NO: 24880 - DNA, 20 bp, Artificial Sequence
  Description of Artificial Sequence: Synthetic oligonucleotide
  Target: PCSK9; (+) strand; PAM type: YTN; PAM sequence: TTG
tgataatgagtaagttctcc

SEQ ID NO: 24881 - DNA, 20 bp, Artificial Sequence
  Description of Artificial Sequence: Synthetic oligonucleotide
  Target: PCSK9; (+) strand; PAM type: YTN; PAM sequence: TTC
tcccgctatgatttcccttg

SEQ ID NO: 24882 - DNA, 20 bp, Artificial Sequence
  Description of Artificial Sequence: Synthetic oligonucleotide
  Target: PCSK9; (+) strand; PAM type: YTN; PAM sequence: CTC
ccgctatgatttcccttgaa

SEQ ID NO: 24883 - DNA, 20 bp, Artificial Sequence
  Description of Artificial Sequence: Synthetic oligonucleotide
  Target: PCSK9; (+) strand; PAM type: YTN; PAM sequence: CTA
tgatttcccttgaaggctga

SEQ ID NO: 24884 - DNA, 20 bp, Artificial Sequence
  Description of Artificial Sequence: Synthetic oligonucleotide
  Target: PCSK9; (+) strand; PAM type: YTN; PAM sequence: TTT
cccttgaaggctgattatta

SEQ ID NO: 24885 - DNA, 20 bp, Artificial Sequence
  Description of Artificial Sequence: Synthetic oligonucleotide
  Target: PCSK9; (+) strand; PAM type: YTN; PAM sequence: TTC
ccttgaaggctgattattaa

SEQ ID NO: 24886 - DNA, 20 bp, Artificial Sequence
  Description of Artificial Sequence: Synthetic oligonucleotide
  Target: PCSK9; (+) strand; PAM type: YTN; PAM sequence: CTT
gaaggctgattattaaaaag

SEQ ID NO: 24887 - DNA, 20 bp, Artificial Sequence
  Description of Artificial Sequence: Synthetic oligonucleotide
  Target: PCSK9; (+) strand; PAM type: YTN; PAM sequence: TTG
aaggctgattattaaaaaga

SEQ ID NO: 24888 - DNA, 20 bp, Artificial Sequence
  Description of Artificial Sequence: Synthetic oligonucleotide
  Target: PCSK9; (+) strand; PAM type: YTN; PAM sequence: CTG
attattaaaaagagcttggc

SEQ ID NO: 24889 - DNA, 20 bp, Artificial Sequence
  Description of Artificial Sequence: Synthetic oligonucleotide
  Target: PCSK9; (+) strand; PAM type: YTN; PAM sequence: TTA
ttaaaaagagcttggcacct

SEQ ID NO: 24890 - DNA, 20 bp, Artificial Sequence
  Description of Artificial Sequence: Synthetic oligonucleotide
  Target: PCSK9; (+) strand; PAM type: YTN; PAM sequence: TTA
aaaagagcttggcacctccc

SEQ ID NO: 24891 - DNA, 20 bp, Artificial Sequence
  Description of Artificial Sequence: Synthetic oligonucleotide
  Target: PCSK9; (+) strand; PAM type: YTN; PAM sequence: CTT
ggcacctccctctcttctct

SEQ ID NO: 24892 - DNA, 20 bp, Artificial Sequence
  Description of Artificial Sequence: Synthetic oligonucleotide
  Target: PCSK9; (+) strand; PAM type: YTN; PAM sequence: TTG
gcacctccctctcttctctc

SEQ ID NO: 24893 - DNA, 20 bp, Artificial Sequence
  Description of Artificial Sequence: Synthetic oligonucleotide
  Target: PCSK9; (+) strand; PAM type: YTN; PAM sequence: CTC
cctctcttctctcttgcttc

SEQ ID NO: 24894 - DNA, 20 bp, Artificial Sequence
  Description of Artificial Sequence: Synthetic oligonucleotide
  Target: PCSK9; (+) strand; PAM type: YTN; PAM sequence: CTC
tcttctctcttgcttcttct

SEQ ID NO: 24895 - DNA, 20 bp, Artificial Sequence
  Description of Artificial Sequence: Synthetic oligonucleotide
  Target: PCSK9; (+) strand; PAM type: YTN; PAM sequence: CTC
ttctctcttgcttcttctct

SEQ ID NO: 24896 - DNA, 20 bp, Artificial Sequence
  Description of Artificial Sequence: Synthetic oligonucleotide
  Target: PCSK9; (+) strand; PAM type: YTN; PAM sequence: CTT
ctctcttgcttcttctcttg

SEQ ID NO: 24897 - DNA, 20 bp, Artificial Sequence
  Description of Artificial Sequence: Synthetic oligonucleotide
  Target: PCSK9; (+) strand; PAM type: YTN; PAM sequence: TTC
tctcttgcttcttctcttgc

SEQ ID NO: 24898 - DNA, 20 bp, Artificial Sequence
  Description of Artificial Sequence: Synthetic oligonucleotide
  Target: PCSK9; (+) strand; PAM type: YTN; PAM sequence: CTC
tcttgcttcttctcttgcca

SEQ ID NO: 24899 - DNA, 20 bp, Artificial Sequence
  Description of Artificial Sequence: Synthetic oligonucleotide
  Target: PCSK9; (+) strand; PAM type: YTN; PAM sequence: CTC
ttgcttcttctcttgccatg

SEQ ID NO: 24900 - DNA, 20 bp, Artificial Sequence
  Description of Artificial Sequence: Synthetic oligonucleotide
  Target: PCSK9; (+) strand; PAM type: YTN; PAM sequence: CTT
gcttcttctcttgccatgtg

SEQ ID NO: 24901 - DNA, 20 bp, Artificial Sequence
  Description of Artificial Sequence: Synthetic oligonucleotide
  Target: PCSK9; (+) strand; PAM type: YTN; PAM sequence: TTG
cttcttctcttgccatgtga

SEQ ID NO: 24902 - DNA, 20 bp, Artificial Sequence
  Description of Artificial Sequence: Synthetic oligonucleotide
  Target: PCSK9; (+) strand; PAM type: YTN; PAM sequence: CTT
cttctcttgccatgtgattg

SEQ ID NO: 24903 - DNA, 20 bp, Artificial Sequence
  Description of Artificial Sequence: Synthetic oligonucleotide
  Target: PCSK9; (+) strand; PAM type: YTN; PAM sequence: TTC
ttctcttgccatgtgattga

SEQ ID NO: 24904 - DNA, 20 bp, Artificial Sequence
  Description of Artificial Sequence: Synthetic oligonucleotide
  Target: PCSK9; (+) strand; PAM type: YTN; PAM sequence: CTT
ctcttgccatgtgattgatc

SEQ ID NO: 24905 - DNA, 20 bp, Artificial Sequence
  Description of Artificial Sequence: Synthetic oligonucleotide
  Target: PCSK9; (+) strand; PAM type: YTN; PAM sequence: TTC
tcttgccatgtgattgatct

SEQ ID NO: 24906 - DNA, 20 bp, Artificial Sequence
  Description of Artificial Sequence: Synthetic oligonucleotide
  Target: PCSK9; (+) strand; PAM type: YTN; PAM sequence: CTC
ttgccatgtgattgatctct

SEQ ID NO: 24907 - DNA, 20 bp, Artificial Sequence
  Description of Artificial Sequence: Synthetic oligonucleotide
  Target: PCSK9; (+) strand; PAM type: YTN; PAM sequence: CTT
gccatgtgattgatctctgc

SEQ ID NO: 24908 - DNA, 20 bp, Artificial Sequence
  Description of Artificial Sequence: Synthetic oligonucleotide
  Target: PCSK9; (+) strand; PAM type: YTN; PAM sequence: TTG
ccatgtgattgatctctgca

SEQ ID NO: 24909 - DNA, 20 bp, Artificial Sequence
  Description of Artificial Sequence: Synthetic oligonucleotide
  Target: PCSK9; (+) strand; PAM type: YTN; PAM sequence: TTG
atctctgcacatgtaggctc

SEQ ID NO: 24910 - DNA, 20 bp, Artificial Sequence
  Description of Artificial Sequence: Synthetic oligonucleotide
  Target: PCSK9; (+) strand; PAM type: YTN; PAM sequence: CTC
tgcacatgtaggctcccctt

SEQ ID NO: 24911 - DNA, 20 bp, Artificial Sequence
  Description of Artificial Sequence: Synthetic oligonucleotide
  Target: PCSK9; (+) strand; PAM type: YTN; PAM sequence: CTG
cacatgtaggctccccttca

SEQ ID NO: 24912 - DNA, 20 bp, Artificial Sequence
  Description of Artificial Sequence: Synthetic oligonucleotide
  Target: PCSK9; (+) strand; PAM type: YTN; PAM sequence: CTC
cccttcaccttctgccatca

SEQ ID NO: 24913 - DNA, 20 bp, Artificial Sequence
  Description of Artificial Sequence: Synthetic oligonucleotide
  Target: PCSK9; (+) strand; PAM type: YTN; PAM sequence: CTT
caccttctgccatcagtgaa

SEQ ID NO: 24914 - DNA, 20 bp, Artificial Sequence
  Description of Artificial Sequence: Synthetic oligonucleotide
  Target: PCSK9; (+) strand; PAM type: YTN; PAM sequence: TTC
accttctgccatcagtgaaa

SEQ ID NO: 24915 - DNA, 20 bp, Artificial Sequence
  Description of Artificial Sequence: Synthetic oligonucleotide
  Target: PCSK9; (+) strand; PAM type: YTN; PAM sequence: CTT
ctgccatcagtgaaagcagc

SEQ ID NO: 24916 - DNA, 20 bp, Artificial Sequence
  Description of Artificial Sequence: Synthetic oligonucleotide
  Target: PCSK9; (+) strand; PAM type: YTN; PAM sequence: TTC
tgccatcagtgaaagcagct

SEQ ID NO: 24917 - DNA, 20 bp, Artificial Sequence
  Description of Artificial Sequence: Synthetic oligonucleotide
  Target: PCSK9; (+) strand; PAM type: YTN; PAM sequence: CTG
ccatcagtgaaagcagctta

SEQ ID NO: 24918 - DNA, 20 bp, Artificial Sequence
  Description of Artificial Sequence: Synthetic oligonucleotide
  Target: PCSK9; (+) strand; PAM type: YTN; PAM sequence: CTT
aaggccctcaccagaagcag

SEQ ID NO: 24919 - DNA, 20 bp, Artificial Sequence
  Description of Artificial Sequence: Synthetic oligonucleotide
  Target: PCSK9; (+) strand; PAM type: YTN; PAM sequence: TTA
aggccctcaccagaagcaga

SEQ ID NO: 24920 - DNA, 20 bp, Artificial Sequence
  Description of Artificial Sequence: Synthetic oligonucleotide
  Target: PCSK9; (+) strand; PAM type: YTN; PAM sequence: CTC
accagaagcagatgctggtg

SEQ ID NO: 24921 - DNA, 20 bp, Artificial Sequence
  Description of Artificial Sequence: Synthetic oligonucleotide
  Target: PCSK9; (+) strand; PAM type: YTN; PAM sequence: CTG
gtgccatgcttcctggagag

SEQ ID NO: 24922 - DNA, 20 bp, Artificial Sequence
  Description of Artificial Sequence: Synthetic oligonucleotide
  Target: PCSK9; (+) strand; PAM type: YTN; PAM sequence: CTT
cctggagagcttgcagaatc

SEQ ID NO: 24923 - DNA, 20 bp, Artificial Sequence
  Description of Artificial Sequence: Synthetic oligonucleotide
  Target: PCSK9; (+) strand; PAM type: YTN; PAM sequence: TTC
ctggagagcttgcagaatca

SEQ ID NO: 24924 - DNA, 20 bp, Artificial Sequence
  Description of Artificial Sequence: Synthetic oligonucleotide
  Target: PCSK9; (+) strand; PAM type: YTN; PAM sequence: CTG
gagagcttgcagaatcatga

SEQ ID NO: 24925 - DNA, 20 bp, Artificial Sequence
  Description of Artificial Sequence: Synthetic oligonucleotide
  Target: PCSK9; (+) strand; PAM type: YTN; PAM sequence: CTT
gcagaatcatgagctgaata

SEQ ID NO: 24926 - DNA, 20 bp, Artificial Sequence
  Description of Artificial Sequence: Synthetic oligonucleotide
  Target: PCSK9; (+) strand; PAM type: YTN; PAM sequence: TTG
cagaatcatgagctgaataa

SEQ ID NO: 24927 - DNA, 20 bp, Artificial Sequence
  Description of Artificial Sequence: Synthetic oligonucleotide
  Target: PCSK9; (+) strand; PAM type: YTN; PAM sequence: CTG
aataaatcccttttccttgt

SEQ ID NO: 24928 - DNA, 20 bp, Artificial Sequence
  Description of Artificial Sequence: Synthetic oligonucleotide
  Target: PCSK9; (+) strand; PAM type: YTN; PAM sequence: CTT
ttccttgtaaattactcacc

SEQ ID NO: 24929 - DNA, 20 bp, Artificial Sequence
  Description of Artificial Sequence: Synthetic oligonucleotide
  Target: PCSK9; (+) strand; PAM type: YTN; PAM sequence: TTT
tccttgtaaattactcacct

SEQ ID NO: 24930 - DNA, 20 bp, Artificial Sequence
  Description of Artificial Sequence: Synthetic oligonucleotide
  Target: PCSK9; (+) strand; PAM type: YTN; PAM sequence: TTT
ccttgtaaattactcacctt

SEQ ID NO: 24931 - DNA, 20 bp, Artificial Sequence
  Description of Artificial Sequence: Synthetic oligonucleotide
  Target: PCSK9; (+) strand; PAM type: YTN; PAM sequence: TTC
cttgtaaattactcaccttc

SEQ ID NO: 24932 - DNA, 20 bp, Artificial Sequence
  Description of Artificial Sequence: Synthetic oligonucleotide
  Target: PCSK9; (+) strand; PAM type: YTN; PAM sequence: CTT
gtaaattactcaccttcagg

SEQ ID NO: 24933 - DNA, 20 bp, Artificial Sequence
  Description of Artificial Sequence: Synthetic oligonucleotide
  Target: PCSK9; (+) strand; PAM type: YTN; PAM sequence: TTG
taaattactcaccttcaggt

SEQ ID NO: 24934 - DNA, 20 bp, Artificial Sequence
  Description of Artificial Sequence: Synthetic oligonucleotide
  Target: PCSK9; (+) strand; PAM type: YTN; PAM sequence: TTA
ctcaccttcaggtattcctt

SEQ ID NO: 24935 - DNA, 20 bp, Artificial Sequence
  Description of Artificial Sequence: Synthetic oligonucleotide
  Target: PCSK9; (+) strand; PAM type: YTN; PAM sequence: CTC
accttcaggtattcctttat

SEQ ID NO: 24936 - DNA, 20 bp, Artificial Sequence
  Description of Artificial Sequence: Synthetic oligonucleotide
  Target: PCSK9; (+) strand; PAM type: YTN; PAM sequence: CTT
caggtattcctttatatagc

SEQ ID NO: 24937 - DNA, 20 bp, Artificial Sequence
  Description of Artificial Sequence: Synthetic oligonucleotide
  Target: PCSK9; (+) strand; PAM type: YTN; PAM sequence: TTC
aggtattcctttatatagca

SEQ ID NO: 24938 - DNA, 20 bp, Artificial Sequence
  Description of Artificial Sequence: Synthetic oligonucleotide
  Target: PCSK9; (+) strand; PAM type: YTN; PAM sequence: TTC
ctttatatagcaacacaaaa

SEQ ID NO: 24939 - DNA, 20 bp, Artificial Sequence
  Description of Artificial Sequence: Synthetic oligonucleotide
  Target: PCSK9; (+) strand; PAM type: YTN; PAM sequence: CTT
tatatagcaacacaaaagga

SEQ ID NO: 24940 - DNA, 20 bp, Artificial Sequence
  Description of Artificial Sequence: Synthetic oligonucleotide
  Target: PCSK9; (+) strand; PAM type: YTN; PAM sequence: TTT
atatagcaacacaaaaggac

SEQ ID NO: 24941 - DNA, 20 bp, Artificial Sequence
  Description of Artificial Sequence: Synthetic oligonucleotide
  Target: PCSK9; (+) strand; PAM type: YTN; PAM sequence: TTA
tatagcaacacaaaaggact

SEQ ID NO: 24942 - DNA, 20 bp, Artificial Sequence
  Description of Artificial Sequence: Synthetic oligonucleotide
  Target: PCSK9; (+) strand; PAM type: YTN; PAM sequence: CTA
agacagtggccttgactttt

SEQ ID NO: 24943 - DNA, 20 bp, Artificial Sequence
  Description of Artificial Sequence: Synthetic oligonucleotide
  Target: PCSK9; (+) strand; PAM type: YTN; PAM sequence: CTT
gacttttctctctctttaag

SEQ ID NO: 24944 - DNA, 20 bp, Artificial Sequence
  Description of Artificial Sequence: Synthetic oligonucleotide
  Target: PCSK9; (+) strand; PAM type: YTN; PAM sequence: TTG
acttttctctctctttaaga

SEQ ID NO: 24945 - DNA, 20 bp, Artificial Sequence
  Description of Artificial Sequence: Synthetic oligonucleotide
  Target: PCSK9; (+) strand; PAM type: YTN; PAM sequence: CTT
ttctctctctttaagaagtg

SEQ ID NO: 24946 - DNA, 20 bp, Artificial Sequence
  Description of Artificial Sequence: Synthetic oligonucleotide
  Target: PCSK9; (+) strand; PAM type: YTN; PAM sequence: TTT
tctctctctttaagaagtgt

SEQ ID NO: 24947 - DNA, 20 bp, Artificial Sequence
  Description of Artificial Sequence: Synthetic oligonucleotide
  Target: PCSK9; (+) strand; PAM type: YTN; PAM sequence: TTT
ctctctctttaagaagtgtt

SEQ ID NO: 24948 - DNA, 20 bp, Artificial Sequence
  Description of Artificial Sequence: Synthetic oligonucleotide
  Target: PCSK9; (+) strand; PAM type: YTN; PAM sequence: TTC
tctctctttaagaagtgttg

SEQ ID NO: 24949 - DNA, 20 bp, Artificial Sequence
  Description of Artificial Sequence: Synthetic oligonucleotide
  Target: PCSK9; (+) strand; PAM type: YTN; PAM sequence: CTC
tctctttaagaagtgttgcc

SEQ ID NO: 24950 - DNA, 20 bp, Artificial Sequence
  Description of Artificial Sequence: Synthetic oligonucleotide
  Target: PCSK9; (+) strand; PAM type: YTN; PAM sequence: CTC
tctttaagaagtgttgcctt

SEQ ID NO: 24951 - DNA, 20 bp, Artificial Sequence
  Description of Artificial Sequence: Synthetic oligonucleotide
  Target: PCSK9; (+) strand; PAM type: YTN; PAM sequence: CTC
tttaagaagtgttgcctttg

SEQ ID NO: 24952 - DNA, 20 bp, Artificial Sequence
  Description of Artificial Sequence: Synthetic oligonucleotide
  Target: PCSK9; (+) strand; PAM type: YTN; PAM sequence: CTT
taagaagtgttgcctttgct

SEQ ID NO: 24953 - DNA, 20 bp, Artificial Sequence
  Description of Artificial Sequence: Synthetic oligonucleotide
  Target: PCSK9; (+) strand; PAM type: YTN; PAM sequence: TTT
aagaagtgttgcctttgctc

SEQ ID NO: 24954 - DNA, 20 bp, Artificial Sequence
  Description of Artificial Sequence: Synthetic oligonucleotide
  Target: PCSK9; (+) strand; PAM type: YTN; PAM sequence: TTA
agaagtgttgcctttgctca

SEQ ID NO: 24955 - DNA, 20 bp, Artificial Sequence
  Description of Artificial Sequence: Synthetic oligonucleotide
  Target: PCSK9; (+) strand; PAM type: YTN; PAM sequence: TTG
cctttgctcacttagtcatc

SEQ ID NO: 24956 - DNA, 20 bp, Artificial Sequence
  Description of Artificial Sequence: Synthetic oligonucleotide
  Target: PCSK9; (+) strand; PAM type: YTN; PAM sequence: CTT
tgctcacttagtcatccctt

SEQ ID NO: 24957 - DNA, 20 bp, Artificial Sequence
  Description of Artificial Sequence: Synthetic oligonucleotide
  Target: PCSK9; (+) strand; PAM type: YTN; PAM sequence: TTT
gctcacttagtcatcccttc

SEQ ID NO: 24958 - DNA, 20 bp, Artificial Sequence
  Description of Artificial Sequence: Synthetic oligonucleotide
  Target: PCSK9; (+) strand; PAM type: YTN; PAM sequence: TTG
ctcacttagtcatcccttct

SEQ ID NO: 24959 - DNA, 20 bp, Artificial Sequence
  Description of Artificial Sequence: Synthetic oligonucleotide
  Target: PCSK9; (+) strand; PAM type: YTN; PAM sequence: CTC
acttagtcatcccttctgcc

SEQ ID NO: 24960 - DNA, 20 bp, Artificial Sequence
  Description of Artificial Sequence: Synthetic oligonucleotide
  Target: PCSK9; (+) strand; PAM type: YTN; PAM sequence: CTT
agtcatcccttctgcctgca

SEQ ID NO: 24961 - DNA, 20 bp, Artificial Sequence
  Description of Artificial Sequence: Synthetic oligonucleotide
  Target: PCSK9; (+) strand; PAM type: YTN; PAM sequence: TTA
gtcatcccttctgcctgcat

SEQ ID NO: 24962 - DNA, 20 bp, Artificial Sequence
  Description of Artificial Sequence: Synthetic oligonucleotide
  Target: PCSK9; (+) strand; PAM type: YTN; PAM sequence: CTT
ctgcctgcatttgtagagca

SEQ ID NO: 24963 - DNA, 20 bp, Artificial Sequence
  Description of Artificial Sequence: Synthetic oligonucleotide
  Target: PCSK9; (+) strand; PAM type: YTN; PAM sequence: TTC
tgcctgcatttgtagagcat

SEQ ID NO: 24964 - DNA, 20 bp, Artificial Sequence
  Description of Artificial Sequence: Synthetic oligonucleotide
  Target: PCSK9; (+) strand; PAM type: YTN; PAM sequence: CTG
cctgcatttgtagagcatct

SEQ ID NO: 24965 - DNA, 20 bp, Artificial Sequence
  Description of Artificial Sequence: Synthetic oligonucleotide
  Target: PCSK9; (+) strand; PAM type: YTN; PAM sequence: CTG
catttgtagagcatctggat

SEQ ID NO: 24966 - DNA, 20 bp, Artificial Sequence
  Description of Artificial Sequence: Synthetic oligonucleotide
  Target: PCSK9; (+) strand; PAM type: YTN; PAM sequence: TTT
gtagagcatctggatgggag

SEQ ID NO: 24967 - DNA, 20 bp, Artificial Sequence
  Description of Artificial Sequence: Synthetic oligonucleotide
  Target: PCSK9; (+) strand; PAM type: YTN; PAM sequence: TTG
tagagcatctggatgggaga

SEQ ID NO: 24968 - DNA, 20 bp, Artificial Sequence
  Description of Artificial Sequence: Synthetic oligonucleotide
  Target: PCSK9; (+) strand; PAM type: YTN; PAM sequence: CTG
gatgggagatttatataacc

SEQ ID NO: 24969 - DNA, 20 bp, Artificial Sequence
  Description of Artificial Sequence: Synthetic oligonucleotide
  Target: PCSK9; (+) strand; PAM type: YTN; PAM sequence: TTT
atataaccgtcactcttgac

SEQ ID NO: 24970 - DNA, 20 bp, Artificial Sequence
  Description of Artificial Sequence: Synthetic oligonucleotide
  Target: PCSK9; (+) strand; PAM type: YTN; PAM sequence: TTA
tataaccgtcactcttgact

SEQ ID NO: 24971 - DNA, 20 bp, Artificial Sequence
  Description of Artificial Sequence: Synthetic oligonucleotide
  Target: PCSK9; (+) strand; PAM type: YTN; PAM sequence: CTC
ttgactttcccagcaggcct

SEQ ID NO: 24972 - DNA, 20 bp, Artificial Sequence
  Description of Artificial Sequence: Synthetic oligonucleotide
  Target: PCSK9; (+) strand; PAM type: YTN; PAM sequence: CTT
gactttcccagcaggcctat

SEQ ID NO: 24973 - DNA, 20 bp, Artificial Sequence
  Description of Artificial Sequence: Synthetic oligonucleotide
  Target: PCSK9; (+) strand; PAM type: YTN; PAM sequence: TTG
actttcccagcaggcctatg

SEQ ID NO: 24974 - DNA, 20 bp, Artificial Sequence
  Description of Artificial Sequence: Synthetic oligonucleotide
  Target: PCSK9; (+) strand; PAM type: YTN; PAM sequence: CTT
tcccagcaggcctatgtcat

SEQ ID NO: 24975 - DNA, 20 bp, Artificial Sequence
  Description of Artificial Sequence: Synthetic oligonucleotide
  Target: PCSK9; (+) strand; PAM type: YTN; PAM sequence: TTT
cccagcaggcctatgtcata

SEQ ID NO: 24976 - DNA, 20 bp, Artificial Sequence
  Description of Artificial Sequence: Synthetic oligonucleotide
  Target: PCSK9; (+) strand; PAM type: YTN; PAM sequence: TTC
ccagcaggcctatgtcatag

SEQ ID NO: 24977 - DNA, 20 bp, Artificial Sequence
  Description of Artificial Sequence: Synthetic oligonucleotide
  Target: PCSK9; (+) strand; PAM type: YTN; PAM sequence: CTA
tgtcataggtactgtggtct

SEQ ID NO: 24978 - DNA, 20 bp, Artificial Sequence
  Description of Artificial Sequence: Synthetic oligonucleotide
  Target: PCSK9; (+) strand; PAM type: YTN; PAM sequence: CTG
tggtctctacaatacagcag

SEQ ID NO: 24979 - DNA, 20 bp, Artificial Sequence
  Description of Artificial Sequence: Synthetic oligonucleotide
  Target: PCSK9; (+) strand; PAM type: YTN; PAM sequence: CTC
tacaatacagcagaggtatc

SEQ ID NO: 24980 - DNA, 20 bp, Artificial Sequence
  Description of Artificial Sequence: Synthetic oligonucleotide
  Target: PCSK9; (+) strand; PAM type: YTN; PAM sequence: CTA
caatacagcagaggtatctg

SEQ ID NO: 24981 - DNA, 20 bp, Artificial Sequence
  Description of Artificial Sequence: Synthetic oligonucleotide
  Target: PCSK9; (+) strand; PAM type: YTN; PAM sequence: CTG
aggctccgagaggttgagtg

SEQ ID NO: 24982 - DNA, 20 bp, Artificial Sequence
  Description of Artificial Sequence: Synthetic oligonucleotide
  Target: PCSK9; (+) strand; PAM type: YTN; PAM sequence: CTC
cgagaggttgagtgacttgc

SEQ ID NO: 24983 - DNA, 20 bp, Artificial Sequence
  Description of Artificial Sequence: Synthetic oligonucleotide
  Target: PCSK9; (+) strand; PAM type: YTN; PAM sequence: TTG
agtgacttgctcatggctgc

SEQ ID NO: 24984 - DNA, 20 bp, Artificial Sequence
  Description of Artificial Sequence: Synthetic oligonucleotide
  Target: PCSK9; (+) strand; PAM type: YTN; PAM sequence: CTT
gctcatggctgcacaaccag

SEQ ID NO: 24985 - DNA, 20 bp, Artificial Sequence
  Description of Artificial Sequence: Synthetic oligonucleotide
  Target: PCSK9; (+) strand; PAM type: YTN; PAM sequence: TTG
ctcatggctgcacaaccagt

SEQ ID NO: 24986 - DNA, 20 bp, Artificial Sequence
  Description of Artificial Sequence: Synthetic oligonucleotide
  Target: PCSK9; (+) strand; PAM type: YTN; PAM sequence: CTC
atggctgcacaaccagtaaa

SEQ ID NO: 24987 - DNA, 20 bp, Artificial Sequence
  Description of Artificial Sequence: Synthetic oligonucleotide
  Target: PCSK9; (+) strand; PAM type: YTN; PAM sequence: CTG
cacaaccagtaaatattgga

SEQ ID NO: 24988 - DNA, 20 bp, Artificial Sequence
  Description of Artificial Sequence: Synthetic oligonucleotide
  Target: PCSK9; (+) strand; PAM type: YTN; PAM sequence: TTG
gagctggaattcaggtccac

SEQ ID NO: 24989 - DNA, 20 bp, Artificial Sequence
  Description of Artificial Sequence: Synthetic oligonucleotide
  Target: PCSK9; (+) strand; PAM type: YTN; PAM sequence: CTG
gaattcaggtccacggtttc

SEQ ID NO: 24990 - DNA, 20 bp, Artificial Sequence
  Description of Artificial Sequence: Synthetic oligonucleotide
  Target: PCSK9; (+) strand; PAM type: YTN; PAM sequence: TTC
aggtccacggtttcctggct

SEQ ID NO: 24991 - DNA, 20 bp, Artificial Sequence
  Description of Artificial Sequence: Synthetic oligonucleotide
  Target: PCSK9; (+) strand; PAM type: YTN; PAM sequence: TTT
cctggctccaaagcccatga

SEQ ID NO: 24992 - DNA, 20 bp, Artificial Sequence
  Description of Artificial Sequence: Synthetic oligonucleotide
  Target: PCSK9; (+) strand; PAM type: YTN; PAM sequence: TTC
ctggctccaaagcccatgat

SEQ ID NO: 24993 - DNA, 20 bp, Artificial Sequence
  Description of Artificial Sequence: Synthetic oligonucleotide
  Target: PCSK9; (+) strand; PAM type: YTN; PAM sequence: CTG
gctccaaagcccatgatttt

SEQ ID NO: 24994 - DNA, 20 bp, Artificial Sequence
  Description of Artificial Sequence: Synthetic oligonucleotide
  Target: PCSK9; (+) strand; PAM type: YTN; PAM sequence: CTC
caaagcccatgattttttcc

SEQ ID NO: 24995 - DNA, 20 bp, Artificial Sequence
  Description of Artificial Sequence: Synthetic oligonucleotide
  Target: PCSK9; (+) strand; PAM type: YTN; PAM sequence: TTT
tttccctcaatttattctga

SEQ ID NO: 24996 - DNA, 20 bp, Artificial Sequence
  Description of Artificial Sequence: Synthetic oligonucleotide
  Target: PCSK9; (+) strand; PAM type: YTN; PAM sequence: TTT
ttccctcaatttattctgac

SEQ ID NO: 24997 - DNA, 20 bp, Artificial Sequence
  Description of Artificial Sequence: Synthetic oligonucleotide
  Target: PCSK9; (+) strand; PAM type: YTN; PAM sequence: TTT
tccctcaatttattctgact

SEQ ID NO: 24998 - DNA, 20 bp, Artificial Sequence
  Description of Artificial Sequence: Synthetic oligonucleotide
  Target: PCSK9; (+) strand; PAM type: YTN; PAM sequence: TTT
ccctcaatttattctgactg

SEQ ID NO: 24999 - DNA, 20 bp, Artificial Sequence
  Description of Artificial Sequence: Synthetic oligonucleotide
  Target: PCSK9; (+) strand; PAM type: YTN; PAM sequence: TTC
cctcaatttattctgactgg

SEQ ID NO: 25000 - DNA, 20 bp, Artificial Sequence
  Description of Artificial Sequence: Synthetic oligonucleotide
  Target: PCSK9; (+) strand; PAM type: YTN; PAM sequence: CTC
aatttattctgactggggca

SEQ ID NO: 25001 - DNA, 20 bp, Artificial Sequence
  Description of Artificial Sequence: Synthetic oligonucleotide
  Target: PCSK9; (+) strand; PAM type: YTN; PAM sequence: TTT
attctgactggggcatgggg

SEQ ID NO: 25002 - DNA, 20 bp, Artificial Sequence
  Description of Artificial Sequence: Synthetic oligonucleotide
  Target: PCSK9; (+) strand; PAM type: YTN; PAM sequence: TTA
ttctgactggggcatggggg

SEQ ID NO: 25003 - DNA, 20 bp, Artificial Sequence
  Description of Artificial Sequence: Synthetic oligonucleotide
  Target: PCSK9; (+) strand; PAM type: YTN; PAM sequence: TTC
tgactggggcatgggggagg

SEQ ID NO: 25004 - DNA, 20 bp, Artificial Sequence
  Description of Artificial Sequence: Synthetic oligonucleotide
  Target: PCSK9; (+) strand; PAM type: YTN; PAM sequence: CTG
actggggcatgggggagggg

SEQ ID NO: 25005 - DNA, 20 bp, Artificial Sequence
  Description of Artificial Sequence: Synthetic oligonucleotide
  Target: PCSK9; (+) strand; PAM type: YTN; PAM sequence: CTG
gggcatgggggagggggtgg

SEQ ID NO: 25006 - DNA, 20 bp, Artificial Sequence
  Description of Artificial Sequence: Synthetic oligonucleotide
  Target: PCSK9; (+) strand; PAM type: YTN; PAM sequence: CTT
tgggcagggccaccaggagc

SEQ ID NO: 25007 - DNA, 20 bp, Artificial Sequence
  Description of Artificial Sequence: Synthetic oligonucleotide
  Target: PCSK9; (+) strand; PAM type: YTN; PAM sequence: TTT
gggcagggccaccaggagcg

SEQ ID NO: 25008 - DNA, 20 bp, Artificial Sequence
  Description of Artificial Sequence: Synthetic oligonucleotide
  Target: PCSK9; (+) strand; PAM type: YTN; PAM sequence: TTG
ggcagggccaccaggagcga

SEQ ID NO: 25009 - DNA, 20 bp, Artificial Sequence
  Description of Artificial Sequence: Synthetic oligonucleotide
  Target: PCSK9; (+) strand; PAM type: YTN; PAM sequence: CTG
ggtgcaggtacagaggaaaa

SEQ ID NO: 25010 - DNA, 20 bp, Artificial Sequence
  Description of Artificial Sequence: Synthetic oligonucleotide
  Target: PCSK9; (+) strand; PAM type: YTN; PAM sequence: CTG
ttgtcgagtgtggcccgtag

SEQ ID NO: 25011 - DNA, 20 bp, Artificial Sequence
  Description of Artificial Sequence: Synthetic oligonucleotide
  Target: PCSK9; (+) strand; PAM type: YTN; PAM sequence: TTG
tcgagtgtggcccgtagttc

SEQ ID NO: 25012 - DNA, 20 bp, Artificial Sequence
  Description of Artificial Sequence: Synthetic oligonucleotide
  Target: PCSK9; (+) strand; PAM type: YTN; PAM sequence: TTC
ccatttttgcctgaatggca

SEQ ID NO: 25013 - DNA, 20 bp, Artificial Sequence
  Description of Artificial Sequence: Synthetic oligonucleotide
  Target: PCSK9; (+) strand; PAM type: YTN; PAM sequence: TTT
ttgcctgaatggcacatttg

SEQ ID NO: 25014 - DNA, 20 bp, Artificial Sequence
  Description of Artificial Sequence: Synthetic oligonucleotide
  Target: PCSK9; (+) strand; PAM type: YTN; PAM sequence: TTT
tgcctgaatggcacatttga

SEQ ID NO: 25015 - DNA, 20 bp, Artificial Sequence
  Description of Artificial Sequence: Synthetic oligonucleotide
  Target: PCSK9; (+) strand; PAM type: YTN; PAM sequence: TTT
gcctgaatggcacatttgaa

SEQ ID NO: 25016 - DNA, 20 bp, Artificial Sequence
  Description of Artificial Sequence: Synthetic oligonucleotide
  Target: PCSK9; (+) strand; PAM type: YTN; PAM sequence: TTG
cctgaatggcacatttgaaa

SEQ ID NO: 25017 - DNA, 20 bp, Artificial Sequence
  Description of Artificial Sequence: Synthetic oligonucleotide
  Target: PCSK9; (+) strand; PAM type: YTN; PAM sequence: CTG
aatggcacatttgaaagtgt

SEQ ID NO: 25018 - DNA, 20 bp, Artificial Sequence
  Description of Artificial Sequence: Synthetic oligonucleotide
  Target: PCSK9; (+) strand; PAM type: YTN; PAM sequence: TTT
gaaagtgttatataaccatg

SEQ ID NO: 25019 - DNA, 20 bp, Artificial Sequence
  Description of Artificial Sequence: Synthetic oligonucleotide
  Target: PCSK9; (+) strand; PAM type: YTN; PAM sequence: TTG
aaagtgttatataaccatgt

SEQ ID NO: 25020 - DNA, 20 bp, Artificial Sequence
  Description of Artificial Sequence: Synthetic oligonucleotide
  Target: PCSK9; (+) strand; PAM type: YTN; PAM sequence: TTA
tataaccatgtgaataataa

SEQ ID NO: 25021 - DNA, 20 bp, Artificial Sequence
  Description of Artificial Sequence: Synthetic oligonucleotide
  Target: PCSK9; (+) strand; PAM type: YTN; PAM sequence: TTG
gcctatatgagttctttaat

SEQ ID NO: 25022 - DNA, 20 bp, Artificial Sequence
  Description of Artificial Sequence: Synthetic oligonucleotide
  Target: PCSK9; (+) strand; PAM type: YTN; PAM sequence: CTA
tatgagttctttaatttgct

SEQ ID NO: 25023 - DNA, 20 bp, Artificial Sequence
  Description of Artificial Sequence: Synthetic oligonucleotide
  Target: PCSK9; (+) strand; PAM type: YTN; PAM sequence: TTC
tttaatttgctttttggtcc

SEQ ID NO: 25024 - DNA, 20 bp, Artificial Sequence
  Description of Artificial Sequence: Synthetic oligonucleotide
  Target: PCSK9; (+) strand; PAM type: YTN; PAM sequence: CTT
taatttgctttttggtccgc

SEQ ID NO: 25025 - DNA, 20 bp, Artificial Sequence
  Description of Artificial Sequence: Synthetic oligonucleotide
  Target: PCSK9; (+) strand; PAM type: YTN; PAM sequence: TTT
aatttgctttttggtccgca

SEQ ID NO: 25026 - DNA, 20 bp, Artificial Sequence
  Description of Artificial Sequence: Synthetic oligonucleotide
  Target: PCSK9; (+) strand; PAM type: YTN; PAM sequence: TTA
atttgctttttggtccgcat

SEQ ID NO: 25027 - DNA, 20 bp, Artificial Sequence
  Description of Artificial Sequence: Synthetic oligonucleotide
  Target: PCSK9; (+) strand; PAM type: YTN; PAM sequence: TTT
gctttttggtccgcatttgg

SEQ ID NO: 25028 - DNA, 20 bp, Artificial Sequence
  Description of Artificial Sequence: Synthetic oligonucleotide
  Target: PCSK9; (+) strand; PAM type: YTN; PAM sequence: TTG
ctttttggtccgcatttggt

SEQ ID NO: 25029 - DNA, 20 bp, Artificial Sequence
  Description of Artificial Sequence: Synthetic oligonucleotide
  Target: PCSK9; (+) strand; PAM type: YTN; PAM sequence: CTT
tttggtccgcatttggtaac

SEQ ID NO: 25030 - DNA, 20 bp, Artificial Sequence
  Description of Artificial Sequence: Synthetic oligonucleotide
  Target: PCSK9; (+) strand; PAM type: YTN; PAM sequence: TTT
ttggtccgcatttggtaact

SEQ ID NO: 25031 - DNA, 20 bp, Artificial Sequence
  Description of Artificial Sequence: Synthetic oligonucleotide
  Target: PCSK9; (+) strand; PAM type: YTN; PAM sequence: TTT
tggtccgcatttggtaactt

SEQ ID NO: 25032 - DNA, 20 bp, Artificial Sequence
  Description of Artificial Sequence: Synthetic oligonucleotide
  Target: PCSK9; (+) strand; PAM type: YTN; PAM sequence: TTT
ggtccgcatttggtaacttc

SEQ ID NO: 25033 - DNA, 20 bp, Artificial Sequence
  Description of Artificial Sequence: Synthetic oligonucleotide
  Target: PCSK9; (+) strand; PAM type: YTN; PAM sequence: TTG
gtccgcatttggtaacttct

SEQ ID NO: 25034 - DNA, 20 bp, Artificial Sequence
  Description of Artificial Sequence: Synthetic oligonucleotide
  Target: PCSK9; (+) strand; PAM type: YTN; PAM sequence: TTT
ggtaacttctttatcatcta

SEQ ID NO: 25035 - DNA, 20 bp, Artificial Sequence
  Description of Artificial Sequence: Synthetic oligonucleotide
  Target: PCSK9; (+) strand; PAM type: YTN; PAM sequence: TTG
gtaacttctttatcatctac

SEQ ID NO: 25036 - DNA, 20 bp, Artificial Sequence
  Description of Artificial Sequence: Synthetic oligonucleotide
  Target: PCSK9; (+) strand; PAM type: YTN; PAM sequence: CTT
ctttatcatctactatactc

SEQ ID NO: 25037 - DNA, 20 bp, Artificial Sequence
  Description of Artificial Sequence: Synthetic oligonucleotide
  Target: PCSK9; (+) strand; PAM type: YTN; PAM sequence: TTC
tttatcatctactatactct

SEQ ID NO: 25038 - DNA, 20 bp, Artificial Sequence
  Description of Artificial Sequence: Synthetic oligonucleotide
  Target: PCSK9; (+) strand; PAM type: YTN; PAM sequence: CTT
tatcatctactatactctgt

SEQ ID NO: 25039 - DNA, 20 bp, Artificial Sequence
  Description of Artificial Sequence: Synthetic oligonucleotide
  Target: PCSK9; (+) strand; PAM type: YTN; PAM sequence: TTT
atcatctactatactctgtt

SEQ ID NO: 25040 - DNA, 20 bp, Artificial Sequence
  Description of Artificial Sequence: Synthetic oligonucleotide
  Target: PCSK9; (+) strand; PAM type: YTN; PAM sequence: TTA
tcatctactatactctgttg

SEQ ID NO: 25041 - DNA, 20 bp, Artificial Sequence
  Description of Artificial Sequence: Synthetic oligonucleotide
  Target: PCSK9; (+) strand; PAM type: YTN; PAM sequence: CTA
ctatactctgttgtgtctct

SEQ ID NO: 25042 - DNA, 20 bp, Artificial Sequence
  Description of Artificial Sequence: Synthetic oligonucleotide
  Target: PCSK9; (+) strand; PAM type: YTN; PAM sequence: CTA
tactctgttgtgtctctttt

SEQ ID NO: 25043 - DNA, 20 bp, Artificial Sequence
  Description of Artificial Sequence: Synthetic oligonucleotide
  Target: PCSK9; (+) strand; PAM type: YTN; PAM sequence: CTC
tgttgtgtctcttttgttgt

SEQ ID NO: 25044 - DNA, 20 bp, Artificial Sequence
  Description of Artificial Sequence: Synthetic oligonucleotide
  Target: PCSK9; (+) strand; PAM type: YTN; PAM sequence: CTG
ttgtgtctcttttgttgtaa

SEQ ID NO: 25045 - DNA, 20 bp, Artificial Sequence
  Description of Artificial Sequence: Synthetic oligonucleotide
  Target: PCSK9; (+) strand; PAM type: YTN; PAM sequence: TTG
tgtctcttttgttgtaattt

SEQ ID NO: 25046 - DNA, 20 bp, Artificial Sequence
  Description of Artificial Sequence: Synthetic oligonucleotide
  Target: PCSK9; (+) strand; PAM type: YTN; PAM sequence: CTC
ttttgttgtaatttgtaagt

SEQ ID NO: 25047 - DNA, 20 bp, Artificial Sequence
  Description of Artificial Sequence: Synthetic oligonucleotide
  Target: PCSK9; (+) strand; PAM type: YTN; PAM sequence: CTT
ttgttgtaatttgtaagtag

SEQ ID NO: 25048 - DNA, 20 bp, Artificial Sequence
  Description of Artificial Sequence: Synthetic oligonucleotide
  Target: PCSK9; (+) strand; PAM type: YTN; PAM sequence: TTT
tgttgtaatttgtaagtagg

SEQ ID NO: 25049 - DNA, 20 bp, Artificial Sequence
  Description of Artificial Sequence: Synthetic oligonucleotide
  Target: PCSK9; (+) strand; PAM type: YTN; PAM sequence: TTT
gttgtaatttgtaagtaggg

SEQ ID NO: 25050 - DNA, 20 bp, Artificial Sequence
  Description of Artificial Sequence: Synthetic oligonucleotide
  Target: PCSK9; (+) strand; PAM type: YTN; PAM sequence: TTG
ttgtaatttgtaagtagggg

SEQ ID NO: 25051 - DNA, 20 bp, Artificial Sequence
  Description of Artificial Sequence: Synthetic oligonucleotide
  Target: PCSK9; (+) strand; PAM type: YTN; PAM sequence: TTG
taatttgtaagtaggggtga

SEQ ID NO: 25052 - DNA, 20 bp, Artificial Sequence
  Description of Artificial Sequence: Synthetic oligonucleotide
  Target: PCSK9; (+) strand; PAM type: YTN; PAM sequence: TTT
gtaagtaggggtgagataaa

SEQ ID NO: 25053 - DNA, 20 bp, Artificial Sequence
  Description of Artificial Sequence: Synthetic oligonucleotide
  Target: PCSK9; (+) strand; PAM type: YTN; PAM sequence: TTG
taagtaggggtgagataaag

SEQ ID NO: 25054 - DNA, 20 bp, Artificial Sequence
  Description of Artificial Sequence: Synthetic oligonucleotide
  Target: PCSK9; (+) strand; PAM type: YTN; PAM sequence: CTA
gggtttgctgggtttcttcc

SEQ ID NO: 25055 - DNA, 20 bp, Artificial Sequence
  Description of Artificial Sequence: Synthetic oligonucleotide
  Target: PCSK9; (+) strand; PAM type: YTN; PAM sequence: TTT
gctgggtttcttccatgtca

SEQ ID NO: 25056 - DNA, 20 bp, Artificial Sequence
  Description of Artificial Sequence: Synthetic oligonucleotide
  Target: PCSK9; (+) strand; PAM type: YTN; PAM sequence: TTG
ctgggtttcttccatgtcat

SEQ ID NO: 25057 - DNA, 20 bp, Artificial Sequence
  Description of Artificial Sequence: Synthetic oligonucleotide
  Target: PCSK9; (+) strand; PAM type: YTN; PAM sequence: CTG
ggtttcttccatgtcatcat

SEQ ID NO: 25058 - DNA, 20 bp, Artificial Sequence
  Description of Artificial Sequence: Synthetic oligonucleotide
  Target: PCSK9; (+) strand; PAM type: YTN; PAM sequence: TTT
cttccatgtcatcatgttcc

SEQ ID NO: 25059 - DNA, 20 bp, Artificial Sequence
  Description of Artificial Sequence: Synthetic oligonucleotide
  Target: PCSK9; (+) strand; PAM type: YTN; PAM sequence: TTC
ttccatgtcatcatgttcct

SEQ ID NO: 25060 - DNA, 20 bp, Artificial Sequence
  Description of Artificial Sequence: Synthetic oligonucleotide
  Target: PCSK9; (+) strand; PAM type: YTN; PAM sequence: CTT
ccatgtcatcatgttcctcc

SEQ ID NO: 25061 - DNA, 20 bp, Artificial Sequence
  Description of Artificial Sequence: Synthetic oligonucleotide
  Target: PCSK9; (+) strand; PAM type: YTN; PAM sequence: TTC
catgtcatcatgttcctcct

SEQ ID NO: 25062 - DNA, 20 bp, Artificial Sequence
  Description of Artificial Sequence: Synthetic oligonucleotide
  Target: PCSK9; (+) strand; PAM type: YTN; PAM sequence: TTC
ctccttgcatggggccagga

SEQ ID NO: 25063 - DNA, 20 bp, Artificial Sequence
  Description of Artificial Sequence: Synthetic oligonucleotide
  Target: PCSK9; (+) strand; PAM type: YTN; PAM sequence: CTC
cttgcatggggccaggatcc

SEQ ID NO: 25064 - DNA, 20 bp, Artificial Sequence
  Description of Artificial Sequence: Synthetic oligonucleotide
  Target: PCSK9; (+) strand; PAM type: YTN; PAM sequence: CTT
gcatggggccaggatccgtg

SEQ ID NO: 25065 - DNA, 20 bp, Artificial Sequence
  Description of Artificial Sequence: Synthetic oligonucleotide
  Target: PCSK9; (+) strand; PAM type: YTN; PAM sequence: TTG
catggggccaggatccgtgg

SEQ ID NO: 25066 - DNA, 20 bp, Artificial Sequence
  Description of Artificial Sequence: Synthetic oligonucleotide
  Target: PCSK9; (+) strand; PAM type: YTN; PAM sequence: TTG
cctggcacctacgtggtggt

SEQ ID NO: 25067 - DNA, 20 bp, Artificial Sequence
  Description of Artificial Sequence: Synthetic oligonucleotide
  Target: PCSK9; (+) strand; PAM type: YTN; PAM sequence: CTG
gcacctacgtggtggtgctg

SEQ ID NO: 25068 - DNA, 20 bp, Artificial Sequence
  Description of Artificial Sequence: Synthetic oligonucleotide
  Target: PCSK9; (+) strand; PAM type: YTN; PAM sequence: CTA
cgtggtggtgctgaaggagg

SEQ ID NO: 25069 - DNA, 20 bp, Artificial Sequence
  Description of Artificial Sequence: Synthetic oligonucleotide
  Target: PCSK9; (+) strand; PAM type: YTN; PAM sequence: CTG
aaggaggagacccacctctc

SEQ ID NO: 25070 - DNA, 20 bp, Artificial Sequence
  Description of Artificial Sequence: Synthetic oligonucleotide
  Target: PCSK9; (+) strand; PAM type: YTN; PAM sequence: CTC
tcgcagtcagagcgcactgc

SEQ ID NO: 25071 - DNA, 20 bp, Artificial Sequence
  Description of Artificial Sequence: Synthetic oligonucleotide
  Target: PCSK9; (+) strand; PAM type: YTN; PAM sequence: CTC
gcagtcagagcgcactgccc

SEQ ID NO: 25072 - DNA, 20 bp, Artificial Sequence
  Description of Artificial Sequence: Synthetic oligonucleotide
  Target: PCSK9; (+) strand; PAM type: YTN; PAM sequence: CTG
cccgccgcctgcaggcccag

SEQ ID NO: 25073 - DNA, 20 bp, Artificial Sequence
  Description of Artificial Sequence: Synthetic oligonucleotide
  Target: PCSK9; (+) strand; PAM type: YTN; PAM sequence: CTG
caggcccaggctgcccgccg

SEQ ID NO: 25074 - DNA, 20 bp, Artificial Sequence
  Description of Artificial Sequence: Synthetic oligonucleotide
  Target: PCSK9; (+) strand; PAM type: YTN; PAM sequence: CTG
cccgccggggatacctcacc

SEQ ID NO: 25075 - DNA, 20 bp, Artificial Sequence
  Description of Artificial Sequence: Synthetic oligonucleotide
  Target: PCSK9; (+) strand; PAM type: YTN; PAM sequence: CTC
accaagatcctgcatgtctt

SEQ ID NO: 25076 - DNA, 20 bp, Artificial Sequence
  Description of Artificial Sequence: Synthetic oligonucleotide
  Target: PCSK9; (+) strand; PAM type: YTN; PAM sequence: CTG
catgtcttccatggccttct

SEQ ID NO: 25077 - DNA, 20 bp, Artificial Sequence
  Description of Artificial Sequence: Synthetic oligonucleotide
  Target: PCSK9; (+) strand; PAM type: YTN; PAM sequence: CTT
ccatggccttcttcctggct

SEQ ID NO: 25078 - DNA, 20 bp, Artificial Sequence
  Description of Artificial Sequence: Synthetic oligonucleotide
  Target: PCSK9; (+) strand; PAM type: YTN; PAM sequence: TTC
catggccttcttcctggctt

SEQ ID NO: 25079 - DNA, 20 bp, Artificial Sequence
  Description of Artificial Sequence: Synthetic oligonucleotide
  Target: PCSK9; (+) strand; PAM type: YTN; PAM sequence: CTT
cttcctggcttcctggtgaa

SEQ ID NO: 25080 - DNA, 20 bp, Artificial Sequence
  Description of Artificial Sequence: Synthetic oligonucleotide
  Target: PCSK9; (+) strand; PAM type: YTN; PAM sequence: TTC
ttcctggcttcctggtgaag

SEQ ID NO: 25081 - DNA, 20 bp, Artificial Sequence
  Description of Artificial Sequence: Synthetic oligonucleotide
  Target: PCSK9; (+) strand; PAM type: YTN; PAM sequence: CTT
cctggcttcctggtgaagat

SEQ ID NO: 25082 - DNA, 20 bp, Artificial Sequence
  Description of Artificial Sequence: Synthetic oligonucleotide
  Target: PCSK9; (+) strand; PAM type: YTN; PAM sequence: TTC
ctggcttcctggtgaagatg

SEQ ID NO: 25083 - DNA, 20 bp, Artificial Sequence
  Description of Artificial Sequence: Synthetic oligonucleotide
  Target: PCSK9; (+) strand; PAM type: YTN; PAM sequence: CTG
gcttcctggtgaagatgagt

SEQ ID NO: 25084 - DNA, 20 bp, Artificial Sequence
  Description of Artificial Sequence: Synthetic oligonucleotide
  Target: PCSK9; (+) strand; PAM type: YTN; PAM sequence: CTT
cctggtgaagatgagtggcg

SEQ ID NO: 25085 - DNA, 20 bp, Artificial Sequence
  Description of Artificial Sequence: Synthetic oligonucleotide
  Target: PCSK9; (+) strand; PAM type: YTN; PAM sequence: TTC
ctggtgaagatgagtggcga

SEQ ID NO: 25086 - DNA, 20 bp, Artificial Sequence
  Description of Artificial Sequence: Synthetic oligonucleotide
  Target: PCSK9; (+) strand; PAM type: YTN; PAM sequence: CTG
gtgaagatgagtggcgacct

SEQ ID NO: 25087 - DNA, 20 bp, Artificial Sequence
  Description of Artificial Sequence: Synthetic oligonucleotide
  Target: PCSK9; (+) strand; PAM type: YTN; PAM sequence: CTG
ctggagctggtgagccaccc

SEQ ID NO: 25088 - DNA, 20 bp, Artificial Sequence
  Description of Artificial Sequence: Synthetic oligonucleotide
  Target: PCSK9; (+) strand; PAM type: YTN; PAM sequence: CTG
gagctggtgagccacccttt

SEQ ID NO: 25089 - DNA, 20 bp, Artificial Sequence
  Description of Artificial Sequence: Synthetic oligonucleotide
  Target: PCSK9; (+) strand; PAM type: YTN; PAM sequence: CTG
gtgagccaccctttttggga

SEQ ID NO: 25090 - DNA, 20 bp, Artificial Sequence
  Description of Artificial Sequence: Synthetic oligonucleotide
  Target: PCSK9; (+) strand; PAM type: YTN; PAM sequence: CTT
tttgggaatggcacttcctg

SEQ ID NO: 25091 - DNA, 20 bp, Artificial Sequence
  Description of Artificial Sequence: Synthetic oligonucleotide
  Target: PCSK9; (+) strand; PAM type: YTN; PAM sequence: TTT
ttgggaatggcacttcctga

SEQ ID NO: 25092 - DNA, 20 bp, Artificial Sequence
  Description of Artificial Sequence: Synthetic oligonucleotide
  Target: PCSK9; (+) strand; PAM type: YTN; PAM sequence: TTT
tgggaatggcacttcctgat

SEQ ID NO: 25093 - DNA, 20 bp, Artificial Sequence
  Description of Artificial Sequence: Synthetic oligonucleotide
  Target: PCSK9; (+) strand; PAM type: YTN; PAM sequence: TTT
gggaatggcacttcctgata

SEQ ID NO: 25094 - DNA, 20 bp, Artificial Sequence
  Description of Artificial Sequence: Synthetic oligonucleotide
  Target: PCSK9; (+) strand; PAM type: YTN; PAM sequence: TTG
ggaatggcacttcctgatag

SEQ ID NO: 25095 - DNA, 20 bp, Artificial Sequence
  Description of Artificial Sequence: Synthetic oligonucleotide
  Target: PCSK9; (+) strand; PAM type: YTN; PAM sequence: CTT
cctgatagggctgggccact

SEQ ID NO: 25096 - DNA, 20 bp, Artificial Sequence
  Description of Artificial Sequence: Synthetic oligonucleotide
  Target: PCSK9; (+) strand; PAM type: YTN; PAM sequence: TTC
ctgatagggctgggccactg

SEQ ID NO: 25097 - DNA, 20 bp, Artificial Sequence
  Description of Artificial Sequence: Synthetic oligonucleotide
  Target: PCSK9; (+) strand; PAM type: YTN; PAM sequence: CTG
atagggctgggccactgcat
